(19) United States
(12) Patent Application Publication
(10) Pub. No.: US 2023/0128001 A1
(43) Pub. Date: Apr. 27, 2023

(54) HIV ANTIGENS AND MHC COMPLEXES

(71) Applicant: Gritstone bio, Inc., Emeryville, CA (US)

(72) Inventors: Roman Yelensky, Newton, MA (US); James Xin Sun, Newton, MA (US); Joshua Klein, Brookline, MA (US); Karin Jooss, Emeryville, CA (US); Ciaran Daniel Scallan, San Francisco, CA (US); Leonid Gitlin, Foster City, CA (US)

(21) Appl. No.: 17/817,312

(22) Filed: Aug. 3, 2022

Related U.S. Application Data
(63) Continuation of application No. 17/564,920, filed on Dec. 29, 2021, now abandoned.
Application No. 17/564,920 is a continuation of application No. PCT/US2020/040630, filed on Jul. 2, 2020.
(60) Provisional application No. 63/029,981, filed on May 26, 2020.
(60) Provisional application No. 62/869,877, filed on Jul. 2, 2019.

(51) Int. Cl. A61K 39/21; A61P 31/18; C12N 15/86

(52) U.S. Cl. CPC A61K 39/21; A61P 31/18; C12N 15/86; A61K 2039/545

(57) ABSTRACT

Disclosed herein are compositions that include antigen-encoding nucleic acid sequences and/or antigen peptides. Also disclosed are nucleotides, cells, and methods associated with the compositions including their use as vaccines against infectious diseases such as HIV.

### CROSS REFERENCE TO RELATED APPLICATIONS

[0001] This application is a continuation of U.S. application Ser. No. 17/564,920 filed Dec. 29, 2021, which is a continuation of International Patent Application No. PCT/US2020/040630 filed Jul. 2, 2020, which claims the benefit of and priority to U.S. Provisional Patent Application No. 62/869,877 filed Jul. 2, 2019 and U.S. Provisional Patent Application No. 63/029,981 filed on May 26, 2020, the entire disclosure of each of which is hereby incorporated by reference in its entirety for all purposes.

### SEQUENCE LISTING

[0002] The instant application contains a Sequence Listing which has been submitted electronically in ASCII format and is hereby incorporated by reference in its entirety. Said ASCII copy, created on Jun. 29, 2020, is named GSO-034WO_SL.txt and is 5,642,000 bytes in size.

### BACKGROUND

[0003] Infectious diseases, such as human immunodeficiency virus (HIV), remain difficult to prevent, treat, and/or cure. Therapeutic vaccines are promising, but for diseases such as HIV, they have not achieved therapeutic efficacy such that they can be deployed as a therapy or preventative vaccines for the population.

[0004] One question for vaccine design is how to identify and include the “best” therapeutic antigens for eliciting an anti-HIV response. Existing methods for identifying and predicting presentation of antigens have only achieved low positive predictive value (PPV) and serves as a significant impediment to vaccine design. If vaccines are designed using predictions with a low PPV, most patients are unlikely to receive a therapeutic antigen and fewer still are likely to receive more than one (even assuming all presented peptides are immunogenic). Thus, antigen vaccination with current methods is unlikely to succeed in preventing infections of infectious disease.

[0005] In addition to the challenges of current antigen prediction methods certain challenges also exist with the available vector systems that can be used for antigen delivery in humans, many of which are derived from humans. For example, many humans have pre-existing immunity to human viruses as a result of previous natural exposure, and this immunity can be a major obstacle to the use of recombinant human viruses for antigen delivery for treating infectious diseases.

### SUMMARY

[0006] Disclosed herein is a composition for delivery of an antigen expression system, the antigen expression system comprising: a vector backbone comprising a chimpanzee adenovirus vector, optionally wherein the chimpanzee adenovirus vector is a ChAdV68 vector, or an alphavirus vector, optionally wherein the alphavirus vector is a Venezuelan equine encephalitis virus vector, the vector backbone comprising at least one HIV MHC class I antigen-encoding nucleic acid sequence comprising a MHC class I epitope encoding nucleic acid sequence, optionally wherein the MHC class I epitope encoding nucleic acid sequence encodes a MHC class I epitope comprising at least one HIV epitope selected from the group consisting of the sequences shown in SEQ ID NOs: 325-22349. In various embodiments, the at least one HIV epitope is selected from the group consisting of the sequences shown in SEQ ID NOs: 4113, 4114, 4115, 4427, 4439, 4494, 4495, 4545, 4561, 4956, 4968, 4975, 4982, 5259, 5261, 5459, 5460, 5610, 5643, and 5661. In various embodiments, the antigen expression system comprises 2, 3, 4, 5, 6, 7, 8, 9, 10, 11, 12, 13, 14, 15, 16, 17, 18, 19, or 20 HIV MHC class I antigen-encoding nucleic acid sequences, wherein each HIV MHC class I antigen-encoding nucleic acid sequence comprises a MHC class I epitope encoding nucleic acid sequence that encodes a MHC class I epitope comprising at least one HIV epitope selected from the group consisting of the sequences shown in SEQ ID Nos: 325-22349. In various embodiments, each HIV MHC class I antigen-encoding nucleic acid sequence comprises a MHC class I epitope encoding nucleic acid sequence that encodes a MHC class I epitope comprising at least one HIV epitope selected from the group consisting of the sequences shown in SEQ ID NOs: 4113, 4114, 4115, 4427, 4439, 4494, 4495, 4545, 4561, 4956, 4968, 4975, 4982, 5259, 5261, 5459, 5460, 5610, 5643, and 5661.

[0007] Additionally disclosed herein is a composition for delivery of one or more antigens, the composition comprising one or more HIV MHC class I antigens or one or more nucleic acid sequences encoding one or more HIV MHC class I antigens, each HIV MHC class I antigen comprising a MHC class I epitope comprising at least one HIV epitope selected from the group consisting of the sequences shown in SEQ ID Nos: 325-22349. In various embodiments, the at least one HIV epitope is selected from the group consisting of the sequences shown in SEQ ID NOs: 4113, 4114, 4115, 4427, 4439, 4494, 4495, 4545, 4561, 4956, 4968, 4975, 4982, 5259, 5261, 5459, 5460, 5610, 5643, and 5661. In various embodiments, the composition comprises 2, 3, 4, 5, 6, 7, 8, 9, 10, 11, 12, 13, 14, 15, 16, 17, 18, 19, or 20 HIV MHC class I antigens, wherein each HIV MHC class I antigen comprises a MHC class I epitope comprising at least one HIV epitope selected from the group consisting of the sequences shown in SEQ ID Nos: 325-22349. In various embodiments, each HIV MHC class I antigen comprises a MHC class I epitope comprising at least one HIV epitope selected from the group consisting of the sequences shown in SEQ ID NOs: 4113, 4114, 4115, 4427, 4439, 4494, 4495, 4545, 4561, 4956, 4968, 4975, 4982, 5259, 5261, 5459, 5460, 5610, 5643, and 5661.

[0008] In various embodiments, the MHC class I epitopes are selected by performing the steps of: (a) obtaining at least one of exome, transcriptome, or whole genome nucleotide sequencing, wherein the nucleotide sequencing data is used to obtain data representing peptide sequences of each of a set of antigens; (b) inputting the peptide sequence of each antigen into a presentation model to generate a set of numerical likelihoods that each of the antigens is presented by one or more of the MHC proteins, the set of numerical likelihoods having been identified at least based on received mass spectrometry data; and (c) selecting a subset of the set of antigens based on the set of numerical likelihoods to generate a set of selected antigens which are used to generate the MHC class I epitopes.

[0009] Additionally disclosed herein is a composition for delivery of an antigen expression system comprising one or more vectors, the one or more vectors comprising: (a) a vector backbone, wherein the backbone comprises: (i) at least one promoter nucleotide sequence, and (ii) at least one polyadenylation (poly(A)) sequence; and (b) an antigen cassette, wherein the antigen cassette comprises: (i) at least one antigen-encoding nucleic acid sequence, comprising: (I) at least one HIV MHC class I antigen-encoding nucleic acid sequence, comprising: (A) a MHC class I epitope encoding nucleic acid sequence, wherein the MHC class I epitope encoding nucleic acid sequence encodes a MHC class I epitope comprising at least one HIV epitope selected from the group consisting of the sequences shown in SEQ ID Nos: 325-22349, (B) optionally, a 5′ linker sequence, and (C) optionally, a 3′ linker sequence; (ii) optionally, a second promoter nucleotide sequence operably linked to the antigen-encoding nucleic acid sequence; and (iii) optionally, at least one MHC class II antigen-encoding nucleic acid sequence; (iv) optionally, at least one nucleic acid sequence encoding a GPGPG (SEQ ID NO: 57) amino acid linker sequence; and (v) optionally, at least one second poly(A) sequence, wherein the second poly(A) sequence is a native poly(A) sequence or an exogenous poly(A) sequence to the vector backbone.

[0010] Additionally disclosed herein is a composition for delivery of an antigen expression system comprising one or more vectors, the one or more vectors comprising: (a) a vector backbone, wherein the backbone comprises: (i) at least one promoter nucleotide sequence, and (ii) at least one polyadenylation (poly(A)) sequence; and (b) an antigen cassette, wherein the antigen cassette comprises: (i) at least one antigen-encoding nucleic acid sequence, comprising: (I) at least 10, 11, 12, 13, 14, 15, 16, 17, 18, 19, or 20 HIV MHC class I antigen-encoding nucleic acid sequences linearly linked to each other, wherein each HIV MHC class I antigen-encoding nucleic acid sequence comprises a MHC class I epitope encoding nucleic acid sequence that encodes a MHC class I epitope comprising at least one HIV epitope selected from the group consisting of the sequences shown in SEQ ID NOs: 325-2165, wherein each of the HIV MHC class I antigen-encoding nucleic acid sequences further comprises; (A) optionally, a 5′ linker sequence, and (B) optionally, a 3′ linker sequence; (ii) optionally, a second promoter nucleotide sequence operably linked to the antigen-encoding nucleic acid sequence; and (iii) optionally, at least one MHC class II antigen-encoding nucleic acid sequence; (iv) optionally, at least one nucleic acid sequence encoding a GPGPG (SEQ ID NO: 58) amino acid linker sequence; and (v) optionally, at least one second poly(A) sequence, wherein the second poly(A) sequence is a native poly(A) sequence or an exogenous poly(A) sequence to the vector backbone.

[0011] Additionally disclosed herein is a composition for delivery of an antigen expression system comprising one or more vectors, the one or more vectors comprising: (a) a vector backbone, wherein the backbone comprises: (i) at least one promoter nucleotide sequence, and (ii) at least one polyadenylation (poly(A)) sequence; and (b) an antigen cassette, wherein the antigen cassette comprises: (i) at least one antigen-encoding nucleic acid sequence, comprising: (I) at least 10, 11, 12, 13, 14, 15, 16, 17, 18, 19, or 20 HIV MHC class I antigen-encoding nucleic acid sequences linearly linked to each other, wherein each HIV MHC class I antigen-encoding nucleic acid sequence comprises a MHC class I epitope encoding nucleic acid sequence that encodes a MHC class I epitope comprising at least one HIV epitope selected from the group consisting of the sequences shown in SEQ ID NOs: 2166-4106, wherein each of the HIV MHC class I antigen-encoding nucleic acid sequences further comprises; (A) optionally, a 5′ linker sequence, and (B) optionally, a 3′ linker sequence; (ii) optionally, a second promoter nucleotide sequence operably linked to the antigen-encoding nucleic acid sequence; and (iii) optionally, at least one MHC class II antigen-encoding nucleic acid sequence; (iv) optionally, at least one nucleic acid sequence encoding a GPGPG (SEQ ID NO: 59) amino acid linker sequence; and (v) optionally, at least one second poly(A) sequence, wherein the second poly(A) sequence is a native poly(A) sequence or an exogenous poly(A) sequence to the vector backbone.

[0012] Additionally disclosed herein is a composition for delivery of an antigen expression system comprising one or more vectors, the one or more vectors comprising: (a) a vector backbone, wherein the backbone comprises: (i) at least one promoter nucleotide sequence, and (ii) at least one polyadenylation (poly(A)) sequence; and (b) an antigen cassette, wherein the antigen cassette comprises: (i) at least one antigen-encoding nucleic acid sequence, comprising: (I) at least 10, 11, 12, 13, 14, 15, 16, 17, 18, 19, or 20 HIV MHC class I antigen-encoding nucleic acid sequences linearly linked to each other, wherein each HIV MHC class I antigen-encoding nucleic acid sequence comprises a MHC class I epitope encoding nucleic acid sequence that encodes a MHC class I epitope comprising at least one HIV epitope selected from the group consisting of the sequences shown in SEQ ID NOs: 4107-6241, wherein each of the HIV MHC class I antigen-encoding nucleic acid sequences further comprises; (A) optionally, a 5′ linker sequence, and (B) optionally, a 3′ linker sequence; (ii) optionally, a second promoter nucleotide sequence operably linked to the antigen-encoding nucleic acid sequence; and (iii) optionally, at least one MHC class II antigen-encoding nucleic acid sequence; (iv) optionally, at least one nucleic acid sequence encoding a GPGPG (SEQ ID NO: 60) amino acid linker sequence; and (v) optionally, at least one second poly(A) sequence, wherein the second poly(A) sequence is a native poly(A) sequence or an exogenous poly(A) sequence to the vector backbone.

[0013] Additionally disclosed herein is a composition for delivery of an antigen expression system comprising one or more vectors, the one or more vectors comprising: (a) a vector backbone, wherein the backbone comprises: (i) at least one promoter nucleotide sequence, and (ii) at least one polyadenylation (poly(A)) sequence; and (b) an antigen cassette, wherein the antigen cassette comprises: (i) at least one antigen-encoding nucleic acid sequence, comprising: (I) at least 10, 11, 12, 13, 14, 15, 16, 17, 18, 19, or 20 HIV MHC class I antigen-encoding nucleic acid sequences linearly linked to each other, wherein each HIV MHC class I antigen-encoding nucleic acid sequence comprises a MHC class I epitope encoding nucleic acid sequence that encodes a MHC class I epitope comprising at least one HIV epitope selected from the group consisting of the sequences shown in SEQ ID NOs: 6242-8389, wherein each of the HIV MHC class I antigen-encoding nucleic acid sequences further comprises; (A) optionally, a 5′ linker sequence, and (B) optionally, a 3′ linker sequence; (ii) optionally, a second promoter nucleotide sequence operably linked to the antigen-encoding nucleic acid sequence; and (iii) optionally, at least one MHC class II antigen-encoding nucleic acid sequence; (iv) optionally, at least one nucleic acid sequence encoding a GPGPG (SEQ ID NO: 61) amino acid linker sequence; and (v) optionally, at least one second poly(A) sequence, wherein the second poly(A) sequence is a native poly(A) sequence or an exogenous poly(A) sequence to the vector backbone.

[0014] Additionally disclosed herein is a composition for delivery of an antigen expression system comprising one or more vectors, the one or more vectors comprising: (a) a vector backbone, wherein the backbone comprises: (i) at least one promoter nucleotide sequence, and (ii) at least one polyadenylation (poly(A)) sequence; and (b) an antigen cassette, wherein the antigen cassette comprises: (i) at least one antigen-encoding nucleic acid sequence, comprising: (I) at least 10, 11, 12, 13, 14, 15, 16, 17, 18, 19, or 20 HIV MHC class I antigen-encoding nucleic acid sequences linearly linked to each other, wherein each HIV MHC class I antigen-encoding nucleic acid sequence comprises a MHC class I epitope encoding nucleic acid sequence that encodes a MHC class I epitope comprising at least one HIV epitope selected from the group consisting of the sequences shown in SEQ ID NOs: 8930-10626, wherein each of the HIV MHC class I antigen-encoding nucleic acid sequences further comprises; (A) optionally, a 5′ linker sequence, and (B) optionally, a 3′ linker sequence; (ii) optionally, a second promoter nucleotide sequence operably linked to the antigen-encoding nucleic acid sequence; and (iii) optionally, at least one MHC class II antigen-encoding nucleic acid sequence; (iv) optionally, at least one nucleic acid sequence encoding a GPGPG (SEQ ID NO: 62) amino acid linker sequence; and (v) optionally, at least one second poly(A) sequence, wherein the second poly(A) sequence is a native poly(A) sequence or an exogenous poly(A) sequence to the vector backbone.

[0015] A composition for delivery of an antigen expression system comprising one or more vectors, the one or more vectors comprising: (a) a vector backbone, wherein the backbone comprises: (i) at least one promoter nucleotide sequence, and (ii) at least one polyadenylation (poly(A)) sequence; and (b) an antigen cassette, wherein the antigen cassette comprises: (i) at least one antigen-encoding nucleic acid sequence, comprising: (I) at least 10, 11, 12, 13, 14, 15, 16, 17, 18, 19, or 20 HIV MHC class I antigen-encoding nucleic acid sequences linearly linked to each other, wherein each HIV MHC class I antigen-encoding nucleic acid sequence comprises a MHC class I epitope encoding nucleic acid sequence that encodes a MHC class I epitope comprising at least one HIV epitope selected from the group consisting of the sequences shown in SEQ ID NOs: 10627-12810, wherein each of the HIV MHC class I antigen-encoding nucleic acid sequences further comprises; (A) optionally, a 5′ linker sequence, and (B) optionally, a 3′ linker sequence; (ii) optionally, a second promoter nucleotide sequence operably linked to the antigen-encoding nucleic acid sequence; and (iii) optionally, at least one MHC class II antigen-encoding nucleic acid sequence; (iv) optionally, at least one nucleic acid sequence encoding a GPGPG (SEQ ID NO: 63) amino acid linker sequence; and (v) optionally, at least one second poly(A) sequence, wherein the second poly(A) sequence is a native poly(A) sequence or an exogenous poly(A) sequence to the vector backbone.

[0016] Additionally disclosed herein is a composition for delivery of an antigen expression system comprising one or more vectors, the one or more vectors comprising: (a) a vector backbone, wherein the backbone comprises: (i) at least one promoter nucleotide sequence, and (ii) at least one polyadenylation (poly(A)) sequence; and (b) an antigen cassette, wherein the antigen cassette comprises: (i) at least one antigen-encoding nucleic acid sequence, comprising: (I) at least 10, 11, 12, 13, 14, 15, 16, 17, 18, 19, or 20 HIV MHC class I antigen-encoding nucleic acid sequences linearly linked to each other, wherein each HIV MHC class I antigen-encoding nucleic acid sequence comprises a MHC class I epitope encoding nucleic acid sequence that encodes a MHC class I epitope comprising at least one HIV epitope selected from the group consisting of the sequences shown in SEQ ID NOs: 12811-15079, wherein each of the HIV MHC class I antigen-encoding nucleic acid sequences further comprises; (A) optionally, a 5′ linker sequence, and (B) optionally, a 3′ linker sequence; (ii) optionally, a second promoter nucleotide sequence operably linked to the antigen-encoding nucleic acid sequence; and (iii) optionally, at least one MHC class II antigen-encoding nucleic acid sequence; (iv) optionally, at least one nucleic acid sequence encoding a GPGPG (SEQ ID NO: 64) amino acid linker sequence; and (v) optionally, at least one second poly(A) sequence, wherein the second poly(A) sequence is a native poly(A) sequence or an exogenous poly(A) sequence to the vector backbone.

[0017] Additionally disclosed herein is a composition for delivery of an antigen expression system comprising one or more vectors, the one or more vectors comprising: (a) a vector backbone, wherein the backbone comprises: (i) at least one promoter nucleotide sequence, and (ii) at least one polyadenylation (poly(A)) sequence; and (b) an antigen cassette, wherein the antigen cassette comprises: (i) at least one antigen-encoding nucleic acid sequence, comprising: (I) at least 10, 11, 12, 13, 14, 15, 16, 17, 18, 19, or 20 HIV MHC class I antigen-encoding nucleic acid sequences linearly linked to each other, wherein each HIV MHC class I antigen-encoding nucleic acid sequence comprises a MHC class I epitope encoding nucleic acid sequence that encodes a MHC class I epitope comprising at least one HIV epitope selected from the group consisting of the sequences shown in SEQ ID NOs: 15080-17174, wherein each of the HIV MHC class I antigen-encoding nucleic acid sequences further comprises; (A) optionally, a 5′ linker sequence, and (B) optionally, a 3′ linker sequence; (ii) optionally, a second promoter nucleotide sequence operably linked to the antigen-encoding nucleic acid sequence; and (iii) optionally, at least one MHC class II antigen-encoding nucleic acid sequence; (iv) optionally, at least one nucleic acid sequence encoding a GPGPG (SEQ ID NO: 65) amino acid linker sequence; and (v) optionally, at least one second poly(A) sequence, wherein the second poly(A) sequence is a native poly(A) sequence or an exogenous poly(A) sequence to the vector backbone.

[0018] Additionally disclosed herein is a composition for delivery of an antigen expression system comprising one or more vectors, the one or more vectors comprising: (a) a vector backbone, wherein the backbone comprises: (i) at least one promoter nucleotide sequence, and (ii) at least one polyadenylation (poly(A)) sequence; and (b) an antigen cassette, wherein the antigen cassette comprises: (i) at least one antigen-encoding nucleic acid sequence, comprising: (I) at least 10, 11, 12, 13, 14, 15, 16, 17, 18, 19, or 20 HIV MHC class I antigen-encoding nucleic acid sequences linearly linked to each other, wherein each HIV MHC class I antigen-encoding nucleic acid sequence comprises a MHC class I epitope encoding nucleic acid sequence that encodes a MHC class I epitope comprising at least one HIV epitope selected from the group consisting of the sequences shown in SEQ ID NOs: 17175-19388, wherein each of the HIV MHC class I antigen-encoding nucleic acid sequences further comprises; (A) optionally, a 5′ linker sequence, and (B) optionally, a 3′ linker sequence; (ii) optionally, a second promoter nucleotide sequence operably linked to the antigen-encoding nucleic acid sequence; and (iii) optionally, at least one MHC class II antigen-encoding nucleic acid sequence; (iv) optionally, at least one nucleic acid sequence encoding a GPGPG (SEQ ID NO: 66) amino acid linker sequence; and (v) optionally, at least one second poly(A) sequence, wherein the second poly(A) sequence is a native poly(A) sequence or an exogenous poly(A) sequence to the vector backbone.

[0019] Additionally disclosed herein is a composition for delivery of an antigen expression system comprising one or more vectors, the one or more vectors comprising: (a) a vector backbone, wherein the backbone comprises: (i) at least one promoter nucleotide sequence, and (ii) at least one polyadenylation (poly(A)) sequence; and (b) an antigen cassette, wherein the antigen cassette comprises: (i) at least one antigen-encoding nucleic acid sequence, comprising: (I) at least 10, 11, 12, 13, 14, 15, 16, 17, 18, 19, or 20 HIV MHC class I antigen-encoding nucleic acid sequences linearly linked to each other, wherein each HIV MHC class I antigen-encoding nucleic acid sequence comprises a MHC class I epitope encoding nucleic acid sequence that encodes a MHC class I epitope comprising at least one HIV epitope selected from the group consisting of the sequences shown in SEQ ID NOs: 19389-21003, wherein each of the HIV MHC class I antigen-encoding nucleic acid sequences further comprises; (A) optionally, a 5′ linker sequence, and (B) optionally, a 3′ linker sequence; (ii) optionally, a second promoter nucleotide sequence operably linked to the antigen-encoding nucleic acid sequence; and (iii) optionally, at least one MHC class II antigen-encoding nucleic acid sequence; (iv) optionally, at least one nucleic acid sequence encoding a GPGPG (SEQ ID NO: 67) amino acid linker sequence; and (v) optionally, at least one second poly(A) sequence, wherein the second poly(A) sequence is a native poly(A) sequence or an exogenous poly(A) sequence to the vector backbone.

[0020] Additionally disclosed herein is a composition for delivery of an antigen expression system comprising one or more vectors, the one or more vectors comprising: (a) a vector backbone, wherein the backbone comprises: (i) at least one promoter nucleotide sequence, and (ii) at least one polyadenylation (poly(A)) sequence; and (b) an antigen cassette, wherein the antigen cassette comprises: (i) at least one antigen-encoding nucleic acid sequence, comprising: (I) at least 10, 11, 12, 13, 14, 15, 16, 17, 18, 19, or 20 HIV MHC class I antigen-encoding nucleic acid sequences linearly linked to each other, wherein each HIV MHC class I antigen-encoding nucleic acid sequence comprises a MHC class I epitope encoding nucleic acid sequence that encodes a MHC class I epitope comprising at least one HIV epitope selected from the group consisting of the sequences shown in SEQ ID NOs: 21004-22349, wherein each of the HIV MHC class I antigen-encoding nucleic acid sequences further comprises; (A) optionally, a 5′ linker sequence, and (B) optionally, a 3′ linker sequence; (ii) optionally, a second promoter nucleotide sequence operably linked to the antigen-encoding nucleic acid sequence; and (iii) optionally, at least one MHC class II antigen-encoding nucleic acid sequence; (iv) optionally, at least one nucleic acid sequence encoding a GPGPG (SEQ ID NO: 68) amino acid linker sequence; and (v) optionally, at least one second poly(A) sequence, wherein the second poly(A) sequence is a native poly(A) sequence or an exogenous poly(A) sequence to the vector backbone.

[0021] Additionally disclosed herein is a composition for delivery of an antigen expression system comprising one or more vectors, the one or more vectors comprising: (a) a vector backbone, wherein the vector backbone comprises (i) a chimpanzee adenovirus vector, optionally wherein the chimpanzee adenovirus vector is a ChAdV68 vector, or an alphavirus vector, optionally wherein the alphavirus vector is a Venezuelan equine encephalitis virus vector, and (ii) a 26S promoter nucleotide sequence, and (iii) a polyadenylation (poly(A)) sequence; and (b) an antigen cassette integrated between the 26S promoter nucleotide sequence and the poly(A) sequence, wherein the antigen cassette comprises: (i) at least one antigen-encoding nucleic acid sequence, comprising: (I) at least 10, 11, 12, 13, 14, 15, 16, 17, 18, 19, or 20 HIV MHC class I antigen-encoding nucleic acid sequences linearly linked to each other and each comprising: (A) a MHC class I epitope encoding nucleic acid sequence, wherein the MHC class I epitope encoding nucleic acid sequence encodes a MHC class I epitope 7-15 amino acids in length, and wherein at least one of the MHC class I epitopes is selected from the group consisting of epitope sequences of any one of SEQ ID Nos: 325-22349, (B) a 5′ linker sequence, wherein the 5′ linker sequence encodes a native N-terminal amino acid sequence of the MHC class I epitope, and wherein the 5′ linker sequence encodes a peptide that is at least 3 amino acids in length, (C) a 3′ linker sequence, wherein the 3′ linker sequence encodes a native C-terminal acid sequence of the MHC class I epitope, and wherein the 3′ linker sequence encodes a peptide that is at least 3 amino acids in length, and wherein the antigen cassette is operably linked to the 26S promoter nucleotide sequence, wherein each of the MHC class I antigen-encoding nucleic acid sequences encodes a polypeptide that is between 13 and 25 amino acids in length, and wherein each 3′ end of each MHC class I antigen-encoding nucleic acid sequence is linked to the 5′ end of the following MHC class I antigen-encoding nucleic acid sequence with the exception of the final MHC class I antigen-encoding nucleic acid sequence in the antigen cassette; and (ii) at least two MHC class II antigen-encoding nucleic acid sequences comprising: (I) a PADRE MHC class II sequence, (II) a Tetanus toxoid MHC class II sequence, (III) a first nucleic acid sequence encoding a GPGPG (SEQ ID NO: 69) amino acid linker sequence linking the PADRE MHC class II sequence and the Tetanus toxoid MHC class II sequence, (IV) a second nucleic acid sequence encoding a GPGPG (SEQ ID NO: 70) amino acid linker sequence linking the 5′ end of the at least two MHC class II antigen-encoding nucleic acid sequences to the HIV MHC class I antigen-encoding nucleic acid sequences, (V) optionally, a third nucleic acid sequence encoding a GPGPG (SEQ ID NO: 71) amino acid linker sequence at the 3′ end of the at least two MHC class II antigen-encoding nucleic acid sequences.

[0022] In various embodiments, an ordered sequence of each element of the antigen cassette is described in the formula, from 5′ to 3′, comprising Pₐ-(L5_{b}-N_{c}-L3_{d})_{X}-(G5ₑ-U_{f})_{Y}-G3_{g} wherein P comprises the second promoter nucleotide sequence, where a=0 or 1, N comprises one of the MHC class I epitope encoding nucleic acid sequences, where c=1, L5 comprises the 5′ linker sequence, where b=0 or 1, L3 comprises the 3′ linker sequence, where d=0 or 1, G5 comprises one of the at least one nucleic acid sequences encoding a GPGPG (SEQ ID NO: 72) amino acid linker, where e=0 or 1, G3 comprises one of the at least one nucleic acid sequences encoding a GPGPG (SEQ ID NO: 73) amino acid linker, where g=0 or 1, U comprises one of the at least one MHC class II antigen-encoding nucleic acid sequence, where f=1, X=1 to 400, where for each X the corresponding N_{c} is a epitope encoding nucleic acid sequence, and Y=0, 1, or 2, where for each Y the corresponding U_{f} is an antigen-encoding nucleic acid sequence.

[0023] In various embodiments, for each X the corresponding N_{c} is a distinct MHC class I epitope encoding nucleic acid sequence. In various embodiments, for each Y the corresponding U_{f} is a distinct MHC class II antigen-encoding nucleic acid sequence.

[0024] In various embodiments, a=0, b=1, d=1, e=1, g=1, h=1, X=20, Y=2, the at least one promoter nucleotide sequence is a single 26S promoter nucleotide sequence provided by the backbone, the at least one polyadenylation poly(A) sequence is a poly(A) sequence of at least 100 consecutive A nucleotides (SEQ ID NO: 74) provided by the backbone, each N encodes a MHC class I epitope 7-15 amino acids in length, L5 is a native 5′ linker sequence that encodes a native N-terminal amino acid sequence of the MHC I epitope, and wherein the 5′ linker sequence encodes a peptide that is at least 3 amino acids in length, L3 is a native 3′ linker sequence that encodes a native nucleic-terminal acid sequence of the MHC I epitope, and wherein the 3′ linker sequence encodes a peptide that is at least 3 amino acids in length, U is each of a PADRE class II sequence and a Tetanus toxoid MHC class II sequence, the vector backbone comprises a chimpanzee adenovirus vector, optionally wherein the chimpanzee adenovirus vector is a ChAdV68 vector, or an alphavirus vector, optionally wherein the alphavirus vector is a Venezuelan equine encephalitis virus vector, and each of the MHC class I antigen-encoding nucleic acid sequences encodes a polypeptide that is between 13 and 25 amino acids in length.

[0025] In various embodiments, the composition further comprising a nanoparticulate delivery vehicle. In various embodiments, the nanoparticulate delivery vehicle is a lipid nanoparticle (LNP). In various embodiments, the LNP comprises ionizable amino lipids. In various embodiments, the ionizable amino lipids comprise MC3-like (dilinoleylmethyl-4-dimethylaminobutyrate) molecules. In various embodiments, the nanoparticulate delivery vehicle encapsulates the antigen expression system. In various embodiments, the antigen cassette is integrated between the at least one promoter nucleotide sequence and the at least one poly(A) sequence. In various embodiments, wherein the at least one promoter nucleotide sequence is operably linked to the antigen-encoding nucleic acid sequence. In various embodiments, the one or more vectors comprise one or more +-stranded RNA vectors. In various embodiments, the one or more +-stranded RNA vectors comprise a 5′ 7-methylguanosine (m7g) cap. In various embodiments, the one or more +-stranded RNA vectors are produced by in vitro transcription. In various embodiments, the one or more vectors are self-replicating within a mammalian cell. In various embodiments, the backbone comprises at least one nucleotide sequence of an Aura virus, a Fort Morgan virus, a Venezuelan equine encephalitis virus, a Ross River virus, a Semliki Forest virus, a Sindbis virus, or a Mayaro virus. In various embodiments, the backbone comprises at least one nucleotide sequence of a Venezuelan equine encephalitis virus. In various embodiments, the backbone comprises at least sequences for nonstructural protein-mediated amplification, a 26S promoter sequence, a poly(A) sequence, a nonstructural protein 1 (nsP1) gene, a nsP2 gene, a nsP3 gene, and a nsP4 gene encoded by the nucleotide sequence of the Aura virus, the Fort Morgan virus, the Venezuelan equine encephalitis virus, the Ross River virus, the Semliki Forest virus, the Sindbis virus, or the Mayaro virus. In various embodiments, the backbone comprises at least sequences for nonstructural protein-mediated amplification, a 26S promoter sequence, and a poly(A) sequence encoded by the nucleotide sequence of the Aura virus, the Fort Morgan virus, the Venezuelan equine encephalitis virus, the Ross River virus, the Semliki Forest virus, the Sindbis virus, or the Mayaro virus.

[0026] In various embodiments, sequences for nonstructural protein-mediated amplification are selected from the group consisting of: an alphavirus 5′ UTR, a 51-nt CSE, a 24-nt CSE, a 26S subgenomic promoter sequence, a 19-nt CSE, an alphavirus 3′ UTR, or combinations thereof. In various embodiments, the backbone does not encode structural virion proteins capsid, E2 and E1. In various embodiments, the antigen cassette is inserted in place of structural virion proteins within the nucleotide sequence of the Aura virus, the Fort Morgan virus, the Venezuelan equine encephalitis virus, the Ross River virus, the Semliki Forest virus, the Sindbis virus, or the Mayaro virus. In various embodiments, the Venezuelan equine encephalitis virus comprises the sequence of SEQ ID NO:3 or SEQ ID NO:5 In various embodiments, the Venezuelan equine encephalitis virus comprises the sequence of SEQ ID NO:3 or SEQ ID NO:5 further comprising a deletion between base pair 7544 and 11175. In various embodiments, the backbone comprises the sequence set forth in SEQ ID NO:6 or SEQ ID NO:7

[0027] In various embodiments, the antigen cassette is inserted at position 7544 to replace the deletion between base pairs 7544 and 11175 as set forth in the sequence of SEQ ID NO:3 or SEQ ID NO:5 In various embodiments, the insertion of the antigen cassette provides for transcription of a polycistronic RNA comprising the nsP1-4 genes and the at least one antigen-encoding nucleic acid sequence, wherein the nsP1-4 genes and the at least one antigen-encoding nucleic acid sequence are in separate open reading frames. In various embodiments, the backbone comprises at least one nucleotide sequence of a chimpanzee adenovirus vector. In various embodiments, the chimpanzee adenovirus vector is a ChAdV68 vector. In various embodiments, the at least one promoter nucleotide sequence is the native 26S promoter nucleotide sequence encoded by the backbone. In various embodiments, the at least one promoter nucleotide sequence is an exogenous RNA promoter. In various embodiments, the second promoter nucleotide sequence is a 26S promoter nucleotide sequence. In various embodiments, the second promoter nucleotide sequence comprises multiple 26S promoter nucleotide sequences, wherein each 26S promoter nucleotide sequence provides for transcription of one or more of the separate open reading frames. In various embodiments, the one or more vectors are each at least 300nt in size.

[0028] In various embodiments, the one or more vectors are each at least 1 kb in size. In various embodiments, the one or more vectors are each 2 kb in size. In various embodiments, the one or more vectors are each less than 5 kb in size. In various embodiments, at least one of the at least one antigen-encoding nucleic acid sequences encodes a polypeptide sequence or portion thereof that is presented by MHC class I protein. In various embodiments, each antigen-encoding nucleic acid sequence is linked directly to one another. In various embodiments, at least one of the at least one antigen-encoding nucleic acid sequences is linked to a distinct antigen-encoding nucleic acid sequence with a nucleic acid sequence encoding a linker. In various embodiments, the linker links two MHC class I epitope sequences or an MHC class I epitope sequence to an MHC class II sequence. In various embodiments, the linker is selected from the group consisting of: (1) consecutive glycine residues, at least 2, 3, 4, 5, 6, 7, 8, 9, or 10 residues in length (SEQ ID NO: 75); (2) consecutive alanine residues, at least 2, 3, 4, 5, 6, 7, 8, 9, or 10 residues in length (SEQ ID NO: 76); (3) two arginine residues (RR); (4) alanine, alanine, tyrosine (AAY); (5) a consensus sequence at least 2, 3, 4, 5, 6, 7, 8, 9, or 10 amino acid residues in length that is processed efficiently by a mammalian proteasome; and (6) one or more native sequences flanking the antigen derived from the cognate protein of origin and that is at least 2, 3, 4, 5, 6, 7, 8, 9, 10, 11, 12, 13, 14, 15, 16, 17, 18, 19, 20, or 2-20 amino acid residues in length. In various embodiments, the linker links two MHC class II sequences or an MHC class II sequence to an MHC class I epitope sequence. In various embodiments, the linker comprises the sequence GPGPG (SEQ ID NO: 77). In various embodiments, at least one sequence of the at least one antigen-encoding nucleic acid sequences is linked, operably or directly, to a separate or contiguous sequence that enhances the expression, stability, cell trafficking, processing and presentation, and/or immunogenicity of the at least one antigen-encoding nucleic acid sequences.

[0029] In various embodiments, the separate or contiguous sequence comprises at least one of: a ubiquitin sequence, a ubiquitin sequence modified to increase proteasome targeting (e.g., the ubiquitin sequence contains a Gly to Ala substitution at position 76), an immunoglobulin signal sequence (e.g., IgK), a major histocompatibility class I sequence, lysosomal-associated membrane protein (LAMP)-1, human dendritic cell lysosomal-associated membrane protein, and a major histocompatibility class II sequence; optionally wherein the ubiquitin sequence modified to increase proteasome targeting is A76. In various embodiments, the at least one antigen-encoding nucleic acid sequence comprises at least 2-10, 2, 3, 4, 5, 6, 7, 8, 9, 10, 11, 12, 13, 14, 15, 16, 17, 18, 19, or 20 nucleic acid sequences. In various embodiments, the at least one HIV MHC class I antigen-encoding nucleic acid sequence or the at least one antigen-encoding nucleic acid sequence comprises at least 15-20, 11-100, 11-200, 11-300, 11-400, or up to 400 nucleic acid sequences. In various embodiments, wherein the at least one HIV MHC class I antigen-encoding nucleic acid sequence or the at least one antigen-encoding nucleic acid sequence comprises at least 2-400 nucleic acid sequences and wherein at least two of the antigen-encoding nucleic acid sequences encode polypeptide sequences or portions thereof that are presented by MHC class I protein. In various embodiments, at least two of the antigen-encoding nucleic acid sequences encode polypeptide sequences or portions thereof that are presented by MHC class I protein.

[0030] In various embodiments, when administered to the subject and translated, at least one of the antigens encoded by the at least one HIV MHC class I antigen-encoding nucleic acid or the at least one of the MHC class I epitopes are presented on antigen presenting cells resulting in an immune response. In various embodiments, the at least one HIV MHC class I antigen-encoding nucleic acid sequence, when administered to the subject and translated, at least one of the antigens are presented on antigen presenting cells resulting in an immune response, and optionally wherein the expression of each of the at least one antigen-encoding nucleic acid sequences is driven by the at least one promoter nucleotide sequence. In various embodiments, each MHC class I antigen-encoding nucleic acid sequence encodes a polypeptide sequence between 8 and 35 amino acids in length, optionally 9-17, 9-25, 8, 9, 10, 11, 12, 13, 14, 15, 16, 17, 18, 19, 20, 21, 22, 23, 24, 25, 26, 27, 28, 29, 30, 31, 32, 33, 34 or 35 amino acids in length. In various embodiments, the at least one MHC class II antigen-encoding nucleic acid sequence is present. In various embodiments, the at least one MHC class II antigen-encoding nucleic acid sequence is 12-20, 12, 13, 14, 15, 16, 17, 18, 19, 20, or 20-40 amino acids in length. In various embodiments, the at least one MHC class II antigen-encoding nucleic acid sequence is present and comprises at least one universal MHC class II antigen-encoding nucleic acid sequence, optionally wherein the at least one universal sequence comprises at least one of Tetanus toxoid and PADRE. In various embodiments, the at least one promoter nucleotide sequence or the second promoter nucleotide sequence is inducible. In various embodiments, the at least one promoter nucleotide sequence or the second promoter nucleotide sequence is non-inducible. In various embodiments, the at least one poly(A) sequence comprises a poly(A) sequence native to the backbone. In various embodiments, the at least one poly(A) sequence comprises a poly(A) sequence exogenous to the backbone. In various embodiments, the at least one poly(A) sequence is operably linked to at least one of the at least one antigen-encoding nucleic acid sequences. In various embodiments, the at least one poly(A) sequence is at least 20, at least 30, at least 40, at least 50, at least 60, at least 70, at least 80, or at least 90 consecutive A nucleotides (SEQ ID NO: 78). In various embodiments, the at least one poly(A) sequence is at least 100 consecutive A nucleotides (SEQ ID NO: 79).

[0031] In various embodiments, the antigen expression system further comprises at least one of: an intron sequence, a woodchuck hepatitis virus posttranscriptional regulatory element (WPRE) sequence, an internal ribosome entry sequence (IRES) sequence, a nucleotide sequence encoding a 2A self cleaving peptide sequence, a nucleotide sequence encoding a Furin cleavage site, or a sequence in the 5′ or 3′ non-coding region known to enhance the nuclear export, stability, or translation efficiency of mRNA that is operably linked to at least one of the at least one antigen-encoding nucleic acid sequences. In various embodiments, the antigen expression system further comprises a reporter gene, including but not limited to, green fluorescent protein (GFP), a GFP variant, secreted alkaline phosphatase, luciferase, a luciferase variant, or a detectable peptide or epitope. In various embodiments, the detectable peptide or epitope is selected from the group consisting of an HA tag, a Flag tag, a His-tag, or a V5 tag. In various embodiments, the at least one MHC class I antigen-encoding nucleic acid sequence is selected by performing the steps of: (a) obtaining at least one of exome, transcriptome, or whole genome nucleotide sequencing, wherein the nucleotide sequencing data is used to obtain data representing peptide sequences of each of a set of antigens; (b) inputting the peptide sequence of each antigen into a presentation model to generate a set of numerical likelihoods that each of the antigens is presented by one or more of the MHC proteins, the set of numerical likelihoods having been identified at least based on received mass spectrometry data; and (c) selecting a subset of the set of antigens based on the set of numerical likelihoods to generate a set of selected antigens which are used to generate the at least one MHC class I antigen-encoding nucleic acid sequence.

[0032] In various embodiments, each of the MHC class I epitope encoding nucleic acid sequences is selected by performing the steps of: (a) obtaining at least one of exome, transcriptome, or whole genome nucleotide sequencing data, wherein the nucleotide sequencing data is used to obtain data representing peptide sequences of each of a set of antigens; (b) inputting the peptide sequence of each antigen into a presentation model to generate a set of numerical likelihoods that each of the antigens is presented by one or more MHC proteins, the set of numerical likelihoods having been identified at least based on received mass spectrometry data; and (c) selecting a subset of the set of antigens based on the set of numerical likelihoods to generate a set of selected antigens which are used to generate the at least 20 MHC class I antigen-encoding nucleic acid sequences. In various embodiments, a number of the set of selected antigens is 2-20. In various embodiments, the presentation model represents dependence between: (a) presence of a pair of a particular one of the MHC alleles and a particular amino acid at a particular position of a peptide sequence; and (b) likelihood of presentation, by the particular one of the MHC alleles of the pair, of such a peptide sequence comprising the particular amino acid at the particular position.

[0033] In various embodiments, selecting the set of selected antigens comprises selecting antigens that have an increased likelihood of being presented relative to unselected antigens based on the presentation model, optionally wherein the selected antigens have been validated as being presented by one or more specific HLA alleles. In various embodiments, selecting the set of selected antigens comprises selecting antigens that have an increased likelihood of being capable of inducing an immune response in response to presence of HIV in the subject relative to unselected antigens based on the presentation model. In various embodiments, selecting the set of selected antigens comprises selecting antigens that have an increased likelihood of being capable of being presented to naïve T cells by professional antigen presenting cells (APCs) relative to unselected antigens based on the presentation model, optionally wherein the APC is a dendritic cell (DC). In various embodiments, selecting the set of selected antigens comprises selecting antigens that have a decreased likelihood of being subject to inhibition via central or peripheral tolerance relative to unselected antigens based on the presentation model. In various embodiments, selecting the set of selected antigens comprises selecting antigens that have a decreased likelihood of being capable of inducing an autoimmune response to normal tissue in the subject relative to unselected antigens based on the presentation model.

[0034] In various embodiments, exome or transcriptome nucleotide sequencing data is obtained by performing next generation sequencing (NGS) or any massively parallel sequencing approach. In various embodiments, the antigen cassette comprises junctional epitope sequences formed by adjacent sequences in the antigen cassette. In various embodiments, at least one or each junctional epitope sequence has an affinity of greater than 500 nM for MHC. In various embodiments, each junctional epitope sequence is non-self. In various embodiments, each of the MHC class I epitopes is predicted or validated to be capable of presentation by at least one HLA allele present in at least 5% of a population. In various embodiments, each of the MHC class I epitopes is predicted or validated to be capable of presentation by at least one HLA allele, wherein each antigen/HLA pair has an antigen/HLA prevalence of at least 0.01% in a population. In various embodiments, each of the MHC class I epitopes is predicted or validated to be capable of presentation by at least one HLA allele, wherein each antigen/HLA pair has an antigen/HLA prevalence of at least 0.1% in a population.

[0035] Additionally disclosed herein is a pharmaceutical composition comprising the composition describe above and a pharmaceutically acceptable carrier. In various embodiments, the composition further comprises an adjuvant.

[0036] Additionally disclosed herein is an isolated nucleotide sequence or set of isolated nucleotide sequences comprising the antigen cassette of any of the above compositions and one or more elements obtained from the sequence of SEQ ID NO:3 or SEQ ID NO:5, optionally wherein the one or more elements are selected from the group consisting of the sequences necessary for nonstructural protein-mediated amplification, the 26S promoter nucleotide sequence, the poly(A) sequence, and the nsP1-4 genes of the sequence set forth in SEQ ID NO:3 or SEQ ID NO:5, and optionally wherein the nucleotide sequence is cDNA. In various embodiments, the sequence or set of isolated nucleotide sequences comprises the antigen cassette of any of the above compositions inserted at position 7544 of the sequence set forth in SEQ ID NO:6 or SEQ ID NO:7. In various embodiments, the isolated nucleotide sequence further comprises: a T7 or SP6 RNA polymerase promoter nucleotide sequence 5′ of the one or more elements obtained from the sequence of SEQ ID NO:3 or SEQ ID NO:5; and optionally, one or more restriction sites 3′ of the poly(A) sequence. In various embodiments, the antigen cassette of any of the above compositions is inserted at position 7563 of SEQ ID NO:8 or SEQ ID NO:9.

[0037] Additionally disclosed herein is a vector or set of vectors comprising the nucleotide sequence described above. Additionally disclosed herein is an isolated cell comprising the nucleotide sequence or set of isolated nucleotide sequences described above, optionally wherein the cell is a BHK-21, CHO, HEK293 or variants thereof, 911, HeLa, A549, LP-293, PER.C6, or AE1-2a cell.

[0038] Additionally disclosed herein is a method for treating a subject with HIV, the method comprising administering to the subject the composition of any of the above compositions or the pharmaceutical composition described above. Additionally disclosed herein is a method for inducing an immune response in a subject, the method comprising administering to the subject the composition of any of the above compositions or the pharmaceutical composition described above. In various embodiments, the subject expresses at least one HLA allele predicted or known to present at least one of the MHC class I epitopes encoded by the one or more vectors of the antigen expression system. In various embodiments, the composition is administered intramuscularly (IM), intradermally (ID), subcutaneously (SC), or intravenously (IV).

[0039] In various embodiments, the composition is administered intramuscularly. In various embodiments, the method further comprises administering to the subject a second vaccine composition. In various embodiments, the second vaccine composition is administered prior to the administration of the composition or the pharmaceutical composition. In various embodiments, the second vaccine composition is administered subsequent to the administration of the composition or the pharmaceutical composition. In various embodiments, the second vaccine composition is the same as the composition or the pharmaceutical composition. In various embodiments, the second vaccine composition is different from the composition or the pharmaceutical composition. In various embodiments, the second vaccine composition comprises a chimpanzee adenovirus vector encoding at least one antigen-encoding nucleic acid sequence. In various embodiments, the at least one antigen-encoding nucleic acid sequence encoded by the chimpanzee adenovirus vector is the same as the at least one antigen-encoding nucleic acid sequence of any of the above compositions.

[0040] Additionally disclosed herein is a method of manufacturing the antigen expression system described above, the method comprising: (a) obtaining a linearized DNA sequence comprising the backbone and the antigen cassette; (b) in vitro transcribing the linearized DNA sequence by addition of the linearized DNA sequence to an in vitro transcription reaction containing all the necessary components to transcribe the linearized DNA sequence into RNA, optionally further comprising in vitro addition of the m7g cap to the resulting RNA; and (c) isolating the one or more vectors from the in vitro transcription reaction. In various embodiments, the linearized DNA sequence is generated by linearizing a DNA plasmid sequence or by amplification using PCR. In various embodiments, the DNA plasmid sequence is generated using one of bacterial recombination or full genome DNA synthesis or full genome DNA synthesis with amplification of synthesized DNA in bacterial cells. In various embodiments, isolating the one or more vectors from the in vitro transcription reaction involves one or more of phenol chloroform extraction, silica column based purification, or similar RNA purification methods.

[0041] Additionally disclosed herein is a method of manufacturing the composition for delivery of the antigen expression system, the method comprising: (a) providing components for the nanoparticulate delivery vehicle; (b) providing the antigen expression system; and (c) providing conditions sufficient for the nanoparticulate delivery vehicle and the antigen expression system to produce the composition for delivery of the antigen expression system. In various embodiments, the conditions are provided by microfluidic mixing.

[0042] Additionally disclosed herein is a method of assessing a subject having HIV, comprising the steps of: a) determining or having determined a HIV subtype of the HIV of the subject; b) determining or having determined whether the subject expresses a HLA allele predicted or known to present a MHC class I epitope encoded by an antigen-encoding nucleic acid sequence in an antigen-based vaccine, and c) determining or having determined that the subject is a candidate for therapy with the antigen-based vaccine when the subject expresses the HLA allele, and the HIV subtype expresses the MHC class I epitope encoded by the antigen-encoding nucleic acid sequence in the antigen-based vaccine, wherein the MHC class I epitope comprises at least one MHC class I epitope sequence selected from the group consisting of epitope sequences of any one of SEQ ID Nos: 325-22349, and d) optionally, administering or having administered the antigen-based vaccine to the subject. In various embodiments, the HLA allele expressed by the subject is selected from the group consisting of HLA alleles in Tables 35-45.

[0043] Additionally disclosed herein is a method of assessing a subject having HIV, comprising the steps of: a) determining or having determined the HIV of the subject is HIV subtype A1; b) determining or having determined whether the subject expresses a HLA allele predicted or known to present a MHC class I epitope encoded by an antigen-encoding nucleic acid sequence in an antigen-based vaccine, and c) determining or having determined that the subject is a candidate for therapy with the antigen-based vaccine when the subject expresses the HLA allele, and the HIV subtype expresses the MHC class I epitope encoded by the antigen-encoding nucleic acid sequence in the antigen-based vaccine, wherein the MHC class I epitope comprises at least one MHC class I epitope sequence comprising at least one HIV epitope selected from the group consisting of the sequences shown in SEQ ID NOs: 325-2165, and d) optionally, administering or having administered the antigen-based vaccine to the subject. In various embodiments, the HLA allele expressed by the subject is selected from the group consisting of HLA alleles in Table 35.

[0044] Additionally disclosed herein is a method of assessing a subject having HIV, comprising the steps of: a) determining or having determined the HIV of the subject is HIV subtype A2; b) determining or having determined whether the subject expresses a HLA allele predicted or known to present a MHC class I epitope encoded by an antigen-encoding nucleic acid sequence in an antigen-based vaccine, and c) determining or having determined that the subject is a candidate for therapy with the antigen-based vaccine when the subject expresses the HLA allele, and the HIV subtype expresses the MHC class I epitope encoded by the antigen-encoding nucleic acid sequence in the antigen-based vaccine, wherein the MHC class I epitope comprises at least one MHC class I epitope sequence comprising at least one HIV epitope selected from the group consisting of the sequences shown in SEQ ID NOs: 2166-4106, and d) optionally, administering or having administered the antigen-based vaccine to the subject. In various embodiments, the HLA allele expressed by the subject is selected from the group consisting of HLA alleles in Table 36.

[0045] Additionally disclosed herein is a method of assessing a subject having HIV, comprising the steps of: a) determining or having determined the HIV of the subject is HIV subtype B; b) determining or having determined whether the subject expresses a HLA allele predicted or known to present a MHC class I epitope encoded by an antigen-encoding nucleic acid sequence in an antigen-based vaccine, and c) determining or having determined that the subject is a candidate for therapy with the antigen-based vaccine when the subject expresses the HLA allele, and the HIV subtype expresses the MHC class I epitope encoded by the antigen-encoding nucleic acid sequence in the antigen-based vaccine, wherein the MHC class I epitope comprises at least one MHC class I epitope sequence comprising at least one HIV epitope selected from the group consisting of the sequences shown in SEQ ID NOs: 4107-6241, and d) optionally, administering or having administered the antigen-based vaccine to the subject. In various embodiments, the HLA allele expressed by the subject is selected from the group consisting of HLA alleles in Table 37.

[0046] Additionally disclosed herein is a method of assessing a subject having HIV, comprising the steps of: a) determining or having determined the HIV of the subject is HIV subtype C; b) determining or having determined whether the subject expresses a HLA allele predicted or known to present a MHC class I epitope encoded by an antigen-encoding nucleic acid sequence in an antigen-based vaccine, and c) determining or having determined that the subject is a candidate for therapy with the antigen-based vaccine when the subject expresses the HLA allele, and the HIV subtype expresses the MHC class I epitope encoded by the antigen-encoding nucleic acid sequence in the antigen-based vaccine, wherein the MHC class I epitope comprises at least one MHC class I epitope sequence comprising at least one HIV epitope selected from the group consisting of the sequences shown in SEQ ID NOs: 6242-8389, and d) optionally, administering or having administered the antigen-based vaccine to the subject. In various embodiments, the HLA allele expressed by the subject is selected from the group consisting of HLA alleles in Table 38.

[0047] Additionally disclosed herein is a method of assessing a subject having HIV, comprising the steps of: a) determining or having determined the HIV of the subject is HIV subtype D; b) determining or having determined whether the subject expresses a HLA allele predicted or known to present a MHC class I epitope encoded by an antigen-encoding nucleic acid sequence in an antigen-based vaccine, and c) determining or having determined that the subject is a candidate for therapy with the antigen-based vaccine when the subject expresses the HLA allele, and the HIV subtype expresses the MHC class I epitope encoded by the antigen-encoding nucleic acid sequence in the antigen-based vaccine, wherein the MHC class I epitope comprises at least one MHC class I epitope sequence comprising at least one HIV epitope selected from the group consisting of the sequences shown in SEQ ID NOs: 8930-10626, and d) optionally, administering or having administered the antigen-based vaccine to the subject. In various embodiments, the HLA allele expressed by the subject is selected from the group consisting of HLA alleles in Table 39.

[0048] Additionally disclosed herein is a method of assessing a subject having HIV, comprising the steps of: a) determining or having determined the HIV of the subject is HIV subtype F1; b) determining or having determined whether the subject expresses a HLA allele predicted or known to present a MHC class I epitope encoded by an antigen-encoding nucleic acid sequence in an antigen-based vaccine, and c) determining or having determined that the subject is a candidate for therapy with the antigen-based vaccine when the subject expresses the HLA allele, and the HIV subtype expresses the MHC class I epitope encoded by the antigen-encoding nucleic acid sequence in the antigen-based vaccine, wherein the MHC class I epitope comprises at least one MHC class I epitope sequence selected from the group consisting of epitope sequences from any one of SEQ ID NOs: 10627-12810, and d) optionally, administering or having administered the antigen-based vaccine to the subject. In various embodiments, the HLA allele expressed by the subject is selected from the group consisting of HLA alleles in Table 40.

[0049] Additionally disclosed herein is a method of assessing a subject having HIV, comprising the steps of: a) determining or having determined the HIV of the subject is HIV subtype F2; b) determining or having determined whether the subject expresses a HLA allele predicted or known to present a MHC class I epitope encoded by an antigen-encoding nucleic acid sequence in an antigen-based vaccine, and c) determining or having determined that the subject is a candidate for therapy with the antigen-based vaccine when the subject expresses the HLA allele, and the HIV subtype expresses the MHC class I epitope encoded by the antigen-encoding nucleic acid sequence in the antigen-based vaccine, wherein the MHC class I epitope comprises at least one MHC class I epitope sequence selected from the group consisting of epitope sequences from any one of SEQ ID NOs: 12811-15079, and d) optionally, administering or having administered the antigen-based vaccine to the subject. In various embodiments, the HLA allele expressed by the subject is selected from the group consisting of HLA alleles in Table 41.

[0050] Additionally disclosed herein is a method of assessing a subject having HIV, comprising the steps of: a) determining or having determined the HIV of the subject is HIV subtype G; b) determining or having determined whether the subject expresses a HLA allele predicted or known to present a MHC class I epitope encoded by an antigen-encoding nucleic acid sequence in an antigen-based vaccine, and c) determining or having determined that the subject is a candidate for therapy with the antigen-based vaccine when the subject expresses the HLA allele, and the HIV subtype expresses the MHC class I epitope encoded by the antigen-encoding nucleic acid sequence in the antigen-based vaccine, wherein the MHC class I epitope comprises at least one MHC class I epitope sequence selected from the group consisting of epitope sequences from any one of SEQ ID NOs: 15080-17174, and d) optionally, administering or having administered the antigen-based vaccine to the subject. In various embodiments, the HLA allele expressed by the subject is selected from the group consisting of HLA alleles in Table 42.

[0051] Additionally disclosed herein is a method of assessing a subject having HIV, comprising the steps of: a) determining or having determined the HIV of the subject is HIV subtype H; b) determining or having determined whether the subject expresses a HLA allele predicted or known to present a MHC class I epitope encoded by an antigen-encoding nucleic acid sequence in an antigen-based vaccine, and c) determining or having determined that the subject is a candidate for therapy with the antigen-based vaccine when the subject expresses the HLA allele, and the HIV subtype expresses the MHC class I epitope encoded by the antigen-encoding nucleic acid sequence in the antigen-based vaccine, wherein the MHC class I epitope comprises at least one MHC class I epitope sequence comprising at least one HIV epitope selected from the group consisting of the sequences shown in SEQ ID NOs: 17175-19388, and d) optionally, administering or having administered the antigen-based vaccine to the subject. In various embodiments, the HLA allele expressed by the subject is selected from the group consisting of HLA alleles in Table 43.

[0052] Additionally disclosed herein is a method of assessing a subject having HIV, comprising the steps of: a) determining or having determined the HIV of the subject is HIV subtype J; b) determining or having determined whether the subject expresses a HLA allele predicted or known to present a MHC class I epitope encoded by an antigen-encoding nucleic acid sequence in an antigen-based vaccine, and c) determining or having determined that the subject is a candidate for therapy with the antigen-based vaccine when the subject expresses the HLA allele, and the HIV subtype expresses the MHC class I epitope encoded by the antigen-encoding nucleic acid sequence in the antigen-based vaccine, wherein the MHC class I epitope comprises at least one MHC class I epitope sequence comprising at least one HIV epitope selected from the group consisting of the sequences shown in SEQ ID NOs: 19389-21003, and d) optionally, administering or having administered the antigen-based vaccine to the subject. In various embodiments, the HLA allele expressed by the subject is selected from the group consisting of HLA alleles in Table 44.

[0053] Additionally disclosed herein is a method of assessing a subject having HIV, comprising the steps of: a) determining or having determined the HIV of the subject is HIV subtype K; b) determining or having determined whether the subject expresses a HLA allele predicted or known to present a MHC class I epitope encoded by an antigen-encoding nucleic acid sequence in an antigen-based vaccine, and c) determining or having determined that the subject is a candidate for therapy with the antigen-based vaccine when the subject expresses the HLA allele, and the HIV subtype expresses the MHC class I epitope encoded by the antigen-encoding nucleic acid sequence in the antigen-based vaccine, wherein the MHC class I epitope comprises at least one MHC class I epitope sequence comprising at least one HIV epitope selected from the group consisting of the sequences shown in SEQ ID NOs: 21004-22349, and d) optionally, administering or having administered the antigen-based vaccine to the subject. In various embodiments, the HLA allele expressed by the subject is selected from the group consisting of HLA alleles in Table 45.

[0054] In various embodiments, determining or having determined a HIV subtype of the HIV of the subject comprises obtaining a dataset indicating the HIV subtype from a third party that has processed a sample from the subject. In various embodiments, determining or having determined whether the subject expresses a HLA allele comprises obtaining a dataset from a third party that has processed a sample from the subject. In various embodiments, determining or having determined whether the subject expresses a HLA allele comprises obtaining a sample from the subject and assaying the sample using a method selected from the group consisting of: exome sequencing, targeted exome sequencing, transcriptome sequencing, Sanger sequencing, PCR-based genotyping assays, mass-spectrometry based methods, microarray, Nanostring, ISH, and IHC. In various embodiments, the sample is selected from tissue, bodily fluid, blood, spinal fluid, or needle aspirate. In various embodiments, the HLA allele has an HLA frequency of at least 1%.

[0055] Additionally disclosed herein is a method for treating a subject, the method comprising administering to the subject an antigen-based vaccine, wherein the antigen-based vaccine comprises: 1) at least one MHC class I epitope expressed by a HIV subtype, or 2) a MHC class I epitope encoding nucleic acid sequence encoding the at least one MHC class I epitope, wherein the at least one MHC class I epitope comprises a MHC class I epitope sequence comprising at least one HIV epitope selected from the group consisting of the sequences shown in SEQ ID Nos: 325-22349. Additionally disclosed herein is a method for treating a subject with HIV, the method comprising administering to the subject an antigen-based vaccine, wherein the antigen-based vaccine comprises) at least one MHC class I epitope expressed by a HIV subtype, wherein the HIV subtype is HIV subtype A1, or 2) a MHC class I epitope encoding nucleic acid sequence encoding the at least one MHC class I epitope, wherein the at least one MHC class I epitope comprises a MHC class I epitope sequence comprising at least one HIV epitope selected from the group consisting of the sequences shown in SEQ ID NOs: 325-2165.

[0056] Additionally disclosed herein is a method for treating a subject with HIV, the method comprising administering to the subject an antigen-based vaccine, wherein the antigen-based vaccine comprises: 1) at least one MHC class I epitope expressed by a HIV subtype, wherein the HIV subtype is HIV subtype A2, or 2) a MHC class I epitope encoding nucleic acid sequence encoding the at least one MHC class I epitope, wherein the at least one MHC class I epitope comprises a MHC class I epitope sequence comprising at least one HIV epitope selected from the group consisting of the sequences shown in SEQ ID NOs: 2166-4106.

[0057] Additionally disclosed herein is a method for treating a subject with HIV, the method comprising administering to the subject an antigen-based vaccine, wherein the antigen-based vaccine comprises: 1) at least one MHC class I epitope expressed by a HIV subtype, wherein the HIV subtype is HIV subtype B, or 2) a MHC class I epitope encoding nucleic acid sequence encoding the at least one MHC class I epitope, wherein the at least one MHC class I epitope comprises a MHC class I epitope sequence comprising at least one HIV epitope selected from the group consisting of the sequences shown in SEQ ID NOs: 4107-6241.

[0058] Additionally disclosed herein is a method for treating a subject with HIV, the method comprising administering to the subject an antigen-based vaccine, wherein the antigen-based vaccine comprises: 1) at least one MHC class I epitope expressed by a HIV subtype, wherein the HIV subtype is HIV subtype C, or 2) a MHC class I epitope encoding nucleic acid sequence encoding the at least one MHC class I epitope, wherein the at least one MHC class I epitope comprises a MHC class I epitope sequence comprising at least one HIV epitope selected from the group consisting of the sequences shown in SEQ ID NOs: 6242-8389.

[0059] Additionally disclosed herein is a method comprising administering to the subject an antigen-based vaccine, wherein the antigen-based vaccine comprises: 1) at least one MHC class I epitope expressed by a HIV subtype, wherein the HIV subtype is HIV subtype D, or 2) a MHC class I epitope encoding nucleic acid sequence encoding the at least one MHC class I epitope, wherein the at least one MHC class I epitope comprises a MHC class I epitope sequence comprising at least one HIV epitope selected from the group consisting of the sequences shown in SEQ ID NOs: 8930-10626.

[0060] Additionally disclosed herein is a method for treating a subject with HIV, the method comprising administering to the subject an antigen-based vaccine, wherein the antigen-based vaccine comprises: 1) at least one MHC class I epitope expressed by a HIV subtype, wherein the HIV subtype is HIV subtype F1, or 2) a MHC class I epitope encoding nucleic acid sequence encoding the at least one MHC class I epitope, wherein the at least one MHC class I epitope comprises at least one HIV epitope sequence selected from the group consisting of the sequences shown in SEQ ID NOs: 10627-12810.

[0061] Additionally disclosed herein is a method for treating a subject with HIV, the method comprising administering to the subject an antigen-based vaccine, wherein the antigen-based vaccine comprises: 1) at least one MHC class I epitope expressed by a HIV subtype, wherein the HIV subtype is HIV subtype F2, or 2) a MHC class I epitope encoding nucleic acid sequence encoding the at least one MHC class I epitope, wherein the at least one MHC class I epitope comprises at least one HIV epitope sequence selected from the group consisting of the sequences shown in SEQ ID NOs: 12811-15079.

[0062] Additionally disclosed herein is a method for treating a subject with HIV, the method comprising administering to the subject an antigen-based vaccine, wherein the antigen-based vaccine comprises: 1) at least one MHC class I epitope expressed by a HIV subtype, wherein the HIV subtype is HIV subtype G, or 2) a MHC class I epitope encoding nucleic acid sequence encoding the at least one MHC class I epitope, wherein the at least one MHC class I epitope comprises at least one HIV epitope sequence selected from the group consisting of the sequences shown in SEQ ID NOs: 15080-17174.

[0063] Additionally disclosed herein is a method for treating a subject with HIV, the method comprising administering to the subject an antigen-based vaccine, wherein the antigen-based vaccine comprises: 1) at least one MHC class I epitope expressed by a HIV subtype, wherein the HIV subtype is HIV subtype H, or 2) a MHC class I epitope encoding nucleic acid sequence encoding the at least one MHC class I epitope, wherein the at least one MHC class I epitope comprises a MHC class I epitope sequence comprising at least one HIV epitope selected from the group consisting of the sequences shown in SEQ ID NOs: 17175-19388.

[0064] Additionally disclosed herein is a method for treating a subject with HIV, the method comprising administering to the subject an antigen-based vaccine, wherein the antigen-based vaccine comprises: 1) at least one MHC class I epitope expressed by a HIV subtype, wherein the HIV subtype is HIV subtype J, or 2) a MHC class I epitope encoding nucleic acid sequence encoding the at least one MHC class I epitope, wherein the at least one MHC class I epitope comprises a MHC class I epitope sequence comprising at least one HIV epitope selected from the group consisting of the sequences shown in SEQ ID NOs: 19389-21003.

[0065] Additionally disclosed herein is a method for treating a subject with HIV, the method comprising administering to the subject an antigen-based vaccine, wherein the antigen-based vaccine comprises: 1) at least one MHC class I epitope expressed by a HIV subtype, wherein the HIV subtype is HIV subtype K, or 2) a MHC class I epitope encoding nucleic acid sequence encoding the at least one MHC class I epitope, wherein the at least one MHC class I epitope comprises a MHC class I epitope sequence comprising at least one HIV epitope selected from the group consisting of the sequences shown in SEQ ID NOs: 21004-22349.

[0066] Additionally disclosed herein is a method for inducing an immune response in a subject with HIV, the method comprising administering to the subject an antigen-based vaccine, wherein the antigen-based vaccine comprises: 1) at least one MHC class I epitope expressed by a HIV subtype, or 2) a MHC class I epitope encoding nucleic acid sequence encoding the at least one MHC class I epitope, wherein the at least one MHC class I epitope comprises a MHC class I epitope sequence comprising at least one HIV epitope selected from the group consisting of the sequences shown in SEQ ID Nos: 325-22349.

[0067] Additionally disclosed herein is a method for inducing an immune response in a subject with HIV, the method comprising administering to the subject an antigen-based vaccine, wherein the antigen-based vaccine comprises: 1) at least one MHC class I epitope expressed by a HIV subtype, wherein the HIV subtype is HIV subtype A1, or 2) a MHC class I epitope encoding nucleic acid sequence encoding the at least one MHC class I epitope, wherein the at least one MHC class I epitope comprises a MHC class I epitope sequence comprising at least one HIV epitope selected from the group consisting of the sequences shown in SEQ ID NOs: 325-2165.

[0068] Additionally disclosed herein is a method for inducing an immune response in a subject with HIV, the method comprising administering to the subject an antigen-based vaccine, wherein the antigen-based vaccine comprises: 1) at least one MHC class I epitope expressed by a HIV subtype, wherein the HIV subtype is HIV subtype A2, or 2) a MHC class I epitope encoding nucleic acid sequence encoding the at least one MHC class I epitope, wherein the at least one MHC class I epitope comprises a MHC class I epitope sequence comprising at least one HIV epitope selected from the group consisting of the sequences shown in SEQ ID NOs: 2166-4106.

[0069] Additionally disclosed herein is a method for inducing an immune response in a subject with HIV, the method comprising administering to the subject an antigen-based vaccine, wherein the antigen-based vaccine comprises: 1) at least one MHC class I epitope expressed by a HIV subtype, wherein the HIV subtype is HIV subtype B, or 2) a MHC class I epitope encoding nucleic acid sequence encoding the at least one MHC class I epitope, wherein the at least one MHC class I epitope comprises a MHC class I epitope sequence comprising at least one HIV epitope selected from the group consisting of the sequences shown in SEQ ID NOs: 4107-6241.

[0070] A method for inducing an immune response in a subject with HIV, the method comprising administering to the subject an antigen-based vaccine, wherein the antigen-based vaccine comprises: 1) at least one MHC class I epitope expressed by a HIV subtype, wherein the HIV subtype is HIV subtype C, or 2) a MHC class I epitope encoding nucleic acid sequence encoding the at least one MHC class I epitope, wherein the at least one MHC class I epitope comprises a MHC class I epitope sequence comprising at least one HIV epitope selected from the group consisting of the sequences shown in SEQ ID NOs: 6242-8389.

[0071] Additionally disclosed herein is a method for inducing an immune response in a subject with HIV, the method comprising administering to the subject an antigen-based vaccine, wherein the antigen-based vaccine comprises: 1) at least one MHC class I epitope expressed by a HIV subtype, wherein the HIV subtype is HIV subtype D, or 2) a MHC class I epitope encoding nucleic acid sequence encoding the at least one MHC class I epitope, wherein the at least one MHC class I epitope comprises a MHC class I epitope sequence selected from a group consisting of epitope sequences from any one of SEQ ID NOs: 8930-10626.

[0072] Additionally disclosed herein is a method for inducing an immune response in a subject with HIV, the method comprising administering to the subject an antigen-based vaccine, wherein the antigen-based vaccine comprises: 1) at least one MHC class I epitope expressed by a HIV subtype, wherein the HIV subtype is HIV subtype F1, or 2) a MHC class I epitope encoding nucleic acid sequence encoding the at least one MHC class I epitope, wherein the at least one MHC class I epitope comprises at least one HIV epitope sequence selected from the group consisting of the sequences shown in SEQ ID NOs: 10627-12810.

[0073] Additionally disclosed herein is a method for inducing an immune response in a subject with HIV, the method comprising administering to the subject an antigen-based vaccine, wherein the antigen-based vaccine comprises: 1) at least one MHC class I epitope expressed by a HIV subtype, wherein the HIV subtype is HIV subtype F2, or 2) a MHC class I epitope encoding nucleic acid sequence encoding the at least one MHC class I epitope, wherein the at least one MHC class I epitope comprises at least one HIV epitope sequence selected from the group consisting of the sequences shown in SEQ ID NOs: 12811-15079.

[0074] Additionally disclosed herein is a method for inducing an immune response in a subject with HIV, the method comprising administering to the subject an antigen-based vaccine, wherein the antigen-based vaccine comprises: 1) at least one MHC class I epitope expressed by a HIV subtype, wherein the HIV subtype is HIV subtype G, or 2) a MHC class I epitope encoding nucleic acid sequence encoding the at least one MHC class I epitope, wherein the at least one MHC class I epitope comprises at least one HIV epitope sequence selected from the group consisting of the sequences shown in SEQ ID NOs: 15080-17174.

[0075] Additionally disclosed herein is a method for inducing an immune response in a subject with HIV, the method comprising administering to the subject an antigen-based vaccine, wherein the antigen-based vaccine comprises: 1) at least one MHC class I epitope expressed by a HIV subtype, wherein the HIV subtype is HIV subtype H, or 2) a MHC class I epitope encoding nucleic acid sequence encoding the at least one MHC class I epitope, wherein the at least one MHC class I epitope comprises a MHC class I epitope sequence comprising at least one HIV epitope selected from the group consisting of the sequences shown in SEQ ID NOs: 17175-19388.

[0076] Additionally disclosed herein is a method for inducing an immune response in a subject with HIV, the method comprising administering to the subject an antigen-based vaccine, wherein the antigen-based vaccine comprises: 1) at least one MHC class I epitope expressed by a HIV subtype, wherein the HIV subtype is HIV subtype J, or 2) a MHC class I epitope encoding nucleic acid sequence encoding the at least one MHC class I epitope, wherein the at least one MHC class I epitope comprises a MHC class I epitope sequence comprising at least one HIV epitope selected from the group consisting of the sequences shown in SEQ ID NOs: 19389-21003.

[0077] Additionally disclosed herein is a method for inducing an immune response in a subject with HIV, the method comprising administering to the subject an antigen-based vaccine, wherein the antigen-based vaccine comprises: 1) at least one MHC class I epitope expressed by a HIV subtype, wherein the HIV subtype is HIV subtype K, or 2) a MHC class I epitope encoding nucleic acid sequence encoding the at least one MHC class I epitope, wherein the at least one MHC class I epitope comprises a MHC class I epitope sequence comprising at least one HIV epitope selected from the group consisting of the sequences shown in SEQ ID NOs: 21004-22349.

[0078] In various embodiments, the subject expresses at least one HLA allele predicted or known to present the at least one MHC class I epitope sequence. In various embodiments, the method further comprises: prior to administering to the subject the antigen-based vaccine, determining that the subject is a candidate for receiving the antigen-based vaccine, wherein the determination comprises identifying that 1) the subject expresses an HLA allele known to or predicted to present the at least one MHC class I epitope and 2) the subject has been exposed to or is susceptible to exposure to the HIV subtype. In various embodiments, the at least one HLA allele is selected from the group consisting of HLA alleles in Tables 35-45.

[0079] In various embodiments, wherein the antigen-based vaccine comprises an antigen expression system. In various embodiments, the antigen expression system comprises any one of the antigen expression systems described above. In various embodiments, the antigen-based vaccine comprises any one of the pharmaceutical compositions.

[0080] In various embodiments, each MHC class I epitope comprises a sequence selected from the group consisting of epitope sequences of any one of SEQ ID NOs: 325-2165. In various embodiments, each MHC class I epitope comprises a sequence selected from the group consisting of epitope sequences of any one of SEQ ID NOs: 2166-4106. In various embodiments, each MHC class I epitope comprises a sequence selected from the group consisting of epitope sequences of any one of SEQ ID NOs: 4107-6241. In various embodiments, each MHC class I epitope comprises a sequence selected from the group consisting of epitope sequences of any one of SEQ ID NOs: 6242-8389. In various embodiments, each MHC class I epitope comprises a sequence selected from the group consisting of epitope sequences of any one of SEQ ID NOs: 8930-10626. In various embodiments, each MHC class I epitope comprises a sequence selected from the group consisting of epitope sequences of any one of SEQ ID NOs: 10627-12810. In various embodiments, each MHC class I epitope comprises a sequence selected from the group consisting of epitope sequences of any one of SEQ ID NOs: 12811-15079. In various embodiments, each MHC class I epitope comprises a sequence selected from the group consisting of epitope sequences of any one of SEQ ID NOs: 15080-17174. In various embodiments, each MHC class I epitope comprises a sequence selected from the group consisting of epitope sequences of any one of SEQ ID NOs: 17175-19388. In various embodiments, each MHC class I epitope comprises a sequence selected from the group consisting of epitope sequences of any one of SEQ ID NOs: 19389-21003. In various embodiments, each MHC class I epitope comprises a sequence selected from the group consisting of epitope sequences of any one of SEQ ID NOs: 21004-22349.

[0081] Additionally disclosed herein is a method of assessing a subject having HIV, comprising the steps of: a) determining or having determined that the subject expresses a HLA allele; b) obtaining or having obtained sequencing data of HIV present in that subject; c) selecting candidate epitope sequences for inclusion in an antigen-based vaccine, wherein a first candidate epitope sequence is selected from the group consisting of epitope sequences from any one of SEQ ID Nos: 325-22349, and wherein a second candidate epitope sequence is a mutated epitope sequence, each of the first and second candidate epitope sequences predicted to be presented by the HLA allele expressed by the subject; d) generating the antigen-based vaccine including the selected candidate epitope sequences; and e) optionally, administering or having administered the antigen-based vaccine to the subject.

[0082] Additionally disclosed herein is a method for treating a subject having HIV, comprising the steps of: a) determining or having determined that the subject expresses a HLA allele; b) obtaining or having obtained sequencing data of HIV present in that subject; c) selecting candidate epitope sequences for inclusion in an antigen-based vaccine, wherein a first candidate epitope sequence is selected from the group consisting of epitope sequences from any one of SEQ ID Nos: 325-22349, and wherein a second candidate epitope sequence is a mutated epitope sequence, each of the first and second candidate epitope sequences predicted to be presented by the HLA allele expressed by the subject; d) generating the antigen-based vaccine including the selected candidate epitope sequences; and e) optionally, administering or having administered the antigen-based vaccine to the subject.

[0083] In various embodiments, epitope sequences of any one of SEQ ID Nos: 325-22349 are identified by applying a presentation model trained on HLA presented peptides sequenced by mass spectrometry. In various embodiments, the presentation model exhibits a precision value of 0.28 at a 40% recall rate. In various embodiments the presentation model exhibits an AUC of 0.24.

### BRIEF DESCRIPTION OF THE SEVERAL VIEWS OF THE DRAWINGS

[0084] These and other features, aspects, and advantages of the present invention will become better understood with regard to the following description, and accompanying drawings, where:

[0085] FIG. 1 illustrates development of an in vitro T cell activation assay. Schematic of the assay in which the delivery of a vaccine cassette to antigen presenting cells, leads to expression, processing and MHC-restricted presentation of distinct peptide antigens. Reporter T cells engineered with T cell receptors that match the specific peptide-MHC combination become activated resulting in luciferase expression.

[0086] FIG. 2A illustrates evaluation of linker sequences in short cassettes and shows five class I MHC restricted epitopes (epitopes 1 through 5) concatenated in the same position relative to each other followed by two universal class II MHC epitopes (MHC-II). Various iterations were generated using different linkers. In some cases the T cell epitopes are directly linked to each other. In others, the T cell epitopes are flanked on one or both sides by its natural sequence. In other iterations, the T cell epitopes are linked by the non-natural sequences AAY, RR, and DPP.

[0087] FIG. 2B illustrates evaluation of linker sequences in short cassettes and shows sequence information on the T cell epitopes embedded in the short cassettes. Figure discloses SEQ ID NOS 274-280, respectively, in order of appearance.

[0088] FIG. 3 illustrates evaluation of cellular targeting sequences added to model vaccine cassettes. The targeting cassettes extend the short cassette designs with ubiquitin (Ub), signal peptides (SP) and/or transmembrane (TM) domains, feature next to the five marker human T cell epitopes (epitopes 1 through 5) also two mouse T cell epitopes SIINFEKL (SEQ ID NO: 80) (SII) and SPSYAYHQF (SEQ ID NO: 81) (A5), and use either the non-natural linker AAY- or natural linkers flanking the T cell epitopes on both sides (25mer).

[0089] FIG. 4A illustrates in vivo evaluation of the impact of epitope position in long 21-mer cassettes and shows the design of long cassettes entails five marker class I epitopes (epitopes 1 through 5) contained in their 25-mer natural sequence (linker=natural flanking sequences), spaced with additional well-known T cell class I epitopes (epitopes 6 through 21) contained in their 25-mer natural sequence, and two universal class II epitopes (MHC-II0, with only the relative position of the class I epitopes varied.

[0090] FIG. 4B illustrates in vivo evaluation of the impact of epitope position in long 21-mer cassettes and shows the sequence information on the T cell epitopes used. Figure discloses SEQ ID NOS 281-301, respectively, in order of appearance.

[0091] FIG. 5A illustrates final cassette design for preclinical IND-enabling studies and shows the design of the final cassettes comprises 20 MHC I epitopes contained in their 25-mer natural sequence (linker=natural flanking sequences), composed of 6 non-human primate (NHP) epitopes, 5 human epitopes, 9 murine epitopes, as well as 2 universal MHC class II epitopes.

[0092] FIG. 5B illustrates final cassette design for preclinical IND-enabling studies and shows the sequence information for the T cell epitopes used that are presented on class I MHC of non-human primate, mouse and human origin, as well as sequences of 2 universal MHC class II epitopes PADRE and Tetanus toxoid. Figure discloses SEQ ID NOS 302-323, respectively, in order of appearance.

[0093] FIG. 6A illustrates ChAdV68.4WTnt.GFP virus production after transfection. HEK293A cells were transfected with ChAdV68.4WTnt.GFP DNA using the calcium phosphate protocol. Viral replication was observed 10 days after transfection and ChAdV68.4WTnt.GFP viral plaques were visualized using light microscopy (40× magnification).

[0094] FIG. 6B illustrates ChAdV68.4WTnt.GFP virus production after transfection. HEK293A cells were transfected with ChAdV68.4WTnt.GFP DNA using the calcium phosphate protocol. Viral replication was observed 10 days after transfection and ChAdV68.4WTnt.GFP viral plaques were visualized using fluorescent microscopy at 40× magnification.

[0095] FIG. 6C illustrates ChAdV68.4WTnt.GFP virus production after transfection. HEK293A cells were transfected with ChAdV68.4WTnt.GFP DNA using the calcium phosphate protocol. Viral replication was observed 10 days after transfection and ChAdV68.4WTnt.GFP viral plaques were visualized using fluorescent microscopy at 100× magnification.

[0096] FIG. 7A illustrates ChAdV68.5WTnt.GFP virus production after transfection. HEK293A cells were transfected with ChAdV68.5WTnt.GFP DNA using the lipofectamine protocol. Viral replication (plaques) was observed 10 days after transfection. A lysate was made and used to reinfect a T25 flask of 293A cells. ChAdV68.5WTnt.GFP viral plaques were visualized and photographed 3 days later using light microscopy (40× magnification)

[0097] FIG. 7B illustrates ChAdV68.5WTnt.GFP virus production after transfection. HEK293A cells were transfected with ChAdV68.5WTnt.GFP DNA using the lipofectamine protocol. Viral replication (plaques) was observed 10 days after transfection. A lysate was made and used to reinfect a T25 flask of 293A cells. ChAdV68.5WTnt.GFP viral plaques were visualized and photographed 3 days later using fluorescent microscopy at 40× magnification.

[0098] FIG. 7C illustrates ChAdV68.5WTnt.GFP virus production after transfection. HEK293A cells were transfected with ChAdV68.5WTnt.GFP DNA using the lipofectamine protocol. Viral replication (plaques) was observed 10 days after transfection. A lysate was made and used to reinfect a T25 flask of 293A cells. ChAdV68.5WTnt.GFP viral plaques were visualized and photographed 3 days later using fluorescent microscopy at 100× magnification.

[0099] FIG. 8 illustrates the viral particle production scheme.

[0100] FIG. 9 illustrates the alphavirus derived VEE self-replicating RNA (srRNA) vector.

[0101] FIG. 10 illustrates in vivo reporter expression after inoculation of C57BL/6J mice with VEE-Luciferase srRNA. Shown are representative images of luciferase signal following immunization of C57BL/6J mice with VEE-Luciferase srRNA (10 ug per mouse, bilateral intramuscular injection, MC3 encapsulated) at various timepoints.

[0102] FIG. 11A illustrates T-cell responses measured 14 days after immunization with VEE srRNA formulated with MC3 LNP in B16-OVA tumor bearing mice. B16-OVA tumor bearing C57BL/6J mice were injected with 10 ug of VEE-Luciferase srRNA (control), VEE-UbAAY srRNA (Vax), VEE-Luciferase srRNA and anti-CTLA-4 (aCTLA-4) or VEE-UbAAY srRNA and anti-CTLA-4 (Vax+aCTLA-4). In addition, all mice were treated with anti-PD1 mAb starting at day 7. Each group consisted of 8 mice. Mice were sacrificed and spleens and lymph nodes were collected 14 days after immunization. SIINFEKL (SEQ ID NO: 82)-specific T-cell responses were assessed by IFN-gamma ELISPOT and are reported as spot-forming cells (SFC) per 106 splenocytes. Lines represent medians.

[0103] FIG. 11B illustrates T-cell responses measured 14 days after immunization with VEE srRNA formulated with MC3 LNP in B16-OVA tumor bearing mice. B16-OVA tumor bearing C57BL/6J mice were injected with 10 ug of VEE-Luciferase srRNA (control), VEE-UbAAY srRNA (Vax), VEE-Luciferase srRNA and anti-CTLA-4 (aCTLA-4) or VEE-UbAAY srRNA and anti-CTLA-4 (Vax+aCTLA-4). In addition, all mice were treated with anti-PD1 mAb starting at day 7. Each group consisted of 8 mice. Mice were sacrificed and spleens and lymph nodes were collected 14 days after immunization. SIINFEKL (SEQ ID NO: 83)-specific T-cell responses were assessed by MHCI-pentamer staining, reported as pentamer positive cells as a percent of CD8 positive cells. Lines represent medians.

[0104] FIG. 12A illustrates antigen-specific T-cell responses following heterologous prime/boost in B16-OVA tumor bearing mice. B16-OVA tumor bearing C57BL/6J mice were injected with adenovirus expressing GFP (Ad5-GFP) and boosted with VEE-Luciferase srRNA formulated with MC3 LNP (Control) or Ad5-UbAAY and boosted with VEE-UbAAY srRNA (Vax). Both the Control and Vax groups were also treated with an IgG control mAb. A third group was treated with the Ad5-GFP prime/VEE-Luciferase srRNA boost in combination with anti-CTLA-4 (aCTLA-4), while the fourth group was treated with the Ad5-UbAAY prime/VEE-UbAAY boost in combination with anti-CTLA-4 (Vax+aCTLA-4). In addition, all mice were treated with anti-PD-1 mAb starting at day 21. T-cell responses were measured by IFN-gamma ELISPOT. Mice were sacrificed and spleens and lymph nodes collected at 14 days post immunization with adenovirus.

[0105] FIG. 12B illustrates antigen-specific T-cell responses following heterologous prime/boost in B16-OVA tumor bearing mice. B16-OVA tumor bearing C57BL/6J mice were injected with adenovirus expressing GFP (Ad5-GFP) and boosted with VEE-Luciferase srRNA formulated with MC3 LNP (Control) or Ad5-UbAAY and boosted with VEE-UbAAY srRNA (Vax). Both the Control and Vax groups were also treated with an IgG control mAb. A third group was treated with the Ad5-GFP prime/VEE-Luciferase srRNA boost in combination with anti-CTLA-4 (aCTLA-4), while the fourth group was treated with the Ad5-UbAAY prime/VEE-UbAAY boost in combination with anti-CTLA-4 (Vax+aCTLA-4). In addition, all mice were treated with anti-PD-1 mAb starting at day 21. T-cell responses were measured by IFN-gamma ELISPOT. Mice were sacrificed and spleens and lymph nodes collected at 14 days post immunization with adenovirus and 14 days post boost with srRNA (day 28 after prime).

[0106] FIG. 12C illustrates antigen-specific T-cell responses following heterologous prime/boost in B16-OVA tumor bearing mice. B16-OVA tumor bearing C57BL/6J mice were injected with adenovirus expressing GFP (Ad5-GFP) and boosted with VEE-Luciferase srRNA formulated with MC3 LNP (Control) or Ad5-UbAAY and boosted with VEE-UbAAY srRNA (Vax). Both the Control and Vax groups were also treated with an IgG control mAb. A third group was treated with the Ad5-GFP prime/VEE-Luciferase srRNA boost in combination with anti-CTLA-4 (aCTLA-4), while the fourth group was treated with the Ad5-UbAAY prime/VEE-UbAAY boost in combination with anti-CTLA-4 (Vax+aCTLA-4). In addition, all mice were treated with anti-PD-1 mAb starting at day 21. T-cell responses were measured by MHC class I pentamer staining. Mice were sacrificed and spleens and lymph nodes collected at 14 days post immunization with adenovirus.

[0107] FIG. 12D illustrates antigen-specific T-cell responses following heterologous prime/boost in B16-OVA tumor bearing mice. B16-OVA tumor bearing C57BL/6J mice were injected with adenovirus expressing GFP (Ad5-GFP) and boosted with VEE-Luciferase srRNA formulated with MC3 LNP (Control) or Ad5-UbAAY and boosted with VEE-UbAAY srRNA (Vax). Both the Control and Vax groups were also treated with an IgG control mAb. A third group was treated with the Ad5-GFP prime/VEE-Luciferase srRNA boost in combination with anti-CTLA-4 (aCTLA-4), while the fourth group was treated with the Ad5-UbAAY prime/VEE-UbAAY boost in combination with anti-CTLA-4 (Vax+aCTLA-4). In addition, all mice were treated with anti-PD-1 mAb starting at day 21. T-cell responses were measured by MHC class I pentamer staining. Mice were sacrificed and spleens and lymph nodes collected at 14 days post immunization with adenovirus and 14 days post boost with srRNA (day 28 after prime).

[0108] FIG. 13A illustrates antigen-specific T-cell responses following heterologous prime/boost in CT26 (Balb/c) tumor bearing mice. Mice were immunized with Ad5-GFP and boosted 15 days after the adenovirus prime with VEE-Luciferase srRNA formulated with MC3 LNP (Control) or primed with Ad5-UbAAY and boosted with VEE-UbAAY srRNA (Vax). Both the Control and Vax groups were also treated with an IgG control mAb. A separate group was administered the Ad5-GFP/VEE-Luciferase srRNA prime/boost in combination with anti-PD-1 (aPD1), while a fourth group received the Ad5-UbAAY/VEE-UbAAY srRNA prime/boost in combination with an anti-PD-1 mAb (Vax+aPD1). T-cell responses to the AH1 peptide were measured using IFN-gamma ELISPOT. Mice were sacrificed and spleens and lymph nodes collected at 12 days post immunization with adenovirus.

[0109] FIG. 13B illustrates antigen-specific T-cell responses following heterologous prime/boost in CT26 (Balb/c) tumor bearing mice. Mice were immunized with Ad5-GFP and boosted 15 days after the adenovirus prime with VEE-Luciferase srRNA formulated with MC3 LNP (Control) or primed with Ad5-UbAAY and boosted with VEE-UbAAY srRNA (Vax). Both the Control and Vax groups were also treated with an IgG control mAb. A separate group was administered the Ad5-GFP/VEE-Luciferase srRNA prime/boost in combination with anti-PD-1 (aPD1), while a fourth group received the Ad5-UbAAY/VEE-UbAAY srRNA prime/boost in combination with an anti-PD-1 mAb (Vax+aPD1). T-cell responses to the AH1 peptide were measured using IFN-gamma ELISPOT. Mice were sacrificed and spleens and lymph nodes collected at 12 days post immunization with adenovirus and 6 days post boost with srRNA (day 21 after prime).

[0110] FIG. 14 illustrates ChAdV68 eliciting T-Cell responses to mouse tumor antigens in mice. Mice were immunized with ChAdV68.5WTnt.MAG25mer, and T-cell responses to the MHC class I epitope SIINFEKL (SEQ ID NO: 84) (OVA) were measured in C57BL/6J female mice and the MHC class I epitope AH1-A5 measured in Balb/c mice. Mean spot forming cells (SFCs) per 10⁶ splenocytes measured in ELISpot assays presented. Error bars represent standard deviation.

[0111] FIGS. 15A, 15B, 15C and 15D illustrate antigen-specific cellular immune responses measured using ELISpot. Antigen-specific IFN-gamma production to six different mamu A01 restricted epitopes was measured in PBMCs for the VEE-MAG25mer srRNA-LNP1 (30 μg) (FIG. 15A), VEE-MAG25mer srRNA-LNP1 (100 μg) (FIG. 15B), or VEE-MAG25mer srRNA-LNP2 (100 μg) (FIG. 15C) homologous prime/boost or the ChAdV68.5WTnt.MAG25mer/VEE-MAG25mer srRNA heterologous prime/boost group (FIG. 15D) using ELISpot 1, 2, 3, 4, 5, 6, 8, 9, or 10 weeks after the first boost immunization (6 rhesus macaques per group). Results are presented as mean spot forming cells (SFC) per 10⁶ PBMCs for each epitope in a stacked bar graph format. Values for each animal were normalized to the levels at pre-bleed (week 0).

[0112] FIG. 16 shows antigen-specific cellular immune response measured using ELISpot. Antigen-specific IFN-gamma production to six different mamu A01 restricted epitopes was measured in PBMCs after immunization with the ChAdV68.5WTnt.MAG25mer/VEE-MAG25mer srRNA heterologous prime/boost regimen using ELISpot prior to immunization and 4, 5, 6, 7, 8, 10, 11, 12, 13, 14, 15, 16, 17, 18, 19, 20, 21, 22, 23 or 24 weeks after the initial immunization. Results are presented as mean spot forming cells (SFC) per 10⁶ PBMCs for each epitope (6 rhesus macaques per group) in a stacked bar graph format.

[0113] FIG. 17 shows antigen-specific cellular immune response measured using ELISpot. Antigen-specific IFN-gamma production to six different mamu A01 restricted epitopes was measured in PBMCs after immunization with the VEE-MAG25mer srRNA LNP2 homologous prime/boost regimen using ELISpot prior to immunization and 4, 5, 6, 7, 8, 10, 11, 12, 13, 14, or 15 weeks after the initial immunization. Results are presented as mean spot forming cells (SFC) per 10⁶ PBMCs for each epitope (6 rhesus macaques per group) in a stacked bar graph format.

[0114] FIG. 18 shows antigen-specific cellular immune response measured using ELISpot. Antigen-specific IFN-gamma production to six different mamu A01 restricted epitopes was measured in PBMCs after immunization with the VEE-MAG25mer srRNA LNP1 homologous prime/boost regimen using ELISpot prior to immunization and 4, 5, 6, 7, 8, 10, 11, 12, 13, 14, or 15 weeks after the initial immunization. Results are presented as mean spot forming cells (SFC) per 10⁶ PBMCs for each epitope (6 rhesus macaques per group) in a stacked bar graph format.

[0115] FIG. 19A and FIG. 19B show example peptide spectrums generated from Promega's dynamic range standard. Figure discloses SEQ ID NO: 324.

[0116] FIG. 20 illustrates the general TCR sequencing strategy and workflow.

[0117] FIG. 21 illustrates the general organization of the model epitopes from the various species for large antigen cassettes that had either 30 (L), 40 (XL) or 50 (XXL) epitopes.

[0118] FIG. 22 shows ChAd vectors express long cassettes as indicated by the above Western blot using an anti-class II (PADRE) antibody that recognizes a sequence common to all cassettes. HEK293 cells were infected with chAd68 vectors expressing large cassettes (chAd68-50XXL, chAd68-40XL & chAd68-30L) of variable size. Infections were set up at a MOI of 0.2. Twenty-four hours post infection MG132 a proteasome inhibitor was added to a set of the infected wells (indicated by the plus sign). Another set of virus treated wells were not treated with MG132 (indicated by minus sign). Uninfected HEK293 cells (293F) were used as a negative control. Forty-eight hours post infection cell pellets were harvested and analyzed by SDS/PAGE electrophoresis, and immunoblotting using a rabbit anti-Class II PADRE antibody. A HRP anti-rabbit antibody and ECL chemiluminescent substrate was used for detection.

[0119] FIG. 23 shows CD8+ immune responses in chAd68 large cassette immunized mice, detected against AH1 (top) and SIINFEKL (SEQ ID NO: 85) (bottom) by ICS. Data is presented as IFNg+ cells against the model epitope as % of total CD8 cells

[0120] FIG. 24 shows CD8+ responses to LD-AH1+(top) and Kb-SIINFEKL+ (SEQ ID NO: 86) (bottom) Tetramers post chAd68 large cassette vaccination. Data is presented as % of total CD8 cells reactive against the model Tetramer peptide complex. *p<0.05, **p<0.01 by ANOVA with Tukey's test. All p-values compared to MAG 20-antigen cassette.

[0121] FIG. 25 shows CD8+ immune responses in alphavirus large cassette treated mice, detected against AH1 (top) and SIINFEKL (SEQ ID NO: 87) ((bottom) by ICS. Data is presented as IFNg+ cells against the model epitope as % of total CD8 cells. *p<0.05, **p<0.01, ***p<0.001 by ANOVA with Tukey's test. All p-values compared to MAG 20-antigen cassette.

[0122] FIG. 26 illustrates the vaccination strategy used to evaluate immunogenicity of the antigen-cassette containing vectors in rhesus macaques. Triangles indicate chAd68 vaccination (1e12 vp/animal) at weeks 0 & 32. Circles represent alphavirus vaccination at weeks 0, 4, 12, 20, 28 & 32. Squares represent administration of an anti-CTLA4 antibody.

[0123] FIG. 27 shows a time course of CD8+ anti-epitope responses in Rhesus Macaques dosed with chAd-MAG alone (Group 4). Mean SFC/1e6 splenocytes is shown.

[0124] FIG. 28 shows a time course of CD8+ anti-epitope responses in Rhesus Macaques dosed with chAd-MAG plus anti-CTLA4 antibody (Ipilimumab) delivered IV. (Group 5). Mean SFC/1e6 splenocytes is shown.

[0125] FIG. 29 shows a time course of CD8+ anti-epitope responses in Rhesus Macaques dosed with chAd-MAG plus anti-CTLA4 antibody (Ipilimumab) delivered SC (Group 6). Mean SFC/1e6 splenocytes is shown.

[0126] FIG. 30 shows antigen-specific memory responses generated by ChAdV68/samRNA vaccine protocol measured by ELISpot. Results are presented as individual dot plots, with each dot representing a single animal. Pre-immunization baseline (left panel) and memory response at 18 months post-prime (right panel) are shown.

[0127] FIG. 31 shows memory cell phenotyping of antigen-specific CD8+ T-cells by flow cytometry using combinatorial tetramer staining and CD45RA/CCR7 co-staining.

[0128] FIG. 32 shows the distribution of memory cell types within the sum of the four Mamu-A*01 tetramer+CD8+ T-cell populations at study month 18. Memory cells were characterized as follows: CD45RA+CCR7+=naïve, CD45RA+CCR7−=effector (Teff), CD45RA-CCR7+=central memory (Tcm), CD45RA-CCR7-=effector memory (Tem).

[0129] FIG. 33 shows frequency of CD8+ T cells recognizing the CT26 tumor antigen AH1 in CT26 tumor-bearing mice. P values determined using the one-way ANOVA with Tukey's multiple comparisons test; **P<0.001, *P<0.05. ChAdV=ChAdV68.5WTnt.MAG25mer; aCTLA4=anti-CTLA4 antibody, clone 9D9.

[0130] FIG. 34 depicts a flow process for providing an antigen-based vaccine to the subject, in accordance with one embodiment.

[0131] FIG. 35 depicts a flow process for providing an antigen-based vaccine to the subject, in accordance with a second embodiment.

[0132] FIG. 36 depicts the predictive capacity of the EDGE model in comparison to a public prediction tool for predicting HIV epitopes that are presented by class I HLA alleles.

### DETAILED DESCRIPTION

### I. Definitions

[0133] In general, terms used in the claims and the specification are intended to be construed as having the plain meaning understood by a person of ordinary skill in the art. Certain terms are defined below to provide additional clarity. In case of conflict between the plain meaning and the provided definitions, the provided definitions are to be used.

[0134] As used herein the term “antigen” is a substance that induces an immune response.

[0135] As used herein the term “antigen-based vaccine” is a vaccine composition based on one or more antigens, e.g., a plurality of antigens. The vaccines can be nucleotide-based (e.g., virally based, RNA based, or DNA based), protein-based (e.g., peptide based), or a combination thereof.

[0136] As used herein the term “candidate antigen” refers to an antigen selected for inclusion in an antigen-based vaccine.

[0137] As used herein the term “candidate epitope sequence” refers to an epitope sequence on a candidate antigen selected for inclusion in an antigen-based vaccine.

[0138] As used herein the term “coding region” is the portion(s) of a gene that encode protein.

[0139] As used herein, the term percent “identity,” in the context of two or more nucleic acid or polypeptide sequences, refer to two or more sequences or subsequences that have a specified percentage of nucleotides or amino acid residues that are the same, when compared and aligned for maximum correspondence, as measured using one of the sequence comparison algorithms described below (e.g., BLASTP and BLASTN or other algorithms available to persons of skill) or by visual inspection. Depending on the application, the percent “identity” can exist over a region of the sequence being compared, e.g., over a functional domain, or, alternatively, exist over the full length of the two sequences to be compared.

[0140] For sequence comparison, typically one sequence acts as a reference sequence to which test sequences are compared. When using a sequence comparison algorithm, test and reference sequences are input into a computer, subsequence coordinates are designated, if necessary, and sequence algorithm program parameters are designated. The sequence comparison algorithm then calculates the percent sequence identity for the test sequence(s) relative to the reference sequence, based on the designated program parameters. Alternatively, sequence similarity or dissimilarity can be established by the combined presence or absence of particular nucleotides, or, for translated sequences, amino acids at selected sequence positions (e.g., sequence motifs).

[0141] Optimal alignment of sequences for comparison can be conducted, e.g., by the local homology algorithm of Smith & Waterman, Adv. Appl. Math. 2:482 (1981), by the homology alignment algorithm of Needleman & Wunsch, J. Mol. Biol. 48:443 (1970), by the search for similarity method of Pearson & Lipman, Proc. Nat'l. Acad. Sci. USA 85:2444 (1988), by computerized implementations of these algorithms (GAP, BESTFIT, FASTA, and TFASTA in the Wisconsin Genetics Software Package, Genetics Computer Group, 575 Science Dr., Madison, Wis.), or by visual inspection (see generally Ausubel et al., infra).

[0142] One example of an algorithm that is suitable for determining percent sequence identity and sequence similarity is the BLAST algorithm, which is described in Altschul et al., J. Mol. Biol. 215:403-410 (1990). Software for performing BLAST analyses is publicly available through the National Center for Biotechnology Information.

[0143] As used herein the term “epitope” is the specific portion of an antigen typically bound by an antibody or T cell receptor.

[0144] As used herein the term “immunogenic” is the ability to elicit an immune response, e.g., via T cells, B cells, or both.

[0145] As used herein the term “HLA binding affinity” “MHC binding affinity” means affinity of binding between a specific antigen and a specific HLA or MHC allele.

[0146] As used herein the term “variant” is a difference between a subject's nucleic acids and the reference human genome used as a control.

[0147] As used herein the term “variant call” is an algorithmic determination of the presence of a variant, typically from sequencing.

[0148] As used herein the term “polymorphism” is a germline variant, i.e., a variant found in all DNA-bearing cells of an individual.

[0149] As used herein the term “somatic variant” is a variant arising in non-germline cells of an individual.

[0150] As used herein the term “allele” is a version of a gene or a version of a genetic sequence or a version of a protein.

[0151] As used herein the term “HLA type” is the complement of HLA gene alleles.

[0152] As used herein the term “exome” is a subset of the genome that codes for proteins. An exome can be the collective exons of a genome.

[0153] As used herein the term “logistic regression” is a regression model for binary data from statistics where the logit of the probability that the dependent variable is equal to one is modeled as a linear function of the dependent variables.

[0154] As used herein the term “neural network” is a machine learning model for classification or regression consisting of multiple layers of linear transformations followed by element-wise nonlinearities typically trained via stochastic gradient descent and back-propagation.

[0155] As used herein the term “proteome” is the set of all proteins expressed and/or translated by a cell, group of cells, or individual.

[0156] As used herein the term “peptidome” is the set of all peptides presented by MHC-I or MHC-II on the cell surface. The peptidome may refer to a property of a cell or a collection of cells.

[0157] As used herein the term “ELISPOT” means Enzyme-linked immunosorbent spot assay—which is a common method for monitoring immune responses in humans and animals.

[0158] As used herein the term “dextramers” is a dextran-based peptide-MHC multimers used for antigen-specific T-cell staining in flow cytometry.

[0159] As used herein the term “tolerance or immune tolerance” is a state of immune non-responsiveness to one or more antigens, e.g. self-antigens.

[0160] As used herein the term “central tolerance” is a tolerance affected in the thymus, either by deleting self-reactive T-cell clones or by promoting self-reactive T-cell clones to differentiate into immunosuppressive regulatory T-cells (Tregs).

[0161] As used herein the term “peripheral tolerance” is a tolerance affected in the periphery by downregulating or anergizing self-reactive T-cells that survive central tolerance or promoting these T cells to differentiate into Tregs.

[0162] The term “sample” can include a single cell or multiple cells or fragments of cells or an aliquot of body fluid, taken from a subject, by means including venipuncture, excretion, ejaculation, massage, biopsy, needle aspirate, lavage sample, scraping, surgical incision, or intervention or other means known in the art.

[0163] The term “subject” encompasses a cell, tissue, or organism, human or non-human, whether in vivo, ex vivo, or in vitro, male or female. The term subject is inclusive of mammals including humans.

[0164] The term “mammal” encompasses both humans and non-humans and includes but is not limited to humans, non-human primates, canines, felines, murines, bovines, equines, and porcines.

[0165] The term “clinical factor” refers to a measure of a condition of a subject, e.g., disease activity or severity. “Clinical factor” encompasses all markers of a subject's health status, including non-sample markers, and/or other characteristics of a subject, such as, without limitation, age and gender. A clinical factor can be a score, a value, or a set of values that can be obtained from evaluation of a sample (or population of samples) from a subject or a subject under a determined condition. A clinical factor can also be predicted by markers and/or other parameters such as gene expression surrogates. Clinical factors can include past indications (e.g., patient history) and smoking history.

[0166] The term “alphavirus” refers to members of the family Togaviridae, and are positive-sense single-stranded RNA viruses. Alphaviruses are typically classified as either Old World, such as Sindbis, Ross River, Mayaro, Chikungunya, and Semliki Forest viruses, or New World, such as eastern equine encephalitis, Aura, Fort Morgan, or Venezuelan equine encephalitis and its derivative strain TC-83. Alphaviruses are typically self-replicating RNA viruses.

[0167] The term “alphavirus backbone” refers to minimal sequence(s) of an alphavirus that allow for self-replication of the viral genome. Minimal sequences can include conserved sequences for nonstructural protein-mediated amplification, a nonstructural protein 1 (nsP1) gene, a nsP2 gene, a nsP3 gene, a nsP4 gene, and a polyA sequence, as well as sequences for expression of subgenomic viral RNA including a 26S promoter element.

[0168] The term “sequences for nonstructural protein-mediated amplification” includes alphavirus conserved sequence elements (CSE) well known to those in the art. CSEs include, but are not limited to, an alphavirus 5′ UTR, a 51-nt CSE, a 24-nt CSE, or other 26S subgenomic promoter sequence, a 19-nt CSE, and an alphavirus 3′ UTR.

[0169] The term “RNA polymerase” includes polymerases that catalyze the production of RNA polynucleotides from a DNA template. RNA polymerases include, but are not limited to, bacteriophage derived polymerases including T3, T7, and SP6.

[0170] The term “lipid” includes hydrophobic and/or amphiphilic molecules. Lipids can be cationic, anionic, or neutral. Lipids can be synthetic or naturally derived, and in some instances biodegradable. Lipids can include cholesterol, phospholipids, lipid conjugates including, but not limited to, polyethyleneglycol (PEG) conjugates (PEGylated lipids), waxes, oils, glycerides, fats, and fat-soluble vitamins. Lipids can also include dilinoleylmethyl-4-dimethylaminobutyrate (MC3) and MC3-like molecules.

[0171] The term “lipid nanoparticle” or “LNP” includes vesicle like structures formed using a lipid containing membrane surrounding an aqueous interior, also referred to as liposomes. Lipid nanoparticles includes lipid-based compositions with a solid lipid core stabilized by a surfactant. The core lipids can be fatty acids, acylglycerols, waxes, and mixtures of these surfactants. Biological membrane lipids such as phospholipids, sphingomyelins, bile salts (sodium taurocholate), and sterols (cholesterol) can be utilized as stabilizers. Lipid nanoparticles can be formed using defined ratios of different lipid molecules, including, but not limited to, defined ratios of one or more cationic, anionic, or neutral lipids. Lipid nanoparticles can encapsulate molecules within an outer-membrane shell and subsequently can be contacted with target cells to deliver the encapsulated molecules to the host cell cytosol. Lipid nanoparticles can be modified or functionalized with non-lipid molecules, including on their surface. Lipid nanoparticles can be single-layered (unilamellar) or multi-layered (multilamellar). Lipid nanoparticles can be complexed with nucleic acid. Unilamellar lipid nanoparticles can be complexed with nucleic acid, wherein the nucleic acid is in the aqueous interior. Multilamellar lipid nanoparticles can be complexed with nucleic acid, wherein the nucleic acid is in the aqueous interior, or to form or sandwiched between

[0172] Abbreviations: MHC: major histocompatibility complex; HLA: human leukocyte antigen, or the human MHC gene locus; NGS: next-generation sequencing; PPV: positive predictive value; FFPE: formalin-fixed, paraffin-embedded; NMD: nonsense-mediated decay; DC: dendritic cell.

[0173] It should be noted that, as used in the specification and the appended claims, the singular forms “a,” “an,” and “the” include plural referents unless the context clearly dictates otherwise.

[0174] Unless specifically stated or otherwise apparent from context, as used herein the term “about” is understood as within a range of normal tolerance in the art, for example within 2 standard deviations of the mean. About can be understood as within 10%, 9%, 8%, 7%, 6%, 5%, 4%, 3%, 2%, 1%, 0.5%, 0.1%, 0.05%, or 0.01% of the stated value. Unless otherwise clear from context, all numerical values provided herein are modified by the term about.

[0175] Any terms not directly defined herein shall be understood to have the meanings commonly associated with them as understood within the art of the invention. Certain terms are discussed herein to provide additional guidance to the practitioner in describing the compositions, devices, methods and the like of aspects of the invention, and how to make or use them. It will be appreciated that the same thing may be said in more than one way. Consequently, alternative language and synonyms may be used for any one or more of the terms discussed herein. No significance is to be placed upon whether or not a term is elaborated or discussed herein. Some synonyms or substitutable methods, materials and the like are provided. Recital of one or a few synonyms or equivalents does not exclude use of other synonyms or equivalents, unless it is explicitly stated. Use of examples, including examples of terms, is for illustrative purposes only and does not limit the scope and meaning of the aspects of the invention herein.

[0176] All references, issued patents and patent applications cited within the body of the specification are hereby incorporated by reference in their entirety, for all purposes.

### II. Methods of Identifying Antigens

[0177] Methods disclosed herein describe identifying candidate antigens for inclusion in a personalized antigen-based vaccine. Candidate antigens represent antigens of an infectious disease, such as HIV, that are likely to be presented on the cell surface of immune cells, including professional antigen presenting cells such as dendritic cells, and/or are likely to be immunogenic, for a particular subject.

[0178] As an example, one such method may comprise the steps of: obtaining HIV sequencing data, wherein the HIV sequencing data is used to obtain data representing peptide sequences of each of a set of antigens; inputting the peptide sequence of each antigen into one or more presentation models to generate a set of numerical likelihoods that each of the antigens is presented by one or more MHC proteins of the subject, the set of numerical likelihoods having been identified at least based on received mass spectrometry data; and selecting a subset of the set of antigens based on the set of numerical likelihoods to generate a set of selected antigens. In one aspect, each antigen in the set of antigens is encoded by coding regions in genes in the HIV genome (e.g., env, gag, Negative factor (nef), pol, rev, trans-activator of transcription (Tat), viral infectivity factor (vif), viral protein r (vir), or viral protein u (viu)).

[0179] The presentation model can comprise a statistical regression or a machine learning (e.g., deep learning) model trained on a set of reference data (also referred to as a training data set) comprising a set of corresponding labels, wherein the set of reference data is obtained from each of a plurality of distinct subjects where optionally some subjects are infected with HIV. The reference data can further comprise mass spectrometry data, sequencing data, RNA sequencing data, expression profiling data, and proteomics data for single-allele cell lines engineered to express a predetermined MHC allele that are subsequently exposed to synthetic protein, normal human cell lines, and fresh and frozen primary samples, and T cell assays (e.g., ELISPOT). In certain aspects, the set of reference data includes each form of reference data.

[0180] The presentation model can comprise a set of features derived at least in part from the set of reference data, and wherein the set of features comprises at least one of allele dependent-features and allele-independent features. In certain aspects each feature is included.

[0181] Methods for identifying candidate antigens also include generating an output for constructing a personalized antigen-based vaccine by identifying one or more antigens of HIV that are likely to be presented. As an example, one such method may comprise the steps of: obtaining HIV sequencing data, wherein the HIV sequencing data is used to obtain data representing peptide sequences of each of a set of antigens; encoding the peptide sequences of each of the antigens into a corresponding numerical vector, each numerical vector including information regarding a plurality of amino acids that make up the peptide sequence and a set of positions of the amino acids in the peptide sequence; inputting the numerical vectors, using a computer processor, into a deep learning presentation model to generate a set of presentation likelihoods for the set of antigens, each presentation likelihood in the set representing the likelihood that a corresponding antigen is presented by MHC proteins of class I MHC alleles; selecting a subset of the set of antigens based on the set of presentation likelihoods to generate a set of selected antigens; and generating the output for constructing the personalized antigen-based vaccine based on the set of selected antigens. In one aspect, each antigen in the set of antigens is encoded by genes in the HIV genome (e.g., env, gag, nef, pol, rev, tat, vif, vir, or viu).

[0182] Specific methods for identifying antigens are known to those skilled in the art, for example the methods described in more detail in international patent application publications WO/2017/106638, WO/2018/195357, and WO/2018/208856, each herein incorporated by reference, in their entirety, for all purposes.

[0183] A method of treating a subject is disclosed herein, comprising performing the steps of any of the antigen identification methods described herein, and further comprising obtaining an antigen-based vaccine comprising the set of selected antigens, and administering the antigen-based vaccine to the subject, wherein, optionally, the subject has HIV.

[0184] A method disclosed herein can also include identifying one or more T cells that are antigen-specific for at least one of the antigens in the subset. In some embodiments, the identification comprises co-culturing the one or more T cells with one or more of the antigens in the subset under conditions that expand the one or more antigen-specific T cells. In further embodiments, the identification comprises contacting the one or more T cells with a tetramer comprising one or more of the antigens in the subset under conditions that allow binding between the T cell and the tetramer. In even further embodiments, the method disclosed herein can also include identifying one or more T cell receptors (TCR) of the one or more identified T cells. In certain embodiments, identifying the one or more T cell receptors comprises sequencing the T cell receptor sequences of the one or more identified T cells. The method disclosed herein can further comprise genetically engineering a plurality of T cells to express at least one of the one or more identified T cell receptors; culturing the plurality of T cells under conditions that expand the plurality of T cells; and infusing the expanded T cells into the subject. In some embodiments, genetically engineering the plurality of T cells to express at least one of the one or more identified T cell receptors comprises cloning the T cell receptor sequences of the one or more identified T cells into an expression vector; and transfecting each of the plurality of T cells with the expression vector. In some embodiments, the method disclosed herein further comprises culturing the one or more identified T cells under conditions that expand the one or more identified T cells; and infusing the expanded T cells into the subject.

[0185] Also disclosed herein is an isolated T cell that is antigen-specific for at least one selected antigen in the subset.

[0186] Also disclosed herein is a method for manufacturing a HIV vaccine, comprising the steps of: obtaining HIV sequencing data, wherein the HIV sequencing data is used to obtain data representing peptide sequences of each of a set of antigens; inputting the peptide sequence of each antigen into one or more presentation models to generate a set of numerical likelihoods that each of the antigens is presented by one or more MHC alleles, the set of numerical likelihoods having been identified at least based on received mass spectrometry data; and selecting a subset of the set of antigens based on the set of numerical likelihoods to generate a set of selected antigens; and producing or having produced a HIV vaccine comprising the set of selected antigens. In one aspect, each antigen in the set of antigens is encoded by genes in the HIV genome (e.g., env, gag, nef, pol, rev, tat, vif, vir, or viu).

[0187] Also disclosed herein is an antigen-based vaccine including a set of selected antigens selected by performing the method comprising the steps of: obtaining HIV sequencing data, wherein the HIV sequencing data is used to obtain data representing peptide sequences of each of a set of antigens; inputting the peptide sequence of each antigen into one or more presentation models to generate a set of numerical likelihoods that each of the antigens is presented by one or more MHC alleles, the set of numerical likelihoods having been identified at least based on received mass spectrometry data; and selecting a subset of the set of antigens based on the set of numerical likelihoods to generate a set of selected antigens; and producing or having produced a HIV vaccine comprising the set of selected antigens. In one aspect, each antigen in the set of antigens is encoded by genes in the HIV genome (e.g., env, gag, nef, pol, rev, tat, vif, vir, or viu).

[0188] The antigen-based vaccine may include one or more of a nucleotide sequence, a polypeptide sequence, RNA, DNA, a cell, a plasmid, or a vector.

[0189] The antigen-based vaccine may include one or more antigens that is immunogenic in the subject.

[0190] The antigen-based vaccine may not include one or more antigens that induce an autoimmune response against normal tissue in the subject.

[0191] The antigen-based vaccine may include an adjuvant.

[0192] The antigen-based vaccine may include an excipient.

[0193] A method disclosed herein may also include selecting antigens that have an increased likelihood of being presented by immune cells of the subject relative to unselected antigens based on the presentation model.

[0194] A method disclosed herein may also include selecting antigens that have an increased likelihood of being capable of being presented to naïve T cells by professional antigen presenting cells (APCs) relative to unselected antigens based on the presentation model, optionally wherein the APC is a dendritic cell (DC).

[0195] A method disclosed herein may also include selecting antigens that have an increased likelihood of being capable of inducing a HIV-specific immune response in the subject relative to unselected antigens based on the presentation model.

[0196] A method disclosed herein may also include selecting antigens that have a decreased likelihood of being subject to inhibition via central or peripheral tolerance relative to unselected antigens based on the presentation model.

[0197] A method disclosed herein may also include selecting antigens that have a decreased likelihood of being capable of inducing an autoimmune response to normal tissue in the subject relative to unselected antigens based on the presentation model.

[0198] The exome or transcriptome nucleotide sequencing and/or expression data may be obtained by performing sequencing on the tissue.

[0199] The sequencing may be next generation sequencing (NGS) or any massively parallel sequencing approach.

[0200] The set of numerical likelihoods may be further identified by at least MHC-allele interacting features comprising at least one of: the predicted affinity with which the MHC allele and the antigen encoded peptide bind; the predicted stability of the antigen encoded peptide-MHC complex; the sequence and length of the antigen encoded peptide; the probability of presentation of antigen encoded peptides with similar sequence in cells from other individuals expressing the particular MHC allele as assessed by mass-spectrometry proteomics or other means; the expression levels of the particular MHC allele in the subject in question (e.g. as measured by RNA-seq or mass spectrometry); the overall antigen encoded peptide-sequence-independent probability of presentation by the particular MHC allele in other distinct subjects who express the particular MHC allele; the overall antigen encoded peptide-sequence-independent probability of presentation by MHC alleles in the same family of molecules (e.g., HLA-A, HLA-B, HLA-C, HLA-DQ, HLA-DR, HLA-DP) in other distinct subjects.

[0201] The set of numerical likelihoods are further identified by at least MHC-allele noninteracting features comprising at least one of: the C- and N-terminal sequences flanking the antigen encoded peptide within its source protein sequence; the presence of protease cleavage motifs in the antigen encoded peptide, optionally weighted according to the expression of corresponding proteases in tissue (as measured by RNA-seq or mass spectrometry); the turnover rate of the source protein as measured in the appropriate cell type; the length of the source protein, the level of expression of proteasome, immunoproteasome, thymoproteasome, or other proteases (which may be measured by RNA-seq, proteome mass spectrometry, or immunohistochemistry); the expression of the source gene (e.g., env, gag, nef, pol, rev, tat, vif, vir, or viu) of the antigen encoded peptide (e.g., as measured by RNA-seq or mass spectrometry); features describing the properties of the domain of the source protein containing the peptide, for example: secondary or tertiary structure (e.g., alpha helix vs beta sheet); alternative splicing; the probability of presentation of peptides from the source protein of the antigen encoded peptide in question in other distinct subjects; the probability that the peptide will not be detected or over-represented by mass spectrometry due to technical biases; the expression of various gene modules/pathways as measured by RNASeq (which need not contain the source protein of the peptide) that are informative about the state of the immune cells; the probability that the peptide binds to the TAP or the measured or predicted binding affinity of the peptide to the TAP; the expression level of TAP (which may be measured by RNA-seq, proteome mass spectrometry, immunohistochemistry); presence or absence of functional germline polymorphisms, including, but not limited to: in genes encoding the proteins involved in the antigen presentation machinery (e.g., B2M, HLA-A, HLA-B, HLA-C, TAP-1, TAP-2, TAPBP, CALR, CNX, ERP57, HLA-DM, HLA-DMA, HLA-DMB, HLA-DO, HLA-DOA, HLA-DOB, HLA-DP, HLA-DPA1, HLA-DPB1, HLA-DQ, HLA-DQA1, HLA-DQA2, HLA-DQB1, HLA-DQB2, HLA-DR, HLA-DRA, HLA-DRB1, HLA-DRB3, HLA-DRB4, HLA-DRB5 or any of the genes coding for components of the proteasome or immunoproteasome); and HIV subtype (e.g., A1, A2, B, C, D, F1, F2, G, H, J, and K); smoking history.

[0202] A method disclosed herein may also include obtaining an antigen-based vaccine comprising the set of selected antigens or a subset thereof, optionally further comprising administering the antigen-based vaccine to the subject.

[0203] At least one of the antigens in the set of candidate antigens, when in polypeptide form, may include at least one of: a binding affinity with MHC with an IC50 value of less than 1000 nM, for MHC Class I polypeptides a length of 8-15, 8, 9, 10, 11, 12, 13, 14, or 15 amino acids, for MHC Class II polypeptides a length of 6-30, 6, 7, 8, 9, 10, 11, 12, 13, 14, 15, 16, 17, 18, 19, 20, 21, 22, 23, 24, 25, 26, 27, 28, 29, or 30 amino acids, presence of sequence motifs within or near the polypeptide in the parent protein sequence promoting proteasome cleavage, and presence of sequence motifs promoting TAP transport. For MHC Class II, presence of sequence motifs within or near the peptide promoting cleavage by extracellular or lysosomal proteases (e.g., cathepsins) or HLA-DM catalyzed HLA binding.

[0204] A method disclosed herein can also include selecting a subset of antigens, wherein the subset of antigens is selected because each has an increased likelihood that it is presented on the surface of HIV relative to one or more other antigens.

[0205] A method disclosed herein can also include selecting a subset of candidate antigens, In one aspect, the subset of candidate antigens is selected because each has an increased likelihood that it is capable of inducing a HIV-specific immune response in the subject relative to one or more other antigens. In one aspect, the subset of candidate antigens is selected because each has an increased likelihood that it is capable of being presented to naïve T cells by professional antigen presenting cells (APCs) relative to one or more distinct antigens, optionally wherein the APC is a dendritic cell (DC). In one aspect, the subset of candidate antigens is selected because each has a decreased likelihood that it is subject to inhibition via central or peripheral tolerance relative to one or more other antigens. In one aspect, the subset of antigens is selected because each has a decreased likelihood that it is capable of inducing an autoimmune response to normal tissue in the subject relative to one or more other antigens.

[0206] The practice of the methods herein will employ, unless otherwise indicated, conventional methods of protein chemistry, biochemistry, recombinant DNA techniques and pharmacology, within the skill of the art. Such techniques are explained fully in the literature. See, e.g., T. E. Creighton, Proteins: Structures and Molecular Properties (W.H. Freeman and Company, 1993); A. L. Lehninger, Biochemistry (Worth Publishers, Inc., current addition); Sambrook, et al., Molecular Cloning: A Laboratory Manual (2nd Edition, 1989); Methods In Enzymology (S. Colowick and N. Kaplan eds., Academic Press, Inc.); Remington's Pharmaceutical Sciences, 18th Edition (Easton, Pa.: Mack Publishing Company, 1990); Carey and Sundberg Advanced Organic Chemistry 3^{rd} Ed. (Plenum Press) Vols A and B (1992).

### III. Identifying HIV Epitope Sequences

[0207] Also disclosed herein are methods for the identification of HIV epitope sequences. In one aspect, HIV epitope sequences are identified from HIV nucleotide sequences that are sequenced from the HIV genome.

[0208] The HIV nucleotide sequences can be encoded by one of nine HIV genes including env, gag, nef, pol, rev, tat, vif, vpr, and vpu. Sequencing of the HIV genome can be done on a nucleic acid sample obtained from any cell type or tissue. For example, a HIV sample can be obtained from a bodily fluid, e.g., blood, obtained by known techniques (e.g. venipuncture) or saliva.

[0209] HIV nucleotide sequence information can be generated directly from millions of individual molecules of nucleic acids obtained from HIV. Real-time single molecule sequencing-by-synthesis technologies rely on the detection of fluorescent nucleotides as they are incorporated into a nascent strand of DNA that is complementary to the template being sequenced. In one method, oligonucleotides 30-50 bases in length are covalently anchored at the 5′ end to glass cover slips. These anchored strands perform two functions. First, they act as capture sites for the target template strands if the templates are configured with capture tails complementary to the surface-bound oligonucleotides. They also act as primers for the template directed primer extension that forms the basis of the sequence reading. The capture primers function as a fixed position site for sequence determination using multiple cycles of synthesis, detection, and chemical cleavage of the dye-linker to remove the dye. Each cycle consists of adding the polymerase/labeled nucleotide mixture, rinsing, imaging and cleavage of dye. In an alternative method, polymerase is modified with a fluorescent donor molecule and immobilized on a glass slide, while each nucleotide is color-coded with an acceptor fluorescent moiety attached to a gamma-phosphate. The system detects the interaction between a fluorescently-tagged polymerase and a fluorescently modified nucleotide as the nucleotide becomes incorporated into the de novo chain. Other sequencing-by-synthesis technologies also exist.

[0210] Any suitable sequencing-by-synthesis platform can be used to generate HIV nucleic acid sequences. As described above, four major sequencing-by-synthesis platforms are currently available: the Genome Sequencers from Roche/454 Life Sciences, the IG Analyzer from Illumina/Solexa, the SOLiD system from Applied BioSystems, and the Heliscope system from Helicos Biosciences. Sequencing-by-synthesis platforms have also been described by Pacific BioSciences and VisiGen Biotechnologies. In some embodiments, a plurality of nucleic acid molecules being sequenced is bound to a support (e.g., solid support). To immobilize the nucleic acid on a support, a capture sequence/universal priming site can be added at the 3′ and/or 5′ end of the template. The nucleic acids can be bound to the support by hybridizing the capture sequence to a complementary sequence covalently attached to the support. The capture sequence (also referred to as a universal capture sequence) is a nucleic acid sequence complementary to a sequence attached to a support that may dually serve as a universal primer.

[0211] As an alternative to a capture sequence, a member of a coupling pair (such as, e.g., antibody/antigen, receptor/ligand, or the avidin-biotin pair as described in, e.g., US Patent Application No. 2006/0252077) can be linked to each fragment to be captured on a surface coated with a respective second member of that coupling pair.

[0212] Subsequent to the capture, the sequence can be analyzed, for example, by single molecule detection/sequencing, e.g., as described in the Examples and in U.S. Pat. No. 7,283,337, including template-dependent sequencing-by-synthesis. In sequencing-by-synthesis, the surface-bound molecule is exposed to a plurality of labeled nucleotide triphosphates in the presence of polymerase. The sequence of the template is determined by the order of labeled nucleotides incorporated into the 3′ end of the growing chain. This can be done in real time or can be done in a step-and-repeat mode. For real-time analysis, different optical labels to each nucleotide can be incorporated and multiple lasers can be utilized for stimulation of incorporated nucleotides.

[0213] Sequencing can also include other massively parallel sequencing or next generation sequencing (NGS) techniques and platforms. Additional examples of massively parallel sequencing techniques and platforms are the Illumina HiSeq or MiSeq, Thermo PGM or Proton, the Pac Bio RS II or Sequel, Qiagen's Gene Reader, and the Oxford Nanopore MinION. Additional similar current massively parallel sequencing technologies can be used, as well as future generations of these technologies.

[0214] In some aspects, HIV nucleotide sequences of different HIV categories, types, and subtypes are obtained from available open-source databases (e.g., the Los Alamos National Lab's HIV database).

[0215] Having obtained the HIV nucleotide sequences, HIV epitope sequences are extracted from the HIV nucleotide sequences. As one example, extraction of the HIV epitope sequences can be conducted by employing a sliding window, where length of the sliding window corresponds to the length of a HIV epitope sequence. To illustrate the extraction process, the sliding window is applied to a first HIV nucleotide sequence. The set of nucleotide base sequences in the sliding window is extracted as a first HIV epitope sequence. The sliding window is shifted by one nucleotide base and the next set of nucleotide base sequences in the shifted sliding window is a second HIV epitope sequence. This process repeats until the sliding window has been applied across all HIV nucleotide sequences.

[0216] In one aspect, each HIV epitope sequence is 18, 19, 20, 21, 22, 23, 24, 25, 26, 27, 28, 29, 30, 31, 32, 33, 34, 35, 36, 37, 38, or 39 nucleotide bases in length (e.g., 6-13 amino acid sequences in length). In one aspect, each HIV epitope sequence is 24, 25, 26, 27, 28, 29, 30, 31, 32, or 33 nucleotide bases in length (e.g., 8-11 amino acid sequences in length).

[0217] Additionally, a variety of methods are available for detecting the presence of a particular mutation in an HIV sequence. Advancements in this field have provided accurate, easy, and inexpensive large-scale SNP genotyping. For example, several techniques have been described including dynamic allele-specific hybridization (DASH), microplate array diagonal gel electrophoresis (MADGE), pyrosequencing, oligonucleotide-specific ligation, the TaqMan system as well as various DNA “chip” technologies such as the Affymetrix SNP chips. These methods utilize amplification of a target genetic region, typically by PCR. Still other methods, based on the generation of small signal molecules by invasive cleavage followed by mass spectrometry or immobilized padlock probes and rolling-circle amplification. Several of the methods known in the art for detecting specific mutations are summarized below.

[0218] PCR based detection means can include multiplex amplification of a plurality of markers simultaneously. For example, it is well known in the art to select PCR primers to generate PCR products that do not overlap in size and can be analyzed simultaneously. Alternatively, it is possible to amplify different markers with primers that are differentially labeled and thus can each be differentially detected. Of course, hybridization based detection means allow the differential detection of multiple PCR products in a sample. Other techniques are known in the art to allow multiplex analyses of a plurality of markers.

[0219] Several methods have been developed to facilitate analysis of single nucleotide polymorphisms in genomic DNA or cellular RNA. For example, a single base polymorphism can be detected by using a specialized exonuclease-resistant nucleotide, as disclosed, e.g., in Mundy, C. R. (U.S. Pat. No. 4,656,127). According to the method, a primer complementary to the allelic sequence immediately 3′ to the polymorphic site is permitted to hybridize to a target molecule. If the polymorphic site on the target molecule contains a nucleotide that is complementary to the particular exonuclease-resistant nucleotide derivative present, then that derivative will be incorporated onto the end of the hybridized primer. Such incorporation renders the primer resistant to exonuclease, and thereby permits its detection. Since the identity of the exonuclease-resistant derivative of the sample is known, a finding that the primer has become resistant to exonucleases reveals that the nucleotide(s) present in the polymorphic site of the target molecule is complementary to that of the nucleotide derivative used in the reaction. This method has the advantage that it does not require the determination of large amounts of extraneous sequence data.

[0220] A solution-based method can be used for determining the identity of a nucleotide of a polymorphic site. Cohen, D. et al. (French Patent 2,650,840; PCT Appln. No. WO91/02087). As in the Mundy method of U.S. Pat. No. 4,656,127, a primer is employed that is complementary to allelic sequences immediately 3′ to a polymorphic site. The method determines the identity of the nucleotide of that site using labeled dideoxynucleotide derivatives, which, if complementary to the nucleotide of the polymorphic site will become incorporated onto the terminus of the primer.

[0221] An alternative method, known as Genetic Bit Analysis or GBA is described by Goelet, P. et al. (PCT Appln. No. 92/15712). The method of Goelet, P. et al. uses mixtures of labeled terminators and a primer that is complementary to the sequence 3′ to a polymorphic site. The labeled terminator that is incorporated is thus determined by, and complementary to, the nucleotide present in the polymorphic site of the target molecule being evaluated. In contrast to the method of Cohen et al. (French Patent 2,650,840; PCT Appln. No. WO91/02087) the method of Goelet, P. et al. can be a heterogeneous phase assay, in which the primer or the target molecule is immobilized to a solid phase.

### IV. Antigens

[0222] Antigens can include nucleotides or polypeptides. For example, an antigen can be an RNA sequence that encodes for a polypeptide sequence. Antigens useful in vaccines can therefore include nucleotide sequences or polypeptide sequences. In one aspect, antigen peptides can be described in the context of their coding sequence where an antigen includes the nucleotide sequence (e.g., DNA or RNA) that codes for the related polypeptide sequence. In one aspect, antigens bind to MHC proteins, and therefore, can be presented by antigen presenting cells such that epitope sequences on the antigens can bind to T cell receptors. In some scenarios, antigens bind to MHC class I proteins. In some scenarios, antigens bind to MHC class II proteins. In some scenarios, antigens bind to both MHC class I and class II proteins.

[0223] Antigens may be derived from either of the two major categories of HIV (HIV-1 or HIV-2). Additionally, antigens may be derived from the different types of HIV-1 including Group N, Group O, or Group P. Additionally, antigens derived from Group N may be from one of subtypes A1, A2, B, C, D, F1, F2, G, H, J, or K.

[0224] Antigens (and corresponding epitope sequences) derived from HIV may differ depending on the category, type, or subtype of HIV. For example, epitope sequences of HIV antigens derived from different HIV subtypes are shown in the second column of Tables 35-45. Additionally, there are a number of epitope sequences that are invariant across the HIV subtypes. Therefore, certain epitope sequences are included in more than one of Tables 35-45.

[0225] One or more polypeptides encoded by an antigen nucleotide sequence can comprise at least one of: a binding affinity with MHC with an IC50 value of less than 1000 nM, for MHC Class I peptides a length of 8-15, 8, 9, 10, 11, 12, 13, 14, or 15 amino acids, presence of sequence motifs within or near the peptide promoting proteasome cleavage, and presence or sequence motifs promoting TAP transport. For MHC Class II peptides a length 6-30, 6, 7, 8, 9, 10, 11, 12, 13, 14, 15, 16, 17, 18, 19, 20, 21, 22, 23, 24, 25, 26, 27, 28, 29, or 30 amino acids, presence of sequence motifs within or near the peptide promoting cleavage by extracellular or lysosomal proteases (e.g., cathepsins) or HLA-DM catalyzed HLA binding.

[0226] One or more antigens can be presented on HIV.

[0227] One or more antigens can be immunogenic in a subject, e.g., capable of eliciting a T cell response or a B cell response in the subject. Optionally, the subject may have HIV.

[0228] One or more antigens that induce an autoimmune response in a subject can be excluded from consideration in the context of vaccine generation for a subject that optionally has HIV.

[0229] The size of at least one antigenic peptide molecule can comprise, but is not limited to, about 5, about 6, about 7, about 8, about 9, about 10, about 11, about 12, about 13, about 14, about 15, about 16, about 17, about 18, about 19, about 20, about 21, about 22, about 23, about 24, about 25, about 26, about 27, about 28, about 29, about 30, about 31, about 32, about 33, about 34, about 35, about 36, about 37, about 38, about 39, about 40, about 41, about 42, about 43, about 44, about 45, about 46, about 47, about 48, about 49, about 50, about 60, about 70, about 80, about 90, about 100, about 110, about 120 or greater amino molecule residues, and any range derivable therein. In specific embodiments the antigenic peptide molecules are equal to or less than 50 amino acids.

[0230] Antigenic peptides and polypeptides can be: for MHC Class I, 15 residues or less in length and usually consist of between about 8 and about 11 residues, particularly 9 or 10 residues; for MHC Class II, 6-30 residues, inclusive.

[0231] If desirable, a longer peptide can be designed in several ways. In one case, when presentation likelihoods of peptides on HLA alleles are predicted or known, a longer peptide could consist of either: (1) individual presented peptides with an extensions of 2-5 amino acids toward the N- and C-terminus of each corresponding gene product; (2) a concatenation of some or all of the presented peptides with extended sequences for each. Use of a longer peptide allows endogenous processing by patient cells and may lead to more effective antigen presentation and induction of T cell responses.

[0232] Antigenic peptides and polypeptides can be presented on a HLA protein. In some aspects, an antigenic peptide or polypeptide can have an IC50 of at least less than 5000 nM, at least less than 1000 nM, at least less than 500 nM, at least less than 250 nM, at least less than 200 nM, at least less than 150 nM, at least less than 100 nM, at least less than 50 nM or less.

[0233] In some aspects, antigenic peptides and polypeptides do not induce an autoimmune response and/or invoke immunological tolerance when administered to a subject.

[0234] Antigenic peptides and polypeptides having a desired activity or property can be modified to provide certain desired attributes, e.g., improved pharmacological characteristics, while increasing or at least retaining substantially all of the biological activity of the unmodified peptide to bind the desired MHC molecule and activate the appropriate T cell. For instance, antigenic peptide and polypeptides can be subject to various changes, such as substitutions, either conservative or non-conservative, where such changes might provide for certain advantages in their use, such as improved MHC binding, stability or presentation. By conservative substitutions is meant replacing an amino acid residue with another which is biologically and/or chemically similar, e.g., one hydrophobic residue for another, or one polar residue for another. The substitutions include combinations such as Gly, Ala; Val, Ile, Leu, Met; Asp, Glu; Asn, Gln; Ser, Thr; Lys, Arg; and Phe, Tyr. The effect of single amino acid substitutions may also be probed using D-amino acids. Such modifications can be made using well known peptide synthesis procedures, as described in e.g., Merrifield, Science 232:341-347 (1986), Barany & Merrifield, The Peptides, Gross & Meienhofer, eds. (N.Y., Academic Press), pp. 1-284 (1979); and Stewart & Young, Solid Phase Peptide Synthesis, (Rockford, Ill., Pierce), 2d Ed. (1984).

[0235] Modifications of peptides and polypeptides with various amino acid mimetics or unnatural amino acids can be particularly useful in increasing the stability of the peptide and polypeptide in vivo. Stability can be assayed in a number of ways. For instance, peptidases and various biological media, such as human plasma and serum, have been used to test stability. See, e.g., Verhoef et al., Eur. J. Drug Metab Pharmacokin. 11:291-302 (1986). Half-life of the peptides can be conveniently determined using a 25% human serum (v/v) assay. The protocol is generally as follows. Pooled human serum (Type AB, non-heat inactivated) is delipidated by centrifugation before use. The serum is then diluted to 25% with RPMI tissue culture media and used to test peptide stability. At predetermined time intervals a small amount of reaction solution is removed and added to either 6% aqueous trichloracetic acid or ethanol. The cloudy reaction sample is cooled (4 degrees C.) for 15 minutes and then spun to pellet the precipitated serum proteins. The presence of the peptides is then determined by reversed-phase HPLC using stability-specific chromatography conditions.

[0236] The peptides and polypeptides can be modified to provide desired attributes other than improved serum half-life. For instance, the ability of the peptides to induce CTL activity can be enhanced by linkage to a sequence which contains at least one epitope that is capable of inducing a T helper cell response. Immunogenic peptides/T helper conjugates can be linked by a spacer molecule. The spacer is typically comprised of relatively small, neutral molecules, such as amino acids or amino acid mimetics, which are substantially uncharged under physiological conditions. The spacers are typically selected from, e.g., Ala, Gly, or other neutral spacers of nonpolar amino acids or neutral polar amino acids. It will be understood that the optionally present spacer need not be comprised of the same residues and thus can be a hetero- or homo-oligomer. When present, the spacer will usually be at least one or two residues, more usually three to six residues. Alternatively, the peptide can be linked to the T helper peptide without a spacer.

[0237] An antigenic peptide can be linked to the T helper peptide either directly or via a spacer either at the amino or carboxy terminus of the peptide. The amino terminus of either the antigenic peptide or the T helper peptide can be acylated. Exemplary T helper peptides include tetanus toxoid 830-843, influenza 307-319, malaria circumsporozoite 382-398 and 378-389.

[0238] Proteins or peptides can be made by any technique known to those of skill in the art, including the expression of proteins, polypeptides or peptides through standard molecular biological techniques, the isolation of proteins or peptides from natural sources, or the chemical synthesis of proteins or peptides. The nucleotide and protein, polypeptide and peptide sequences corresponding to various genes have been previously disclosed, and can be found at computerized databases known to those of ordinary skill in the art. One such database is the National Center for Biotechnology Information's Genbank and GenPept databases located at the National Institutes of Health website. The coding regions for known genes can be amplified and/or expressed using the techniques disclosed herein or as would be known to those of ordinary skill in the art. Alternatively, various commercial preparations of proteins, polypeptides and peptides are known to those of skill in the art.

[0239] In a further aspect an antigen includes a nucleic acid (e.g. polynucleotide) that encodes an antigenic peptide or portion thereof. The polynucleotide can be, e.g., DNA, cDNA, PNA, CNA, RNA (e.g., mRNA), either single- and/or double-stranded, or native or stabilized forms of polynucleotides, such as, e.g., polynucleotides with a phosphorothiate backbone, or combinations thereof and it may or may not contain introns. A still further aspect provides an expression vector capable of expressing a polypeptide or portion thereof. Expression vectors for different cell types are well known in the art and can be selected without undue experimentation. Generally, DNA is inserted into an expression vector, such as a plasmid, in proper orientation and correct reading frame for expression. If necessary, DNA can be linked to the appropriate transcriptional and translational regulatory control nucleotide sequences recognized by the desired host, although such controls are generally available in the expression vector. The vector is then introduced into the host through standard techniques. Guidance can be found e.g. in Sambrook et al. (1989) Molecular Cloning, A Laboratory Manual, Cold Spring Harbor Laboratory, Cold Spring Harbor, N.Y.

### V. Vaccine Compositions

[0240] Also disclosed herein is an immunogenic composition, e.g., a vaccine composition, capable of raising a specific immune response, e.g., a HIV-specific immune response. Vaccine compositions typically comprise one or more antigens selected using a method described herein.

[0241] In one aspect, the vaccine composition includes one antigen with an epitope sequence selected from any one of SEQ ID Nos: 325-22349. In other aspects, the vaccine composition includes a plurality of antigens with epitope sequences selected from any one of SEQ ID Nos: 325-22349. In such scenarios, at least two of the plurality of antigens can be distinct peptides. By distinct polypeptides is meant that the peptides vary by length, amino acid sequence, or both.

[0242] In some aspects, the vaccine composition includes one or more epitope encoding nucleic acid sequences. In one aspect, the epitope encoding nucleic acid sequences are MHC class I epitope encoding nucleic acid sequences. Each epitope encoding nucleic acid sequence can encode for an antigen with epitope sequences selected from any one of SEQ ID Nos: 325-22349.

[0243] In some aspects, a vaccine composition can contain between 1 and 30 peptides, 2, 3, 4, 5, 6, 7, 8, 9, 10, 11, 12, 13, 14, 15, 16, 17, 18, 19, 20, 21, 22, 23, 24, 25, 26, 27, 28, 29, or 30 different peptides, 6, 7, 8, 9, 10 11, 12, 13, or 14 different peptides, or 12, 13 or 14 different peptides. In various embodiments, the peptides included in the vaccine composition include an epitope sequence selected from any one of SEQ ID Nos: 325-22349 shown in Tables 35-45. Peptides can include post-translational modifications. A vaccine can contain between 1 and 100 or more nucleotide sequences, 2, 3, 4, 5, 6, 7, 8, 9, 10, 11, 12, 13, 14, 15, 16, 17, 18, 19, 20, 21, 22, 23, 24, 25, 26, 27, 28, 29, 30, 31, 32, 33, 34, 35, 36, 37, 38, 39, 40, 41, 42, 43, 44, 45, 46, 47, 48, 49, 50, 51, 52, 53, 54, 55, 56, 57, 58, 59, 60, 61, 62, 63, 64, 65, 66, 67, 68, 69, 70, 71, 72, 73, 74, 75, 76, 77, 78, 79, 80, 81, 82, 83, 84, 85, 86, 87, 88, 89, 90, 91, 92, 93, 94, 95, 96, 97, 98, 99, 100 or more different nucleotide sequences, 6, 7, 8, 9, 10 11, 12, 13, or 14 different nucleotide sequences, or 12, 13 or 14 different nucleotide sequences. A vaccine can contain between 1 and 30 antigen sequences, 2, 3, 4, 5, 6, 7, 8, 9, 10, 11, 12, 13, 14, 15, 16, 17, 18, 19, 20, 21, 22, 23, 24, 25, 26, 27, 28, 29, 30, 31, 32, 33, 34, 35, 36, 37, 38, 39, 40, 41, 42, 43, 44, 45, 46, 47, 48, 49, 50, 51, 52, 53, 54, 55, 56, 57, 58, 59, 60, 61, 62, 63, 64, 65, 66, 67, 68, 69, 70, 71, 72, 73, 74, 75, 76, 77, 78, 79, 80, 81, 82, 83, 84, 85, 86, 87, 88, 89, 90, 91, 92, 93, 94, 95, 96, 97, 98, 99, 100 or more different antigen sequences, 6, 7, 8, 9, 10 11, 12, 13, or 14 different antigen sequences, or 12, 13 or 14 different antigen sequences. A vaccine can contain between 1 and 30 antigen-encoding sequences, 2, 3, 4, 5, 6, 7, 8, 9, 10, 11, 12, 13, 14, 15, 16, 17, 18, 19, 20, 21, 22, 23, 24, 25, 26, 27, 28, 29, 30, 31, 32, 33, 34, 35, 36, 37, 38, 39, 40, 41, 42, 43, 44, 45, 46, 47, 48, 49, 50, 51, 52, 53, 54, 55, 56, 57, 58, 59, 60, 61, 62, 63, 64, 65, 66, 67, 68, 69, 70, 71, 72, 73, 74, 75, 76, 77, 78, 79, 80, 81, 82, 83, 84, 85, 86, 87, 88, 89, 90, 91, 92, 93, 94, 95, 96, 97, 98, 99, 100 or more different antigen-encoding sequences, 6, 7, 8, 9, 10 11, 12, 13, or 14 different antigen-encoding sequences, or 12, 13 or 14 different antigen-encoding sequences. In various embodiments, the antigen-encoding sequences encode for antigens that comprise epitope sequences selected from any one of SEQ ID Nos: 325-22349 shown in Tables 35-45.

[0244] Further details of the selection of candidate epitope sequences or antigen-encoding nucleic acid sequences that are to be included in the vaccine composition are described below.

[0245] In one embodiment, different peptides and/or polypeptides or nucleotide sequences encoding them are selected so that the peptides and/or polypeptides capable of associating with different MHC molecules, such as different MHC class I molecules and/or different MHC class II molecules. In some aspects, one vaccine composition comprises coding sequence for peptides and/or polypeptides capable of associating with the most frequently occurring MHC class I molecules and/or different MHC class II molecules. Hence, vaccine compositions can comprise different fragments capable of associating with at least 2 preferred, at least 3 preferred, or at least 4 preferred MHC class I molecules and/or different MHC class II molecules.

[0246] The vaccine composition can be capable of raising a specific cytotoxic T-cells response and/or a specific helper T-cell response.

[0247] Antigens can also be included in viral vector-based vaccine platforms, such as vaccinia, fowlpox, self-replicating alphavirus, marabavirus, adenovirus (See, e.g., Tatsis et al., Adenoviruses, Molecular Therapy (2004) 10, 616-629), or lentivirus, including but not limited to second, third or hybrid second/third generation lentivirus and recombinant lentivirus of any generation designed to target specific cell types or receptors (See, e.g., Hu et al., Immunization Delivered by Lentiviral Vectors for Cancer and Infectious Diseases, Immunol Rev. (2011) 239(1): 45-61, Sakuma et al., Lentiviral vectors: basic to translational, Biochem J. (2012) 443(3):603-18, Cooper et al., Rescue of splicing-mediated intron loss maximizes expression in lentiviral vectors containing the human ubiquitin C promoter, Nucl. Acids Res. (2015) 43 (1): 682-690, Zufferey et al., Self-Inactivating Lentivirus Vector for Safe and Efficient In Vivo Gene Delivery, J. Virol. (1998) 72 (12): 9873-9880). Dependent on the packaging capacity of the above mentioned viral vector-based vaccine platforms, this approach can deliver one or more nucleotide sequences that encode one or more antigen peptides. The sequences may be flanked by non-mutated sequences, may be separated by linkers or may be preceded with one or more sequences targeting a subcellular compartment (See, e.g., Gros et al., Prospective identification of antigen-specific lymphocytes in the peripheral blood of melanoma patients, Nat Med. (2016) 22 (4):433-8, Stronen et al., Targeting of cancer antigens with donor-derived T cell receptor repertoires, Science. (2016) 352 (6291):1337-41, Lu et al., Efficient identification of mutated cancer antigens recognized by T cells associated with durable tumor regressions, Clin Cancer Res. (2014) 20(13):3401-10). Upon introduction into a host, infected cells express the antigens, and thereby elicit a host immune (e.g., CTL) response against the peptide(s). Vaccinia vectors and methods useful in immunization protocols are described in, e.g., U.S. Pat. No. 4,722,848. Another vector is BCG (Bacille Calmette Guerin). BCG vectors are described in Stover et al. (Nature 351:456-460 (1991)). A wide variety of other vaccine vectors useful for therapeutic administration or immunization of antigens, e.g., Salmonella typhi vectors, and the like will be apparent to those skilled in the art from the description herein.

[0248] V.A. Antigen Vaccine Sequence Selection

[0249] Selected candidate antigens with epitope sequences are included in antigen-based vaccines. In various embodiments, epitope sequences for candidate antigens are selected using a presentation model, as is described in further detail below in reference to the presentation model. In various embodiments, epitope sequences for candidate antigens are selected from a Los Alamos National Lab's HIV database, such as the Los Alamos Best-defined (“A-list”) CTL epitopes,¹⁰⁸ which is incorporated by reference in its entirety. In various embodiments, epitope sequences for candidate antigens are selected using a presentation model that is deployed to evaluate epitope sequences from the Los Alamos Best-defined (“A-list”) CTL epitopes.¹⁰⁸ Although the subsequent description refers to inclusion of antigenic peptides in the antigen-based vaccine, one skilled in the art may understand that the subsequent description can be applied for the inclusion of antigen-encoding nucleic acid sequences in an antigen cassette, where the antigen-encoding nucleic acid sequences encode for these antigenic peptides. Further details of the antigen cassette are discussed below.

[0250] In one aspect, each antigen-based vaccine may be developed for patients with a haplotype that includes one or more particular HLA alleles. Therefore, a patient with a particular HLA can be treated or vaccinated with an antigen-based vaccine that is developed specifically for the particular HLA allele. In some aspects, each antigen-based vaccine is developed for patients with a haplotype that includes particular combinations of HLA alleles. In one embodiment, the particular combination of HLA alleles is known to be expressed by a population of individuals of a particular ancestral descent. Thus, a patient who is of that ancestral descent is also likely to express the combination of HLA alleles and therefore, can be a candidate for a vaccine that includes antigens that are likely to be presented by the expressed combination of HLA alleles. In some aspects, an antigen-based vaccine can be developed with a sufficient number of antigens such that a patient of any ancestral descent is likely to present a subset of the antigens included in the antigen-based vaccine. In other words, with a sufficient number of antigens in the antigen-based vaccine, such an antigen-based vaccine can be efficacious for any patient.

[0251] As an example, antigen-based vaccines can be developed for any one or more of the following HLA alleles: A0101, A0201, A0203, A0204, A0205, A0206, A0207, A0208, A0301, A0302, A1101, A2301, A2402, A2501, A2601, A2602, A2603, A2901, A2902, A3001, A3002, A3004, A3101, A3201, A3301, A3303, A6801, A6802, B0702, B0801, B1301, B1302, B1401, B1402, B1501, B1502, B1503, B1510, B1513, B1801, B2702, B2705, B3501, B3502, B3503, B3508, B3512, B3701, B3801, B3901, B3906, B4001, B4002, B4006, B4102, B4402, B4403, B4405, B4601, B4801, B4901, B5001, B5101, B5401, B5501, B5502, B5601, B5701, B5801, C0102, C0202, C0302, C0303, C0304, C0401, C0501, C0602, C0701, C0702, C0704, C0801, C0802, C0803, C1203, C1402, C1403, C1502, C1601, C1602, C1604, C1701. Antigens for inclusion in the antigen-based vaccine can be selected by reference to Tables 35-45 (e.g., any one of SEQ ID Nos: 325-22349), where each relevant epitope sequence of an antigen for inclusion is selected by identifying rows that list the particular HLA allele that the antigen-based vaccine is developed for. Notably, certain epitope sequences are invariant across multiple HIV subtypes and therefore, appear across multiple tables in Tables 35-45. In some aspects, antigens for inclusion in the antigen-based vaccine can each include epitope sequences that appear in more than one of Tables 35-45. Additionally, antigens for inclusion in the antigen-based vaccine can be selected from a list of validated HIV epitopes. Examples of validated HIV epitopes can be found in the journal article “Best-Characterized HIV-1 CTL Epitopes: The 2013 Update” (which refers to validated HIV epitopes as “best defined HIV CTL epitopes in Table I-A-1), which is hereby incorporated by reference in its entirety.¹⁰⁵ Additional examples of validated HIV epitopes can be found in the journal article “The 2019 Optimal HIV CTL epitopes update: Growing diversity in epitope length and HLA restriction” which is hereby incorporated by reference in its entirety.¹⁰⁹

[0252] For example, referring to the first row of Table 35, if an antigen-based vaccine is developed for the A2501 HLA allele, then the epitope sequence “DTIAIAVAGW (SEQ ID NO: 756)” can be selected for inclusion. Such an antigen-based vaccine can include additional epitope sequences from Tables 35-45 that share a row with the A2501 HLA allele. For example, referring to Table 36, the epitope sequence “DTIAVAVAEW (SEQ ID NO: 2606)” can additionally be selected for inclusion in the antigen-based vaccine.

[0253] In some aspects, antigen-based vaccines can be developed for combinations of the aforementioned HLA alleles. For example, if certain combinations of HLA alleles are known to be expressed together by subjects, then an antigen-based vaccine can be developed for the combination of expressed HLA alleles. In some aspects, 1, 2, 3, 4, 5, 6, 7, 8, 9, or 10 HLA alleles are included in the combination of HLA alleles. Antigens for inclusion in the antigen-based vaccine can be selected by reference to Tables 35-45 (e.g., any one of SEQ ID Nos: 325-22349), where each relevant epitope sequence of an antigen for inclusion is selected by identifying rows that list any one HLA allele in the combination of HLA alleles.

[0254] In one aspect, each antigen-based vaccine may be developed for patients that are infected, exposed, or susceptible to infection by a particular category, type, or subtype of HIV. Therefore, a patient can be treated or vaccinated with an antigen-based vaccine that is developed specifically for the particular category, type, or subtype of HIV that the patient is infected, exposed, or susceptible to infection to.

[0255] For example, antigen-based vaccines can be developed for any one of the categories (e.g., HIV-1 or HIV-2), types (Group N, Group O, or Group P), or subtypes (A1, A2, B, C, D, F1, F2, G, H, J, or K) of HIV. Antigens for inclusion in the antigen-based vaccine can be selected by reference to Tables 35-45 (e.g., any one of SEQ ID Nos: 325-22349).

[0256] In various embodiments, an antigen-based vaccine developed for HIV subtype A1 can include one or more antigens with HIV epitope sequences shown in Table 35 (e.g., any one of SEQ ID NOs: 325-2165).

[0257] In various embodiments, an antigen-based vaccine developed for HIV subtype A2 can include one or more antigens with HIV epitope sequences shown in Table 36 (e.g., any one of SEQ ID NOs: 2166-4106).

[0258] In various embodiments, an antigen-based vaccine developed for HIV subtype B can include one or more antigens with HIV epitope sequences shown in Table 37 (e.g., any one of SEQ ID NOs: 2166-4106).

[0259] In various embodiments, an antigen-based vaccine developed for HIV subtype C can include one or more antigens with HIV epitope sequences shown in Table 38 (e.g., any one of SEQ ID NOs: 6242-8389).

[0260] In various embodiments, an antigen-based vaccine developed for HIV subtype D can include one or more antigens with HIV epitope sequences shown in Table 39 (e.g., any one of SEQ ID NOs: 8930-10626).

[0261] In various embodiments, an antigen-based vaccine developed for HIV subtype F1 can include one or more antigens with HIV epitope sequences shown in Table 40 (e.g., any one of SEQ ID NOs: 10627-12810).

[0262] In various embodiments, an antigen-based vaccine developed for HIV subtype F2 can include one or more antigens with HIV epitope sequences shown in Table 41 (e.g., any one of SEQ ID NOs: 12811-15079).

[0263] In various embodiments, an antigen-based vaccine developed for HIV subtype G can include one or more antigens with HIV epitope sequences shown in Table 42 (e.g., any one of SEQ ID NOs: 15080-17174).

[0264] In various embodiments, an antigen-based vaccine developed for HIV subtype H can include one or more antigens with HIV epitope sequences shown in Table 43 (e.g., any one of SEQ ID NOs: 17175-19388).

[0265] In various embodiments, an antigen-based vaccine developed for HIV subtype J can include one or more antigens with HIV epitope sequences shown in Table 44 (e.g., any one of SEQ ID NOs: 19389-21003).

[0266] In various embodiments, an antigen-based vaccine developed for HIV subtype K can include one or more antigens with HIV epitope sequences shown in Table 45 (e.g., any one of SEQ ID NOs: 21004-22349).

[0267] In one aspect, each antigen-based vaccine may be developed for patients taking into consideration both 1) the patient's HLA type that includes the expression of one or more particular HLA alleles and 2) the particular category, type, or subtype of HIV that the patient is infected, exposed to, or susceptible to exposure to. As an example, a patient that expresses a particular HLA allele and who is exposed to or susceptible to exposure to a subtype of HIV can be treated or vaccinated with an antigen-based vaccine that is developed specifically for the subtype of HIV and the patient's expressed HLA allele. Antigens for inclusion in the antigen-based vaccine can be selected by reference to one of Tables 35-45 (e.g., any one of SEQ ID Nos: 325-22349), where each relevant epitope sequence of an antigen for inclusion is selected by identifying rows in that Table that list a particular HLA allele.

[0268] For example, an antigen-based vaccine can be developed for HIV subtype A1 and for patients with the B4102 HLA allele. Referring to Table 35, a first antigen with epitope sequence “AEVVQKVTM (SEQ ID NO: 1594)” and a second antigen with epitope sequence “AEVVQKVVM (SEQ ID NO: 1595)” can be selected for inclusion in the antigen-based vaccine. Such an antigen-based vaccine can include additional HIV epitope sequences from Table 35 (e.g., any of SEQ ID NOs: 1594-1642) that share a row with the B4102 HLA allele. As another example, an antigen-based vaccine can be developed for HIV subtype A2 and for patients with the B4001 HLA allele. Referring to Table 36, a first antigen with epitope sequence “TESNDTITL (SEQ ID NO: 3424)” and a second antigen with epitope sequence “AEDPEREVL (SEQ ID NO: 3425)” can be selected for inclusion in the antigen-based vaccine. Such an antigen-based vaccine can include additional HIV epitope sequences from Table 36 that share a row with the B4001 HLA allele (e.g., any of SEQ ID NOs: 3424-3458).

[0269] In particular embodiments, one or more HIV epitope sequences or one or more HIV epitope sequences encoded by a HIV epitope encoding sequence that are selected for inclusion in an antigen-based vaccine can include any of SEQ ID NOs: 325-328, 2166-2178, 4107-4113, 6242-6248, 8390-8397, 10627-10633, 12811-12820, 15080-15086, 17175-17184, 19389-19396, or 21004-21009.

[0270] In particular embodiments, one or more HIV epitope sequences or one or more HIV epitope sequences encoded by HIV epitope encoding sequences that are selected for inclusion in an antigen-based vaccine can include any of SEQ ID NOs: 329-353, 2179-2200, 4114-4134, 6249-6270, 8398-8415, 10634-10654, 12821-12850, 15087-15107, 17185-17213, 19397-19420, or 21010-21031.

[0271] In particular embodiments, one or more HIV epitope sequences or one or more HIV epitope sequences encoded by HIV epitope encoding sequences that are selected for inclusion in an antigen-based vaccine can include any of SEQ ID NOs: 354-403, 2201-2248, 4135-4177, 6271-6315, 8416-8474, 10655-10700, 12851-12912, 15108-15155, 17214-17264, 19421-19463, or 21032-21064.

[0272] In particular embodiments, one or more HIV epitope sequences or one or more HIV epitope sequences encoded by HIV epitope encoding sequences that are selected for inclusion in an antigen-based vaccine can include any of SEQ ID NOs: 404-469, 2249-2326, 4178-4261, 6316-6400, 8475-8558, 10701-10768, 12913-12994, 15156-15214, 17265-17349, 19464-19518, 21065-21117.

[0273] In particular embodiments, one or more HIV epitope sequences or one or more HIV epitope sequences encoded by HIV epitope encoding sequences that are selected for inclusion in an antigen-based vaccine can include any of 470-526, 2327-2379, 6401-6450, 8559-8626, 10769-10822, 12995-13056, 15215-15263, 17350-17405, 19519-19570, and 21118-21161.

[0274] In particular embodiments, one or more HIV epitope sequences or one or more HIV epitope sequences encoded by HIV epitope encoding sequences that are selected for inclusion in an antigen-based vaccine can include any of SEQ ID NOs: 527-565, 2380-2421, 6451-6492, 8627-8671, 10823-10867, 10357-13098, 15264-15292, 17406-17448, 19571-19604, and 21162-21192.

[0275] In particular embodiments, one or more HIV epitope sequences or one or more HIV epitope sequences encoded by HIV epitope encoding sequences that are selected for inclusion in an antigen-based vaccine can include any of 566-587, 2422-2438, 6493-6509, 8672-8689, 10868-10887, 13099-13125, 15293-15307, 17449-17473, 19605-19618, and 21193-21205.

[0276] In particular embodiments, one or more HIV epitope sequences or one or more HIV epitope sequences encoded by HIV epitope encoding sequences that are selected for inclusion in an antigen-based vaccine can include any of SEQ ID NOs: 588-630, 2439-2477, 6510-6548, 8690-8733, 10888-10931, 13126-13179, 15308-15336, 17474-17512, 19619-19649, and 21206-21233.

[0277] In particular embodiments, one or more HIV epitope sequences or one or more HIV epitope sequences encoded by HIV epitope encoding sequences that are selected for inclusion in an antigen-based vaccine can include any of 631-650, 2478-2501, 6549-6573, 8734-8761, 10932-10969, 13180-13224, 15337-15354, 17513-17543, 19650-19665, and 21234-21247.

[0278] In particular embodiments, one or more HIV epitope sequences or one or more HIV epitope sequences encoded by HIV epitope encoding sequences that are selected for inclusion in an antigen-based vaccine can include any of 651-682, 2502-2541, 6574-6618, 8762-8809, 10970-11026, 13225-13290, 15355-15396, 17544-17603, 19666-19697, and 21248-21274.

[0279] In particular embodiments, one or more HIV epitope sequences or one or more HIV epitope sequences encoded by HIV epitope encoding sequences that are selected for inclusion in an antigen-based vaccine can include any of SEQ ID NOs: 683-726, 2542-2583, 6619-6668, 8810-8862, 11027-11087, 13291-13370, 15397-15451, 17604-17652, 19698-19726, and 21275-21309.

[0280] In particular embodiments, one or more HIV epitope sequences or one or more HIV epitope sequences encoded by HIV epitope encoding sequences that are selected for inclusion in an antigen-based vaccine can include any of SEQ ID NOs: 727-741, 2584-2593, 6669-6685, 8863-8871, 11088-11103, 13371-13385, 15452-15465, 17653-17667, 19727-19738, and 21310-21317. Such an antigen-based vaccine can be useful for treating a patient who expresses the HLA allele A2301.

[0281] In particular embodiments, one or more HIV epitope sequences or one or more HIV epitope sequences encoded by HIV epitope encoding sequences that are selected for inclusion in an antigen-based vaccine can include any of SEQ ID NOs: 742-755, 2594-2605, 6686-6698, 8872-8885, 11104-11116, 13386-13397, 15466-15479, 17668-17679, 19739-19750, and 21318-21323. Such an antigen-based vaccine can be useful for treating a patient who expresses the HLA allele A2402.

[0282] In particular embodiments, one or more HIV epitope sequences or one or more HIV epitope sequences encoded by HIV epitope encoding sequences that are selected for inclusion in an antigen-based vaccine can include any of SEQ ID NOs: SEQ ID NOs: 756-769, 2606-2622, 6699-6711, 8886-8903, 11117-11132, 13398-13414, 15480-15505, 17680-17693, 19751-19760, and 21324-21333. Such an antigen-based vaccine can be useful for treating a patient who expresses the HLA allele 2501.

[0283] In particular embodiments, one or more HIV epitope sequences or one or more HIV epitope sequences encoded by HIV epitope encoding sequences that are selected for inclusion in an antigen-based vaccine can include any of SEQ ID NOs: 770-783, 2623-2640, 6712-6728, 8904-8927, 11133-11155, 13415-13433, 15506-15533, 17694-17714, 19761-19773, and 21334-21346. Such an antigen-based vaccine can be useful for treating a patient who expresses the HLA allele 2601.

[0284] In particular embodiments, one or more HIV epitope sequences or one or more HIV epitope sequences encoded by HIV epitope encoding sequences that are selected for inclusion in an antigen-based vaccine can include any of SEQ ID NOs: SEQ ID NOs: 784-790, 2641-2652, 6729-6739, 8928-8937, 11156-11168, 13434-13446, 1553-15550, 17715-17723, 19774-19782, and 21347-21353. Such an antigen-based vaccine can be useful for treating a patient who expresses the HLA allele 2602.

[0285] In particular embodiments, one or more HIV epitope sequences or one or more HIV epitope sequences encoded by HIV epitope encoding sequences that are selected for inclusion in an antigen-based vaccine can include any of SEQ ID NOs: 791-802, 2653-2671, 6740-6759, 8938-8959, 11169-11189, 13447-13464, 15551-15569, 17724-17739, 19783-19797, and 21354-21360. Such an antigen-based vaccine can be useful for treating a patient who expresses the HLA allele 2603.

[0286] In particular embodiments, one or more HIV epitope sequences or one or more HIV epitope sequences encoded by HIV epitope encoding sequences that are selected for inclusion in an antigen-based vaccine can include any of SEQ ID NOs: 803-814, 2672-2679, 6760-6768, 8960-8976, 11190-11195, 13465-13474, 15570-15588, 17740-17751, 19798-19808, and 21361-21366. Such an antigen-based vaccine can be useful for treating a patient who expresses the HLA allele A2901.

[0287] In particular embodiments, one or more HIV epitope sequences or one or more HIV epitope sequences encoded by HIV epitope encoding sequences that are selected for inclusion in an antigen-based vaccine can include any of SEQ ID NOs: 815-828, 2680-2698, 6769-6784, 8977-9000,11196-11210, 13475-13493, 15589-15612, 17752-17773, 19809-19821, and 21367-21376. Such an antigen-based vaccine can be useful for treating a patient who expresses the HLA allele A2902.

[0288] In particular embodiments, one or more HIV epitope sequences or one or more HIV epitope sequences encoded by HIV epitope encoding sequences that are selected for inclusion in an antigen-based vaccine can include any of SEQ ID NOs: SEQ ID NOs: 829-842, 2699-2707, 6785-6793, 9001-9012, 11211-11216, 13494-13501, 15613-15617, 17774-17781, 19822-19828, and 21377-21383). Such an antigen-based vaccine can be useful for treating a patient who expresses the HLA allele A3001.

[0289] In particular embodiments, one or more HIV epitope sequences or one or more HIV epitope sequences encoded by HIV epitope encoding sequences that are selected for inclusion in an antigen-based vaccine can include any of SEQ ID NOs: SEQ ID NOs: 843-857, 2708-2722, 6794-6807, 9013-9040, 11217-11235, 13502-13519, 15618-15636, 17782-17809, 19829-19843, and 21384-21390). Such an antigen-based vaccine can be useful for treating a patient who expresses the HLA allele A3002.

[0290] In particular embodiments, one or more HIV epitope sequences or one or more HIV epitope sequences encoded by HIV epitope encoding sequences that are selected for inclusion in an antigen-based vaccine can include any of SEQ ID NOs: 858-864, 2723-2728, 6808-6817, 9041-9060, 11236-11246, 13520-13530, 15637-15649, 17810-17828, 19844-19850, and 21391-21393). Such an antigen-based vaccine can be useful for treating a patient who expresses the HLA allele A3004.

[0291] In particular embodiments, one or more HIV epitope sequences or one or more HIV epitope sequences encoded by HIV epitope encoding sequences that are selected for inclusion in an antigen-based vaccine can include any of SEQ ID NOs: 865-895, 2729-2757, 6818-6846, 9061-9082, 11247-11272, 13531-13558, 15650-15683, 17829-17862, 19851-19869, and 21394-21407). Such an antigen-based vaccine can be useful for treating a patient who expresses the HLA allele A3101.

[0292] In particular embodiments, one or more HIV epitope sequences or one or more HIV epitope sequences encoded by HIV epitope encoding sequences that are selected for inclusion in an antigen-based vaccine can include any of SEQ ID NOs: 896-899, 2758-2761, 6847-6850, 9083-9091, 11273-11275, 13559-13567, 15684-15688, 17863-17870, 19870-19874, and 21408-21409). Such an antigen-based vaccine can be useful for treating a patient who expresses the HLA allele A3201.

[0293] In particular embodiments, one or more HIV epitope sequences or one or more HIV epitope sequences encoded by HIV epitope encoding sequences that are selected for inclusion in an antigen-based vaccine can include any of SEQ ID NOs: 900-920, 2762-2793, 6851-6880, 9092-9112, 11276-11300, 13568-13585, 15689-15707, 17871-17900, 19875-19898, and 21410-21425. Such an antigen-based vaccine can be useful for treating a patient who expresses the HLA allele A3301.

[0294] In particular embodiments, one or more HIV epitope sequences or one or more HIV epitope sequences encoded by HIV epitope encoding sequences that are selected for inclusion in an antigen-based vaccine can include any of SEQ ID NOs: 921-955, 2794-2851, 6881-6935, 9113-9164, 11301-11346, 13586-13619, 15708-15742, 17901-17964, 19899-19933, and 21426-21459. Such an antigen-based vaccine can be useful for treating a patient who expresses the HLA allele A3303.

[0295] In particular embodiments, one or more HIV epitope sequences or one or more HIV epitope sequences encoded by HIV epitope encoding sequences that are selected for inclusion in an antigen-based vaccine can include any of SEQ ID NOs: 956-997, 2852-2908, 6936-6986, 9165-9228, 11347-11410, 13620-13667, 15743-15785, 17965-18029, 19934-19986, and 21460-24192. Such an antigen-based vaccine can be useful for treating a patient who expresses the HLA allele A6801.

[0296] In particular embodiments, one or more HIV epitope sequences or one or more HIV epitope sequences encoded by HIV epitope encoding sequences that are selected for inclusion in an antigen-based vaccine can include any of SEQ ID NOs: 998-1032, 2909-2946, 6897-7037, 9229-9292, 11411-11461, 13668-13715, 15786-15828, 18030-18068, 19987-20027, and 24193-21523). Such an antigen-based vaccine can be useful for treating a patient who expresses the HLA allele A6802.

[0297] In particular embodiments, one or more HIV epitope sequences or one or more HIV epitope sequences encoded by HIV epitope encoding sequences that are selected for inclusion in an antigen-based vaccine can include any of SEQ ID NOs: 1033-1050, 2947-2969, 7038-7065, 9293-9312, 11462-11485, 13716-13738, 15829-15849, 18069-18091, 20028-20038, and 21524-21540. Such an antigen-based vaccine can be useful for treating a patient who expresses the HLA allele B0702.

[0298] In particular embodiments, one or more HIV epitope sequences or one or more HIV epitope sequences encoded by HIV epitope encoding sequences that are selected for inclusion in an antigen-based vaccine can include any of SEQ ID NOs: 1051-1066, 2970-2984, 7066-7078, 9313-9325, 11486-11497, 13739-13752, 15850-15862, 18092-18112, 20039-20051, and 21541-21549). Such an antigen-based vaccine can be useful for treating a patient who expresses the HLA allele B0801.

[0299] In particular embodiments, one or more HIV epitope sequences or one or more HIV epitope sequences encoded by HIV epitope encoding sequences that are selected for inclusion in an antigen-based vaccine can include any of SEQ ID NOs: 1067-1080, 2985-2999, 7079-7095, 9326-9347, 11498-11516, 13753-13767, 15863-15875, 18113-18128, 20052-20062, and 21550-21557). Such an antigen-based vaccine can be useful for treating a patient who expresses the HLA allele B1301.

[0300] In particular embodiments, one or more HIV epitope sequences or one or more HIV epitope sequences encoded by HIV epitope encoding sequences that are selected for inclusion in an antigen-based vaccine can include any of SEQ ID NOs: 1081-1117, 3000-3052, 7096-7140, 9348-9406, 11517-11557, 13768-13821, 15876-15923, 18129-18178, 20063-20093, and 21558-21593. Such an antigen-based vaccine can be useful for treating a patient who expresses the HLA allele B1302.

[0301] In particular embodiments, one or more HIV epitope sequences or one or more HIV epitope sequences encoded by HIV epitope encoding sequences that are selected for inclusion in an antigen-based vaccine can include any of SEQ ID NOs: 1118-1125, 3053-3058, 7141-7145, 9407-9411, 11558-11562, 13822-13827, 15924-15931, 18179-18185, 20094-20098, and 21594-21599. Such an antigen-based vaccine can be useful for treating a patient who expresses the HLA allele B1401.

[0302] In particular embodiments, one or more HIV epitope sequences or one or more HIV epitope sequences encoded by HIV epitope encoding sequences that are selected for inclusion in an antigen-based vaccine can include any of SEQ ID NOs: 1126-1139, 3059-3070, 7146-7159, 9412-9418, 11563-11574, 13828-13837, 15932-15943, 18186-18197, 20099-20109, and 21600-21606. Such an antigen-based vaccine can be useful for treating a patient who expresses the HLA allele B1402.

[0303] In particular embodiments, one or more HIV epitope sequences or one or more HIV epitope sequences encoded by HIV epitope encoding sequences that are selected for inclusion in an antigen-based vaccine can include any of SEQ ID NOs: 1140-1192, 3071-3111, 7160-7211, 9419-9481, 11575-11633, 13838-13895, 15944-16001, 18198-18259, 20110-20141, and 21607-21635. Such an antigen-based vaccine can be useful for treating a patient who expresses the HLA allele B1501.

[0304] In particular embodiments, one or more HIV epitope sequences or one or more HIV epitope sequences encoded by HIV epitope encoding sequences that are selected for inclusion in an antigen-based vaccine can include any of SEQ ID NOs: 1193-1220, 3112-3135, 7212-7247, 9482-9501, 11634-11670, 13896-13937, 16002-16036, 18260-18300, 20142-20165, and 21636-21656. Such an antigen-based vaccine can be useful for treating a patient who expresses the HLA allele B1502.

[0305] In particular embodiments, one or more HIV epitope sequences or one or more HIV epitope sequences encoded by HIV epitope encoding sequences that are selected for inclusion in an antigen-based vaccine can include any of SEQ ID NOs: 1221-1245, 3136-3152, 7248-7273, 9502-9526, 11671-11693, 13938-13968, 16037-16065, 18301-18324, 20166-20179, and 21657-21669. Such an antigen-based vaccine can be useful for treating a patient who expresses the HLA allele B1503.

[0306] In particular embodiments, one or more HIV epitope sequences or one or more HIV epitope sequences encoded by HIV epitope encoding sequences that are selected for inclusion in an antigen-based vaccine can include any of SEQ ID NOs: 1246-1266, 3153-3178, 7274-7296, 9527-9548, 11694-11722, 13969-13995, 16066-16083, 18325-18352, 20180-20200, and 21670-21689. Such an antigen-based vaccine can be useful for treating a patient who expresses the HLA allele B1510.

[0307] In particular embodiments, one or more HIV epitope sequences or one or more HIV epitope sequences encoded by HIV epitope encoding sequences that are selected for inclusion in an antigen-based vaccine can include any of SEQ ID NOs: 1267-1270, 3179-3183, 7297-7300, 9549-9551, 11723-11725, 13996-14005, 16084-16091, 18353-18358, 20201-20205, and 21690-21692. Such an antigen-based vaccine can be useful for treating a patient who expresses the HLA allele B1513.

[0308] In particular embodiments, one or more HIV epitope sequences or one or more HIV epitope sequences encoded by HIV epitope encoding sequences that are selected for inclusion in an antigen-based vaccine can include any of SEQ ID NOs: 1271-1286, 3184-3203, 7301-7328, 9552-9565, 11726-11742, 14006-14024, 16092-16107, 18359-18375, 20206-20224, and 21693-21705. Such an antigen-based vaccine can be useful for treating a patient who expresses the HLA allele B1801.

[0309] In particular embodiments, one or more HIV epitope sequences or one or more HIV epitope sequences encoded by HIV epitope encoding sequences that are selected for inclusion in an antigen-based vaccine can include any of SEQ ID NOs: 1287-1304, 3204-3225, 7329-7355, 9566-9594, 11743-11756, 14025-14048, 16108-16135, 18376-18408, 20225-20241, and 21706-21716. Such an antigen-based vaccine can be useful for treating a patient who expresses the HLA allele B2702.

[0310] In particular embodiments, one or more HIV epitope sequences or one or more HIV epitope sequences encoded by HIV epitope encoding sequences that are selected for inclusion in an antigen-based vaccine can include any of SEQ ID NOs: 1305-1319, 3226-3234, 7356-7370, 9595-9610, 11757-11771, 14049-14063, 16136-16145, 18409-18422, 20242-20254, and 21717-21723. Such an antigen-based vaccine can be useful for treating a patient who expresses the HLA allele B2705.

[0311] In particular embodiments, one or more HIV epitope sequences or one or more HIV epitope sequences encoded by HIV epitope encoding sequences that are selected for inclusion in an antigen-based vaccine can include any of SEQ ID NOs: 1320-1338, 3235-3260, 7371-7405, 9611-9641, 11772-11812, 14064-14095, 16146-16186, 18423-18463, 20255-20279, and 21724-21745. Such an antigen-based vaccine can be useful for treating a patient who expresses the HLA allele B3501.

[0312] In particular embodiments, one or more HIV epitope sequences or one or more HIV epitope sequences encoded by HIV epitope encoding sequences that are selected for inclusion in an antigen-based vaccine can include any of SEQ ID NOs: 1339-1349, 3261-3272, 7406-7424, 9642-9661, 11813-11833, 14096-14112, 16187-16205, 18464-18482, 20280-20291, and 21746-21754. Such an antigen-based vaccine can be useful for treating a patient who expresses the HLA allele B3502.

[0313] In particular embodiments, one or more HIV epitope sequences or one or more HIV epitope sequences encoded by HIV epitope encoding sequences that are selected for inclusion in an antigen-based vaccine can include any of SEQ ID NOs: 1350-1373, 3273-3298, 7425-7457, 9662-9697, 11834-11877, 14113-14148, 16206-16238, 18483-18513, 20292-20316, and 21755-21772. Such an antigen-based vaccine can be useful for treating a patient who expresses the HLA allele B3503.

[0314] In particular embodiments, one or more HIV epitope sequences or one or more HIV epitope sequences encoded by HIV epitope encoding sequences that are selected for inclusion in an antigen-based vaccine can include any of SEQ ID NOs: 1374-1386, 3299-3309, 7458-7477, 9698-9719, 11878-11899, 14149-14166, 16239-16256, 18514-18538, 20317-20331, and 21773-21786. Such an antigen-based vaccine can be useful for treating a patient who expresses the HLA allele B3508.

[0315] In particular embodiments, one or more HIV epitope sequences or one or more HIV epitope sequences encoded by HIV epitope encoding sequences that are selected for inclusion in an antigen-based vaccine can include any of SEQ ID NOs: 1387-1405, 3310-3326, 7478-7498, 9720-9744, 11900-11930, 14167-14185, 16257-16280, 18539-18560, 20332-20344, and 21787-21799. Such an antigen-based vaccine can be useful for treating a patient who expresses the HLA allele B3512.

[0316] In particular embodiments, one or more HIV epitope sequences or one or more HIV epitope sequences encoded by HIV epitope encoding sequences that are selected for inclusion in an antigen-based vaccine can include any of SEQ ID NOs: 1406-1425, 3327-3338, 7499-7512, 9745-9757, 11931-11944, 14186-14196, 16281-16291, 18561-18572, 20345-20359, and 21800-21808. Such an antigen-based vaccine can be useful for treating a patient who expresses the HLA allele B3701.

[0317] In particular embodiments, one or more HIV epitope sequences or one or more HIV epitope sequences encoded by HIV epitope encoding sequences that are selected for inclusion in an antigen-based vaccine can include any of SEQ ID NOs: 1426-1451, 3339-3367, 7513-7533, 9758-9782, 11945-11970, 14197-14219, 16292-16310, 18573-18599, 20360-20381, and 21809-21828. Such an antigen-based vaccine can be useful for treating a patient who expresses the HLA allele B3801.

[0318] In particular embodiments, one or more HIV epitope sequences or one or more HIV epitope sequences encoded by HIV epitope encoding sequences that are selected for inclusion in an antigen-based vaccine can include any of SEQ ID NOs: 1452-1476, 3368-3391, 7534-7551, 9783-9802, 11971-11992, 14220-14242, 16311-16323, 18600-18619, 20382-20395, and 21829-21844. Such an antigen-based vaccine can be useful for treating a patient who expresses the HLA allele B3901.

[0319] In particular embodiments, one or more HIV epitope sequences or one or more HIV epitope sequences encoded by HIV epitope encoding sequences that are selected for inclusion in an antigen-based vaccine can include any of SEQ ID NOs: 1477-1499, 3392-3423, 7552-7571, 9803-9831, 11993-12020, 14243-14277, 16324-16349, 18620-18653, 20396-20411, and 21845-21861. Such an antigen-based vaccine can be useful for treating a patient who expresses the HLA allele B3906.

[0320] In particular embodiments, one or more HIV epitope sequences or one or more HIV epitope sequences encoded by HIV epitope encoding sequences that are selected for inclusion in an antigen-based vaccine can include any of SEQ ID NOs: 1500-1527, 3424-3458, 7572-7614, 9832-9867, 12021-12057, 14278-14309, 16350-16384, 18654-18686, 20412-20431, and 21862-21888. Such an antigen-based vaccine can be useful for treating a patient who expresses the HLA allele B4001.

[0321] In particular embodiments, one or more HIV epitope sequences or one or more HIV epitope sequences encoded by HIV epitope encoding sequences that are selected for inclusion in an antigen-based vaccine can include any of SEQ ID NOs: 1528-1576, 3459-3497, 7615-7665, 9868-9913, 12058-12110, 14310-14359, 16385-16431, 18687-18736, 20432-20460, and 21889-21924). Such an antigen-based vaccine can be useful for treating a patient who expresses the HLA allele B4002.

[0322] In particular embodiments, one or more HIV epitope sequences or one or more HIV epitope sequences encoded by HIV epitope encoding sequences that are selected for inclusion in an antigen-based vaccine can include any of SEQ ID NOs: 1577-1593, 3498-3517, 7666-7689, 9914-9942, 12111-12136, 14360-14380, 16432-16463, 18737-18759, 20461-20479, and 21925-21940. Such an antigen-based vaccine can be useful for treating a patient who expresses the HLA allele B4006.

[0323] In particular embodiments, one or more HIV epitope sequences or one or more HIV epitope sequences encoded by HIV epitope encoding sequences that are selected for inclusion in an antigen-based vaccine can include any of SEQ ID NOs: 1594-1642, 3518-3554, 7690-7742, 9943-9988, 12137-12175, 14381-14429, 16437-16510, 18760-18811, 20480-20512, and 21941-21975. Such an antigen-based vaccine can be useful for treating a patient who expresses the HLA allele B4102.

[0324] In particular embodiments, one or more HIV epitope sequences or one or more HIV epitope sequences encoded by HIV epitope encoding sequences that are selected for inclusion in an antigen-based vaccine can include any of SEQ ID NOs: 1643-1663, 3555-3575, 7743-7772, 9989-10011, 12176-12202, 14430-14448, 16510-16527, 18812-18834, 20513-20530, and 21976-21992. Such an antigen-based vaccine can be useful for treating a patient who expresses the HLA allele B4402.

[0325] In particular embodiments, one or more HIV epitope sequences or one or more HIV epitope sequences encoded by HIV epitope encoding sequences that are selected for inclusion in an antigen-based vaccine can include any of SEQ ID NOs: 1664-1697, 3576-3611, 7773-7826, 10012-10058, 12203-12254, 14449-14493, 16528-16562, 18835-18883, 20531-20564, and 21993-22024. Such an antigen-based vaccine can be useful for treating a patient who expresses the HLA allele B4403.

[0326] In particular embodiments, one or more HIV epitope sequences or one or more HIV epitope sequences encoded by HIV epitope encoding sequences that are selected for inclusion in an antigen-based vaccine can include any of SEQ ID NOs: 1698-1745, 3612-3674, 7827-7903, 10059-10134, 12255-12327, 14494-14560, 16563-16633, 18884-18953, 20565-20613, and 22025-22067. Such an antigen-based vaccine can be useful for treating a patient who expresses the HLA allele B4405.

[0327] In particular embodiments, one or more HIV epitope sequences or one or more HIV epitope sequences encoded by HIV epitope encoding sequences that are selected for inclusion in an antigen-based vaccine can include any of SEQ ID NOs: 1746-1752, 3675-3679, 7904-7910, 10135-10146, 12328-12339, 14561-14574, 16634-16645, 18954-18957, 20614-20619, and 22068-22069. Such an antigen-based vaccine can be useful for treating a patient who expresses the HLA allele B4601.

[0328] In particular embodiments, one or more HIV epitope sequences or one or more HIV epitope sequences encoded by HIV epitope encoding sequences that are selected for inclusion in an antigen-based vaccine can include any of SEQ ID NOs: 1753-1785, 3680-3695, 7911-7926, 10147-10161, 12340-12359, 14575-14596, 16646-16664, 18958-18974, 20620-20636, and 22070-22081. Such an antigen-based vaccine can be useful for treating a patient who expresses the HLA allele B4801.

[0329] In particular embodiments, one or more HIV epitope sequences or one or more HIV epitope sequences encoded by HIV epitope encoding sequences that are selected for inclusion in an antigen-based vaccine can include any of SEQ ID NOs: 1786-1824, 3696-3719, 7927-7967, 10162-10207, 12360-12395, 14597-14634, 16665-16709, 18975-19013, 20637-20656, and 22082-22109. Such an antigen-based vaccine can be useful for treating a patient who expresses the HLA allele B4901.

[0330] In particular embodiments, one or more HIV epitope sequences or one or more HIV epitope sequences encoded by HIV epitope encoding sequences that are selected for inclusion in an antigen-based vaccine can include any of SEQ ID NOs: 1825-1855, 3720-3755, 7968-8008, 10208-10251, 12396-12438, 14635-14675, 16710-16748, 19014-19051, 20657-20682, and 22110-22129. Such an antigen-based vaccine can be useful for treating a patient who expresses the HLA allele B5001.

[0331] In particular embodiments, one or more HIV epitope sequences or one or more HIV epitope sequences encoded by HIV epitope encoding sequences that are selected for inclusion in an antigen-based vaccine can include any of SEQ ID NOs: 1856-1872, 3756-3789, 8009-8037, 10252-10287, 12439-12467, 14676-14708, 16749-16783, 19052-19076, 20683-20711, and 22130-22158. Such an antigen-based vaccine can be useful for treating a patient who expresses the HLA allele B5101.

[0332] In particular embodiments, one or more HIV epitope sequences or one or more HIV epitope sequences encoded by HIV epitope encoding sequences that are selected for inclusion in an antigen-based vaccine can include any of SEQ ID NOs: 1873-1900, 3790-3823, 8038-8075, 10288-10327, 12468-12507, 14709-14745, 16784-16826, 19077-19108, 207120-20748, and 22159-22178. Such an antigen-based vaccine can be useful for treating a patient who expresses the HLA allele B5401.

[0333] In particular embodiments, one or more HIV epitope sequences or one or more HIV epitope sequences encoded by HIV epitope encoding sequences that are selected for inclusion in an antigen-based vaccine can include any of SEQ ID NOs: 1901-1907, 3824-3827, 8076-8088, 10328-10341, 12508-12520, 14746-14756, 16827-16841, 19109-19113, 20749-20759, and 22179-22184. Such an antigen-based vaccine can be useful for treating a patient who expresses the HLA allele B5501.

[0334] In particular embodiments, one or more HIV epitope sequences or one or more HIV epitope sequences encoded by HIV epitope encoding sequences that are selected for inclusion in an antigen-based vaccine can include any of SEQ ID NOs: 1908-1924, 3828-3843, 8089-8109, 10342-10364, 12521-12543, 14757-14777, 16842-16867, 19114-19135, 20760-20785, and 22185-22194. Such an antigen-based vaccine can be useful for treating a patient who expresses the HLA allele B5502.

[0335] In particular embodiments, one or more HIV epitope sequences or one or more HIV epitope sequences encoded by HIV epitope encoding sequences that are selected for inclusion in an antigen-based vaccine can include any of SEQ ID NOs: 1925-1945, 3844-3865, 8110-8136, 10365-10392, 12544-12565, 14778-14802, 16868-16897, 19136-19156, 20786-20810, and 22195-22209. Such an antigen-based vaccine can be useful for treating a patient who expresses the HLA allele B5601.

[0336] In particular embodiments, one or more HIV epitope sequences or one or more HIV epitope sequences encoded by HIV epitope encoding sequences that are selected for inclusion in an antigen-based vaccine can include any of SEQ ID NOs: 1946-1985, 3866-3908, 8137-8188, 10393-10441, 12566-12606, 14803-14849, 16898-16956, 19157-19202, 20811-20848, and 22210-22234. Such an antigen-based vaccine can be useful for treating a patient who expresses the HLA allele B5701.

[0337] In particular embodiments, one or more HIV epitope sequences or one or more HIV epitope sequences encoded by HIV epitope encoding sequences that are selected for inclusion in an antigen-based vaccine can include any of SEQ ID NOs: 1986-2019, 3909-3942, 8189-8218, 10442-10467, 12607-12632, 14850-14873, 16957-16992, 19203-19232, 20849-20875, and 22235-22252. Such an antigen-based vaccine can be useful for treating a patient who expresses the HLA allele B5801.

[0338] In particular embodiments, one or more HIV epitope sequences or one or more HIV epitope sequences encoded by HIV epitope encoding sequences that are selected for inclusion in an antigen-based vaccine can include any of SEQ ID NOs: 2020-2026, 3943-3945, 8219-8224, 10468-10472, 12633-12644, 14874-14881, 16993-16996, 19233-19242, 20876-20880, and 22253-22255. Such an antigen-based vaccine can be useful for treating a patient who expresses the HLA allele C0102.

[0339] In particular embodiments, one or more HIV epitope sequences or one or more HIV epitope sequences encoded by HIV epitope encoding sequences that are selected for inclusion in an antigen-based vaccine can include any of SEQ ID NOs: 2027-2028, 3946-3947, 8225-8227, 10473-10476, 12645-12647, 14882-14887, 16997-16999, 19243-19245, 20881-20883, and 22256-22262. Such an antigen-based vaccine can be useful for treating a patient who expresses the HLA allele C0202.

[0340] In particular embodiments, one or more HIV epitope sequences or one or more HIV epitope sequences encoded by HIV epitope encoding sequences that are selected for inclusion in an antigen-based vaccine can include any of SEQ ID NOs: 2029-2034, 3948-3956, 8228-8233, 10477-10484, 12648-12657, 14888-14900, 17000-17007, 19246-19253, 20884-20888, and 22263-22266. Such an antigen-based vaccine can be useful for treating a patient who expresses the HLA allele C0302.

[0341] In particular embodiments, one or more HIV epitope sequences or one or more HIV epitope sequences encoded by HIV epitope encoding sequences that are selected for inclusion in an antigen-based vaccine can include any of SEQ ID NOs: 2035-2039, 3957-3962, 8234-8239, 10485-10491, 12658-12663, 14901-14911, 17008-17016, 19254-19257, 20889-20893, and 22267-22272. Such an antigen-based vaccine can be useful for treating a patient who expresses the HLA allele C0303.

[0342] In particular embodiments, one or more HIV epitope sequences or one or more HIV epitope sequences encoded by HIV epitope encoding sequences that are selected for inclusion in an antigen-based vaccine can include any of SEQ ID NOs: 2040-2047, 3963-3974, 8240-8250, 10492-10502, 12664-12676, 14912-14927, 17017-17029, 19258-19270, 20894-20901, and 22273-22274. Such an antigen-based vaccine can be useful for treating a patient who expresses the HLA allele C0304.

[0343] In particular embodiments, one or more HIV epitope sequences or one or more HIV epitope sequences encoded by HIV epitope encoding sequences that are selected for inclusion in an antigen-based vaccine can include any of SEQ ID NOs: 2048-2052, 3975-3979, 8251-8257, 10503-10505, 12677-12680, 14928-14932, 17030-17033, 19271-19277, 20902-20903, and 22275-22281. Such an antigen-based vaccine can be useful for treating a patient who expresses the HLA allele C0401.

[0344] In particular embodiments, one or more HIV epitope sequences or one or more HIV epitope sequences encoded by HIV epitope encoding sequences that are selected for inclusion in an antigen-based vaccine can include any of SEQ ID NOs: 2053-2057, 3980-3992, 8258-8262, 10506-10514, 12681-12692, 14933-14944, 17034-17041, 19278-19288, 20904-20911, and 22282-22283. Such an antigen-based vaccine can be useful for treating a patient who expresses the HLA allele C0501.

[0345] In particular embodiments, one or more HIV epitope sequences or one or more HIV epitope sequences encoded by HIV epitope encoding sequences that are selected for inclusion in an antigen-based vaccine can include any of SEQ ID NOs: 2058-2059, 3993-3995, 8263, 10515-10518, 12693-12697, 14945-14948, 17042-17045, 19289-19290, 20912-20913, 22284-22295). Such an antigen-based vaccine can be useful for treating a patient who expresses the HLA allele C0602.

[0346] In particular embodiments, one or more HIV epitope sequences or one or more HIV epitope sequences encoded by HIV epitope encoding sequences that are selected for inclusion in an antigen-based vaccine can include any of SEQ ID NOs: 8264 and 17046. Such an antigen-based vaccine can be useful for treating a patient who expresses the HLA allele C0701.

[0347] In particular embodiments, one or more HIV epitope sequences or one or more HIV epitope sequences encoded by HIV epitope encoding sequences that are selected for inclusion in an antigen-based vaccine can include any of SEQ ID NOs: 2060, 3996-3997, 12698, and 14949). Such an antigen-based vaccine can be useful for treating a patient who expresses the HLA allele C0702.

[0348] In particular embodiments, one or more HIV epitope sequences or one or more HIV epitope sequences encoded by HIV epitope encoding sequences that are selected for inclusion in an antigen-based vaccine can include any of SEQ ID NOs: 2061, 3998, 10519, and 17047. Such an antigen-based vaccine can be useful for treating a patient who expresses the HLA allele C0704.

[0349] In particular embodiments, one or more HIV epitope sequences or one or more HIV epitope sequences encoded by HIV epitope encoding sequences that are selected for inclusion in an antigen-based vaccine can include any of SEQ ID NOs: 2062-2079, 3999-4013, 8265-8274, 10520-10533, 12699-12721, 14950-14974, 17048-17069, 19291-19304, 20914-20923, and 22284-22295. Such an antigen-based vaccine can be useful for treating a patient who expresses the HLA allele C0801.

[0350] In particular embodiments, one or more HIV epitope sequences or one or more HIV epitope sequences encoded by HIV epitope encoding sequences that are selected for inclusion in an antigen-based vaccine can include any of SEQ ID NOs: 2080-2088, 4014-4031, 8275-8288, 10534-10545, 12722-12739, 14975-14987, 17070-1076, 19305-19321, 20924-20929, and 22296-22300). Such an antigen-based vaccine can be useful for treating a patient who expresses the HLA allele C0802.

[0351] In particular embodiments, one or more HIV epitope sequences or one or more HIV epitope sequences encoded by HIV epitope encoding sequences that are selected for inclusion in an antigen-based vaccine can include any of SEQ ID NOs: 2089-2100, 4032-4035, 8289-8295, 10546-10548, 12740-12742, 14988-14997, 17077-17079, 19322-19324, 20930-20938, and 22301-22304. Such an antigen-based vaccine can be useful for treating a patient who expresses the HLA allele C0803.

[0352] In particular embodiments, one or more HIV epitope sequences or one or more HIV epitope sequences encoded by HIV epitope encoding sequences that are selected for inclusion in an antigen-based vaccine can include any of SEQ ID NOs: 2101-2105, 4036-4043, 8296-8302, 10549-10555, 102743-12748, 14998-15007, 17080-17089, 19325-19332, 20939-20947, and 22305-22310. Such an antigen-based vaccine can be useful for treating a patient who expresses the HLA allele C1203.

[0353] In particular embodiments, one or more HIV epitope sequences or one or more HIV epitope sequences encoded by HIV epitope encoding sequences that are selected for inclusion in an antigen-based vaccine can include any of SEQ ID NOs: 2106-2122, 4044-4058, 8303-8329, 10556-10574, 12749-12763, 15008-15025, 17090-17108, 19333-19348, 20948-20962, and 22311-22320. Such an antigen-based vaccine can be useful for treating a patient who expresses the HLA allele C1402.

[0354] In particular embodiments, one or more HIV epitope sequences or one or more HIV epitope sequences encoded by HIV epitope encoding sequences that are selected for inclusion in an antigen-based vaccine can include any of SEQ ID NOs: 2123-2133, 4059-4069, 8330-8342, 10575-10587, 12764-12772 15026-15035, 17109-17124, 19349-19361, 20963-20970, and 22321-22327. Such an antigen-based vaccine can be useful for treating a patient who expresses the HLA allele C1403.

[0355] In particular embodiments, one or more HIV epitope sequences or one or more HIV epitope sequences encoded by HIV epitope encoding sequences that are selected for inclusion in an antigen-based vaccine can include any of SEQ ID NOs: 2134-2138, 4070-4074, 8343-8354, 10588-10591, 12773-12778, 15036-15040, 17125-17135, 19362-19366, 20971-20978, and 22328-22332. Such an antigen-based vaccine can be useful for treating a patient who expresses the HLA allele C1502.

[0356] In particular embodiments, one or more HIV epitope sequences or one or more HIV epitope sequences encoded by HIV epitope encoding sequences that are selected for inclusion in an antigen-based vaccine can include any of SEQ ID NOs: 2139-2143, 4075-4079, 8355-8358, 10592-10595, 12779-12782, 15041-15048, 17136-17144, 19367-19370, 20979-20983, and 22333-22334. Such an antigen-based vaccine can be useful for treating a patient who expresses the HLA allele C1601.

[0357] In particular embodiments, one or more HIV epitope sequences or one or more HIV epitope sequences encoded by HIV epitope encoding sequences that are selected for inclusion in an antigen-based vaccine can include any of SEQ ID NOs: 2144-2151, 4080-4089, 8359-8367, 10596-10602, 12783-12792, 15049-15058, 17145-17157, 19371-19376, 20984-20992, and 22335-22340. Such an antigen-based vaccine can be useful for treating a patient who expresses the HLA allele C1602.

[0358] In particular embodiments, one or more HIV epitope sequences or one or more HIV epitope sequences encoded by HIV epitope encoding sequences that are selected for inclusion in an antigen-based vaccine can include any of SEQ ID NOs: 2152-2160, 4090-4098, 8368-8381, 10603-10615, 12793-12803, 15059-15069, 17158-17165, 19377-19382, 20994-20998, and 22341-22345. Such an antigen-based vaccine can be useful for treating a patient who expresses the HLA allele C1604.

[0359] In particular embodiments, one or more HIV epitope sequences or one or more HIV epitope sequences encoded by HIV epitope encoding sequences that are selected for inclusion in an antigen-based vaccine can include any of SEQ ID NOs: 2161-2165, 4099-4106, 8382-8389, 10616-10626, 12804-12810, 15070-15079, 17166-17174, 19383-19388, 20999-21003, and 22346-22349. Such an antigen-based vaccine can be useful for treating a patient who expresses the HLA allele C1701.

[0360] In various embodiments, an antigen-based vaccine can be generated to include at least one HIV epitope sequence, or at least one HIV-epitope encoding sequence that encodes for the at least one HIV epitope sequence, that is predicted (e.g., as predicted by a presentation model) to most likely be presented by a HLA allele. In various embodiments, an antigen-based vaccine can include one or more HIV-epitope encoding sequences that encode for one or more HIV epitope sequences selected from any of SEQ ID NOs: 4178, 4178 and 5329, 5239, 756, 1594, 3184, 6851, 6936, 7773, 10970, 11027, 11028, 12508, 13291, 13768, 13838, 14597, 14874, 16634, 20396, 20480, and 21755. In various embodiments, an antigen-based vaccine can include one or more HIV epitope sequences selected from any of SEQ ID NOs: 4178, 4178 and 5329, 5239, 756, 1594, 3184, 6851, 6936, 7773, 10970, 11027, 11028, 12508, 13291, 13768, 13838, 14597, 14874, 16634, 20396, 20480, and 21755.

[0361] In various embodiments, an antigen-based vaccine can be generated for a particular HIV subtype. For example, all selected HIV epitopes are derived from a HIV subtype and are predicted to be presented by one or more HLA alleles. In various embodiments, the selected epitopes are from HIV subtype B and are predicted to be presented by frequently expressed HLA alleles (e.g., any of A0101, A0201, A0301, A1101, A2301, A2402, B0702, B0801, B3501, B4001, B4402, and B4403). Example epitope sequences and corresponding SEQ ID NOs that can be selected for HIV subtype B are shown below in Table 1:

TABLE 1
Candidate epitope sequences

| SEQ ID | HIV | Epitope | | HIV |
|---|---|---|---|---|
| NO: | Subtype | sequence | HLA | Protein |
| 4113 | B | GSEELRSLY | A0101 | gag |
| 4114 | B | VLAEAMSQV | A0201 | gag |
| 4115 | B | SLYNTVATL | A0201 | gag |
| 4427 | B | VTNSGAIMMQK | A0301 | gag |
| 4439 | B | NSATIMMQK | A0301 | gag |
| 4494 | B | VTNSATIMMQK | A1101 | gag |
| 4495 | B | NSGAIMMQK | A1101 | gag |
| 4545 | B | NYTNLIYTL | A2301 | env |
| 4561 | B | NYTSLIYTL | A2402 | env |
| 4956 | B | YPLTSLRSL | B0702 | gag |
| 4968 | B | TPQDLNTML | B0702 | gag |
| 4975 | B | YPLTALKSL | B0801 | gag |
| 4982 | B | ELKSLFNTV | B0801 | gag |
| 5259 | B | PPIPVGEIY | B3501 | gag |
| 5261 | B | NPPIPVGEIY | B3501 | gag |
| 5459 | B | IEIKDTKEAL | B4001 | gag |
| 5460 | B | IEVKDTKEAL | B4001 | gag |
| 5610 | B | AEQASQEVKNW | B4402 | gag |
| 5643 | B | TENSSQVSQNY | B4403 | gag |
| 5661 | B | QETIDKELY | B4403 | gag |

[0362] In various embodiments, an antigen-based vaccine can include one or more HIV epitope sequences selected from SEQ ID NOs: 4113, 4114, 4115, 4427, 4439, 4494, 4495, 4545, 4561, 4956, 4968, 4975, 4982, 5259, 5261, 5459, 5460, 5610, 5643, and 5661. In various embodiments, an antigen-based vaccine can include one or more HIV-epitope encoding sequences that encode for one or more HIV epitope sequences selected from SEQ ID NOs: 4113, 4114, 4115, 4427, 4439, 4494, 4495, 4545, 4561, 4956, 4968, 4975, 4982, 5259, 5261, 5459, 5460, 5610, 5643, and 5661. In various embodiments, an antigen-based vaccine can include two, three, four, five, six, seven, eight, nine, ten, eleven, twelve, thirteen, fourteen, fifteen, sixteen, seventeen, eighteen, nineteen, or twenty HIV epitope sequences selected from SEQ ID NOs: 4113, 4114, 4115, 4427, 4439, 4494, 4495, 4545, 4561, 4956, 4968, 4975, 4982, 5259, 5261, 5459, 5460, 5610, 5643, and 5661. In various embodiments, an antigen-based vaccine can include two, three, four, five, six, seven, eight, nine, ten, eleven, twelve, thirteen, fourteen, fifteen, sixteen, seventeen, eighteen, nineteen, or twenty HIV-epitope encoding sequences that encode for two, three, four, five, six, seven, eight, nine, ten, eleven, twelve, thirteen, fourteen, fifteen, sixteen, seventeen, eighteen, nineteen, or twenty HIV epitope sequences selected from SEQ ID NOs: 4113, 4114, 4115, 4427, 4439, 4494, 4495, 4545, 4561, 4956, 4968, 4975, 4982, 5259, 5261, 5459, 5460, 5610, 5643, and 5661.

[0363] V.B. Antigen Cassette

[0364] “Antigen cassette” refers to the combination of a selected antigen or plurality of antigens and the other regulatory elements necessary to transcribe the antigen(s) and express the transcribed product. An antigen or plurality of antigens can be operatively linked to regulatory components in a manner which permits transcription. Such components include conventional regulatory elements that can drive expression of the antigen(s) in a cell transfected with the viral vector. Thus the antigen cassette can also contain a selected promoter which is linked to the antigen(s) and located, with other, optional regulatory elements, within the selected viral sequences of the recombinant vector. Cassettes can include one or more antigens with epitope sequences selected from any one of SEQ ID Nos: 325-22349.

[0365] Useful promoters can be constitutive promoters or regulated (inducible) promoters, which will enable control of the amount of antigen(s) to be expressed. For example, a desirable promoter is that of the cytomegalovirus immediate early promoter/enhancer [see, e.g., Boshart et al, Cell, 41:521-530 (1985)]. Another desirable promoter includes the Rous sarcoma virus LTR promoter/enhancer. Still another promoter/enhancer sequence is the chicken cytoplasmic beta-actin promoter [T. A. Kost et al, Nucl. Acids Res., 11(23):8287 (1983)]. Other suitable or desirable promoters can be selected by one of skill in the art.

[0366] The antigen cassette can also include nucleic acid sequences heterologous to the viral vector sequences including sequences providing signals for efficient polyadenylation of the transcript (poly(A), poly-A or pA) and introns with functional splice donor and acceptor sites. A common poly-A sequence which is employed in the exemplary vectors of this invention is that derived from the papovavirus SV-40. The poly-A sequence generally can be inserted in the cassette following the antigen-based sequences and before the viral vector sequences. A common intron sequence can also be derived from SV-40, and is referred to as the SV-40 T intron sequence. An antigen cassette can also contain such an intron, located between the promoter/enhancer sequence and the antigen(s). Selection of these and other common vector elements are conventional [see, e.g., Sambrook et al, “Molecular Cloning. A Laboratory Manual.”, 2d edit., Cold Spring Harbor Laboratory, New York (1989) and references cited therein] and many such sequences are available from commercial and industrial sources as well as from Genbank.

[0367] An antigen cassette can have one or more antigens. For example, a given cassette can include 1-10, 1-20, 1-30, 10-20, 15-25, 15-20, 1, 2, 3, 4, 5, 6, 7, 8, 9, 10, 11, 12, 13, 14, 15, 16, 17, 18, 19, 20, or more antigens. Antigens can be linked directly to one another. Antigens can also be linked to one another with linkers. Antigens can be in any orientation relative to one another including N to C or C to N.

[0368] As above stated, the antigen cassette can be located in the site of any selected deletion in the viral vector, such as the site of the E1 gene region deletion or E3 gene region deletion, among others which may be selected.

[0369] The antigen cassette can be described using the following formula to describe the ordered sequence of each element, from 5′ to 3′:

(Pₐ-(L5_{b}-N_{c}-L3_{d})_{X})_{Z}-(P2ₕ-(G5ₑ-U_{f})_{Y})_{W}-G3_{g}

[0370] wherein P and P2 comprise promoter nucleotide sequences, N comprises an MHC class I epitope encoding nucleic acid sequence, L5 comprises a 5′ linker sequence, L3 comprises a 3′ linker sequence, G5 comprises a nucleic acid sequences encoding an amino acid linker, G3 comprises one of the at least one nucleic acid sequences encoding an amino acid linker, U comprises an MHC class II antigen-encoding nucleic acid sequence, where for each X the corresponding Nc is a epitope encoding nucleic acid sequence, where for each Y the corresponding Uf is an antigen-encoding nucleic acid sequence. The composition and ordered sequence can be further defined by selecting the number of elements present, for example where a=0 or 1, where b=0 or 1, where c=1, where d=0 or 1, where e=0 or 1, where f=1, where g=0 or 1, where h=0 or 1, X=1 to 400, Y=0, 1, 2, 3, 4 or 5, Z=1 to 400, and W=0, 1, 2, 3, 4 or 5.

[0371] In one example, elements present include where a=0, b=1, d=1, e=1, g=1, h=0, X=10, Y=2, Z=1, and W=1, describing where no additional promoter is present (i.e. only the promoter nucleotide sequence provided by the RNA alphavirus backbone is present), 20 MHC class I epitope are present, a 5′ linker is present for each N, a 3′ linker is present for each N, 2 MHC class II epitopes are present, a linker is present linking the two MHC class II epitopes, a linker is present linking the 5′ end of the two MHC class II epitopes to the 3′ linker of the final MHC class I epitope, and a linker is present linking the 3′ end of the two MHC class II epitopes to the to the RNA alphavirus backbone. Examples of linking the 3′ end of the antigen cassette to the RNA alphavirus backbone include linking directly to the 3′ UTR elements provided by the RNA alphavirus backbone, such as a 3′ 19-nt CSE. Examples of linking the 5′ end of the antigen cassette to the RNA alphavirus backbone include linking directly to a 26S promoter sequence, an alphavirus 5′ UTR, a 51-nt CSE, or a 24-nt CSE.

[0372] Other examples include: where a=1 describing where a promoter other than the promoter nucleotide sequence provided by the RNA alphavirus backbone is present; where a=1 and Z is greater than 1 where multiple promoters other than the promoter nucleotide sequence provided by the RNA alphavirus backbone are present each driving expression of 1 or more distinct MHC class I epitope encoding nucleic acid sequences; where h=1 describing where a separate promoter is present to drive expression of the MHC class II antigen-encoding nucleic acid sequences; and where g=0 describing the MHC class II antigen-encoding nucleic acid sequence, if present, is directly linked to the RNA alphavirus backbone.

[0373] Other examples include where each MHC class I epitope that is present can have a 5′ linker, a 3′ linker, neither, or both. In examples where more than one MHC class I epitope is present in the same antigen cassette, some MHC class I epitopes may have both a 5′ linker and a 3′ linker, while other MHC class I epitopes may have either a 5′ linker, a 3′ linker, or neither. In other examples where more than one MHC class I epitope is present in the same antigen cassette, some MHC class I epitopes may have either a 5′ linker or a 3′ linker, while other MHC class I epitopes may have either a 5′ linker, a 3′ linker, or neither.

[0374] In examples where more than one MHC class II epitope is present in the same antigen cassette, some MHC class II epitopes may have both a 5′ linker and a 3′ linker, while other MHC class II epitopes may have either a 5′ linker, a 3′ linker, or neither. In other examples where more than one MHC class II epitope is present in the same antigen cassette, some MHC class II epitopes may have either a 5′ linker or a 3′ linker, while other MHC class II epitopes may have either a 5′ linker, a 3′ linker, or neither.

[0375] The promoter nucleotide sequences P and/or P2 can be the same as a promoter nucleotide sequence provided by the RNA alphavirus backbone. For example, the promoter sequence provided by the RNA alphavirus backbone, Pn and P2, can each comprise a 26S subgenomic promoter. The promoter nucleotide sequences P and/or P2 can be different from the promoter nucleotide sequence provided by the RNA alphavirus backbone, as well as can be different from each other.

[0376] The 5′ linker L5 can be a native sequence or a non-natural sequence. Non-natural sequence include, but are not limited to, AAY, RR, and DPP. The 3′ linker L3 can also be a native sequence or a non-natural sequence. Additionally, L5 and L3 can both be native sequences, both be non-natural sequences, or one can be native and the other non-natural. For each X, the amino acid linkers can be 2, 3, 4, 5, 6, 7, 8, 9, 10, 11, 12, 13, 14, 15, 16, 17, 18, 19, 20, 21, 22, 23, 24, 25, 26, 27, 28, 29, 30, 31, 32, 33, 34, 35, 36, 37, 38, 39, 40, 41, 42, 43, 44, 45, 46, 47, 48, 49, 50, 51, 52, 53, 54, 55, 56, 57, 58, 59, 60, 61, 62, 63, 64, 65, 66, 67, 68, 69, 70, 71, 72, 73, 74, 75, 76, 77, 78, 79, 80, 81, 82, 83, 84, 85, 86, 87, 88, 89, 90, 91, 92, 93, 94, 95, 96, 97, 98, 99, 100 or more amino acids in length. For each X, the amino acid linkers can be also be at least 3, at least 4, at least 5, at least 6, at least 7, at least 8, at least 9, at least 10, at least 11, at least 12, at least 13, at least 14, at least 15, at least 16, at least 17, at least 18, at least 19, at least 20, at least 21, at least 22, at least 23, at least 24, at least 25, at least 26, at least 27, at least 28, at least 29, or at least 30 amino acids in length.

[0377] The amino acid linker G5, for each Y, can be 2, 3, 4, 5, 6, 7, 8, 9, 10, 11, 12, 13, 14, 15, 16, 17, 18, 19, 20, 21, 22, 23, 24, 25, 26, 27, 28, 29, 30, 31, 32, 33, 34, 35, 36, 37, 38, 39, 40, 41, 42, 43, 44, 45, 46, 47, 48, 49, 50, 51, 52, 53, 54, 55, 56, 57, 58, 59, 60, 61, 62, 63, 64, 65, 66, 67, 68, 69, 70, 71, 72, 73, 74, 75, 76, 77, 78, 79, 80, 81, 82, 83, 84, 85, 86, 87, 88, 89, 90, 91, 92, 93, 94, 95, 96, 97, 98, 99, 100 or more amino acids in length. For each Y, the amino acid linkers can be also be at least 3, at least 4, at least 5, at least 6, at least 7, at least 8, at least 9, at least 10, at least 11, at least 12, at least 13, at least 14, at least 15, at least 16, at least 17, at least 18, at least 19, at least 20, at least 21, at least 22, at least 23, at least 24, at least 25, at least 26, at least 27, at least 28, at least 29, or at least 30 amino acids in length.

[0378] The amino acid linker G3 can be 2, 3, 4, 5, 6, 7, 8, 9, 10, 11, 12, 13, 14, 15, 16, 17, 18, 19, 20, 21, 22, 23, 24, 25, 26, 27, 28, 29, 30, 31, 32, 33, 34, 35, 36, 37, 38, 39, 40, 41, 42, 43, 44, 45, 46, 47, 48, 49, 50, 51, 52, 53, 54, 55, 56, 57, 58, 59, 60, 61, 62, 63, 64, 65, 66, 67, 68, 69, 70, 71, 72, 73, 74, 75, 76, 77, 78, 79, 80, 81, 82, 83, 84, 85, 86, 87, 88, 89, 90, 91, 92, 93, 94, 95, 96, 97, 98, 99, 100 or more amino acids in length. G3 can be also be at least 3, at least 4, at least 5, at least 6, at least 7, at least 8, at least 9, at least 10, at least 11, at least 12, at least 13, at least 14, at least 15, at least 16, at least 17, at least 18, at least 19, at least 20, at least 21, at least 22, at least 23, at least 24, at least 25, at least 26, at least 27, at least 28, at least 29, or at least 30 amino acids in length.

[0379] For each X, each N can encode a MHC class I epitope 7-15 amino acids in length. For each X, each N can also encode a MHC class I epitope 5, 6, 7, 8, 9, 10, 11, 12, 13, 14, 15, 16, 17, 18, 19, 20, 21, 22, 23, 24, 25, 26, 27, 28, 29, or 30 amino acids in length. For each X, each N can also encodes a MHC class I epitope at least 5, at least 6, at least 7, at least 8, at least 9, at least 10, at least 11, at least 12, at least 13, at least 14, at least 15, at least 16, at least 17, at least 18, at least 19, at least 20, at least 21, at least 22, at least 23, at least 24, at least 25, at least 26, at least 27, at least 28, at least 29, or at least 30 amino acids in length.

[0380] V.C. Antigen Prioritization

[0381] More candidate antigens may be available for vaccine inclusion than the vaccine technology can support. Additionally, uncertainty about various aspects of the antigen analysis may remain and tradeoffs may exist between different properties of candidate vaccine antigens. Thus, in place of predetermined filters at each step of the selection process, an integrated multi-dimensional model can be considered that places candidate antigens in a space with at least the following axes and optimizes selection using an integrative approach.
[0382] 1. Risk of auto-immunity or tolerance (risk of germline) (lower risk of auto-immunity is typically preferred)
[0383] 2. Probability of sequencing artifact (lower probability of artifact is typically preferred)
[0384] 3. Probability of immunogenicity (higher probability of immunogenicity is typically preferred)
[0385] 4. Probability of presentation (higher probability of presentation is typically preferred)
[0386] 5. Gene expression (higher expression is typically preferred)
[0387] 6. Coverage of HLA genes (larger number of HLA molecules involved in the presentation of a set of antigens may lower the probability that HIV will escape immune attack via downregulation or mutation of HLA molecules)
[0388] 7. Coverage of HLA classes (covering both HLA-I and HLA-II may increase the probability of therapeutic response and decrease the probability of HIV escape)

[0389] Additionally, optionally, antigens can be deprioritized (e.g., excluded) from the vaccination if they are predicted to be presented by proteins corresponding to lost or inactivated HLA alleles. HLA allele loss can occur by either somatic mutation, loss of heterozygosity, or homozygous deletion of the locus. Methods for detection of HLA allele somatic mutation are well known in the art, e.g. (Shukla et al., 2015). Methods for detection of somatic LOH and homozygous deletion (including for HLA locus) are likewise well described. (Carter et al., 2012; McGranahan et al., 2017; Van Loo et al., 2010). Antigens can also be deprioritized if mass-spectrometry data indicates a predicted antigen is not presented by a predicted HLA allele.

[0390] V.D. Alphavirus

[0391] V.D.1. Alphavirus Biology

[0392] Alphaviruses are members of the family Togaviridae, and are positive-sense single stranded RNA viruses. Members are typically classified as either Old World, such as Sindbis, Ross River, Mayaro, Chikungunya, and Semliki Forest viruses, or New World, such as eastern equine encephalitis, Aura, Fort Morgan, or Venezuelan equine encephalitis virus and its derivative strain TC-83 (Strauss Microbrial Review 1994). A natural alphavirus genome is typically around 12 kb in length, the first two-thirds of which contain genes encoding non-structural proteins (nsPs) that form RNA replication complexes for self-replication of the viral genome, and the last third of which contains a subgenomic expression cassette encoding structural proteins for virion production (Frolov RNA 2001).

[0393] A model lifecycle of an alphavirus involves several distinct steps (Strauss Microbrial Review 1994, Jose Future Microbiol 2009). Following virus attachment to a host cell, the virion fuses with membranes within endocytic compartments resulting in the eventual release of genomic RNA into the cytosol. The genomic RNA, which is in a plus-strand orientation and comprises a 5′ methylguanylate cap and 3′ polyA tail, is translated to produce non-structural proteins nsP1-4 that form the replication complex. Early in infection, the plus-strand is then replicated by the complex into a minus-stand template. In the current model, the replication complex is further processed as infection progresses, with the resulting processed complex switching to transcription of the minus-strand into both full-length positive-strand genomic RNA, as well as the 26S subgenomic positive-strand RNA containing the structural genes. Several conserved sequence elements (CSEs) of alphavirus have been identified to potentially play a role in the various RNA replication steps including; a complement of the 5′ UTR in the replication of plus-strand RNAs from a minus-strand template, a 51-nt CSE in the replication of minus-strand synthesis from the genomic template, a 24-nt CSE in the junction region between the nsPs and the 26S RNA in the transcription of the subgenomic RNA from the minus-strand, and a 3′ 19-nt CSE in minus-strand synthesis from the plus-strand template.

[0394] Following the replication of the various RNA species, virus particles are then typically assembled in the natural lifecycle of the virus. The 26S RNA is translated and the resulting proteins further processed to produce the structural proteins including capsid protein, glycoproteins E1 and E2, and two small polypeptides E3 and 6K (Strauss 1994). Encapsidation of viral RNA occurs, with capsid proteins normally specific for only genomic RNA being packaged, followed by virion assembly and budding at the membrane surface.

[0395] V.D.2. Alphavirus as a Delivery Vector

[0396] Alphaviruses (including alphavirus sequences, features, and other elements) can be used to generate alphavirus-based delivery vectors (also be referred to as alphavirus vectors, alphavirus viral vectors, alphavirus vaccine vectors, self-replicating RNA (srRNA) vectors, or self-amplifying RNA (samRNA) vectors). Alphaviruses have previously been engineered for use as expression vector systems (Pushko 1997, Rheme 2004). Alphaviruses offer several advantages, particularly in a vaccine setting where heterologous antigen expression can be desired. Due to its ability to self-replicate in the host cytosol, alphavirus vectors are generally able to produce high copy numbers of the expression cassette within a cell resulting in a high level of heterologous antigen production. Additionally, the vectors are generally transient, resulting in improved biosafety as well as reduced induction of immunological tolerance to the vector. The public, in general, also lacks pre-existing immunity to alphavirus vectors as compared to other standard viral vectors, such as human adenovirus. Alphavirus based vectors also generally result in cytotoxic responses to infected cells. Cytotoxicity, to a certain degree, can be important in a vaccine setting to properly illicit an immune response to the heterologous antigen expressed. However, the degree of desired cytotoxicity can be a balancing act, and thus several attenuated alphaviruses have been developed, including the TC-83 strain of VEE. Thus, an example of an antigen expression vector described herein can utilize an alphavirus backbone that allows for a high level of antigen expression, elicits a robust immune response to antigen, does not elicit an immune response to the vector itself, and can be used in a safe manner. Furthermore, the antigen expression cassette can be designed to elicit different levels of an immune response through optimization of which alphavirus sequences the vector uses, including, but not limited to, sequences derived from VEE or its attenuated derivative TC-83.

[0397] Several expression vector design strategies have been engineered using alphavirus sequences (Pushko 1997). In one strategy, a alphavirus vector design includes inserting a second copy of the 26S promoter sequence elements downstream of the structural protein genes, followed by a heterologous gene (Frolov 1993). Thus, in addition to the natural non-structural and structural proteins, an additional subgenomic RNA is produced that expresses the heterologous protein. In this system, all the elements for production of infectious virions are present and, therefore, repeated rounds of infection of the expression vector in non-infected cells can occur.

[0398] Another expression vector design makes use of helper virus systems (Pushko 1997). In this strategy, the structural proteins are replaced by a heterologous gene. Thus, following self-replication of viral RNA mediated by still intact non-structural genes, the 26S subgenomic RNA provides for expression of the heterologous protein. Traditionally, additional vectors that expresses the structural proteins are then supplied in trans, such as by co-transfection of a cell line, to produce infectious virus. A system is described in detail in U.S. Pat. No. 8,093,021, which is herein incorporated by reference in its entirety, for all purposes. The helper vector system provides the benefit of limiting the possibility of forming infectious particles and, therefore, improves biosafety. In addition, the helper vector system reduces the total vector length, potentially improving the replication and expression efficiency. Thus, an example of an antigen expression vector described herein can utilize an alphavirus backbone wherein the structural proteins are replaced by an antigen cassette, the resulting vector both reducing biosafety concerns, while at the same time promoting efficient expression due to the reduction in overall expression vector size.

[0399] V.D.3. Alphavirus Production In Vitro

[0400] Alphavirus delivery vectors are generally positive-sense RNA polynucleotides. A convenient technique well-known in the art for RNA production is in vitro transcription (IVT). In this technique, a DNA template of the desired vector is first produced by techniques well-known to those in the art, including standard molecular biology techniques such as cloning, restriction digestion, ligation, gene synthesis, and polymerase chain reaction (PCR). The DNA template contains a RNA polymerase promoter at the 5′ end of the sequence desired to be transcribed into RNA. Promoters include, but are not limited to, bacteriophage polymerase promoters such as T3, T7, or SP6. The DNA template is then incubated with the appropriate RNA polymerase enzyme, buffer agents, and nucleotides (NTPs). The resulting RNA polynucleotide can optionally be further modified including, but limited to, addition of a 5′ cap structure such as 7-methylguanosine or a related structure, and optionally modifying the 3′ end to include a polyadenylate (polyA) tail. The RNA can then be purified using techniques well-known in the field, such as phenol-chloroform extraction.

[0401] V.D.4. Delivery Via Lipid Nanoparticle

[0402] An aspect to consider in vaccine vector design is immunity against the vector itself (Riley 2017). This may be in the form of preexisting immunity to the vector itself, such as with certain human adenovirus systems, or in the form of developing immunity to the vector following administration of the vaccine. The latter is an important consideration if multiple administrations of the same vaccine are performed, such as separate priming and boosting doses, or if the same vaccine vector system is to be used to deliver different antigen cassettes. For example, efficacy of foreign vectors may be reduced if those vectors are targeted by neutralizing antibodies.

[0403] An alternative strategy is the use of nanomaterials to deliver expression vectors (Riley 2017). Nanomaterial vehicles, importantly, can be made of non-immunogenic materials and generally avoid eliciting immunity to the delivery vector itself. These materials can include, but are not limited to, lipids, inorganic nanomaterials, and other polymeric materials. Lipids can be cationic, anionic, or neutral. The materials can be synthetic or naturally derived, and in some instances biodegradable. Lipids can include fats, cholesterol, phospholipids, lipid conjugates including, but not limited to, polyethyleneglycol (PEG) conjugates (PEGylated lipids), waxes, oils, glycerides, and fat soulable vitamins.

[0404] Lipid nanoparticles (LNPs) are an attractive delivery system due to the amphiphilic nature of lipids enabling formation of membranes and vesicle like structures (Riley 2017). In general, these vesicles deliver the expression vector by absorbing into the membrane of target cells and releasing nucleic acid into the cytosol. In addition, LNPs can be further modified or functionalized to facilitate targeting of specific cell types. Another consideration in LNP design is the balance between targeting efficiency and cytotoxicity. Lipid compositions generally include defined mixtures of cationic, neutral, anionic, and amphipathic lipids. In some instances, specific lipids are included to prevent LNP aggregation, prevent lipid oxidation, or provide functional chemical groups that facilitate attachment of additional moieties. Lipid composition can influence overall LNP size and stability. In an example, the lipid composition comprises dilinoleylmethyl-4-dimethylaminobutyrate (MC3) or MC3-like molecules. MC3 and MC3-like lipid compositions can be formulated to include one or more other lipids, such as a PEG or PEG-conjugated lipid, a sterol, or neutral lipids.

[0405] Nucleic-acid vectors, such as expression vectors, exposed directly to serum can have several undesirable consequences, including degradation of the nucleic acid by serum nucleases or off-target stimulation of the immune system by the free nucleic acids. Therefore, encapsulation of the alphavirus vector can be used to avoid degradation, while also avoiding potential off-target affects. In certain examples, an alphavirus vector is fully encapsulated within the delivery vehicle, such as within the aqueous interior of an LNP. Encapsulation of the alphavirus vector within an LNP can be carried out by techniques well-known to those skilled in the art, such as microfluidic mixing and droplet generation carried out on a microfluidic droplet generating device. Such devices include, but are not limited to, standard T-junction devices or flow-focusing devices. In an example, the desired lipid formulation, such as MC3 or MC3-like containing compositions, is provided to the droplet generating device in parallel with the alphavirus delivery vector and other desired agents, such that the delivery vector and desired agents are fully encapsulated within the interior of the MC3 or MC3-like based LNP. In an example, the droplet generating device can control the size range and size distribution of the LNPs produced. For example, the LNP can have a size ranging from 1 to 1000 nanometers in diameter, e.g., 1, 10, 50, 100, 500, or 1000 nanometers. Following droplet generation, the delivery vehicles encapsulating the expression vectors can be further treated or modified to prepare them for administration.

[0406] V.E. Chimpanzee Adenovirus (ChAd)

[0407] V.E.1. Viral Delivery with Chimpanzee Adenovirus

[0408] Vaccine compositions for delivery of one or more antigens can be created by providing adenovirus nucleotide sequences of chimpanzee origin, a variety of novel vectors, and cell lines expressing chimpanzee adenovirus genes. A nucleotide sequence of a chimpanzee C68 adenovirus (also referred to herein as ChAdV68) can be used in a vaccine composition for antigen delivery (See SEQ ID NO: 1). Use of C68 adenovirus derived vectors is described in further detail in U.S. Pat. No. 6,083,716, which is herein incorporated by reference in its entirety, for all purposes.

[0409] In a further aspect, provided herein is a recombinant adenovirus comprising the DNA sequence of a chimpanzee adenovirus such as C68 and an antigen cassette operatively linked to regulatory sequences directing its expression. The recombinant virus is capable of infecting a mammalian, preferably a human, cell and capable of expressing the antigen cassette product in the cell. In this vector, the native chimpanzee E1 gene, and/or E3 gene, and/or E4 gene can be deleted. An antigen cassette can be inserted into any of these sites of gene deletion. The antigen cassette can include an antigen against which a primed immune response is desired.

[0410] In another aspect, provided herein is a mammalian cell infected with a chimpanzee adenovirus such as C68.

[0411] In still a further aspect, a novel mammalian cell line is provided which expresses a chimpanzee adenovirus gene (e.g., from C68) or functional fragment thereof.

[0412] In still a further aspect, provided herein is a method for delivering an antigen cassette into a mammalian cell comprising the step of introducing into the cell an effective amount of a chimpanzee adenovirus, such as C68, that has been engineered to express the antigen cassette.

[0413] Still another aspect provides a method for eliciting an immune response in a mammalian host to treat HIV. The method can comprise the step of administering to the host an effective amount of a recombinant chimpanzee adenovirus, such as C68, comprising an antigen cassette that encodes one or more antigens from HIV against which the immune response is targeted.

[0414] Also disclosed is a non-simian mammalian cell that expresses a chimpanzee adenovirus gene obtained from the sequence of SEQ ID NO: 1. The gene can be selected from the group consisting of the adenovirus E1A, E1B, E2A, E2B, E3, E4, L1, L2, L3, L4 and L5 of SEQ ID NO: 1.

[0415] Also disclosed is a nucleic acid molecule comprising a chimpanzee adenovirus DNA sequence comprising a gene obtained from the sequence of SEQ ID NO: 1. The gene can be selected from the group consisting of said chimpanzee adenovirus ETA, E1B, E2A, E2B, E3, E4, L1, L2, L3, L4 and L5 genes of SEQ ID NO: 1. In some aspects the nucleic acid molecule comprises SEQ ID NO: 1. In some aspects the nucleic acid molecule comprises the sequence of SEQ ID NO: 1, lacking at least one gene selected from the group consisting of ETA, E1B, E2A, E2B, E3, E4, L1, L2, L3, L4 and L5 genes of SEQ ID NO: 1.

[0416] Also disclosed is a vector comprising a chimpanzee adenovirus DNA sequence obtained from SEQ ID NO: 1 and an antigen cassette operatively linked to one or more regulatory sequences which direct expression of the cassette in a heterologous host cell, optionally wherein the chimpanzee adenovirus DNA sequence comprises at least the cis-elements necessary for replication and virion encapsidation, the cis-elements flanking the antigen cassette and regulatory sequences. In some aspects, the chimpanzee adenovirus DNA sequence comprises a gene selected from the group consisting of E1A, E1B, E2A, E2B, E3, E4, L1, L2, L3, L4 and L5 gene sequences of SEQ ID NO: 1. In some aspects the vector can lack the E1A and/or E1B gene.

[0417] Also disclosed herein is a host cell transfected with a vector disclosed herein such as a C68 vector engineered to expression an antigen cassette. Also disclosed herein is a human cell that expresses a selected gene introduced therein through introduction of a vector disclosed herein into the cell.

[0418] Also disclosed herein is a method for delivering an antigen cassette to a mammalian cell comprising introducing into said cell an effective amount of a vector disclosed herein such as a C68 vector engineered to expression the antigen cassette.

[0419] Also disclosed herein is a method for producing an antigen comprising introducing a vector disclosed herein into a mammalian cell, culturing the cell under suitable conditions and producing the antigen.

[0420] V.E.2. E1-Expressing Complementation Cell Lines

[0421] To generate recombinant chimpanzee adenoviruses (Ad) deleted in any of the genes described herein, the function of the deleted gene region, if essential to the replication and infectivity of the virus, can be supplied to the recombinant virus by a helper virus or cell line, i.e., a complementation or packaging cell line. For example, to generate a replication-defective chimpanzee adenovirus vector, a cell line can be used which expresses the E1 gene products of the human or chimpanzee adenovirus; such a cell line can include HEK293 or variants thereof. The protocol for the generation of the cell lines expressing the chimpanzee E1 gene products (Examples 3 and 4 of U.S. Pat. No. 6,083,716) can be followed to generate a cell line which expresses any selected chimpanzee adenovirus gene.

[0422] An AAV augmentation assay can be used to identify a chimpanzee adenovirus E1-expressing cell line. This assay is useful to identify E1 function in cell lines made by using the E1 genes of other uncharacterized adenoviruses, e.g., from other species. That assay is described in Example 4B of U.S. Pat. No. 6,083,716.

[0423] A selected chimpanzee adenovirus gene, e.g., E1, can be under the transcriptional control of a promoter for expression in a selected parent cell line. Inducible or constitutive promoters can be employed for this purpose. Among inducible promoters are included the sheep metallothionine promoter, inducible by zinc, or the mouse mammary tumor virus (MMTV) promoter, inducible by a glucocorticoid, particularly, dexamethasone. Other inducible promoters, such as those identified in International patent application WO95/13392, incorporated by reference herein can also be used in the production of packaging cell lines. Constitutive promoters in control of the expression of the chimpanzee adenovirus gene can be employed also.

[0424] A parent cell can be selected for the generation of a novel cell line expressing any desired C68 gene. Without limitation, such a parent cell line can be HeLa [ATCC Accession No. CCL 2], A549 [ATCC Accession No. CCL 185], KB [CCL 17], Detroit [e.g., Detroit 510, CCL 72] and WI-38 [CCL 75] cells. Other suitable parent cell lines can be obtained from other sources. Parent cell lines can include CHO, HEK293 or variants thereof, 911, HeLa, A549, LP-293, PER.C6, or AE1-2a.

[0425] An E1-expressing cell line can be useful in the generation of recombinant chimpanzee adenovirus E1 deleted vectors. Cell lines constructed using essentially the same procedures that express one or more other chimpanzee adenoviral gene products are useful in the generation of recombinant chimpanzee adenovirus vectors deleted in the genes that encode those products. Further, cell lines which express other human Ad E1 gene products are also useful in generating chimpanzee recombinant Ads.

[0426] V.E.3. Recombinant Viral Particles as Vectors

[0427] The compositions disclosed herein can comprise viral vectors, that deliver at least one antigen to cells. Such vectors comprise a chimpanzee adenovirus DNA sequence such as C68 and an antigen cassette operatively linked to regulatory sequences which direct expression of the cassette. The C68 vector is capable of expressing the cassette in an infected mammalian cell. The C68 vector can be functionally deleted in one or more viral genes. An antigen cassette comprises at least one antigen under the control of one or more regulatory sequences such as a promoter. Optional helper viruses and/or packaging cell lines can supply to the chimpanzee viral vector any necessary products of deleted adenoviral genes.

[0428] The term “functionally deleted” means that a sufficient amount of the gene region is removed or otherwise altered, e.g., by mutation or modification, so that the gene region is no longer capable of producing one or more functional products of gene expression. Mutations or modifications that can result in functional deletions include, but are not limited to, nonsense mutations such as introduction of premature stop codons and removal of canonical and non-canonical start codons, mutations that alter mRNA splicing or other transcriptional processing, or combinations thereof. If desired, the entire gene region can be removed.

[0429] Modifications of the nucleic acid sequences forming the vectors disclosed herein, including sequence deletions, insertions, and other mutations may be generated using standard molecular biological techniques and are within the scope of this invention.

[0430] V.E.4. Construction of the Viral Plasmid Vector

[0431] The chimpanzee adenovirus C68 vectors include recombinant, defective adenoviruses, that is, chimpanzee adenovirus sequences functionally deleted in the Ela or E1b genes, and optionally bearing other mutations, e.g., temperature-sensitive mutations or deletions in other genes. It is anticipated that these chimpanzee sequences are also useful in forming hybrid vectors from other adenovirus and/or adeno-associated virus sequences. Homologous adenovirus vectors prepared from human adenoviruses are described in the published literature [see, for example, Kozarsky I and II, cited above, and references cited therein, U.S. Pat. No. 5,240,846].

[0432] In the construction of useful chimpanzee adenovirus C68 vectors for delivery of an antigen cassette to a human (or other mammalian) cell, a range of adenovirus nucleic acid sequences can be employed in the vectors. A vector comprising minimal chimpanzee C68 adenovirus sequences can be used in conjunction with a helper virus to produce an infectious recombinant virus particle. The helper virus provides essential gene products required for viral infectivity and propagation of the minimal chimpanzee adenoviral vector. When only one or more selected deletions of chimpanzee adenovirus genes are made in an otherwise functional viral vector, the deleted gene products can be supplied in the viral vector production process by propagating the virus in a selected packaging cell line that provides the deleted gene functions in trans.

[0433] V.E.5. Recombinant Minimal Adenovirus

[0434] A minimal chimpanzee Ad C68 virus is a viral particle containing just the adenovirus cis-elements necessary for replication and virion encapsidation. That is, the vector contains the cis-acting 5′ and 3′ inverted terminal repeat (ITR) sequences of the adenoviruses (which function as origins of replication) and the native 5′ packaging/enhancer domains (that contain sequences necessary for packaging linear Ad genomes and enhancer elements for the E1 promoter). See, for example, the techniques described for preparation of a “minimal” human Ad vector in International Patent Application WO96/13597 and incorporated herein by reference.

[0435] V.E.6. Other Defective Adenoviruses

[0436] Recombinant, replication-deficient adenoviruses can also contain more than the minimal chimpanzee adenovirus sequences. These other Ad vectors can be characterized by deletions of various portions of gene regions of the virus, and infectious virus particles formed by the optional use of helper viruses and/or packaging cell lines.

[0437] As one example, suitable vectors may be formed by deleting all or a sufficient portion of the C68 adenoviral immediate early gene Ela and delayed early gene E1b, so as to eliminate their normal biological functions. Replication-defective E1-deleted viruses are capable of replicating and producing infectious virus when grown on a chimpanzee adenovirus-transformed, complementation cell line containing functional adenovirus Ela and E1b genes which provide the corresponding gene products in trans. Based on the homologies to known adenovirus sequences, it is anticipated that, as is true for the human recombinant E1-deleted adenoviruses of the art, the resulting recombinant chimpanzee adenovirus is capable of infecting many cell types and can express antigen(s), but cannot replicate in most cells that do not carry the chimpanzee E1 region DNA unless the cell is infected at a very high multiplicity of infection.

[0438] As another example, all or a portion of the C68 adenovirus delayed early gene E3 can be eliminated from the chimpanzee adenovirus sequence which forms a part of the recombinant virus.

[0439] Chimpanzee adenovirus C68 vectors can also be constructed having a deletion of the E4 gene. Still another vector can contain a deletion in the delayed early gene E2a.

[0440] Deletions can also be made in any of the late genes L1 through L5 of the chimpanzee C68 adenovirus genome. Similarly, deletions in the intermediate genes IX and IVa2 can be useful for some purposes. Other deletions may be made in the other structural or non-structural adenovirus genes.

[0441] The above discussed deletions can be used individually, i.e., an adenovirus sequence can contain deletions of E1 only. Alternatively, deletions of entire genes or portions thereof effective to destroy or reduce their biological activity can be used in any combination. For example, in one exemplary vector, the adenovirus C68 sequence can have deletions of the E1 genes and the E4 gene, or of the E1, E2a and E3 genes, or of the E1 and E3 genes, or of E1, E2a and E4 genes, with or without deletion of E3, and so on. As discussed above, such deletions can be used in combination with other mutations, such as temperature-sensitive mutations, to achieve a desired result.

[0442] The cassette comprising antigen(s) can be inserted optionally into any deleted region of the chimpanzee C68 Ad virus. Alternatively, the cassette can be inserted into an existing gene region to disrupt the function of that region, if desired.

[0443] V.E.7. Helper Viruses

[0444] Depending upon the chimpanzee adenovirus gene content of the viral vectors employed to carry the antigen cassette, a helper adenovirus or non-replicating virus fragment can be used to provide sufficient chimpanzee adenovirus gene sequences to produce an infective recombinant viral particle containing the cassette.

[0445] Useful helper viruses contain selected adenovirus gene sequences not present in the adenovirus vector construct and/or not expressed by the packaging cell line in which the vector is transfected. A helper virus can be replication-defective and contain a variety of adenovirus genes in addition to the sequences described above. The helper virus can be used in combination with the E1-expressing cell lines described herein.

[0446] For C68, the “helper” virus can be a fragment formed by clipping the C terminal end of the C68 genome with SspI, which removes about 1300 bp from the left end of the virus. This clipped virus is then co-transfected into an E1-expressing cell line with the plasmid DNA, thereby forming the recombinant virus by homologous recombination with the C68 sequences in the plasmid.

[0447] Helper viruses can also be formed into poly-cation conjugates as described in Wu et al, J. Biol. Chem., 264:16985-16987 (1989); K. J. Fisher and J. M. Wilson, Biochem. J., 299:49 (Apr. 1, 1994). Helper virus can optionally contain a reporter gene. A number of such reporter genes are known to the art. The presence of a reporter gene on the helper virus which is different from the antigen cassette on the adenovirus vector allows both the Ad vector and the helper virus to be independently monitored. This second reporter is used to enable separation between the resulting recombinant virus and the helper virus upon purification.

[0448] V.E.8. Assembly of Viral Particle and Infection of a Cell Line

[0449] Assembly of the selected DNA sequences of the adenovirus, the antigen cassette, and other vector elements into various intermediate plasmids and shuttle vectors, and the use of the plasmids and vectors to produce a recombinant viral particle can all be achieved using conventional techniques. Such techniques include conventional cloning techniques of cDNA, in vitro recombination techniques (e.g., Gibson assembly), use of overlapping oligonucleotide sequences of the adenovirus genomes, polymerase chain reaction, and any suitable method which provides the desired nucleotide sequence. Standard transfection and co-transfection techniques are employed, e.g., CaPO4 precipitation techniques or liposome-mediated transfection methods such as lipofectamine. Other conventional methods employed include homologous recombination of the viral genomes, plaquing of viruses in agar overlay, methods of measuring signal generation, and the like.

[0450] For example, following the construction and assembly of the desired antigen cassette-containing viral vector, the vector can be transfected in vitro in the presence of a helper virus into the packaging cell line. Homologous recombination occurs between the helper and the vector sequences, which permits the adenovirus-antigen sequences in the vector to be replicated and packaged into virion capsids, resulting in the recombinant viral vector particles.

[0451] The resulting recombinant chimpanzee C68 adenoviruses are useful in transferring an antigen cassette to a selected cell. In in vivo experiments with the recombinant virus grown in the packaging cell lines, the E1-deleted recombinant chimpanzee adenovirus demonstrates utility in transferring a cassette to a non-chimpanzee, preferably a human, cell.

[0452] V.E.9. Use of the Recombinant Virus Vectors

[0453] The resulting recombinant chimpanzee C68 adenovirus containing the antigen cassette thus provides an efficient gene transfer vehicle which can deliver antigen(s) to a subject in vivo or ex vivo.

[0454] The above-described recombinant vectors are administered to humans according to published methods for gene therapy. A chimpanzee viral vector bearing an antigen cassette can be administered to a patient, preferably suspended in a biologically compatible solution or pharmaceutically acceptable delivery vehicle, as described herein. A suitable vehicle includes sterile saline. Other aqueous and non-aqueous isotonic sterile injection solutions and aqueous and non-aqueous sterile suspensions known to be pharmaceutically acceptable carriers and well known to those of skill in the art may be employed for this purpose.

[0455] The chimpanzee adenoviral vectors are administered in sufficient amounts to transduce the human cells and to provide sufficient levels of antigen transfer and expression to provide a therapeutic benefit without undue adverse or with medically acceptable physiological effects, which can be determined by those skilled in the medical arts. Conventional and pharmaceutically acceptable routes of administration include, but are not limited to, direct delivery to the liver, intranasal, intravenous, intramuscular, subcutaneous, intradermal, oral and other parental routes of administration. Routes of administration may be combined, if desired.

[0456] Dosages of the viral vector will depend primarily on factors such as the condition being treated, the age, weight and health of the patient, and may thus vary among patients. The dosage will be adjusted to balance the therapeutic benefit against any side effects and such dosages may vary depending upon the therapeutic application for which the recombinant vector is employed. The levels of expression of antigen(s) can be monitored to determine the frequency of dosage administration.

[0457] Recombinant, replication defective adenoviruses can be administered in a “pharmaceutically effective amount”, that is, an amount of recombinant adenovirus that is effective in a route of administration to transfect the desired cells and provide sufficient levels of expression of the selected gene to provide a vaccinal benefit, i.e., some measurable level of protective immunity. C68 vectors comprising an antigen cassette can be co-administered with adjuvant. Adjuvant can be separate from the vector (e.g., alum) or encoded within the vector, in particular if the adjuvant is a protein. Adjuvants are well known in the art.

[0458] Conventional and pharmaceutically acceptable routes of administration include, but are not limited to, intranasal, intramuscular, intratracheal, subcutaneous, intradermal, rectal, oral and other parental routes of administration. Routes of administration may be combined, if desired, or adjusted depending upon the immunogen or the disease. For example, in prophylaxis of rabies, the subcutaneous, intratracheal and intranasal routes are preferred. The route of administration primarily will depend on the nature of the disease being treated.

[0459] The levels of immunity to antigen(s) can be monitored to determine the need, if any, for boosters. Following an assessment of antibody titers in the serum, for example, optional booster immunizations may be desired

[0460] V.F. Pharmaceutical Compositions

[0461] A vaccine composition can be a pharmaceutical composition that further comprises an adjuvant and/or a carrier. Examples of useful adjuvants and carriers are given herein below. A composition can be associated with a carrier such as a protein or an antigen-presenting cell such as a dendritic cell (DC) capable of presenting the peptide to a T-cell.

[0462] Adjuvants are any substance whose admixture into a vaccine composition increases or otherwise modifies the immune response to an antigen. Carriers can be scaffold structures, for example a polypeptide or a polysaccharide, to which an antigen, is capable of being associated. Optionally, adjuvants are conjugated covalently or non-covalently.

[0463] The ability of an adjuvant to increase an immune response to an antigen is typically manifested by a significant or substantial increase in an immune-mediated reaction, or reduction in disease symptoms. For example, an increase in humoral immunity is typically manifested by a significant increase in the titer of antibodies raised to the antigen, and an increase in T-cell activity is typically manifested in increased cell proliferation, or cellular cytotoxicity, or cytokine secretion. An adjuvant may also alter an immune response, for example, by changing a primarily humoral or Th response into a primarily cellular, or Th response.

[0464] Suitable adjuvants include, but are not limited to 1018 ISS, alum, aluminum salts, Amplivax, AS15, BCG, CP-870,893, CpG7909, CyaA, dSLIM, GM-CSF, IC30, IC31, Imiquimod, ImuFact IMP321, IS Patch, ISS, ISCOMATRIX, JuvImmune, LipoVac, MF59, monophosphoryl lipid A, Montanide IMS 1312, Montanide ISA 206, Montanide ISA 50V, Montanide ISA-51, OK-432, OM-174, OM-197-MP-EC, ONTAK, PepTel vector system, PLG microparticles, resiquimod, SRL172, Virosomes and other Virus-like particles, YF-17D, VEGF trap, R848, beta-glucan, Pam3Cys, Aquila's QS21 stimulon (Aquila Biotech, Worcester, Mass., USA) which is derived from saponin, mycobacterial extracts and synthetic bacterial cell wall mimics, and other proprietary adjuvants such as Ribi's Detox. Quil or Superfos. Adjuvants such as incomplete Freund's or GM-CSF are useful. Several immunological adjuvants (e.g., MF59) specific for dendritic cells and their preparation have been described previously (Dupuis M, et al., Cell Immunol. 1998; 186(1):18-27; Allison A C; Dev Biol Stand. 1998; 92:3-11). Also cytokines can be used. Several cytokines have been directly linked to influencing dendritic cell migration to lymphoid tissues (e.g., TNF-alpha), accelerating the maturation of dendritic cells into efficient antigen-presenting cells for T-lymphocytes (e.g., GM-CSF, IL-1 and IL-4) (U.S. Pat. No. 5,849,589, specifically incorporated herein by reference in its entirety) and acting as immunoadjuvants (e.g., IL-12) (Gabrilovich D I, et al., J Immunother Emphasis Tumor Immunol. 1996 (6):414-418).

[0465] CpG immunostimulatory oligonucleotides have also been reported to enhance the effects of adjuvants in a vaccine setting. Other TLR binding molecules such as RNA binding TLR 7, TLR 8 and/or TLR 9 may also be used.

[0466] Other examples of useful adjuvants include, but are not limited to, chemically modified CpGs (e.g. CpR, Idera), Poly(I:C)(e.g. polyi:CI2U), non-CpG bacterial DNA or RNA as well as immunoactive small molecules and antibodies such as cyclophosphamide, sunitinib, bevacizumab, celebrex, NCX-4016, sildenafil, tadalafil, vardenafil, sorafinib, XL-999, CP-547632, pazopanib, ZD2171, AZD2171, ipilimumab, tremelimumab, and SC58175, which may act therapeutically and/or as an adjuvant. The amounts and concentrations of adjuvants and additives can readily be determined by the skilled artisan without undue experimentation. Additional adjuvants include colony-stimulating factors, such as Granulocyte Macrophage Colony Stimulating Factor (GM-CSF, sargramostim).

[0467] A vaccine composition can comprise more than one different adjuvant. Furthermore, a therapeutic composition can comprise any adjuvant substance including any of the above or combinations thereof. It is also contemplated that a vaccine and an adjuvant can be administered together or separately in any appropriate sequence.

[0468] A carrier (or excipient) can be present independently of an adjuvant. In some aspects, the carrier is present in conjunction with the adjuvant. The function of a carrier can for example be to increase the molecular weight to increase activity or immunogenicity, to confer stability, to increase the biological activity, or to increase serum half-life. Furthermore, a carrier can aid presenting peptides to T-cells. A carrier can be any suitable carrier known to the person skilled in the art, for example a protein or an antigen presenting cell. A carrier protein could be but is not limited to keyhole limpet hemocyanin, serum proteins such as transferrin, bovine serum albumin, human serum albumin, thyroglobulin or ovalbumin, immunoglobulins, or hormones, such as insulin or palmitic acid. For immunization of humans, the carrier is generally a physiologically acceptable carrier acceptable to humans and safe. However, tetanus toxoid and/or diptheria toxoid are suitable carriers. Alternatively, the carrier can be dextrans for example sepharose.

[0469] Additional examples of carriers can be acqueous carriers such as water, buffered water, 0.9% saline, 0.3% glycine, hyaluronic acid and the like. These compositions can be sterilized by conventional, well known sterilization techniques, or can be sterile filtered. The resulting aqueous solutions can be packaged for use as is, or lyophilized, the lyophilized preparation being combined with a sterile solution prior to administration. The compositions may contain pharmaceutically acceptable auxiliary substances as required to approximate physiological conditions, such as pH adjusting and buffering agents, tonicity adjusting agents, wetting agents and the like, for example, sodium acetate, sodium lactate, sodium chloride, potassium chloride, calcium chloride, sorbitan monolaurate, triethanolamine oleate, etc.

[0470] Cytotoxic T-cells (CTLs) recognize an antigen in the form of a peptide bound to an MHC molecule rather than the intact foreign antigen itself. The MHC molecule itself is located at the cell surface of an antigen presenting cell. Thus, an activation of CTLs is possible if a trimeric complex of peptide antigen, MHC molecule, and APC is present. Correspondingly, it may enhance the immune response if not only the peptide is used for activation of CTLs, but if additionally APCs with the respective MHC molecule are added. Therefore, in some embodiments a vaccine composition additionally contains at least one antigen presenting cell.

[0471] In some aspects, any of the above compositions further comprise a nanoparticulate delivery vehicle. The nanoparticulate delivery vehicle, in some aspects, may be a lipid nanoparticle (LNP) or liposomes. In some aspects, the LNP comprises ionizable amino lipids. In some aspects, the ionizable amino lipids comprise MC3-like (dilinoleylmethyl-4-dimethylaminobutyrate) molecules. In some aspects, the nanoparticulate delivery vehicle encapsulates the antigen expression system.

[0472] In some aspects, any of the above compositions further comprise a plurality of LNPs, wherein the LNPs comprise: the antigen expression system; a cationic lipid; a non-cationic lipid; and a conjugated lipid that inhibits aggregation of the LNPs, wherein at least about 95% of the LNPs in the plurality of LNPs either: have a non-lamellar morphology; or are electron-dense.

[0473] In some aspects, the non-cationic lipid is a mixture of (1) a phospholipid and (2) cholesterol or a cholesterol derivative.

[0474] In some aspects, the conjugated lipid that inhibits aggregation of the LNPs is a polyethyleneglycol (PEG)-lipid conjugate. In some aspects, the PEG-lipid conjugate is selected from the group consisting of: a PEG-diacylglycerol (PEG-DAG) conjugate, a PEG dialkyloxypropyl (PEG-DAA) conjugate, a PEG-phospholipid conjugate, a PEG-ceramide (PEG-Cer) conjugate, and a mixture thereof. In some aspects the PEG-DAA conjugate is a member selected from the group consisting of a PEG-didecyloxypropyl (C₁₀) conjugate, a PEG-dilauryloxypropyl (C₁₂) conjugate, a PEG-dimyristyloxypropyl (C₁₄) conjugate, a PEG-dipalmityloxypropyl (C₁₆) conjugate, a PEG-distearyloxypropyl (C₁₈) conjugate, and a mixture thereof.

[0475] In some aspects, the antigen expression system is fully encapsulated in the LNPs.

[0476] In some aspects, the non-lamellar morphology of the LNPs comprises an inverse hexagonal (H_{II}) or cubic phase structure.

[0477] In some aspects, the cationic lipid comprises from about 10 mol % to about 50 mol % of the total lipid present in the LNPs. In some aspects, the cationic lipid comprises from about 20 mol % to about 50 mol % of the total lipid present in the LNPs. In some aspects, the cationic lipid comprises from about 20 mol % to about 40 mol % of the total lipid present in the LNPs.

[0478] In some aspects, the non-cationic lipid comprises from about 10 mol % to about 60 mol % of the total lipid present in the LNPs. In some aspects, the non-cationic lipid comprises from about 20 mol % to about 55 mol % of the total lipid present in the LNPs. In some aspects, the non-cationic lipid comprises from about 25 mol % to about 50 mol % of the total lipid present in the LNPs.

[0479] In some aspects, the conjugated lipid comprises from about 0.5 mol % to about 20 mol % of the total lipid present in the LNPs. In some aspects, the conjugated lipid comprises from about 2 mol % to about 20 mol % of the total lipid present in the LNPs. In some aspects, the conjugated lipid comprises from about 1.5 mol % to about 18 mol % of the total lipid present in the LNPs.

[0480] In some aspects, greater than 95% of the LNPs have a non-lamellar morphology. In some aspects, greater than 95% of the LNPs are electron dense.

[0481] In some aspects, any of the above compositions further comprise a plurality of LNPs, wherein the LNPs comprise: a cationic lipid comprising from 50 mol % to 65 mol % of the total lipid present in the LNPs; a conjugated lipid that inhibits aggregation of LNPs comprising from 0.5 mol % to 2 mol % of the total lipid present in the LNPs; and a non-cationic lipid comprising either: a mixture of a phospholipid and cholesterol or a derivative thereof, wherein the phospholipid comprises from 4 mol % to 10 mol % of the total lipid present in the LNPs and the cholesterol or derivative thereof comprises from 30 mol % to 40 mol % of the total lipid present in the LNPs; a mixture of a phospholipid and cholesterol or a derivative thereof, wherein the phospholipid comprises from 3 mol % to 15 mol % of the total lipid present in the LNPs and the cholesterol or derivative thereof comprises from 30 mol % to 40 mol % of the total lipid present in the LNPs; or up to 49.5 mol % of the total lipid present in the LNPs and comprising a mixture of a phospholipid and cholesterol or a derivative thereof, wherein the cholesterol or derivative thereof comprises from 30 mol % to 40 mol % of the total lipid present in the LNPs.

[0482] In some aspects, any of the above compositions further comprise a plurality of LNPs, wherein the LNPs comprise: a cationic lipid comprising from 50 mol % to 85 mol % of the total lipid present in the LNPs; a conjugated lipid that inhibits aggregation of LNPs comprising from 0.5 mol % to 2 mol % of the total lipid present in the LNPs; and a non-cationic lipid comprising from 13 mol % to 49.5 mol % of the total lipid present in the LNPs.

[0483] In some aspects, the phospholipid comprises dipalmitoylphosphatidylcholine (DPPC), distearoylphosphatidylcholine (DSPC), or a mixture thereof.

[0484] In some aspects, the conjugated lipid comprises a polyethyleneglycol (PEG)-lipid conjugate. In some aspects, the PEG-lipid conjugate comprises a PEG-diacylglycerol (PEG-DAG) conjugate, a PEG-dialkyloxypropyl (PEG-DAA) conjugate, or a mixture thereof. In some aspects, the PEG-DAA conjugate comprises a PEG-dimyristyloxypropyl (PEG-DMA) conjugate, a PEG-distearyloxypropyl (PEG-DSA) conjugate, or a mixture thereof. In some aspects, the PEG portion of the conjugate has an average molecular weight of about 2,000 daltons.

[0485] In some aspects, the conjugated lipid comprises from 1 mol % to 2 mol % of the total lipid present in the LNPs.

[0486] In some aspects, the LNP comprises a compound having a structure of Formula I:

[chemical structure]

or a pharmaceutically acceptable salt, tautomer, prodrug or stereoisomer thereof, wherein: L¹ and L² are each independently -0(C=0)-, —(C=0)0-, —C(=0)-, —0-, —S(0)ₓ—, —S—S—, —C(=0)S—, —SC(=0)-, —R^{a}C(=0)-, —C(═0) R^{a}—, —R^{a}C(=0)R^{a}—, —OC(═0)R^{a}—, —R^{a}C(=0)0- or a direct bond; G¹ is Ci-C₂ alkylene, —(C=0)-, -0(C=0)-, —SC(=0)-, —R^{a}C(=0)- or a direct bond: —C(=0)-, —(C=0)0-, —C(=0)S—, —C(=0)R^{a}— or a direct bond; G is C₁-C₆ alkylene; R^{a} is H or C1-C12 alkyl; R^{1a} and R^{1b} are, at each occurrence, independently either: (a) H or C₁-C₁₂ alkyl; or (b) R^{1a} is H or C₁-C₁₂ alkyl, and R^{1b} together with the carbon atom to which it is bound is taken together with an adjacent R^{1b} and the carbon atom to which it is bound to form a carbon-carbon double bond; R^{2a} and R^{2b} are, at each occurrence, independently either: (a) H or C₁-C₁₂ alkyl; or (b) R^{2a} is H or C₁-C₁₂ alkyl, and R^{2b} together with the carbon atom to which it is bound is taken together with an adjacent R^{2b} and the carbon atom to which it is bound to form a carbon-carbon double bond; R^{3a} and R^{3b} are, at each occurrence, independently either (a): H or C₁-C₁₂ alkyl; or (b) R^{3a} is H or C₁-C₁₂ alkyl, and R^{3b} together with the carbon atom to which it is bound is taken together with an adjacent R and the carbon atom to which it is bound to form a carbon-carbon double bond; R^{4a} and R^{4b} are, at each occurrence, independently either: (a) H or C1-C12 alkyl; or (b) R^{4a} is H or C1-C12 alkyl, and R^{4b} together with the carbon atom to which it is bound is taken together with an adjacent R^{4b} and the carbon atom to which it is bound to form a carbon-carbon double bond; R⁵ and R⁶ are each independently H or methyl; R⁷ is C4-C20 alkyl; R⁸ and R⁹ are each independently C1-C12 alkyl; or R⁸ and R⁹, together with the nitrogen atom to which they are attached, form a 5, 6 or 7-membered heterocyclic ring; a, b, c and d are each independently an integer from 1 to 24; and x is 0, 1 or 2.

[0487] In some aspects, the LNP comprises a compound having a structure of Formula II:

[chemical structure]

or a pharmaceutically acceptable salt, tautomer, prodrug or stereoisomer thereof, wherein: L¹ and L² are each independently -0(C=0)-, —(C=0)0- or a carbon-carbon double bond; R^{1a} and R^{1b} are, at each occurrence, independently either (a) H or C₁-C₁₂ alkyl, or (b) R^{1a} is H or C₁-C₁₂ alkyl, and R^{1b} together with the carbon atom to which it is bound is taken together with an adjacent R^{1b} and the carbon atom to which it is bound to form a carbon-carbon double bond; R^{2a} and R^{2b} are, at each occurrence, independently either (a) H or C₁-C₁₂ alkyl, or (b) R^{2a} is H or C₁-C₁₂ alkyl, and R^{2b} together with the carbon atom to which it is bound is taken together with an adjacent R^{2b} and the carbon atom to which it is bound to form a carbon-carbon double bond; R^{3a} and R^{3b} are, at each occurrence, independently either (a) H or C₁-C₁₂ alkyl, or (b) R^{3a} is H or C₁-C₁₂ alkyl, and R^{3b} together with the carbon atom to which it is bound is taken together with an adjacent R^{3b} and the carbon atom to which it is bound to form a carbon-carbon double bond; R^{4a} and R^{4b} are, at each occurrence, independently either (a) H or C₁-C₁₂ alkyl, or (b) R^{4a} is H or C₁-C₁₂ alkyl, and R^{4b} together with the carbon atom to which it is bound is taken together with an adjacent R^{4b} and the carbon atom to which it is bound to form a carbon-carbon double bond; R⁵ and R⁶ are each independently methyl or cycloalkyl; R⁷ is, at each occurrence, independently H or C₁-C₁₂ alkyl; R⁸ and R⁹ are each independently unsubstituted C1-C12 alkyl; or R⁸ and R⁹, together with the nitrogen atom to which they are attached, form a 5, 6 or 7-membered heterocyclic ring comprising one nitrogen atom; a and d are each independently an integer from 0 to 24; b and c are each independently an integer from 1 to 24; and e is 1 or 2, provided that: at least one of R^{1a}, R^{2a}, R^{3a} or R^{4a} is C1-C12 alkyl, or at least one of L¹ or L² is -0(C=0)- or —(C=0)0-; and R^{1a} and R^{1b} are not isopropyl when a is 6 or n-butyl when a is 8.

[0488] In some aspects, any of the above compositions further comprise one or more excipients comprising a neutral lipid, a steroid, and a polymer conjugated lipid. In some aspects, the neutral lipid comprises at least one of 1,2-Distearoyl-sn-glycero-3-phosphocholine (DSPC), 1,2-Dipalmitoyl-sn-glycero-3-phosphocholine (DPPC), 1,2-Dimyristoyl-sn-glycero-3-phosphocholine (DMPC), 1-Palmitoyl-2-oleoyl-sn-glycero-3-phosphocholine (POPC), 1,2-dioleoyl-sn-glycero-3-phosphocholine (DOPC), and 1,2-Dioleoyl-sn-glycero-3-phosphoethanolamine (DOPE). In some aspects, the neutral lipid is DSPC.

[0489] In some aspects, the molar ratio of the compound to the neutral lipid ranges from about 2:1 to about 8:1.

[0490] In some aspects, the steroid is cholesterol. In some aspects, the molar ratio of the compound to cholesterol ranges from about 2:1 to 1:1.

[0491] In some aspects, the polymer conjugated lipid is a pegylated lipid. In some aspects, the molar ratio of the compound to the pegylated lipid ranges from about 100:1 to about 25:1. In some aspects, the pegylated lipid is PEG-DAG, a PEG polyethylene (PEG-PE), a PEG-succinoyl-diacylglycerol (PEG-S-DAG), PEG-cer or a PEG dialkyoxypropylcarbamate. In some aspects, the pegylated lipid has the following structure III:

[chemical structure]

or a pharmaceutically acceptable salt, tautomer or stereoisomer thereof, wherein: R¹⁰ and R¹¹ are each independently a straight or branched, saturated or unsaturated alkyl chain containing from 10 to 30 carbon atoms, wherein the alkyl chain is optionally interrupted by one or more ester bonds; and z has a mean value ranging from 30 to 60. In some aspects, R¹⁰ and R¹¹ are each independently straight, saturated alkyl chains having 12 to 16 carbon atoms. In some aspects, the average z is about 45.

[0492] In some aspects, the LNP self-assembles into non-bilayer structures when mixed with polyanionic nucleic acid. In some aspects, the non-bilayer structures have a diameter between 60 nm and 120 nm. In some aspects, the non-bilayer structures have a diameter of about 70 nm, about 80 nm, about 90 nm, or about 100 nm. In some aspects, wherein the nanoparticulate delivery vehicle has a diameter of about 100 nm.

[0493] In some aspects, a targeting ligand can be included with the lipid nanoparticle. For example, the targeting ligand can be incorporated into the liposome and can include antibodies or fragments thereof specific for cell surface determinants of the desired immune system cells.

[0494] Also disclosed herein is a pharmaceutical composition comprising any of the compositions disclosed herein (such as an alphavirus-based or ChAd-based vector disclosed herein) and a pharmaceutically acceptable adjuvant and/or carrier.

### VI. Therapeutic Methods

[0495] Also provided is a method of inducing a HIV specific immune response in a subject, vaccinating against HIV (e.g., a prophylactic treatment), treating and or alleviating a symptom of HIV in a subject by administering to the subject one or more antigens such as a plurality of antigens identified using methods disclosed herein.

[0496] In some aspects, a subject has been diagnosed with HIV, at risk of contracting HIV, or at risk of exposure to HIV. A subject can be a human, dog, cat, horse or any animal in which a HIV specific immune response is desired.

[0497] A vaccine composition can be administered such that the amount of one or more antigens in the vaccine composition is sufficient to induce a CTL response.

[0498] A vaccine composition can be administered alone or in combination with other therapeutic agents. A therapeutic agent is for example, anti-retrovirals such as nucleoside reverse transcriptase inhibitors (NRTIs), nonnucleoside reverse transcriptase inhibitors (NNRTIs), protease inhibitors (PIs), fusion inhibitors, Entry inhibitors—CCr5 co-receptor antagonist, or HIV integrase strand transfer inhibitors.

[0499] The optimum amount of each antigen to be included in a vaccine composition and the optimum dosing regimen can be determined. For example, an antigen or its variant can be prepared for intravenous (i.v.) injection, sub-cutaneous (s.c.) injection, intradermal (i.d.) injection, intraperitoneal (i.p.) injection, intramuscular (i.m.) injection, parenteral, topical, nasal, oral, or local administration. Methods of injection include s.c., i.d., i.p., i.m., and i.v. Methods of DNA or RNA injection include i.d., i.m., s.c., i.p. and i.v. Other methods of administration of the vaccine composition are known to those skilled in the art.

[0500] Compositions comprising an antigen can be administered to an individual already suffering from HIV. In therapeutic applications, compositions are administered to a patient in an amount sufficient to elicit an effective CTL response to the HIV antigen and to cure or at least partially arrest symptoms, complications, and/or progression of HIV. An amount adequate to accomplish this is defined as “therapeutically effective dose.” Amounts effective for this use will depend on, e.g., the composition, the manner of administration, the stage and severity of HIV being treated, the weight and general state of health of the patient, and the judgment of the prescribing physician. In some instances, the vaccine composition can be administered sequentially where subsequent administrations represent boosting doses. Such boosting doses can be further administered until at least symptoms are substantially abated and for a period

[0501] A vaccine can be compiled so that the selection, number and/or amount of antigens present in the composition is specific for a particular category, type, or subtype of HIV and specific for a patient. Additionally, the selection can be dependent on the status (e.g., early stage or late stage) of the disease, earlier treatment regimens, the immune status of the patient, and the HLA-haplotype of the patient. Furthermore, a vaccine can contain individualized components, according to personal needs of the particular patient. Examples include varying the selection of antigens according to the expression of the antigen in the particular patient or adjustments for secondary treatments following a first round or scheme of treatment.

### VII. Selecting a Subject for Administering an Antigen-Based Vaccine

[0502] A subject can be identified as a candidate for receiving an antigen-based vaccine through the use of various diagnostic methods. Reference is made to FIG. 34 depicts a flow process 3400 for providing an antigen-based vaccine to the subject, in accordance with one embodiment.

[0503] In one aspect, patient selection for antigen vaccination is performed by considering the subject's HLA type. In one aspect, patient selection for antigen vaccination is performed by considering a HIV subtype that the subject was exposed to or will likely become exposed to. In some aspects, patient selection for antigen vaccination is performed by considering both 1) the subject's HLA type and 2) a HIV subtype that the subject was exposed to or will likely become exposed to.

[0504] As an example, a subject is considered eligible for the vaccine therapy if 1) the subject carries an HLA allele predicted or known to present an antigen with an epitope sequence included in a vaccine, and 2) the subject was exposed to a HIV subtype that expresses the antigen with the epitope sequence. As another example, the subject is considered eligible for the vaccine therapy if 1) the subject carries an HLA allele predicted or known to present an antigen with an epitope sequence included in a vaccine, and 2) the patient is susceptible to exposure to a particular HIV subtype that expresses the antigen with the epitope sequence.

[0505] VII.A. Isolation and Detection of HLA Peptides

[0506] At step 3410, whether the subject expresses one or more HLA alleles is determined. In one aspect, the one or more HLA alleles are class I HLA alleles, class II HLA alleles, or both class I and class II HLA alleles.

[0507] In one aspect, determining whether the subject expresses one or more HLA alleles involves a population-based analysis. More specifically, determining whether the subject expresses one or more HLA alleles includes determining the origin of the subject and further identifying one or more HLA alleles that are known to be commonly expressed by the population of individuals of that origin. Examples of an origin can be ethnicity, geographic location, birth location, or ancestry. In one embodiment, an HLA allele is considered commonly expressed by the population of individuals of an origin if there is a greater than 95% chance that an individual of that origin expresses that HLA allele. In some embodiments, an HLA allele is considered commonly expressed by the population of individuals of an origin if there is a greater than a 50, 55, 60, 65, 70, 75, 80, 85, or 90% chance that an individual of that origin expresses that HLA allele. For example, a subject is determined to be of European origin and individuals of European origin are known to express one or more HLA alleles. Thus, the subject of European origin is determined to express the known one or more HLA alleles expressed by individuals of European origin. Common expression of HLA alleles based on an origin can be found in available databases such as http://www.ebi.ac.uk/imgt/hla/ambig.html.

[0508] In one aspect, determining whether the subject expresses one or more HLA alleles involves identifying the haplotype of the patient though high-throughput sequencing or Sanger sequencing diagnostic methods. Example patient haplotypes are documented in the column entitled “HLA alleles” in Tables 35-45. First, isolation of HLA-peptide molecules is performed using classic immunoprecipitation (IP) methods on a sample. In some aspects, the sample is a tissue sample and prior to IP, the tissue sample is lysed and solubilized. A clarified lysate is used for HLA specific IP.

[0509] Immunoprecipitation is performed using antibodies coupled to beads where the antibody is specific for HLA molecules. For a pan-Class I HLA immunoprecipitation, a pan-Class I CR antibody is used, for Class II HLA-DR, an HLA-DR antibody is used. Antibody is covalently attached to NHS-sepharose beads during overnight incubation. After covalent attachment, the beads were washed and aliquoted for IP. Immunoprecipitations can also be performed with antibodies that are not covalently attached to beads. Typically this is done using sepharose or magnetic beads coated with Protein A and/or Protein G to hold the antibody to the column. Some antibodies that can be used to selectively enrich MHC/peptide complex are listed below.

| Antibody Name | Specificity |
|---|---|
| W6/32 | Class I HLA-A, B, C |
| L243 | Class II-HLA-DR |
| Tu36 | Class II-HLA-DR |
| LN3 | Class II-HLA-DR |
| Tu39 | Class II-HLA-DR, DP, DQ |

[0510] The clarified tissue lysate is added to the antibody beads for the immunoprecipitation. After immunoprecipitation, the beads are removed from the lysate and the lysate stored for additional experiments, including additional IPs. The IP beads are washed to remove non-specific binding and the HLA/peptide complex is eluted from the beads using standard techniques. The protein components are removed from the peptides using a molecular weight spin column or C18 fractionation. The resultant peptides are taken to dryness by SpeedVac evaporation and in some instances are stored at −20 C prior to MS analysis.

[0511] Dried peptides are reconstituted in an HPLC buffer suitable for reverse phase chromatography and loaded onto a C-18 microcapillary HPLC column for gradient elution in a Fusion Lumos mass spectrometer (Thermo). MS1 spectra of peptide mass/charge (m/z) were collected in the Orbitrap detector at high resolution followed by MS2 low resolution scans collected in the ion trap detector after HCD fragmentation of the selected ion. Additionally, MS2 spectra can be obtained using either CID or ETD fragmentation methods or any combination of the three techniques to attain greater amino acid coverage of the peptide. MS2 spectra can also be measured with high resolution mass accuracy in the Orbitrap detector.

[0512] MS2 spectra from each analysis are searched against a protein database using Comet and the peptide identification are scored using Percolator. Additional sequencing is performed using PEAKS studio (Bioinformatics Solutions Inc.) and other search engines or sequencing methods can be used including spectral matching and de novo sequencing.

[0513] In one aspect, the subject is deemed to be expressing an HLA allele if the HLA allele has an HLA frequency of at least 0.5%. In some aspects, the subject deemed to be expressing an HLA allele if the HLA allele has a HLA frequency of at least 1%, 2%, 3%, 4%, or 5%.

[0514] VII.B.1. MS Limit of Detection Studies in Support of Comprehensive HLA Peptide Sequencing.

[0515] Using the peptide YVYVADVAAK (SEQ ID NO: 94), it was determined what the limits of detection are using different amounts of peptide loaded onto the LC column. The amounts of peptide tested were 1 pmol, 100 fmol, 10 fmol, 1 fmol, and 100 amol. (Table 2) The results are shown in FIGS. 19A and 19B. These results indicate that the lowest limit of detection (LoD) is in the attomol range (10⁻¹⁸), that the dynamic range spans five orders of magnitude, and that the signal to noise appears sufficient for sequencing at low femtomol ranges (10⁻¹⁵).

TABLE 2

| Peptide m/z | Loaded on Column | | Copies/Cell in 1e9cells |
|---|---|---|---|
| 566.830 | 1 | pmol | 600 |
| 562.823 | 100 | fmol | 60 |
| 559.816 | 10 | fmol | 6 |
| 556.810 | 1 | fmol | 0.6 |
| 553.802 | 100 | amol | 0.06 |

[0516] VII.B. Identifying HIV Subtype

[0517] Returning to FIG. 34, at step 3420, a HIV subtype that the subject has been exposed to or a HIV subtype that the subject is susceptible to is identified.

[0518] To identify a HIV subtype that a subject has been exposed to, a test sample is obtained from the subject. The test sample can be any of blood, seminal fluid, ocular lens fluid, cerebral spinal fluid, saliva, synovial fluid, peritoneal fluid, amniotic fluid, tissue, or needle aspirate. A HIV isolate is extracted from the test sample. In one aspect, extraction includes separating cellular components in the test sample from HIV isolate through centrifugation and the HIV isolate can be retained in the supernatant. In one aspect, extraction includes lysing and solubilizing the test sample. The lysate can be further clarified (e.g., centrifuged/filtered) to obtain a HIV isolate.

[0519] Detection of the HIV subtype in the HIV isolates can be conducted using enzyme-linked immunosorbent assay (ELISA), dot blot assays, HIV spot and comb tests, immunofluorescence tests, or Western blot. In some aspects, detection of the HIV subtype in the HIV isolate is conducted by amplifying the viral nucleic acid in the HIV isolates (e.g., polymerase chain reaction). The HIV isolates are mixed with amplification reagents and a set of primers to amplify target sequences of the particular HIV subtype. The amplified target sequences can then be detected using a variety of detection technologies. For example, exposure of the target sequences to probes would form a probe/sequence product, which can be further detected as an indication of the presence of a particular HIV subtype. Example primers and probes for detecting particular HIV subtypes are described in WO 2003020878, which is hereby incorporated by reference in its entirety.

[0520] A patient can be susceptible to exposure to a particular HIV subtype based on the prevalence of HIV subtypes at the patient's current geographic location or the patient's future, planned geographic destination. For example, a patient can be susceptible to HIV subtype A1 and A2 if the patient is located at or planning to travel to Central and East African countries. A patient can be susceptible to HIV subtype B if the patient is located at or planning to travel to West and Central Europe, North or South America, Australia, or Southeast Asia. A patient can be susceptible to HIV subtype C if the patient is located at or planning to travel to Sub-Saharan Africa, India, or Brazil. A patient can be susceptible to HIV subtype D if the patient is located at or planning to travel to North Africa or the Middle East. A patient can be susceptible to HIV subtype F1 or F2 if the patient is located at or planning to travel to South or Southeast Asia. A patient can be susceptible to HIV subtype G if the patient is located at or planning to travel to West or Central Africa. A patient can be susceptible to HIV subtypes H if the patient is located at or planning to travel to Central Africa. A patient can be susceptible to HIV subtype J if the patient is located at or planning to travel to North, Central, or West Africa, or the Carribean. A patient can be susceptible to HIV subtype K if the patient is located at or planning to travel to the Democratic Republic of Congo or Cameroon.

[0521] In some embodiments, an understanding of the HIV subtype is not needed and therefore, step 3420 need not be performed. For example, if a vaccine includes sufficient antigens such that the vaccine can be predicted to be efficacious against multiple HIV subtypes, then identification if the particular HIV subtype for this subject is not needed.

[0522] VII.C. Candidate Patient

[0523] Returning to FIG. 34, at step 3430, the subject is identified as a candidate for receiving an antigen-based vaccine. Generally, the subject is identified as a candidate if the subject expresses a HLA allele (determined at step 3410) and the HLA allele is known or predicted to likely present a HIV antigen with an epitope sequence that is expressed by the identified HIV subtype (identified at step 3420). Tables 35-45 show pairings of HLA alleles and epitope sequences, where each HLA allele in a pair is predicted to present a corresponding epitope sequence.

[0524] At step 3440, an antigen-based vaccine is selected based on the HLA alleles expressed by the subject and the identified HIV subtype. In one aspect, the antigen-based vaccine is a personalized vaccine that was previously developed 1) for subjects that express the HLA alleles and 2) for the particular identified HIV subtype. For example, the antigen-based vaccine can include 1, 2, 3, 4, 5, 6, 7, 8, 9, or 10 epitopes that are known to be expressed by the identified HIV subtype, each of the epitopes known or predicted to likely be presented by the proteins corresponding to expressed HLA alleles of the subjects. As another example, the antigen-based vaccine can include antigen-encoding nucleic acid sequences that encode for antigens that include the epitope sequences. Such epitope sequences are known or predicted to likely be presented by the proteins corresponding to expressed HLA alleles of the subjects.

[0525] At step 3450, the selected antigen-based vaccine is administered to the subject.

[0526] In some aspects, the steps in the flow process 3400 can be differently ordered than as shown in FIG. 34. For example, the HIV subtype may be identified (step 3420) prior to determining the subject's expression of one or more HLA alleles (step 3410).

[0527] VII.D. Alternate Embodiment for Selecting a Subject for Administering an Antigen-Based Vaccine

[0528] Reference is made to FIG. 35 depicts a flow process 3500 for providing an antigen-based vaccine to the subject, in accordance with a second embodiment. Given the high mutation rate of HIV, in some scenarios, particular epitope sequences of proteins derived from HIV may be mutated. Such mutations may have arisen in the HIV after the HIV infected the subject. Additionally, these mutated epitope sequences may be presented by HLA alleles of a subject. Thus, FIG. 35 depicts a flow process for providing a personalized antigen-based vaccine to a subject, where the antigen-based vaccine includes antigens with mutated epitope sequences corresponding to HIV that the subject was previously exposed to.

[0529] At step 3510, whether the subject expresses one or more HLA alleles is determined. Similar to step 3410 shown in FIG. 34, the determination of whether the subject expresses one or more HLA alleles involves performing ancestral population-based analysis or involves identifying the haplotype of the patient.

[0530] At step 3520, sequencing data of HIV that the subject was exposed to is obtained. In one aspect, a sample containing HIV can be obtained from the subject and the HIV is then sequenced. As an example, the sample can be obtained from the subject's lymph nodes and the HIV can be sequenced according to the methods described above in the section entitled “Identifying HIV epitope sequences.”

[0531] At step 3530, candidate epitope sequences are selected for inclusion in an antigen-based vaccine. To identify candidate epitope sequences, a presentation model can be applied to the sequencing data of HIV. The presentation model is described in further detail below. In some aspects, the candidate epitope sequences include mutated epitope sequences identified from the obtained sequencing data of HIV. Such mutated epitope sequences may not appear in Tables 35-45. In some aspects, the candidate epitope sequences include any of the epitope sequences shown in Tables 35-45 (e.g., any of SEQ ID Nos: 325-22349). In some aspects, the candidate epitope sequences include validated HIV epitope sequences. In some aspects, the candidate epitope sequences include any combination of mutated epitope sequences, epitope sequences shown in Tables 35-45 (any of SEQ ID Nos: 325-22349), and validated HIV epitope sequences.

[0532] At step 3540, the antigen-based vaccine is generated, the vaccine including the selected candidate epitope sequences. Thus, the antigen-based vaccine is a personalized vaccine for the subject as it includes the mutated epitope sequences that are specific for the mutated epitope sequences expressed by HIV that has infected the subject.

[0533] At step 3550, the antigen-based vaccine is administered to the subject.

### VIII. Vaccine Manufacturing

[0534] Also disclosed is a method of manufacturing an antigen-based vaccine, comprising performing the steps of a method disclosed herein; and producing an antigen-based vaccine comprising a plurality of antigens or a subset of the plurality of antigens.

[0535] Antigens disclosed herein can be manufactured using methods known in the art. For example, a method of producing an antigen or a vector (e.g., a vector including at least one sequence encoding one or more antigens) disclosed herein can include culturing a host cell under conditions suitable for expressing the antigen or vector wherein the host cell comprises at least one polynucleotide encoding the antigen or vector, and purifying the antigen or vector. Standard purification methods include chromatographic techniques, electrophoretic, immunological, precipitation, dialysis, filtration, concentration, and chromatofocusing techniques.

[0536] Host cells can include a Chinese Hamster Ovary (CHO) cell, NS0 cell, yeast, or a HEK293 cell. Host cells can be transformed with one or more polynucleotides comprising at least one nucleic acid sequence that encodes an antigen or vector disclosed herein, optionally wherein the isolated polynucleotide further comprises a promoter sequence operably linked to the at least one nucleic acid sequence that encodes the antigen or vector. In certain embodiments the isolated polynucleotide can be cDNA.

### IX. Vaccination Protocol

[0537] A vaccination protocol can be used to dose a subject with one or more antigens. A priming vaccine and a boosting vaccine can be used to dose the subject. In various embodiments, the priming vaccine can be based on C68 (e.g., the sequences shown in SEQ ID NO:1 or 2) or srRNA (e.g., the sequences shown in SEQ ID NO:3 or 4) and the boosting vaccine can be based on C68 (e.g., the sequences shown in SEQ ID NO:1 or 2) or srRNA (e.g., the sequences shown in SEQ ID NO:3 or 4). In various embodiments, the priming vaccine can be based on alphavirus and the boosting vaccine can be based on alphavirus. In various embodiments, the priming vaccine can be based on C68 and the boosting vaccine can be based on alphavirus.

[0538] Each vector typically includes a cassette that includes antigens. Cassettes can include about 20 antigens, separated by spacers such as the natural sequence that normally surrounds each antigen or other non-natural spacer sequences such as AAY. Cassettes can also include MHCII antigens such a tetanus toxoid antigen and PADRE antigen, which can be considered universal class II antigens. Cassettes can also include a targeting sequence such as a ubiquitin targeting sequence. In addition, each vaccine dose can be administered to the subject in conjunction with (e.g., concurrently, before, or after) anti-retrovirals such as nucleoside reverse transcriptase inhibitors (NRTIs), nonnucleoside reverse transcriptase inhibitors (NNRTIs), protease inhibitors (PIs), fusion inhibitors, Entry inhibitors—CCr5 co-receptor antagonist, or HIV integrase strand transfer inhibitors.

[0539] A priming vaccine can be injected (e.g., intramuscularly) in a subject. Bilateral injections per dose can be used. For example, one or more injections of ChAdV68 (C68) can be used (e.g., total dose 1×10¹² viral particles); one or more injections of self-replicating RNA (srRNA) at low vaccine dose selected from the range 0.001 to 1 ug RNA, in particular 0.1 or 1 ug can be used; or one or more injections of srRNA at high vaccine dose selected from the range 1 to 100 ug RNA, in particular 10 or 100 ug can be used.

[0540] A vaccine boost (boosting vaccine) can be injected (e.g., intramuscularly) after prime vaccination. A boosting vaccine can be administered about every 1, 2, 3, 4, 5, 6, 7, 8, 9, or 10 weeks, e.g., every 4 weeks and/or 8 weeks after the prime. Bilateral injections per dose can be used. For example, one or more injections of ChAdV68 (C68) can be used (e.g., total dose 1×10¹² viral particles); one or more injections of self-replicating RNA (srRNA) at low vaccine dose selected from the range 0.001 to 1 ug RNA, in particular 0.1 or 1 ug can be used; or one or more injections of srRNA at high vaccine dose selected from the range 1 to 100 ug RNA, in particular 10 or 100 ug can be used.

[0541] Immune monitoring can be performed before, during, and/or after vaccine administration. Such monitoring can inform safety and efficacy, among other parameters.

[0542] To perform immune monitoring, PBMCs are commonly used. PBMCs can be isolated before prime vaccination, and after prime vaccination (e.g. 4 weeks and 8 weeks). PBMCs can be harvested just prior to boost vaccinations and after each boost vaccination (e.g. 4 weeks and 8 weeks).

[0543] T cell responses can be assessed as part of an immune monitoring protocol. T cell responses can be measured using one or more methods known in the art such as ELISpot, intracellular cytokine staining, cytokine secretion and cell surface capture, T cell proliferation, MHC multimer staining, or by cytotoxicity assay. T cell responses to epitopes encoded in vaccines can be monitored from PBMCs by measuring induction of cytokines, such as IFN-gamma, using an ELISpot assay. Specific CD4 or CD8 T cell responses to epitopes encoded in vaccines can be monitored from PBMCs by measuring induction of cytokines captured intracellularly or extracellularly, such as IFN-gamma, using flow cytometry. Specific CD4 or CD8 T cell responses to epitopes encoded in the vaccines can be monitored from PBMCs by measuring T cell populations expressing T cell receptors specific for epitope/MHC class I complexes using MHC multimer staining. Specific CD4 or CD8 T cell responses to epitopes encoded in the vaccines can be monitored from PBMCs by measuring the ex vivo expansion of T cell populations following 3H-thymidine, bromodeoxyuridine and carboxyfluoresceine-diacetate-succinimidylester (CFSE) incorporation. The antigen recognition capacity and lytic activity of PBMC-derived T cells that are specific for epitopes encoded in vaccines can be assessed functionally by chromium release assay or alternative colorimetric cytotoxicity assays.

### X. Identifying Candidate Antigens

[0544] Candidate antigens can be identified using computational prediction models that predict how likely different antigens are to be presented by HLA alleles. The training and deployment of such computational prediction models, also referred to as presentation models or machine learning models, is discussed in the following sections.

[0545] X.A. Presentation Model

[0546] Presentation models, also referred to as machine learning models, can be used to identify likelihoods of peptide presentation in patients. Various presentation models are known to those skilled in the art, for example the presentation models described in more detail in international patent application publications WO/2017/106638, WO/2018/195357, WO/2018/208856, WO2016187508, US patent application US20110293637, and PCT/US19/33830, each herein incorporated by reference, in their entirety, for all purposes.

[0547] X.B. Training Module

[0548] Training modules can be used to construct one or more presentation models based on training data sets that generate likelihoods of whether peptide sequences will be presented by MHC alleles associated with the peptide sequences. Various training modules are known to those skilled in the art, for example the presentation models described in more detail in international patent application publications WO/2017/106638, WO/2018/195357, WO/2018/208856, and PCT/US19/33830, each herein incorporated by reference, in their entirety, for all purposes. A training module can construct a presentation model to predict presentation likelihoods of peptides on a per-allele basis. A training module can also construct a presentation model to predict presentation likelihoods of antigens in a multiple-allele setting where two or more MHC alleles are present.

[0549] X.C. Prediction Module

[0550] A prediction module can be used to receive sequence data and select candidate epitope sequences in the sequence data using a presentation model. Specifically, the sequence data may be DNA sequences, RNA sequences, and/or protein sequences corresponding to the HIV genome. For example, sequence data may be a HIV epitope sequence (e.g., 8-11 amino acid residues in length) encoded by a gene in the HIV genome.

[0551] Generally, a presentation module can apply one or more presentation models to estimate presentation likelihoods of each peptide sequence. The prediction module selects one or more candidate epitope sequences that are likely to be presented on HLA molecules based on the estimated presentation likelihoods. In one embodiment, the presentation module applies presentation models to epitope sequences to estimate presentation likelihoods. In some embodiments, the presentation module applies presentation models to encoded representations of epitope sequences to estimate presentation likelihoods. Such encoded representations may be feature vectors of the peptide sequences. The presentation model outputs estimated presentation likelihoods of antigen presentation in patients.

[0552] In one implementation, the presentation module selects candidate epitope sequences that have estimated presentation likelihoods above a predetermined threshold. In another implementation, the presentation model selects the N candidate epitope sequences that have the highest estimated presentation likelihoods (where N is generally the maximum number of epitopes that can be delivered in a vaccine).

[0553] In some aspects, the presentation module may further prioritize the candidate epitope sequences by analyzing the structure of antigens that include the candidate epitope sequences. For example, the presentation module may analyze the structure of HIV antigens that include the candidate epitope sequences in order to identify particular amino acid residues or mutations of particular amino acid residues that are highly influential in HIV activity (e.g., viral replication/infection and ability to escape the immune system). Epitope sequences with these identified particular amino acid residues can be ranked more highly. Example analysis, also referred to as structure-based network analysis, is described in further detail in “Structural topology defines protective CD8+ T cell epitopes in the HIV proteome,” which is hereby incorporated by reference in its entirety.¹⁰⁶

### XI. Cassette Design Module

[0554] A cassette design module can generate a vaccine cassette sequence based on selected candidate peptides. For example, the cassette design module can select, for inclusion in the vaccine cassette sequence, antigen-encoding nucleic acid sequences that encode for the selected candidate peptides. Various cassette design modules are known to those skilled in the art, for example the cassette design modules described in more detail in international patent application publications WO/2017/106638, WO/2018/195357, and WO/2018/208856, each herein incorporated by reference, in their entirety, for all purposes.

[0555] A set of therapeutic epitopes may be generated based on the selected peptides determined by a prediction module associated with presentation likelihoods above a predetermined threshold, where the presentation likelihoods are determined by the presentation models. However it is appreciated that in other embodiments, the set of therapeutic epitopes may be generated based on any one or more of a number of methods (alone or in combination), for example, based on binding affinity or predicted binding affinity to HLA class I or class II alleles of the patient, binding stability or predicted binding stability to HLA class I or class II alleles of the patient, random sampling, and the like.

[0556] Therapeutic epitopes may correspond to selected peptides themselves. Therapeutic epitopes may also include C- and/or N-terminal flanking sequences in addition to the selected peptides. N- and C-terminal flanking sequences can be the native N- and C-terminal flanking sequences of the therapeutic vaccine epitope in the context of its source protein. Therapeutic epitopes can represent a fixed-length epitope. Therapeutic epitopes can represent a variable-length epitope, in which the length of the epitope can be varied depending on, for example, the length of the C- or N-flanking sequence. For example, the C-terminal flanking sequence and the N-terminal flanking sequence can each have varying lengths of 2-5 residues, resulting in 16 possible choices for the epitope.

[0557] A cassette design module can also generate cassette sequences by taking into account presentation of junction epitopes that span the junction between a pair of therapeutic epitopes in the cassette. Junction epitopes are novel non-self but irrelevant epitope sequences that arise in the cassette due to the process of concatenating therapeutic epitopes and linker sequences in the cassette. The novel sequences of junction epitopes are different from the therapeutic epitopes of the cassette themselves.

[0558] A cassette design module can generate a cassette sequence that reduces the likelihood that junction epitopes are presented in the patient. Specifically, when the cassette is injected into the patient, junction epitopes have the potential to be presented by HLA class I or HLA class II alleles of the patient, and stimulate a CD8 or CD4 T-cell response, respectively. Such reactions are often times undesirable because T-cells reactive to the junction epitopes have no therapeutic benefit, and may diminish the immune response to the selected therapeutic epitopes in the cassette by antigenic competition.⁷⁶

[0559] A cassette design module can iterate through one or more candidate cassettes, and determine a cassette sequence for which a presentation score of junction epitopes associated with that cassette sequence is below a numerical threshold. The junction epitope presentation score is a quantity associated with presentation likelihoods of the junction epitopes in the cassette, and a higher value of the junction epitope presentation score indicates a higher likelihood that junction epitopes of the cassette will be presented by HLA class I proteins or HLA class II proteins or both.

[0560] In one embodiment, a cassette design module may determine a cassette sequence associated with the lowest junction epitope presentation score among the candidate cassette sequences.

[0561] A cassette design module may iterate through one or more candidate cassette sequences, determine the junction epitope presentation score for the candidate cassettes, and identify an optimal cassette sequence associated with a junction epitope presentation score below the threshold.

[0562] A cassette design module may further check the one or more candidate cassette sequences to identify if any of the junction epitopes in the candidate cassette sequences are self-epitopes for a given patient for whom the vaccine is being designed. To accomplish this, the cassette design module checks the junction epitopes against a known database such as BLAST. In one embodiment, the cassette design module may be configured to design cassettes that avoid junction self-epitopes.

[0563] A cassette design module can perform a brute force approach and iterate through all or most possible candidate cassette sequences to select the sequence with the smallest junction epitope presentation score. However, the number of such candidate cassettes can be prohibitively large as the capacity of the vaccine increases. For example, for a vaccine capacity of 20 epitopes, the cassette design module has to iterate through ˜10¹⁸ possible candidate cassettes to determine the cassette with the lowest junction epitope presentation score. This determination may be computationally burdensome (in terms of computational processing resources required), and sometimes intractable, for the cassette design module to complete within a reasonable amount of time to generate the vaccine for the patient. Moreover, accounting for the possible junction epitopes for each candidate cassette can be even more burdensome. Thus, a cassette design module may select a cassette sequence based on ways of iterating through a number of candidate cassette sequences that are significantly smaller than the number of candidate cassette sequences for the brute force approach.

[0564] A cassette design module can generate a subset of randomly or at least pseudo-randomly generated candidate cassettes, and selects the candidate cassette associated with a junction epitope presentation score below a predetermined threshold as the cassette sequence. Additionally, the cassette design module may select the candidate cassette from the subset with the lowest junction epitope presentation score as the cassette sequence. For example, the cassette design module may generate a subset of ˜1 million candidate cassettes for a set of 20 selected epitopes, and select the candidate cassette with the smallest junction epitope presentation score. Although generating a subset of random cassette sequences and selecting a cassette sequence with a low junction epitope presentation score out of the subset may be sub-optimal relative to the brute force approach, it requires significantly less computational resources thereby making its implementation technically feasible. Further, performing the brute force method as opposed to this more efficient technique may only result in a minor or even negligible improvement in junction epitope presentation score, thus making it not worthwhile from a resource allocation perspective. A cassette design module can determine an improved cassette configuration by formulating the epitope sequence for the cassette as an asymmetric traveling salesman problem (TSP). Given a list of nodes and distances between each pair of nodes, the TSP determines a sequence of nodes associated with the shortest total distance to visit each node exactly once and return to the original node. For example, given cities A, B, and C with known distances between each other, the solution of the TSP generates a closed sequence of cities, for which the total distance traveled to visit each city exactly once is the smallest among possible routes. The asymmetric version of the TSP determines the optimal sequence of nodes when the distance between a pair of nodes are asymmetric. For example, the “distance” for traveling from node A to node B may be different from the “distance” for traveling from node B to node A. By solving for an improved optimal cassette using an asymmetric TSP, the cassette design module can find a cassette sequence that results in a reduced presentation score across the junctions between epitopes of the cassette. The solution of the asymmetric TSP indicates a sequence of therapeutic epitopes that correspond to the order in which the epitopes should be concatenated in a cassette to minimize the junction epitope presentation score across the junctions of the cassette. A cassette sequence determined through this approach can result in a sequence with significantly less presentation of junction epitopes while potentially requiring significantly less computational resources than the random sampling approach, especially when the number of generated candidate cassette sequences is large. Illustrative examples of different computational approaches and comparisons for optimizing cassette design are described in more detail in international patent application publications WO/2017/106638, WO/2018/195357, and WO/2018/208856, each herein incorporated by reference, in their entirety, for all purposes.

### XII. Example Computer

[0565] A computer can be used for any of the computational methods described herein. One skilled in the art will recognize a computer can have different architectures. Examples of computers are known to those skilled in the art, for example the computers described in more detail in international patent application publications WO/2017/106638, WO/2018/195357, and WO/2018/208856, each herein incorporated by reference, in their entirety, for all purposes.

### EXAMPLES

### XIII. Example 1: Antigen Delivery Vector Example

[0566] Below are examples of specific embodiments for carrying out the present invention. The examples are offered for illustrative purposes only, and are not intended to limit the scope of the present invention in any way. Efforts have been made to ensure accuracy with respect to numbers used (e.g., amounts, temperatures, etc.), but some experimental error and deviation should be allowed for.

[0567] The practice of the present invention will employ, unless otherwise indicated, conventional methods of protein chemistry, biochemistry, recombinant DNA techniques and pharmacology, within the skill of the art. Such techniques are explained fully in the literature. See, e.g., T. E. Creighton, Proteins: Structures and Molecular Properties (W.H. Freeman and Company, 1993); A. L. Lehninger, Biochemistry (Worth Publishers, Inc., current addition); Sambrook, et al., Molecular Cloning: A Laboratory Manual (2nd Edition, 1989); Methods In Enzymology (S. Colowick and N. Kaplan eds., Academic Press, Inc.); Remington's Pharmaceutical Sciences, 18th Edition (Easton, Pa.: Mack Publishing Company, 1990); Carey and Sundberg Advanced Organic Chemistry 3^{rd} Ed. (Plenum Press) Vols A and B (1992).

[0568] XIII.A. Antigen Cassette Design

[0569] Through vaccination, multiple class I MHC restricted HIV-specific antigens that induce an immune response can be delivered. In one example, a vaccine cassette was engineered to encode multiple epitope sequences as a single gene product where the epitopes were either embedded within their natural, surrounding peptide sequence or spaced by non-natural linker sequences. Several design parameters were identified that could potentially impact antigen processing and presentation and therefore the magnitude and breadth of the TSNA specific CD8 T cell responses. In the present example, several model cassettes were designed and constructed to evaluate: (1) whether robust T cell responses could be generated to multiple epitopes incorporated in a single expression cassette; (2) what makes an optimal linker placed between the TSNAs within the expression cassette—that leads to optimal processing and presentation of all epitopes; (3) if the relative position of the epitopes within the cassette impact T cell responses; (4) whether the number of epitopes within a cassette influences the magnitude or quality of the T cell responses to individual epitopes; (5) if the addition of cellular targeting sequences improves T cell responses.

[0570] Two readouts were developed to evaluate antigen presentation and T cell responses specific for marker epitopes within the model cassettes: (1) an in vitro cell-based screen which allowed assessment of antigen presentation as gauged by the activation of specially engineered reporter T cells (Aarnoudse et al., 2002; Nagai et al., 2012); and (2) an in vivo assay that used HLA-A2 transgenic mice (Vitiello et al., 1991) to assess post-vaccination immunogenicity of cassette-derived epitopes of human origin by their corresponding epitope-specific T cell responses (Comet et al., 2006; Depla et al., 2008; Ishioka et al., 1999).

[0571] XIII.B. Antigen Cassette Design Evaluation

[0572] XIII.B.1. Methods and Materials

### TCR and Cassette Design and Cloning

[0573] The selected TCRs recognize peptides NLVPMVATV (SEQ ID NO: 95) (PDB #5D2N), CLGGLLTMV (SEQ ID NO: 96) (PDB #3REV), GILGFVFTL (SEQ ID NO: 97) (PDB #1OGA) LLFGYPVYV (SEQ ID NO: 98) (PDB #1AO7) when presented by proteins of A*0201 allele. Transfer vectors were constructed that contain 2A peptide-linked TCR subunits (beta followed by alpha), the EMCV IRES, and 2A-linked CD8 subunits (beta followed by alpha and by the puromycin resistance gene). Open reading frame sequences were codon-optimized and synthesized by GeneArt.

### Cell Line Generation for In Vitro Epitope Processing and Presentation Studies

[0574] Peptides were purchased from ProImmune or Genscript diluted to 10 mg/mL with 10 mM tris(2-carboxyethyl)phosphine (TCEP) in water/DMSO (2:8, v/v). Cell culture medium and supplements, unless otherwise noted, were from Gibco. Heat inactivated fetal bovine serum (FBShi) was from Seradigm. QUANTI-Luc Substrate, Zeocin, and Puromycin were from InvivoGen. Jurkat-Lucia NFAT Cells (InvivoGen) were maintained in RPMI 1640 supplemented with 10% FBShi, Sodium Pyruvate, and 100 μg/mL Zeocin. Once transduced, these cells additionally received 0.3 μg/mL Puromycin. T2 cells (ATCC CRL-1992) were cultured in Iscove's Medium (IMDM) plus 20% FBShi. U-87 MG (ATCC HTB-14) cells were maintained in MEM Eagles Medium supplemented with 10% FBShi.

[0575] Jurkat-Lucia NFAT cells contain an NFAT-inducible Lucia reporter construct. The Lucia gene, when activated by the engagement of the T cell receptor (TCR), causes secretion of a coelenterazine-utilizing luciferase into the culture medium. This luciferase can be measured using the QUANTI-Luc luciferase detection reagent. Jurkat-Lucia cells were transduced with lentivirus to express antigen-specific TCRs. The HIV-derived lentivirus transfer vector was obtained from GeneCopoeia, and lentivirus support plasmids expressing VSV-G (pCMV-VsvG), Rev (pRSV-Rev) and Gag-pol (pCgpV) were obtained from Cell Design Labs.

[0576] Lentivirus was prepared by transfection of 50-80% confluent T75 flasks of HEK293 cells with Lipofectamine 2000 (Thermo Fisher), using 40 μl of lipofectamine and 20 μg of the DNA mixture (4:2:1:1 by weight of the transfer plasmid:pCgpV:pRSV-Rev:pCMV-VsvG). 8-10 mL of the virus-containing media were concentrated using the Lenti-X system (Clontech), and the virus resuspended in 100-200 μl of fresh medium. This volume was used to overlay an equal volume of Jurkat-Lucia cells (5×10E4-1×10E6 cells were used in different experiments). Following culture in 0.3 μg/ml puromycin-containing medium, cells were sorted to obtain clonality. These Jurkat-Lucia TCR clones were tested for activity and selectivity using peptide loaded T2 cells.

### In Vitro Epitope Processing and Presentation Assay

[0577] T2 cells are routinely used to examine antigen recognition by TCRs. T2 cells lack a peptide transporter for antigen processing (TAP deficient) and cannot load endogenous peptides in the endoplasmic reticulum for presentation on the MHC. However, the T2 cells can easily be loaded with exogenous peptides. The five marker peptides (NLVPMVATV (SEQ ID NO: 99), CLGGLLTMV (SEQ ID NO: 100), GLCTLVAML (SEQ ID NO: 101), LLFGYPVYV (SEQ ID NO: 102), GILGFVFTL (SEQ ID NO: 103)) and two irrelevant peptides (WLSLLVPFV (SEQ ID NO: 104), FLLTRICT (SEQ ID NO: 105)) were loaded onto T2 cells. Briefly, T2 cells were counted and diluted to 1×106 cells/mL with IMDM plus 1% FBShi. Peptides were added to result in 10 μg peptide/1×106 cells. Cells were then incubated at 37° C. for 90 minutes. Cells were washed twice with IMDM plus 20% FBShi, diluted to 5×10E5 cells/mL and 100 μL plated into a 96-well Costar tissue culture plate. Jurkat-Lucia TCR clones were counted and diluted to 5×10E5 cells/mL in RPMI 1640 plus 10% FBShi and 100 μL added to the T2 cells. Plates were incubated overnight at 37° C., 5% CO2. Plates were then centrifuged at 400 g for 3 minutes and 20 μL supernatant removed to a white flat bottom Greiner plate. QUANTI-Luc substrate was prepared according to instructions and 50 μL/well added. Luciferase expression was read on a Molecular Devices SpectraMax iE3x.

[0578] To test marker epitope presentation by the adenoviral cassettes, U-87 MG cells were used as surrogate antigen presenting cells (APCs) and were transduced with the adenoviral vectors. U-87 MG cells were harvested and plated in culture media as 5×10E5 cells/100 μl in a 96-well Costar tissue culture plate. Plates were incubated for approximately 2 hours at 37° C. Adenoviral cassettes were diluted with MEM plus 10% FBShi to an MOI of 100, 50, 10, 5, 1 and 0 and added to the U-87 MG cells as 5 μl/well. Plates were again incubated for approximately 2 hours at 37° C. Jurkat-Lucia TCR clones were counted and diluted to 5×10E5 cells/mL in RPMI plus 10% FBShi and added to the U-87 MG cells as 100 μL/well. Plates were then incubated for approximately 24 hours at 37° C., 5% CO2. Plates were centrifuged at 400 g for 3 minutes and 20 μL supernatant removed to a white flat bottom Greiner plate. QUANTI-Luc substrate was prepared according to instructions and 50 μL/well added. Luciferase expression was read on a Molecular Devices SpectraMax iE3x.

### Mouse Strains for Immunogenicity Studies

[0579] Transgenic HLA-A2.1 (HLA-A2 Tg) mice were obtained from Taconic Labs, Inc. These mice carry a transgene consisting of a chimeric class I molecule comprised of the human HLA-A2.1 leader, α1, and α2 domains and the murine H2-Kb α3, transmembrane, and cytoplasmic domains (Vitiello et al., 1991). Mice used for these studies were the first generation offspring (F1) of wild type BALB/cAnNTac females and homozygous HLA-A2.1 Tg males on the C57Bl/6 background.

### Adenovirus Vector (Ad5v) Immunizations

[0580] HLA-A2 Tg mice were immunized with 1×10¹⁰ to 1×10⁶ viral particles of adenoviral vectors via bilateral intramuscular injection into the tibialis anterior. Immune responses were measured at 12 days post-immunization.

### Lymphocyte Isolation

[0581] Lymphocytes were isolated from freshly harvested spleens and lymph nodes of immunized mice. Tissues were dissociated in RPMI containing 10% fetal bovine serum with penicillin and streptomycin (complete RPMI) using the GentleMACS tissue dissociator according to the manufacturer's instructions.

### Ex Vivo Enzyme-Linked Immunospot (ELISPOT) Analysis

[0582] ELISPOT analysis was performed according to ELISPOT harmonization guidelines (Janetzki et al., 2015) with the mouse IFNg ELISpotPLUS kit (MABTECH). 1×10⁵ splenocytes were incubated with 10 uM of the indicated peptides for 16 hours in 96-well IFNg antibody coated plates. Spots were developed using alkaline phosphatase. The reaction was timed for 10 minutes and was quenched by running the plate under tap water. Spots were counted using an AID vSpot Reader Spectrum. For ELISPOT analysis, wells with saturation >50% were recorded as “too numerous to count”. Samples with deviation of replicate wells >10% were excluded from analysis. Spot counts were then corrected for well confluency using the formula: spot count+2×(spot count×% confluence/[100%−% confluence]). Negative background was corrected by subtraction of spot counts in the negative peptide stimulation wells from the antigen stimulated wells. Finally, wells labeled too numerous to count were set to the highest observed corrected value, rounded up to the nearest hundred.

### Ex Vivo Intracellular Cytokine Staining (ICS) and Flow Cytometry Analysis

[0583] Freshly isolated lymphocytes at a density of 2-5×10⁶ cells/mL were incubated with 10 uM of the indicated peptides for 2 hours. After two hours, brefeldin A was added to a concentration of 5 ug/ml and cells were incubated with stimulant for an additional 4 hours. Following stimulation, viable cells were labeled with fixable viability dye eFluor780 according to manufacturer's protocol and stained with anti-CD8 APC (clone 53-6.7, BioLegend) at 1:400 dilution. Anti-IFNg PE (clone XMG1.2, BioLegend) was used at 1:100 for intracellular staining. Samples were collected on an Attune NxT Flow Cytometer (Thermo Scientific). Flow cytometry data was plotted and analyzed using FlowJo. To assess degree of antigen-specific response, both the percent IFNg+ of CD8+ cells and the total IFNg+ cell number/1×10⁶ live cells were calculated in response to each peptide stimulant.

[0584] XIII.B.2. In Vitro Evaluation of Antigen Cassette Designs

[0585] As an example of antigen cassette design evaluation, an in vitro cell-based assay was developed to assess whether selected human epitopes within model vaccine cassettes were being expressed, processed, and presented by antigen-presenting cells (FIG. 1). Upon recognition, Jurkat-Lucia reporter T cells that were engineered to express one of five TCRs specific for well-characterized peptide-HLA combinations become activated and translocate the nuclear factor of activated T cells (NFAT) into the nucleus which leads to transcriptional activation of a luciferase reporter gene. Antigenic stimulation of the individual reporter CD8 T cell lines was quantified by bioluminescence.

[0586] Individual Jurkat-Lucia reporter lines were modified by lentiviral transduction with an expression construct that includes an antigen-specific TCR beta and TCR alpha chain separated by a P2A ribosomal skip sequence to ensure equimolar amounts of translated product (Banu et al., 2014). The addition of a second CD8 beta-P2A-CD8 alpha element to the lentiviral construct provided expression of the CD8 co-receptor, which the parent reporter cell line lacks, as CD8 on the cell surface is crucial for the binding affinity to target pMHC molecules and enhances signaling through engagement of its cytoplasmic tail (Lyons et al., 2006; Yachi et al., 2006).

[0587] After lentiviral transduction, the Jurkat-Lucia reporters were expanded under puromycin selection, subjected to single cell fluorescence assisted cell sorting (FACS), and the monoclonal populations tested for luciferase expression. This yielded stably transduced reporter cell lines for specific peptide antigens 1, 2, 4, and 5 with functional cell responses. (Table 3A).

TABLE 3A
Development of an in vitro T cell activation assay.
Peptide-specific T cell recognition as measured by
induction of luciferase indicates effective processing
and presentation of the vaccine cassette antigens.

| | Short Cassette Design |
|---|---|
| Epitope | AAY |
| 1 | 24.5 ± 0.5 |
| 2 | 11.3 ± 0.4 |
| 3* | n/a |
| 4 | 26.1 ± 3.1 |
| 5 | 46.3 ± 1.9 |

*Reporter T cell for epitope 3 not yet generated

[0588] In another example, a series of short cassettes, all marker epitopes were incorporated in the same position (FIG. 2A) and only the linkers separating the HLA-A*0201 restricted epitopes (FIG. 2B) were varied. Reporter T cells were individually mixed with U-87 antigen-presenting cells (APCs) that were infected with adenoviral constructs expressing these short cassettes, and luciferase expression was measured relative to uninfected controls. All four antigens in the model cassettes were recognized by matching reporter T cells, demonstrating efficient processing and presentation of multiple antigens. The magnitude of T cell responses follow largely similar trends for the natural and AAY-linkers. The antigens released from the RR-linker based cassette show lower luciferase inductions (Table 3B). The DPP-linker, designed to disrupt antigen processing, produced a vaccine cassette that led to low epitope presentation (Table 3B).

TABLE 3B
Evaluation of linker sequences in short cassettes. Luciferase induction in the in
vitro T cell activation assay indicated that, apart from the DPP-based cassette, all linkers
facilitated efficient release of the cassette antigens. T cell epitope only (no linker) = 9AA,
natural linker one side = 17AA, natural linker both sides = 25AA, non-natural linkers =
AAY, RR, DPP

| | Short Cassette Designs | | | | | |
|---|---|---|---|---|---|---|
| Epitope | 9AA | 17AA | 25AA | AAY | RR | DPP |
| 1 | 33.6 ± 0.9 | 42.8 ± 2.1 | 42.3 ± 2.3 | 24.5 ± 0.5 | 21.7 ± 0.9 | 0.9 ± 0.1 |
| 2 | 12.0 ± 0.9 | 10.3 ± 0.6 | 14.6 ± 04 | 11.3 ± 0.4 | 8.5 ± 0.3 | 1.1 ± 0.2 |
| 3* | n/a | n/a | n/a | n/a | n/a | n/a |
| 4 | 26.6 ± 2.5 | 16.1 ± 0.6 | 16.6 ± 0.8 | 26.1 ± 3.1 | 12.5 ± 0.8 | 1.3 ± 0.2 |
| 5 | 29.7 ± 0.6 | 21.2 ± 0.7 | 24.3 ± 1.4 | 46.3 ± 1.9 | 19.7 ± 0.4 | 1.3 ± 0.1 |

*Reporter T cell for epitope 3 not yet generated

[0589] In another example, an additional series of short cassettes were constructed that, besides human and mouse epitopes, contained targeting sequences such as ubiquitin (Ub), MHC and Ig-kappa signal peptides (SP), and/or MHC transmembrane (TM) motifs positioned on either the N- or C-terminus of the cassette. (FIG. 3). When delivered to U-87 APCs by adenoviral vector, the reporter T cells again demonstrated efficient processing and presentation of multiple cassette-derived antigens. However, the magnitude of T cell responses were not substantially impacted by the various targeting features (Table 4).

TABLE 4
Evaluation of cellular targeting sequences added to model vaccine cassettes.
Employing the in vitro T cell activation assay demonstrated that the four HLA-A*0201
restricted marker epitopes are liberated efficiently from the model cassettes and targeting
sequences did not substantially improve T cell recognition and activation.

| | Short Cassette Designs | | | | | | | | | |
|---|---|---|---|---|---|---|---|---|---|---|
| Epitope | A | B | C | D | E | F | G | H | I | J |
| 1 | 32.5 ± | 31.8 ± | 29.1 ± | 29.1 ± | 28.4 ± | 20.4 ± | 35.0 ± | 30.3 ± | 22.5 ± | 38.1 ± |
| | 1.5 | 0.8 | 1.2 | 1.1 | 0.7 | 0.5 | 1.3 | 2.0 | 0.9 | 1.6 |
| 2 | 6.1 ± | 6.3 ± | 7.6 ± | 7.0 ± | 5.9 ± | 3.7 ± | 7.6 ± | 5.4 ± | 6.2 ± | 6.4 ± |
| | 0.2 | 0.2 | 0.4 | 0.5 | 0.2 | 0.2 | 0.4 | 0.3 | 0.4 | 0.3 |
| 3* | n/a | n/a | n/a | n/a | n/a | n/a | n/a | n/a | n/a | n/a |
| 4 | 12.3 ± | 14.1 ± | 12.2 ± | 13.7 ± | 11.7 ± | 10.6 ± | 11.0 ± | 7.6 ± | 16.1 ± | 8.7 ± |
| | 1.1 | 0.7 | 0.8 | 1.0 | 0.8 | 0.4 | 0.6 | 0.6 | 0.5 | 0.5 |
| 5 | 44.4 ± | 53.6 ± | 49.9 ± | 50.5 ± | 41.7 ± | 36.1 ± | 46.5 ± | 31.4 ± | 75.4 ± | 35.7 ± |
| | 2.8 | 1.6 | 3.3 | 2.8 | 2.8 | 1.1 | 2.1 | 0.6 | 1.6 | 2.2 |

*Reporter T cell for epitope 3 not yet generated

[0590] XIII.B.3. In Vivo Evaluation of Antigen Cassette Designs

[0591] As another example of antigen cassette design evaluation, vaccine cassettes were designed to contain 5 well-characterized human class I MHC epitopes known to stimulate CD8 T cells in an HLA-A*02:01 restricted fashion (FIG. 2A, 3, 5A). For the evaluation of their in vivo immunogenicity, vaccine cassettes containing these marker epitopes were incorporated in adenoviral vectors and used to infect HLA-A2 transgenic mice. This mouse model carries a transgene consisting partly of human HLA-A*0201 and mouse H2-Kb thus encoding a chimeric class I MHC molecule consisting of the human HLA-A2.1 leader, α1 and α2 domains ligated to the murine α3, transmembrane and cytoplasmic H2-Kb domain (Vitiello et al., 1991). The chimeric molecule allows HLA-A*02:01-restricted antigen presentation whilst maintaining the species-matched interaction of the CD8 co-receptor with the α3 domain on the MHC.

[0592] For the short cassettes, all marker epitopes generated a T cell response, as determined by IFN-gamma ELISPOT, that was approximately 10-50× stronger of what has been commonly reported (Comet et al., 2006; Depla et al., 2008; Ishioka et al., 1999). Of all the linkers evaluated, the concatamer of 25mer sequences, each containing a minimal epitope flanked by their natural amino acids sequences, generated the largest and broadest T cell response (Table 5). Intracellular cytokine staining (ICS) and flow cytometry analysis revealed that the antigen-specific T cell responses are derived from CD8 T cells.

TABLE 5
In vivo evaluation of linker sequences in short cassettes. ELISPOT data indicated
that HLA-A2 transgenic mice, 17 days post-infection with 1e11 adenovirus viral particles,
generated a T cell response to all class I MHC restricted epitopes in the cassette.

| | Short Cassette Designs | | | | | |
|---|---|---|---|---|---|---|
| Epitope | 9AA | 17AA | 25AA | AAY | RR | DPP |
| 1 | 2020 +/− 583 | 2505 +/− 1281 | 6844 +/− 956 | 1489 +/− 762 | 1675 +/− 690 | 1781 +/− 774 |
| 2 | 4472 +/− 755 | 3792 +/− 1319 | 7629 +/− 996 | 3851 +/− 1748 | 4726 +/− 1715 | 5868 +/− 1427 |
| 3 | 5830 +/− 315 | 3629 +/− 862 | 7253 +/− 491 | 4813 +/− 1761 | 6779 +/− 1033 | 7328 +/− 1700 |
| 4 | 5536 +/− 375 | 2446 +/− 955 | 2961 +/− 1487 | 4230 +/− 1759 | 6518 +/− 909 | 7222 +/− 1824 |
| 5 | 8800 +/− 0 | 7943 +/− 821 | 8423 +/− 442 | 8312 +/− 696 | 8800 +/− 0 | 1836 +/− 328 |

[0593] In another example, a series of long vaccine cassettes was constructed and incorporated in adenoviral vectors that, next to the original 5 marker epitopes, contained an additional 16 HLA-A*02:01, A*03:01 and B*44:05 epitopes with known CD8 T cell reactivity (FIG. 4A, B). The size of these long cassettes closely mimicked the final clinical cassette design, and only the position of the epitopes relative to each other was varied. The CD8 T cell responses were comparable in magnitude and breadth for both long and short vaccine cassettes, demonstrating that (a) the addition of more epitopes did not substantially impact the magnitude of immune response to the original set of epitopes, and (b) the position of an epitope in a cassette did not substantially influence the ensuing T cell response to it (Table 6).

TABLE 6
In vivo evaluation of the impact of epitope position in long
cassettes. ELISPOT data indicated that HLA-A2 transgenic
mice, 17 days post-infection with 5e10 adenovirus viral
particles, generated a T cell response comparable in
magnitude for both long and short vaccine cassettes.

| | Long Cassette Designs | | |
|---|---|---|---|
| Epitope | Standard | Scrambled | Short |
| 1 | 863 +/− 1080 | 804 +/− 1113 | 1871 +/− 2859 |
| 2 | 6425 +/− 1594 | 28 +/− 62 | 5390 +/− 1357 |
| 3* | 23 +/− 30 | 36 +/− 18 | 0 +/− 48 |
| 4 | 2224 +/− 1074 | 2727 +/− 644 | 2637 +/− 1673 |
| 5 | 7952 +/− 297 | 8100 +/− 0 | 8100 +/− 0 |

*Suspected technical error caused an absence of a T cell response.

[0594] XIII.B.4. Antigen Cassette Design for Immunogenicity and Toxicology Studies

[0595] In summary, the findings of the model cassette evaluations (FIG. 2-5, Tables 2-6) demonstrated that, for model vaccine cassettes, robust immunogenicity was achieved when a “string of beads” approach was employed that encodes around 20 epitopes in the context of an adenovirus-based vector. The epitopes were assembled by concatenating 25mer sequences, each embedding a minimal CD8 T cell epitope (e.g. 9 amino acid residues) that were flanked on both sides by its natural, surrounding peptide sequence (e.g. 8 amino acid residues on each side). As used herein, a “natural” or “native” flanking sequence refers to the N- and/or C-terminal flanking sequence of a given epitope in the naturally occurring context of that epitope within its source protein. For example, the HCMV pp65 MHC I epitope NLVPMVATV (SEQ ID NO: 106) is flanked on its 5′ end by the native 5′ sequence WQAGILAR (SEQ ID NO: 107) and on its 3′ end by the native 3′ sequence QGQNLKYQ (SEQ ID NO: 108), thus generating the WQAGILARNLVPMVATVQGQNLKYQ (SEQ ID NO: 109) 25mer peptide found within the HCMV pp65 source protein. The natural or native sequence can also refer to a nucleotide sequence that encodes an epitope flanked by native flanking sequence(s). Each 25mer sequence is directly connected to the following 25mer sequence. In instances where the minimal CD8 T cell epitope is greater than or less than 9 amino acids, the flanking peptide length can be adjusted such that the total length is still a 25mer peptide sequence. For example, a 10 amino acid CD8 T cell epitope can be flanked by an 8 amino acid sequence and a 7 amino acid. The concatamer was followed by two universal class II MHC epitopes that were included to stimulate CD4 T helper cells and improve overall in vivo immunogenicity of the vaccine cassette antigens. (Alexander et al., 1994; Panina-Bordignon et al., 1989) The class II epitopes were linked to the final class I epitope by a GPGPG amino acid linker (SEQ ID NO:56). The two class II epitopes were also linked to each other by a GPGPG (SEQ ID NO: 110) amino acid linker, as a well as flanked on the C-terminus by a GPGPG (SEQ ID NO: 111) amino acid linker. Neither the position nor the number of epitopes appeared to substantially impact T cell recognition or response. Targeting sequences also did not appear to substantially impact the immunogenicity of cassette-derived antigens.

[0596] As a further example, based on the in vitro and in vivo data obtained with model cassettes (FIG. 2-5, Tables 2-6), a cassette design was generated that alternates well-characterized T cell epitopes known to be immunogenic in nonhuman primates (NHPs), mice and humans. The 20 epitopes, all embedded in their natural 25mer sequences, are followed by the two universal class II MHC epitopes that were present in all model cassettes evaluated (FIG. 5A, 5B). This cassette design was used to study immunogenicity as well as pharmacology and toxicology studies in multiple species.

[0597] XIII.B.5. Antigen Cassette Design and Evaluation for 30, 40, and 50 Antigens

[0598] Large antigen cassettes were designed that had either 30 (L), 40 (XL) or 50 (XXL) epitopes, each 25 amino acids in length. The epitopes were a mix of human, NHP and mouse epitopes to model infectious disease antigens. FIG. 21 illustrates the general organization of the epitopes from the various species. The model antigens used are described in Tables 7, 8 and 9 for human, primate, and mouse model epitopes, respectively. Each of Tables 7, 8 and 9 described the epitope position, name, minimal epitope description, and MHC class.

[0599] These cassettes were cloned into the chAd68 and alphavirus vaccine vectors as described to evaluate the efficacy of longer multiple-epitope cassettes. FIG. 22 shows that each of the large antigen cassettes were expressed from a ChAdV vector as indicated by at least one major band of the expected size by Western blot.

[0600] Mice were immunized as described to evaluate the efficacy of the large cassettes. T cell responses were analyzed by ICS and tetramer staining following immunization with a chAd68 vector (FIG. 23/Table 10 and FIG. 24/Table 11, respectively) and by ICS following immunization with a srRNA vector (FIG. 25/Table 12) for epitopes AH1 (top panels) and SINNFEKL (SEQ ID NO: 112) (bottom panels). Immunizations using chAd68 and srRNA vaccine vectors expressing either 30 (L), 40 (XL) or 50 (XXL) epitopes induced CD8+ immune responses to model disease epitopes.

TABLE 7
Human epitopes in large cassettes (SEQ ID NOS 174-203, respectively, in order of columns)

| Epitope | | | | | | | | | |
|---|---|---|---|---|---|---|---|---|---|
| position | | | | | | | | | |
| in each | | | | | | | | | |
| cassette | | | | Minimal | | | Restric- | | |
| L | XL | XXL | Name | epitope | 25mer | MHC | tion | Strain | Species |
| 3 | 3 | 3 | 5.influenza | GILGFVFTL | PILSPLTKGILGFVFTITVPSERGL | Class I | A*02:01 | Human | Human |
| | | | M | | | | | | |
| 6 | 6 | 6 | 4.HTLV-1 | LLFGYPVYV | HFPGFGQSLLFGYPVYVFGDCVQGD | Class I | A*02:01 | Human | Human |
| | | | Tax | | | | | | |
| 9 | 9 | 9 | 3.EBV | GLCTLVAML | RMQAIQNAGLCTLVAMLEETIFWLQ | Class I | A*02:01 | Human | Human |
| | | | BMLF1 | | | | | | |
| 12 | 12 | 12 | 1.HCMV | NLVPMVATV | WQAGILARNLVPMVATVQGQNLKYQ | Class I | A*02:01 | Human | Human |
| | | | pp65 | | | | | | |
| 15 | 15 | 15 | 2.EBV | CLGGLLTMV | RTYGPVFMCLGGLLTMVAGAVWLTV | Class I | A*02:01 | Human | Human |
| | | | LMP2A | | | | | | |
| 18 | 18 | 18 | CT83 | NTDNNLAVY | SSSGLINSNTDNNLAVYDLSRDILN | Class I | A*01:01 | Human | Human |
| | 21 | 21 | MAGEA6 | EVDPIGHVY | LVFGIELMEVDPIGHVYIFATCLGL | Class I | B*35.01 | Human | Human |
| 21 | 25 | 25 | CT83 | LLASSILCA | MNFYLLLASSILCALIVFWKYRRFQ | Class I | A*02:01 | Human | Human |
| 24 | 31 | 28 | FOXE1 | AIFPGAVPAA | AAAAAAAAIFPGAVPAARPPYPGAV | Class I | A*02:01 | Human | Human |
| 27 | 35 | 32 | CT83 | VYDISRDIL | SNTDNNLAVYDLSRDILNNFPHSIA | Class I | A*24:02 | Human | Human |
| | 38 | 36 | MAGE3/6 | ASSLPTTMNY | DPPQSPQGASSLPTTMNYPLWSQSY | Class I | A*01:01 | Human | Human |
| 30 | 40 | 40 | Influenza | PKYVKQNTLK | ITYGACPKYVKQNTLKLATGMRNVP | Class II | DRB1*0101 [symbol] | Human | Human |
| | | | HA | LAT | | | | | |
| | | 44 | CMV pp65 | LPLKMLNIPS | SIYVYALPLKMLNIPSINVHHYPSA | Class II | DRB1*0101 | Human | Human |
| | | | | INVH | | | | | |
| | | 47 | EBV EBNA3A | PEQWMFQGAP | EGPWVPEQWMFQGAPPSQGTDVVQH | Class II | DRB1*0102 | Human | Human |
| | | | | PSQGT | | | | | |
| | | 50 | CMV pp65 | EHPTFTSQYR | RGPQYSEHPTFTSQYRIQGKLEYRH | Class II | DRB1*1101 | Human | Human |
| | | | | IQGKL | | | | | |

[symbol]

indicates data missing or illegible when filed

TABLE 8
NHP epitopes in large cassettes (SEQ ID NOS 204-233, respectively, in order of columns)

| Epitope | | | | | | | | | |
|---|---|---|---|---|---|---|---|---|---|
| position | | | | | | | | | |
| in each | | | | | | | | | |
| cassette | | | | Minimal | | | Restric- | | |
| L | XL | XXL | Name | epitope | 25mer | MHC | tion | Strain | Species |
| 1 | 1 | 1 | Gag CM9 | CTPYDINQM | MFQALSEGCTPYDINQMLNVLGDHQ | Class I | Mamu-A*01 | Rhesus | NHP |
| 4 | 4 | 4 | Tat TL8 | TTPESANL | SCISEADATTPESANLGEEILSQLY | Class I | Mamu-A*01 | Rhesus | NHP |
| 7 | 7 | 7 | Env CL9 | CAPPGYALL | WDAIRFRYCAPPGYALLRCNDTNYS | Class I | Mamu-A*01 | Rhesus | NHP |
| 10 | 10 | 10 | Pol SV9 | SGPKTNIIV | AFLMALTDSGPKTNIIVDSQYVMGI | Class I | Mamu-A*01 | Rhesus | NHP |
| 13 | 13 | 13 | Gag LW9 | LSPRTLNAW | GNVWVHTPLSPRTLNAWVKAVEEKK | Class I | Mamu-A*01 | Rhesus | NHP |
| | | 16 | Env_TL9 | TVPWPNASL | AFRQVCHTTVPWPNASLTPKWNNET | Class I | Mamu-A*01 | Rhesus | NHP |
| 16 | 16 | 19 | Ag85B | PNGTHSWEYWGAQLN | VFNEPPNGTHSWEYWGAQLNAMKGD | Class II | Mamu-DR*W [symbol] | Rhesus | NHP |
| 19 | 19 | 23 | HIV-1 | YKYKVVKIEPLGV | NWRSELYKYKVVKIEPLGVAPTKAK | Class II | Mamu-DR*W [symbol] | Rhesus | NHP |
| | | | Env | | | | | | |
| | | 26 | Gag | TEEAKQIVQRHLVVE | EKVKHTEEAKQIVQRHLVVETGTTE | Class II | Mamu-DRB* [symbol] | Rhesus | NHP |
| | | | TE15 | | | | | | |
| | 23 | 30 | CFP-10 | AGSLQGQWRGAAG | DQVESTAGSLQGQWRGAAGTAAQAA | Class II | Mafa-DRB1* [symbol] | Cyno | NHP |
| | | | 36-48 | | | | | | |
| | 27 | 34 | CFP-10 | EISTNIRQAGVQYSRA | QELDEISTNIRQAGVQYSRADEEQQ | Class II | Mafa-DRB1* [symbol] | Cyno | NHP |
| | | | 71-86 | | | | | | |
| 22 | 29 | 38 | Env | RPKQAWCWF | FHSQPINERPKQAWCWEGGSWKEAI | Class I | Mafa-A1*06 [symbol] | Cyno | NHP |
| | | | 338-346 | | | | | | |
| 25 | 33 | 42 | Nef | RPKVPLRTM | DDIDEEDDDLVGVSVRPKVPLRTMS | Class I | Mafa-A1*06 [symbol] | Cyno | NHP |
| | | | 103-111 | | | | | | |
| 28 | 37 | 45 | Gag | GPRKPIKCW | PFAAAQQRGPRKPIKCWNCGKEGHS | Class I | Mafa-A1*06 [symbol] | Cyno | NHP |
| | | | 386-394 | | | | | | |
| | | 48 | Nef LT9 | LNMADKKET | RRLTARGLLNMADKKETRTPKKAKA | Class I | Mafa-B*104 [symbol] | Cyno | NHP |

[symbol]

indicates data missing or illegible when filed

TABLE 9
Mouse epitopes in large cassettes (SEQ ID NOS 234-273, respectively, in order of columns)

| Epitope | | | | | | | | | |
|---|---|---|---|---|---|---|---|---|---|
| position | | | | | | | | | |
| in each | | | | | | | | | |
| cassette | | | | Minimal | | | Restric- | | |
| L | XL | XXL | Name | epitope | 25mer | MHC | tion | Strain | Species |
| 2 | 2 | 2 | OVA257 | SIINFEKL | VSGLEQLESIINFEKLTEWTSSNVM | Class I | H2-Kb | B6 | Mouse |
| | | 5 | B16-EGP | EGPRNQDWL | ALLAVGALEGPRNQDWLGVPRQLVT | Class I | H2-Db | B6 | Mouse |
| | | 8 | B16-TRP1 | TAPDNLGYM | VTNTEMFVTAPDNIGYMYEVQWPGQ | Class I | H2-Db | B6 | Mouse |
| | | | 455-463 | | | | | | |
| | | 11 | Trp2180-188 | SVYDFFVWL | TQPQIANCSVYDFFVWLHYYSVRDT | Class I | H2-Kb | B6 | Mouse |
| 5 | 5 | 14 | CT26 AH1-A5 | SPSYAYMQF | LWPRVTYHSPSYAYHQFERRAKYKR | Class I | H2-Ld | Balb/C | Mouse |
| | 8 | 17 | CT26 AH1-39 | MNKYAYHML | LWPRVTYHMNKYAYHMLERRAKYKR | Class I | H2-Ld | Balb/C | Mouse |
| | 11 | 20 | MC38 Dpagt1 | SIIVFNLL | GQSLVISASIIVFNLLELEGDYRDD | Class I | H2-Kb | B6 | Mouse |
| | 14 | 22 | MC38 Adpgk | ASMTNMELM | GIPVHLELASMTNMELMSSIVHQQV | Class I | H2-Db | B6 | Mouse |
| | 17 | 24 | MC38 Reps1 | AQLANDVVL | RVLELFRAAQLANDVVLQIMELCGA | Class I | H2-Db | B6 | Mouse |
| 8 | 20 | 27 | P815 P1A 35-44 | LPYLGWLVF | HRYSLEEILPYLGWLVFAVVTTSFL | Class I | H2-Ld | DBA/2 | Mouse |
| 11 | 22 | 29 | P815 P1E | GYCGLRGTGV | YLSKNPDGYCGLRGTGVSCPMAIKK | Class I | H2-Kd | DBA/2 | Mouse |
| 14 | 24 | 31 | Panc02 | LSIFKHKL | NEIPFTYEQLSIFKHKLDKTYPQGY | Class I | H2-Kb | B6 | Mouse |
| | | | Mesotheli [symbol] | | | | | | |
| 17 | 26 | 33 | Panc02 | LIWIPALL | SRASLLGPGFVLIWIPALLPALRLS | Class I | H2-Kb | B6 | Mouse |
| | | | Mesotheli [symbol] | | | | | | |
| 20 | 28 | 35 | ID8 FRa | SSGHNECPV | NWHKGWNWSSGHNECPVGASCHPFT | Class I | H2-Kb | B6 | Mouse |
| | | | 161-169 | | | | | | |
| 23 | 30 | 37 | ID8 Mesothelin | GQKMMAQAI | KTLLKVSKGQKMNAQAIALVACYLR | Class I | H2-Db | B6 | Mouse |
| | | | 40 [symbol] | | | | | | |
| 26 | 32 | 39 | OVA-II | ISQAVHAAH | ESLKISQAVHAAHAEINEAGREVVG | Class II | I-Ab, | B6 | Mouse |
| | | | | AEINEAGR | | | I-Ad | | |
| 29 | 34 | 41 | ESAT-6 | MTEQQWNFAG | MTEQQWNFAGIEAAASAIQGNVTSI | Class II | I-Ab | B6 | Mouse |
| | | | | IEAAASAIQ | | | | | |
| | 36 | 43 | TT p30 | FNNFTVSFWLR | DMFNNFTVSFWLRVPKVSASHLEQY | Class II | I-Ad | Balb/C | Mouse |
| | | | | VPKVSASH [symbol] | | | | | |
| | 39 | 46 | HEL | DGSTDYGILQI | TNRNTDGSTDYGILQINSRWWCNDG | Class II | I-Ak | CBA | Mouse |
| | | | | NSRW | | | | | |
| | | 49 | MOG | MEVGWYRSPFS | TGMEVGWYRSPFSRVVHLYRNGKDQ | Class II | I-Ab | B6 | Mouse |
| | | | | RVVHLYRN | | | | | |

[symbol]

indicates data missing or illegible when filed

TABLE 10
Average IFNg+ cells in response to AH1 and
SIINFEKL (SEQ ID NO: 113) peptides in ChAd
large cassette treated mice. Data is presented
as % of total CD8 cells. Shown is average and
standard deviation per group and p-value by
ANOVA with Tukey's test. All p-values compared
to MAG 20-antigen cassette.

| # | | | Standard | | |
|---|---|---|---|---|---|
| antigens | Antigen | Average | deviation | p-value | N |
| 20 | SIINFEKL | 5.308 | 0.660 | n/a | 8 |
| | (SEQ ID | | | | |
| | NO: 114) | | | | |
| 30 | SIINFEKL | 4.119 | 1.019 | 0.978 | 8 |
| | (SEQ ID | | | | |
| | NO: 115) | | | | |
| 40 | SIINFEKL | 6.324 | 0.954 | 0.986 | 8 |
| | (SEQ ID | | | | |
| | NO: 116) | | | | |
| 50 | SIINFEKL | 8.169 | 1.469 | 0.751 | 8 |
| | (SEQ ID | | | | |
| | NO: 117) | | | | |
| 20 | AH1 | 6.405 | 2.664 | n/a | 8 |
| 30 | AH1 | 4.373 | 1.442 | 0.093 | 8 |
| 40 | AH1 | 4.126 | 1.135 | 0.050 | 8 |
| 50 | AH1 | 4.216 | 0.808 | 0.063 | 8 |

TABLE 11
Average tetramer+ cells for AH1 and SIINFEKL
(SEQ ID NO: 118) antigens in ChAd large
cassette treated mice. Data is presented as
% of total CD8 cells. Shown is average and
standard deviation per group and p-value by
ANOVA with Tukey's test. All p-values
compared to MAG 20-antigen cassette.

| # | | | Standard | | |
|---|---|---|---|---|---|
| antigens | Antigen | Average | deviation | p-value | N |
| 20 | SIINFEKL | 10.314 | 2.384 | n/a | 8 |
| | (SEQ ID | | | | |
| | NO: 119) | | | | |
| 30 | SIINFEKL | 4.551 | 2.370 | 0.003 | 8 |
| | (SEQ ID | | | | |
| | NO: 120) | | | | |
| 40 | SIINFEKL | 5.186 | 3.254 | 0.009 | 8 |
| | (SEQ ID | | | | |
| | NO: 121) | | | | |
| 50 | SIINFEKL | 14.113 | 3.660 | 0.072 | 8 |
| | (SEQ ID | | | | |
| | NO: 122) | | | | |
| 20 | AH1 | 6.864 | 2.207 | n/a | 8 |
| 30 | AH1 | 4.713 | 0.922 | 0.036 | 8 |
| 40 | AH1 | 5.393 | 1.452 | 0.223 | 8 |
| 50 | AH1 | 5.860 | 1.041 | 0.543 | 8 |

TABLE 12
Average IFNg+ cells in response to AH1 and
SIINFEKL (SEQ ID NO: 123) peptides in SAM
large cassette treated mice. Data is presented
as % of total CD8 cells. Shown is average and
standard deviation per group and p-value by
ANOVA with Tukey's test. All p-values compared
to MAG 20-antigen cassette.

| # | | | Standard | | |
|---|---|---|---|---|---|
| antigens | Antigen | Average | deviation | p-value | N |
| 20 | SIINFEKL | 1.843 | 0.422 | n/a | 8 |
| | (SEQ ID | | | | |
| | NO: 124) | | | | |
| 30 | SIINFEKL | 2.112 | 0.522 | 0.879 | 7 |
| | (SEQ ID | | | | |
| | NO: 125) | | | | |
| 40 | SIINFEKL | 1.754 | 0.978 | 0.995 | 7 |
| | (SEQ ID | | | | |
| | NO: 126) | | | | |
| 50 | SIINFEKL | 1.409 | 0.766 | 0.606 | 8 |
| | (SEQ ID | | | | |
| | NO: 127) | | | | |
| 20 | AH1 | 3.050 | 0.909 | n/a | 8 |
| 30 | AH1 | 0.618 | 0.427 | 1.91E−05 | 7 |
| 40 | AH1 | 1.286 | 0.284 | 0.001 | 7 |
| 50 | AH1 | 1.309 | 1.149 | 0.001 | 8 |

### XIV. Example 2: ChAd Antigen Cassette Delivery Vector

[0601] XIV.A. ChAd Antigen Cassette Delivery Vector Construction

[0602] In one example, Chimpanzee adenovirus (ChAd) was engineered to be a delivery vector for antigen cassettes. In a further example, a full-length ChAdV68 vector was synthesized based on AC_000011.1 (sequence 2 from U.S. Pat. No. 6,083,716) with E1 (nt 457 to 3014) and E3 (nt 27,816-31,332) sequences deleted. Reporter genes under the control of the CMV promoter/enhancer were inserted in place of the deleted E1 sequences. Transfection of this clone into HEK293 cells did not yield infectious virus. To confirm the sequence of the wild-type C68 virus, isolate VR-594 was obtained from the ATCC, passaged, and then independently sequenced (SEQ ID NO:10). When comparing the AC_000011.1 sequence to the ATCC VR-594 sequence (SEQ ID NO:10) of wild-type ChAdV68 virus, 6 nucleotide differences were identified. In one example, a modified ChAdV68 vector was generated based on AC_000011.1, with the corresponding ATCC VR-594 nucleotides substituted at five positions (ChAdV68.5WTnt SEQ ID NO:1).

[0603] In another example, a modified ChAdV68 vector was generated based on AC_000011.1 with E1 (nt 577 to 3403) and E3 (nt 27,816-31,332) sequences deleted and the corresponding ATCC VR-594 nucleotides substituted at four positions. A GFP reporter (ChAdV68.4WTnt.GFP; SEQ ID NO:11) or model antigen cassette (ChAdV68.4WTnt.MAG25mer; SEQ ID NO:12) under the control of the CMV promoter/enhancer was inserted in place of deleted E1 sequences.

[0604] In another example, a modified ChAdV68 vector was generated based on AC_000011.1 with E1 (nt 577 to 3403) and E3 (nt 27,125-31,825) sequences deleted and the corresponding ATCC VR-594 nucleotides substituted at five positions. A GFP reporter (ChAdV68.5WTnt.GFP; SEQ ID NO:13) or model antigen cassette (ChAdV68.5WTnt.MAG25mer; SEQ ID NO:2) under the control of the CMV promoter/enhancer was inserted in place of deleted E1 sequences

[0605] Relevant vectors are described below:
[0606] Full-Length ChAdVC68 sequence “ChAdV68.5WTnt” (SEQ ID NO:1); AC_000011.1 sequence with corresponding ATCC VR-594 nucleotides substituted at five positions.
[0607] ATCC VR-594 C68 (SEQ ID NO: 10); Independently sequenced; Full-Length C68
[0608] ChAdv68.4WTnt.GFP (SEQ ID NO:11 AC_000011.1 with E1 (nt 577 to 3403) and E3 (nt 27,816-31332) sequences deleted; corresponding ATCC VR-594 nucleotides substituted at four positions; GFP reporter under the control of the CMV promoter/enhancer inserted in place of deleted E1
[0609] ChAdV68.4WTnt.MAG25mer (SEQ ID NO:12); AC_000011.1 with E1 (nt577 to 3403) and E3 (nt 27,816-31,332) sequences deleted: corresponding ATCC VR-594 nucleotides substituted at four positions; model antigen cassette under the control of the CMV promoter/enhancer inserted in place of deleted E1
[0610] ChAdV68.5WTnt.GFP (SEQ ID NO: 13); AC_000011.1 with E1 (nt 577 to 3403) and E3 (nt 27,125-31,825) sequences deleted; corresponding ATCC VR-594 nucleotides substituted at five positions; GFP reporter under the control of the CMV promoter/enhancer inserted in place of deleted E1

[0611] XIV.B. ChAd Antigen Cassette Delivery Vector Testing

[0612] XIV.B.1. ChAd Vector Evaluation Methods and Materials

### Transfection of HEK293A Cells Using Lipofectamine

[0613] DNA for the ChAdV68 constructs (ChAdV68.4WTnt.GFP, ChAdV68.5WTnt.GFP, ChAdV68.4WTnt.MAG25mer and ChAdV68.5WTnt.MAG25mer) was prepared and transfected into HEK293A cells using the following protocol.

[0614] 10 ug of plasmid DNA was digested with PacI to liberate the viral genome. DNA was then purified using GeneJet DNA cleanup Micro columns (Thermo Fisher) according to manufacturer's instructions for long DNA fragments, and eluted in 20 ul of pre-heated water; columns were left at 37 degrees for 0.5-1 hours before the elution step.

[0615] HEK293A cells were introduced into 6-well plates at a cell density of 10⁶ cells/well 14-18 hours prior to transfection. Cells were overlaid with 1 ml of fresh medium (DMEM-10% hiFBS with pen/strep and glutamate) per well. 1-2 ug of purified DNA was used per well in a transfection with twice the ul volume (2-4 ul) of Lipofectamine2000, according to the manufacturer's protocol. 0.5 ml of OPTI-MEM medium containing the transfection mix was added to the 1 ml of normal growth medium in each well, and left on cells overnight.

[0616] Transfected cell cultures were incubated at 37° C. for at least 5-7 days. If viral plaques were not visible by day 7 post-transfection, cells were split 1:4 or 1:6, and incubated at 37° C. to monitor for plaque development. Alternatively, transfected cells were harvested and subjected to 3 cycles of freezing and thawing and the cell lysates were used to infect HEK293A cells and the cells were incubated until virus plaques were observed.

Transfection of ChAdV68 Vectors into HEK293A Cells Using Calcium Phosphate and Generation of the Tertiary Viral Stock

[0617] DNA for the ChAdV68 constructs (ChAdV68.4WTnt.GFP, ChAdV68.5WTnt.GFP, ChAdV68.4WTnt.MAG25mer, ChAdV68.5WTnt.MAG25mer) was prepared and transfected into HEK293A cells using the following protocol.

[0618] HEK293A cells were seeded one day prior to the transfection at 10⁶ cells/well of a 6 well plate in 5% BS/DMEM/1XP/S, 1XGlutamax. Two wells are needed per transfection. Two to four hours prior to transfection the media was changed to fresh media. The ChAdV68.4WTnt.GFP plasmid was linearized with PacI. The linearized DNA was then phenol chloroform extracted and precipitated using one tenth volume of 3M Sodium acetate pH 5.3 and two volumes of 100% ethanol. The precipitated DNA was pelleted by centrifugation at 12,000×g for 5 min before washing 1× with 70% ethanol. The pellet was air dried and re-suspended in 50 μL of sterile water. The DNA concentration was determined using a NanoDrop™ (ThermoFisher) and the volume adjusted to 5 μg of DNA/50 μL.

[0619] 169 μL of sterile water was added to a microfuge tube. 5 μL of 2M CaCl₂) was then added to the water and mixed gently by pipetting. 50 μL of DNA was added dropwise to the CaCl₂) water solution. Twenty six L of 2M CaCl₂) was then added and mixed gently by pipetting twice with a micro-pipetor. This final solution should consist of 5 μg of DNA in 250 μL of 0.25M CaCl₂). A second tube was then prepared containing 250 μL of 2×HBS (Hepes buffered solution). Using a 2 mL sterile pipette attached to a Pipet-Aid air was slowly bubbled through the 2×HBS solution. At the same time the DNA solution in the 0.25M CaCl₂) solution was added in a dropwise fashion. Bubbling was continued for approximately 5 seconds after addition of the final DNA droplet. The solution was then incubated at room temperature for up to 20 minutes before adding to 293A cells. 250 μL of the DNA/Calcium phosphate solution was added dropwise to a monolayer of 293A cells that had been seeded one day prior at 10⁶ cells per well of a 6 well plate. The cells were returned to the incubator and incubated overnight. The media was changed 24 h later. After 72 h the cells were split 1:6 into a 6 well plate. The monolayers were monitored daily by light microscopy for evidence of cytopathic effect (CPE). 7-10 days post transfection viral plaques were observed and the monolayer harvested by pipetting the media in the wells to lift the cells. The harvested cells and media were transferred to a 50 mL centrifuge tube followed by three rounds of freeze thawing (at −80° C. and 37° C.). The subsequent lysate, called the primary virus stock was clarified by centrifugation at full speed on a bench top centrifuge (4300×g) and a proportion of the lysate 10-50%) used to infect 293A cells in a T25 flask. The infected cells were incubated for 48 h before harvesting cells and media at complete CPE. The cells were once again harvested, freeze thawed and clarified before using this secondary viral stock to infect a T150 flask seeded at 1.5×10⁷ cells per flask. Once complete CPE was achieved at 72 h the media and cells were harvested and treated as with earlier viral stocks to generate a tertiary stock.

### Production in 293F Cells

[0620] ChAdV68 virus production was performed in 293F cells grown in 293 FreeStyle™ (ThermoFisher) media in an incubator at 8% C0₂. On the day of infection cells were diluted to 10⁶ cells per mL, with 98% viability and 400 mL were used per production run in 1 L Shake flasks (Corning). 4 mL of the tertiary viral stock with a target MOI of >3.3 was used per infection. The cells were incubated for 48-72 h until the viability was <70% as measured by Trypan blue. The infected cells were then harvested by centrifugation, full speed bench top centrifuge and washed in 1×PBS, re-centrifuged and then re-suspended in 20 mL of 10 mM Tris pH7.4. The cell pellet was lysed by freeze thawing 3× and clarified by centrifugation at 4,300×g for 5 minutes.

### Purification by CsCl Centrifugation

[0621] Viral DNA was purified by CsCl centrifugation. Two discontinuous gradient runs were performed. The first to purify virus from cellular components and the second to further refine separation from cellular components and separate defective from infectious particles.

[0622] 10 mL of 1.2 (26.8 g CsCl dissolved in 92 mL of 10 mM Tris pH 8.0) CsCl was added to polyallomer tubes. Then 8 mL of 1.4 CsCl (53 g CsCl dissolved in 87 mL of 10 mM Tris pH 8.0) was carefully added using a pipette delivering to the bottom of the tube. The clarified virus was carefully layered on top of the 1.2 layer. If needed more 10 mM Tris was added to balance the tubes. The tubes were then placed in a SW-32Ti rotor and centrifuged for 2 h 30 min at 10° C. The tube was then removed to a laminar flow cabinet and the virus band pulled using an 18 gauge needle and a 10 mL syringe. Care was taken not to remove contaminating host cell DNA and protein. The band was then diluted at least 2× with 10 mM Tris pH 8.0 and layered as before on a discontinuous gradient as described above. The run was performed as described before except that this time the run was performed overnight. The next day the band was pulled with care to avoid pulling any of the defective particle band. The virus was then dialyzed using a Slide-a-Lyzer™ Cassette (Pierce) against ARM buffer (20 mM Tris pH 8.0, 25 mM NaCl, 2.5% Glycerol). This was performed 3×, 1 h per buffer exchange. The virus was then aliquoted for storage at −80° C.

### Viral Assays

[0623] VP concentration was performed by using an OD 260 assay based on the extinction coefficient of 1.1×10¹² viral particles (VP) is equivalent to an Absorbance value of 1 at OD260 nm. Two dilutions (1:5 and 1:10) of adenovirus were made in a viral lysis buffer (0.1% SDS, 10 mM Tris pH 7.4, 1 mM EDTA). OD was measured in duplicate at both dilutions and the VP concentration/mL was measured by multiplying the OD260 value X dilution factor X 1.1×10¹²VP.

[0624] An infectious unit (IU) titer was calculated by a limiting dilution assay of the viral stock. The virus was initially diluted 100× in DMEM/5% NS/1×PS and then subsequently diluted using 10-fold dilutions down to 1×10⁻⁷. 100 μL of these dilutions were then added to 293A cells that were seeded at least an hour before at 3e5 cells/well of a 24 well plate. This was performed in duplicate. Plates were incubated for 48 h in a CO2 (5%) incubator at 37° C. The cells were then washed with 1×PBS and were then fixed with 100% cold methanol (−20° C.). The plates were then incubated at −20° C. for a minimum of 20 minutes. The wells were washed with 1×PBS then blocked in 1×PBS/0.1% BSA for 1 h at room temperature. A rabbit anti-Ad antibody (Abcam, Cambridge, Mass.) was added at 1:8,000 dilution in blocking buffer (0.25 ml per well) and incubated for 1 h at room temperature. The wells were washed 4× with 0.5 mL PBS per well. A HRP conjugated Goat anti-Rabbit antibody (Bethyl Labs, Montgomery Tex.) diluted 1000× was added per well and incubated for 1 h prior to a final round of washing. 5 PBS washes were performed and the plates were developed using DAB (Diaminobenzidine tetrahydrochloride) substrate in Tris buffered saline (0.67 mg/mL DAB in 50 mM Tris pH 7.5, 150 mM NaCl) with 0.01% H₂O₂. Wells were developed for 5 min prior to counting. Cells were counted under a 10× objective using a dilution that gave between 4-40 stained cells per field of view. The field of view that was used was a 0.32 mm² grid of which there are equivalent to 625 per field of view on a 24 well plate. The number of infectious viruses/mL can be determined by the number of stained cells per grid multiplied by the number of grids per field of view multiplied by a dilution factor 10. Similarly, when working with GFP expressing cells florescent can be used rather than capsid staining to determine the number of GFP expressing virions per mL.

### Immunizations

[0625] C57BL/6J female mice and Balb/c female mice were injected with 1×10⁸ viral particles (VP) of ChAdV68.5WTnt.MAG25mer in 100 uL volume, bilateral intramuscular injection (50 uL per leg).

### Splenocyte Dissociation

[0626] Spleen and lymph nodes for each mouse were pooled in 3 mL of complete RPMI (RPMI, 10% FBS, penicillin/streptomycin). Mechanical dissociation was performed using the gentleMACS Dissociator (Miltenyi Biotec), following manufacturer's protocol. Dissociated cells were filtered through a 40 micron filter and red blood cells were lysed with ACK lysis buffer (150 mM NH₄Cl, 10 mM KHCO₃, 0.1 mM Na₂EDTA). Cells were filtered again through a 30 micron filter and then resuspended in complete RPMI. Cells were counted on the Attune NxT flow cytometer (Thermo Fisher) using propidium iodide staining to exclude dead and apoptotic cells. Cell were then adjusted to the appropriate concentration of live cells for subsequent analysis.

### Ex Vivo Enzyme-Linked Immunospot (ELISPOT) Analysis

[0627] ELISPOT analysis was performed according to ELISPOT harmonization guidelines {DOI: 10.1038/nprot.2015.068} with the mouse IFNg ELISpotPLUS kit (MABTECH). 5×10⁴ splenocytes were incubated with 10 uM of the indicated peptides for 16 hours in 96-well IFNg antibody coated plates. Spots were developed using alkaline phosphatase. The reaction was timed for 10 minutes and was terminated by running plate under tap water. Spots were counted using an AID vSpot Reader Spectrum. For ELISPOT analysis, wells with saturation >50% were recorded as “too numerous to count”. Samples with deviation of replicate wells >10% were excluded from analysis. Spot counts were then corrected for well confluency using the formula: spot count+2×(spot count×% confluence/[100%−% confluence]). Negative background was corrected by subtraction of spot counts in the negative peptide stimulation wells from the antigen stimulated wells. Finally, wells labeled too numerous to count were set to the highest observed corrected value, rounded up to the nearest hundred.

[0628] XIV.B.2. Production of ChAdV68 Viral Delivery Particles after DNA Transfection

[0629] In one example, ChAdV68.4WTnt.GFP (FIG. 6) and ChAdV68.5WTnt.GFP (FIG. 7) DNA was transfected into HEK293A cells and virus replication (viral plaques) was observed 7-10 days after transfection. ChAdV68 viral plaques were visualized using light (FIGS. 6A and 7A) and fluorescent microscopy (FIG. 6B-C and FIG. 7B-C). GFP denotes productive ChAdV68 viral delivery particle production.

[0630] XIV.B.3. ChAdV68 Viral Delivery Particles Expansion

[0631] In one example, ChAdV68.4WTnt.GFP, ChAdV68.5WTnt.GFP, and ChAdV68.5WTnt.MAG25mer viruses were expanded in HEK293F cells and a purified virus stock produced 18 days after transfection (FIG. 8). Viral particles were quantified in the purified ChAdV68 virus stocks and compared to adenovirus type 5 (Ad5) and ChAdVY25 (a closely related ChAdV; Dicks, 2012, PloS ONE 7, e40385) viral stocks produced using the same protocol. ChAdV68 viral titers were comparable to Ad5 and ChAdVY25 (Table 13).

TABLE 13
Adenoviral vector production in 293F suspension cells

| Construct | Average VP/cell +/− SD |
|---|---|
| Ad5-Vectors (Multiple vectors) | 2.96e4 +/− 2.26e4 |
| Ad5-GFP | 3.89e4 |
| chAdY25-GFP | 1.75e3 +/− 6.03e1 |
| ChAdV68.4WTnt.GFP | 1.2e4 +/− 6.5e3 |
| ChAdV68.5WTnt.GFP | 1.8e3 |
| ChAdV68.5WTnt.MAG25mer | 1.39e3 +/− 1.1e3 |

*SD is only reported where multiple Production runs have been performed

[0632] XIV.B.4. Evaluation of Immunogenicity

[0633] C68 vector expressing mouse tumor antigens were evaluated in mouse immunogenicity studies to demonstrate the C68 vector elicits T-cell responses. T-cell responses to the MHC class I epitope SIINFEKL (SEQ ID NO: 128) were measured in C57BL/6J female mice and the MHC class I epitope AH1-A5 (Slansky et al., 2000, Immunity 13:529-538) measured in Balb/c mice. As shown in FIG. 14, strong T-cell responses relative to control were measured after immunization of mice with ChAdV68.5WTnt.MAG25mer. Mean cellular immune responses of 8957 or 4019 spot forming cells (SFCs) per 10⁶ splenocytes were observed in ELISpot assays when C57BL/6J or Balb/c mice were immunized with ChAdV68.5WTnt.MAG25mer, respectively, 10 days after immunization.

[0634] Tumor infiltrating lymphocytes were also evaluated in CT26 tumor model evaluating ChAdV and co-administration of a an anti-CTLA4 antibody. Mice were implanted with CT26 tumors cells and 7 days after implantation, were immunized with ChAdV vaccine and treated with anti-CTLA4 antibody (clone 9D9) or IgG as a control. Tumor infiltrating lymphocytes were analyzed 12 days after immunization. Tumors from each mouse were dissociated using the gentleMACS Dissociator (Miltenyi Biotec) and mouse tumor dissociation kit (Miltenyi Biotec). Dissociated cells were filtered through a 30 micron filter and resuspended in complete RPMI. Cells were counted on the Attune NxT flow cytometer (Thermo Fisher) using propidium iodide staining to exclude dead and apoptotic cells. Cell were then adjusted to the appropriate concentration of live cells for subsequent analysis. Antigen specific cells were identified by MHC-tetramer complexes and co-stained with anti-CD8 and a viability marker. Tumors were harvested 12 days after prime immunization.

[0635] Antigen-specific CD8+ T cells within the tumor comprised a median of 3.3%, 2.2%, or 8.1% of the total live cell population in ChAdV, anti-CTLA4, and ChAdV+ anti-CTLA4 treated groups, respectively (FIG. 33 and Table 14). Treatment with anti-CTLA in combination with active ChAdV immunization resulted in a statistically significant increase in the antigen-specific CD8+ T cell frequency over both ChAdV alone and anti-CTLA4 alone demonstrating anti-CTLA4, when co-administered with the chAd68 vaccine, increased the number of infiltrating T cells within a tumor.

TABLE 14
Tetramer+ infiltrating CD8 T cell frequencies in CT26 tumors

| Treatment | Median % tetramer+ |
|---|---|
| ChAdV68.5WTnt.MAG25mer | 3.3 |
| (ChAdV) | |
| Anti-CTLA4 | 2.2 |
| ChAdV68.5WTnt.MAG25mer | 8.1 |
| (ChAdV) + anti-CTLA4 | |

### XV. Example 3: Alphavirus Antigen Cassette Delivery Vector

[0636] XV.A. Alphavirus Delivery Vector Evaluation Materials and Methods

### In Vitro Transcription to Generate RNA

[0637] For in vitro testing: plasmid DNA was linearized by restriction digest with PmeI, column purified following manufacturer's protocol (GeneJet DNA cleanup kit, Thermo) and used as template. In vitro transcription was performed using the RiboMAX Large Scale RNA production System (Promega) with the m⁷G cap analog (Promega) according to manufacturer's protocol. mRNA was purified using the RNeasy kit (Qiagen) according to manufacturer's protocol.

[0638] For in vivo studies: RNA was generated and purified by TriLInk Biotechnologies and capped with Enzymatic Cap1.

### Transfection of RNA

[0639] HEK293A cells were seeded at 6e4 cells/well for 96 wells and 2e5 cells/well for 24 wells, ˜16 hours prior to transfection. Cells were transfected with mRNA using MessengerMAX lipofectamine (Invitrogen) and following manufacturer's protocol. For 96-wells, 0.15 uL of lipofectamine and 10 ng of mRNA was used per well, and for 24-wells, 0.75 uL of lipofectamine and 150 ng of mRNA was used per well. A GFP expressing mRNA (TriLink Biotechnologies) was used as a transfection control.

### Luciferase Assay

[0640] Luciferase reporter assay was performed in white-walled 96-well plates with each condition in triplicate using the ONE-Glo luciferase assay (Promega) following manufacturer's protocol. Luminescence was measured using the SpectraMax.

qRT-PCR

[0641] Transfected cells were rinsed and replaced with fresh media 2 hours post transfection to remove any untransfected mRNA. Cells were then harvested at various timepoints in RLT plus lysis buffer (Qiagen), homogenized using a QiaShredder (Qiagen) and RNA was extracted using the RNeasy kit (Qiagen), all according to manufacturer's protocol. Total RNA was quantified using a Nanodrop (Thermo Scientific). qRT-PCR was performed using the Quantitect Probe One-Step RT-PCR kit (Qiagen) on the qTower³ (Analytik Jena) according to manufacturer's protocol, using 20 ng of total RNA per reaction. Each sample was run in triplicate for each probe. Actin or GusB were used as reference genes. Custom primer/probes were generated by IDT (Table 15).

TABLE 15
qPCR primers/probes

| Target | | |
|---|---|---|
| Luci | Primer1 | GTGGTGTGCAGCGAGAATAG (SEQ ID NO: |
| | | 129) |
| | Primer2 | CGCTCGTTGTAGATGTCGTTAG (SEQ ID NO: |
| | | 130) |
| | Probe | /56-FAM/TTGCAGTTC/ZEN/TTCATGCCCGTG |
| | | TTG/3IABkFQ/ (SEQ ID NO: 131) |
| GusB | Primer1 | GTTTTTGATCCAGACCCAGATG (SEQ ID NO: |
| | | 132) |
| | Primer2 | GCCCATTATTCAGAGCGAGTA (SEQ ID NO: |
| | | 133) |
| | Probe | /56-FAM/TGCAGGGTT/ZEN/TCACCAGGATCC |
| | | AC/3IABkFQ/ (SEQ ID NO: 134) |
| ActB | Primer1 | CCTTGCACATGCCGGAG (SEQ ID NO: 135) |
| | Primer2 | ACAGAGCCTCGCCTTTG (SEQ ID NO: 136) |
| | Probe | /56-FAM/TCATCCATG/ZEN/GTGAGCTGGCG |
| | | G/3IABkFQ/ (SEQ ID NO: 137) |
| MAG- | Primer1 | CTGAAAGCTCGGTTTGCTAATG (SEQ ID NO: |
| 25mer | | 138) |
| Set1 | Primer2 | CCATGCTGGAAGAGACAATCT (SEQ ID NO: |
| | | 139) |
| | Probe | /56-FAM/CGTTTCTGA/ZEN/TGGCGCTGACCG |
| | | ATA/3IABkFQ/ (SEQ ID NO: 140) |
| MAG- | Primer1 | TATGCCTATCCTGTCTCCTCTG (SEQ ID NO: |
| 25mer | | 141) |
| Set2 | Primer2 | GCTAATGCAGCTAAGTCCTCTC (SEQ ID NO: |
| | | 142) |
| | Probe | /56-FAM/TGTTTACCC/ZEN/TGACCGTGCCTT |
| | | CTG/3IABkFQ/ (SEQ ID NO: 143) |

### B16-OVA Tumor Model

[0642] C57BL/6J mice were injected in the lower left abdominal flank with 10⁵ B16-OVA cells/animal. Tumors were allowed to grow for 3 days prior to immunization.

### CT26 Tumor Model

[0643] Balb/c mice were injected in the lower left abdominal flank with 10⁶ CT26 cells/animal. Tumors were allowed to grow for 7 days prior to immunization.

### Immunizations

[0644] For srRNA vaccine, mice were injected with 10 ug of RNA in 100 uL volume, bilateral intramuscular injection (50 uL per leg). For Ad5 vaccine, mice were injected with 5×10¹⁰ viral particles (VP) in 100 uL volume, bilateral intramuscular injection (50 uL per leg). Animals were injected with anti-CTLA-4 (clone 9D9, BioXcell), anti-PD-1 (clone RMP1-14, BioXcell) or anti-IgG (clone MPC-11, BioXcell), 250 ug dose, 2 times per week, via intraperitoneal injection.

### In Vivo Bioluminescent Imaging

[0645] At each timepoint mice were injected with 150 mg/kg luciferin substrate via intraperitoneal injection and bioluminescence was measured using the IVIS In vivo imaging system (PerkinElmer) 10-15 minutes after injection.

### Splenocyte Dissociation

[0646] Spleen and lymph nodes for each mouse were pooled in 3 mL of complete RPMI (RPMI, 10% FBS, penicillin/streptomycin). Mechanical dissociation was performed using the gentleMACS Dissociator (Miltenyi Biotec), following manufacturer's protocol. Dissociated cells were filtered through a 40 micron filter and red blood cells were lysed with ACK lysis buffer (150 mM NH₄Cl, 10 mM KHCO₃, 0.1 mM Na₂EDTA). Cells were filtered again through a 30 micron filter and then resuspended in complete RPMI. Cells were counted on the Attune NxT flow cytometer (Thermo Fisher) using propidium iodide staining to exclude dead and apoptotic cells. Cell were then adjusted to the appropriate concentration of live cells for subsequent analysis.

### Ex Vivo Enzyme-Linked Immunospot (ELISPOT) Analysis

[0647] ELISPOT analysis was performed according to ELISPOT harmonization guidelines {DOI: 10.1038/nprot.2015.068} with the mouse IFNg ELISpotPLUS kit (MABTECH). 5×10⁴ splenocytes were incubated with 10 uM of the indicated peptides for 16 hours in 96-well IFNg antibody coated plates. Spots were developed using alkaline phosphatase. The reaction was timed for 10 minutes and was terminated by running plate under tap water. Spots were counted using an AID vSpot Reader Spectrum. For ELISPOT analysis, wells with saturation >50% were recorded as “too numerous to count”. Samples with deviation of replicate wells >10% were excluded from analysis. Spot counts were then corrected for well confluency using the formula: spot count+2×(spot count×% confluence/[100%−% confluence]). Negative background was corrected by subtraction of spot counts in the negative peptide stimulation wells from the antigen stimulated wells. Finally, wells labeled too numerous to count were set to the highest observed corrected value, rounded up to the nearest hundred.

[0648] XV.B. Alphavirus Vector

[0649] XV.B.1. Alphavirus Vector In Vitro Evaluation

[0650] In one implementation of the present invention, a RNA alphavirus backbone for the antigen expression system was generated from a Venezuelan Equine Encephalitis (VEE) (Kinney, 1986, Virology 152: 400-413) based self-replicating RNA (srRNA) vector. In one example, the sequences encoding the structural proteins of VEE located 3′ of the 26S sub-genomic promoter were deleted (VEE sequences 7544 to 11,175 deleted; numbering based on Kinney et al 1986; SEQ ID NO:6) and replaced by antigen sequences (SEQ ID NO: 14 and SEQ ID NO:4) or a luciferase reporter (e.g., VEE-Luciferase, SEQ ID NO:15) (FIG. 9). RNA was transcribed from the srRNA DNA vector in vitro, transfected into HEK293A cells and luciferase reporter expression was measured. In addition, an (non-replicating) mRNA encoding luciferase was transfected for comparison. An ˜30,000-fold increase in srRNA reporter signal was observed for VEE-Luciferase srRNA when comparing the 23 hour measurement vs the 2 hour measurement (Table 16). In contrast, the mRNA reporter exhibited a less than 10-fold increase in signal over the same time period (Table 16).

TABLE 16
Expression of luciferase from VEE self-replicating vector
increases over time. HEK293A cells transfected with 10 ng
of VEE-Luciferase srRNA or 10 ng of non-replicating
luciferase mRNA (TriLink L-6307) per well in 96 wells.
Luminescence was measured at various times post
transfection. Luciferase expression is reported as relative
luminescence units (RLU). Each data point is the
mean +/− SD of 3 transfected wells.

| | Timepoint | | Standard Dev |
|---|---|---|---|
| Construct | (hr) | Mean RLU | (triplicate wells) |
| mRNA | 2 | 878.6666667 | 120.7904522 |
| mRNA | 5 | 1847.333333 | 978.515372 |
| mRNA | 9 | 4847 | 868.3271273 |
| mRNA | 23 | 8639.333333 | 751.6816702 |
| SRRNA | 2 | 27 | 15 |
| SRRNA | 5 | 4884.333333 | 2955.158935 |
| SRRNA | 9 | 182065.5 | 16030.81784 |
| SRRNA | 23 | 783658.3333 | 68985.05538 |

[0651] In another example, replication of the srRNA was confirmed directly by measuring RNA levels after transfection of either the luciferase encoding srRNA (VEE-Luciferase) or an srRNA encoding a multi-epitope cassette (VEE-MAG25mer) using quantitative reverse transcription polymerase chain reaction (qRT-PCR). An ˜150-fold increase in RNA was observed for the VEE-luciferase srRNA (Table 17), while a 30-50-fold increase in RNA was observed for the VEE-MAG25mer srRNA (Table 18). These data confirm that the VEE srRNA vectors replicate when transfected into cells.

TABLE 17
Direct measurement of RNA replication in VEE-Luciferase srRNA transfected
cells. HEK293A cells transfected with VEE-Luciferase srRNA (150 ng per well, 24-well) and
RNA levels quantified by qRT-PCR at various times after transfection. Each measurement
was normalized based on the Actin reference gene and fold-change relative to the 2 hour
timepoint is presented.

| Timepoint | | | | | | Relative Fold |
|---|---|---|---|---|---|---|
| (hr) | Luciferase Ct | Actin Ct | dCt | Ref dCt | ddCt | change |
| 2 | 20.51 | 18.14 | 2.38 | 2.38 | 0.00 | 1.00 |
| 4 | 20.09 | 18.39 | 1.70 | 2.38 | −0.67 | 1.59 |
| 6 | 15.50 | 18.19 | −2.69 | 2.38 | −5.07 | 33.51 |
| 8 | 13.51 | 18.36 | −4.85 | 2.38 | −7.22 | 149.43 |

TABLE 18
Direct measurement of RNA replication in VEE-MAG25mer srRNA transfected
cells. HEK293 cells transfected with VEE-MAG25mer srRNA (150 ng per well, 24-well) and
RNA levels quantified by qRT-PCR at various times after transfection. Each measurement
was normalized based on the GusB reference gene and fold-change relative to the 2 hour
timepoint is presented. Different lines on the graph represent 2 different qPCR primer/probe
sets, both of which detect the epitope cassette region of the srRNA.

| Primer/ | Timepoint | | GusB | | | | Relative |
|---|---|---|---|---|---|---|---|
| probe | (hr) | Ct | Ct | dCt | Ref dCt | ddCt | Fold-Change |
| Set1 | 2 | 18.96 | 22.41 | −3.45 | −3.45 | 0.00 | 1.00 |
| Set1 | 4 | 17.46 | 22.27 | −4.81 | −3.45 | −1.37 | 2.58 |
| Set1 | 6 | 14.87 | 22.04 | −7.17 | −3.45 | −3.72 | 13.21 |
| Set1 | 8 | 14.16 | 22.19 | −8.02 | −3.45 | −4.58 | 23.86 |
| Set1 | 24 | 13.16 | 22.01 | −8.86 | −3.45 | −5.41 | 42.52 |
| Set1 | 36 | 13.53 | 22.63 | −9.10 | −3.45 | −5.66 | 50.45 |
| Set2 | 2 | 17.75 | 22.41 | −4.66 | −4.66 | 0.00 | 1.00 |
| Set2 | 4 | 16.66 | 22.27 | −5.61 | −4.66 | −0.94 | 1.92 |
| Set2 | 6 | 14.22 | 22.04 | −7.82 | −4.66 | −3.15 | 8.90 |
| Set2 | 8 | 13.18 | 22.19 | −9.01 | −4.66 | −4.35 | 20.35 |
| Set2 | 24 | 12.22 | 22.01 | −9.80 | −4.66 | −5.13 | 35.10 |
| Set2 | 36 | 13.08 | 22.63 | −9.55 | −4.66 | −4.89 | 29.58 |

[0652] XV.B.2. Alphavirus Vector In Vivo Evaluation

[0653] In another example, VEE-Luciferase reporter expression was evaluated in vivo. Mice were injected with 10 ug of VEE-Luciferase srRNA encapsulated in lipid nanoparticle (MC3) and imaged at 24 and 48 hours, and 7 and 14 days post injection to determine bioluminescent signal. Luciferase signal was detected at 24 hours post injection and increased over time and appeared to peak at 7 days after srRNA injection (FIG. 10).

[0654] XV.B.3. Alphavirus Vector Tumor Model Evaluation

[0655] In one implementation, to determine if the VEE srRNA vector directs antigen-specific immune responses in vivo, a VEE srRNA vector was generated (VEE-UbAAY, SEQ ID NO:14) that expresses 2 different MHC class I mouse tumor epitopes, SIINFEKL (SEQ ID NO: 144) and AH1-A5 (Slansky et al., 2000, Immunity 13:529-538). The SFL (SIINFEKL (SEQ ID NO: 145)) epitope is expressed by the B16-OVA melanoma cell line, and the AH1-A5 (SPSYAYHQF (SEQ ID NO: 146); Slansky et al., 2000, Immunity) epitope induces T cells targeting a related epitope (AH1/SPSYVYHQF (SEQ ID NO: 147); Huang et al., 1996, Proc Natl Acad Sci USA 93:9730-9735) that is expressed by the CT26 colon carcinoma cell line. In one example, for in vivo studies, VEE-UbAAY srRNA was generated by in vitro transcription using T7 polymerase (TriLink Biotechnologies) and encapsulated in a lipid nanoparticle (MC3).

[0656] A strong antigen-specific T-cell response targeting SFL, relative to control, was observed two weeks after immunization of B16-OVA tumor bearing mice with MC3 formulated VEE-UbAAY srRNA. In one example, a median of 3835 spot forming cells (SFC) per 10⁶ splenocytes was measured after stimulation with the SFL peptide in ELISpot assays (FIG. 11A, Table 19) and 1.8% (median) of CD8 T-cells were SFL antigen-specific as measured by pentamer staining (FIG. 11B, Table 19). In another example, co-administration of an anti-CTLA-4 monoclonal antibody (mAb) with the VEE srRNA vaccine resulted in a moderate increase in overall T-cell responses with a median of 4794.5 SFCs per 10⁶ splenocytes measured in the ELISpot assay (FIG. 11A, Table 19).

TABLE 19
Results of ELISPOT and MHCI-pentamer staining assays 14 days post VEE
srRNA immunization in B16-OVA tumor bearing C57BL/6J mice.

| | | | Pentamer | | | | Pentamer |
|---|---|---|---|---|---|---|---|
| | | SFC/1e6 | positive (% | | | SFC/1e6 | positive (% |
| Group | Mouse | splenocytes | of CD8) | Group | Mouse | splenocytes | of CD8) |
| Control | 1 | 47 | 0.22 | Vax | 1 | 6774 | 4.92 |
| | 2 | 80 | 0.32 | | 2 | 2323 | 1.34 |
| | 3 | 0 | 0.27 | | 3 | 2997 | 1.52 |
| | 4 | 0 | 0.29 | | 4 | 4492 | 1.86 |
| | 5 | 0 | 0.27 | | 5 | 4970 | 3.7 |
| | 6 | 0 | 0.25 | | 6 | | 4.13 |
| | 7 | 0 | 0.23 | | 7 | 3835 | 1.66 |
| | 8 | 87 | 0.25 | | 8 | 3119 | 1.64 |
| aCTLA4 | 1 | 0 | 0.24 | Vax + | 1 | 6232 | 2.16 |
| | 2 | 0 | 0.26 | aCTLA4 | 2 | 4242 | 0.82 |
| | 3 | 0 | 0.39 | | 3 | 5347 | 1.57 |
| | 4 | 0 | 0.28 | | 4 | 6568 | 2.33 |
| | 5 | 0 | 0.28 | | 5 | 6269 | 1.55 |
| | 6 | 0 | 0.28 | | 6 | 4056 | 1.74 |
| | 7 | 0 | 0.31 | | 7 | 4163 | 1.14 |
| | 8 | 6 | 0.26 | | 8 | 3667 | 1.01 |

* Note
that results from mouse #6 in the Vax group were excluded from analysis due to high variability between triplicate wells.

[0657] In another implementation, to mirror a clinical approach, a heterologous prime/boost in the B16-OVA and CT26 mouse tumor models was performed, where tumor bearing mice were immunized first with adenoviral vector expressing the same antigen cassette (Ad5-UbAAY), followed by a boost immunization with the VEE-UbAAY srRNA vaccine 14 days after the Ad5-UbAAY prime. In one example, an antigen-specific immune response was induced by the Ad5-UbAAY vaccine resulting in 7330 (median) SFCs per 10⁶ splenocytes measured in the ELISpot assay (FIG. 12A, Table 20) and 2.9% (median) of CD8 T-cells targeting the SFL antigen as measured by pentamer staining (FIG. 12C, Table 20). In another example, the T-cell response was maintained 2 weeks after the VEE-UbAAY srRNA boost in the B16-OVA model with 3960 (median) SFL-specific SFCs per 10⁶ splenocytes measured in the ELISpot assay (FIG. 121B, Table 20) and 3.1% (median) of CD8 T-cells targeting the SFL antigen as measured by pentamer staining (FIG. 12D, Table 20).

TABLE 20
Immune monitoring of B16-OVA mice following heterologous prime/boost with
Ad5 vaccine prime and srRNA boost.

| | | | | | | | |
|---|---|---|---|---|---|---|---|
| | | | Pentamer | | | | Pentamer |
| | | SFC/1e6 | positive | | | SFC/1e6 | positive |
| Group | Mouse | splenocytes | (% of CD8) | Group | Mouse | splenocytes | (% of CD8) |

Day 14

| | | | | | | | |
|---|---|---|---|---|---|---|---|
| Control | 1 | 0 | 0.10 | Vax | 1 | 8514 | 1.87 |
| | 2 | 0 | 0.09 | | 2 | 7779 | 1.91 |
| | 3 | 0 | 0.11 | | 3 | 6177 | 3.17 |
| | 4 | 46 | 0.18 | | 4 | 7945 | 3.41 |
| | 5 | 0 | 0.11 | | 5 | 8821 | 4.51 |
| | 6 | 16 | 0.11 | | 6 | 6881 | 2.48 |
| | 7 | 0 | 0.24 | | 7 | 5365 | 2.57 |
| | 8 | 37 | 0.10 | | 8 | 6705 | 3.98 |
| aCTLA4 | 1 | 0 | 0.08 | Vax + | 1 | 9416 | 2.35 |
| | 2 | 29 | 0.10 | aCTLA4 | 2 | 7918 | 3.33 |
| | 3 | 0 | 0.09 | | 3 | 10153 | 4.50 |
| | 4 | 29 | 0.09 | | 4 | 7212 | 2.98 |
| | 5 | 0 | 0.10 | | 5 | 11203 | 4.38 |
| | 6 | 49 | 0.10 | | 6 | 9784 | 2.27 |
| | 7 | 0 | 0.10 | | 8 | 7267 | 2.87 |
| | 8 | 31 | 0.14 | | | | |

Day 28

| | | | | | | | |
|---|---|---|---|---|---|---|---|
| Control | 2 | 0 | 0.17 | Vax | 1 | 5033 | 2.61 |
| | 4 | 0 | 0.15 | | 2 | 3958 | 3.08 |
| | 6 | 20 | 0.17 | | 4 | 3960 | 3.58 |
| aCTLA4 | 1 | 7 | 0.23 | Vax + | 4 | 3460 | 2.44 |
| | 2 | 0 | 0.18 | aCTLA4 | 5 | 5670 | 3.46 |
| | 3 | 0 | 0.14 | | | | |

[0658] In another implementation, similar results were observed after an Ad5-UbAAY prime and VEE-UbAAY srRNA boost in the CT26 mouse model. In one example, an AH1 antigen-specific response was observed after the Ad5-UbAAY prime (day 14) with a mean of 5187 SFCs per 10⁶ splenocytes measured in the ELISpot assay (FIG. 13A, Table 21) and 3799 SFCs per 10⁶ splenocytes measured in the ELISpot assay after the VEE-UbAAY srRNA boost (day 28) (FIG. 131B, Table 21).

TABLE 21
Immune monitoring after heterologous prime/boost
in CT26 tumor mouse model.
Day 12

| | | SFC/1e6 |
|---|---|---|
| Group | Mouse | splenocytes |
| Control | 1 | 1799 |
| | 2 | 1442 |
| | 3 | 1235 |
| aPD1 | 1 | 737 |
| | 2 | 5230 |
| | 3 | 332 |
| Vax | 1 | 6287 |
| | 2 | 4086 |
| Vax + | 1 | 5363 |
| aPD1 | 2 | 6500 |

Day 21

| | | SFC/1e6 |
|---|---|---|
| Group | Mouse | splenocytes |
| Control | 9 | 167 |
| | 10 | 115 |
| | 11 | 347 |
| aPD1 | 8 | 511 |
| | 11 | 758 |
| Vax | 9 | 3133 |
| | 10 | 2036 |
| | 11 | 6227 |
| Vax + | 8 | 3844 |
| aPD1 | 9 | 2071 |
| | 11 | 4888 |

### XVI. Example 4: Non-Human Primate Studies

[0659] Various dosing protocols using ChAdV68 and self-replicating RNA (srRNA) were evaluated in non-human primates (NHP).

[0660] Materials and Methods

[0661] A priming vaccine was injected intramuscularly (IM) in each NHP to initiate the study (vaccine prime). One or more boosting vaccines (vaccine boost) were also injected intramuscularly in each NHP. Bilateral injections per dose were administered according to groups outlined in tables and summarized below.

### Immunizations

[0662] Mamu-A*01 Indian rhesus macaques were immunized bilaterally with 1×10¹² viral particles (5×10¹¹ viral particles per injection) of ChAdV68.5WTnt.MAG25mer, 30 ug of VEE-MAG25MER srRNA, 100 ug of VEE-MAG25mer srRNA or 300 ug of VEE-MAG25mer srRNA formulated in LNP-1 or LNP-2. Vaccine boosts of 30 ug, 100 ug or 300 ug VEE-MAG25mer srRNA were administered intramuscularly at the indicated time after prime vaccination.

### Immune Monitoring

[0663] PBMCs were isolated at indicated times after prime vaccination using Lymphocyte Separation Medium (LSM, MP Biomedicals) and LeucoSep separation tubes (Greiner Bio-One) and resuspended in RPMI containing 10% FBS and penicillin/streptomycin. Cells were counted on the Attune NxT flow cytometer (Thermo Fisher) using propidium iodide staining to exclude dead and apoptotic cells. Cell were then adjusted to the appropriate concentration of live cells for subsequent analysis. For each monkey in the studies, T cell responses were measured using ELISpot or flow cytometry methods. T cell responses to 6 different rhesus macaque Mamu-A*01 class I epitopes encoded in the vaccines were monitored from PBMCs by measuring induction of cytokines, such as IFN-gamma, using ex vivo enzyme-linked immunospot (ELISpot) analysis. ELISpot analysis was performed according to ELISPOT harmonization guidelines {DOI: 10.1038/nprot.2015.068} with the monkey IFNg ELISpotPLUS kit (MABTECH). 200,000 PBMCs were incubated with 10 uM of the indicated peptides for 16 hours in 96-well IFNg antibody coated plates. Spots were developed using alkaline phosphatase. The reaction was timed for 10 minutes and was terminated by running plate under tap water. Spots were counted using an AID vSpot Reader Spectrum. For ELISPOT analysis, wells with saturation >50% were recorded as “too numerous to count”. Samples with deviation of replicate wells >10% were excluded from analysis. Spot counts were then corrected for well confluency using the formula: spot count+2×(spot count×% confluence/[100%−% confluence]). Negative background was corrected by subtraction of spot counts in the negative peptide stimulation wells from the antigen stimulated wells. Finally, wells labeled too numerous to count were set to the highest observed corrected value, rounded up to the nearest hundred.

[0664] Specific CD4 and CD8 T cell responses to 6 different rhesus macaque Mamu-A*01 class I epitopes encoded in the vaccines were monitored from PBMCs by measuring induction of intracellular cytokines, such as IFN-gamma, using flow cytometry. The results from both methods indicate that cytokines were induced in an antigen-specific manner to epitopes.

[0665] Immunogenicity in Rhesus Macaques

[0666] This study was designed to (a) evaluate the immunogenicity and preliminary safety of VEE-MAG25mer srRNA 30 μg and 100 μg doses as a homologous prime/boost or heterologous prime/boost in combination with ChAdV68.5WTnt.MAG25mer; (b) compare the immune responses of VEE-MAG25mer srRNA in lipid nanoparticles using LNP1 versus LNP2; (c) evaluate the kinetics of T-cell responses to VEE-MAG25mer srRNA and ChAdV68.5WTnt.MAG25mer immunizations.

[0667] The study arm was conducted in Mamu-A*01 Indian rhesus macaques to demonstrate immunogenicity. Select antigens used in this study are only recognized in Rhesus macaques, specifically those with a Mamu-A*01 MHC class I haplotype. Mamu-A*01 Indian rhesus macaques were randomized to the different study arms (6 macaques per group) and administered an IM injection bilaterally with either ChAdV68.5WTnt.MAG25mer or VEE-MAG25mer srRNA vector encoding model antigens that includes multiple Mamu-A*01 restricted epitopes. The study arms were as described below.

TABLE 22
Non-GLP immunogenicity study in Indian Rhesus Macaques

| Group | Prime | Boost 1 | Boost 2 |
|---|---|---|---|
| 1 | VEE-MAG25mer | VEE-MAG25mer | VEE-MAG25mer |
| | srRNA-LNP1 | srRNA-LNP1 | srRNA-LNP1 |
| | (30 μg) | (30 μg) | (30 μg) |
| 2 | VEE-MAG25mer | VEE-MAG25mer | VEE-MAG25mer |
| | srRNA-LNP1 | srRNA-LNP1 | srRNA-LNP1 |
| | (100 μg) | (100 μg) | (100 μg) |
| 3 | VEE-MAG25mer | VEE-MAG25mer | VEE-MAG25mer |
| | srRNA-LNP2 | srRNA-LNP2 | srRNA-LNP2 |
| | (100 μg) | (100 μg) | (100 μg) |
| 4 | ChAdV68.5WTnt. | VEE-MAG25mer | VEE-MAG25mer |
| | MAG25mer | srRNA-LNP1 | srRNA-LNP1 |
| | | (100 μg) | (100 μg) |

[0668] PBMCs were collected prior to immunization and on weeks 1, 2, 3, 4, 5, 6, 8, 9, and 10 after the initial immunization for immune monitoring.

[0669] Results

[0670] Antigen-specific cellular immune responses in peripheral blood mononuclear cells (PBMCs) were measured to six different Mamu-A*01 restricted epitopes prior to immunization and 1, 2, 3, 4, 5, 6, 8, 9, and 10 weeks after the initial immunization. Animals received a boost immunization with VEE-MAG25mer srRNA on weeks 4 and 8 with either 30 μg or 100 μg doses, and either formulated with LNP1 or LNP2, as described in Table 22. Combined immune responses to all six epitopes were plotted for each immune monitoring timepoint (FIG. 15A-D and Tables 23-26).

[0671] Combined antigen-specific immune responses were observed at all measurements with 170, 14, 15, 11, 7, 8, 14, 17, 12 SFCs per 10⁶ PBMCs (six epitopes combined) 1, 2, 3, 4, 5, 6, 8, 9, or 10 weeks after an initial VEE-MAG25mer srRNA-LNP1 (30 μg) prime immunization, respectively (FIG. 15A). Combined antigen-specific immune responses were observed at all measurements with 108, −3, 14, 1, 37, 4, 105, 17, 25 SFCs per 10⁶ PBMCs (six epitopes combined) 1, 2, 3, 4, 5, 6, 8, 9, or 10 weeks after an initial VEE-MAG25mer srRNA-LNP1 (100 μg) prime immunization, respectively (FIG. 15B). Combined antigen-specific immune responses were observed at all measurements with −17, 38, 14, −2, 87, 21, 104, 129, 89 SFCs per 10⁶ PBMCs (six epitopes combined) 1, 2, 3, 4, 5, 6, 8, 9, or 10 weeks after an initial VEE-MAG25mer srRNA-LNP2 (100 μg) prime immunization, respectively (FIG. 15C). Negative values are a result of normalization to pre-bleed values for each epitope/animal.

[0672] Combined antigen-specific immune responses were observed at all measurements with 1218, 1784, 1866, 973, 1813, 747, 797, 1249, and 547 SFCs per 10⁶ PBMCs (six epitopes combined) 1, 2, 3, 4, 5, 6, 8, 9, or 10 weeks after an initial ChAdV68.5WTnt.MAG25mer prime immunization, respectively (FIG. 15D). The immune response showed the expected profile with peak immune responses measured ˜2-3 weeks after the prime immunization followed by a contraction in the immune response after 4 weeks. Combined antigen-specific cellular immune responses of 1813 SFCs per 10⁶ PBMCs (six epitopes combined) were measured 5 weeks after the initial immunization with ChAdV68.5WTnt.MAG25mer (i.e., 1 week after the first boost with VEE-MAG25mer srRNA). The immune response measured 1 week after the first boost with VEE-MAG25mer srRNA (week 5) was comparable to the peak immune response measured for the ChAdV68.5WTnt.MAG25mer prime immunization (week 3) (FIG. 15D). Combined antigen-specific cellular immune responses of 1249 SFCs per 10⁶ PBMCs (six epitopes combined) was measured 9 weeks after the initial immunization with ChAdV68.5WTnt.MAG25mer, respectively (i.e., 1 week after the second boost with VEE-MAG25mer srRNA). The immune responses measured 1 week after the second boost with VEE-MAG25mer srRNA (week 9) was ˜2-fold higher than that measured just before the boost immunization (FIG. 15D).

TABLE 23
Mean spot forming cells (SFC) per 10⁶ PBMCs for each epitope ± SEM
for VEE-MAG25mer srRNA-LNP1 (30 μg) (Group 1)

| | Antigen | | | | | |
|---|---|---|---|---|---|---|
| Wk | Env CL9 | Env TL9 | Gag CM9 | Gag LW9 | Pol SV9 | Tat TL8 |
| 1 | 0 ± 0 | 0 ± 0 | 0 ± 0 | 0 ± 0 | 0 ± 0 | 0 ± 0 |
| 2 | 39.7 ± 22.7 | 35.4 ± 25.1 | 3.2 ± 3.6 | 33 ± 28.1 | 30.9 ± 20.3 | 28.3 ± 17.5 |
| 3 | 2 ± 2.4 | 0.2 ± 1.8 | 1.8 ± 2.4 | 3.7 ± 1.9 | 1.7 ± 2.8 | 4.9 ± 2.3 |
| 4 | 1 ± 1.8 | 0.3 ± 1.2 | 5.5 ± 3.6 | 2.3 ± 2.2 | 5.7 ± 2.7 | 0.8 ± 0.8 |
| 5 | 0.5 ± 0.9 | 1.4 ± 3.8 | 3.1 ± 1.6 | 2.3 ± 2.7 | 1.9 ± 2 | 1.4 ± 1.2 |
| 6 | 1.9 ± 1.8 | −0.3 ± 3 | 1.7 ± 1.2 | 1.4 ± 1.4 | 0.8 ± 1.1 | 1.1 ± 1 |
| 8 | −0.4 ± 0.8 | −0.9 ± 2.9 | 0.5 ± 1.3 | 3 ± 1.1 | 2.2 ± 2.1 | 3.7 ± 2 |
| 9 | 1 ± 1.7 | 1.2 ± 4.2 | 7.2 ± 3.9 | 0.5 ± 0.7 | 1.6 ± 3 | 3 ± 1 |
| 10 | 3.8 ± 1.8 | 11 ± 5 | −1.1 ± 1.1 | 1.9 ± 0.9 | 1.3 ± 1.6 | 0.2 ± 0.5 |

TABLE 24
Mean spot forming cells (SFC) per 10⁶ PBMCs for each epitope ± SEM
for VEE-MAG25mer srRNA-LNP1 (100 μg) (Group 2)

| | Antigen | | | | | |
|---|---|---|---|---|---|---|
| Wk | Env CL9 | Env TL9 | Gag CM9 | Gag LW9 | Pol SV9 | Tat TL8 |
| 1 | 0 ± 0 | 0 ± 0 | 0 ± 0 | 0 ± 0 | 0 ± 0 | 0 ± 0 |
| 2 | 7.9 ± 17.2 | 23.2 ± 17.4 | 11.4 ± 4.9 | 41.7 ± 16.5 | 15 ± 13.5 | 8.9 ± 6.2 |
| 3 | −3.1 ± 4.6 | −7.2 ± 6.5 | 2.3 ± 2.3 | −0.3 ± 2.7 | 2.7 ± 5.1 | 2.2 ± 1.4 |
| 4 | 1.9 ± 3.8 | −6.2 ± 7.6 | 10.5 ± 4.1 | 1.2 ± 2.9 | 5.6 ± 4.9 | 1.1 ± 0.8 |
| 5 | −2.6 ± 7 | −8 ± 5.9 | 1.5 ± 1.7 | 6.4 ± 2.3 | 0.7 ± 4.3 | 3.3 ± 1.3 |
| 6 | 6.3 ± 6.3 | 4.4 ± 8.3 | 6.6 ± 4.4 | 5.2 ± 5.2 | 3.9 ± 5 | 10.8 ± 6.9 |
| 8 | −3.6 ± 7.2 | −6.8 ± 7.3 | −0.8 ± 1.2 | 3.4 ± 4.2 | 6.4 ± 7.5 | 5.7 ± 2.7 |
| 9 | 8.1 ± 2.4 | 20.6 ± 23.4 | 18.9 ± 5.7 | 8.1 ± 8.9 | 9 ± 11.2 | 40 ± 17.6 |
| 10 | 3.1 ± 8 | −3.9 ± 8.5 | 3.3 ± 1.8 | 0.6 ± 2.9 | 7.4 ± 6.4 | 6.1 ± 2.5 |

TABLE 25
Mean spot forming cells (SFC) per 10⁶ PBMCs for each epitope ± SEM
for VEE-MAG25mer srRNA-LNP2 (100 μg) (Group 3)

| | Antigen | | | | | |
|---|---|---|---|---|---|---|
| Wk | Env CL9 | Env TL9 | Gag CM9 | Gag LW9 | Pol SV9 | Tat TL8 |
| 1 | 0 ± 0 | 0 ± 0 | 0 ± 0 | 0 ± 0 | 0 ± 0 | 0 ± 0 |
| 2 | −5.9 ± 3.8 | −0.3 ± 0.5 | −0.5 ± 1.5 | −5.7 ± 6.1 | −1 ± 1.3 | −3.2 ± 5.5 |
| 3 | 0.7 ± 5.2 | 3.4 ± 2.4 | 4.2 ± 4.6 | 18.3 ± 15.5 | 11.9 ± 5.1 | −0.4 ± 8.2 |
| 4 | −3.8 ± 5.5 | 2.3 ± 1.8 | 11.3 ± 6.1 | −3.1 ± 5.6 | 8.5 ± 4 | −1.5 ± 6.1 |
| 5 | −3.7 ± 5.7 | −0.1 ± 0.7 | −0.2 ± 1.6 | 3.4 ± 8.5 | 3 ± 3.1 | −4.6 ± 5 |
| 6 | 12.3 ± 15 | 7.8 ± 4.9 | 24.7 ± 19.8 | 23.2 ± 22.5 | 18.7 ± 15.8 | 0.5 ± 6.2 |
| 8 | 5.9 ± 12.3 | −0.1 ± 0.7 | −0.5 ± 1.3 | 8.8 ± 14.4 | 8.7 ± 8 | −1.3 ± 4 |
| 9 | 16.1 ± 13.4 | 16.5 ± 4 | 22.9 ± 4.2 | 13 ± 13.2 | 16.4 ± 7.8 | 19.6 ± 9.2 |
| 10 | 29.9 ± 21.8 | 22 ± 19.5 | 0.5 ± 2.6 | 22.2 ± 22.6 | 35.3 ± 15.8 | 19.4 ± 17.3 |

TABLE 26
Mean spot forming cells (SFC) per 10⁶ PBMCs for each epitope ± SEM for
ChAdV68.5WTnt.MAG25mer prime

| | Antigen | | | | | |
|---|---|---|---|---|---|---|
| Wk | Env CL9 | Env TL9 | Gag CM9 | Gag LW9 | Pol SV9 | Tat TL8 |
| 1 | 178 ± 68.7 | 206.5 ± 94.8 | 221.2 ± 120 | 15.4 ± 16.7 | 33.3 ± 25.9 | 563.5 ± 174.4 |
| 2 | 311.2 ± 165.5 | 278.8 ± 100.9 | 344.6 ± 110.8 | 46.3 ± 13.5 | 181.6 ± 76.8 | 621.4 ± 220.9 |
| 3 | 277.3 ± 101.1 | 359.6 ± 90.5 | 468.2 ± 106.6 | 41.7 ± 11.1 | 169.8 ± 57.8 | 549.4 ± 115.7 |
| 4 | 140 ± 46.5 | 169.6 ± 46.8 | 239.4 ± 37 | 26.5 ± 11.4 | 75 ± 31.6 | 322.2 ± 50.7 |
| 5 | 155.6 ± 62.1 | 406.7 ± 96.4 | 542.7 ± 143.3 | 35.1 ± 16.6 | 134.2 ± 53.7 | 538.5 ± 91.9 |
| 6 | 78.9 ± 42.5 | 95.5 ± 29.4 | 220.9 ± 75.3 | −1.4 ± 5.3 | 43.4 ± 19.6 | 308.1 ± 42.6 |
| 8 | 88.4 ± 30.4 | 162.1 ± 30.3 | 253.4 ± 78.6 | 21.4 ± 11.2 | 53.7 ± 22.3 | 217.8 ± 45.2 |
| 9 | 158.5 ± 69 | 322.3 ± 87.2 | 338.2 ± 137.1 | 5.6 ± 12.4 | 109.2 ± 17.9 | 314.8 ± 43.4 |
| 10 | 97.3 ± 32.5 | 133.2 ± 27 | 154.9 ± 59.2 | 10 ± 6 | 26 ± 16.7 | 125.5 ± 27.7 |

[0673] Non-GLP RNA Dose Ranging Study (Higher Doses) in Indian Rhesus Macaques

[0674] This study was designed to (a) evaluate the immunogenicity of VEE-MAG25mer srRNAat a dose of 300 μg as a homologous prime/boost or heterologous prime/boost in combination with ChAdV68.5WTnt.MAG25mer; (b) compare the immune responses of VEE-MAG25mer srRNA in lipid nanoparticles using LNP1 versus LNP2 at the 300 μg dose; and (c) evaluate the kinetics of T-cell responses to VEE-MAG25mer srRNA and ChAdV68.5WTnt.MAG25mer immunizations.

[0675] The study arm was conducted in Mamu-A*01 Indian rhesus macaques to demonstrate immunogenicity. Vaccine immunogenicity in nonhuman primate species, such as Rhesus, is the best predictor of vaccine potency in humans. Furthermore, select antigens used in this study are only recognized in Rhesus macaques, specifically those with a Mamu-A*01 MHC class I haplotype. Mamu-A*01 Indian rhesus macaques were randomized to the different study arms (6 macaques per group) and administered an IM injection bilaterally with either ChAdV68.5-WTnt.MAG25mer or VEE-MAG25mer srRNA encoding model antigens that includes multiple Mamu-A*01 restricted antigens. The study arms were as described below.

[0676] PBMCs were collected prior to immunization and 4, 5, 6, 7, 8, 10, 11, 12, 13, 14, 15, 16, 17, 18, 19, 20, 21, 22, 23 or 24 weeks after the initial immunization for immune monitoring for group 1 (heterologous prime/boost). PBMCs were collected prior to immunization and 4, 5, 7, 8, 10, 11, 12, 13, 14, or 15 weeks after the initial immunization for immune monitoring for groups 2 and 3 (homologous prime/boost).

TABLE 27
Non-GLP immunogenicity study in Indian Rhesus Macaques

| Group | Prime | Boost 1 | Boost 2 | Boost 3 |
|---|---|---|---|---|
| 1 | ChAdV68.5WTnt. | VEE-MAG25mer | VEE-MAG25mer | VEE-MAG25mer |
| | MAG25mer | srRNA-LNP2 | srRNA-LNP2 | srRNA-LNP2 |
| | | (300 μg) | (300 μg) | (300 μg) |
| 2 | VEE-MAG25mer | VEE-MAG25mer | VEE-MAG25mer | |
| | srRNA-LNP2 | srRNA-LNP2 | srRNA-LNP2 | |
| | (300 μg) | (300 μg) | (300 μg) | |
| 3 | VEE-MAG25mer | VEE-MAG25mer | VEE-MAG25mer | |
| | srRNA-LNP1 | srRNA-LNP1 | srRNA-LNP1 | |
| | (300 μg) | (300 μg) | (300 μg) | |

[0677] Results

[0678] Mamu-A*01 Indian rhesus macaques were immunized with ChAdV68.5-WTnt.MAG25mer. Antigen-specific cellular immune responses in peripheral blood mononuclear cells (PBMCs) were measured to six different Mamu-A*01 restricted epitopes prior to immunization and 4, 5, 6, 7, 8, 10, 11, 12, 13, 14, 15, 16, 17, 18, 19, 20, 21, 22, 23 or 24 weeks after the initial immunization (FIG. 16 and Table 28). Animals received boost immunizations with VEE-MAG25mer srRNA using the LNP2 formulation on weeks 4, 12, and 20. Combined antigen-specific immune responses of 1750, 4225, 1100, 2529, 3218, 1915, 1708, 1561, 5077, 4543, 4920, 5820, 3395, 2728, 1996, 1465, 4730, 2984, 2828, or 3043 SFCs per 10⁶ PBMCs (six epitopes combined) were measured 4, 5, 6, 7, 8, 10, 11, 12, 13, 14, 15, 16, 17, 18, 19, 20, 21, 22, 23 or 24 weeks after the initial immunization with ChAdV68.5WTnt.MAG25mer (FIG. 16). Immune responses measured 1 week after the second boost immunization (week 13) with VEE-MAG25mer srRNA were ˜3-fold higher than that measured just before the boost immunization (week 12). Immune responses measured 1 week after the third boost immunization (week 21) with VEE-MAG25mer srRNA, were ˜3-fold higher than that measured just before the boost immunization (week 20), similar to the response observed for the second boost.

[0679] Mamu-A*01 Indian rhesus macaques were also immunized with VEE-MAG25mer srRNA using two different LNP formulations (LNP1 and LNP2). Antigen-specific cellular immune responses in peripheral blood mononuclear cells (PBMCs) were measured to six different Mamu-A*01 restricted epitopes prior to immunization and 4, 5, 6, 7, 8, 10, 11, 12, 13, 14, or 15 weeks after the initial immunization (FIGS. 22 and 23, Tables 29 and 30). Animals received boost immunizations with VEE-MAG25mer srRNA using the respective LNP1 or LNP2 formulation on weeks 4 and 12. Combined antigen-specific immune responses of 168, 204, 103, 126, 140, 145, 330, 203, and 162 SFCs per 106 PBMCs (six epitopes combined) were measured 4, 5, 7, 8, 10, 11, 13, 14, 15 weeks after the immunization with VEE-MAG25mer srRNA-LNP2 (FIG. 17). Combined antigen-specific immune responses of 189, 185, 349, 437, 492, 570, 233, 886, 369, and 381 SFCs per 10⁶ PBMCs (six epitopes combined) were measured 4, 5, 7, 8, 10, 11, 12, 13, 14, 15 weeks after the immunization with VEE-MAG25mer srRNA-LNP1 (FIG. 18).

TABLE 28
Mean spot forming cells (SFC) per 10⁶ PBMCs for each epitope ± SEM for
priming vaccination with ChAdV68.5WTnt.MAG25mer (Group 1)

| | Antigen | | | | | |
|---|---|---|---|---|---|---|
| Wk | Env CL9 | Env TL9 | Gag CM9 | Gag LW9 | Pol SV9 | Tat TL8 |
| 4 | 173 ± 41.6 | 373.5 ± 87.3 | 461.4 ± 74.2 | 38.4 ± 26.1 | 94.5 ± 26 | 609.2 ± 121.9 |
| 5 | 412.7 ± 138.4 | 987.8 ± 283.3 | 1064.4 ± 266.9 | 85.6 ± 31.2 | 367.2 ± 135.2 | 1306.8 ± 332.8 |
| 6 | 116.2 ± 41.2 | 231.1 ± 46.3 | 268.3 ± 90.7 | 86.1 ± 42 | 174.3 ± 61 | 223.9 ± 38.1 |
| 7 | 287.4 ± 148.7 | 588.9 ± 173.9 | 693.2 ± 224.8 | 92.1 ± 33.5 | 172.9 ± 55.6 | 694.6 ± 194.8 |
| 8 | 325.4 ± 126.6 | 735.8 ± 212 | 948.9 ± 274.5 | 211.3 ± 62.7 | 179.1 ± 50 | 817.3 ± 185.2 |
| 10 | 312 ± 129.7 | 543.2 ± 188.4 | 618.6 ± 221.7 | −5.7 ± 4.1 | 136.5 ± 51.3 | 309.9 ± 85.6 |
| 11 | 248.5 ± 81.1 | 348.7 ± 129.8 | 581.1 ± 205.5 | −3.1 ± 4.4 | 119 ± 51.2 | 413.7 ± 144.8 |
| 12 | 261.9 ± 68.2 | 329.9 ± 83 | 486.5 ± 118.6 | −1.2 ± 5.1 | 132.8 ± 31.8 | 350.9 ± 69.3 |
| 13 | 389.3 ± 167.7 | 1615.8 ± 418.3 | 1244.3 ± 403.6 | 1.3 ± 8.1 | 522.5 ± 155 | 1303.3 ± 385.6 |
| 14 | 406.3 ± 121.6 | 1616 ± 491.7 | 1142.3 ± 247.2 | 6.6 ± 11.1 | 322.7 ± 94.1 | 1048.6 ± 215.6 |
| 15 | 446.8 ± 138.7 | 1700.8 ± 469.1 | 1306.3 ± 294.4 | 43 ± 24.5 | 421.2 ± 87.9 | 1001.5 ± 236.4 |
| 16 | 686.8 ± 268.8 | 1979.5 ± 541.7 | 1616.8 ± 411.8 | 2.4 ± 7.8 | 381.9 ± 116.4 | 1152.8 ± 352.7 |
| 17 | 375.8 ± 109.3 | 1378.6 ± 561.2 | 773.1 ± 210.3 | −1.4 ± 4.3 | 177.6 ± 93.7 | 691.7 ± 245 |
| 18 | 255.9 ± 99.7 | 1538.4 ± 498.1 | 498.7 ± 152.3 | −5.3 ± 3.3 | 26.2 ± 13.4 | 413.9 ± 164.8 |
| 19 | 133 ± 62.6 | 955.9 ± 456.8 | 491.1 ± 121.8 | −5.7 ± 4.1 | 50.3 ± 25.4 | 371.2 ± 123.7 |
| 20 | 163.7 ± 55.8 | 641.7 ± 313.5 | 357.9 ± 91.1 | 2.6 ± 7.5 | 41.4 ± 24.2 | 257.8 ± 68.9 |
| 21 | 319.9 ± 160.5 | 2017.1 ± 419.9 | 1204.8 ± 335.2 | −3.7 ± 5.1 | 268.1 ± 109.6 | 924.1 ± 301 |
| 22 | 244.7 ± 105.6 | 1370.9 ± 563.5 | 780.3 ± 390 | −3.6 ± 5.1 | 118.2 ± 68.1 | 473.3 ± 249.3 |
| 23 | 176.7 ± 81.8 | 1263.7 ± 527.3 | 838.6 ± 367.9 | −5.7 ± 4.1 | 73.6 ± 49 | 480.9 ± 163.9 |
| 24 | 236.5 ± 92 | 1324.7 ± 589.3 | 879.7 ± 321 | −0.4 ± 5.7 | 104 ± 53.1 | 498 ± 135.8 |

TABLE 29
Mean spot forming cells (SFC) per 10⁶ PBMCs for each epitope ± SEM for
priming vaccination with VEE-MAG25mer srRNA-LNP2 (300 μg) (Group 2)

| | Antigen | | | | | |
|---|---|---|---|---|---|---|
| Wk | Env CL9 | Env TL9 | Gag CM9 | Gag LW9 | Pol SV9 | Tat TL8 |
| 4 | 46 ± 27.1 | 18.4 ± 6.8 | 58.3 ± 45.8 | 29.9 ± 20.8 | 4.9 ± 2.3 | 10.7 ± 4 |
| 5 | 85.4 ± 54 | 5.2 ± 5.8 | 52.4 ± 51.2 | 34.5 ± 35 | 11.8 ± 12.2 | 14.4 ± 7.9 |
| 7 | 18.6 ± 32.5 | 1.9 ± 1.7 | 59.4 ± 55.7 | 9.3 ± 10.7 | 3.3 ± 3 | 10.7 ± 6.1 |
| 8 | 36.6 ± 39.4 | 6.3 ± 3.9 | 48.7 ± 39.9 | 13.5 ± 8.8 | 3.8 ± 3.6 | 17.2 ± 9.7 |
| 10 | 69.1 ± 59.1 | 4.4 ± 1.9 | 39.3 ± 38 | 14.7 ± 10.8 | 4.4 ± 5.3 | 8.5 ± 5.3 |
| 11 | 43 ± 38.8 | 22.6 ± 21.1 | 30.2 ± 26.2 | 3.3 ± 2.2 | 5.8 ± 3.5 | 40.3 ± 25.5 |
| 13 | 120.4 ± 78.3 | 68.2 ± 43.9 | 54.2 ± 36.8 | 21.8 ± 7.4 | 17.7 ± 6.1 | 47.4 ± 27.3 |
| 14 | 76 ± 44.8 | 28 ± 19.5 | 65.9 ± 64.3 | −0.3 ± 1.3 | 2.5 ± 2 | 31.1 ± 26.5 |
| 15 | 58.9 ± 41.4 | 19.5 ± 15.1 | 55.4 ± 51 | 2.5 ± 2 | 5.5 ± 3.6 | 20.1 ± 15.7 |

TABLE 30
Mean spot forming cells (SFC) per 10⁶ PBMCs for each epitope ± SEM for
priming vaccination with VEE-MAG25mer srRNA-LNP1 (300 μg) (Group 3)

| | Antigen | | | | | |
|---|---|---|---|---|---|---|
| Wk | Env CL9 | Env TL9 | Gag CM9 | Gag LW9 | Pol SV9 | Tat TL8 |
| 4 | 19.5 ± 8.7 | 13.3 ± 13.1 | 16.5 ± 15.3 | 10.5 ± 7.3 | 35.9 ± 24.8 | 92.9 ± 91.6 |
| 5 | 87.9 ± 43.9 | 12.7 ± 11.7 | 37.2 ± 31.9 | 21.1 ± 23.8 | 13.2 ± 13.7 | 12.6 ± 13.7 |
| 7 | 21.1 ± 13.3 | 48.8 ± 48.4 | 51.7 ± 39.5 | 9.1 ± 10.5 | 58.6 ± 55.8 | 159.4 ± 159 |
| 8 | 47.7 ± 21.7 | 66.4 ± 52.2 | 59.8 ± 57.4 | 49.4 ± 28 | 79.4 ± 63 | 133.8 ± 132.1 |
| 10 | 49 ± 30.2 | 42.2 ± 41.1 | 139.3 ± 139.3 | 51.6 ± 51.2 | 78.2 ± 75.8 | 131.7 ± 131.6 |
| 11 | 42 ± 26.8 | 20.9 ± 21.4 | 177.1 ± 162 | −6.3 ± 4.3 | 104.3 ± 104.1 | 231.5 ± 230.1 |
| 12 | 40.2 ± 19 | 20.3 ± 11.9 | 42.2 ± 46.7 | 3.7 ± 6.7 | 57 ± 44.7 | 70 ± 69.2 |
| 13 | 81.2 ± 48.9 | 38.2 ± 37.6 | 259.4 ± 222.2 | −4 ± 4.1 | 164.1 ± 159.3 | 347.3 ± 343.5 |
| 14 | 34.5 ± 31.8 | 5.3 ± 11.6 | 138.6 ± 137.3 | −4.7 ± 5.2 | 52.3 ± 52.9 | 142.6 ± 142.6 |
| 15 | 49 ± 24 | 6.7 ± 9.8 | 167.1 ± 163.8 | −6.4 ± 4.2 | 47.8 ± 42.3 | 116.6 ± 114.5 |

[0680] srRNA Dose Ranging Study

[0681] In one implementation of the present invention, an srRNA dose ranging study can be conducted in mamu A01 Indian rhesus macaques to identify which srRNA dose to progress to NHP immunogenicity studies. In one example, Mamu A01 Indian rhesus macaques can be administered with an srRNA vector encoding model antigens that includes multiple mamu A01 restricted epitopes by IM injection. In another example, an anti-CTLA-4 monoclonal antibody can be administered SC proximal to the site of IM vaccine injection to target the vaccine draining lymph node in one group of animals. PBMCs can be collected every 2 weeks after the initial vaccination for immune monitoring. The study arms are described in below (Table 31).

TABLE 31
Non-GLP RNA dose ranging study in Indian Rhesus Macaques

| Group | Prime | Boost 1 | Boost 2 |
|---|---|---|---|
| 1 | srRNA-LNP | srRNA-LNP | srRNA-LNP |
| | (Low Dose) | (Low Dose) | (Low Dose) |
| 2 | srRNA-LNP | srRNA-LNP | srRNA-LNP |
| | (Mid Dose) | (Mid Dose) | (Mid Dose) |
| 3 | srRNA-LNP | srRNA-LNP | srRNA-LNP |
| | (High Dose) | (High Dose) | (High Dose) |
| 4 | srRNA-LNP | srRNA-LNP | srRNA-LNP |
| | (High Dose) + | (High Dose) + | (High Dose) + |
| | anti-CTLA-4 | anti-CTLA-4 | anti-CTLA-4 |

* Dose range of srRNA to be determined with the high dose ≤300 μg.

[0682] Immunogenicity Study in Indian Rhesus Macaques

[0683] Vaccine studies were conducted in mamu A01 Indian rhesus macaques (NHPs) to demonstrate immunogenicity using the antigen vectors. FIG. 26 illustrates the vaccination strategy. Three groups of NHPs were immunized with ChAdV68.5-WTnt.MAG25mer and either with the checkpoint inhibitor anti-CTLA-4 antibody Ipilimumab (Groups 5 & 6) or without the checkpoint inhibitor (Group 4). The antibody was administered either intra-venously (group 5) or subcutaneously (group 6). Triangles indicate chAd68 vaccination (1e12 vp/animal) at weeks 0 & 32. Circles represent alphavirus vaccination at weeks 0, 4, 12, 20, 28 and 32.

[0684] The time course of CD8+ anti-epitope responses in the immunized NHPs are presented for chAd-MAG immunization alone (FIG. 27 and Table 32A), chAd-MAG immunization with the checkpoint inhibitor delivered IV (FIG. 28 and Table 32B), and chAd-MAG immunization with the checkpoint inhibitor delivered SC (FIG. 29 and Table 32C). The results demonstrate chAd68 vectors efficiently primed CD8+ responses in primates, alphavirus vectors efficiently boosted the chAD68 vaccine priming response, checkpoint inhibitor whether delivered IV or SC amplified both priming and boosting responses, and chAd vectors readministered post vaccination to effectively boosted the immune responses.

TABLE 32A
CD8+ anti-epitope responses in Rhesus Macaques dosed with chAd-MAG
(Group 4). Mean SFC/1e6 splenocytes +/− the standard error is shown

| | Antigen | | | | | |
|---|---|---|---|---|---|---|
| Wk | Env CL9 | Env TL9 | Gag CM9 | Gag LW9 | Pol SV9 | Tat TL8 |
| 4 | 173 ± 41.6 | 373.5 ± 87.3 | 461.4 ± 74.2 | 38.4 ± 26.1 | 94.5 ± 26 | 609.2 ± 121.9 |
| 5 | 412.7 ± 138.4 | 987.8 ± 283.3 | 1064.4 ± 266.9 | 85.6 ± 31.2 | 367.2 ± 135.2 | 1306.8 ± 332.8 |
| 6 | 116.2 ± 41.2 | 231.1 ± 46.3 | 268.3 ± 90.7 | 86.1 ± 42 | 174.3 ± 61 | 223.9 ± 38.1 |
| 7 | 287.4 ± 148.7 | 588.9 ± 173.9 | 693.2 ± 224.8 | 92.1 ± 33.5 | 172.9 ± 55.6 | 694.6 ± 194.8 |
| 8 | 325.4 ± 126.6 | 735.8 ± 212 | 948.9 ± 274.5 | 211.3 ± 62.7 | 179.1 ± 50 | 817.3 ± 185.2 |
| 10 | 312 ± 129.7 | 543.2 ± 188.4 | 618.6 ± 221.7 | −5.7 ± 4.1 | 136.5 ± 51.3 | 309.9 ± 85.6 |
| 11 | 248.5 ± 81.1 | 348.7 ± 129.8 | 581.1 ± 205.5 | −3.1 ± 4.4 | 119 ± 51.2 | 413.7 ± 144.8 |
| 12 | 261.9 ± 68.2 | 329.9 ± 83 | 486.5 ± 118.6 | −1.2 ± 5.1 | 132.8 ± 31.8 | 350.9 ± 69.3 |
| 13 | 389.3 ± 167.7 | 1615.8 ± 418.3 | 1244.3 ± 403.6 | 1.3 ± 8.1 | 522.5 ± 155 | 1303.3 ± 385.6 |
| 14 | 406.3 ± 121.6 | 1616 ± 491.7 | 1142.3 ± 247.2 | 6.6 ± 11.1 | 322.7 ± 94.1 | 1048.6 ± 215.6 |
| 15 | 446.8 ± 138.7 | 1700.8 ± 469.1 | 1306.3 ± 294.4 | 43 ± 24.5 | 421.2 ± 87.9 | 1001.5 ± 236.4 |
| 16 | 686.8 ± 268.8 | 1979.5 ± 541.7 | 1616.8 ± 411.8 | 2.4 ± 7.8 | 381.9 ± 116.4 | 1152.8 ± 352.7 |
| 17 | 375.8 ± 109.3 | 1378.6 ± 561.2 | 773.1 ± 210.3 | −1.4 ± 4.3 | 177.6 ± 93.7 | 691.7 ± 245 |
| 18 | 255.9 ± 99.7 | 1538.4 ± 498.1 | 498.7 ± 152.3 | −5.3 ± 3.3 | 26.2 ± 13.4 | 413.9 ± 164.8 |
| 19 | 133 ± 62.6 | 955.9 ± 456.8 | 491.1 ± 121.8 | −5.7 ± 4.1 | 50.3 ± 25.4 | 371.2 ± 123.7 |
| 20 | 163.7 ± 55.8 | 641.7 ± 313.5 | 357.9 ± 91.1 | 2.6 ± 7.5 | 41.4 ± 24.2 | 257.8 ± 68.9 |
| 21 | 319.9 ± 160.5 | 2017.1 ± 419.9 | 1204.8 ± 335.2 | −3.7 ± 5.1 | 268.1 ± 109.6 | 924.1 ± 301 |
| 22 | 244.7 ± 105.6 | 1370.9 ± 563.5 | 780.3 ± 390 | −3.6 ± 5.1 | 118.2 ± 68.1 | 473.3 ± 249.3 |
| 23 | 176.7 ± 81.8 | 1263.7 ± 527.3 | 838.6 ± 367.9 | −5.7 ± 4.1 | 73.6 ± 49 | 480.9 ± 163.9 |
| 24 | 236.5 ± 92 | 1324.7 ± 589.3 | 879.7 ± 321 | −0.4 ± 5.7 | 104 ± 53.1 | 498 ± 135.8 |
| 25 | 136.4 ± 52.6 | 1207.1 ± 501.6 | 924 ± 358.5 | 6.2 ± 10.5 | 74.1 ± 34.4 | 484.6 ± 116.7 |
| 26 | 278.2 ± 114.4 | 1645 ± 661.7 | 1170.2 ± 469.9 | −2.9 ± 5.7 | 80.6 ± 55.8 | 784.4 ± 214.1 |
| 27 | 159 ± 56.8 | 961.7 ± 547.1 | 783.6 ± 366.4 | −5 ± 4.3 | 63.6 ± 27.5 | 402.9 ± 123.4 |
| 28 | 189.6 ± 75.7 | 1073.1 ± 508.8 | 668.3 ± 312.5 | −5.7 ± 4.1 | 80.3 ± 38.3 | 386.4 ± 122 |
| 29 | 155.3 ± 69.1 | 1102.9 ± 606.1 | 632.9 ± 235 | 34.5 ± 24.2 | 80 ± 35.5 | 422.5 ± 122.9 |
| 30 | 160.2 ± 59.9 | 859 ± 440.9 | 455 ± 209.1 | −3 ± 5.3 | 60.5 ± 28.4 | 302.7 ± 123.2 |
| 31 | 122.2 ± 49.7 | 771.1 ± 392.7 | 582.2 ± 233.5 | −5.7 ± 4.1 | 55.1 ± 27.3 | 295.2 ± 68.3 |
| 32 | 119.3 ± 28.3 | 619.4 ± 189.7 | 566 ± 222.1 | −3.7 ± 5.1 | 21.9 ± 4.5 | 320.5 ± 76.4 |
| 33 | 380.5 ± 122 | 1636.1 ± 391.4 | 1056.2 ± 205.7 | −5.7 ± 4.1 | 154.5 ± 38.5 | 988.4 ± 287.7 |
| 34 | 1410.8 ± 505.4 | 972.4 ± 301.5 | 319.6 ± 89.6 | −4.8 ± 4.2 | 141.1 ± 49.8 | 1375.5 ± 296.7 |
| 37 | 130.8 ± 29.2 | 500 ± 156.9 | 424.9 ± 148.9 | −3.5 ± 4.7 | 77.7 ± 24.6 | 207.1 ± 42.4 |
| 38 | 167.7 ± 54.8 | 1390.8 ± 504.7 | 830.4 ± 329.1 | −5.5 ± 4.1 | 111.8 ± 43.2 | 516 ± 121.7 |

TABLE 32B
CD8+ anti-epitope responses in Rhesus Macaques dosed with chAd-MAG plus
anti-CTLA4 antibody (Ipilimumab) delivered IV. (Group 5). Mean SFC/1e6 splenocytes +/−
the standard error is shown

| | Antigen | | | | | |
|---|---|---|---|---|---|---|
| Wk | Env CL9 | Env TL9 | Gag CM9 | Gag LW9 | Pol SV9 | Tat TL8 |
| 4 | 1848.1 ± 432.2 | 1295.7 ± 479.7 | 1709.8 ± 416.9 | 513.7 ± 219.8 | 838.5 ± 221.1 | 2514.6 ± 246.5 |
| 5 | 1844.1 ± 410.2 | 2367.5 ± 334.4 | 1983.1 ± 370.7 | 732.1 ± 249.4 | 1429.7 ± 275.3 | 2517.7 ± 286.5 |
| 6 | 822.4 ± 216.7 | 1131.2 ± 194.7 | 796.8 ± 185.8 | 226.8 ± 70 | 802.2 ± 101.4 | 913.5 ± 222.7 |
| 7 | 1147.2 ± 332.9 | 1066 ± 311.2 | 1149.8 ± 467.3 | 267.4 ± 162.6 | 621.5 ± 283.2 | 1552.2 ± 395.1 |
| 8 | 1192.7 ± 188.8 | 1461.5 ± 237.7 | 1566.9 ± 310.5 | 522.5 ± 118.6 | 662.3 ± 142.4 | 1706 ± 216.7 |
| 10 | 1249 ± 220.3 | 1170.6 ± 227.7 | 1297.3 ± 264.7 | −0.3 ± 4.4 | 551.8 ± 90.5 | 1425.3 ± 142.6 |
| 11 | 934.2 ± 221.7 | 808 ± 191.3 | 1003.1 ± 293.4 | 1.9 ± 4.3 | 364.2 ± 76.6 | 1270.8 ± 191.6 |
| 12 | 1106.2 ± 216.6 | 896.7 ± 190.7 | 1020.1 ± 243.3 | 1.3 ± 3.9 | 436.6 ± 90 | 1222 ± 155.4 |
| 13 | 2023.8 ± 556.3 | 3696.7 ± 1.7 | 2248.5 ± 436.4 | −4.5 ± 3.5 | 2614 ± 406.1 | 3700 ± 0 |
| 14 | 1278.7 ± 240 | 2639.5 ± 387 | 1654.6 ± 381.1 | −6 ± 2.1 | 988.8 ± 197.9 | 2288.3 ± 298.7 |
| 15 | 1458.9 ± 281.8 | 2932.5 ± 488.7 | 1893.4 ± 499 | 74.6 ± 15.6 | 1657.8 ± 508.9 | 2709.1 ± 428.7 |
| 16 | 1556.8 ± 243 | 2143.8 ± 295.2 | 2082.8 ± 234.2 | −5.8 ± 2.5 | 1014.6 ± 161.4 | 2063.7 ± 86.7 |
| 17 | 1527 ± 495.1 | 2213 ± 677.1 | 1767.7 ± 391.8 | 15.1 ± 5.9 | 633.8 ± 133.9 | 2890.8 ± 433.9 |
| 18 | 1068.2 ± 279.9 | 1940.9 ± 204.1 | 1114.1 ± 216.1 | −5.8 ± 2.5 | 396.6 ± 77.6 | 1659.4 ± 171.7 |
| 19 | 760.7 ± 362.2 | 1099.5 ± 438.4 | 802.7 ± 192.5 | −2.4 ± 3.3 | 262.2 ± 62.2 | 1118.6 ± 224.2 |
| 20 | 696.3 ± 138.2 | 954.9 ± 198 | 765.1 ± 248.4 | −1.4 ± 4.4 | 279.6 ± 89.3 | 1139 ± 204.5 |
| 21 | 1201.4 ± 327.9 | 3096 ± 1.9 | 1901 ± 412.1 | −5.8 ± 2.5 | 1676.3 ± 311.5 | 2809.3 ± 195.8 |
| 22 | 1442.5 ± 508.3 | 2944.7 ± 438.6 | 1528.4 ± 349.6 | 2.8 ± 5.1 | 940.7 ± 160.5 | 2306.3 ± 218.6 |
| 23 | 1400.4 ± 502.2 | 2757.1 ± 452.9 | 1604.2 ± 450.1 | −5.1 ± 2.3 | 708.1 ± 162.6 | 2100.4 ± 362.9 |
| 24 | 1351 ± 585.1 | 2264.5 ± 496 | 1080.6 ± 253.8 | 0.3 ± 6.5 | 444.2 ± 126.4 | 1823.7 ± 306.5 |
| 25 | 1211.5 ± 505.2 | 2160.4 ± 581.8 | 970.8 ± 235.9 | 2.5 ± 3.8 | 450.4 ± 126.9 | 1626.2 ± 261.3 |
| 26 | 1443 ± 492.5 | 2485 ± 588 | 1252.5 ± 326.4 | −0.2 ± 6 | 360.2 ± 92.3 | 2081.9 ± 331.1 |
| 27 | 896.2 ± 413.3 | 1686 ± 559.5 | 751 ± 192.1 | −3.7 ± 2.5 | 247.4 ± 82.8 | 1364.1 ± 232 |
| 28 | 1147.8 ± 456.9 | 1912.1 ± 417.1 | 930.3 ± 211.4 | −5.8 ± 2.5 | 423.9 ± 79.6 | 1649.3 ± 315 |
| 29 | 1038.5 ± 431.9 | 1915.2 ± 626.1 | 786.8 ± 205.9 | 23.5 ± 8.3 | 462.8 ± 64 | 1441.5 ± 249.7 |
| 30 | 730.5 ± 259.3 | 1078.6 ± 211.5 | 699.1 ± 156.2 | −4.4 ± 2.7 | 234.4 ± 43.9 | 1160.6 ± 112.6 |
| 31 | 750.4 ± 328.3 | 1431 ± 549.9 | 650.6 ± 141.1 | −5.2 ± 3 | 243.4 ± 56.4 | 868.9 ± 142.8 |
| 32 | 581.4 ± 227.7 | 1326.6 ± 505.2 | 573.3 ± 138 | −3.2 ± 4.2 | 160.8 ± 49.2 | 936.4 ± 110.4 |
| 33 | 2198.4 ± 403.8 | 3093.4 ± 123.3 | 2391.8 ± 378.4 | 7.1 ± 8.5 | 1598.1 ± 343.1 | 2827.5 ± 289.5 |
| 34 | 2654.3 ± 337 | 2709.9 ± 204.3 | 1297.5 ± 291.4 | 0.4 ± 4.2 | 1091.8 ± 242.9 | 1924 ± 245.7 |
| 37 | 846.8 ± 301.7 | 1706.9 ± 196 | 973.6 ± 149.3 | 50.5 ± 45.2 | 777.3 ± 140.2 | 1478.8 ± 94.3 |

TABLE 32C
CD8+ anti-epitope responses in Rhesus Macaques dosed with chAd-MAG plus
anti-CTLA4 antibody (Ipilimumab) delivered SC (Group 6). Mean SFC/1e6 splenocytes +/−
the standard error is shown

| | Antigen | | | | | |
|---|---|---|---|---|---|---|
| Wk | Env CL9 | Env TL9 | Gag CM9 | Gag LW9 | Pol SV9 | Tat TL8 |
| 4 | 598.3 ± 157.4 | 923.7 ± 306.8 | 1075.6 ± 171.8 | 180.5 ± 74.1 | 752.3 ± 245.8 | 1955.3 ± 444.4 |
| 5 | 842.2 ± 188.5 | 1703.7 ± 514.2 | 1595.8 ± 348.4 | 352.7 ± 92.3 | 1598.9 ± 416.8 | 2163.7 ± 522.1 |
| 6 | 396.4 ± 45.3 | 728.3 ± 232.7 | 503.8 ± 151.9 | 282 ± 69 | 463.1 ± 135.7 | 555.2 ± 191.5 |
| 7 | 584.2 ± 177 | 838.3 ± 254.9 | 1013.9 ± 349.4 | 173.6 ± 64.3 | 507.4 ± 165.7 | 1222.8 ± 368 |
| 8 | 642.9 ± 134 | 1128.6 ± 240.6 | 1259.1 ± 163.8 | 366.1 ± 72.8 | 726.7 ± 220.9 | 1695.6 ± 359.4 |
| 10 | 660.4 ± 211.4 | 746.9 ± 222.7 | 944.8 ± 210.2 | −1.2 ± 1.9 | 523.4 ± 230.7 | 787.3 ± 308.3 |
| 11 | 571.2 ± 162 | 609.4 ± 194.3 | 937.9 ± 186.5 | −8.9 ± 2.3 | 511.6 ± 229.6 | 1033.3 ± 315.7 |
| 12 | 485.3 ± 123.7 | 489.4 ± 142.7 | 919.3 ± 214.1 | −8.9 ± 2.3 | 341.6 ± 139.4 | 1394.7 ± 432.1 |
| 13 | 986.9 ± 154.5 | 2811.9 ± 411.3 | 1687.7 ± 344.3 | −4.1 ± 5.1 | 1368.5 ± 294.2 | 2751 ± 501.9 |
| 14 | 945.9 ± 251.4 | 2027.7 ± 492.8 | 1386.7 ± 326.7 | −5.7 ± 2.8 | 708.9 ± 277.1 | 1588.2 ± 440.1 |
| 15 | 1075.2 ± 322.4 | 2386 ± 580.7 | 1606.3 ± 368.1 | −5.4 ± 3.2 | 763.3 ± 248.8 | 1896.5 ± 507.8 |
| 16 | 1171.8 ± 341.6 | 2255.1 ± 439.6 | 1672.2 ± 342.3 | −7.8 ± 2.4 | 1031.6 ± 228.8 | 1896.4 ± 419.9 |
| 17 | 1118.2 ± 415.4 | 2156.3 ± 476 | 1345.3 ± 377.7 | −1.1 ± 6.7 | 573.7 ± 118.8 | 1614.4 ± 382.3 |
| 18 | 861.3 ± 313.8 | 2668.2 ± 366.8 | 1157.2 ± 259.6 | −8.9 ± 2.3 | 481.2 ± 164 | 1725.8 ± 511.4 |
| 19 | 719.2 ± 294.2 | 1447.2 ± 285 | 968 ± 294.5 | −2.2 ± 4.6 | 395.6 ± 106.1 | 1199.6 ± 289.2 |
| 20 | 651.6 ± 184 | 1189.8 ± 242.8 | 947.4 ± 249.8 | −8.9 ± 2.3 | 355 ± 106.3 | 1234.7 ± 361.7 |
| 21 | 810.3 ± 301.9 | 2576.2 ± 283.7 | 1334 ± 363.1 | −8.9 ± 2.3 | 892.2 ± 305 | 1904.4 ± 448.1 |
| 22 | 775 ± 196.4 | 2949 ± 409.7 | 1421.8 ± 309.7 | 38 ± 27.8 | 577 ± 144.2 | 2330.6 ± 572.3 |
| 23 | 584.9 ± 240.2 | 1977.9 ± 361.4 | 1209.8 ± 405.1 | −7.3 ± 3.2 | 273.7 ± 93.3 | 1430.6 ± 363.9 |
| 24 | 485.4 ± 194.4 | 1819.8 ± 325.5 | 837.2 ± 261.4 | −3.4 ± 4.1 | 234.4 ± 71.1 | 943.9 ± 243.3 |
| 25 | 452.3 ± 175 | 2072 ± 405.7 | 957.1 ± 293.1 | −8.9 ± 2.3 | 163 ± 43.2 | 1341.2 ± 394.7 |
| 26 | 517.9 ± 179.1 | 2616 ± 567.5 | 1126.6 ± 289 | −8.3 ± 2.3 | 199.9 ± 89.2 | 1615.7 ± 385.6 |
| 27 | 592.8 ± 171.7 | 1838.3 ± 372.4 | 749.3 ± 170.4 | −7.3 ± 2.5 | 325.5 ± 98.7 | 1110.7 ± 308.8 |
| 28 | 793 ± 228.5 | 1795.4 ± 332.3 | 1068.7 ± 210.3 | 2.5 ± 4.1 | 553.1 ± 144.3 | 1480.8 ± 357.1 |
| 29 | 661.8 ± 199.9 | 2140.6 ± 599.3 | 1202.7 ± 292.2 | −8.7 ± 2.8 | 558.9 ± 279.2 | 1424.2 ± 408.6 |
| 30 | 529.1 ± 163.3 | 1528.2 ± 249.8 | 840.5 ± 218.3 | −8.9 ± 2.3 | 357.7 ± 149.4 | 1029.3 ± 335 |
| 31 | 464.8 ± 152.9 | 1332.2 ± 322.7 | 726.3 ± 194.3 | −8.9 ± 2.3 | 354.3 ± 158.6 | 884.4 ± 282 |
| 32 | 612.9 ± 175.3 | 1584.2 ± 390.2 | 1058.3 ± 219.8 | −8.7 ± 2.8 | 364.6 ± 149.8 | 1388.8 ± 467.3 |
| 33 | 1600.2 ± 416.7 | 2597.4 ± 367.9 | 2086.4 ± 414.8 | −6.3 ± 3.3 | 893.8 ± 266 | 2490.6 ± 416.4 |
| 34 | 2814.6 ± 376.2 | 2713.6 ± 380.8 | 1888.8 ± 499.4 | −7.5 ± 3.1 | 1288.9 ± 438.9 | 2428.1 ± 458.9 |
| 37 | 1245.9 ± 471.7 | 1877.7 ± 291.2 | 1606.6 ± 441.9 | 14.2 ± 13 | 1227.5 ± 348.1 | 1260.7 ± 342 |

[0685] Memory Phenotyping in Indian Rhesus Macaques

[0686] Rhesus macaque were immunized with ChAdV68.5WTnt.MAG25mer/VEE-MAG25mer srRNA heterologous prime/boost regimen with or without anti-CTLA4, and boosted again with ChAdV68.5WTnt.MAG25mer. Groups were assessed 11 months after the final ChAdV68 administration (study month 18). by ELISpot was performed as described. FIG. 30 and Table 33 shows cellular responses to six different Mamu-A*01 restricted epitopes as measured by ELISpot both pre-immunization (left panel) and after 18 months (right panel). The detection of responses to the restricted epitopes demonstrates antigen-specific memory responses were generated by ChAdV68/samRNA vaccine protocol.

[0687] To assess memory, CD8+ T-cells recognizing 4 different rhesus macaque Mamu-A*01 class I epitopes encoded in the vaccines were monitored using dual-color Mamu-A*01 tetramer labeling, with each antigen being represented by a unique double positive combination, and allowed the identification of all 4 antigen-specific populations within a single sample. Memory cell phenotyping was performed by co-staining with the cell surface markers CD45RA and CCR7. FIG. 31 and Table 34 shows the results of the combinatorial tetramer staining and CD45RA/CCR7 co-staining for memory T-cells recognizing four different Mamu-A*01 restricted epitopes. The T cell phenotypes were also assessed by flow cytometry. FIG. 32 shows the distribution of memory cell types within the sum of the four Mamu-A*01 tetramer+CD8+ T-cell populations at study month 18. Memory cells were characterized as follows: CD45RA+CCR7+=naïve, CD45RA+CCR7-=effector (Teff), CD45RA-CCR7+=central memory (Tcm), CD45RA-CCR7-=effector memory (Tem). Collectively, the results demonstrate that memory responses were detected at least one year following the last boost indicating long lasting immunity, including effector, central memory, and effector memory populations.

TABLE 33
Mean spot forming cells (SFC) per 10⁶ PBMCs for each animal at both pre-prime
and memory assessment time points (18 months).

| | Pre-prime baseline | | | | | | 18 months | | | | | |
|---|---|---|---|---|---|---|---|---|---|---|---|---|
| | Tat | Gag | Env | Env | Gag | Pol | Tat | Gag | Env | Env | Gag | Pol |
| Animal | TL8 | CM9 | TL9 | CL9 | LW9 | SV9 | TL8 | CM9 | TL9 | CL9 | LW9 | SV9 |
| 1 | 1.7 | 0.0 | 0.0 | 5.0 | 0.0 | 13.7 | 683.0 | 499.2 | 1100.3 | 217.5 | 47.7 | 205.3 |
| 2 | 0.0 | 0.0 | 0.0 | 0.2 | 0.1 | 0.0 | 773.4 | ND | 1500.0 | 509.3 | 134.5 | 242.5 |
| 3 | 0.0 | 0.0 | 6.7 | 6.8 | 10.2 | 3.3 | 746.3 | 167.5 | 494.1 | 402.8 | 140.6 | 376.0 |
| 4 | 0.0 | 0.0 | 0.0 | 0.0 | 0.0 | 0.0 | 47.6 | 1023.9 | 85.1 | 44.2 | 44.2 | 47.6 |
| 5 | 15.3 | 6.7 | 18.6 | 15.6 | 5.2 | 12.1 | 842.4 | 467.7 | 1500.0 | 805.9 | 527.8 | 201.8 |
| 6 | 3.1 | 0.0 | 0.0 | 15.5 | 6.9 | 5.3 | 224.3 | 720.3 | 849.0 | 296.9 | 32.4 | 121.9 |

ND = not determined due to technical exclusion

TABLE 34
Percent Mamu-A*01 tetramer positive out of live CD8+ cells

| Animal | Tat TL8 | Gag CM9 | Env TL9 | Env CL9 |
|---|---|---|---|---|
| 1 | 0.42 | 0.11 | 0.19 | 0.013 |
| 2 | 0.36 | 0.048 | 0.033 | 0.00834 |
| 3 | 0.97 | 0.051 | 0.35 | 0.048 |
| 4 | 0.46 | 0.083 | 0.17 | 0.028 |
| 5 | 0.77 | 0.45 | 0.14 | 0.2 |
| 6 | 0.71 | 0.16 | 0.17 | 0.04 |

### XVII. Example 5: Identification of MHC/Peptide Target-Reactive T Cells and TCRs

[0688] Target reactive T cells and TCRs are identified for one or more of the HIV subtype/HLA allele/epitope sequence combinations shown in Tables 35-45.

[0689] T cells are isolated from blood, lymph nodes, or tissues of patients. T cells can be enriched for antigen-specific T cells, e.g., by sorting antigen-MHC tetramer binding cells or by sorting activated cells stimulated in an in vitro co-culture of T cells and antigen-pulsed antigen presenting cells. Various reagents are known in the art for antigen-specific T cell identification including antigen-loaded tetramers and other MHC-based reagents.

[0690] Antigen-relevant alpha-beta (or gamma-delta) TCR dimers can be identified by single cell sequencing of TCRs of antigen-specific T cells. Alternatively, bulk TCR sequencing of antigen-specific T cells can be performed and alpha-beta pairs with a high probability of matching can be determined using a TCR pairing method known in the art.

[0691] Alternatively or in addition, antigen-specific T cells can be obtained through in vitro priming of naïve T cells from healthy donors. T cells obtained from PBMCs, lymph nodes, or cord blood can be repeatedly stimulated by antigen-pulsed antigen presenting cells to prime differentiation of antigen-experienced T cells. TCRs can then be identified similarly as described above for antigen-specific T cells from patients.

### XVIII. Example 6: Identification of Candidate Antigens

[0692] Candidate HIV antigens were identified for inclusion in the antigen-based vaccine using a series of steps. For each HIV subtype (subtypes A1, A2, B, C, D, F1, F2, G, H, J, and K), sequences for each of nine HIV genes (env, gag, nef, pol, rev, tat, vif, vpr, and vpu) were obtained from Los Alamos National Lab's HIV database¹⁰⁴. Amino acid sequences (8-11 amino acids in length) are extracted from sequences of the nine HIV genes for each HIV subtype. Specifically, a sliding window is applied to the sequences of the nine HIV genes to obtain the amino acid sequences (8-11 amino acids in length). These amino acid sequences were applied to the EDGE prediction model (a deep learning model trained on HLA presented peptides sequenced by MS/MS, as described in international patent application publications WO/2017/106638, WO/2018/195357, WO/2018/208856, and PCT/US19/33830, each herein incorporated by reference, in their entirety, for all purposes) across all modeled HLA alleles. All epitope sequence/HLA allele pair that has an EDGE score>0.01 was recorded for each HIV subtype. A total of 7096 unique epitope sequences were identified and the corresponding HLA allele for each sequence are shown in Tables 35-45.

### XIX. Example 7: Validation of Candidate Antigen Presentation

[0693] Mass spectrometry (MS) validation of candidate antigens is performed using targeted mass spectrometry methods. HIV tissue samples are obtained, homogenized, and used for RNASeq transcriptome sequencing and immunoprecipitation of the HLA/peptide complexes. A peptide target list is generated for each sample by analysis of the transcriptome. The EDGE deep learning model of antigen presentation is applied to the mutation sequence and expression data to prioritize peptides for the targeting list. The peptides from the HLA molecules are eluted and collected using size exclusion to isolate the presented peptides prior to mass spectrometry. Synthetic heavy labeled peptide with the same amino acid sequence is co-loaded with each sample for targeted mass spectrometry. Both coelution of the heavy labeled peptide with the experimental peptide and analysis of the fragmentation pattern are used to validate a candidate epitope sequence. Mass spectrometry analysis methods are described in more detail in Gillete et al. (Nat Methods. 2013 January; 10(1):28-34), herein incorporated by reference in its entirety for all purposes.

[0694] MS data are further evaluated to assess the value of narrowly targeting patients with specific HLAs for treatment, e.g., requiring patients to have at least one validated or predicted HLA allele that presents an antigen contained in a vaccine cassette. For example, a candidate epitope sequence may be selected for inclusion because it was predicted to be presented by a particular HLA protein. However, if the MS data demonstrates the contrary and that the candidate epitope sequence was not presented by the HLA protein, then the epitope sequence/HLA protein pair can be excluded for purposes of selection criteria for the vaccine.

### XX. Example 8: Vaccine Cassette Antigen Selection

[0695] Antigens including epitope sequences for inclusion in an antigen-based vaccine were chosen. Although the subsequent description refers to selection of antigenic peptides and subsequent inclusion of sequences in an antigen cassette, the sequences encoding for such selected antigenic peptides, one skilled in the art may understand that the subsequent description can also be applied for the inclusion of the antigenic peptides themselves in the antigen-based vaccine.

[0696] First, for each HIV subtype (A1, A2, B, C, D, F1, F2, G, H, J, and K), a corresponding Table in Tables 35-45 was identified (e.g., A1—Table 35, A2—Table 36, B—Table 37, C—Table 38, D—Table 39, F1—Table 40, F2—Table 41, G—Table 42, H—Table 43, J—Table 44, and K—Table 45).

[0697] Next, for each HLA allele in the table, epitope sequences (or antigen-encoding sequences that encode for each of the epitope sequences) for inclusion in the antigen-based vaccine were selected by identifying rows in the table that list the particular HLA allele.

[0698] Specifically, for a HIV subtype and HLA allele A0101, the antigen-encoding sequence for inclusion in the vaccine was selected by reference to the table corresponding to the HIV subtype, where each relevant sequence considered is selected by identifying all rows in that table that list A0101 (e.g., any of SEQ ID NOs: 325-328, 2166-2178, 4107-4113, 6242-6248, 8390-8397, 10627-10633, 12811-12820, 15080-15086, 17175-17184, 19389-19396, or 21004-21009).

[0699] For a HIV subtype and HLA allele A0201, the antigen-encoding sequence for inclusion in the vaccine was selected by reference to the table corresponding to the HIV subtype, where each relevant sequence considered is selected by identifying all rows in that table that list A0201 (e.g., any of SEQ ID NOs: 329-353, 2179-2200, 4114-4134, 6249-6270, 8398-8415, 10634-10654, 12821-12850, 15087-15107, 17185-17213, 19397-19420, or 21010-21031).

[0700] For a HIV subtype and HLA allele A0203, the antigen-encoding sequence for inclusion in the vaccine was selected by reference to the table corresponding to the HIV subtype, where each relevant sequence considered is selected by identifying all rows in that table that list A0203 (e.g., any of SEQ ID NOs: 354-403, 2201-2248, 4135-4177, 6271-6315, 8416-8474, 10655-10700, 12851-12912, 15108-15155, 17214-17264, 19421-19463, or 21032-21064).

[0701] For a HIV subtype and HLA allele A0204, the antigen-encoding sequence for inclusion in the vaccine was selected by reference to the table corresponding to the HIV subtype, where each relevant sequence considered is selected by identifying all rows in that table that list A0204 (e.g., any of SEQ ID NOs: 404-469, 2249-2326, 4178-4261, 6316-6400, 8475-8558, 10701-10768, 12913-12994, 15156-15214, 17265-17349, 19464-19518, 21065-21117).

[0702] For a HIV subtype and HLA allele A0205, the antigen-encoding sequence for inclusion in the vaccine was selected by reference to the table corresponding to the HIV subtype, where each relevant sequence considered is selected by identifying all rows in that table that list A0205 (e.g., any of SEQ ID NOs: 470-526, 2327-2379, 6401-6450, 8559-8626, 10769-10822, 12995-13056, 15215-15263, 17350-17405, 19519-19570, and 21118-21161).

[0703] For a HIV subtype and HLA allele A0206, the antigen-encoding sequence for inclusion in the vaccine was selected by reference to the table corresponding to the HIV subtype, where each relevant sequence considered is selected by identifying all rows in that table that list A0206 (e.g., any of SEQ ID NOs: 527-565, 2380-2421, 6451-6492, 8627-8671, 10823-10867, 10357-13098, 15264-15292, 17406-17448, 19571-19604, and 21162-21192).

[0704] For a HIV subtype and HLA allele A0207, the antigen-encoding sequence for inclusion in the vaccine was selected by reference to the table corresponding to the HIV subtype, where each relevant sequence considered is selected by identifying all rows in that table that list A0207 (e.g., any of SEQ ID NOs: 566-587, 2422-2438, 6493-6509, 8672-8689, 10868-10887, 13099-13125, 15293-15307, 17449-17473, 19605-19618, and 21193-21205).

[0705] For a HIV subtype and HLA allele A0208, the antigen-encoding sequence for inclusion in the vaccine was selected by reference to the table corresponding to the HIV subtype, where each relevant sequence considered is selected by identifying all rows in that table that list A0208 (e.g., any of SEQ ID NOs: 588-630, 2439-2477, 6510-6548, 8690-8733, 10888-10931, 13126-13179, 15308-15336, 17474-17512, 19619-19649, and 21206-21233).

[0706] For a HIV subtype and HLA allele A0301, the antigen-encoding sequence for inclusion in the vaccine was selected by reference to the table corresponding to the HIV subtype, where each relevant sequence considered is selected by identifying all rows in that table that list A0301 (e.g., any of SEQ ID NOs: 631-650, 2478-2501, 6549-6573, 8734-8761, 10932-10969, 13180-13224, 15337-15354, 17513-17543, 19650-19665, and 21234-21247).

[0707] For a HIV subtype and HLA allele A0302, the antigen-encoding sequence for inclusion in the vaccine was selected by reference to the table corresponding to the HIV subtype, where each relevant sequence considered is selected by identifying all rows in that table that list A0302 (e.g., any of SEQ ID NOs: 651-682, 2502-2541, 6574-6618, 8762-8809, 10970-11026, 13225-13290, 15355-15396, 17544-17603, 19666-19697, and 21248-21274).

[0708] For a HIV subtype and HLA allele A1011, the antigen-encoding sequence for inclusion in the vaccine was selected by reference to the table corresponding to the HIV subtype, where each relevant sequence considered is selected by identifying all rows in that table that list A1011 (e.g., any of SEQ ID NOs: 683-726, 2542-2583, 6619-6668, 8810-8862, 11027-11087, 13291-13370, 15397-15451, 17604-17652, 19698-19726, and 21275-21309).

[0709] For a HIV subtype and HLA allele A2301, the antigen-encoding sequence for inclusion in the vaccine was selected by reference to the table corresponding to the HIV subtype, where each relevant sequence considered is selected by identifying all rows in that table that list A2301 (e.g., any of SEQ ID NOs: 727-741, 2584-2593, 6669-6685, 8863-8871, 11088-11103, 13371-13385, 15452-15465, 17653-17667, 19727-19738, and 21310-21317).

[0710] For a HIV subtype and HLA allele A2302, the antigen-encoding sequence for inclusion in the vaccine was selected by reference to the table corresponding to the HIV subtype, where each relevant sequence considered is selected by identifying all rows in that table that list A2402 (e.g., any of SEQ ID NOs: 742-755, 2594-2605, 6686-6698, 8872-8885, 11104-11116, 13386-13397, 15466-15479, 17668-17679, 19739-19750, and 21318-21323).

[0711] For a HIV subtype and HLA allele A2501, the antigen-encoding sequence for inclusion in the vaccine was selected by reference to the table corresponding to the HIV subtype, where each relevant sequence considered is selected by identifying all rows in that table that list A2501 (e.g., any of SEQ ID NOs: 756-769, 2606-2622, 6699-6711, 8886-8903, 11117-11132, 13398-13414, 15480-15505, 17680-17693, 19751-19760, and 21324-21333).

[0712] For a HIV subtype and HLA allele A2601, the antigen-encoding sequence for inclusion in the vaccine was selected by reference to the table corresponding to the HIV subtype, where each relevant sequence considered is selected by identifying all rows in that table that list A2601 (e.g., any of SEQ ID NOs: 770-783, 2623-2640, 6712-6728, 8904-8927, 11133-11155, 13415-13433, 15506-15533, 17694-17714, 19761-19773, and 21334-21346).

[0713] For a HIV subtype and HLA allele A2602, the antigen-encoding sequence for inclusion in the vaccine was selected by reference to the table corresponding to the HIV subtype, where each relevant sequence considered is selected by identifying all rows in that table that list A2602 (e.g., any of SEQ ID NOs: 784-790, 2641-2652, 6729-6739, 8928-8937, 11156-11168, 13434-13446, 1553-15550, 17715-17723, 19774-19782, and 21347-21353).

[0714] For a HIV subtype and HLA allele A2603, the antigen-encoding sequence for inclusion in the vaccine was selected by reference to the table corresponding to the HIV subtype, where each relevant sequence considered is selected by identifying all rows in that table that list A2603 (e.g., any of SEQ ID NOs: 791-802, 2653-2671, 6740-6759, 8938-8959, 11169-11189, 13447-13464, 15551-15569, 17724-17739, 19783-19797, and 21354-21360).

[0715] For a HIV subtype and HLA allele A2901, the antigen-encoding sequence for inclusion in the vaccine was selected by reference to the table corresponding to the HIV subtype, where each relevant sequence considered is selected by identifying all rows in that table that list A2901 (e.g., any of SEQ ID NOs: 803-814, 2672-2679, 6760-6768, 8960-8976, 11190-11195, 13465-13474, 15570-15588, 17740-17751, 19798-19808, and 21361-21366).

[0716] For a HIV subtype and HLA allele A2902, the antigen-encoding sequence for inclusion in the vaccine was selected by reference to the table corresponding to the HIV subtype, where each relevant sequence considered is selected by identifying all rows in that table that list A2902 (e.g., any of SEQ ID NOs: 815-828, 2680-2698, 6769-6784, 8977-9000, 11196-11210, 13475-13493, 15589-15612, 17752-17773, 19809-19821, and 21367-21376).

[0717] For a HIV subtype and HLA allele A3001, the antigen-encoding sequence for inclusion in the vaccine was selected by reference to the table corresponding to the HIV subtype, where each relevant sequence considered is selected by identifying all rows in that table that list A3001 (e.g., any of SEQ ID NOs: 829-842, 2699-2707, 6785-6793, 9001-9012, 11211-11216, 13494-13501, 15613-15617, 17774-17781, 19822-19828, and 21377-21383).

[0718] For a HIV subtype and HLA allele A3002, the antigen-encoding sequence for inclusion in the vaccine was selected by reference to the table corresponding to the HIV subtype, where each relevant sequence considered is selected by identifying all rows in that table that list A3002 (e.g., any of SEQ ID NOs: 843-857, 2708-2722, 6794-6807, 9013-9040, 11217-11235, 13502-13519, 15618-15636, 17782-17809, 19829-19843, and 21384-21390).

[0719] For a HIV subtype and HLA allele A3004, the antigen-encoding sequence for inclusion in the vaccine was selected by reference to the table corresponding to the HIV subtype, where each relevant sequence considered is selected by identifying all rows in that table that list A3004 (e.g., any of SEQ ID NOs: 858-864, 2723-2728, 6808-6817, 9041-9060, 11236-11246, 13520-13530, 15637-15649, 17810-17828, 19844-19850, and 21391-21393).

[0720] For a HIV subtype and HLA allele A3101, the antigen-encoding sequence for inclusion in the vaccine was selected by reference to the table corresponding to the HIV subtype, where each relevant sequence considered is selected by identifying all rows in that table that list A3101 (e.g., any of SEQ ID NOs: 865-895, 2729-2757, 6818-6846, 9061-9082, 11247-11272, 13531-13558, 15650-15683, 17829-17862, 19851-19869, and 21394-21407).

[0721] For a HIV subtype and HLA allele A3201, the antigen-encoding sequence for inclusion in the vaccine was selected by reference to the table corresponding to the HIV subtype, where each relevant sequence considered is selected by identifying all rows in that table that list A3201 (e.g., any of SEQ ID NOs: 896-899, 2758-2761, 6847-6850, 9083-9091, 11273-11275, 13559-13567, 15684-15688, 17863-17870, 19870-19874, and 21408-21409).

[0722] For a HIV subtype and HLA allele A3301, the antigen-encoding sequence for inclusion in the vaccine was selected by reference to the table corresponding to the HIV subtype, where each relevant sequence considered is selected by identifying all rows in that table that list A3301 (e.g., any of SEQ ID NOs: 900-920, 2762-2793, 6851-6880, 9092-9112, 11276-11300, 13568-13585, 15689-15707, 17871-17900, 19875-19898, and 21410-21425).

[0723] For a HIV subtype and HLA allele A3303, the antigen-encoding sequence for inclusion in the vaccine was selected by reference to the table corresponding to the HIV subtype, where each relevant sequence considered is selected by identifying all rows in that table that list A3303 (e.g., any of SEQ ID NOs: 921-955, 2794-2851, 6881-6935, 9113-9164, 11301-11346, 13586-13619, 15708-15742, 17901-17964, 19899-19933, and 21426-21459).

[0724] For a HIV subtype and HLA allele A6801, the antigen-encoding sequence for inclusion in the vaccine was selected by reference to the table corresponding to the HIV subtype, where each relevant sequence considered is selected by identifying all rows in that table that list A6801 (e.g., any of SEQ ID NOs: 956-997, 2852-2908, 6936-6986, 9165-9228, 11347-11410, 13620-13667, 15743-15785, 17965-18029, 19934-19986, and 21460-24192).

[0725] For a HIV subtype and HLA allele A6802, the antigen-encoding sequence for inclusion in the vaccine was selected by reference to the table corresponding to the HIV subtype, where each relevant sequence considered is selected by identifying all rows in that table that list A6802 (e.g., any of SEQ ID NOs: 998-1032, 2909-2946, 6897-7037, 9229-9292, 11411-11461, 13668-13715, 15786-15828, 18030-18068, 19987-20027, and 24193-21523).

[0726] For a HIV subtype and HLA allele B0702, the antigen-encoding sequence for inclusion in the vaccine was selected by reference to the table corresponding to the HIV subtype, where each relevant sequence considered is selected by identifying all rows in that table that list B0702 (e.g., any of SEQ ID NOs: 1033-1050, 2947-2969, 7038-7065, 9293-9312, 11462-11485, 13716-13738, 15829-15849, 18069-18091, 20028-20038, and 21524-21540).

[0727] For a HIV subtype and HLA allele B0801, the antigen-encoding sequence for inclusion in the vaccine was selected by reference to the table corresponding to the HIV subtype, where each relevant sequence considered is selected by identifying all rows in that table that list B0801 (e.g., any of SEQ ID NOs: 1051-1066, 2970-2984, 7066-7078, 9313-9325, 11486-11497, 13739-13752, 15850-15862, 18092-18112, 20039-20051, and 21541-21549).

[0728] For a HIV subtype and HLA allele B1301, the antigen-encoding sequence for inclusion in the vaccine was selected by reference to the table corresponding to the HIV subtype, where each relevant sequence considered is selected by identifying all rows in that table that list B1301 (e.g., any of SEQ ID NOs: 1067-1080, 2985-2999, 7079-7095, 9326-9347, 11498-11516, 13753-13767, 15863-15875, 18113-18128, 20052-20062, and 21550-21557).

[0729] For a HIV subtype and HLA allele B1302, the antigen-encoding sequence for inclusion in the vaccine was selected by reference to the table corresponding to the HIV subtype, where each relevant sequence considered is selected by identifying all rows in that table that list B1302 (e.g., any of SEQ ID NOs: 1081-1117, 3000-3052, 7096-7140, 9348-9406, 11517-11557, 13768-13821, 15876-15923, 18129-18178, 20063-20093, and 21558-21593).

[0730] For a HIV subtype and HLA allele B1401, the antigen-encoding sequence for inclusion in the vaccine was selected by reference to the table corresponding to the HIV subtype, where each relevant sequence considered is selected by identifying all rows in that table that list B1401 (e.g., any of SEQ ID NOs: 1118-1125, 3053-3058, 7141-7145, 9407-9411, 11558-11562, 13822-13827, 15924-15931, 18179-18185, 20094-20098, and 21594-21599).

[0731] For a HIV subtype and HLA allele B1402, the antigen-encoding sequence for inclusion in the vaccine was selected by reference to the table corresponding to the HIV subtype, where each relevant sequence considered is selected by identifying all rows in that table that list B1402 (e.g., any of SEQ ID NOs: 1126-1139, 3059-3070, 7146-7159, 9412-9418, 11563-11574, 13828-13837, 15932-15943, 18186-18197, 20099-20109, and 21600-21606).

[0732] For a HIV subtype and HLA allele B1501, the antigen-encoding sequence for inclusion in the vaccine was selected by reference to the table corresponding to the HIV subtype, where each relevant sequence considered is selected by identifying all rows in that table that list B1501 (e.g., any of SEQ ID NOs: 1140-1192, 3071-3111, 7160-7211, 9419-9481, 11575-11633, 13838-13895, 15944-16001, 18198-18259, 20110-20141, and 21607-21635).

[0733] For a HIV subtype and HLA allele B1502, the antigen-encoding sequence for inclusion in the vaccine was selected by reference to the table corresponding to the HIV subtype, where each relevant sequence considered is selected by identifying all rows in that table that list B1502 (e.g., any of SEQ ID NOs: 1193-1220, 3112-3135, 7212-7247, 9482-9501, 11634-11670, 13896-13937, 16002-16036, 18260-18300, 20142-20165, and 21636-21656).

[0734] For a HIV subtype and HLA allele B1503, the antigen-encoding sequence for inclusion in the vaccine was selected by reference to the table corresponding to the HIV subtype, where each relevant sequence considered is selected by identifying all rows in that table that list B1503 (e.g., any of SEQ ID NOs: 1221-1245, 3136-3152, 7248-7273, 9502-9526, 11671-11693, 13938-13968, 16037-16065, 18301-18324, 20166-20179, and 21657-21669).

[0735] For a HIV subtype and HLA allele B1510, the antigen-encoding sequence for inclusion in the vaccine was selected by reference to the table corresponding to the HIV subtype, where each relevant sequence considered is selected by identifying all rows in that table that list B1510 (e.g., any of SEQ ID NOs: 1246-1266, 3153-3178, 7274-7296, 9527-9548, 11694-11722, 13969-13995, 16066-16083, 18325-18352, 20180-20200, and 21670-21689).

[0736] For a HIV subtype and HLA allele B1513, the antigen-encoding sequence for inclusion in the vaccine was selected by reference to the table corresponding to the HIV subtype, where each relevant sequence considered is selected by identifying all rows in that table that list B1513 (e.g., any of SEQ ID NOs: 1267-1270, 3179-3183, 7297-7300, 9549-9551, 11723-11725, 13996-14005, 16084-16091, 18353-18358, 20201-20205, and 21690-21692).

[0737] For a HIV subtype and HLA allele B1801, the antigen-encoding sequence for inclusion in the vaccine was selected by reference to the table corresponding to the HIV subtype, where each relevant sequence considered is selected by identifying all rows in that table that list B1801 (e.g., any of SEQ ID NOs: 1271-1286, 3184-3203, 7301-7328, 9552-9565, 11726-11742, 14006-14024, 16092-16107, 18359-18375, 20206-20224, and 21693-21705).

[0738] For a HIV subtype and HLA allele B2702, the antigen-encoding sequence for inclusion in the vaccine was selected by reference to the table corresponding to the HIV subtype, where each relevant sequence considered is selected by identifying all rows in that table that list B2702 (e.g., any of SEQ ID NOs: 1287-1304, 3204-3225, 7329-7355, 9566-9594, 11743-11756, 14025-14048, 16108-16135, 18376-18408, 20225-20241, and 21706-21716).

[0739] For a HIV subtype and HLA allele B2705, the antigen-encoding sequence for inclusion in the vaccine was selected by reference to the table corresponding to the HIV subtype, where each relevant sequence considered is selected by identifying all rows in that table that list B2705 (e.g., any of SEQ ID NOs: 1305-1319, 3226-3234, 7356-7370, 9595-9610, 11757-11771, 14049-14063, 16136-16145, 18409-18422, 20242-20254, and 21717-21723)-.

[0740] For a HIV subtype and HLA allele B3501, the antigen-encoding sequence for inclusion in the vaccine was selected by reference to the table corresponding to the HIV subtype, where each relevant sequence considered is selected by identifying all rows in that table that list B3501 (e.g., any of SEQ ID NOs: 1320-1338, 3235-3260, 7371-7405, 9611-9641, 11772-11812, 14064-14095, 16146-16186, 18423-18463, 20255-20279, and 21724-21745).

[0741] For a HIV 4subtype and HLA allele B3502, the antigen-encoding sequence for inclusion in the vaccine was selected by reference to the table corresponding to the HIV subtype, where each relevant sequence considered is selected by identifying all rows in that table that list B3502 (e.g., any of SEQ ID NOs: 1339-1349, 3261-3272, 7406-7424, 9642-9661, 11813-11833, 14096-14112, 16187-16205, 18464-18482, 20280-20291, and 21746-21754).

[0742] For a HIV subtype and HLA allele B3503, the antigen-encoding sequence for inclusion in the vaccine was selected by reference to the table corresponding to the HIV subtype, where each relevant sequence considered is selected by identifying all rows in that table that list B3503 (e.g., any of SEQ ID NOs: 1350-1373, 3273-3298, 7425-7457, 9662-9697, 11834-11877, 14113-14148, 16206-16238, 18483-18513, 20292-20316, and 21755-21772).

[0743] For a HIV subtype and HLA allele B3508, the antigen-encoding sequence for inclusion in the vaccine was selected by reference to the table corresponding to the HIV subtype, where each relevant sequence considered is selected by identifying all rows in that table that list B3508 (e.g., any of SEQ ID NOs: 1374-1386, 3299-3309, 7458-7477, 9698-9719, 11878-11899, 14149-14166, 16239-16256, 18514-18538, 20317-20331, and 21773-21786).

[0744] For a HIV subtype and HLA allele B3512, the antigen-encoding sequence for inclusion in the vaccine was selected by reference to the table corresponding to the HIV subtype, where each relevant sequence considered is selected by identifying all rows in that table that list B3512 (e.g., any of SEQ ID NOs: 1387-1405, 3310-3326, 7478-7498, 9720-9744, 11900-11930, 14167-14185, 16257-16280, 18539-18560, 20332-20344, and 21787-21799).

[0745] For a HIV subtype and HLA allele B3701, the antigen-encoding sequence for inclusion in the vaccine was selected by reference to the table corresponding to the HIV subtype, where each relevant sequence considered is selected by identifying all rows in that table that list BB3701 (e.g., any of SEQ ID NOs: 1406-1425, 3327-3338, 7499-7512, 9745-9757, 11931-11944, 14186-14196, 16281-16291, 18561-18572, 20345-20359, and 21800-21808).

[0746] For a HIV subtype and HLA allele B3801, the antigen-encoding sequence for inclusion in the vaccine was selected by reference to the table corresponding to the HIV subtype, where each relevant sequence considered is selected by identifying all rows in that table that list B3801 (e.g., any of SEQ ID NOs: 1426-1451, 3339-3367, 7513-7533, 9758-9782, 11945-11970, 14197-14219, 16292-16310, 18573-18599, 20360-20381, and 21809-21828).

[0747] For a HIV subtype and HLA allele B3901, the antigen-encoding sequence for inclusion in the vaccine was selected by reference to the table corresponding to the HIV subtype, where each relevant sequence considered is selected by identifying all rows in that table that list B3901 (e.g., any of SEQ ID NOs: 1452-1476, 3368-3391, 7534-7551, 9783-9802, 11971-11992, 14220-14242, 16311-16323, 18600-18619, 20382-20395, and 21829-21844).

[0748] For a HIV subtype and HLA allele B3906, the antigen-encoding sequence for inclusion in the vaccine was selected by reference to the table corresponding to the HIV subtype, where each relevant sequence considered is selected by identifying all rows in that table that list B3906 (e.g., any of SEQ ID NOs: 1477-1499, 3392-3423, 7552-7571, 9803-9831, 11993-12020, 14243-14277, 16324-16349, 18620-18653, 20396-20411, and 21845-21861).

[0749] For a HIV subtype and HLA allele B4001, the antigen-encoding sequence for inclusion in the vaccine was selected by reference to the table corresponding to the HIV subtype, where each relevant sequence considered is selected by identifying all rows in that table that list B4001 (e.g., any of SEQ ID NOs: 1500-1527, 3424-3458, 7572-7614, 9832-9867, 12021-12057, 14278-14309, 16350-16384, 18654-18686, 20412-20431, and 21862-21888).

[0750] For a HIV subtype and HLA allele B4002, the antigen-encoding sequence for inclusion in the vaccine was selected by reference to the table corresponding to the HIV subtype, where each relevant sequence considered is selected by identifying all rows in that table that list B4002 (e.g., any of SEQ ID NOs: 1528-1576, 3459-3497, 7615-7665, 9868-9913, 12058-12110, 14310-14359, 16385-16431, 18687-18736, 20432-20460, and 21889-21924).

[0751] For a HIV subtype and HLA allele B4006, the antigen-encoding sequence for inclusion in the vaccine was selected by reference to the table corresponding to the HIV subtype, where each relevant sequence considered is selected by identifying all rows in that table that list B4006 (e.g., any of SEQ ID NOs: 1577-1593, 3498-3517, 7666-7689, 9914-9942, 12111-12136, 14360-14380, 16432-16463, 18737-18759, 20461-20479, and 21925-21940).

[0752] For a HIV subtype and HLA allele 4102, the antigen-encoding sequence for inclusion in the vaccine was selected by reference to the table corresponding to the HIV subtype, where each relevant sequence considered is selected by identifying all rows in that table that list B4102 (e.g., any of SEQ ID NOs: 1594-1642, 3518-3554, 7690-7742, 9943-9988, 12137-12175, 14381-14429, 16437-16510, 18760-18811, 20480-20512, and 21941-21975).

[0753] For a HIV subtype and HLA allele B4402, the antigen-encoding sequence for inclusion in the vaccine was selected by reference to the table corresponding to the HIV subtype, where each relevant sequence considered is selected by identifying all rows in that table that list B4402 (e.g., any of SEQ ID NOs: 1643-1663, 3555-3575, 7743-7772, 9989-10011, 12176-12202, 14430-14448, 16510-16527, 18812-18834, 20513-20530, and 21976-21992).

[0754] For a HIV subtype and HLA allele B4403, the antigen-encoding sequence for inclusion in the vaccine was selected by reference to the table corresponding to the HIV subtype, where each relevant sequence considered is selected by identifying all rows in that table that list B4403 (e.g., any of SEQ ID NOs: 1664-1697, 3576-3611, 7773-7826, 10012-10058, 12203-12254, 14449-14493, 16528-16562, 18835-18883, 20531-20564, and 21993-22024).

[0755] For a HIV subtype and HLA allele B4405, the antigen-encoding sequence for inclusion in the vaccine was selected by reference to the table corresponding to the HIV subtype, where each relevant sequence considered is selected by identifying all rows in that table that list B4405 (e.g., any of SEQ ID NOs: 1698-1745, 3612-3674, 7827-7903, 10059-10134, 12255-12327, 14494-14560, 16563-16633, 18884-18953, 20565-20613, and 22025-22067).

[0756] For a HIV subtype and HLA allele B4601, the antigen-encoding sequence for inclusion in the vaccine was selected by reference to the table corresponding to the HIV subtype, where each relevant sequence considered is selected by identifying all rows in that table that list B4601 (e.g., any of SEQ ID NOs: 1746-1752, 3675-3679, 7904-7910, 10135-10146, 12328-12339, 14561-14574, 16634-16645, 18954-18957, 20614-20619, and 22068-22069).

[0757] For a HIV subtype and HLA allele B4801, the antigen-encoding sequence for inclusion in the vaccine was selected by reference to the table corresponding to the HIV subtype, where each relevant sequence considered is selected by identifying all rows in that table that list B4801 (e.g., any of SEQ ID NOs: 1753-1785, 3680-3695, 7911-7926, 10147-10161, 12340-12359, 14575-14596, 16646-16664, 18958-18974, 20620-20636, and 22070-22081).

[0758] For a HIV subtype and HLA allele B4901, the antigen-encoding sequence for inclusion in the vaccine was selected by reference to the table corresponding to the HIV subtype, where each relevant sequence considered is selected by identifying all rows in that table that list B4901 (e.g., any of SEQ ID NOs: 1786-1824, 3696-3719, 7927-7967, 10162-10207, 12360-12395, 14597-14634, 16665-16709, 18975-19013, 20637-20656, and 22082-22109).

[0759] For a HIV subtype and HLA allele B5001, the antigen-encoding sequence for inclusion in the vaccine was selected by reference to the table corresponding to the HIV subtype, where each relevant sequence considered is selected by identifying all rows in that table that list B5001 (e.g., any of SEQ ID NOs: 1825-1855, 3720-3755, 7968-8008, 10208-10251, 12396-12438, 14635-14675, 16710-16748, 19014-19051, 20657-20682, and 22110-22129).

[0760] For a HIV subtype and HLA allele B5101, the antigen-encoding sequence for inclusion in the vaccine was selected by reference to the table corresponding to the HIV subtype, where each relevant sequence considered is selected by identifying all rows in that table that list B5101 (e.g., any of SEQ ID NOs: 1856-1872, 3756-3789, 8009-8037, 10252-10287, 12439-12467, 14676-14708, 16749-16783, 19052-19076, 20683-20711, and 22130-22158).

[0761] For a HIV subtype and HLA allele B5401, the antigen-encoding sequence for inclusion in the vaccine was selected by reference to the table corresponding to the HIV subtype, where each relevant sequence considered is selected by identifying all rows in that table that list B5401 (e.g., any of SEQ ID NOs: 1873-1900, 3790-3823, 8038-8075, 10288-10327, 12468-12507, 14709-14745, 16784-16826, 19077-19108, 207120-20748, and 22159-22178).

[0762] For a HIV subtype and HLA allele B5501, the antigen-encoding sequence for inclusion in the vaccine was selected by reference to the table corresponding to the HIV subtype, where each relevant sequence considered is selected by identifying all rows in that table that list B5501 (e.g., any of SEQ ID NOs: 1901-1907, 3824-3827, 8076-8088, 10328-10341, 12508-12520, 14746-14756, 16827-16841, 19109-19113, 20749-20759, and 22179-22184).

[0763] For a HIV subtype and HLA allele B5502, the antigen-encoding sequence for inclusion in the vaccine was selected by reference to the table corresponding to the HIV subtype, where each relevant sequence considered is selected by identifying all rows in that table that list B5502 (e.g., any of SEQ ID NOs: 1908-1924, 3828-3843, 8089-8109, 10342-10364, 12521-12543, 14757-14777, 16842-16867, 19114-19135, 20760-20785, and 22185-22194).

[0764] For a HIV subtype and HLA allele B5601, the antigen-encoding sequence for inclusion in the vaccine was selected by reference to the table corresponding to the HIV subtype, where each relevant sequence considered is selected by identifying all rows in that table that list B5601 (e.g., any of SEQ ID NOs: 1925-1945, 3844-3865, 8110-8136, 10365-10392, 12544-12565, 14778-14802, 16868-16897, 19136-19156, 20786-20810, and 22195-22209).

[0765] For a HIV subtype and HLA allele B5701, the antigen-encoding sequence for inclusion in the vaccine was selected by reference to the table corresponding to the HIV subtype, where each relevant sequence considered is selected by identifying all rows in that table that list B5701 (e.g., any of SEQ ID NOs: 1946-1985, 3866-3908, 8137-8188, 10393-10441, 12566-12606, 14803-14849, 16898-16956, 19157-19202, 20811-20848, and 22210-22234).

[0766] For a HIV subtype and HLA allele B5801, the antigen-encoding sequence for inclusion in the vaccine was selected by reference to the table corresponding to the HIV subtype, where each relevant sequence considered is selected by identifying all rows in that table that list B5801 (e.g., any of SEQ ID NOs: 1986-2019, 3909-3942, 8189-8218, 10442-10467, 12607-12632, 14850-14873, 16957-16992, 19203-19232, 20849-20875, and 22235-22252).

[0767] For a HIV subtype and HLA allele C0102, the antigen-encoding sequence for inclusion in the vaccine was selected by reference to the table corresponding to the HIV subtype, where each relevant sequence considered is selected by identifying all rows in that table that list C0102 (e.g., any of SEQ ID NOs: 2020-2026, 3943-3945, 8219-8224, 10468-10472, 12633-12644, 14874-14881, 16993-16996, 19233-19242, 20876-20880, and 22253-22255).

[0768] For a HIV subtype and HLA allele C0202, the antigen-encoding sequence for inclusion in the vaccine was selected by reference to the table corresponding to the HIV subtype, where each relevant sequence considered is selected by identifying all rows in that table that list C0202 (e.g., any of SEQ ID NOs: 2027-2028, 3946-3947, 8225-8227, 10473-10476, 12645-12647, 14882-14887, 16997-16999, 19243-19245, 20881-20883, and 22256-22262).

[0769] For a HIV subtype and HLA allele C0302, the antigen-encoding sequence for inclusion in the vaccine was selected by reference to the table corresponding to the HIV subtype, where each relevant sequence considered is selected by identifying all rows in that table that list C0302 (e.g., any of SEQ ID NOs: 2029-2034, 3948-3956, 8228-8233, 10477-10484, 12648-12657, 14888-14900, 17000-17007, 19246-19253, 20884-20888, and 22263-22266).

[0770] For a HIV subtype and HLA allele C0303, the antigen-encoding sequence for inclusion in the vaccine was selected by reference to the table corresponding to the HIV subtype, where each relevant sequence considered is selected by identifying all rows in that table that list C0303 (e.g., any of SEQ ID NOs: 2035-2039, 3957-3962, 8234-8239, 10485-10491, 12658-12663, 14901-14911, 17008-17016, 19254-19257, 20889-20893, and 22267-22272).

[0771] For a HIV subtype and HLA allele C0304, the antigen-encoding sequence for inclusion in the vaccine was selected by reference to the table corresponding to the HIV subtype, where each relevant sequence considered is selected by identifying all rows in that table that list C0304 (e.g., any of SEQ ID NOs: 2040-2047, 3963-3974, 8240-8250, 10492-10502, 12664-12676, 14912-14927, 17017-17029, 19258-19270, 20894-20901, and 22273-22274).

[0772] For a HIV subtype and HLA allele C0401, the antigen-encoding sequence for inclusion in the vaccine was selected by reference to the table corresponding to the HIV subtype, where each relevant sequence considered is selected by identifying all rows in that table that list C0401 (e.g., any of SEQ ID NOs: 2048-2052, 3975-3979, 8251-8257, 10503-10505, 12677-12680, 14928-14932, 17030-17033, 19271-19277, 20902-20903, and 22275-22281).

[0773] For a HIV subtype and HLA allele C0501, the antigen-encoding sequence for inclusion in the vaccine was selected by reference to the table corresponding to the HIV subtype, where each relevant sequence considered is selected by identifying all rows in that table that list C0501 (e.g., any of SEQ ID NOs: 2053-2057, 3980-3992, 8258-8262, 10506-10514, 12681-12692, 14933-14944, 17034-17041, 19278-19288, 20904-20911, and 22282-22283).

[0774] For a HIV subtype and HLA allele C0602, the antigen-encoding sequence for inclusion in the vaccine was selected by reference to the table corresponding to the HIV subtype, where each relevant sequence considered is selected by identifying all rows in that table that list C0602 (e.g., any of SEQ ID NOs: 2058-2059, 3993-3995, 8263, 10515-10518, 12693-12697, 14945-14948, 17042-17045, 19289-19290, 20912-20913, 22284-22295).

[0775] For a HIV subtype and HLA allele C0701, the antigen-encoding sequence for inclusion in the vaccine was selected by reference to the table corresponding to the HIV subtype, where each relevant sequence considered is selected by identifying all rows in that table that list C0701 (e.g., any of SEQ ID NOs: 8264 and 17046).

[0776] For a HIV subtype and HLA allele C0702, the antigen-encoding sequence for inclusion in the vaccine was selected by reference to the table corresponding to the HIV subtype, where each relevant sequence considered is selected by identifying all rows in that table that list C0702 (e.g., any of SEQ ID NOs: 2060, 3996-3997, 12698, and 14949).

[0777] For a HIV subtype and HLA allele C0704, the antigen-encoding sequence for inclusion in the vaccine was selected by reference to the table corresponding to the HIV subtype, where each relevant sequence considered is selected by identifying all rows in that table that list C0704 (e.g., any of SEQ ID NOs: 2061, 3998, 10519, and 17047).

[0778] For a HIV subtype and HLA allele C0801, the antigen-encoding sequence for inclusion in the vaccine was selected by reference to the table corresponding to the HIV subtype, where each relevant sequence considered is selected by identifying all rows in that table that list C0801 (e.g., any of SEQ ID NOs: 2062-2079, 3999-4013, 8265-8274, 10520-10533, 12699-12721, 14950-14974, 17048-17069, 19291-19304, 20914-20923, and 22284-22295).

[0779] For a HIV subtype and HLA allele C0802, the antigen-encoding sequence for inclusion in the vaccine was selected by reference to the table corresponding to the HIV subtype, where each relevant sequence considered is selected by identifying all rows in that table that list C0802 (e.g., any of SEQ ID NOs: 2080-2088, 4014-4031, 8275-8288, 10534-10545, 12722-12739, 14975-14987, 17070-1076, 19305-19321, 20924-20929, and 22296-22300).

[0780] For a HIV subtype and HLA allele C0803, the antigen-encoding sequence for inclusion in the vaccine was selected by reference to the table corresponding to the HIV subtype, where each relevant sequence considered is selected by identifying all rows in that table that list C0803 (e.g., any of SEQ ID NOs: 2089-2100, 4032-4035, 8289-8295, 10546-10548, 12740-12742, 14988-14997, 17077-17079, 19322-19324, 20930-20938, and 22301-22304).

[0781] For a HIV subtype and HLA allele C1203, the antigen-encoding sequence for inclusion in the vaccine was selected by reference to the table corresponding to the HIV subtype, where each relevant sequence considered is selected by identifying all rows in that table that list C1203 (e.g., any of SEQ ID NOs: 2101-2105, 4036-4043, 8296-8302, 10549-10555, 102743-12748, 14998-15007, 17080-17089, 19325-19332, 20939-20947, and 22305-22310).

[0782] For a HIV subtype and HLA allele C1402, the antigen-encoding sequence for inclusion in the vaccine was selected by reference to the table corresponding to the HIV subtype, where each relevant sequence considered is selected by identifying all rows in that table that list C1402 (e.g., any of SEQ ID NOs: 2106-2122, 4044-4058, 8303-8329, 10556-10574, 12749-12763, 15008-15025, 17090-17108, 19333-19348, 20948-20962, and 22311-22320).

[0783] For a HIV subtype and HLA allele C1403, the antigen-encoding sequence for inclusion in the vaccine was selected by reference to the table corresponding to the HIV subtype, where each relevant sequence considered is selected by identifying all rows in that table that list C1403 (e.g., any of SEQ ID NOs: 2123-2133, 4059-4069, 8330-8342, 10575-10587, 12764-12772 15026-15035, 17109-17124, 19349-19361, 20963-20970, and 22321-22327).

[0784] For a HIV subtype and HLA allele C1502, the antigen-encoding sequence for inclusion in the vaccine was selected by reference to the table corresponding to the HIV subtype, where each relevant sequence considered is selected by identifying all rows in that table that list C1502 (e.g., any of SEQ ID NOs: 2134-2138, 4070-4074, 8343-8354, 10588-10591, 12773-12778, 15036-15040, 17125-17135, 19362-19366, 20971-20978, and 22328-22332).

[0785] For a HIV subtype and HLA allele C1601, the antigen-encoding sequence for inclusion in the vaccine was selected by reference to the table corresponding to the HIV subtype, where each relevant sequence considered is selected by identifying all rows in that table that list C1601 (e.g., any of SEQ ID NOs: 2139-2143, 4075-4079, 8355-8358, 10592-10595, 12779-12782, 15041-15048, 17136-17144, 19367-19370, 20979-20983, and 22333-22334).

[0786] For a HIV subtype and HLA allele C1602, the antigen-encoding sequence for inclusion in the vaccine was selected by reference to the table corresponding to the HIV subtype, where each relevant sequence considered is selected by identifying all rows in that table that list C1602 (e.g., any of SEQ ID NOs: 2144-2151, 4080-4089, 8359-8367, 10596-10602, 12783-12792, 15049-15058, 17145-17157, 19371-19376, 20984-20992, and 22335-22340).

[0787] For a HIV subtype and HLA allele C1604, the antigen-encoding sequence for inclusion in the vaccine was selected by reference to the table corresponding to the HIV subtype, where each relevant sequence considered is selected by identifying all rows in that table that list C1604 (e.g., any of SEQ ID NOs: 2152-2160, 4090-4098, 8368-8381, 10603-10615, 12793-12803, 15059-15069, 17158-17165, 19377-19382, 20994-20998, and 22341-22345).

[0788] For a HIV subtype and HLA allele C1701, the antigen-encoding sequence for inclusion in the vaccine was selected by reference to the table corresponding to the HIV subtype, where each relevant sequence considered is selected by identifying all rows in that table that list C1701 (e.g., any of SEQ ID NOs: 2161-2165, 4099-4106, 8382-8389, 10616-10626, 12804-12810, 15070-15079, 17166-17174, 19383-19388, 20999-21003, and 22346-22349).

### XXI. Example 9: Evaluation of T Cell Recognition of Candidate Antigens

[0789] The candidate antigens are evaluated to determine whether they induce an immune response in patients. Specifically, peripheral blood mononuclear cells (PBMCs) from healthy donors are enriched for naïve CD8+ T cells. The healthy donors are confirmed to have the HLA allele B4102. The CD8+ T cells are stained with MHC multimers presenting several of the candidate antigens including epitope sequences present in the vaccine cassette: a first antigen including the epitope sequence “AEVVQKVTM (SEQ ID NO: 148)” and a second antigen including the epitope sequence “AEVVQKVVM (SEQ ID NO: 149).” HLA-peptide binding cells are sorted, expanded and their specificity for the antigens are confirmed. TCR sequencing of antigen-specific T cells is performed. FIG. 20 illustrates the general TCR sequencing strategy and workflow. TCR sequencing strategy reveal a polyclonal response. The naïve T cell repertoire analysis suggests the candidate antigens are expected to induce an immune response in select patients when administered by vaccination.

### XXI. Example 10: Performance of EDGE Machine Learning Model for Identifying HIV Epitopes

[0790] FIG. 36 depicts the predictive capacity of the EDGE machine learning model in comparison to a public prediction tool for predicting HIV epitopes that are presented by class I HLA alleles. Specifically, the EDGE machine learning model was trained on 507,502 peptides presented in mass spectrometry across 398 samples and covers 116 identified alleles. The EDGE machine learning model generates per-allele scores, each per-allele score representing a likelihood that a HIV epitope is presented by a particular class I HLA allele. Example alleles are shown in the column entitled “HLA” in any one of Tables 35-45. Additionally, these per-allele likelihoods can be aggregated to determine a likelihood that the HIV epitope is presented by at least one of the class I HLA alleles. In comparison, the public prediction tool for predicting HIV epitopes was the MHCflurry¹⁰⁷.

[0791] The EDGE model and MHCflurry were deployed on a test dataset of HIV CD8+ epitopes obtained from the Los Alamos HIV Database to predict HIV epitopes that are presented by at least one class I HLA allele. As shown in FIG. 36, the EDGE model outperforms MHCflurry. Specifically, at a 40% recall rate, the EDGE model exhibited a precision value of 0.28 whereas MHCflurry exhibited a precision value of 0.15. Additionally, EDGE outperforms MHCflurry with an area under the curve (AUC)=0.24 compared to 0.13.

[0792] Altogether, this Example demonstrates that the EDGE machine learning model is able to better predict HIV epitopes that are presented by one or more class I HLA alleles in comparison to a conventional, publicly available model. Therefore, in comparison to epitopes identified through conventional methods, epitopes identified through the use of the EDGE machine learning model, such as epitopes shown in the column entitled “Epitope sequence” in any one of Tables 35-45 (e.g., any one of SEQ ID Nos: 325-22349), are more likely to be presented by one or more class I HLA alleles.

### Certain Sequences

[0793] Vectors, cassettes, and antibodies referred to herein are described below and referred to by SEQ ID NO.

Tremelimumab VL (SEQ ID NO: 16)
Tremelimumab VH (SEQ ID NO: 17)
Tremelimumab VH CDR1 (SEQ ID NO: 18)
Tremelimumab VH CDR2 (SEQ ID NO: 19)
Tremelimumab VH CDR3 (SEQ ID NO: 20)
Tremelimumab VL CDR1 (SEQ ID NO: 21)
Tremelimumab VL CDR2 (SEQ ID NO: 22)
Tremelimumab VL CDR3 (SEQ ID NO: 23)
Durvalumab (MEDI4736) VL (SEQ ID NO: 24)
MEDI4736 VH (SEQ ID NO: 25)
MEDI4736 VH CDR1 (SEQ ID NO: 26)
MEDI4736 VH CDR2 (SEQ ID NO: 27)
MEDI4736 VH CDR3 (SEQ ID NO: 28)
MEDI4736 VL CDR1 (SEQ ID NO: 29)
MEDI4736 VL CDR2 (SEQ ID NO: 30)
MEDI4736 VL CDR3 (SEQ ID NO: 31)
UbA76-25merPDTT nucleotide (SEQ ID NO: 32)
UbA76-25merPDTT polypeptide (SEQ ID NO: 33)
MAG-25merPDTT nucleotide (SEQ ID NO: 34)
MAG-25merPDTT polypeptide (SEQ ID NO: 35)
Ub7625merPDTT_NoSFL nucleotide (SEQ ID NO: 36)
Ub7625merPDTT_NoSFL polypeptide (SEQ ID NO: 37)
ChAdV68.5WTnt.MAG25mer (SEQ ID NO: 2); AC_000011.1 with E1 (nt 577 to 3403)
and E3 (nt 27, 125-31, 825) sequences deleted; corresponding ATCC VR-594
nucleotides substituted at five positions; model antigen cassette under
the control of the CMV promoter/enhancer inserted in place of deleted E1;
SV40 polyA 3′ of cassette
Venezuelan equine encephalitis virus [VEE] (SEQ ID NO: 3) GenBank: L01442.2
VEE-MAG25mer (SEQ ID NO: 4); contains MAG-25merPDTT nucleotide (bases 30-1755)
Venezuelan equine encephalitis virus strain TC-83 [TC-83] (SEQ ID NO: 5)
GenBank: L01443.1
VEE Delivery Vector (SEQ ID NO: 6); VEE genome with nucleotides 7544-11175
deleted [alphavirus structural proteins removed]
TC-83 Delivery Vector (SEQ ID NO: 7); TC-83 genome with nucleotides 7544-
11175 deleted [alphavirus structural proteins removed]
VEE Production Vector (SEQ ID NO: 8); VEE genome with nucleotides 7544-
11175 deleted, plus 5′ T7-promoter, plus 3′ restriction sites
TC-83 Production Vector (SEQ ID NO: 9); TC-83 genome with nucleotides 7544-
11175 deleted, plus 5′ T7-promoter, plus 3′ restriction sites
VEE-UbAAY (SEQ ID NO: 14); VEE delivery vector with MHC class I mouse tumor
epitopes SIINFEKL (SEQ ID NO: 150) and AH1-A5 inserted
VEE-Luciferase (SEQ ID NO: 15); VEE delivery vector with luciferase gene
inserted at 7545
ubiquitin (SEQ ID NO: 38) > UbG76 0-228
Ubiquitin A76 (SEQ ID NO: 39) > UbA76 0-228
HLA-A2 (MHC class I) signal peptide (SEQ ID NO: 40) > MHC SignalPep 0-78
HLA-A2 (MHC class I) Trans Membrane domain (SEQ ID NO: 41) > HLA A2 TM Domain
0-201
IgK Leader Seq (SEQ ID NO: 42) > IgK Leader Seq 0-60
Human DC-Lamp (SEQ ID NO: 43) > HumanDCLAMP 0-3178
Mouse LAMP1 (SEQ ID NO: 44) > MouseLamp1 0-1858
Human Lamp1 cDNA (SEQ ID NO: 45) > Human Lamp1 0-2339
Tetanus toxoid nulceic acid sequence (SEQ ID NO: 46)
Tetanus toxoid amino acid sequence (SEQ ID NO: 47)
PADRE nulceotide sequence (SEQ ID NO: 48)
PADRE amino acid sequence (SEQ ID NO: 49)
WPRE (SEC ID NO: 50) > WPRE 0-593
IRES (SEQ ID NO: 51) > eGFP_IRES_SEAP_Insert 1746-2335
GFP (SEQ ID NO: 52)
SEAP (SEQ ID NO: 53)
Firefly Luciferase (SEQ ID NO: 54)
FMDV 2A (SEQ ID NO: 55)
Tremelimumab VL (SEQ ID NO: 16)
Tremelimumab VH (SEQ ID NO: 17)
Tremelimumab VH CDR1 (SEQ ID NO: 18)
Tremelimumab VH CDR2 (SEQ ID NO: 19)
Tremelimumab VH CDR3 (SEQ ID NO: 20)
Tremelimumab VL CDR1 (SEQ ID NO: 21)
Tremelimumab VL CDR2 (SEQ ID NO: 22)
Tremelimumab VL CDR3 (SEQ ID NO: 23)
Durvalumab (MEDI4736) VL (SEQ ID NO: 24)
MEDI4736 VH (SEQ ID NO: 25)
MEDI4736 VH CDR1 (SEQ ID NO: 26)
MEDI4736 VH CDR2 (SEQ ID NO: 27)
MEDI4736 VH CDR3 (SEQ ID NO: 28)
MEDI4736 VL CDR1 (SEQ ID NO: 29)
MEDI4736 VL CDR2 (SEQ ID NO: 30)
MEDI4736 VL CDR3 (SEQ ID NO: 31)
UbA76-25merPDTT nucleotide (SEQ ID NO: 32)
UbA76-25merPDTT polypeptide (SEQ ID NO: 33)
MAG-25merPDTT nucleotide (SEQ ID NO: 34)
MAG-25merPDTT polypeptide (SEQ ID NO: 35)
Ub7625merPDTT_NoSFL nucleotide (SEQ ID NO: 36)
Ub7625merPDTT_NoSFL polypeptide (SEQ ID NO: 37)
ChAdV68.5WTnt.MAG25mer (SEQ ID NO: 2); AC_000011.1 with E1 (nt 577 to 3403)
and E3 (nt 27, 125-31, 825) sequences deleted; corresponding ATCC VR-594
nucleotides substituted at five positions; model antigen cassette under
the control of the CMV promoter/enhancer inserted in place of deleted E1;
SV40 polyA 3′ of cassette
Venezuelan equine encephalitis virus [VEE] (SEQ ID NO: 3) GenBank: L01442.2
VEE-MAG25mer (SEQ ID NO: 4); contains MAG-25merPDTT nucleotide (bases 30-1755)
Venezuelan equine encephalitis virus strain TC-83 [TC-83] (SEQ ID NO: 5)
GenBank: L01443.1
VEE Delivery Vector (SEQ ID NO: 6); VEE genome with nucleotides 7544-11175
deleted [alphavirus structural proteins removed]
TC-83 Delivery Vector (SEQ ID NO: 7); TC-83 genome with nucleotides 7544-11175
deleted [alphavirus structural proteins removed]
VEE Production Vector (SEQ ID NO: 8); VEE genome with nucleotides 7544-11175
deleted, plus 5′ T7-promoter, plus 3′ restriction sites
TC-83 Production Vector (SEQ ID NO: 9); TC-83 genome with nucleotides 7544-11175
deleted, plus 5′ T7-promoter, plus 3′ restriction sites
VEE-UbAAY (SEQ ID NO: 14); VEE delivery vector with MHC class I mouse tumor
epitopes SIINFEKL and AH1-A5 inserted
VEE-Luciferase (SEQ ID NO: 15); VEE delivery vector with luciferase gene
inserted at 7545
ubiquitin (SEQ ID NO: 38) > UbG76 0-228
Ubiquitin A76 (SEQ ID NO: 39) > UbA76 0-228
HLA-A2 (MHC class I) signal peptide (SEQ ID NO: 40) > MHC SignalPep 0-78
HLA-A2 (MHC class I) Trans Membrane domain (SEQ ID NO: 41) > HLA A2 TM Domain
0-201
IgK Leader Seq (SEQ ID NO: 42) > IgK Leader Seq 0-60
Human DC-Lamp (SEQ ID NO: 43) > HumanDCLAMP 0-3178
Mouse LAMP1 (SEQ ID NO: 44) > MouseLamp1 0-1858
Human Lamp1 cDNA (SEQ ID NO: 45) > Human Lamp1 0-2339
Tetanus toxoid nulceic acid sequence (SEQ ID NO: 46)
Tetanus toxoid amino acid sequence (SEQ ID NO: 47)
PADRE nulceotide sequence (SEQ ID NO: 48)
PADRE amino acid sequence (SEQ ID NO: 49)
WPRE (SEQ ID NO: 50) > WPRE 0-593
IRES (SEQ ID NO: 51) > eGFP_IRES_SEAP_Insert 1746-2335
GFP (SEQ ID NO: 52)
SEAP (SEQ ID NO: 53)
Firefly Luciferase (SEQ ID NO: 54)
FMDV 2A (SEQ ID NO: 55)

### REFERENCES

[0794] 1. Desrichard, A., Snyder, A. & Chan, T. A. Cancer Neoantigens and Applications for Immunotherapy. Clin. Cancer Res. Off. J. Am. Assoc. Cancer Res. (2015). doi: 10.1158/1078-0432.CCR-14-3175
[0795] 2. Schumacher, T. N. & Schreiber, R. D. Neoantigens in cancer immunotherapy. Science 348, 69-74 (2015).
[0796] 3. Gubin, M. M., Artyomov, M. N., Mardis, E. R. & Schreiber, R. D. Tumor neoantigens: building a framework for personalized cancer immunotherapy. J Clin. Invest. 125, 3413-3421 (2015).
[0797] 4. Rizvi, N. A. et al. Cancer immunology. Mutational landscape determines sensitivity to PD-1 blockade in non-small cell lung cancer. Science 348, 124-128 (2015).
[0798] 5. Snyder, A. et al. Genetic basis for clinical response to CTLA-4 blockade in melanoma. N. Engl. J Med. 371, 2189-2199 (2014).
[0799] 6. Carreno, B. M. et al. Cancer immunotherapy. A dendritic cell vaccine increases the breadth and diversity of melanoma neoantigen-specific T cells. Science 348, 803-808 (2015).
[0800] 7. Tran, E. et al. Cancer immunotherapy based on mutation-specific CD4+ T cells in a patient with epithelial cancer. Science 344, 641-645 (2014).
[0801] 8. Hacohen, N. & Wu, C. J.-Y. United States Patent Application: 20110293637—COMPOSITIONS AND METHODS OF IDENTIFYING TUMOR SPECIFIC NEOANTIGENS. (A1). at <http://appft1.uspto.gov/netacgi/nph-Parser?Sect1=PTO1&Sect2=HITOFF&d=PG01&p=l&u=/netahtml/PTO/srchnum.html&r=l& f=G&l=50&s1=20110293637. PGNR.>
[0802] 9. Lundegaard, C., Hoof, I., Lund, O. & Nielsen, M. State of the art and challenges in sequence based T-cell epitope prediction. Immunome Res. 6 Suppl 2, S3 (2010).
[0803] 10. Yadav, M. et al. Predicting immunogenic tumour mutations by combining mass spectrometry and exome sequencing. Nature 515, 572-576 (2014).
[0804] 11. Bassani-Stemberg, M., Pletscher-Frankild, S., Jensen, L. J. & Mann, M. Mass spectrometry of human leukocyte antigen class I peptidomes reveals strong effects of protein abundance and turnover on antigen presentation. Mol. Cell. Proteomics MCP 14, 658-673 (2015).
[0805] 12. Van Allen, E. M. et al. Genomic correlates of response to CTLA-4 blockade in metastatic melanoma. Science 350, 207-211 (2015).
[0806] 13. Yoshida, K. & Ogawa, S. Splicing factor mutations and cancer. Wiley Interdiscip. Rev. RNA 5, 445-459 (2014).
[0807] 14. Cancer Genome Atlas Research Network. Comprehensive molecular profiling of lung adenocarcinoma. Nature 511, 543-550 (2014).
[0808] 15. Rajasagi, M. et al. Systematic identification of personal tumor-specific neoantigens in chronic lymphocytic leukemia. Blood 124, 453-462 (2014).
[0809] 16. Downing, S. R. et al. United States Patent Application: 0120208706—OPTIMIZATION OF MULTIGENE ANALYSIS OF TUMOR SAMPLES. (A1). at <http://appft1.uspto.gov/netacgi/nph-Parser?Sect1=PTO1&Sect2=HITOFF&d=PG01&p=l&u=/netahtml/PTO/srchnum.html&r=l& f=G&l=50&s1=20120208706. PGNR.>
[0810] 17. Target Capture for NextGen Sequencing—IDT. at <http://www.idtdna.com/pages/products/nextgen/target-capture>
[0811] 18. Shukla, S. A. et al. Comprehensive analysis of cancer-associated somatic mutations in class I HLA genes. Nat. Biotechnol. 33, 1152-1158 (2015).
[0812] 19. Cieslik, M. et al. The use of exome capture RNA-seq for highly degraded RNA with application to clinical cancer sequencing. Genome Res. 25, 1372-1381 (2015).
[0813] 20. Bodini, M. et al. The hidden genomic landscape of acute myeloid leukemia: subclonal structure revealed by undetected mutations. Blood 125, 600-605 (2015).
[0814] 21. Saunders, C. T. et al. Strelka: accurate somatic small-variant calling from sequenced tumor-normal sample pairs. Bioinforma. Oxf. Engl. 28, 1811-1817 (2012).
[0815] 22. Cibulskis, K. et al. Sensitive detection of somatic point mutations in impure and heterogeneous cancer samples. Nat. Biotechnol. 31, 213-219 (2013).
[0816] 23. Wilkerson, M. D. et al. Integrated RNA and DNA sequencing improves mutation detection in low purity tumors. Nucleic Acids Res. 42, e107 (2014).
[0817] 24. Mose, L. E., Wilkerson, M. D., Hayes, D. N., Perou, C. M. & Parker, J. S. ABRA: improved coding indel detection via assembly-based realignment. Bioinforma. Oxf Engl. 30, 2813-2815 (2014).
[0818] 25. Ye, K., Schulz, M. H., Long, Q., Apweiler, R. & Ning, Z. Pindel: a pattern growth approach to detect break points of large deletions and medium sized insertions from paired-end short reads. Bioinforma. Oxf. Engl. 25, 2865-2871 (2009).
[0819] 26. Lam, H. Y. K. et al. Nucleotide-resolution analysis of structural variants using BreakSeq and a breakpoint library. Nat. Biotechnol. 28, 47-55 (2010).
[0820] 27. Frampton, G. M. et al. Development and validation of a clinical cancer genomic profiling test based on massively parallel DNA sequencing. Nat. Biotechnol. 31, 1023-1031 (2013).
[0821] 28. Boegel, S. et al. HLA typing from RNA-Seq sequence reads. Genome Med. 4, 102 (2012).
[0822] 29. Liu, C. et al. ATHLATES: accurate typing of human leukocyte antigen through exome sequencing. Nucleic Acids Res. 41, e142 (2013).
[0823] 30. Mayor, N. P. et al. HLA Typing for the Next Generation. PloS One 10, e0127153 (2015).
[0824] 31. Roy, C. K., Olson, S., Graveley, B. R., Zamore, P. D. & Moore, M. J. Assessing long-distance RNA sequence connectivity via RNA-templated DNA-DNA ligation. eLife 4, (2015).
[0825] 32. Song, L. & Florea, L. CLASS: constrained transcript assembly of RNA-seq reads. BMC Bioinformatics 14 Suppl 5, S14 (2013).
[0826] 33. Maretty, L., Sibbesen, J. A. & Krogh, A. Bayesian transcriptome assembly. Genome Biol. 15, 501 (2014).
[0827] 34. Pertea, M. et al. StringTie enables improved reconstruction of a transcriptome from RNA-seq reads. Nat. Biotechnol. 33, 290-295 (2015).
[0828] 35. Roberts, A., Pimentel, H., Trapnell, C. & Pachter, L. Identification of novel transcripts in annotated genomes using RNA-Seq. Bioinforma. Oxf. Engl. (2011). doi:10.1093/bioinformatics/btr355
[0829] 36. Vitting-Seerup, K., Porse, B. T., Sandelin, A. & Waage, J. spliceR: an R package for classification of alternative splicing and prediction of coding potential from RNA-seq data. BMC Bioinformatics 15, 81 (2014).
[0830] 37. Rivas, M. A. et al. Human genomics. Effect of predicted protein-truncating genetic variants on the human transcriptome. Science 348, 666-669 (2015).
[0831] 38. Skelly, D. A., Johansson, M., Madeoy, J., Wakefield, J. & Akey, J. M. A powerful and flexible statistical framework for testing hypotheses of allele-specific gene expression from RNA-seq data. Genome Res. 21, 1728-1737 (2011).
[0832] 39. Anders, S., Pyl, P. T. & Huber, W. HTSeq—a Python framework to work with high-throughput sequencing data. Bioinforma. Oxf. Engl. 31, 166-169 (2015).
[0833] 40. Furney, S. J. et al. SF3B1 mutations are associated with alternative splicing in uveal melanoma. Cancer Discov. (2013). doi:10.1158/2159-8290.CD-13-0330
[0834] 41. Zhou, Q. et al. A chemical genetics approach for the functional assessment of novel cancer genes. Cancer Res. (2015). doi:10.1158/0008-5472.CAN-14-2930
[0835] 42. Maguire, S. L. et al. SF3B1 mutations constitute a novel therapeutic target in breast cancer. J. Pathol. 235, 571-580 (2015).
[0836] 43. Carithers, L. J. et al. A Novel Approach to High-Quality Postmortem Tissue Procurement: The GTEx Project. Biopreservation Biobanking 13, 311-319 (2015).
[0837] 44. Xu, G. et al. RNA CoMPASS: a dual approach for pathogen and host transcriptome analysis of RNA-seq datasets. PloS One 9, e89445 (2014).
[0838] 45. Andreatta, M. & Nielsen, M. Gapped sequence alignment using artificial neural networks: application to the MHC class I system. Bioinforma. Oxf. Engl. (2015). doi:10.1093/bioinformatics/btv639
[0839] 46. Jorgensen, K. W., Rasmussen, M., Buus, S. & Nielsen, M. NetMHCstab—predicting stability of peptide-MHC-I complexes; impacts for cytotoxic T lymphocyte epitope discovery. Immunology 141, 18-26 (2014).
[0840] 47. Larsen, M. V. et al. An integrative approach to CTL epitope prediction: a combined algorithm integrating MHC class I binding, TAP transport efficiency, and proteasomal cleavage predictions. Eur. J. Immunol. 35, 2295-2303 (2005).
[0841] 48. Nielsen, M., Lundegaard, C., Lund, O. & Keşmir, C. The role of the proteasome in generating cytotoxic T-cell epitopes: insights obtained from improved predictions of proteasomal cleavage. Immunogenetics 57, 33-41 (2005).
[0842] 49. Boisvert, F.-M. et al. A Quantitative Spatial Proteomics Analysis of Proteome Turnover in Human Cells. Mol. Cell. Proteomics 11, M111.011429-M11.011429 (2012).
[0843] 50. Duan, F. et al. Genomic and bioinformatic profiling of mutational neoepitopes reveals new rules to predict anticancer immunogenicity. J Exp. Med. 211, 2231-2248 (2014).
[0844] 51. Janeway's Immunobiology: 9780815345312: Medicine & Health Science Books @ Amazon.com. at <http://www.amazon.com/Janeways-Immunobiology-Kenneth-Murphy/dp/0815345313>
[0845] 52. Calis, J. J. A. et al. Properties of MHC Class I Presented Peptides That Enhance Immunogenicity. PLoS Comput. Biol. 9, e1003266 (2013).
[0846] 53. Zhang, J. et al. Intratumor heterogeneity in localized lung adenocarcinomas delineated by multiregion sequencing. Science 346, 256-259 (2014)
[0847] 54. Walter, M. J. et al. Clonal architecture of secondary acute myeloid leukemia. N. Engl. J. Med. 366, 1090-1098 (2012).
[0848] 55. Hunt D F, Henderson R A, Shabanowitz J, Sakaguchi K, Michel H, Sevilir N, Cox A L, Appella E, Engelhard V H. Characterization of peptides bound to the class I MHC molecule HLA-A2.1 by mass spectrometry. Science 1992. 255: 1261-1263.
[0849] 56. Zarling A L, Polefrone J M, Evans A M, Mikesh L M, Shabanowitz J, Lewis S T, Engelhard V H, Hunt D F. Identification of class I MHC-associated phosphopeptides as targets for cancer immunotherapy. Proc Natl Acad Sci USA. 2006 Oct. 3; 103(40):14889-94.
[0850] 57. Bassani-Sternberg M, Pletscher-Frankild S, Jensen L J, Mann M. Mass spectrometry of human leukocyte antigen class I peptidomes reveals strong effects of protein abundance and turnover on antigen presentation. Mol Cell Proteomics. 2015 March; 14(3):658-73. doi: 10.1074/mcp.M114.042812.
[0851] 58. Abelin J G, Trantham P D, Penny S A, Patterson A M, Ward S T, Hildebrand W H, Cobbold M, Bai D L, Shabanowitz J, Hunt D F. Complementary IMAC enrichment methods for HLA-associated phosphopeptide identification by mass spectrometry. Nat Protoc. 2015 September; 10(9):1308-18. doi: 10.1038/nprot.2015.086. Epub 2015 Aug. 6
[0852] 59. Barnstable C J, Bodmer W F, Brown G, Galfre G, Milstein C, Williams A F, Ziegler A. Production of monoclonal antibodies to group A erythrocytes, HLA and other human cell surface antigens-new tools for genetic analysis. Cell. 1978 May; 14(1):9-20.
[0853] 60. Goldman J M, Hibbin J, Kearney L, Orchard K, Th'ng K H. HLA-DR monoclonal antibodies inhibit the proliferation of normal and chronic granulocytic leukaemia myeloid progenitor cells. Br J Haematol. 1982 November; 52(3):411-20.
[0854] 61. Eng J K, Jahan T A, Hoopmann M R. Comet: an open-source MS/MS sequence database search tool. Proteomics. 2013 January; 13(1):22-4. doi: 10.1002/pmic.201200439. Epub 2012 Dec. 4.
[0855] 62. Eng J K, Hoopmann M R, Jahan T A, Egertson J D, Noble W S, MacCoss M J. A deeper look into Comet—implementation and features. J Am Soc Mass Spectrom. 2015 November; 26(11):1865-74. doi: 10.1007/s13361-015-1179-x. Epub 2015 Jun. 27.
[0856] 63. Lukas Käll, Jesse Canterbury, Jason Weston, William Stafford Noble and Michael J. MacCoss. Semi-supervised learning for peptide identification from shotgun proteomics datasets. Nature Methods 4:923-925, November 2007
[0857] 64. Lukas Käll, John D. Storey, Michael J. MacCoss and William Stafford Noble. Assigning confidence measures to peptides identified by tandem mass spectrometry. Journal of Proteome Research, 7(1):29-34, January 2008
[0858] 65. Lukas Käll, John D. Storey and William Stafford Noble. Nonparametric estimation of posterior error probabilities associated with peptides identified by tandem mass spectrometry. Bioinformatics, 24(16):i42-i48, August 2008
[0859] 66. Kinney R M, B J Johnson, V L Brown, D W Trent. Nucleotide Sequence of the 26 S mRNA of the Virulent Trinidad Donkey Strain of Venezuelan Equine Encephalitis Virus and Deduced Sequence of the Encoded Structural Proteins. Virology 152 (2), 400-413. 1986 Jul. 30.
[0860] 67. Jill E Slansky, Frederique M Rattis, Lisa F Boyd, Tarek Fahmy, Elizabeth M Jaffee, Jonathan P Schneck, David H Margulies, Drew M Pardoll. Enhanced Antigen-Specific Antitumor Immunity with Altered Peptide Ligands that Stabilize the MHC-Peptide-TCR Complex. Immunity, Volume 13, Issue 4, 1 Oct. 2000, Pages 529-538.
[0861] 68. A Y Huang, P H Gulden, A S Woods, M C Thomas, C D Tong, W Wang, V H Engelhard, G Pastemack, R Cotter, D Hunt, D M Pardoll, and E M Jaffee. The immunodominant major histocompatibility complex class I-restricted antigen of a murine colon tumor derives from an endogenous retroviral gene product. Proc Natl Acad Sci USA.; 93(18): 9730-9735, 1996 Sep. 3.
[0862] 69. JOHNSON, BARBARA J. B., RICHARD M. KINNEY, CRYSTLE L. KOST AND DENNIS W. TRENT. Molecular Determinants of Alphavirus Neurovirulence: Nucleotide and Deduced Protein Sequence Changes during Attenuation of Venezuelan Equine Encephalitis Virus. J Gen Virol 67:1951-1960, 1986.
[0863] 70. Aarnoudse, C. A., Kruse, M., Konopitzky, R., Brouwenstijn, N., and Schrier, P. I. (2002). TCR reconstitution in Jurkat reporter cells facilitates the identification of novel tumor antigens by cDNA expression cloning. Int J Cancer 99, 7-13.
[0864] 71. Alexander, J., Sidney, J., Southwood, S., Ruppert, J., Oseroff, C., Maewal, A., Snoke, K., Serra, H. M., Kubo, R. T., and Sette, A. (1994). Development of high potency universal DR-restricted helper epitopes by modification of high affinity DR-blocking peptides. Immunity 1, 751-761.
[0865] 72. Banu, N., Chia, A., Ho, Z. Z., Garcia, A. T., Paravasivam, K., Grotenbreg, G. M., Bertoletti, A., and Gehring, A. J. (2014). Building and optimizing a virus-specific T cell receptor library for targeted immunotherapy in viral infections. Scientific Reports 4, 4166.
[0866] 73. Comet, S., Miconnet, I., Menez, J., Lemonnier, F., and Kosmatopoulos, K. (2006). Optimal organization of a polypeptide-based candidate cancer vaccine composed of cryptic tumor peptides with enhanced immunogenicity. Vaccine 24, 2102-2109.
[0867] 74. Depla, E., van der Aa, A., Livingston, B. D., Crimi, C., Allosery, K., de Brabandere, V., Krakover, J., Murthy, S., Huang, M., Power, S., et al. (2008). Rational design of a multiepitope vaccine encoding T-lymphocyte epitopes for treatment of chronic hepatitis B virus infections. Journal of Virology 82, 435-450.
[0868] 75. Ishioka, G. Y., Fikes, J., Hermanson, G., Livingston, B., Crimi, C., Qin, M., del Guercio, M. F., Oseroff, C., Dahlberg, C., Alexander, J., et al. (1999). Utilization of MHC class I transgenic mice for development of minigene DNA vaccines encoding multiple HLA-restricted CTL epitopes. J Immunol 162, 3915-3925.
[0869] 76. Janetzki, S., Price, L., Schroeder, H., Britten, C. M., Welters, M. J. P., and Hoos, A. (2015). Guidelines for the automated evaluation of Elispot assays. Nat Protoc 10, 1098-1115.
[0870] 77. Lyons, G. E., Moore, T., Brasic, N., Li, M., Roszkowski, J. J., and Nishimura, M. I. (2006). Influence of human CD8 on antigen recognition by T-cell receptor-transduced cells. Cancer Res 66, 11455-11461.
[0871] 78. Nagai, K., Ochi, T., Fujiwara, H., An, J., Shirakata, T., Mineno, J., Kuzushima, K., Shiku, H., Melenhorst, J. J., Gostick, E., et al. (2012). Aurora kinase A-specific T-cell receptor gene transfer redirects T lymphocytes to display effective antileukemia reactivity. Blood 119, 368-376.
[0872] 79. Panina-Bordignon, P., Tan, A., Termijtelen, A., Demotz, S., Corradin, G., and Lanzavecchia, A. (1989). Universally immunogenic T cell epitopes: promiscuous binding to human MHC class II and promiscuous recognition by T cells. Eur J Immunol 19, 2237-2242.
[0873] 80. Vitiello, A., Marchesini, D., Furze, J., Sherman, L. A., and Chesnut, R. W. (1991). Analysis of the HLA-restricted influenza-specific cytotoxic T lymphocyte response in transgenic mice carrying a chimeric human-mouse class I major histocompatibility complex. J Exp Med 173, 1007-1015.
[0874] 81. Yachi, P. P., Ampudia, J., Zal, T., and Gascoigne, N. R. J. (2006). Altered peptide ligands induce delayed CD8-T cell receptor interaction—a role for CD8 in distinguishing antigen quality. Immunity 25, 203-211.
[0875] 82. Pushko P, Parker M, Ludwig G V, Davis N L, Johnston R E, Smith J F. Replicon-helper systems from attenuated Venezuelan equine encephalitis virus: expression of heterologous genes in vitro and immunization against heterologous pathogens in vivo. Virology. 1997 Dec. 22; 239(2):389-401.
[0876] 83. Strauss, J H and E G Strauss. The alphaviruses: gene expression, replication, and evolution. Microbiol Rev. 1994 September; 58(3): 491-562.
[0877] 84. Rhême C, Ehrengruber M U, Grandgirard D. Alphaviral cytotoxicity and its implication in vector development. Exp Physiol. 2005 January; 90(1):45-52. Epub 2004 Nov. 12.
[0878] 85. Riley, Michael K. I I, and Wilfred Vermerris. Recent Advances in Nanomaterials for Gene Delivery-A Review. Nanomaterials 2017, 7(5), 94.
[0879] 86. Frolov I, Hardy R, Rice C M. Cis-acting RNA elements at the 5′ end of Sindbis virus genome RNA regulate minus- and plus-strand RNA synthesis. RNA. 2001 November; 7(11):1638-51.
[0880] 87. Jose J, Snyder J E, Kuhn R J. A structural and functional perspective of alphavirus replication and assembly. Future Microbiol. 2009 September; 4(7):837-56.
[0881] 88. Bo Li and C. olin N. Dewey. RSEM: accurate transcript quantification from RNA-Seq data with or without a referenfe genome. BMC Bioinformatics, 12:323, August 2011
[0882] 89. Hillary Pearson, Tariq Daouda, Diana Paola Granados, Chantal Durette, Eric Bonneil, Mathieu Courcelles, Anja Rodenbrock, Jean-Philippe Laverdure, Caroline Cöté, Sylvie Mader, Sebastien Lemieux, Pierre Thibault, and Claude Perreault. MHC class I-associated peptides derive from selective regions of the human genome. The Journal of Clinical Investigation, 2016,
[0883] 90. Juliane Liepe, Fabio Marino, John Sidney, Anita Jeko, Daniel E. Bunting, Alessandro Sette, Peter M. Kloetzel, Michael P. H. Stumpf, Albert J. R. Heck, Michele Mishto. A large fraction of HLA class I ligands are proteasome-generated spliced peptides. Science, 21, October 2016.
[0884] 91. Mommen G P., Marino, F., Meiring H D., Poelen, M C., van Gaans-van den Brink, J A., Mohammed S., Heck A J., and van Els C A. Sampling From the Proteome to the Human Leukocyte Antigen-DR (HLA-DR) Ligandome Proceeds Via High Specificity. Mol Cell Proteomics 15(4): 1412-1423, April 2016.
[0885] 92. Sebastian Kreiter, Mathias Vormehr, Niels van de Roemer, Mustafa Diken, Martin Löwer, Jan Diekmann, Sebastian Boegel, Barbara Schrörs, Fulvia Vascotto, John C. Castle, Arbel D. Tadmor, Stephen P. Schoenberger, Christoph Huber, Özlem Türeci, and Ugur Sahin. Mutant MHC class II epitopes drive therapeutic immune responses to caner. Nature 520, 692-696, April 2015.
[0886] 93. Tran E., Turcotte S., Gros A., Robbins P. F., Lu Y. C., Dudley M. E., Wunderlich J. R., Somerville R. P., Hogan K., Hinrichs C. S., Parkhurst M. R., Yang J. C., Rosenberg S. A. Cancer immunotherapy based on mutation-specific CD4+ T cells in a patient with epithelial cancer. Science 344(6184) 641-645, May 2014.
[0887] 94. Andreatta M., Karosiene E., Rasmussen M., Stryhn A., Buus S., Nielsen M. Accurate pan-specific prediction of peptide-MHC class II binding affinity with improved binding core identification. Immunogenetics 67(11-12) 641-650, November 2015.
[0888] 95. Nielsen, M., Lund, O. NN-align. An artificial neural network-based alignment algorithm for MHC class II peptide binding prediction. BMC Bioinformatics 10:296, September 2009.
[0889] 96. Nielsen, M., Lundegaard, C., Lund, O. Prediction of MHC class II binding affinity using SMM-align, a novel stabilization matrix alignment method. BMC Bioinformatics 8:238, July 2007.
[0890] 97. Zhang, J., et al. PEAKS D B: de novo sequencing assisted database search for sensitive and accurate peptide identification. Molecular & Cellular Proteomics. 11(4):1-8. Jan. 2, 2012.
[0891] 98. Jensen, Kamilla Kjaergaard, et al. “Improved Methods for Prediting Peptide Binding Affinity to MHC Class II Molecules.” Immunology, 2018, doi:10.1111/imm.12889.
[0892] 99. Carter, S. L., Cibulskis, K., Helman, E., McKenna, A., Shen, H., Zack, T., Laird, P. W., Onofrio, R. C., Winckler, W., Weir, B. A., et al. (2012). Absolute quantification of somatic DNA alterations in human cancer. Nat. Biotechnol. 30, 413-421
[0893] 100. McGranahan, N., Rosenthal, R., Hiley, C. T., Rowan, A. J., Watkins, T. B. K., Wilson, G. A., Birkbak, N. J., Veeriah, S., Van Loo, P., Herrero, J., et al. (2017). Allele-Specific HLA Loss and Immune Escape in Lung Cancer Evolution. Cell 171, 1259-1271.e11.
[0894] 101. Shukla, S. A., Rooney, M. S., Rajasagi, M., Tiao, G., Dixon, P. M., Lawrence, M. S., Stevens, J., Lane, W. J., Dellagatta, J. L., Steelman, S., et al. (2015). Comprehensive analysis of cancer-associated somatic mutations in class I HLA genes. Nat. Biotechnol. 33, 1152-1158.
[0895] 102. Van Loo, P., Nordgard, S. H., Lingjorde, O. C., Russnes, H. G., Rye, I. H., Sun, W., Weigman, V. J., Marynen, P., Zetterberg, A., Naume, B., et al. (2010). Allele-specific copy number analysis of tumors. Proc. Natl. Acad. Sci. U.S.A 107, 16910-16915.
[0896] 103. Van Loo, P., Nordgard, S. H., Lingjorde, O. C., Russnes, H. G., Rye, I. H., Sun, W., Weigman, V. J., Marynen, P., Zetterberg, A., Naume, B., et al. (2010). Allele-specific copy number analysis of tumors. Proc. Natl. Acad. Sci. U.S.A 107, 16910-16915.
[0897] 104. HIV Sequence Compendium 2018 Foley B, Leitner T, Apetrei C, Hahn B, Mizrachi I, Mullins J, Rambaut A, Wolinsky S, and Korber B, Eds. Published by Theoretical Biology and Biophysics Group, Los Alamos National Laboratory, NM, LA-UR 18-25673.
[0898] 105. Llano, A., Williams, A., Olvera, A., Silva-Arrieta, S., Brander, C., (2013). Best-Characterized HIV-1 CTL Epitopes: The 2013 Update. HIV Molecular Immunology, 3-25.
[0899] 106. Gaiha, G., Rossin, E., Urbach, J., et al. (2019). Structural topology defines protective CD8+ T cell epitopes in the HIV proteome. Science 364, 480-484.
[0900] 107. O'Donnell, T. J., Rubinsteyn, A., Bonsack, M., Riemer, A. B., Laserson, U., & Hammerbacher, J. (2018). MHCflurry: Open-Source Class I MHC Binding Affinity Prediction. Cell Systems, 7(1), 129-132.e4.
[0901] 108. Los Almos National Security, LLC, “Best-defined CTL/CD8+ Epitope Summary”, 20 Nov. 2019, https://www.hiv.lanl.gov/content/immunology/tables/optimal_ctl_summary.html.
[0902] 109. Llano A, Cedeño, S, Silva-Arrieta, S, Brander C (2019). The 2019 Optimal HIV CTL epitopes update: Growing diversity in epitope length and HLA restriction. in HIV Molecular Immunology 2019. Yusim, K, Korber B, Brander, C, Barouch, D, de Boer, R, Haynes, B F, Koup, R, Moore, J P, Walker, B D, Eds. Published by Theoretical Biology and Biophysics Group, Los Alamos National Laboratory, Los Alamos, N. Mex.

Lengthy table referenced here
US20230128001A1-20230427-T00001
Please refer to the end of the specification for access instructions.

Lengthy table referenced here
US20230128001A1-20230427-T00002
Please refer to the end of the specification for access instructions.

Lengthy table referenced here
US20230128001A1-20230427-T00003
Please refer to the end of the specification for access instructions.

Lengthy table referenced here
US20230128001A1-20230427-T00004
Please refer to the end of the specification for access instructions.

Lengthy table referenced here
US20230128001A1-20230427-T00005
Please refer to the end of the specification for access instructions.

Lengthy table referenced here
US20230128001A1-20230427-T00006
Please refer to the end of the specification for access instructions.

Lengthy table referenced here
US20230128001A1-20230427-T00007
Please refer to the end of the specification for access instructions.

Lengthy table referenced here
US20230128001A1-20230427-T00008
Please refer to the end of the specification for access instructions.

Lengthy table referenced here
US20230128001A1-20230427-T00009
Please refer to the end of the specification for access instructions.

Lengthy table referenced here
US20230128001A1-20230427-T00010
Please refer to the end of the specification for access instructions.

Lengthy table referenced here
US20230128001A1-20230427-T00011
Please refer to the end of the specification for access instructions.

LENGTHY TABLES
The patent application contains a lengthy table section. A copy of the table is available in electronic form from the USPTO web site (https://seqdata.uspto.gov/?pageRequest=docDetail&DocID=US20230128001A1). An electronic copy of the table will also be available from the USPTO upon request and payment of the fee set forth in 37 CFR 1.19(b)(3).

1. A composition for delivery of an antigen expression system or for delivery of one or more antigens, wherein:
(A) the antigen expression system comprises a vector backbone comprising a chimpanzee adenovirus vector, optionally wherein the chimpanzee adenovirus vector is a ChAdV68 vector, or an alphavirus vector, optionally wherein the alphavirus vector is a Venezuelan equine encephalitis virus vector, the vector backbone comprising at least one HIV MHC class I antigen-encoding nucleic acid sequence comprising a MHC class I epitope encoding nucleic acid sequence, optionally wherein the MHC class I epitope encoding nucleic acid sequence encodes a MHC class I epitope comprising at least one HIV epitope selected from the group consisting of the sequences shown in SEQ ID NOs: 325-22349; or
(B) the composition for delivery of one or more antigens comprises one or more HIV MHC class I antigens or one or more nucleic acid sequences encoding one or more HIV MHC class I antigens, each HIV MHC class I antigen comprising a MHC class I epitope comprising at least one HIV epitope selected from the group consisting of the sequences shown in SEQ ID Nos: 325-22349.

2. The composition of claim 1, wherein the at least one HIV epitope is selected from the group consisting of the sequences shown in SEQ ID NOs: 4113, 4114, 4115, 4427, 4439, 4494, 4495, 4545, 4561, 4956, 4968, 4975, 4982, 5259, 5261, 5459, 5460, 5610, 5643, and 5661.

3. The composition of claim 1, wherein the antigen expression system comprises 2, 3, 4, 5, 6, 7, 8, 9, 10, 11, 12, 13, 14, 15, 16, 17, 18, 19, or 20 HIV MHC class I antigen-encoding nucleic acid sequences, wherein each HIV MHC class I antigen-encoding nucleic acid sequence comprises a MHC class I epitope encoding nucleic acid sequence that encodes a MHC class I epitope comprising at least one HIV epitope selected from the group consisting of the sequences shown in SEQ ID Nos: 325-22349.

4. The composition of claim 3, wherein each HIV MHC class I antigen-encoding nucleic acid sequence comprises a MHC class I epitope encoding nucleic acid sequence that encodes a MHC class I epitope comprising at least one HIV epitope selected from the group consisting of the sequences shown in SEQ ID NOs: 4113, 4114, 4115, 4427, 4439, 4494, 4495, 4545, 4561, 4956, 4968, 4975, 4982, 5259, 5261, 5459, 5460, 5610, 5643, and 5661.

5. (canceled)

6. (canceled)

7. (canceled)

8. (canceled)

9. (canceled)

10. A composition for delivery of an antigen expression system comprising one or more vectors, the one or more vectors comprising:
(a) a vector backbone, wherein the backbone comprises:
(i) at least one promoter nucleotide sequence, and
(ii) at least one polyadenylation (poly(A)) sequence; and
(b) an antigen cassette, wherein the antigen cassette comprises:
(i) at least one antigen-encoding nucleic acid sequence, comprising:
(I) at least one HIV MHC class I antigen-encoding nucleic acid sequence, comprising:
(A) a MHC class I epitope encoding nucleic acid sequence, wherein the MHC class I epitope encoding nucleic acid sequence encodes a MHC class I epitope comprising at least one HIV epitope selected from the group consisting of the sequences shown in SEQ ID Nos: 325-22349,
(B) optionally, a 5′ linker sequence, and
(C) optionally, a 3′ linker sequence;
(ii) optionally, a second promoter nucleotide sequence operably linked to the antigen-encoding nucleic acid sequence; and
(iii) optionally, at least one MHC class II antigen-encoding nucleic acid sequence;
(iv) optionally, at least one nucleic acid sequence encoding a GPGPG (SEQ ID NO: 151) amino acid linker sequence; and
(v) optionally, at least one second poly(A) sequence, wherein the second poly(A) sequence is a native poly(A) sequence or an exogenous poly(A) sequence to the vector backbone.

11. The composition of claim 10, wherein the at least one antigen-encoding nucleic acid sequence comprises:
(I-a) at least 10, 11, 12, 13, 14, 15, 16, 17, 18, 19, or 20 HIV MHC class I antigen-encoding nucleic acid sequences linearly linked to each other, wherein each HIV MHC class I antigen-encoding nucleic acid sequence comprises a MHC class I epitope encoding nucleic acid sequence that encodes a MHC class I epitope comprising at least one HIV epitope selected from the group consisting of the sequences shown in SEQ ID NOs: 325-2165;
or
(I-b) at least 10, 11, 12, 13, 14, 15, 16, 17, 18, 19, or 20 HIV MHC class I antigen-encoding nucleic acid sequences linearly linked to each other, wherein each HIV MHC class I antigen-encoding nucleic acid sequence comprises a MHC class I epitope encoding nucleic acid sequence that encodes a MHC class I epitope comprising at least one HIV epitope selected from the group consisting of the sequences shown in SEQ ID NOs: 2166-4106;
or
(I-c) at least 10, 11, 12, 13, 14, 15, 16, 17, 18, 19, or 20 HIV MHC class I antigen-encoding nucleic acid sequences linearly linked to each other, wherein each HIV MHC class I antigen-encoding nucleic acid sequence comprises a MHC class I epitope encoding nucleic acid sequence that encodes a MHC class I epitope comprising at least one HIV epitope selected from the group consisting of the sequences shown in SEQ ID NOs: 4107-6241:
or
(I-d) at least 10, 11, 12, 13, 14, 15, 16, 17, 18, 19, or 20 HIV MHC class I antigen-encoding nucleic acid sequences linearly linked to each other, wherein each HIV MHC class I antigen-encoding nucleic acid sequence comprises a MHC class I epitope encoding nucleic acid sequence that encodes a MHC class I epitope comprising at least one HIV epitope selected from the group consisting of the sequences shown in SEQ ID NOs: 6242-8389: or
(I-e) at least 10, 11, 12, 13, 14, 15, 16, 17, 18, 19, or 20 HIV MHC class I antigen-encoding nucleic acid sequences linearly linked to each other, wherein each HIV MHC class I antigen-encoding nucleic acid sequence comprises a MHC class I epitope encoding nucleic acid sequence that encodes a MHC class I epitope comprising at least one HIV epitope selected from the group consisting of the sequences shown in SEQ ID NOs: 8930-10626; or
(I-f) at least 10, 11, 12, 13, 14, 15, 16, 17, 18, 19, or 20 HIV MHC class I antigen-encoding nucleic acid sequences linearly linked to each other, wherein each HIV MHC class I antigen-encoding nucleic acid sequence comprises a MHC class I epitope encoding nucleic acid sequence that encodes a MHC class I epitope comprising at least one HIV epitope selected from the group consisting of the sequences shown in SEQ ID NOs: 10627-12810; or
(I-g) at least 10, 11, 12, 13, 14, 15, 16, 17, 18, 19, or 20 HIV MHC class I antigen-encoding nucleic acid sequences linearly linked to each other, wherein each HIV MHC class I antigen-encoding nucleic acid sequence comprises a MHC class I epitope encoding nucleic acid sequence that encodes a MHC class I epitope comprising at least one HIV epitope selected from the group consisting of the sequences shown in SEQ ID NOs: 12811-15079;
or
(I-h) at least 10, 11, 12, 13, 14, 15, 16, 17, 18, 19, or 20 HIV MHC class I antigen-encoding nucleic acid sequences linearly linked to each other, wherein each HIV MHC class I antigen-encoding nucleic acid sequence comprises a MHC class I epitope encoding nucleic acid sequence that encodes a MHC class I epitope selected from the group consisting of epitope sequences of any one of SEQ ID NOs: 15080-17174;
or
(I-i) at least 10, 11, 12, 13, 14, 15, 16, 17, 18, 19, or 20 HIV MHC class I antigen-encoding nucleic acid sequences linearly linked to each other, wherein each HIV MHC class I antigen-encoding nucleic acid sequence comprises a MHC class I epitope encoding nucleic acid sequence that encodes a MHC class I epitope comprising at least one HIV epitope selected from the group consisting of the sequences shown in SEQ ID NOs: 17175-19388;
or
(I-j) at least 10, 11, 12, 13, 14, 15, 16, 17, 18, 19, or 20 HIV MHC class I antigen-encoding nucleic acid sequences linearly linked to each other, wherein each HIV MHC class I antigen-encoding nucleic acid sequence comprises a MHC class I epitope encoding nucleic acid sequence that encodes a MHC class I epitope comprising at least one HIV epitope selected from the group consisting of the sequences shown in SEQ ID NOs: 19389-21003;
or
(I-k) at least 10, 11, 12, 13, 14, 15, 16, 17, 18, 19, or 20 HIV MHC class I antigen-encoding nucleic acid sequences linearly linked to each other, wherein each HIV MHC class I antigen-encoding nucleic acid sequence comprises a MHC class I epitope encoding nucleic acid sequence that encodes a MHC class I epitope comprising at least one HIV epitope selected from the group consisting of the sequences shown in SEQ ID NOs: 21004-22349, and
wherein each of the HIV MHC class I antigen-encoding nucleic acid sequences further comprises;
(A) optionally, a 5′ linker sequence, and
(B) optionally, a 3′ linker sequence.

12-21. (canceled)

22. The composition of claim 10, wherein:
(a) the vector backbone comprises:
(i) a chimpanzee adenovirus vector, optionally wherein the chimpanzee adenovirus vector is a ChAdV68 vector, or an alphavirus vector, optionally wherein the alphavirus vector is a Venezuelan equine encephalitis virus vector, and
(ii) a 26S promoter nucleotide sequence, and
(iii) a polyadenylation (poly(A)) sequence; and
(b) the antigen cassette is integrated between the 26S promoter nucleotide sequence and the poly(A) sequence, wherein the antigen cassette comprises:
(i) the at least one antigen-encoding nucleic acid sequence, comprising:
(I) the at least 10, 11, 12, 13, 14, 15, 16, 17, 18, 19, or 20 HIV MHC class I antigen-encoding nucleic acid sequences linearly linked to each other and each comprising:
(A) the optional 5′ linker sequence, wherein the 5′ linker sequence encodes a native N-terminal amino acid sequence of the MHC class I epitope, and wherein the 5′ linker sequence encodes a peptide that is at least 3 amino acids in length,
(B) the optional 3′ linker sequence, wherein the 3′ linker sequence encodes a native C-terminal acid sequence of the MHC class I epitope, and wherein the 3′ linker sequence encodes a peptide that is at least 3 amino acids in length, and
wherein the antigen cassette is operably linked to the 26S promoter nucleotide sequence, wherein each of the MHC class I antigen-encoding nucleic acid sequences encodes a polypeptide that is between 13 and 25 amino acids in length, and wherein each 3′ end of each MHC class I antigen-encoding nucleic acid sequence is linked to the 5′ end of the following MHC class I antigen-encoding nucleic acid sequence with the exception of the final MHC class I antigen-encoding nucleic acid sequence in the antigen cassette; and
(ii) at least two MHC class II antigen-encoding nucleic acid sequences comprising:
(I) a PADRE MHC class II sequence,
(II) a Tetanus toxoid MHC class II sequence,
(III) a first nucleic acid sequence encoding the at least one nucleic acid sequence encoding GPGPG (SEQ ID NO: 163) amino acid linker sequence linking the PADRE MHC class II sequence and the Tetanus toxoid MHC class II sequence,
(IV) a second nucleic acid sequence encoding the at least one nucleic acid sequence encoding the GPGPG (SEQ ID NO: 164) amino acid linker sequence linking the 5′ end of the at least two MHC class II antigen-encoding nucleic acid sequences to the HIV MHC class I antigen-encoding nucleic acid sequences,
(V) optionally, a third nucleic acid sequence encoding at least one nucleic acid sequence encoding the GPGPG (SEQ ID NO: 165) amino acid linker sequence at the 3′ end of the at least two MHC class II antigen-encoding nucleic acid sequences.

23. The composition of claim 10, wherein an ordered sequence of each element of the antigen cassette is described in the formula, from 5′ to 3′, comprising:
Pₐ-(L5_{b}-N_{c}-L3_{d})_{X}-(G5ₑ-U_{f})_{Y}-G3_{g}
wherein P comprises the second promoter nucleotide sequence, where a=0 or 1,
N comprises one of the MHC class I epitope encoding nucleic acid sequences, where c=1,
L5 comprises the 5′ linker sequence, where b=0 or 1,
L3 comprises the 3′ linker sequence, where d=0 or 1,
G5 comprises one of the at least one nucleic acid sequences encoding a GPGPG (SEQ ID NO: 166) amino acid linker, where e=0 or 1,
G3 comprises one of the at least one nucleic acid sequences encoding a GPGPG (SEQ ID NO: 167) amino acid linker, where g=0 or 1,
U comprises one of the at least one MHC class II antigen-encoding nucleic acid sequence, where f=1,
X=1 to 400, where for each X the corresponding N_{c} is a epitope encoding nucleic acid sequence, and
Y=0, 1, or 2, where for each Y the corresponding U_{f} is an antigen-encoding nucleic acid sequence.

24-38. (canceled)

39. The composition of claim 1, wherein the vector backbone the alphavirus vector comprising at least one nucleotide sequence of a Venezuelan equine encephalitis virus, wherein the Venezuelan equine encephalitis virus comprises the sequence of SEQ ID NO:3 or SEQ ID NO:5 further comprising a deletion between base pair 7544 and 11175, and wherein the cassette is inserted at position 7544 to replace the deletion between base pairs 7544 and 11175 as set forth in the sequence of SEQ ID NO:3 or SEQ ID NO:5.

40-49. (canceled)

50. The composition of claim 1, wherein the vector backbone comprises the chimpanzee adenovirus vector, wherein the chimpanzee adenovirus vector is a ChAdV68 vector, and wherein the ChAdV68 backbone comprises at least nucleotides 2 to 36,518 of the sequence set forth in SEQ ID NO:1, wherein the nucleotides 2 to 36,518 lack: (1) nucleotides 577 to 3403 of the sequence shown in SEQ ID NO:1 corresponding to an E1 deletion; (2) nucleotides 27,125 to 31,825 of the sequence shown in SEQ ID NO:1 corresponding to an E3 deletion; and (3) nucleotides 34,916 to 35,642 of the sequence shown in SEQ ID NO:1 corresponding to a partial E4 deletion: optionally wherein the antigen cassette is inserted within the E1 deletion.

51-98. (canceled)

99. The composition of claim 10, wherein the antigen cassette comprises junctional epitope sequences formed by adjacent sequences in the antigen cassette, wherein at least one or each junctional epitope sequence has an affinity of greater than 500 nM for MHC, optionally wherein each junctional epitope sequence is non-self.

100. (canceled)

101. (canceled)

102. (canceled)

103. (canceled)

104. (canceled)

105. A pharmaceutical composition comprising the composition claim 1 and a pharmaceutically acceptable carrier.

106. (canceled)

107. An isolated nucleotide sequence or set of isolated nucleotide sequences comprising the antigen cassette of claim 10 and one or more elements obtained from the sequence of SEQ ID NO:3 or SEQ ID NO:5, optionally wherein the one or more elements are selected from the group consisting of the sequences necessary for nonstructural protein-mediated amplification, the 26S promoter nucleotide sequence, the poly(A) sequence, and the nsP1-4 genes of the sequence set forth in SEQ ID NO:3 or SEQ ID NO:5, and optionally wherein the nucleotide sequence is cDNA, and optionally wherein the sequence or set of isolated nucleotide sequences comprises the antigen cassette of claim 10 inserted at position 7544 of the sequence set forth in SEQ ID NO:6 or SEQ ID NO:7.

108. (canceled)

109. (canceled)

110. (canceled)

111. (canceled)

112. An isolated cell comprising the nucleotide sequence or set of isolated nucleotide sequences of claim 107, optionally wherein the cell is a BHK-21, CHO, HEK293 or variants thereof, 911, HeLa, A549, LP-293, PER.C6, or AE1-2a cell.

113. A method for treating a subject with HIV, the method comprising administering to the subject the composition of claim 1.

114. A method for inducing an immune response in a subject, the method comprising administering to the subject the composition of claim 1.

115-130. (canceled)

131. A method of assessing a subject having HIV, comprising the steps of:
a) determining or having determined a HIV subtype of the HIV of the subject;
b) determining or having determined whether the subject expresses a HLA allele predicted or known to present a MHC class I epitope encoded by an antigen-encoding nucleic acid sequence in an antigen-based vaccine, and
c) determining or having determined that the subject is a candidate for therapy with the antigen-based vaccine when the subject expresses the HLA allele, and the HIV subtype expresses the MHC class I epitope encoded by the antigen-encoding nucleic acid sequence in the antigen-based vaccine,
wherein the MHC class I epitope comprises at least one MHC class I epitope sequence selected from the group consisting of epitope sequences from any one of SEQ ID Nos: 325-22349, and
d) optionally, administering or having administered the antigen-based vaccine to the subject.

132-189. (canceled)

190. The composition of claim 1, wherein each MHC class I epitope comprises at least one HIV epitope selected from the group consisting of the sequences shown in:
(a) SEQ ID NOs: 325-2165;
(b) SEQ ID NOs: 2166-4106;
(c) SEQ ID NOs: 4107-6241;
(d) SEQ ID NOs: 6242-8389;
(e) SEQ ID NOs: 8930-10626;
(f) SEQ ID NOs: 10627-12810;
(g) SEQ ID NOs: 12811-15079;
(h) SEQ ID NOs: 15080-17174;
(i) SEQ ID NOs: 17175-19388;
(j) SEQ ID NOs: 19389-21003; or selected from
(k) SEQ ID NOs: 21004-22349.

191-205. (canceled)

206. A method for treating a subject with HIV, the method comprising administering to the subject the composition of claim 10.

207. A method for inducing an immune response in a subject, the method comprising administering to the subject the composition of claim 10.

208. The method of claim 131, wherein:
if the HIV of the subject is HIV subtype A1 then the MHC class I epitope comprises at least one MHC class I epitope sequence comprising at least one HIV epitope selected from the group consisting of the sequences shown in SEQ ID NOs: 325-2165, and optionally the HLA allele expressed by the subject is selected from the group consisting of HLA alleles in Table 35; or
if the HIV of the subject is HIV subtype A2 then the MHC class I epitope comprises at least one MHC class I epitope sequence comprising at least one HIV epitope selected from the group consisting of the sequences shown in SEQ ID NOs: 2166-4106, and optionally the HLA allele expressed by the subject is selected from the group consisting of HLA alleles in Table 36; or
if the HIV of the subject is HIV subtype B then the MHC class I epitope comprises at least one MHC class I epitope sequence comprising at least one HIV epitope selected from the group consisting of the sequences shown in SEQ ID NOs: 4107-6241, and optionally wherein the HLA allele expressed by the subject is selected from the group consisting of HLA alleles in Table 37; or
if the HIV of the subject is HIV subtype C then the MHC class I epitope comprises at least one MHC class I epitope sequence comprising at least one HIV epitope selected from the group consisting of the sequences shown in SEQ ID NOs: 6242-8389, and optionally wherein the HLA allele expressed by the subject is selected from the group consisting of HLA alleles in Table 38; or
if the HIV of the subject is HIV subtype D then the MHC class I epitope comprises at least one MHC class I epitope sequence comprising at least one HIV epitope selected from the group consisting of the sequences shown in SEQ ID NOs: 8930-10626, and optionally the HLA allele expressed by the subject is selected from the group consisting of HLA alleles in Table 39; or
if the HIV of the subject is HIV subtype F1 then the MHC class I epitope comprises at least one HIV epitope selected from the group consisting of the sequences shown in SEQ ID NOs: 10627-12810, and optionally the HLA allele expressed by the subject is selected from the group consisting of HLA alleles in Table 40; or
if the HIV of the subject is HIV subtype F2 then the MHC class I epitope comprises at least one HIV epitope selected from the group consisting of the sequences shown in SEQ ID NOs: 12811-15079, and optionally the HLA allele expressed by the subject is selected from the group consisting of HLA alleles in Table 41; or
if the HIV of the subject is HIV subtype G then the MHC class I epitope comprises at least one HIV epitope selected from the group consisting of the sequences shown in SEQ ID NOs: 15080-17174, and optionally wherein the HLA allele expressed by the subject is selected from the group consisting of HLA alleles in Table 42; or
if the HIV of the subject is HIV subtype H, then the MHC class I epitope comprises at least one MHC class I epitope sequence comprising at least one HIV epitope selected from the group consisting of the sequences shown in SEQ ID NOs: 17175-19388, and optionally wherein the HLA allele expressed by the subject is selected from the group consisting of HLA alleles in Table 43; or
if the HIV of the subject is HIV subtype J then the MHC class I epitope comprises at least one MHC class I epitope sequence comprising at least one HIV epitope selected from the group consisting of the sequences shown in SEQ ID NOs: 19389-21003, and optionally wherein the HLA allele expressed by the subject is selected from the group consisting of HLA alleles in Table 44; or
if the HIV of the subject is HIV subtype K then the MHC class I epitope comprises at least one MHC class I epitope sequence comprising at least one HIV epitope selected from the group consisting of the sequences shown in SEQ ID NOs: 21004-22349, and optionally wherein the HLA allele expressed by the subject is selected from the group consisting of HLA alleles in Table 45.

The application's sequence listing, which the Patent Office published only in electronic form, follows.

SEQUENCE LISTING (22349 sequences)

SEQ ID NO: 1 - DNA, 36519 bp, synthetic construct
  misc_feature 1..36519: note = Description of Artificial Sequence: Synthetic polynucleotide
  source 1..36519: mol_type = other DNA
ccatcttcaataatatacctcaaactttttgtgcgcgttaatatgcaaatgaggcgtttgaatttggggaggaagggcggtgattggtcgagggatgagcgaccgttaggggcggggcgagtgacgttttgatgacgtggttgcgaggaggagccagtttgcaagttctcgtgggaaaagtgacgtcaaacgaggtgtggtttgaacacggaaatactcaattttcccgcgctctctgacaggaaatgaggtgtttctgggcggatgcaagtgaaaacgggccattttcgcgcgaaaactgaatgaggaagtgaaaatctgagtaatttcgcgtttatggcagggaggagtatttgccgagggccgagtagactttgaccgattacgtgggggtttcgattaccgtgtttttcacctaaatttccgcgtacggtgtcaaagtccggtgtttttacgtaggtgtcagctgatcgccagggtatttaaacctgcgctctccagtcaagaggccactcttgagtgccagcgagaagagttttctcctccgcgccgcgagtcagatctacactttgaaagatgaggcacctgagagacctgcccgatgagaaaatcatcatcgcttccgggaacgagattctggaactggtggtaaatgccatgatgggcgacgaccctccggagccccccaccccatttgagacaccttcgctgcacgatttgtatgatctggaggtggatgtgcccgaggacgatcccaatgaggaggcggtaaatgatttttttagcgatgccgcgctgctagctgccgaggaggcttcgagctctagctcagacagcgactcttcactgcatacccctagacccggcagaggtgagaaaaagatccccgagcttaaaggggaagagatggacttgcgctgctatgaggaatgcttgcccccgagcgatgatgaggacgagcaggcgatccagaacgcagcgagccagggagtgcaagccgccagcgagagctttgcgctggactgcccgcctctgcccggacacggctgtaagtcttgtgaatttcatcgcatgaatactggagataaagctgtgttgtgtgcactttgctatatgagagcttacaaccattgtgtttacagtaagtgtgattaagttgaactttagagggaggcagagagcagggtgactgggcgatgactggtttatttatgtatatatgttctttatataggtcccgtctctgacgcagatgatgagacccccactacaaagtccacttcgtcacccccagaaattggcacatctccacctgagaatattgttagaccagttcctgttagagccactgggaggagagcagctgtggaatgtttggatgacttgctacagggtggggttgaacctttggacttgtgtacccggaaacgccccaggcactaagtgccacacatgtgtgtttacttgaggtgatgtcagtatttatagggtgtggagtgcaataaaaaatgtgttgactttaagtgcgtggtttatgactcaggggtggggactgtgagtatataagcaggtgcagacctgtgtggttagctcagagcggcatggagatttggacggtcttggaagactttcacaagactagacagctgctagagaacgcctcgaacggagtctcttacctgtggagattctgcttcggtggcgacctagctaggctagtctacagggccaaacaggattatagtgaacaatttgaggttattttgagagagtgttctggtctttttgacgctcttaacttgggccatcagtctcactttaaccagaggatttcgagagcccttgattttactactcctggcagaaccactgcagcagtagccttttttgcttttattcttgacaaatggagtcaagaaacccatttcagcagggattaccagctggatttcttagcagtagctttgtggagaacatggaagtgccagcgcctgaatgcaatctccggctacttgccggtacagccgctagacactctgaggatcctgaatctccaggagagtcccagggcacgccaacgtcgccagcagcagcagcaggaggaggatcaagaagagaacccgagagccggcctggaccctccggcggaggaggaggagtagctgacctgtttcctgaactgcgccgggtgctgactaggtcttcgagtggtcgggagagggggattaagcgggagaggcatgatgagactaatcacagaactgaactgactgtgggtctgatgagtcgcaagcgcccagaaacagtgtggtggcatgaggtgcagtcgactggcacagatgaggtgtcggtgatgcatgagaggttttctctagaacaagtcaagacttgttggttagagcctgaggatgattgggaggtagccatcaggaattatgccaagctggctctgaggccagacaagaagtacaagattactaagctgataaatatcagaaatgcctgctacatctcagggaatggggctgaagtggagatctgtctccaggaaagggtggctttcagatgctgcatgatgaatatgtacccgggagtggtgggcatggatggggttacctttatgaacatgaggttcaggggagatgggtataatggcacggtctttatggccaataccaagctgacagtccatggctgctccttctttgggtttaataacacctgcatcgaggcctggggtcaggtcggtgtgaggggctgcagtttttcagccaactggatgggggtcgtgggcaggaccaagagtatgctgtccgtgaagaaatgcttgtttgagaggtgccacctgggggtgatgagcgagggcgaagccagaatccgccactgcgcctctaccgagacgggctgctttgtgctgtgcaagggcaatgctaagatcaagcataatatgatctgtggagcctcggacgagcgcggctaccagatgctgacctgcgccggcgggaacagccatatgctggccaccgtacatgtggcttcccatgctcgcaagccctggcccgagttcgagcacaatgtcatgaccaggtgcaatatgcatctggggtcccgccgaggcatgttcatgccctaccagtgcaacctgaattatgtgaaggtgctgctggagcccgatgccatgtccagagtgagcctgacgggggtgtttgacatgaatgtggaggtgtggaagattctgagatatgatgaatccaagaccaggtgccgagcctgcgagtgcggagggaagcatgccaggttccagcccgtgtgtgtggatgtgacggaggacctgcgacccgatcatttggtgttgccctgcaccgggacggagttcggttccagcggggaagaatctgactagagtgagtagtgttctggggcgggggaggacctgcatgagggccagaataactgaaatctgtgcttttctgtgtgttgcagcagcatgagcggaagcggctcctttgagggaggggtattcagcccttatctgacggggcgtctcccctcctgggcgggagtgcgtcagaatgtgatgggatccacggtggacggccggcccgtgcagcccgcgaactcttcaaccctgacctatgcaaccctgagctcttcgtcgttggacgcagctgccgccgcagctgctgcatctgccgccagcgccgtgcgcggaatggccatgggcgccggctactacggcactctggtggccaactcgagttccaccaataatcccgccagcctgaacgaggagaagctgttgctgctgatggcccagctcgaggccttgacccagcgcctgggcgagctgacccagcaggtggctcagctgcaggagcagacgcgggccgcggttgccacggtgaaatccaaataaaaaatgaatcaataaataaacggagacggttgttgattttaacacagagtctgaatctttatttgatttttcgcgcgcggtaggccctggaccaccggtctcgatcattgagcacccggtggatcttttccaggacccggtagaggtgggcttggatgttgaggtacatgggcatgagcccgtcccgggggtggaggtagctccattgcagggcctcgtgctcgggggtggtgttgtaaatcacccagtcatagcaggggcgcagggcatggtgttgcacaatatctttgaggaggagactgatggccacgggcagccctttggtgtaggtgtttacaaatctgttgagctgggagggatgcatgcggggggagatgaggtgcatcttggcctggatcttgagattggcgatgttaccgcccagatcccgcctggggttcatgttgtgcaggaccaccagcacggtgtatccggtgcacttggggaatttatcatgcaacttggaagggaaggcgtgaaagaatttggcgacgcctttgtgcccgcccaggttttccatgcactcatccatgatgatggcgatgggcccgtgggcggcggcctgggcaaagacgtttcgggggtcggacacatcatagttgtggtcctgggtgaggtcatcataggccattttaatgaatttggggcggagggtgccggactgggggacaaaggtaccctcgatcccgggggcgtagttcccctcacagatctgcatctcccaggctttgagctcggagggggggatcatgtccacctgcggggcgataaagaacacggtttccggggcgggggagatgagctgggccgaaagcaagttccggagcagctgggacttgccgcagccggtggggccgtagatgaccccgatgaccggctgcaggtggtagttgagggagagacagctgccgtcctcccggaggaggggggccacctcgttcatcatctcgcgcacgtgcatgttctcgcgcaccagttccgccaggaggcgctctccccccagggataggagctcctggagcgaggcgaagtttttcagcggcttgagtccgtcggccatgggcattttggagagggtttgttgcaagagttccaggcggtcccagagctcggtgatgtgctctacggcatctcgatccagcagacctcctcgtttcgcgggttgggacggctgcgggagtagggcaccagacgatgggcgtccagcgcagccagggtccggtccttccagggtcgcagcgtccgcgtcagggtggtctccgtcacggtgaaggggtgcgcgccgggctgggcgcttgcgagggtgcgcttcaggctcatccggctggtcgaaaaccgctcccgatcggcgccctgcgcgtcggccaggtagcaattgaccatgagttcgtagttgagcgcctcggccgcgtggcctttggcgcggagcttacctttggaagtctgcccgcaggcgggacagaggagggacttgagggcgtagagcttgggggcgaggaagacggactcgggggcgtaggcgtccgcgccgcagtgggcgcagacggtctcgcactccacgagccaggtgaggtcgggctggtcggggtcaaaaaccagtttcccgccgttctttttgatgcgtttcttacctttggtctccatgagctcgtgtccccgctgggtgacaaagaggctgtccgtgtccccgtagaccgactttatgggccggtcctcgagcggtgtgccgcggtcctcctcgtagaggaaccccgcccactccgagacgaaagcccgggtccaggccagcacgaaggaggccacgtgggacgggtagcggtcgttgtccaccagcgggtccaccttttccagggtatgcaaacacatgtccccctcgtccacatccaggaaggtgattggcttgtaagtgtaggccacgtgaccgggggtcccggccgggggggtataaaagggtgcgggtccctgctcgtcctcactgtcttccggatcgctgtccaggagcgccagctgttggggtaggtattccctctcgaaggcgggcatgacctcggcactcaggttgtcagtttctagaaacgaggaggatttgatattgacggtgccggcggagatgcctttcaagagcccctcgtccatctggtcagaaaagacgatctttttgttgtcgagcttggtggcgaaggagccgtagagggcgttggagaggagcttggcgatggagcgcatggtctggtttttttccttgtcggcgcgctccttggcggcgatgttgagctgcacgtactcgcgcgccacgcacttccattcggggaagacggtggtcagctcgtcgggcacgattctgacctgccagccccgattatgcagggtgatgaggtccacactggtggccacctcgccgcgcaggggctcattagtccagcagaggcgtccgcccttgcgcgagcagaaggggggcagggggtccagcatgacctcgtcgggggggtcggcatcgatggtgaagatgccgggcaggaggtcggggtcaaagtagctgatggaagtggccagatcgtccagggcagcttgccattcgcgcacggccagcgcgcgctcgtagggactgaggggcgtgccccagggcatgggatgggtaagcgcggaggcgtacatgccgcagatgtcgtagacgtagaggggctcctcgaggatgccgatgtaggtggggtagcagcgccccccgcggatgctggcgcgcacgtagtcatacagctcgtgcgagggggcgaggagccccgggcccaggttggtgcgactgggcttttcggcgcggtagacgatctggcggaaaatggcatgcgagttggaggagatggtgggcctttggaagatgttgaagtgggcgtggggcagtccgaccgagtcgcggatgaagtgggcgtaggagtcttgcagcttggcgacgagctcggcggtgactaggacgtccagagcgcagtagtcgagggtctcctggatgatgtcatacttgagctgtcccttttgtttccacagctcgcggttgagaaggaactcttcgcggtccttccagtactcttcgagggggaacccgtcctgatctgcacggtaagagcctagcatgtagaactggttgacggccttgtaggcgcagcagcccttctccacggggagggcgtaggcctgggcggccttgcgcagggaggtgtgcgtgagggcgaaagtgtccctgaccatgaccttgaggaactggtgcttgaagtcgatatcgtcgcagcccccctgctcccagagctggaagtccgtgcgcttcttgtaggcggggttgggcaaagcgaaagtaacatcgttgaagaggatcttgcccgcgcggggcataaagttgcgagtgatgcggaaaggttggggcacctcggcccggttgttgatgacctgggcggcgagcacgatctcgtcgaagccgttgatgttgtggcccacgatgtagagttccacgaatcgcggacggcccttgacgtggggcagtttcttgagctcctcgtaggtgagctcgtcggggtcgctgagcccgtgctgctcgagcgcccagtcggcgagatgggggttggcgcggaggaaggaagtccagagatccacggccagggcggtttgcagacggtcccggtactgacggaactgctgcccgacggccattttttcgggggtgacgcagtagaaggtgcgggggtccccgtgccagcgatcccatttgagctggagggcgagatcgagggcgagctcgacgagccggtcgtccccggagagtttcatgaccagcatgaaggggacgagctgcttgccgaaggaccccatccaggtgtaggtttccacatcgtaggtgaggaagagcctttcggtgcgaggatgcgagccgatggggaagaactggatctcctgccaccaattggaggaatggctgttgatgtgatggaagtagaaatgccgacggcgcgccgaacactcgtgcttgtgtttatacaagcggccacagtgctcgcaacgctgcacgggatgcacgtgctgcacgagctgtacctgagttcctttgacgaggaatttcagtgggaagtggagtcgtggcgcctgcatctcgtgctgtactacgtcgtggtggtcggcctggccctcttctgcctcgatggtggtcatgctgacgagcccgcgcgggaggcaggtccagacctcggcgcgagcgggtcggagagcgaggacgagggcgcgcaggccggagctgtccagggtcctgagacgctgcggagtcaggtcagtgggcagcggcggcgcgcggttgacttgcaggagtttttccagggcgcgcgggaggtccagatggtacttgatctccaccgcgccattggtggcgacgtcgatggcttgcagggtcccgtgcccctggggtgtgaccaccgtcccccgtttcttcttgggcggctggggcgacgggggcggtgcctcttccatggttagaagcggcggcgaggacgcgcgccgggcggcaggggcggctcggggcccggaggcaggggcggcaggggcacgtcggcgccgcgcgcgggtaggttctggtactgcgcccggagaagactggcgtgagcgacgacgcgacggttgacgtcctggatctgacgcctctgggtgaaggccacgggacccgtgagtttgaacctgaaagagagttcgacagaatcaatctcggtatcgttgacggcggcctgccgcaggatctcttgcacgtcgcccgagttgtcctggtaggcgatctcggtcatgaactgctcgatctcctcctcttgaaggtctccgcggccggcgcgctccacggtggccgcgaggtcgttggagatgcggcccatgagctgcgagaaggcgttcatgcccgcctcgttccagacgcggctgtagaccacgacgccctcgggatcgcgggcgcgcatgaccacctgggcgaggttgagctccacgtggcgcgtgaagaccgcgtagttgcagaggcgctggtagaggtagttgagcgtggtggcgatgtgctcggtgacgaagaaatacatgatccagcggcggagcggcatctcgctgacgtcgcccagcgcctccaaacgttccatggcctcgtaaaagtccacggcgaagttgaaaaactgggagttgcgcgccgagacggtcaactcctcctccagaagacggatgagctcggcgatggtggcgcgcacctcgcgctcgaaggcccccgggagttcctccacttcctcttcttcctcctccactaacatctcttctacttcctcctcaggcggcagtggtggcgggggagggggcctgcgtcgccggcggcgcacgggcagacggtcgatgaagcgctcgatggtctcgccgcgccggcgtcgcatggtctcggtgacggcgcgcccgtcctcgcggggccgcagcgtgaagacgccgccgcgcatctccaggtggccgggggggtccccgttgggcagggagagggcgctgacgatgcatcttatcaattgccccgtagggactccgcgcaaggacctgagcgtctcgagatccacgggatctgaaaaccgctgaacgaaggcttcgagccagtcgcagtcgcaaggtaggctgagcacggtttcttctggcgggtcatgttggttgggagcggggcgggcgatgctgctggtgatgaagttgaaataggcggttctgagacggcggatggtggcgaggagcaccaggtctttgggcccggcttgctggatgcgcagacggtcggccatgccccaggcgtggtcctgacacctggccaggtccttgtagtagtcctgcatgagccgctccacgggcacctcctcctcgcccgcgcggccgtgcatgcgcgtgagcccgaagccgcgctggggctggacgagcgccaggtcggcgacgacgcgctcggcgaggatggcttgctggatctgggtgagggtggtctggaagtcatcaaagtcgacgaagcggtggtaggctccggtgttgatggtgtaggagcagttggccatgacggaccagttgacggtctggtggcccggacgcacgagctcgtggtacttgaggcgcgagtaggcgcgcgtgtcgaagatgtagtcgttgcaggtgcgcaccaggtactggtagccgatgaggaagtgcggcggcggctggcggtagagcggccatcgctcggtggcgggggcgccgggcgcgaggtcctcgagcatggtgcggtggtagccgtagatgtacctggacatccaggtgatgccggcggcggtggtggaggcgcgcgggaactcgcggacgcggttccagatgttgcgcagcggcaggaagtagttcatggtgggcacggtctggcccgtgaggcgcgcgcagtcgtggatgctctatacgggcaaaaacgaaagcggtcagcggctcgactccgtggcctggaggctaagcgaacgggttgggctgcgcgtgtaccccggttcgaatctcgaatcaggctggagccgcagctaacgtggtattggcactcccgtctcgacccaagcctgcaccaaccctccaggatacggaggcgggtcgttttgcaacttttttttggaggccggatgagactagtaagcgcggaaagcggccgaccgcgatggctcgctgccgtagtctggagaagaatcgccagggttgcgttgcggtgtgccccggttcgaggccggccggattccgcggctaacgagggcgtggctgccccgtcgtttccaagaccccatagccagccgacttctccagttacggagcgagcccctcttttgttttgtttgtttttgccagatgcatcccgtactgcggcagatgcgcccccaccaccctccaccgcaacaacagccccctccacagccggcgcttctgcccccgccccagcagcaacttccagccacgaccgccgcggccgccgtgagcggggctggacagagttatgatcaccagctggccttggaagagggcgaggggctggcgcgcctgggggcgtcgtcgccggagcggcacccgcgcgtgcagatgaaaagggacgctcgcgaggcctacgtgcccaagcagaacctgttcagagacaggagcggcgaggagcccgaggagatgcgcgcggcccggttccacgcggggcgggagctgcggcgcggcctggaccgaaagagggtgctgagggacgaggatttcgaggcggacgagctgacggggatcagccccgcgcgcgcgcacgtggccgcggccaacctggtcacggcgtacgagcagaccgtgaaggaggagagcaacttccaaaaatccttcaacaaccacgtgcgcaccctgatcgcgcgcgaggaggtgaccctgggcctgatgcacctgtgggacctgctggaggccatcgtgcagaaccccaccagcaagccgctgacggcgcagctgttcctggtggtgcagcatagtcgggacaacgaagcgttcagggaggcgctgctgaatatcaccgagcccgagggccgctggctcctggacctggtgaacattctgcagagcatcgtggtgcaggagcgcgggctgccgctgtccgagaagctggcggccatcaacttctcggtgctgagtttgggcaagtactacgctaggaagatctacaagaccccgtacgtgcccatagacaaggaggtgaagatcgacgggttttacatgcgcatgaccctgaaagtgctgaccctgagcgacgatctgggggtgtaccgcaacgacaggatgcaccgtgcggtgagcgccagcaggcggcgcgagctgagcgaccaggagctgatgcatagtctgcagcgggccctgaccggggccgggaccgagggggagagctactttgacatgggcgcggacctgcactggcagcccagccgccgggccttggaggcggcggcaggaccctacgtagaagaggtggacgatgaggtggacgaggagggcgagtacctggaagactgatggcgcgaccgtatttttgctagatgcaacaacaacagccacctcctgatcccgcgatgcgggcggcgctgcagagccagccgtccggcattaactcctcggacgattggacccaggccatgcaacgcatcatggcgctgacgacccgcaaccccgaagcctttagacagcagccccaggccaaccggctctcggccatcctggaggccgtggtgccctcgcgctccaaccccacgcacgagaaggtcctggccatcgtgaacgcgctggtggagaacaaggccatccgcggcgacgaggccggcctggtgtacaacgcgctgctggagcgcgtggcccgctacaacagcaccaacgtgcagaccaacctggaccgcatggtgaccgacgtgcgcgaggccgtggcccagcgcgagcggttccaccgcgagtccaacctgggatccatggtggcgctgaacgccttcctcagcacccagcccgccaacgtgccccggggccaggaggactacaccaacttcatcagcgccctgcgcctgatggtgaccgaggtgccccagagcgaggtgtaccagtccgggccggactacttcttccagaccagtcgccagggcttgcagaccgtgaacctgagccaggctttcaagaacttgcagggcctgtggggcgtgcaggccccggtcggggaccgcgcgacggtgtcgagcctgctgacgccgaactcgcgcctgctgctgctgctggtggcccccttcacggacagcggcagcatcaaccgcaactcgtacctgggctacctgattaacctgtaccgcgaggccatcggccaggcgcacgtggacgagcagacctaccaggagatcacccacgtgagccgcgccctgggccaggacgacccgggcaacctggaagccaccctgaactttttgctgaccaaccggtcgcagaagatcccgccccagtacgcgctcagcaccgaggaggagcgcatcctgcgttacgtgcagcagagcgtgggcctgttcctgatgcaggagggggccacccccagcgccgcgctcgacatgaccgcgcgcaacatggagcccagcatgtacgccagcaaccgcccgttcatcaataaactgatggactacttgcatcgggcggccgccatgaactctgactatttcaccaacgccatcctgaatccccactggctcccgccgccggggttctacacgggcgagtacgacatgcccgaccccaatgacgggttcctgtgggacgatgtggacagcagcgtgttctccccccgaccgggtgctaacgagcgccccttgtggaagaaggaaggcagcgaccgacgcccgtcctcggcgctgtccggccgcgagggtgctgccgcggcggtgcccgaggccgccagtcctttcccgagcttgcccttctcgctgaacagtatccgcagcagcgagctgggcaggatcacgcgcccgcgcttgctgggcgaagaggagtacttgaatgactcgctgttgagacccgagcgggagaagaacttccccaataacgggatagaaagcctggtggacaagatgagccgctggaagacgtatgcgcaggagcacagggacgatccccgggcgtcgcagggggccacgagccggggcagcgccgcccgtaaacgccggtggcacgacaggcagcggggacagatgtgggacgatgaggactccgccgacgacagcagcgtgttggacttgggtgggagtggtaacccgttcgctcacctgcgcccccgtatcgggcgcatgatgtaagagaaaccgaaaataaatgatactcaccaaggccatggcgaccagcgtgcgttcgtttcttctctgttgttgttgtatctagtatgatgaggcgtgcgtacccggagggtcctcctccctcgtacgagagcgtgatgcagcaggcgatggcggcggcggcgatgcagcccccgctggaggctccttacgtgcccccgcggtacctggcgcctacggaggggcggaacagcattcgttactcggagctggcacccttgtacgataccacccggttgtacctggtggacaacaagtcggcggacatcgcctcgctgaactaccagaacgaccacagcaacttcctgaccaccgtggtgcagaacaatgacttcacccccacggaggccagcacccagaccatcaactttgacgagcgctcgcggtggggcggccagctgaaaaccatcatgcacaccaacatgcccaacgtgaacgagttcatgtacagcaacaagttcaaggcgcgggtgatggtctcccgcaagacccccaatggggtgacagtgacagaggattatgatggtagtcaggatgagctgaagtatgaatgggtggaatttgagctgcccgaaggcaacttctcggtgaccatgaccatcgacctgatgaacaacgccatcatcgacaattacttggcggtggggcggcagaacggggtgctggagagcgacatcggcgtgaagttcgacactaggaacttcaggctgggctgggaccccgtgaccgagctggtcatgcccggggtgtacaccaacgaggctttccatcccgatattgtcttgctgcccggctgcggggtggacttcaccgagagccgcctcagcaacctgctgggcattcgcaagaggcagcccttccaggaaggcttccagatcatgtacgaggatctggaggggggcaacatccccgcgctcctggatgtcgacgcctatgagaaaagcaaggaggatgcagcagctgaagcaactgcagccgtagctaccgcctctaccgaggtcaggggcgataattttgcaagcgccgcagcagtggcagcggccgaggcggctgaaaccgaaagtaagatagtcattcagccggtggagaaggatagcaagaacaggagctacaacgtactaccggacaagataaacaccgcctaccgcagctggtacctagcctacaactatggcgaccccgagaagggcgtgcgctcctggacgctgctcaccacctcggacgtcacctgcggcgtggagcaagtctactggtcgctgcccgacatgatgcaagacccggtcaccttccgctccacgcgtcaagttagcaactacccggtggtgggcgccgagctcctgcccgtctactccaagagcttcttcaacgagcaggccgtctactcgcagcagctgcgcgccttcacctcgcttacgcacgtcttcaaccgcttccccgagaaccagatcctcgtccgcccgcccgcgcccaccattaccaccgtcagtgaaaacgttcctgctctcacagatcacgggaccctgccgctgcgcagcagtatccggggagtccagcgcgtgaccgttactgacgccagacgccgcacctgcccctacgtctacaaggccctgggcatagtcgcgccgcgcgtcctctcgagccgcaccttctaaatgtccattctcatctcgcccagtaataacaccggttggggcctgcgcgcgcccagcaagatgtacggaggcgctcgccaacgctccacgcaacaccccgtgcgcgtgcgcgggcacttccgcgctccctggggcgccctcaagggccgcgtgcggtcgcgcaccaccgtcgacgacgtgatcgaccaggtggtggccgacgcgcgcaactacacccccgccgccgcgcccgtctccaccgtggacgccgtcatcgacagcgtggtggccgacgcgcgccggtacgcccgcgccaagagccggcggcggcgcatcgcccggcggcaccggagcacccccgccatgcgcgcggcgcgagccttgctgcgcagggccaggcgcacgggacgcagggccatgctcagggcggccagacgcgcggcttcaggcgccagcgccggcaggacccggagacgcgcggccacggcggcggcagcggccatcgccagcatgtcccgcccgcggcgagggaacgtgtactgggtgcgcgacgccgccaccggtgtgcgcgtgcccgtgcgcacccgcccccctcgcacttgaagatgttcacttcgcgatgttgatgtgtcccagcggcgaggaggatgtccaagcgcaaattcaaggaagagatgctccaggtcatcgcgcctgagatctacggccctgcggtggtgaaggaggaaagaaagccccgcaaaatcaagcgggtcaaaaaggacaaaaaggaagaagaaagtgatgtggacggattggtggagtttgtgcgcgagttcgccccccggcggcgcgtgcagtggcgcgggcggaaggtgcaaccggtgctgagacccggcaccaccgtggtcttcacgcccggcgagcgctccggcaccgcttccaagcgctcctacgacgaggtgtacggggatgatgatattctggagcaggcggccgagcgcctgggcgagtttgcttacggcaagcgcagccgttccgcaccgaaggaagaggcggtgtccatcccgctggaccacggcaaccccacgccgagcctcaagcccgtgaccttgcagcaggtgctgccgaccgcggcgccgcgccgggggttcaagcgcgagggcgaggatctgtaccccaccatgcagctgatggtgcccaagcgccagaagctggaagacgtgctggagaccatgaaggtggacccggacgtgcagcccgaggtcaaggtgcggcccatcaagcaggtggccccgggcctgggcgtgcagaccgtggacatcaagattcccacggagcccatggaaacgcagaccgagcccatgatcaagcccagcaccagcaccatggaggtgcagacggatccctggatgccatcggctcctagtcgaagaccccggcgcaagtacggcgcggccagcctgctgatgcccaactacgcgctgcatccttccatcatccccacgccgggctaccgcggcacgcgcttctaccgcggtcataccagcagccgccgccgcaagaccaccactcgccgccgccgtcgccgcaccgccgctgcaaccacccctgccgccctggtgcggagagtgtaccgccgcggccgcgcacctctgaccctgccgcgcgcgcgctaccacccgagcatcgccatttaaactttcgcctgctttgcagatcaatggccctcacatgccgccttcgcgttcccattacgggctaccgaggaagaaaaccgcgccgtagaaggctggcggggaacgggatgcgtcgccaccaccaccggcggcggcgcgccatcagcaagcggttggggggaggcttcctgcccgcgctgatccccatcatcgccgcggcgatcggggcgatccccggcattgcttccgtggcggtgcaggcctctcagcgccactgagacacacttggaaacatcttgtaataaaccaatggactctgacgctcctggtcctgtgatgtgttttcgtagacagatggaagacatcaatttttcgtccctggctccgcgacacggcacgcggccgttcatgggcacctggagcgacatcggcaccagccaactgaacgggggcgccttcaattggagcagtctctggagcgggcttaagaatttcgggtccacgcttaaaacctatggcagcaaggcgtggaacagcaccacagggcaggcgctgagggataagctgaaagagcagaacttccagcagaaggtggtcgatgggctcgcctcgggcatcaacggggtggtggacctggccaaccaggccgtgcagcggcagatcaacagccgcctggacccggtgccgcccgccggctccgtggagatgccgcaggtggaggaggagctgcctcccctggacaagcggggcgagaagcgaccccgccccgatgcggaggagacgctgctgacgcacacggacgagccgcccccgtacgaggaggcggtgaaactgggtctgcccaccacgcggcccatcgcgcccctggccaccggggtgctgaaacccgaaaagcccgcgaccctggacttgcctcctccccagccttcccgcccctctacagtggctaagcccctgccgccggtggccgtggcccgcgcgcgacccgggggcaccgcccgccctcatgcgaactggcagagcactctgaacagcatcgtgggtctgggagtgcagagtgtgaagcgccgccgctgctattaaacctaccgtagcgcttaacttgcttgtctgtgtgtgtatgtattatgtcgccgccgccgctgtccaccagaaggaggagtgaagaggcgcgtcgccgagttgcaagatggccaccccatcgatgctgccccagtgggcgtacatgcacatcgccggacaggacgcttcggagtacctgagtccgggtctggtgcagtttgcccgcgccacagacacctacttcagtctggggaacaagtttaggaaccccacggtggcgcccacgcacgatgtgaccaccgaccgcagccagcggctgacgctgcgcttcgtgcccgtggaccgcgaggacaacacctactcgtacaaagtgcgctacacgctggccgtgggcgacaaccgcgtgctggacatggccagcacctactttgacatccgcggcgtgctggatcggggccctagcttcaaaccctactccggcaccgcctacaacagtctggcccccaagggagcacccaacacttgtcagtggacatataaagccgatggtgaaactgccacagaaaaaacctatacatatggaaatgcacccgtgcagggcattaacatcacaaaagatggtattcaacttggaactgacaccgatgatcagccaatctacgcagataaaacctatcagcctgaacctcaagtgggtgatgctgaatggcatgacatcactggtactgatgaaaagtatggaggcagagctcttaagcctgataccaaaatgaagccttgttatggttcttttgccaagcctactaataaagaaggaggtcaggcaaatgtgaaaacaggaacaggcactactaaagaatatgacatagacatggctttctttgacaacagaagtgcggctgctgctggcctagctccagaaattgttttgtatactgaaaatgtggatttggaaactccagatacccatattgtatacaaagcaggcacagatgacagcagctcttctattaatttgggtcagcaagccatgcccaacagacctaactacattggtttcagagacaactttatcgggctcatgtactacaacagcactggcaatatgggggtgctggccggtcaggcttctcagctgaatgctgtggttgacttgcaagacagaaacaccgagctgtcctaccagctcttgcttgactctctgggtgacagaacccggtatttcagtatgtggaatcaggcggtggacagctatgatcctgatgtgcgcattattgaaaatcatggtgtggaggatgaacttcccaactattgtttccctctggatgctgttggcagaacagatacttatcagggaattaaggctaatggaactgatcaaaccacatggaccaaagatgacagtgtcaatgatgctaatgagataggcaagggtaatccattcgccatggaaatcaacatccaagccaacctgtggaggaacttcctctacgccaacgtggccctgtacctgcccgactcttacaagtacacgccggccaatgttaccctgcccaccaacaccaacacctacgattacatgaacggccgggtggtggcgccctcgctggtggactcctacatcaacatcggggcgcgctggtcgctggatcccatggacaacgtgaaccccttcaaccaccaccgcaatgcggggctgcgctaccgctccatgctcctgggcaacgggcgctacgtgcccttccacatccaggtgccccagaaatttttcgccatcaagagcctcctgctcctgcccgggtcctacacctacgagtggaacttccgcaaggacgtcaacatgatcctgcagagctccctcggcaacgacctgcgcacggacggggcctccatctccttcaccagcatcaacctctacgccaccttcttccccatggcgcacaacacggcctccacgctcgaggccatgctgcgcaacgacaccaacgaccagtccttcaacgactacctctcggcggccaacatgctctaccccatcccggccaacgccaccaacgtgcccatctccatcccctcgcgcaactgggccgccttccgcggctggtccttcacgcgtctcaagaccaaggagacgccctcgctgggctccgggttcgacccctacttcgtctactcgggctccatcccctacctcgacggcaccttctacctcaaccacaccttcaagaaggtctccatcaccttcgactcctccgtcagctggcccggcaacgaccggctcctgacgcccaacgagttcgaaatcaagcgcaccgtcgacggcgagggctacaacgtggcccagtgcaacatgaccaaggactggttcctggtccagatgctggcccactacaacatcggctaccagggcttctacgtgcccgagggctacaaggaccgcatgtactccttcttccgcaacttccagcccatgagccgccaggtggtggacgaggtcaactacaaggactaccaggccgtcaccctggcctaccagcacaacaactcgggcttcgtcggctacctcgcgcccaccatgcgccagggccagccctaccccgccaactacccctacccgctcatcggcaagagcgccgtcaccagcgtcacccagaaaaagttcctctgcgacagggtcatgtggcgcatccccttctccagcaacttcatgtccatgggcgcgctcaccgacctcggccagaacatgctctatgccaactccgcccacgcgctagacatgaatttcgaagtcgaccccatggatgagtccacccttctctatgttgtcttcgaagtcttcgacgtcgtccgagtgcaccagccccaccgcggcgtcatcgaggccgtctacctgcgcacccccttctcggccggtaacgccaccacctaagctcttgcttcttgcaagccatggccgcgggctccggcgagcaggagctcagggccatcatccgcgacctgggctgcgggccctacttcctgggcaccttcgataagcgcttcccgggattcatggccccgcacaagctggcctgcgccatcgtcaacacggccggccgcgagaccgggggcgagcactggctggccttcgcctggaacccgcgctcgaacacctgctacctcttcgaccccttcgggttctcggacgagcgcctcaagcagatctaccagttcgagtacgagggcctgctgcgccgcagcgccctggccaccgaggaccgctgcgtcaccctggaaaagtccacccagaccgtgcagggtccgcgctcggccgcctgcgggctcttctgctgcatgttcctgcacgccttcgtgcactggcccgaccgccccatggacaagaaccccaccatgaacttgctgacgggggtgcccaacggcatgctccagtcgccccaggtggaacccaccctgcgccgcaaccaggaggcgctctaccgcttcctcaactcccactccgcctactttcgctcccaccgcgcgcgcatcgagaaggccaccgccttcgaccgcatgaatcaagacatgtaaaccgtgtgtgtatgttaaatgtctttaataaacagcactttcatgttacacatgcatctgagatgatttatttagaaatcgaaagggttctgccgggtctcggcatggcccgcgggcagggacacgttgcggaactggtacttggccagccacttgaactcggggatcagcagtttgggcagcggggtgtcggggaaggagtcggtccacagcttccgcgtcagttgcagggcgcccagcaggtcgggcgcggagatcttgaaatcgcagttgggacccgcgttctgcgcgcgggagttgcggtacacggggttgcagcactggaacaccatcagggccgggtgcttcacgctcgccagcaccgtcgcgtcggtgatgctctccacgtcgaggtcctcggcgttggccatcccgaagggggtcatcttgcaggtctgccttcccatggtgggcacgcacccgggcttgtggttgcaatcgcagtgcagggggatcagcatcatctgggcctggtcggcgttcatccccgggtacatggccttcatgaaagcctccaattgcctgaacgcctgctgggccttggctccctcggtgaagaagaccccgcaggacttgctagagaactggttggtggcgcacccggcgtcgtgcacgcagcagcgcgcgtcgttgttggccagctgcaccacgctgcgcccccagcggttctgggtgatcttggcccggtcggggttctccttcagcgcgcgctgcccgttctcgctcgccacatccatctcgatcatgtgctccttctggatcatggtggtcccgtgcaggcaccgcagcttgccctcggcctcggtgcacccgtgcagccacagcgcgcacccggtgcactcccagttcttgtgggcgatctgggaatgcgcgtgcacgaagccctgcaggaagcggcccatcatggtggtcagggtcttgttgctagtgaaggtcagcggaatgccgcggtgctcctcgttgatgtacaggtggcagatgcggcggtacacctcgccctgctcgggcatcagctggaagttggctttcaggtcggtctccacgcggtagcggtccatcagcatagtcatgatttccatacccttctcccaggccgagacgatgggcaggctcatagggttcttcaccatcatcttagcgctagcagccgcggccagggggtcgctctcgtccagggtctcaaagctccgcttgccgtccttctcggtgatccgcaccggggggtagctgaagcccacggccgccagctcctcctcggcctgtctttcgtcctcgctgtcctggctgacgtcctgcaggaccacatgcttggtcttgcggggtttcttcttgggcggcagcggcggcggagatgttggagatggcgagggggagcgcgagttctcgctcaccactactatctcttcctcttcttggtccgaggccacgcggcggtaggtatgtctcttcgggggcagaggcggaggcgacgggctctcgccgccgcgacttggcggatggctggcagagccccttccgcgttcgggggtgcgctcccggcggcgctctgactgacttcctccgcggccggccattgtgttctcctagggaggaacaacaagcatggagactcagccatcgccaacctcgccatctgcccccaccgccgacgagaagcagcagcagcagaatgaaagcttaaccgccccgccgcccagccccgccacctccgacgcggccgtcccagacatgcaagagatggaggaatccatcgagattgacctgggctatgtgacgcccgcggagcacgaggaggagctggcagtgcgcttttcacaagaagagatacaccaagaacagccagagcaggaagcagagaatgagcagagtcaggctgggctcgagcatgacggcgactacctccacctgagcgggggggaggacgcgctcatcaagcatctggcccggcaggccaccatcgtcaaggatgcgctgctcgaccgcaccgaggtgcccctcagcgtggaggagctcagccgcgcctacgagttgaacctcttctcgccgcgcgtgccccccaagcgccagcccaatggcacctgcgagcccaacccgcgcctcaacttctacccggtcttcgcggtgcccgaggccctggccacctaccacatctttttcaagaaccaaaagatccccgtctcctgccgcgccaaccgcacccgcgccgacgcccttttcaacctgggtcccggcgcccgcctacctgatatcgcctccttggaagaggttcccaagatcttcgagggtctgggcagcgacgagactcgggccgcgaacgctctgcaaggagaaggaggagagcatgagcaccacagcgccctggtcgagttggaaggcgacaacgcgcggctggcggtgctcaaacgcacggtcgagctgacccatttcgcctacccggctctgaacctgccccccaaagtcatgagcgcggtcatggaccaggtgctcatcaagcgcgcgtcgcccatctccgaggacgagggcatgcaagactccgaggagggcaagcccgtggtcagcgacgagcagctggcccggtggctgggtcctaatgctagtccccagagtttggaagagcggcgcaaactcatgatggccgtggtcctggtgaccgtggagctggagtgcctgcgccgcttcttcgccgacgcggagaccctgcgcaaggtcgaggagaacctgcactacctcttcaggcacgggttcgtgcgccaggcctgcaagatctccaacgtggagctgaccaacctggtctcctacatgggcatcttgcacgagaaccgcctggggcagaacgtgctgcacaccaccctgcgcggggaggcccggcgcgactacatccgcgactgcgtctacctctacctctgccacacctggcagacgggcatgggcgtgtggcagcagtgtctggaggagcagaacctgaaagagctctgcaagctcctgcagaagaacctcaagggtctgtggaccgggttcgacgagcgcaccaccgcctcggacctggccgacctcattttccccgagcgcctcaggctgacgctgcgcaacggcctgcccgactttatgagccaaagcatgttgcaaaactttcgctctttcatcctcgaacgctccggaatcctgcccgccacctgctccgcgctgccctcggacttcgtgccgctgaccttccgcgagtgccccccgccgctgtggagccactgctacctgctgcgcctggccaactacctggcctaccactcggacgtgatcgaggacgtcagcggcgagggcctgctcgagtgccactgccgctgcaacctctgcacgccgcaccgctccctggcctgcaacccccagctgctgagcgagacccagatcatcggcaccttcgagttgcaagggcccagcgaaggcgagggttcagccgccaaggggggtctgaaactcaccccggggctgtggacctcggcctacttgcgcaagttcgtgcccgaggactaccatcccttcgagatcaggttctacgaggaccaatcccatccgcccaaggccgagctgtcggcctgcgtcatcacccagggggcgatcctggcccaattgcaagccatccagaaatcccgccaagaattcttgctgaaaaagggccgcggggtctacctcgacccccagaccggtgaggagctcaaccccggcttcccccaggatgccccgaggaaacaagaagctgaaagtggagctgccgcccgtggaggatttggaggaagactgggagaacagcagtcaggcagaggaggaggagatggaggaagactgggacagcactcaggcagaggaggacagcctgcaagacagtctggaggaagacgaggaggaggcagaggaggaggtggaagaagcagccgccgccagaccgtcgtcctcggcgggggagaaagcaagcagcacggataccatctccgctccgggtcggggtcccgctcgaccacacagtagatgggacgagaccggacgattcccgaaccccaccacccagaccggtaagaaggagcggcagggatacaagtcctggcgggggcacaaaaacgccatcgtctcctgcttgcaggcctgcgggggcaacatctccttcacccggcgctacctgctcttccaccgcggggtgaactttccccgcaacatcttgcattactaccgtcacctccacagcccctactacttccaagaagaggcagcagcagcagaaaaagaccagcagaaaaccagcagctagaaaatccacagcggcggcagcaggtggactgaggatcgcggcgaacgagccggcgcaaacccgggagctgaggaaccggatctttcccaccctctatgccatcttccagcagagtcgggggcaggagcaggaactgaaagtcaagaaccgttctctgcgctcgctcacccgcagttgtctgtatcacaagagcgaagaccaacttcagcgcactctcgaggacgccgaggctctcttcaacaagtactgcgcgctcactcttaaagagtagcccgcgcccgcccagtcgcagaaaaaggcgggaattacgtcacctgtgcccttcgccctagccgcctccacccatcatcatgagcaaagagattcccacgccttacatgtggagctaccagccccagatgggcctggccgccggtgccgcccaggactactccacccgcatgaattggctcagcgccgggcccgcgatgatctcacgggtgaatgacatccgcgcccaccgaaaccagatactcctagaacagtcagcgctcaccgccacgccccgcaatcacctcaatccgcgtaattggcccgccgccctggtgtaccaggaaattccccagcccacgaccgtactacttccgcgagacgcccaggccgaagtccagctgactaactcaggtgtccagctggcgggcggcgccaccctgtgtcgtcaccgccccgctcagggtataaagcggctggtgatccggggcagaggcacacagctcaacgacgaggtggtgagctcttcgctgggtctgcgacctgacggagtcttccaactcgccggatcggggagatcttccttcacgcctcgtcaggccgtcctgactttggagagttcgtcctcgcagccccgctcgggtggcatcggcactctccagttcgtggaggagttcactccctcggtctacttcaaccccttctccggctcccccggccactacccggacgagttcatcccgaacttcgacgccatcagcgagtcggtggacggctacgattgaatgtcccatggtggcgcagctgacctagctcggcttcgacacctggaccactgccgccgcttccgctgcttcgctcgggatctcgccgagtttgcctactttgagctgcccgaggagcaccctcagggcccggcccacggagtgcggatcgtcgtcgaagggggcctcgactcccacctgcttcggatcttcagccagcgtccgatcctggtcgagcgcgagcaaggacagacccttctgactctgtactgcatctgcaaccaccccggcctgcatgaaagtctttgttgtctgctgtgtactgagtataataaaagctgagatcagcgactactccggacttccgtgtgttcctgaatccatcaaccagtctttgttcttcaccgggaacgagaccgagctccagctccagtgtaagccccacaagaagtacctcacctggctgttccagggctccccgatcgccgttgtcaaccactgcgacaacgacggagtcctgctgagcggccctgccaaccttactttttccacccgcagaagcaagctccagctcttccaacccttcctccccgggacctatcagtgcgtctcgggaccctgccatcacaccttccacctgatcccgaataccacagcgtcgctccccgctactaacaaccaaactaacctccaccaacgccaccgtcgcgacctttctgaatctaatactaccacccacaccggaggtgagctccgaggtcaaccaacctctgggatttactacggcccctgggaggtggttgggttaatagcgctaggcctagttgcgggtgggcttttggttctctgctacctatacctcccttgctgttcgtacttagtggtgctgtgttgctggtttaagaaatggggaagatcaccctagtgagctgcggtgcgctggtggcggtgttgctttcgattgtgggactgggcggtgcggctgtagtgaaggagaaggccgatccctgcttgcatttcaatcccaacaaatgccagctgagttttcagcccgatggcaatcggtgcgcggtactgatcaagtgcggatgggaatgcgagaacgtgagaatcgagtacaataacaagactcggaacaatactctcgcgtccgtgtggcagcccggggaccccgagtggtacaccgtctctgtccccggtgctgacggctccccgcgcaccgtgaataatactttcatttttgcgcacatgtgcgacacggtcatgtggatgagcaagcagtacgatatgtggccccccacgaaggagaacatcgtggtcttctccatcgcttacagcctgtgcacggcgctaatcaccgctatcgtgtgcctgagcattcacatgctcatcgctattcgccccagaaataatgccgaaaaagaaaaacagccataacgttttttttcacacctttttcagaccatggcctctgttaaatttttgcttttatttgccagtctcattgccgtcattcatggaatgagtaatgagaaaattactatttacactggcactaatcacacattgaaaggtccagaaaaagccacagaagtttcatggtattgttattttaatgaatcagatgtatctactgaactctgtggaaacaataacaaaaaaaatgagagcattactctcatcaagtttcaatgtggatctgacttaaccctaattaacatcactagagactatgtaggtatgtattatggaactacagcaggcatttcggacatggaattttatcaagtttctgtgtctgaacccaccacgcctagaatgaccacaaccacaaaaactacacctgttaccactatgcagctcactaccaataacatttttgccatgcgtcaaatggtcaacaatagcactcaacccaccccacccagtgaggaaattcccaaatccatgattggcattattgttgctgtagtggtgtgcatgttgatcatcgccttgtgcatggtgtactatgccttctgctacagaaagcacagactgaacgacaagctggaacacttactaagtgttgaattttaattttttagaaccatgaagatcctaggccttttaattttttctatcattacctctgctctatgcaattctgacaatgaggacgttactgtcgttgtcggatcaaattatacactgaaaggtccagcgaagggtatgctttcgtggtattgctattttggatctgacactacagaaactgaattatgcaatcttaagaatggcaaaattcaaaattctaaaattaacaattatatatgcaatggtactgatctgatactcctcaatatcacgaaatcatatgctggcagttacacctgccctggagatgatgctgacagtatgattttttacaaagtaactgttgttgatcccactactccacctccacccaccacaactactcacaccacacacacagatcaaaccgcagcagaggaggcagcaaagttagccttgcaggtccaagacagttcatttgttggcattacccctacacctgatcagcggtgtccggggctgctagtcagcggcattgtcggtgtgctttcgggattagcagtcataatcatctgcatgttcatttttgcttgctgctatagaaggctttaccgacaaaaatcagacccactgctgaacctctatgtttaattttttccagagtcatgaaggcagttagcgctctagttttttgttctttgattggcattgttttttgcaatcctattcctaaagttagctttattaaagatgtgaatgttactgaggggggcaatgtgacactggtaggtgtagagggtgctgaaaacaccacctggacaaaataccacctcaatgggtggaaagatatttgcaattggagtgtattagtttatacatgtgagggagttaatcttaccattgtcaatgccacctcagctcaaaatggtagaattcaaggacaaagtgtcagtgtatctaatgggtattttacccaacatacttttatctatgacgttaaagtcataccactgcctacgcctagcccacctagcactaccacacagacaacccacactacacagacaaccacatacagtacattaaatcagcctaccaccactacagcagcagaggttgccagctcgtctggggtccgagtggcatttttgatgtgggccccatctagcagtcccactgctagtaccaatgagcagactactgaatttttgtccactgtcgagagccacaccacagctacctccagtgccttctctagcaccgccaatctctcctcgctttcctctacaccaatcagtcccgctactactcctagccccgctcctcttcccactcccctgaagcaaacagacggcggcatgcaatggcagatcaccctgctcattgtgatcgggttggtcatcctggccgtgttgctctactacatcttctgccgccgcattcccaacgcgcaccgcaagccggtctacaagcccatcattgtcgggcagccggagccgcttcaggtggaagggggtctaaggaatcttctcttctcttttacagtatggtgattgaactatgattcctagacaattcttgatcactattcttatctgcctcctccaagtctgtgccaccctcgctctggtggccaacgccagtccagactgtattgggcccttcgcctcctacgtgctctttgccttcaccacctgcatctgctgctgtagcatagtctgcctgcttatcaccttcttccagttcattgactggatctttgtgcgcatcgcctacctgcgccaccacccccagtaccgcgaccagcgagtggcgcggctgctcaggctcctctgataagcatgcgggctctgctacttctcgcgcttctgctgttagtgctcccccgtcccgtcgacccccggtcccccacccagtcccccgaggaggtccgcaaatgcaaattccaagaaccctggaaattcctcaaatgctaccgccaaaaatcagacatgcatcccagctggatcatgatcattgggatcgtgaacattctggcctgcaccctcatctcctttgtgatttacccctgctttgactttggttggaactcgccagaggcgctctatctcccgcctgaacctgacacaccaccacagcaacctcaggcacacgcactaccaccactacagcctaggccacaatacatgcccatattagactatgaggccgagccacagcgacccatgctccccgctattagttacttcaatctaaccggcggagatgactgacccactggccaacaacaacgtcaacgaccttctcctggacatggacggccgcgcctcggagcagcgactcgcccaacttcgcattcgccagcagcaggagagagccgtcaaggagctgcaggatgcggtggccatccaccagtgcaagagaggcatcttctgcctggtgaaacaggccaagatctcctacgaggtcactccaaacgaccatcgcctctcctacgagctcctgcagcagcgccagaagttcacctgcctggtcggagtcaaccccatcgtcatcacccagcagtctggcgataccaaggggtgcatccactgctcctgcgactcccccgactgcgtccacactctgatcaagaccctctgcggcctccgcgacctcctccccatgaactaatcacccccttatccagtgaaataaagatcatattgatgatgattttacagaaataaaaaataatcatttgatttgaaataaagatacaatcatattgatgatttgagtttaacaaaaaaataaagaatcacttacttgaaatctgataccaggtctctgtccatgttttctgccaacaccacttcactcccctcttcccagctctggtactgcaggccccggcgggctgcaaacttcctccacacgctgaaggggatgtcaaattcctcctgtccctcaatcttcattttatcttctatcagatgtccaaaaagcgcgtccgggtggatgatgacttcgaccccgtctacccctacgatgcagacaacgcaccgaccgtgcccttcatcaacccccccttcgtctcttcagatggattccaagagaagcccctgggggtgttgtccctgcgactggccgaccccgtcaccaccaagaacggggaaatcaccctcaagctgggagagggggtggacctcgattcctcgggaaaactcatctccaacacggccaccaaggccgccgcccctctcagtttttccaacaacaccatttcccttaacatggatcaccccttttacactaaagatggaaaattatccttacaagtttctccaccattaaatatactgagaacaagcattctaaacacactagctttaggttttggatcaggtttaggactccgtggctctgccttggcagtacagttagtctctccacttacatttgatactgatggaaacataaagcttaccttagacagaggtttgcatgttacaacaggagatgcaattgaaagcaacataagctgggctaaaggtttaaaatttgaagatggagccatagcaaccaacattggaaatgggttagagtttggaagcagtagtacagaaacaggtgttgatgatgcttacccaatccaagttaaacttggatctggccttagctttgacagtacaggagccataatggctggtaacaaagaagacgataaactcactttgtggacaacacctgatccatcaccaaactgtcaaatactcgcagaaaatgatgcaaaactaacactttgcttgactaaatgtggtagtcaaatactggccactgtgtcagtcttagttgtaggaagtggaaacctaaaccccattactggcaccgtaagcagtgctcaggtgtttctacgttttgatgcaaacggtgttcttttaacagaacattctacactaaaaaaatactgggggtataggcagggagatagcatagatggcactccatataccaatgctgtaggattcatgcccaatttaaaagcttatccaaagtcacaaagttctactactaaaaataatatagtagggcaagtatacatgaatggagatgtttcaaaacctatgcttctcactataaccctcaatggtactgatgacagcaacagtacatattcaatgtcattttcatacacctggactaatggaagctatgttggagcaacatttggggctaactcttataccttctcatacatcgcccaagaatgaacactgtatcccaccctgcatgccaacccttcccaccccactctgtggaacaaactctgaaacacaaaataaaataaagttcaagtgttttattgattcaacagttttacaggattcgagcagttatttttcctccaccctcccaggacatggaatacaccaccctctccccccgcacagccttgaacatctgaatgccattggtgatggacatgcttttggtctccacgttccacacagtttcagagcgagccagtctcgggtcggtcagggagatgaaaccctccgggcactcccgcatctgcacctcacagctcaacagctgaggattgtcctcggtggtcgggatcacggttatctggaagaagcagaagagcggcggtgggaatcatagtccgcgaacgggatcggccggtggtgtcgcatcaggccccgcagcagtcgctgccgccgccgctccgtcaagctgctgctcagggggtccgggtccagggactccctcagcatgatgcccacggccctcagcatcagtcgtctggtgcggcgggcgcagcagcgcatgcggatctcgctcaggtcgctgcagtacgtgcaacacagaaccaccaggttgttcaacagtccatagttcaacacgctccagccgaaactcatcgcgggaaggatgctacccacgtggccgtcgtaccagatcctcaggtaaatcaagtggtgccccctccagaacacgctgcccacgtacatgatctccttgggcatgtggcggttcaccacctcccggtaccacatcaccctctggttgaacatgcagccccggatgatcctgcggaaccacagggccagcaccgccccgcccgccatgcagcgaagagaccccgggtcccggcaatggcaatggaggacccaccgctcgtacccgtggatcatctgggagctgaacaagtctatgttggcacagcacaggcatatgctcatgcatctcttcagcactctcaactcctcgggggtcaaaaccatatcccagggcacggggaactcttgcaggacagcgaaccccgcagaacagggcaatcctcgcacagaacttacattgtgcatggacagggtatcgcaatcaggcagcaccgggtgatcctccaccagagaagcgcgggtctcggtctcctcacagcgtggtaagggggccggccgatacgggtgatggcgggacgcggctgatcgtgttcgcgaccgtgtcatgatgcagttgctttcggacattttcgtacttgctgtagcagaacctggtccgggcgctgcacaccgatcgccggcggcggtctcggcgcttggaacgctcggtgttgaaattgtaaaacagccactctctcagaccgtgcagcagatctagggcctcaggagtgatgaagatcccatcatgcctgatggctctgatcacatcgaccaccgtggaatgggccagacccagccagatgatgcaattttgttgggtttcggtgacggcgggggagggaagaacaggaagaaccatgattaacttttaatccaaacggtctcggagtacttcaaaatgaagatcgcggagatggcacctctcgcccccgctgtgttggtggaaaataacagccaggtcaaaggtgatacggttctcgagatgttccacggtggcttccagcaaagcctccacgcgcacatccagaaacaagacaatagcgaaagcgggagggttctctaattcctcaatcatcatgttacactcctgcaccatccccagataattttcatttttccagccttgaatgattcgaactagttcctgaggtaaatccaagccagccatgataaagagctcgcgcagagcgccctccaccggcattcttaagcacaccctcataattccaagatattctgctcctggttcacctgcagcagattgacaagcggaatatcaaaatctctgccgcgatccctgagctcctccctcagcaataactgtaagtactctttcatatcctctccgaaatttttagccataggaccaccaggaataagattagggcaagccacagtacagataaaccgaagtcctccccagtgagcattgccaaatgcaagactgctataagcatgctggctagacccggtgatatcttccagataactggacagaaaatcgcccaggcaatttttaagaaaatcaacaaaagaaaaatcctccaggtggacgtttagagcctcgggaacaacgatgaagtaaatgcaagcggtgcgttccagcatggttagttagctgatctgtagaaaaaacaaaaatgaacattaaaccatgctagcctggcgaacaggtgggtaaatcgttctctccagcaccaggcaggccacggggtctccggcgcgaccctcgtaaaaattgtcgctatgattgaaaaccatcacagagagacgttcccggtggccggcgtgaatgattcgacaagatgaatacacccccggaacattggcgtccgcgagtgaaaaaaagcgcccgaggaagcaataaggcactacaatgctcagtctcaagtccagcaaagcgatgccatgcggatgaagcacaaaattctcaggtgcgtacaaaatgtaattactcccctcctgcacaggcagcaaagcccccgatccctccaggtacacatacaaagcctcagcgtccatagcttaccgagcagcagcacacaacaggcgcaagagtcagagaaaggctgagctctaacctgtccacccgctctctgctcaatatatagcccagatctacactgacgtaaaggccaaagtctaaaaatacccgccaaataatcacacacgcccagcacacgcccagaaaccggtgacacactcaaaaaaatacgcgcacttcctcaaacgcccaaaactgccgtcatttccgggttcccacgctacgtcatcaaaacacgactttcaaattccgtcgaccgttaaaaacgtcacccgccccgcccctaacggtcgcccgtctctcagccaatcagcgccccgcatccccaaattcaaacacctcatttgcatattaacgcgcacaaaaagtttgaggtatattattgatgatgg

SEQ ID NO: 2 - DNA, 31588 bp, synthetic construct
  misc_feature 1..31588: note = Description of Artificial Sequence: Synthetic polynucleotide
  source 1..31588: mol_type = other DNA
ccatcttcaataatatacctcaaactttttgtgcgcgttaatatgcaaatgaggcgtttgaatttggggaggaagggcggtgattggtcgagggatgagcgaccgttaggggcggggcgagtgacgttttgatgacgtggttgcgaggaggagccagtttgcaagttctcgtgggaaaagtgacgtcaaacgaggtgtggtttgaacacggaaatactcaattttcccgcgctctctgacaggaaatgaggtgtttctgggcggatgcaagtgaaaacgggccattttcgcgcgaaaactgaatgaggaagtgaaaatctgagtaatttcgcgtttatggcagggaggagtatttgccgagggccgagtagactttgaccgattacgtgggggtttcgattaccgtgtttttcacctaaatttccgcgtacggtgtcaaagtccggtgtttttacgtaggtgtcagctgatcgccagggtatttaaacctgcgctctccagtcaagaggccactcttgagtgccagcgagaagagttttctcctccgcgccgcgagtcagatctacactttgaaagtagggataacagggtaatgacattgattattgactagttgttaatagtaatcaattacggggtcattagttcatagcccatatatggagttccgcgttacataacttacggtaaatggcccgcctggctgaccgcccaacgacccccgcccattgacgtcaataatgacgtatgttcccatagtaacgccaatagggactttccattgacgtcaatgggtggagtatttacggtaaactgcccacttggcagtacatcaagtgtatcatatgccaagtccgccccctattgacgtcaatgacggtaaatggcccgcctggcattatgcccagtacatgaccttacgggactttcctacttggcagtacatctacgtattagtcatcgctattaccatggtgatgcggttttggcagtacaccaatgggcgtggatagcggtttgactcacggggatttccaagtctccaccccattgacgtcaatgggagtttgttttggcaccaaaatcaacgggactttccaaaatgtcgtaataaccccgccccgttgacgcaaatgggcggtaggcgtgtacggtgggaggtctatataagcagagctcgtttagtgaaccgtcagatcgcctggaacgccatccacgctgttttgacctccatagaagacagcgatcgcgccaccatggccgggatgttccaggcactgtccgaaggctgcacaccctatgatattaaccagatgctgaatgtcctgggagaccaccaggtctctggcctggagcagctggagagcatcatcaacttcgagaagctgaccgagtggacaagctccaatgtgatgcctatcctgtccccactgaccaagggcatcctgggcttcgtgtttaccctgacagtgccttctgagcggggcctgtcttgcatcagcgaggcagacgcaaccacaccagagtccgccaatctgggcgaggagatcctgtctcagctgtacctgtggccccgggtgacatatcactccccttcttacgcctatcaccagttcgagcggagagccaagtacaagagacacttcccaggctttggccagtctctgctgttcggctaccccgtgtacgtgttcggcgattgcgtgcagggcgactgggatgccatccggtttagatactgcgcaccacctggatatgcactgctgaggtgtaacgacaccaattattccgccctgctggcagtgggcgccctggagggccctcgcaatcaggattggctgggcgtgccaaggcagctggtgacacgcatgcaggccatccagaacgcaggcctgtgcaccctggtggcaatgctggaggagacaatcttctggctgcaggcctttctgatggccctgaccgacagcggccccaagacaaacatcatcgtggattcccagtacgtgatgggcatctccaagccttctttccaggagtttgtggactgggagaacgtgagcccagagctgaattccaccgatcagccattctggcaggcaggaatcctggcaaggaacctggtgcctatggtggccacagtgcagggccagaatctgaagtaccagggccagagcctggtcatcagcgcctccatcatcgtgtttaacctgctggagctggagggcgactatcgggacgatggcaacgtgtgggtgcacaccccactgagccccagaacactgaacgcctgggtgaaggccgtggaggagaagaagggcatcccagtgcacctggagctggcctccatgaccaatatggagctgatgtctagcatcgtgcaccagcaggtgaggacatacggacccgtgttcatgtgcctgggaggcctgctgaccatggtggcaggagccgtgtggctgacagtgcgggtgctggagctgttcagagccgcccagctggccaacgatgtggtgctgcagatcatggagctgtgcggagcagcctttcgccaggtgtgccacaccacagtgccatggcccaatgcctccctgacccccaagtggaacaatgagacaacacagcctcagatcgccaactgtagcgtgtacgacttcttcgtgtggctgcactactatagcgtgagggataccctgtggccccgcgtgacataccacatgaataagtacgcctatcacatgctggagaggcgcgccaagtataagagaggccctggcccaggcgcaaagtttgtggcagcatggaccctgaaggccgccgccggccccggccccggccagtatatcaaggctaacagtaagttcattggaatcacagagctgggacccggacctggataatgagtttaaactcccatttaaatgtgagggttaatgcttcgagcagacatgataagatacattgatgagtttggacaaaccacaactagaatgcagtgaaaaaaatgctttatttgtgaaatttgtgatgctattgctttatttgtaaccattataagctgcaataaacaagttaacaacaacaattgcattcattttatgtttcaggttcagggggagatgtgggaggttttttaaagcaagtaaaacctctacaaatgtggtaaaataactataacggtcctaaggtagcgagtgagtagtgttctggggcgggggaggacctgcatgagggccagaataactgaaatctgtgcttttctgtgtgttgcagcagcatgagcggaagcggctcctttgagggaggggtattcagcccttatctgacggggcgtctcccctcctgggcgggagtgcgtcagaatgtgatgggatccacggtggacggccggcccgtgcagcccgcgaactcttcaaccctgacctatgcaaccctgagctcttcgtcgttggacgcagctgccgccgcagctgctgcatctgccgccagcgccgtgcgcggaatggccatgggcgccggctactacggcactctggtggccaactcgagttccaccaataatcccgccagcctgaacgaggagaagctgttgctgctgatggcccagctcgaggccttgacccagcgcctgggcgagctgacccagcaggtggctcagctgcaggagcagacgcgggccgcggttgccacggtgaaatccaaataaaaaatgaatcaataaataaacggagacggttgttgattttaacacagagtctgaatctttatttgatttttcgcgcgcggtaggccctggaccaccggtctcgatcattgagcacccggtggatcttttccaggacccggtagaggtgggcttggatgttgaggtacatgggcatgagcccgtcccgggggtggaggtagctccattgcagggcctcgtgctcgggggtggtgttgtaaatcacccagtcatagcaggggcgcagggcatggtgttgcacaatatctttgaggaggagactgatggccacgggcagccctttggtgtaggtgtttacaaatctgttgagctgggagggatgcatgcggggggagatgaggtgcatcttggcctggatcttgagattggcgatgttaccgcccagatcccgcctggggttcatgttgtgcaggaccaccagcacggtgtatccggtgcacttggggaatttatcatgcaacttggaagggaaggcgtgaaagaatttggcgacgcctttgtgcccgcccaggttttccatgcactcatccatgatgatggcgatgggcccgtgggcggcggcctgggcaaagacgtttcgggggtcggacacatcatagttgtggtcctgggtgaggtcatcataggccattttaatgaatttggggcggagggtgccggactgggggacaaaggtaccctcgatcccgggggcgtagttcccctcacagatctgcatctcccaggctttgagctcggagggggggatcatgtccacctgcggggcgataaagaacacggtttccggggcgggggagatgagctgggccgaaagcaagttccggagcagctgggacttgccgcagccggtggggccgtagatgaccccgatgaccggctgcaggtggtagttgagggagagacagctgccgtcctcccggaggaggggggccacctcgttcatcatctcgcgcacgtgcatgttctcgcgcaccagttccgccaggaggcgctctccccccagggataggagctcctggagcgaggcgaagtttttcagcggcttgagtccgtcggccatgggcattttggagagggtttgttgcaagagttccaggcggtcccagagctcggtgatgtgctctacggcatctcgatccagcagacctcctcgtttcgcgggttgggacggctgcgggagtagggcaccagacgatgggcgtccagcgcagccagggtccggtccttccagggtcgcagcgtccgcgtcagggtggtctccgtcacggtgaaggggtgcgcgccgggctgggcgcttgcgagggtgcgcttcaggctcatccggctggtcgaaaaccgctcccgatcggcgccctgcgcgtcggccaggtagcaattgaccatgagttcgtagttgagcgcctcggccgcgtggcctttggcgcggagcttacctttggaagtctgcccgcaggcgggacagaggagggacttgagggcgtagagcttgggggcgaggaagacggactcgggggcgtaggcgtccgcgccgcagtgggcgcagacggtctcgcactccacgagccaggtgaggtcgggctggtcggggtcaaaaaccagtttcccgccgttctttttgatgcgtttcttacctttggtctccatgagctcgtgtccccgctgggtgacaaagaggctgtccgtgtccccgtagaccgactttatgggccggtcctcgagcggtgtgccgcggtcctcctcgtagaggaaccccgcccactccgagacgaaagcccgggtccaggccagcacgaaggaggccacgtgggacgggtagcggtcgttgtccaccagcgggtccaccttttccagggtatgcaaacacatgtccccctcgtccacatccaggaaggtgattggcttgtaagtgtaggccacgtgaccgggggtcccggccgggggggtataaaagggtgcgggtccctgctcgtcctcactgtcttccggatcgctgtccaggagcgccagctgttggggtaggtattccctctcgaaggcgggcatgacctcggcactcaggttgtcagtttctagaaacgaggaggatttgatattgacggtgccggcggagatgcctttcaagagcccctcgtccatctggtcagaaaagacgatctttttgttgtcgagcttggtggcgaaggagccgtagagggcgttggagaggagcttggcgatggagcgcatggtctggtttttttccttgtcggcgcgctccttggcggcgatgttgagctgcacgtactcgcgcgccacgcacttccattcggggaagacggtggtcagctcgtcgggcacgattctgacctgccagccccgattatgcagggtgatgaggtccacactggtggccacctcgccgcgcaggggctcattagtccagcagaggcgtccgcccttgcgcgagcagaaggggggcagggggtccagcatgacctcgtcgggggggtcggcatcgatggtgaagatgccgggcaggaggtcggggtcaaagtagctgatggaagtggccagatcgtccagggcagcttgccattcgcgcacggccagcgcgcgctcgtagggactgaggggcgtgccccagggcatgggatgggtaagcgcggaggcgtacatgccgcagatgtcgtagacgtagaggggctcctcgaggatgccgatgtaggtggggtagcagcgccccccgcggatgctggcgcgcacgtagtcatacagctcgtgcgagggggcgaggagccccgggcccaggttggtgcgactgggcttttcggcgcggtagacgatctggcggaaaatggcatgcgagttggaggagatggtgggcctttggaagatgttgaagtgggcgtggggcagtccgaccgagtcgcggatgaagtgggcgtaggagtcttgcagcttggcgacgagctcggcggtgactaggacgtccagagcgcagtagtcgagggtctcctggatgatgtcatacttgagctgtcccttttgtttccacagctcgcggttgagaaggaactcttcgcggtccttccagtactcttcgagggggaacccgtcctgatctgcacggtaagagcctagcatgtagaactggttgacggccttgtaggcgcagcagcccttctccacggggagggcgtaggcctgggcggccttgcgcagggaggtgtgcgtgagggcgaaagtgtccctgaccatgaccttgaggaactggtgcttgaagtcgatatcgtcgcagcccccctgctcccagagctggaagtccgtgcgcttcttgtaggcggggttgggcaaagcgaaagtaacatcgttgaagaggatcttgcccgcgcggggcataaagttgcgagtgatgcggaaaggttggggcacctcggcccggttgttgatgacctgggcggcgagcacgatctcgtcgaagccgttgatgttgtggcccacgatgtagagttccacgaatcgcggacggcccttgacgtggggcagtttcttgagctcctcgtaggtgagctcgtcggggtcgctgagcccgtgctgctcgagcgcccagtcggcgagatgggggttggcgcggaggaaggaagtccagagatccacggccagggcggtttgcagacggtcccggtactgacggaactgctgcccgacggccattttttcgggggtgacgcagtagaaggtgcgggggtccccgtgccagcgatcccatttgagctggagggcgagatcgagggcgagctcgacgagccggtcgtccccggagagtttcatgaccagcatgaaggggacgagctgcttgccgaaggaccccatccaggtgtaggtttccacatcgtaggtgaggaagagcctttcggtgcgaggatgcgagccgatggggaagaactggatctcctgccaccaattggaggaatggctgttgatgtgatggaagtagaaatgccgacggcgcgccgaacactcgtgcttgtgtttatacaagcggccacagtgctcgcaacgctgcacgggatgcacgtgctgcacgagctgtacctgagttcctttgacgaggaatttcagtgggaagtggagtcgtggcgcctgcatctcgtgctgtactacgtcgtggtggtcggcctggccctcttctgcctcgatggtggtcatgctgacgagcccgcgcgggaggcaggtccagacctcggcgcgagcgggtcggagagcgaggacgagggcgcgcaggccggagctgtccagggtcctgagacgctgcggagtcaggtcagtgggcagcggcggcgcgcggttgacttgcaggagtttttccagggcgcgcgggaggtccagatggtacttgatctccaccgcgccattggtggcgacgtcgatggcttgcagggtcccgtgcccctggggtgtgaccaccgtcccccgtttcttcttgggcggctggggcgacgggggcggtgcctcttccatggttagaagcggcggcgaggacgcgcgccgggcggcaggggcggctcggggcccggaggcaggggcggcaggggcacgtcggcgccgcgcgcgggtaggttctggtactgcgcccggagaagactggcgtgagcgacgacgcgacggttgacgtcctggatctgacgcctctgggtgaaggccacgggacccgtgagtttgaacctgaaagagagttcgacagaatcaatctcggtatcgttgacggcggcctgccgcaggatctcttgcacgtcgcccgagttgtcctggtaggcgatctcggtcatgaactgctcgatctcctcctcttgaaggtctccgcggccggcgcgctccacggtggccgcgaggtcgttggagatgcggcccatgagctgcgagaaggcgttcatgcccgcctcgttccagacgcggctgtagaccacgacgccctcgggatcgcgggcgcgcatgaccacctgggcgaggttgagctccacgtggcgcgtgaagaccgcgtagttgcagaggcgctggtagaggtagttgagcgtggtggcgatgtgctcggtgacgaagaaatacatgatccagcggcggagcggcatctcgctgacgtcgcccagcgcctccaaacgttccatggcctcgtaaaagtccacggcgaagttgaaaaactgggagttgcgcgccgagacggtcaactcctcctccagaagacggatgagctcggcgatggtggcgcgcacctcgcgctcgaaggcccccgggagttcctccacttcctcttcttcctcctccactaacatctcttctacttcctcctcaggcggcagtggtggcgggggagggggcctgcgtcgccggcggcgcacgggcagacggtcgatgaagcgctcgatggtctcgccgcgccggcgtcgcatggtctcggtgacggcgcgcccgtcctcgcggggccgcagcgtgaagacgccgccgcgcatctccaggtggccgggggggtccccgttgggcagggagagggcgctgacgatgcatcttatcaattgccccgtagggactccgcgcaaggacctgagcgtctcgagatccacgggatctgaaaaccgctgaacgaaggcttcgagccagtcgcagtcgcaaggtaggctgagcacggtttcttctggcgggtcatgttggttgggagcggggcgggcgatgctgctggtgatgaagttgaaataggcggttctgagacggcggatggtggcgaggagcaccaggtctttgggcccggcttgctggatgcgcagacggtcggccatgccccaggcgtggtcctgacacctggccaggtccttgtagtagtcctgcatgagccgctccacgggcacctcctcctcgcccgcgcggccgtgcatgcgcgtgagcccgaagccgcgctggggctggacgagcgccaggtcggcgacgacgcgctcggcgaggatggcttgctggatctgggtgagggtggtctggaagtcatcaaagtcgacgaagcggtggtaggctccggtgttgatggtgtaggagcagttggccatgacggaccagttgacggtctggtggcccggacgcacgagctcgtggtacttgaggcgcgagtaggcgcgcgtgtcgaagatgtagtcgttgcaggtgcgcaccaggtactggtagccgatgaggaagtgcggcggcggctggcggtagagcggccatcgctcggtggcgggggcgccgggcgcgaggtcctcgagcatggtgcggtggtagccgtagatgtacctggacatccaggtgatgccggcggcggtggtggaggcgcgcgggaactcgcggacgcggttccagatgttgcgcagcggcaggaagtagttcatggtgggcacggtctggcccgtgaggcgcgcgcagtcgtggatgctctatacgggcaaaaacgaaagcggtcagcggctcgactccgtggcctggaggctaagcgaacgggttgggctgcgcgtgtaccccggttcgaatctcgaatcaggctggagccgcagctaacgtggtattggcactcccgtctcgacccaagcctgcaccaaccctccaggatacggaggcgggtcgttttgcaacttttttttggaggccggatgagactagtaagcgcggaaagcggccgaccgcgatggctcgctgccgtagtctggagaagaatcgccagggttgcgttgcggtgtgccccggttcgaggccggccggattccgcggctaacgagggcgtggctgccccgtcgtttccaagaccccatagccagccgacttctccagttacggagcgagcccctcttttgttttgtttgtttttgccagatgcatcccgtactgcggcagatgcgcccccaccaccctccaccgcaacaacagccccctccacagccggcgcttctgcccccgccccagcagcaacttccagccacgaccgccgcggccgccgtgagcggggctggacagagttatgatcaccagctggccttggaagagggcgaggggctggcgcgcctgggggcgtcgtcgccggagcggcacccgcgcgtgcagatgaaaagggacgctcgcgaggcctacgtgcccaagcagaacctgttcagagacaggagcggcgaggagcccgaggagatgcgcgcggcccggttccacgcggggcgggagctgcggcgcggcctggaccgaaagagggtgctgagggacgaggatttcgaggcggacgagctgacggggatcagccccgcgcgcgcgcacgtggccgcggccaacctggtcacggcgtacgagcagaccgtgaaggaggagagcaacttccaaaaatccttcaacaaccacgtgcgcaccctgatcgcgcgcgaggaggtgaccctgggcctgatgcacctgtgggacctgctggaggccatcgtgcagaaccccaccagcaagccgctgacggcgcagctgttcctggtggtgcagcatagtcgggacaacgaagcgttcagggaggcgctgctgaatatcaccgagcccgagggccgctggctcctggacctggtgaacattctgcagagcatcgtggtgcaggagcgcgggctgccgctgtccgagaagctggcggccatcaacttctcggtgctgagtttgggcaagtactacgctaggaagatctacaagaccccgtacgtgcccatagacaaggaggtgaagatcgacgggttttacatgcgcatgaccctgaaagtgctgaccctgagcgacgatctgggggtgtaccgcaacgacaggatgcaccgtgcggtgagcgccagcaggcggcgcgagctgagcgaccaggagctgatgcatagtctgcagcgggccctgaccggggccgggaccgagggggagagctactttgacatgggcgcggacctgcactggcagcccagccgccgggccttggaggcggcggcaggaccctacgtagaagaggtggacgatgaggtggacgaggagggcgagtacctggaagactgatggcgcgaccgtatttttgctagatgcaacaacaacagccacctcctgatcccgcgatgcgggcggcgctgcagagccagccgtccggcattaactcctcggacgattggacccaggccatgcaacgcatcatggcgctgacgacccgcaaccccgaagcctttagacagcagccccaggccaaccggctctcggccatcctggaggccgtggtgccctcgcgctccaaccccacgcacgagaaggtcctggccatcgtgaacgcgctggtggagaacaaggccatccgcggcgacgaggccggcctggtgtacaacgcgctgctggagcgcgtggcccgctacaacagcaccaacgtgcagaccaacctggaccgcatggtgaccgacgtgcgcgaggccgtggcccagcgcgagcggttccaccgcgagtccaacctgggatccatggtggcgctgaacgccttcctcagcacccagcccgccaacgtgccccggggccaggaggactacaccaacttcatcagcgccctgcgcctgatggtgaccgaggtgccccagagcgaggtgtaccagtccgggccggactacttcttccagaccagtcgccagggcttgcagaccgtgaacctgagccaggctttcaagaacttgcagggcctgtggggcgtgcaggccccggtcggggaccgcgcgacggtgtcgagcctgctgacgccgaactcgcgcctgctgctgctgctggtggcccccttcacggacagcggcagcatcaaccgcaactcgtacctgggctacctgattaacctgtaccgcgaggccatcggccaggcgcacgtggacgagcagacctaccaggagatcacccacgtgagccgcgccctgggccaggacgacccgggcaacctggaagccaccctgaactttttgctgaccaaccggtcgcagaagatcccgccccagtacgcgctcagcaccgaggaggagcgcatcctgcgttacgtgcagcagagcgtgggcctgttcctgatgcaggagggggccacccccagcgccgcgctcgacatgaccgcgcgcaacatggagcccagcatgtacgccagcaaccgcccgttcatcaataaactgatggactacttgcatcgggcggccgccatgaactctgactatttcaccaacgccatcctgaatccccactggctcccgccgccggggttctacacgggcgagtacgacatgcccgaccccaatgacgggttcctgtgggacgatgtggacagcagcgtgttctccccccgaccgggtgctaacgagcgccccttgtggaagaaggaaggcagcgaccgacgcccgtcctcggcgctgtccggccgcgagggtgctgccgcggcggtgcccgaggccgccagtcctttcccgagcttgcccttctcgctgaacagtatccgcagcagcgagctgggcaggatcacgcgcccgcgcttgctgggcgaagaggagtacttgaatgactcgctgttgagacccgagcgggagaagaacttccccaataacgggatagaaagcctggtggacaagatgagccgctggaagacgtatgcgcaggagcacagggacgatccccgggcgtcgcagggggccacgagccggggcagcgccgcccgtaaacgccggtggcacgacaggcagcggggacagatgtgggacgatgaggactccgccgacgacagcagcgtgttggacttgggtgggagtggtaacccgttcgctcacctgcgcccccgtatcgggcgcatgatgtaagagaaaccgaaaataaatgatactcaccaaggccatggcgaccagcgtgcgttcgtttcttctctgttgttgttgtatctagtatgatgaggcgtgcgtacccggagggtcctcctccctcgtacgagagcgtgatgcagcaggcgatggcggcggcggcgatgcagcccccgctggaggctccttacgtgcccccgcggtacctggcgcctacggaggggcggaacagcattcgttactcggagctggcacccttgtacgataccacccggttgtacctggtggacaacaagtcggcggacatcgcctcgctgaactaccagaacgaccacagcaacttcctgaccaccgtggtgcagaacaatgacttcacccccacggaggccagcacccagaccatcaactttgacgagcgctcgcggtggggcggccagctgaaaaccatcatgcacaccaacatgcccaacgtgaacgagttcatgtacagcaacaagttcaaggcgcgggtgatggtctcccgcaagacccccaatggggtgacagtgacagaggattatgatggtagtcaggatgagctgaagtatgaatgggtggaatttgagctgcccgaaggcaacttctcggtgaccatgaccatcgacctgatgaacaacgccatcatcgacaattacttggcggtggggcggcagaacggggtgctggagagcgacatcggcgtgaagttcgacactaggaacttcaggctgggctgggaccccgtgaccgagctggtcatgcccggggtgtacaccaacgaggctttccatcccgatattgtcttgctgcccggctgcggggtggacttcaccgagagccgcctcagcaacctgctgggcattcgcaagaggcagcccttccaggaaggcttccagatcatgtacgaggatctggaggggggcaacatccccgcgctcctggatgtcgacgcctatgagaaaagcaaggaggatgcagcagctgaagcaactgcagccgtagctaccgcctctaccgaggtcaggggcgataattttgcaagcgccgcagcagtggcagcggccgaggcggctgaaaccgaaagtaagatagtcattcagccggtggagaaggatagcaagaacaggagctacaacgtactaccggacaagataaacaccgcctaccgcagctggtacctagcctacaactatggcgaccccgagaagggcgtgcgctcctggacgctgctcaccacctcggacgtcacctgcggcgtggagcaagtctactggtcgctgcccgacatgatgcaagacccggtcaccttccgctccacgcgtcaagttagcaactacccggtggtgggcgccgagctcctgcccgtctactccaagagcttcttcaacgagcaggccgtctactcgcagcagctgcgcgccttcacctcgcttacgcacgtcttcaaccgcttccccgagaaccagatcctcgtccgcccgcccgcgcccaccattaccaccgtcagtgaaaacgttcctgctctcacagatcacgggaccctgccgctgcgcagcagtatccggggagtccagcgcgtgaccgttactgacgccagacgccgcacctgcccctacgtctacaaggccctgggcatagtcgcgccgcgcgtcctctcgagccgcaccttctaaatgtccattctcatctcgcccagtaataacaccggttggggcctgcgcgcgcccagcaagatgtacggaggcgctcgccaacgctccacgcaacaccccgtgcgcgtgcgcgggcacttccgcgctccctggggcgccctcaagggccgcgtgcggtcgcgcaccaccgtcgacgacgtgatcgaccaggtggtggccgacgcgcgcaactacacccccgccgccgcgcccgtctccaccgtggacgccgtcatcgacagcgtggtggccgacgcgcgccggtacgcccgcgccaagagccggcggcggcgcatcgcccggcggcaccggagcacccccgccatgcgcgcggcgcgagccttgctgcgcagggccaggcgcacgggacgcagggccatgctcagggcggccagacgcgcggcttcaggcgccagcgccggcaggacccggagacgcgcggccacggcggcggcagcggccatcgccagcatgtcccgcccgcggcgagggaacgtgtactgggtgcgcgacgccgccaccggtgtgcgcgtgcccgtgcgcacccgcccccctcgcacttgaagatgttcacttcgcgatgttgatgtgtcccagcggcgaggaggatgtccaagcgcaaattcaaggaagagatgctccaggtcatcgcgcctgagatctacggccctgcggtggtgaaggaggaaagaaagccccgcaaaatcaagcgggtcaaaaaggacaaaaaggaagaagaaagtgatgtggacggattggtggagtttgtgcgcgagttcgccccccggcggcgcgtgcagtggcgcgggcggaaggtgcaaccggtgctgagacccggcaccaccgtggtcttcacgcccggcgagcgctccggcaccgcttccaagcgctcctacgacgaggtgtacggggatgatgatattctggagcaggcggccgagcgcctgggcgagtttgcttacggcaagcgcagccgttccgcaccgaaggaagaggcggtgtccatcccgctggaccacggcaaccccacgccgagcctcaagcccgtgaccttgcagcaggtgctgccgaccgcggcgccgcgccgggggttcaagcgcgagggcgaggatctgtaccccaccatgcagctgatggtgcccaagcgccagaagctggaagacgtgctggagaccatgaaggtggacccggacgtgcagcccgaggtcaaggtgcggcccatcaagcaggtggccccgggcctgggcgtgcagaccgtggacatcaagattcccacggagcccatggaaacgcagaccgagcccatgatcaagcccagcaccagcaccatggaggtgcagacggatccctggatgccatcggctcctagtcgaagaccccggcgcaagtacggcgcggccagcctgctgatgcccaactacgcgctgcatccttccatcatccccacgccgggctaccgcggcacgcgcttctaccgcggtcataccagcagccgccgccgcaagaccaccactcgccgccgccgtcgccgcaccgccgctgcaaccacccctgccgccctggtgcggagagtgtaccgccgcggccgcgcacctctgaccctgccgcgcgcgcgctaccacccgagcatcgccatttaaactttcgcctgctttgcagatcaatggccctcacatgccgccttcgcgttcccattacgggctaccgaggaagaaaaccgcgccgtagaaggctggcggggaacgggatgcgtcgccaccaccaccggcggcggcgcgccatcagcaagcggttggggggaggcttcctgcccgcgctgatccccatcatcgccgcggcgatcggggcgatccccggcattgcttccgtggcggtgcaggcctctcagcgccactgagacacacttggaaacatcttgtaataaaccaatggactctgacgctcctggtcctgtgatgtgttttcgtagacagatggaagacatcaatttttcgtccctggctccgcgacacggcacgcggccgttcatgggcacctggagcgacatcggcaccagccaactgaacgggggcgccttcaattggagcagtctctggagcgggcttaagaatttcgggtccacgcttaaaacctatggcagcaaggcgtggaacagcaccacagggcaggcgctgagggataagctgaaagagcagaacttccagcagaaggtggtcgatgggctcgcctcgggcatcaacggggtggtggacctggccaaccaggccgtgcagcggcagatcaacagccgcctggacccggtgccgcccgccggctccgtggagatgccgcaggtggaggaggagctgcctcccctggacaagcggggcgagaagcgaccccgccccgatgcggaggagacgctgctgacgcacacggacgagccgcccccgtacgaggaggcggtgaaactgggtctgcccaccacgcggcccatcgcgcccctggccaccggggtgctgaaacccgaaaagcccgcgaccctggacttgcctcctccccagccttcccgcccctctacagtggctaagcccctgccgccggtggccgtggcccgcgcgcgacccgggggcaccgcccgccctcatgcgaactggcagagcactctgaacagcatcgtgggtctgggagtgcagagtgtgaagcgccgccgctgctattaaacctaccgtagcgcttaacttgcttgtctgtgtgtgtatgtattatgtcgccgccgccgctgtccaccagaaggaggagtgaagaggcgcgtcgccgagttgcaagatggccaccccatcgatgctgccccagtgggcgtacatgcacatcgccggacaggacgcttcggagtacctgagtccgggtctggtgcagtttgcccgcgccacagacacctacttcagtctggggaacaagtttaggaaccccacggtggcgcccacgcacgatgtgaccaccgaccgcagccagcggctgacgctgcgcttcgtgcccgtggaccgcgaggacaacacctactcgtacaaagtgcgctacacgctggccgtgggcgacaaccgcgtgctggacatggccagcacctactttgacatccgcggcgtgctggatcggggccctagcttcaaaccctactccggcaccgcctacaacagtctggcccccaagggagcacccaacacttgtcagtggacatataaagccgatggtgaaactgccacagaaaaaacctatacatatggaaatgcacccgtgcagggcattaacatcacaaaagatggtattcaacttggaactgacaccgatgatcagccaatctacgcagataaaacctatcagcctgaacctcaagtgggtgatgctgaatggcatgacatcactggtactgatgaaaagtatggaggcagagctcttaagcctgataccaaaatgaagccttgttatggttcttttgccaagcctactaataaagaaggaggtcaggcaaatgtgaaaacaggaacaggcactactaaagaatatgacatagacatggctttctttgacaacagaagtgcggctgctgctggcctagctccagaaattgttttgtatactgaaaatgtggatttggaaactccagatacccatattgtatacaaagcaggcacagatgacagcagctcttctattaatttgggtcagcaagccatgcccaacagacctaactacattggtttcagagacaactttatcgggctcatgtactacaacagcactggcaatatgggggtgctggccggtcaggcttctcagctgaatgctgtggttgacttgcaagacagaaacaccgagctgtcctaccagctcttgcttgactctctgggtgacagaacccggtatttcagtatgtggaatcaggcggtggacagctatgatcctgatgtgcgcattattgaaaatcatggtgtggaggatgaacttcccaactattgtttccctctggatgctgttggcagaacagatacttatcagggaattaaggctaatggaactgatcaaaccacatggaccaaagatgacagtgtcaatgatgctaatgagataggcaagggtaatccattcgccatggaaatcaacatccaagccaacctgtggaggaacttcctctacgccaacgtggccctgtacctgcccgactcttacaagtacacgccggccaatgttaccctgcccaccaacaccaacacctacgattacatgaacggccgggtggtggcgccctcgctggtggactcctacatcaacatcggggcgcgctggtcgctggatcccatggacaacgtgaaccccttcaaccaccaccgcaatgcggggctgcgctaccgctccatgctcctgggcaacgggcgctacgtgcccttccacatccaggtgccccagaaatttttcgccatcaagagcctcctgctcctgcccgggtcctacacctacgagtggaacttccgcaaggacgtcaacatgatcctgcagagctccctcggcaacgacctgcgcacggacggggcctccatctccttcaccagcatcaacctctacgccaccttcttccccatggcgcacaacacggcctccacgctcgaggccatgctgcgcaacgacaccaacgaccagtccttcaacgactacctctcggcggccaacatgctctaccccatcccggccaacgccaccaacgtgcccatctccatcccctcgcgcaactgggccgccttccgcggctggtccttcacgcgtctcaagaccaaggagacgccctcgctgggctccgggttcgacccctacttcgtctactcgggctccatcccctacctcgacggcaccttctacctcaaccacaccttcaagaaggtctccatcaccttcgactcctccgtcagctggcccggcaacgaccggctcctgacgcccaacgagttcgaaatcaagcgcaccgtcgacggcgagggctacaacgtggcccagtgcaacatgaccaaggactggttcctggtccagatgctggcccactacaacatcggctaccagggcttctacgtgcccgagggctacaaggaccgcatgtactccttcttccgcaacttccagcccatgagccgccaggtggtggacgaggtcaactacaaggactaccaggccgtcaccctggcctaccagcacaacaactcgggcttcgtcggctacctcgcgcccaccatgcgccagggccagccctaccccgccaactacccctacccgctcatcggcaagagcgccgtcaccagcgtcacccagaaaaagttcctctgcgacagggtcatgtggcgcatccccttctccagcaacttcatgtccatgggcgcgctcaccgacctcggccagaacatgctctatgccaactccgcccacgcgctagacatgaatttcgaagtcgaccccatggatgagtccacccttctctatgttgtcttcgaagtcttcgacgtcgtccgagtgcaccagccccaccgcggcgtcatcgaggccgtctacctgcgcacccccttctcggccggtaacgccaccacctaagctcttgcttcttgcaagccatggccgcgggctccggcgagcaggagctcagggccatcatccgcgacctgggctgcgggccctacttcctgggcaccttcgataagcgcttcccgggattcatggccccgcacaagctggcctgcgccatcgtcaacacggccggccgcgagaccgggggcgagcactggctggccttcgcctggaacccgcgctcgaacacctgctacctcttcgaccccttcgggttctcggacgagcgcctcaagcagatctaccagttcgagtacgagggcctgctgcgccgcagcgccctggccaccgaggaccgctgcgtcaccctggaaaagtccacccagaccgtgcagggtccgcgctcggccgcctgcgggctcttctgctgcatgttcctgcacgccttcgtgcactggcccgaccgccccatggacaagaaccccaccatgaacttgctgacgggggtgcccaacggcatgctccagtcgccccaggtggaacccaccctgcgccgcaaccaggaggcgctctaccgcttcctcaactcccactccgcctactttcgctcccaccgcgcgcgcatcgagaaggccaccgccttcgaccgcatgaatcaagacatgtaaaccgtgtgtgtatgttaaatgtctttaataaacagcactttcatgttacacatgcatctgagatgatttatttagaaatcgaaagggttctgccgggtctcggcatggcccgcgggcagggacacgttgcggaactggtacttggccagccacttgaactcggggatcagcagtttgggcagcggggtgtcggggaaggagtcggtccacagcttccgcgtcagttgcagggcgcccagcaggtcgggcgcggagatcttgaaatcgcagttgggacccgcgttctgcgcgcgggagttgcggtacacggggttgcagcactggaacaccatcagggccgggtgcttcacgctcgccagcaccgtcgcgtcggtgatgctctccacgtcgaggtcctcggcgttggccatcccgaagggggtcatcttgcaggtctgccttcccatggtgggcacgcacccgggcttgtggttgcaatcgcagtgcagggggatcagcatcatctgggcctggtcggcgttcatccccgggtacatggccttcatgaaagcctccaattgcctgaacgcctgctgggccttggctccctcggtgaagaagaccccgcaggacttgctagagaactggttggtggcgcacccggcgtcgtgcacgcagcagcgcgcgtcgttgttggccagctgcaccacgctgcgcccccagcggttctgggtgatcttggcccggtcggggttctccttcagcgcgcgctgcccgttctcgctcgccacatccatctcgatcatgtgctccttctggatcatggtggtcccgtgcaggcaccgcagcttgccctcggcctcggtgcacccgtgcagccacagcgcgcacccggtgcactcccagttcttgtgggcgatctgggaatgcgcgtgcacgaagccctgcaggaagcggcccatcatggtggtcagggtcttgttgctagtgaaggtcagcggaatgccgcggtgctcctcgttgatgtacaggtggcagatgcggcggtacacctcgccctgctcgggcatcagctggaagttggctttcaggtcggtctccacgcggtagcggtccatcagcatagtcatgatttccatacccttctcccaggccgagacgatgggcaggctcatagggttcttcaccatcatcttagcgctagcagccgcggccagggggtcgctctcgtccagggtctcaaagctccgcttgccgtccttctcggtgatccgcaccggggggtagctgaagcccacggccgccagctcctcctcggcctgtctttcgtcctcgctgtcctggctgacgtcctgcaggaccacatgcttggtcttgcggggtttcttcttgggcggcagcggcggcggagatgttggagatggcgagggggagcgcgagttctcgctcaccactactatctcttcctcttcttggtccgaggccacgcggcggtaggtatgtctcttcgggggcagaggcggaggcgacgggctctcgccgccgcgacttggcggatggctggcagagccccttccgcgttcgggggtgcgctcccggcggcgctctgactgacttcctccgcggccggccattgtgttctcctagggaggaacaacaagcatggagactcagccatcgccaacctcgccatctgcccccaccgccgacgagaagcagcagcagcagaatgaaagcttaaccgccccgccgcccagccccgccacctccgacgcggccgtcccagacatgcaagagatggaggaatccatcgagattgacctgggctatgtgacgcccgcggagcacgaggaggagctggcagtgcgcttttcacaagaagagatacaccaagaacagccagagcaggaagcagagaatgagcagagtcaggctgggctcgagcatgacggcgactacctccacctgagcgggggggaggacgcgctcatcaagcatctggcccggcaggccaccatcgtcaaggatgcgctgctcgaccgcaccgaggtgcccctcagcgtggaggagctcagccgcgcctacgagttgaacctcttctcgccgcgcgtgccccccaagcgccagcccaatggcacctgcgagcccaacccgcgcctcaacttctacccggtcttcgcggtgcccgaggccctggccacctaccacatctttttcaagaaccaaaagatccccgtctcctgccgcgccaaccgcacccgcgccgacgcccttttcaacctgggtcccggcgcccgcctacctgatatcgcctccttggaagaggttcccaagatcttcgagggtctgggcagcgacgagactcgggccgcgaacgctctgcaaggagaaggaggagagcatgagcaccacagcgccctggtcgagttggaaggcgacaacgcgcggctggcggtgctcaaacgcacggtcgagctgacccatttcgcctacccggctctgaacctgccccccaaagtcatgagcgcggtcatggaccaggtgctcatcaagcgcgcgtcgcccatctccgaggacgagggcatgcaagactccgaggagggcaagcccgtggtcagcgacgagcagctggcccggtggctgggtcctaatgctagtccccagagtttggaagagcggcgcaaactcatgatggccgtggtcctggtgaccgtggagctggagtgcctgcgccgcttcttcgccgacgcggagaccctgcgcaaggtcgaggagaacctgcactacctcttcaggcacgggttcgtgcgccaggcctgcaagatctccaacgtggagctgaccaacctggtctcctacatgggcatcttgcacgagaaccgcctggggcagaacgtgctgcacaccaccctgcgcggggaggcccggcgcgactacatccgcgactgcgtctacctctacctctgccacacctggcagacgggcatgggcgtgtggcagcagtgtctggaggagcagaacctgaaagagctctgcaagctcctgcagaagaacctcaagggtctgtggaccgggttcgacgagcgcaccaccgcctcggacctggccgacctcattttccccgagcgcctcaggctgacgctgcgcaacggcctgcccgactttatgagccaaagcatgttgcaaaactttcgctctttcatcctcgaacgctccggaatcctgcccgccacctgctccgcgctgccctcggacttcgtgccgctgaccttccgcgagtgccccccgccgctgtggagccactgctacctgctgcgcctggccaactacctggcctaccactcggacgtgatcgaggacgtcagcggcgagggcctgctcgagtgccactgccgctgcaacctctgcacgccgcaccgctccctggcctgcaacccccagctgctgagcgagacccagatcatcggcaccttcgagttgcaagggcccagcgaaggcgagggttcagccgccaaggggggtctgaaactcaccccggggctgtggacctcggcctacttgcgcaagttcgtgcccgaggactaccatcccttcgagatcaggttctacgaggaccaatcccatccgcccaaggccgagctgtcggcctgcgtcatcacccagggggcgatcctggcccaattgcaagccatccagaaatcccgccaagaattcttgctgaaaaagggccgcggggtctacctcgacccccagaccggtgaggagctcaaccccggcttcccccaggatgccccgaggaaacaagaagctgaaagtggagctgccgcccgtggaggatttggaggaagactgggagaacagcagtcaggcagaggaggaggagatggaggaagactgggacagcactcaggcagaggaggacagcctgcaagacagtctggaggaagacgaggaggaggcagaggaggaggtggaagaagcagccgccgccagaccgtcgtcctcggcgggggagaaagcaagcagcacggataccatctccgctccgggtcggggtcccgctcgaccacacagtagatgggacgagaccggacgattcccgaaccccaccacccagaccggtaagaaggagcggcagggatacaagtcctggcgggggcacaaaaacgccatcgtctcctgcttgcaggcctgcgggggcaacatctccttcacccggcgctacctgctcttccaccgcggggtgaactttccccgcaacatcttgcattactaccgtcacctccacagcccctactacttccaagaagaggcagcagcagcagaaaaagaccagcagaaaaccagcagctagaaaatccacagcggcggcagcaggtggactgaggatcgcggcgaacgagccggcgcaaacccgggagctgaggaaccggatctttcccaccctctatgccatcttccagcagagtcgggggcaggagcaggaactgaaagtcaagaaccgttctctgcgctcgctcacccgcagttgtctgtatcacaagagcgaagaccaacttcagcgcactctcgaggacgccgaggctctcttcaacaagtactgcgcgctcactcttaaagagtagcccgcgcccgcccagtcgcagaaaaaggcgggaattacgtcacctgtgcccttcgccctagccgcctccacccatcatcatgagcaaagagattcccacgccttacatgtggagctaccagccccagatgggcctggccgccggtgccgcccaggactactccacccgcatgaattggctcagcgccgggcccgcgatgatctcacgggtgaatgacatccgcgcccaccgaaaccagatactcctagaacagtcagcgctcaccgccacgccccgcaatcacctcaatccgcgtaattggcccgccgccctggtgtaccaggaaattccccagcccacgaccgtactacttccgcgagacgcccaggccgaagtccagctgactaactcaggtgtccagctggcgggcggcgccaccctgtgtcgtcaccgccccgctcagggtataaagcggctggtgatccggggcagaggcacacagctcaacgacgaggtggtgagctcttcgctgggtctgcgacctgacggagtcttccaactcgccggatcggggagatcttccttcacgcctcgtcaggccgtcctgactttggagagttcgtcctcgcagccccgctcgggtggcatcggcactctccagttcgtggaggagttcactccctcggtctacttcaaccccttctccggctcccccggccactacccggacgagttcatcccgaacttcgacgccatcagcgagtcggtggacggctacgattgaaactaatcacccccttatccagtgaaataaagatcatattgatgatgattttacagaaataaaaaataatcatttgatttgaaataaagatacaatcatattgatgatttgagtttaacaaaaaaataaagaatcacttacttgaaatctgataccaggtctctgtccatgttttctgccaacaccacttcactcccctcttcccagctctggtactgcaggccccggcgggctgcaaacttcctccacacgctgaaggggatgtcaaattcctcctgtccctcaatcttcattttatcttctatcagatgtccaaaaagcgcgtccgggtggatgatgacttcgaccccgtctacccctacgatgcagacaacgcaccgaccgtgcccttcatcaacccccccttcgtctcttcagatggattccaagagaagcccctgggggtgttgtccctgcgactggccgaccccgtcaccaccaagaacggggaaatcaccctcaagctgggagagggggtggacctcgattcctcgggaaaactcatctccaacacggccaccaaggccgccgcccctctcagtttttccaacaacaccatttcccttaacatggatcaccccttttacactaaagatggaaaattatccttacaagtttctccaccattaaatatactgagaacaagcattctaaacacactagctttaggttttggatcaggtttaggactccgtggctctgccttggcagtacagttagtctctccacttacatttgatactgatggaaacataaagcttaccttagacagaggtttgcatgttacaacaggagatgcaattgaaagcaacataagctgggctaaaggtttaaaatttgaagatggagccatagcaaccaacattggaaatgggttagagtttggaagcagtagtacagaaacaggtgttgatgatgcttacccaatccaagttaaacttggatctggccttagctttgacagtacaggagccataatggctggtaacaaagaagacgataaactcactttgtggacaacacctgatccatcaccaaactgtcaaatactcgcagaaaatgatgcaaaactaacactttgcttgactaaatgtggtagtcaaatactggccactgtgtcagtcttagttgtaggaagtggaaacctaaaccccattactggcaccgtaagcagtgctcaggtgtttctacgttttgatgcaaacggtgttcttttaacagaacattctacactaaaaaaatactgggggtataggcagggagatagcatagatggcactccatataccaatgctgtaggattcatgcccaatttaaaagcttatccaaagtcacaaagttctactactaaaaataatatagtagggcaagtatacatgaatggagatgtttcaaaacctatgcttctcactataaccctcaatggtactgatgacagcaacagtacatattcaatgtcattttcatacacctggactaatggaagctatgttggagcaacatttggggctaactcttataccttctcatacatcgcccaagaatgaacactgtatcccaccctgcatgccaacccttcccaccccactctgtggaacaaactctgaaacacaaaataaaataaagttcaagtgttttattgattcaacagttttacaggattcgagcagttatttttcctccaccctcccaggacatggaatacaccaccctctccccccgcacagccttgaacatctgaatgccattggtgatggacatgcttttggtctccacgttccacacagtttcagagcgagccagtctcgggtcggtcagggagatgaaaccctccgggcactcccgcatctgcacctcacagctcaacagctgaggattgtcctcggtggtcgggatcacggttatctggaagaagcagaagagcggcggtgggaatcatagtccgcgaacgggatcggccggtggtgtcgcatcaggccccgcagcagtcgctgccgccgccgctccgtcaagctgctgctcagggggtccgggtccagggactccctcagcatgatgcccacggccctcagcatcagtcgtctggtgcggcgggcgcagcagcgcatgcggatctcgctcaggtcgctgcagtacgtgcaacacagaaccaccaggttgttcaacagtccatagttcaacacgctccagccgaaactcatcgcgggaaggatgctacccacgtggccgtcgtaccagatcctcaggtaaatcaagtggtgccccctccagaacacgctgcccacgtacatgatctccttgggcatgtggcggttcaccacctcccggtaccacatcaccctctggttgaacatgcagccccggatgatcctgcggaaccacagggccagcaccgccccgcccgccatgcagcgaagagaccccgggtcccggcaatggcaatggaggacccaccgctcgtacccgtggatcatctgggagctgaacaagtctatgttggcacagcacaggcatatgctcatgcatctcttcagcactctcaactcctcgggggtcaaaaccatatcccagggcacggggaactcttgcaggacagcgaaccccgcagaacagggcaatcctcgcacagaacttacattgtgcatggacagggtatcgcaatcaggcagcaccgggtgatcctccaccagagaagcgcgggtctcggtctcctcacagcgtggtaagggggccggccgatacgggtgatggcgggacgcggctgatcgtgttcgcgaccgtgtcatgatgcagttgctttcggacattttcgtacttgctgtagcagaacctggtccgggcgctgcacaccgatcgccggcggcggtctcggcgcttggaacgctcggtgttgaaattgtaaaacagccactctctcagaccgtgcagcagatctagggcctcaggagtgatgaagatcccatcatgcctgatggctctgatcacatcgaccaccgtggaatgggccagacccagccagatgatgcaattttgttgggtttcggtgacggcgggggagggaagaacaggaagaaccatgattaacttttaatccaaacggtctcggagtacttcaaaatgaagatcgcggagatggcacctctcgcccccgctgtgttggtggaaaataacagccaggtcaaaggtgatacggttctcgagatgttccacggtggcttccagcaaagcctccacgcgcacatccagaaacaagacaatagcgaaagcgggagggttctctaattcctcaatcatcatgttacactcctgcaccatccccagataattttcatttttccagccttgaatgattcgaactagttcctgaggtaaatccaagccagccatgataaagagctcgcgcagagcgccctccaccggcattcttaagcacaccctcataattccaagatattctgctcctggttcacctgcagcagattgacaagcggaatatcaaaatctctgccgcgatccctgagctcctccctcagcaataactgtaagtactctttcatatcctctccgaaatttttagccataggaccaccaggaataagattagggcaagccacagtacagataaaccgaagtcctccccagtgagcattgccaaatgcaagactgctataagcatgctggctagacccggtgatatcttccagataactggacagaaaatcgcccaggcaatttttaagaaaatcaacaaaagaaaaatcctccaggtggacgtttagagcctcgggaacaacgatgaagtaaatgcaagcggtgcgttccagcatggttagttagctgatctgtagaaaaaacaaaaatgaacattaaaccatgctagcctggcgaacaggtgggtaaatcgttctctccagcaccaggcaggccacggggtctccggcgcgaccctcgtaaaaattgtcgctatgattgaaaaccatcacagagagacgttcccggtggccggcgtgaatgattcgacaagatgaatacacccccggaacattggcgtccgcgagtgaaaaaaagcgcccgaggaagcaataaggcactacaatgctcagtctcaagtccagcaaagcgatgccatgcggatgaagcacaaaattctcaggtgcgtacaaaatgtaattactcccctcctgcacaggcagcaaagcccccgatccctccaggtacacatacaaagcctcagcgtccatagcttaccgagcagcagcacacaacaggcgcaagagtcagagaaaggctgagctctaacctgtccacccgctctctgctcaatatatagcccagatctacactgacgtaaaggccaaagtctaaaaatacccgccaaataatcacacacgcccagcacacgcccagaaaccggtgacacactcaaaaaaatacgcgcacttcctcaaacgcccaaaactgccgtcatttccgggttcccacgctacgtcatcaaaacacgactttcaaattccgtcgaccgttaaaaacgtcacccgccccgcccctaacggtcgcccgtctctcagccaatcagcgccccgcatccccaaattcaaacacctcatttgcatattaacgcgcacaaaaagtttgagg

SEQ ID NO: 3 - DNA, 11447 bp, Venezuelan equine encephalitis virus
  source 1..11447: mol_type = genomic DNA
atgggcggcgcatgagagaagcccagaccaattacctacccaaaatggagaaagttcacgttgacatcgaggaagacagcccattcctcagagctttgcagcggagcttcccgcagtttgaggtagaagccaagcaggtcactgataatgaccatgctaatgccagagcgttttcgcatctggcttcaaaactgatcgaaacggaggtggacccatccgacacgatccttgacattggaagtgcgcccgcccgcagaatgtattctaagcacaagtatcattgtatctgtccgatgagatgtgcggaagatccggacagattgtataagtatgcaactaagctgaagaaaaactgtaaggaaataactgataaggaattggacaagaaaatgaaggagctcgccgccgtcatgagcgaccctgacctggaaactgagactatgtgcctccacgacgacgagtcgtgtcgctacgaagggcaagtcgctgtttaccaggatgtatacgcggttgacggaccgacaagtctctatcaccaagccaataagggagttagagtcgcctactggataggctttgacaccaccccttttatgtttaagaacttggctggagcatatccatcatactctaccaactgggccgacgaaaccgtgttaacggctcgtaacataggcctatgcagctctgacgttatggagcggtcacgtagagggatgtccattcttagaaagaagtatttgaaaccatccaacaatgttctattctctgttggctcgaccatctaccacgagaagagggacttactgaggagctggcacctgccgtctgtatttcacttacgtggcaagcaaaattacacatgtcggtgtgagactatagttagttgcgacgggtacgtcgttaaaagaatagctatcagtccaggcctgtatgggaagccttcaggctatgctgctacgatgcaccgcgagggattcttgtgctgcaaagtgacagacacattgaacggggagagggtctcttttcccgtgtgcacgtatgtgccagctacattgtgtgaccaaatgactggcatactggcaacagatgtcagtgcggacgacgcgcaaaaactgctggttgggctcaaccagcgtatagtcgtcaacggtcgcacccagagaaacaccaataccatgaaaaattaccttttgcccgtagtggcccaggcatttgctaggtgggcaaaggaatataaggaagatcaagaagatgaaaggccactaggactacgagatagacagttagtcatggggtgttgttgggcttttagaaggcacaagataacatctatttataagcgcccggatacccaaaccatcatcaaagtgaacagcgatttccactcattcgtgctgcccaggataggcagtaacacattggagatcgggctgagaacaagaatcaggaaaatgttagaggagcacaaggagccgtcacctctcattaccgccgaggacgtacaagaagctaagtgcgcagccgatgaggctaaggaggtgcgtgaagccgaggagttgcgcgcagctctaccacctttggcagctgatgttgaggagcccactctggaagccgatgtcgacttgatgttacaagaggctggggccggctcagtggagacacctcgtggcttgataaaggttaccagctacgctggcgaggacaagatcggctcttacgctgtgctttctccgcaggctgtactcaagagtgaaaaattatcttgcatccaccctctcgctgaacaagtcatagtgataacacactctggccgaaaagggcgttatgccgtggaaccataccatggtaaagtagtggtgccagagggacatgcaatacccgtccaggactttcaagctctgagtgaaagtgccaccattgtgtacaacgaacgtgagttcgtaaacaggtacctgcaccatattgccacacatggaggagcgctgaacactgatgaagaatattacaaaactgtcaagcccagcgagcacgacggcgaatacctgtacgacatcgacaggaaacagtgcgtcaagaaagaactagtcactgggctagggctcacaggcgagctggtggatcctcccttccatgaattcgcctacgagagtctgagaacacgaccagccgctccttaccaagtaccaaccataggggtgtatggcgtgccaggatcaggcaagtctggcatcattaaaagcgcagtcaccaaaaaagatctagtggtgagcgccaagaaagaaaactgtgcagaaattataagggacgtcaagaaaatgaaagggctggacgtcaatgccagaactgtggactcagtgctcttgaatggatgcaaacaccccgtagagaccctgtatattgacgaagcttttgcttgtcatgcaggtactctcagagcgctcatagccattataagacctaaaaaggcagtgctctgcggggatcccaaacagtgcggtttttttaacatgatgtgcctgaaagtgcattttaaccacgagatttgcacacaagtcttccacaaaagcatctctcgccgttgcactaaatctgtgacttcggtcgtctcaaccttgttttacgacaaaaaaatgagaacgacgaatccgaaagagactaagattgtgattgacactaccggcagtaccaaacctaagcaggacgatctcattctcacttgtttcagagggtgggtgaagcagttgcaaatagattacaaaggcaacgaaataatgacggcagctgcctctcaagggctgacccgtaaaggtgtgtatgccgttcggtacaaggtgaatgaaaatcctctgtacgcacccacctcagaacatgtgaacgtcctactgacccgcacggaggaccgcatcgtgtggaaaacactagccggcgacccatggataaaaacactgactgccaagtaccctgggaatttcactgccacgatagaggagtggcaagcagagcatgatgccatcatgaggcacatcttggagagaccggaccctaccgacgtcttccagaataaggcaaacgtgtgttgggccaaggctttagtgccggtgctgaagaccgctggcatagacatgaccactgaacaatggaacactgtggattattttgaaacggacaaagctcactcagcagagatagtattgaaccaactatgcgtgaggttctttggactcgatctggactccggtctattttctgcacccactgttccgttatccattaggaataatcactgggataactccccgtcgcctaacatgtacgggctgaataaagaagtggtccgtcagctctctcgcaggtacccacaactgcctcgggcagttgccactggaagagtctatgacatgaacactggtacactgcgcaattatgatccgcgcataaacctagtacctgtaaacagaagactgcctcatgctttagtcctccaccataatgaacacccacagagtgacttttcttcattcgtcagcaaattgaagggcagaactgtcctggtggtcggggaaaagttgtccgtcccaggcaaaatggttgactggttgtcagaccggcctgaggctaccttcagagctcggctggatttaggcatcccaggtgatgtgcccaaatatgacataatatttgttaatgtgaggaccccatataaataccatcactatcagcagtgtgaagaccatgccattaagcttagcatgttgaccaagaaagcttgtctgcatctgaatcccggcggaacctgtgtcagcataggttatggttacgctgacagggccagcgaaagcatcattggtgctatagcgcggcagttcaagttttcccgggtatgcaaaccgaaatcctcacttgaagagacggaagttctgtttgtattcattgggtacgatcgcaaggcccgtacgcacaatccttacaagctttcatcaaccttgaccaacatttatacaggttccagactccacgaagccggatgtgcaccctcatatcatgtggtgcgaggggatattgccacggccaccgaaggagtgattataaatgctgctaacagcaaaggacaacctggcggaggggtgtgcggagcgctgtataagaaattcccggaaagcttcgatttacagccgatcgaagtaggaaaagcgcgactggtcaaaggtgcagctaaacatatcattcatgccgtaggaccaaacttcaacaaagtttcggaggttgaaggtgacaaacagttggcagaggcttatgagtccatcgctaagattgtcaacgataacaattacaagtcagtagcgattccactgttgtccaccggcatcttttccgggaacaaagatcgactaacccaatcattgaaccatttgctgacagctttagacaccactgatgcagatgtagccatatactgcagggacaagaaatgggaaatgactctcaaggaagcagtggctaggagagaagcagtggaggagatatgcatatccgacgactcttcagtgacagaacctgatgcagagctggtgagggtgcatccgaagagttctttggctggaaggaagggctacagcacaagcgatggcaaaactttctcatatttggaagggaccaagtttcaccaggcggccaaggatatagcagaaattaatgccatgtggcccgttgcaacggaggccaatgagcaggtatgcatgtatatcctcggagaaagcatgagcagtattaggtcgaaatgccccgtcgaagagtcggaagcctccacaccacctagcacgctgccttgcttgtgcatccatgccatgactccagaaagagtacagcgcctaaaagcctcacgtccagaacaaattactgtgtgctcatcctttccattgccgaagtatagaatcactggtgtgcagaagatccaatgctcccagcctatattgttctcaccgaaagtgcctgcgtatattcatccaaggaagtatctcgtggaaacaccaccggtagacgagactccggagccatcggcagagaaccaatccacagaggggacacctgaacaaccaccacttataaccgaggatgagaccaggactagaacgcctgagccgatcatcatcgaagaggaagaagaggatagcataagtttgctgtcagatggcccgacccaccaggtgctgcaagtcgaggcagacattcacgggccgccctctgtatctagctcatcctggtccattcctcatgcatccgactttgatgtggacagtttatccatacttgacaccctggagggagctagcgtgaccagcggggcaacgtcagccgagactaactcttacttcgcaaagagtatggagtttctggcgcgaccggtgcctgcgcctcgaacagtattcaggaaccctccacatcccgctccgcgcacaagaacaccgtcacttgcacccagcagggcctgctcgagaaccagcctagtttccaccccgccaggcgtgaatagggtgatcactagagaggagctcgaggcgcttaccccgtcacgcactcctagcaggtcggtctcgagaaccagcctggtctccaacccgccaggcgtaaatagggtgattacaagagaggagtttgaggcgttcgtagcacaacaacaatgacggtttgatgcgggtgcatacatcttttcctccgacaccggtcaagggcatttacaacaaaaatcagtaaggcaaacggtgctatccgaagtggtgttggagaggaccgaattggagatttcgtatgccccgcgcctcgaccaagaaaaagaagaattactacgcaagaaattacagttaaatcccacacctgctaacagaagcagataccagtccaggaaggtggagaacatgaaagccataacagctagacgtattctgcaaggcctagggcattatttgaaggcagaaggaaaagtggagtgctaccgaaccctgcatcctgttcctttgtattcatctagtgtgaaccgtgccttttcaagccccaaggtcgcagtggaagcctgtaacgccatgttgaaagagaactttccgactgtggcttcttactgtattattccagagtacgatgcctatttggacatggttgacggagcttcatgctgcttagacactgccagtttttgccctgcaaagctgcgcagctttccaaagaaacactcctatttggaacccacaatacgatcggcagtgccttcagcgatccagaacacgctccagaacgtcctggcagctgccacaaaaagaaattgcaatgtcacgcaaatgagagaattgcccgtattggattcggcggcctttaatgtggaatgcttcaagaaatatgcgtgtaataatgaatattgggaaacgtttaaagaaaaccccatcaggcttactgaagaaaacgtggtaaattacattaccaaattaaaaggaccaaaagctgctgctctttttgcgaagacacataatttgaatatgttgcaggacataccaatggacaggtttgtaatggacttaaagagagacgtgaaagtgactccaggaacaaaacatactgaagaacggcccaaggtacaggtgatccaggctgccgatccgctagcaacagcgtatctgtgcggaatccaccgagagctggttaggagattaaatgcggtcctgcttccgaacattcatacactgtttgatatgtcggctgaagactttgacgctattatagccgagcacttccagcctggggattgtgttctggaaactgacatcgcgtcgtttgataaaagtgaggacgacgccatggctctgaccgcgttaatgattctggaagacttaggtgtggacgcagagctgttgacgctgattgaggcggctttcggcgaaatttcatcaatacatttgcccactaaaactaaatttaaattcggagccatgatgaaatctggaatgttcctcacactgtttgtgaacacagtcattaacattgtaatcgcaagcagagtgttgagagaacggctaaccggatcaccatgtgcagcattcattggagatgacaatatcgtgaaaggagtcaaatcggacaaattaatggcagacaggtgcgccacctggttgaatatggaagtcaagattatagatgctgtggtgggcgagaaagcgccttatttctgtggagggtttattttgtgtgactccgtgaccggcacagcgtgccgtgtggcagaccccctaaaaaggctgtttaagcttggcaaacctctggcagcagacgatgaacatgatgatgacaggagaagggcattgcatgaagagtcaacacgctggaaccgagtgggtattctttcagagctgtgcaaggcagtagaatcaaggtatgaaaccgtaggaacttccatcatagttatggccatgactactctagctagcagtgttaaatcattcagctacctgagaggggcccctataactctctacggctaacctgaatggactacgacatagtctagtccgccaagatgttcccgttccagccaatgtatccgatgcagccaatgccctatcgcaacccgttcgcggccccgcgcaggccctggttccccagaaccgacccttttctggcgatgcaggtgcaggaattaacccgctcgatggctaacctgacgttcaagcaacgccgggacgcgccacctgaggggccatccgctaagaaaccgaagaaggaggcctcgcaaaaacagaaagggggaggccaagggaagaagaagaagaaccaagggaagaagaaggctaagacagggccgcctaatccgaaggcacagaatggaaacaagaagaagaccaacaagaaaccaggcaagagacagcgcatggtcatgaaattggaatctgacaagacgttcccaatcatgttggaagggaagataaacggctacgcttgtgtggtcggagggaagttattcaggccgatgcatgtggaaggcaagatcgacaacgacgttctggccgcgcttaagacgaagaaagcatccaaatacgatcttgagtatgcagatgtgccacagaacatgcgggccgatacattcaaatacacccatgagaaaccccaaggctattacagctggcatcatggagcagtccaatatgaaaatgggcgtttcacggtgccgaaaggagttggggccaagggagacagcggacgacccattctggataaccagggacgggtggtcgctattgtgctgggaggtgtgaatgaaggatctaggacagccctttcagtcgtcatgtggaacgagaagggagttaccgtgaagtatactccggagaactgcgagcaatggtcactagtgaccaccatgtgtctgctcgccaatgtgacgttcccatgtgctcaaccaccaatttgctacgacagaaaaccagcagagactttggccatgctcagcgttaacgttgacaacccgggctacgatgagctgctggaagcagctgttaagtgccccggaaggaaaaggagatccaccgaggagctgtttaaggagtataagctaacgcgcccttacatggccagatgcatcagatgtgcagttgggagctgccatagtccaatagcaatcgaggcagtaaagagcgacgggcacgacggttatgttagacttcagacttcctcgcagtatggcctggattcctccggcaacttaaagggcaggaccatgcggtatgacatgcacgggaccattaaagagataccactacatcaagtgtcactccatacatctcgcccgtgtcacattgtggatgggcacggttatttcctgcttgccaggtgcccggcaggggactccatcaccatggaatttaagaaagattccgtcacacactcctgctcggtgccgtatgaagtgaaatttaatcctgtaggcagagaactctatactcatcccccagaacacggagtagagcaagcgtgccaagtctacgcacatgatgcacagaacagaggagcttatgtcgagatgcacctcccgggctcagaagtggacagcagtttggtttccttgagcggcagttcagtcaccgtgacacctcctgttgggactagcgccctggtggaatgcgagtgtggcggcacaaagatctccgagaccatcaacaagacaaaacagttcagccagtgcacaaagaaggagcagtgcagagcatatcggctgcagaacgataagtgggtgtataattctgacaaactgcccaaagcagcgggagccaccttaaaaggaaaactgcatgtcccattcttgctggcagacggcaaatgcaccgtgcctctagcaccagaacctatgataacctttggtttcagatcagtgtcactgaaactgcaccctaagaatcccacatatctaaccacccgccaacttgctgatgagcctcactacacgcacgagctcatatctgaaccagctgttaggaattttaccgtcaccgaaaaagggtgggagtttgtatggggaaaccacccgccgaaaaggttttgggcacaggaaacagcacccggaaatccacatgggctaccgcacgaggtgataactcattattaccacagataccctatgtccaccatcctgggtttgtcaatttgtgccgccattgcaaccgtttccgttgcagcgtctacctggctgttttgcagatctagagttgcgtgcctaactccttaccggctaacacctaacgctaggataccattttgtctggctgtgctttgctgcgcccgcactgcccgggccgagaccacctgggagtccttggatcacctatggaacaataaccaacagatgttctggattcaattgctgatccctctggccgccttgatcgtagtgactcgcctgctcaggtgcgtgtgctgtgtcgtgccttttttagtcatggccggcgccgcaggcgccggcgcctacgagcacgcgaccacgatgccgagccaagcgggaatctcgtataacactatagtcaacagagcaggctacgcaccactccctatcagcataacaccaacaaagatcaagctgatacctacagtgaacttggagtacgtcacctgccactacaaaacaggaatggattcaccagccatcaaatgctgcggatctcaggaatgcactccaacttacaggcctgatgaacagtgcaaagtcttcacaggggtttacccgttcatgtggggtggtgcatattgcttttgcgacactgagaacacccaagtcagcaaggcctacgtaatgaaatctgacgactgccttgcggatcatgctgaagcatataaagcgcacacagcctcagtgcaggcgttcctcaacatcacagtgggagaacactctattgtgactaccgtgtatgtgaatggagaaactcctgtgaatttcaatggggtcaaattaactgcaggtccgctttccacagcttggacaccctttgatcgcaaaatcgtgcagtatgccggggagatctataattatgattttcctgagtatggggcaggacaaccaggagcatttggagatatacaatccagaacagtctcaagctcagatctgtatgccaataccaacctagtgctgcagagacccaaagcaggagcgatccacgtgccatacactcaggcaccttcgggttttgagcaatggaagaaagataaagctccatcattgaaatttaccgcccctttcggatgcgaaatatatacaaaccccattcgcgccgaaaactgtgctgtagggtcaattccattagcctttgacattcccgacgccttgttcaccagggtgtcagaaacaccgacactttcagcggccgaatgcactcttaacgagtgcgtgtattcttccgactttggtgggatcgccacggtcaagtactcggccagcaagtcaggcaagtgcgcagtccatgtgccatcagggactgctaccctaaaagaagcagcagtcgagctaaccgagcaagggtcggcgactatccatttctcgaccgcaaatatccacccggagttcaggctccaaatatgcacatcatatgttacgtgcaaaggtgattgtcaccccccgaaagaccatattgtgacacaccctcagtatcacgcccaaacatttacagccgcggtgtcaaaaaccgcgtggacgtggttaacatccctgctgggaggatcagccgtaattattataattggcttggtgctggctactattgtggccatgtacgtgctgaccaaccagaaacataattgaatacagcagcaattggcaagctgcttacatagaactcgcggcgattggcatgccgccttaaaatttttattttattttttcttttcttttccgaatcggattttgtttttaatatttc

SEQ ID NO: 4 - DNA, 9577 bp, synthetic construct
  misc_feature 1..9577: note = Description of Artificial Sequence: Synthetic polynucleotide
  source 1..9577: mol_type = other DNA
atgggcggcgcatgagagaagcccagaccaattacctacccaaaatggagaaagttcacgttgacatcgaggaagacagcccattcctcagagctttgcagcggagcttcccgcagtttgaggtagaagccaagcaggtcactgataatgaccatgctaatgccagagcgttttcgcatctggcttcaaaactgatcgaaacggaggtggacccatccgacacgatccttgacattggaagtgcgcccgcccgcagaatgtattctaagcacaagtatcattgtatctgtccgatgagatgtgcggaagatccggacagattgtataagtatgcaactaagctgaagaaaaactgtaaggaaataactgataaggaattggacaagaaaatgaaggagctcgccgccgtcatgagcgaccctgacctggaaactgagactatgtgcctccacgacgacgagtcgtgtcgctacgaagggcaagtcgctgtttaccaggatgtatacgcggttgacggaccgacaagtctctatcaccaagccaataagggagttagagtcgcctactggataggctttgacaccaccccttttatgtttaagaacttggctggagcatatccatcatactctaccaactgggccgacgaaaccgtgttaacggctcgtaacataggcctatgcagctctgacgttatggagcggtcacgtagagggatgtccattcttagaaagaagtatttgaaaccatccaacaatgttctattctctgttggctcgaccatctaccacgagaagagggacttactgaggagctggcacctgccgtctgtatttcacttacgtggcaagcaaaattacacatgtcggtgtgagactatagttagttgcgacgggtacgtcgttaaaagaatagctatcagtccaggcctgtatgggaagccttcaggctatgctgctacgatgcaccgcgagggattcttgtgctgcaaagtgacagacacattgaacggggagagggtctcttttcccgtgtgcacgtatgtgccagctacattgtgtgaccaaatgactggcatactggcaacagatgtcagtgcggacgacgcgcaaaaactgctggttgggctcaaccagcgtatagtcgtcaacggtcgcacccagagaaacaccaataccatgaaaaattaccttttgcccgtagtggcccaggcatttgctaggtgggcaaaggaatataaggaagatcaagaagatgaaaggccactaggactacgagatagacagttagtcatggggtgttgttgggcttttagaaggcacaagataacatctatttataagcgcccggatacccaaaccatcatcaaagtgaacagcgatttccactcattcgtgctgcccaggataggcagtaacacattggagatcgggctgagaacaagaatcaggaaaatgttagaggagcacaaggagccgtcacctctcattaccgccgaggacgtacaagaagctaagtgcgcagccgatgaggctaaggaggtgcgtgaagccgaggagttgcgcgcagctctaccacctttggcagctgatgttgaggagcccactctggaagccgatgtcgacttgatgttacaagaggctggggccggctcagtggagacacctcgtggcttgataaaggttaccagctacgctggcgaggacaagatcggctcttacgctgtgctttctccgcaggctgtactcaagagtgaaaaattatcttgcatccaccctctcgctgaacaagtcatagtgataacacactctggccgaaaagggcgttatgccgtggaaccataccatggtaaagtagtggtgccagagggacatgcaatacccgtccaggactttcaagctctgagtgaaagtgccaccattgtgtacaacgaacgtgagttcgtaaacaggtacctgcaccatattgccacacatggaggagcgctgaacactgatgaagaatattacaaaactgtcaagcccagcgagcacgacggcgaatacctgtacgacatcgacaggaaacagtgcgtcaagaaagaactagtcactgggctagggctcacaggcgagctggtggatcctcccttccatgaattcgcctacgagagtctgagaacacgaccagccgctccttaccaagtaccaaccataggggtgtatggcgtgccaggatcaggcaagtctggcatcattaaaagcgcagtcaccaaaaaagatctagtggtgagcgccaagaaagaaaactgtgcagaaattataagggacgtcaagaaaatgaaagggctggacgtcaatgccagaactgtggactcagtgctcttgaatggatgcaaacaccccgtagagaccctgtatattgacgaagcttttgcttgtcatgcaggtactctcagagcgctcatagccattataagacctaaaaaggcagtgctctgcggggatcccaaacagtgcggtttttttaacatgatgtgcctgaaagtgcattttaaccacgagatttgcacacaagtcttccacaaaagcatctctcgccgttgcactaaatctgtgacttcggtcgtctcaaccttgttttacgacaaaaaaatgagaacgacgaatccgaaagagactaagattgtgattgacactaccggcagtaccaaacctaagcaggacgatctcattctcacttgtttcagagggtgggtgaagcagttgcaaatagattacaaaggcaacgaaataatgacggcagctgcctctcaagggctgacccgtaaaggtgtgtatgccgttcggtacaaggtgaatgaaaatcctctgtacgcacccacctcagaacatgtgaacgtcctactgacccgcacggaggaccgcatcgtgtggaaaacactagccggcgacccatggataaaaacactgactgccaagtaccctgggaatttcactgccacgatagaggagtggcaagcagagcatgatgccatcatgaggcacatcttggagagaccggaccctaccgacgtcttccagaataaggcaaacgtgtgttgggccaaggctttagtgccggtgctgaagaccgctggcatagacatgaccactgaacaatggaacactgtggattattttgaaacggacaaagctcactcagcagagatagtattgaaccaactatgcgtgaggttctttggactcgatctggactccggtctattttctgcacccactgttccgttatccattaggaataatcactgggataactccccgtcgcctaacatgtacgggctgaataaagaagtggtccgtcagctctctcgcaggtacccacaactgcctcgggcagttgccactggaagagtctatgacatgaacactggtacactgcgcaattatgatccgcgcataaacctagtacctgtaaacagaagactgcctcatgctttagtcctccaccataatgaacacccacagagtgacttttcttcattcgtcagcaaattgaagggcagaactgtcctggtggtcggggaaaagttgtccgtcccaggcaaaatggttgactggttgtcagaccggcctgaggctaccttcagagctcggctggatttaggcatcccaggtgatgtgcccaaatatgacataatatttgttaatgtgaggaccccatataaataccatcactatcagcagtgtgaagaccatgccattaagcttagcatgttgaccaagaaagcttgtctgcatctgaatcccggcggaacctgtgtcagcataggttatggttacgctgacagggccagcgaaagcatcattggtgctatagcgcggcagttcaagttttcccgggtatgcaaaccgaaatcctcacttgaagagacggaagttctgtttgtattcattgggtacgatcgcaaggcccgtacgcacaatccttacaagctttcatcaaccttgaccaacatttatacaggttccagactccacgaagccggatgtgcaccctcatatcatgtggtgcgaggggatattgccacggccaccgaaggagtgattataaatgctgctaacagcaaaggacaacctggcggaggggtgtgcggagcgctgtataagaaattcccggaaagcttcgatttacagccgatcgaagtaggaaaagcgcgactggtcaaaggtgcagctaaacatatcattcatgccgtaggaccaaacttcaacaaagtttcggaggttgaaggtgacaaacagttggcagaggcttatgagtccatcgctaagattgtcaacgataacaattacaagtcagtagcgattccactgttgtccaccggcatcttttccgggaacaaagatcgactaacccaatcattgaaccatttgctgacagctttagacaccactgatgcagatgtagccatatactgcagggacaagaaatgggaaatgactctcaaggaagcagtggctaggagagaagcagtggaggagatatgcatatccgacgactcttcagtgacagaacctgatgcagagctggtgagggtgcatccgaagagttctttggctggaaggaagggctacagcacaagcgatggcaaaactttctcatatttggaagggaccaagtttcaccaggcggccaaggatatagcagaaattaatgccatgtggcccgttgcaacggaggccaatgagcaggtatgcatgtatatcctcggagaaagcatgagcagtattaggtcgaaatgccccgtcgaagagtcggaagcctccacaccacctagcacgctgccttgcttgtgcatccatgccatgactccagaaagagtacagcgcctaaaagcctcacgtccagaacaaattactgtgtgctcatcctttccattgccgaagtatagaatcactggtgtgcagaagatccaatgctcccagcctatattgttctcaccgaaagtgcctgcgtatattcatccaaggaagtatctcgtggaaacaccaccggtagacgagactccggagccatcggcagagaaccaatccacagaggggacacctgaacaaccaccacttataaccgaggatgagaccaggactagaacgcctgagccgatcatcatcgaagaggaagaagaggatagcataagtttgctgtcagatggcccgacccaccaggtgctgcaagtcgaggcagacattcacgggccgccctctgtatctagctcatcctggtccattcctcatgcatccgactttgatgtggacagtttatccatacttgacaccctggagggagctagcgtgaccagcggggcaacgtcagccgagactaactcttacttcgcaaagagtatggagtttctggcgcgaccggtgcctgcgcctcgaacagtattcaggaaccctccacatcccgctccgcgcacaagaacaccgtcacttgcacccagcagggcctgctcgagaaccagcctagtttccaccccgccaggcgtgaatagggtgatcactagagaggagctcgaggcgcttaccccgtcacgcactcctagcaggtcggtctcgagaaccagcctggtctccaacccgccaggcgtaaatagggtgattacaagagaggagtttgaggcgttcgtagcacaacaacaatgacggtttgatgcgggtgcatacatcttttcctccgacaccggtcaagggcatttacaacaaaaatcagtaaggcaaacggtgctatccgaagtggtgttggagaggaccgaattggagatttcgtatgccccgcgcctcgaccaagaaaaagaagaattactacgcaagaaattacagttaaatcccacacctgctaacagaagcagataccagtccaggaaggtggagaacatgaaagccataacagctagacgtattctgcaaggcctagggcattatttgaaggcagaaggaaaagtggagtgctaccgaaccctgcatcctgttcctttgtattcatctagtgtgaaccgtgccttttcaagccccaaggtcgcagtggaagcctgtaacgccatgttgaaagagaactttccgactgtggcttcttactgtattattccagagtacgatgcctatttggacatggttgacggagcttcatgctgcttagacactgccagtttttgccctgcaaagctgcgcagctttccaaagaaacactcctatttggaacccacaatacgatcggcagtgccttcagcgatccagaacacgctccagaacgtcctggcagctgccacaaaaagaaattgcaatgtcacgcaaatgagagaattgcccgtattggattcggcggcctttaatgtggaatgcttcaagaaatatgcgtgtaataatgaatattgggaaacgtttaaagaaaaccccatcaggcttactgaagaaaacgtggtaaattacattaccaaattaaaaggaccaaaagctgctgctctttttgcgaagacacataatttgaatatgttgcaggacataccaatggacaggtttgtaatggacttaaagagagacgtgaaagtgactccaggaacaaaacatactgaagaacggcccaaggtacaggtgatccaggctgccgatccgctagcaacagcgtatctgtgcggaatccaccgagagctggttaggagattaaatgcggtcctgcttccgaacattcatacactgtttgatatgtcggctgaagactttgacgctattatagccgagcacttccagcctggggattgtgttctggaaactgacatcgcgtcgtttgataaaagtgaggacgacgccatggctctgaccgcgttaatgattctggaagacttaggtgtggacgcagagctgttgacgctgattgaggcggctttcggcgaaatttcatcaatacatttgcccactaaaactaaatttaaattcggagccatgatgaaatctggaatgttcctcacactgtttgtgaacacagtcattaacattgtaatcgcaagcagagtgttgagagaacggctaaccggatcaccatgtgcagcattcattggagatgacaatatcgtgaaaggagtcaaatcggacaaattaatggcagacaggtgcgccacctggttgaatatggaagtcaagattatagatgctgtggtgggcgagaaagcgccttatttctgtggagggtttattttgtgtgactccgtgaccggcacagcgtgccgtgtggcagaccccctaaaaaggctgtttaagcttggcaaacctctggcagcagacgatgaacatgatgatgacaggagaagggcattgcatgaagagtcaacacgctggaaccgagtgggtattctttcagagctgtgcaaggcagtagaatcaaggtatgaaaccgtaggaacttccatcatagttatggccatgactactctagctagcagtgttaaatcattcagctacctgagaggggcccctataactctctacggctaacctgaatggactacgactctagaatagtctttaattaagccaccatggcaggcatgtttcaggcgctgagcgaaggctgcaccccgtatgatattaaccagatgctgaacgtgctgggcgatcatcaggtctcaggccttgagcagcttgagagtataatcaactttgaaaaactgactgaatggaccagttctaatgttatgcctatcctgtctcctctgacaaagggcatcctgggcttcgtgtttaccctgaccgtgccttctgagagaggacttagctgcattagcgaagcggatgcgaccaccccggaaagcgcgaacctgggcgaagaaattctgagccagctgtatctttggccaagggtgacctaccattcccctagttatgcttaccaccaatttgaaagacgagccaaatataaaagacacttccccggctttggccagagcctgctgtttggctaccctgtgtacgtgttcggcgattgcgtgcagggcgattgggatgcgattcgctttcgctattgcgcgccgccgggctatgcgctgctgcgctgcaacgataccaactatagcgctctgctggctgtgggggccctagaaggacccaggaatcaggactggcttggtgtcccaagacaacttgtaactcggatgcaggctattcagaatgccggcctgtgtaccctggtggccatgctggaagagacaatcttctggctgcaagcgtttctgatggcgctgaccgatagcggcccgaaaaccaacattattgtggatagccagtatgtgatgggcattagcaaaccgagctttcaggaatttgtggattgggaaaacgtgagcccggaactgaacagcaccgatcagccgttttggcaagccggaatcctggccagaaatctggtgcctatggtggccacagtgcagggccagaacctgaagtaccagggtcagtcactagtcatctctgcttctatcattgtcttcaacctgctggaactggaaggtgattatcgagatgatggcaacgtgtgggtgcataccccgctgagcccgcgcaccctgaacgcgtgggtgaaagcggtggaagaaaaaaaaggtattccagttcacctagagctggccagtatgaccaacatggagctcatgagcagtattgtgcatcagcaggtcagaacatacggccccgtgttcatgtgtctcggcggactgcttacaatggtggctggtgctgtgtggctgacagtgcgagtgctcgagctgttccgggccgcgcagctggccaacgacgtggtcctccagatcatggagctttgtggtgcagcgtttcgccaggtgtgccataccaccgtgccgtggccgaacgcgagcctgaccccgaaatggaacaacgaaaccacccagccccagatcgccaactgcagcgtgtatgacttttttgtgtggctccattattattctgttcgagacacactttggccaagggtgacctaccatatgaacaaatatgcgtatcatatgctggaaagacgagccaaatataaaagaggaccaggacctggcgctaaatttgtggccgcctggacactgaaagccgctgctggtcctggacctggccagtacatcaaggccaacagcaagttcatcggcatcaccgaactcggacccggaccaggctgatgattcgaacggccgtatcacgcccaaacatttacagccgcggtgtcaaaaaccgcgtggacgtggttaacatccctgctgggaggatcagccgtaattattataattggcttggtgctggctactattgtggccatgtacgtgctgaccaaccagaaacataattgaatacagcagcaattggcaagctgcttacatagaactcgcggcgattggcatgccgccttaaaatttttattttattttttcttttcttttccgaatcggattttgtttttaatatttcaaaaaaaaaaaaaaaaaaaaaaaaaaaaaaaaaaaaaaaaaaaaaaaaaaaaaaaaaaaaaaaaaaaaaaaaaaaaaaaa

SEQ ID NO: 5 - DNA, 11447 bp, Venezuelan equine encephalitis virus; identical to SEQ ID NO: 3
  source 1..11447: mol_type = genomic DNA

SEQ ID NO: 6 - DNA, 7894 bp, synthetic construct
  misc_feature 1..7894: note = Description of Artificial Sequence: Synthetic polynucleotide
  source 1..7894: mol_type = other DNA
atgggcggcgcatgagagaagcccagaccaattacctacccaaaatggagaaagttcacgttgacatcgaggaagacagcccattcctcagagctttgcagcggagcttcccgcagtttgaggtagaagccaagcaggtcactgataatgaccatgctaatgccagagcgttttcgcatctggcttcaaaactgatcgaaacggaggtggacccatccgacacgatccttgacattggaagtgcgcccgcccgcagaatgtattctaagcacaagtatcattgtatctgtccgatgagatgtgcggaagatccggacagattgtataagtatgcaactaagctgaagaaaaactgtaaggaaataactgataaggaattggacaagaaaatgaaggagctcgccgccgtcatgagcgaccctgacctggaaactgagactatgtgcctccacgacgacgagtcgtgtcgctacgaagggcaagtcgctgtttaccaggatgtatacgcggttgacggaccgacaagtctctatcaccaagccaataagggagttagagtcgcctactggataggctttgacaccaccccttttatgtttaagaacttggctggagcatatccatcatactctaccaactgggccgacgaaaccgtgttaacggctcgtaacataggcctatgcagctctgacgttatggagcggtcacgtagagggatgtccattcttagaaagaagtatttgaaaccatccaacaatgttctattctctgttggctcgaccatctaccacgagaagagggacttactgaggagctggcacctgccgtctgtatttcacttacgtggcaagcaaaattacacatgtcggtgtgagactatagttagttgcgacgggtacgtcgttaaaagaatagctatcagtccaggcctgtatgggaagccttcaggctatgctgctacgatgcaccgcgagggattcttgtgctgcaaagtgacagacacattgaacggggagagggtctcttttcccgtgtgcacgtatgtgccagctacattgtgtgaccaaatgactggcatactggcaacagatgtcagtgcggacgacgcgcaaaaactgctggttgggctcaaccagcgtatagtcgtcaacggtcgcacccagagaaacaccaataccatgaaaaattaccttttgcccgtagtggcccaggcatttgctaggtgggcaaaggaatataaggaagatcaagaagatgaaaggccactaggactacgagatagacagttagtcatggggtgttgttgggcttttagaaggcacaagataacatctatttataagcgcccggatacccaaaccatcatcaaagtgaacagcgatttccactcattcgtgctgcccaggataggcagtaacacattggagatcgggctgagaacaagaatcaggaaaatgttagaggagcacaaggagccgtcacctctcattaccgccgaggacgtacaagaagctaagtgcgcagccgatgaggctaaggaggtgcgtgaagccgaggagttgcgcgcagctctaccacctttggcagctgatgttgaggagcccactctggaagccgatgtcgacttgatgttacaagaggctggggccggctcagtggagacacctcgtggcttgataaaggttaccagctacgctggcgaggacaagatcggctcttacgctgtgctttctccgcaggctgtactcaagagtgaaaaattatcttgcatccaccctctcgctgaacaagtcatagtgataacacactctggccgaaaagggcgttatgccgtggaaccataccatggtaaagtagtggtgccagagggacatgcaatacccgtccaggactttcaagctctgagtgaaagtgccaccattgtgtacaacgaacgtgagttcgtaaacaggtacctgcaccatattgccacacatggaggagcgctgaacactgatgaagaatattacaaaactgtcaagcccagcgagcacgacggcgaatacctgtacgacatcgacaggaaacagtgcgtcaagaaagaactagtcactgggctagggctcacaggcgagctggtggatcctcccttccatgaattcgcctacgagagtctgagaacacgaccagccgctccttaccaagtaccaaccataggggtgtatggcgtgccaggatcaggcaagtctggcatcattaaaagcgcagtcaccaaaaaagatctagtggtgagcgccaagaaagaaaactgtgcagaaattataagggacgtcaagaaaatgaaagggctggacgtcaatgccagaactgtggactcagtgctcttgaatggatgcaaacaccccgtagagaccctgtatattgacgaagcttttgcttgtcatgcaggtactctcagagcgctcatagccattataagacctaaaaaggcagtgctctgcggggatcccaaacagtgcggtttttttaacatgatgtgcctgaaagtgcattttaaccacgagatttgcacacaagtcttccacaaaagcatctctcgccgttgcactaaatctgtgacttcggtcgtctcaaccttgttttacgacaaaaaaatgagaacgacgaatccgaaagagactaagattgtgattgacactaccggcagtaccaaacctaagcaggacgatctcattctcacttgtttcagagggtgggtgaagcagttgcaaatagattacaaaggcaacgaaataatgacggcagctgcctctcaagggctgacccgtaaaggtgtgtatgccgttcggtacaaggtgaatgaaaatcctctgtacgcacccacctcagaacatgtgaacgtcctactgacccgcacggaggaccgcatcgtgtggaaaacactagccggcgacccatggataaaaacactgactgccaagtaccctgggaatttcactgccacgatagaggagtggcaagcagagcatgatgccatcatgaggcacatcttggagagaccggaccctaccgacgtcttccagaataaggcaaacgtgtgttgggccaaggctttagtgccggtgctgaagaccgctggcatagacatgaccactgaacaatggaacactgtggattattttgaaacggacaaagctcactcagcagagatagtattgaaccaactatgcgtgaggttctttggactcgatctggactccggtctattttctgcacccactgttccgttatccattaggaataatcactgggataactccccgtcgcctaacatgtacgggctgaataaagaagtggtccgtcagctctctcgcaggtacccacaactgcctcgggcagttgccactggaagagtctatgacatgaacactggtacactgcgcaattatgatccgcgcataaacctagtacctgtaaacagaagactgcctcatgctttagtcctccaccataatgaacacccacagagtgacttttcttcattcgtcagcaaattgaagggcagaactgtcctggtggtcggggaaaagttgtccgtcccaggcaaaatggttgactggttgtcagaccggcctgaggctaccttcagagctcggctggatttaggcatcccaggtgatgtgcccaaatatgacataatatttgttaatgtgaggaccccatataaataccatcactatcagcagtgtgaagaccatgccattaagcttagcatgttgaccaagaaagcttgtctgcatctgaatcccggcggaacctgtgtcagcataggttatggttacgctgacagggccagcgaaagcatcattggtgctatagcgcggcagttcaagttttcccgggtatgcaaaccgaaatcctcacttgaagagacggaagttctgtttgtattcattgggtacgatcgcaaggcccgtacgcacaatccttacaagctttcatcaaccttgaccaacatttatacaggttccagactccacgaagccggatgtgcaccctcatatcatgtggtgcgaggggatattgccacggccaccgaaggagtgattataaatgctgctaacagcaaaggacaacctggcggaggggtgtgcggagcgctgtataagaaattcccggaaagcttcgatttacagccgatcgaagtaggaaaagcgcgactggtcaaaggtgcagctaaacatatcattcatgccgtaggaccaaacttcaacaaagtttcggaggttgaaggtgacaaacagttggcagaggcttatgagtccatcgctaagattgtcaacgataacaattacaagtcagtagcgattccactgttgtccaccggcatcttttccgggaacaaagatcgactaacccaatcattgaaccatttgctgacagctttagacaccactgatgcagatgtagccatatactgcagggacaagaaatgggaaatgactctcaaggaagcagtggctaggagagaagcagtggaggagatatgcatatccgacgactcttcagtgacagaacctgatgcagagctggtgagggtgcatccgaagagttctttggctggaaggaagggctacagcacaagcgatggcaaaactttctcatatttggaagggaccaagtttcaccaggcggccaaggatatagcagaaattaatgccatgtggcccgttgcaacggaggccaatgagcaggtatgcatgtatatcctcggagaaagcatgagcagtattaggtcgaaatgccccgtcgaagagtcggaagcctccacaccacctagcacgctgccttgcttgtgcatccatgccatgactccagaaagagtacagcgcctaaaagcctcacgtccagaacaaattactgtgtgctcatcctttccattgccgaagtatagaatcactggtgtgcagaagatccaatgctcccagcctatattgttctcaccgaaagtgcctgcgtatattcatccaaggaagtatctcgtggaaacaccaccggtagacgagactccggagccatcggcagagaaccaatccacagaggggacacctgaacaaccaccacttataaccgaggatgagaccaggactagaacgcctgagccgatcatcatcgaagaggaagaagaggatagcataagtttgctgtcagatggcccgacccaccaggtgctgcaagtcgaggcagacattcacgggccgccctctgtatctagctcatcctggtccattcctcatgcatccgactttgatgtggacagtttatccatacttgacaccctggagggagctagcgtgaccagcggggcaacgtcagccgagactaactcttacttcgcaaagagtatggagtttctggcgcgaccggtgcctgcgcctcgaacagtattcaggaaccctccacatcccgctccgcgcacaagaacaccgtcacttgcacccagcagggcctgctcgagaaccagcctagtttccaccccgccaggcgtgaatagggtgatcactagagaggagctcgaggcgcttaccccgtcacgcactcctagcaggtcggtctcgagaaccagcctggtctccaacccgccaggcgtaaatagggtgattacaagagaggagtttgaggcgttcgtagcacaacaacaatgacggtttgatgcgggtgcatacatcttttcctccgacaccggtcaagggcatttacaacaaaaatcagtaaggcaaacggtgctatccgaagtggtgttggagaggaccgaattggagatttcgtatgccccgcgcctcgaccaagaaaaagaagaattactacgcaagaaattacagttaaatcccacacctgctaacagaagcagataccagtccaggaaggtggagaacatgaaagccataacagctagacgtattctgcaaggcctagggcattatttgaaggcagaaggaaaagtggagtgctaccgaaccctgcatcctgttcctttgtattcatctagtgtgaaccgtgccttttcaagccccaaggtcgcagtggaagcctgtaacgccatgttgaaagagaactttccgactgtggcttcttactgtattattccagagtacgatgcctatttggacatggttgacggagcttcatgctgcttagacactgccagtttttgccctgcaaagctgcgcagctttccaaagaaacactcctatttggaacccacaatacgatcggcagtgccttcagcgatccagaacacgctccagaacgtcctggcagctgccacaaaaagaaattgcaatgtcacgcaaatgagagaattgcccgtattggattcggcggcctttaatgtggaatgcttcaagaaatatgcgtgtaataatgaatattgggaaacgtttaaagaaaaccccatcaggcttactgaagaaaacgtggtaaattacattaccaaattaaaaggaccaaaagctgctgctctttttgcgaagacacataatttgaatatgttgcaggacataccaatggacaggtttgtaatggacttaaagagagacgtgaaagtgactccaggaacaaaacatactgaagaacggcccaaggtacaggtgatccaggctgccgatccgctagcaacagcgtatctgtgcggaatccaccgagagctggttaggagattaaatgcggtcctgcttccgaacattcatacactgtttgatatgtcggctgaagactttgacgctattatagccgagcacttccagcctggggattgtgttctggaaactgacatcgcgtcgtttgataaaagtgaggacgacgccatggctctgaccgcgttaatgattctggaagacttaggtgtggacgcagagctgttgacgctgattgaggcggctttcggcgaaatttcatcaatacatttgcccactaaaactaaatttaaattcggagccatgatgaaatctggaatgttcctcacactgtttgtgaacacagtcattaacattgtaatcgcaagcagagtgttgagagaacggctaaccggatcaccatgtgcagcattcattggagatgacaatatcgtgaaaggagtcaaatcggacaaattaatggcagacaggtgcgccacctggttgaatatggaagtcaagattatagatgctgtggtgggcgagaaagcgccttatttctgtggagggtttattttgtgtgactccgtgaccggcacagcgtgccgtgtggcagaccccctaaaaaggctgtttaagcttggcaaacctctggcagcagacgatgaacatgatgatgacaggagaagggcattgcatgaagagtcaacacgctggaaccgagtgggtattctttcagagctgtgcaaggcagtagaatcaaggtatgaaaccgtaggaacttccatcatagttatggccatgactactctagctagcagtgttaaatcattcagctacctgagaggggcccctataactctctacggctaacctgaatggactacgactatcacgcccaaacatttacagccgcggtgtcaaaaaccgcgtggacgtggttaacatccctgctgggaggatcagccgtaattattataattggcttggtgctggctactattgtggccatgtacgtgctgaccaaccagaaacataattgaatacagcagcaattggcaagctgcttacatagaactcgcggcgattggcatgccgccttaaaatttttattttattttttcttttcttttccgaatcggattttgtttttaatatttcaaaaaaaaaaaaaaaaaaaaaaaaaaaaaaaaaaaaaaaaaaaaaaaaaaaaaaaaaaaaaaaaaaaaaaaaaaaaaaaa

SEQ ID NO: 7 - DNA, 7893 bp, synthetic construct
  misc_feature 1..7893: note = Description of Artificial Sequence: Synthetic polynucleotide
  source 1..7893: mol_type = other DNA
ataggcggcgcatgagagaagcccagaccaattacctacccaaaatggagaaagttcacgttgacatcgaggaagacagcccattcctcagagctttgcagcggagcttcccgcagtttgaggtagaagccaagcaggtcactgataatgaccatgctaatgccagagcgttttcgcatctggcttcaaaactgatcgaaacggaggtggacccatccgacacgatccttgacattggaagtgcgcccgcccgcagaatgtattctaagcacaagtatcattgtatctgtccgatgagatgtgcggaagatccggacagattgtataagtatgcaactaagctgaagaaaaactgtaaggaaataactgataaggaattggacaagaaaatgaaggagctcgccgccgtcatgagcgaccctgacctggaaactgagactatgtgcctccacgacgacgagtcgtgtcgctacgaagggcaagtcgctgtttaccaggatgtatacgcggttgacggaccgacaagtctctatcaccaagccaataagggagttagagtcgcctactggataggctttgacaccaccccttttatgtttaagaacttggctggagcatatccatcatactctaccaactgggccgacgaaaccgtgttaacggctcgtaacataggcctatgcagctctgacgttatggagcggtcacgtagagggatgtccattcttagaaagaagtatttgaaaccatccaacaatgttctattctctgttggctcgaccatctaccacgagaagagggacttactgaggagctggcacctgccgtctgtatttcacttacgtggcaagcaaaattacacatgtcggtgtgagactatagttagttgcgacgggtacgtcgttaaaagaatagctatcagtccaggcctgtatgggaagccttcaggctatgctgctacgatgcaccgcgagggattcttgtgctgcaaagtgacagacacattgaacggggagagggtctcttttcccgtgtgcacgtatgtgccagctacattgtgtgaccaaatgactggcatactggcaacagatgtcagtgcggacgacgcgcaaaaactgctggttgggctcaaccagcgtatagtcgtcaacggtcgcacccagagaaacaccaataccatgaaaaattaccttttgcccgtagtggcccaggcatttgctaggtgggcaaaggaatataaggaagatcaagaagatgaaaggccactaggactacgagatagacagttagtcatggggtgttgttgggcttttagaaggcacaagataacatctatttataagcgcccggatacccaaaccatcatcaaagtgaacagcgatttccactcattcgtgctgcccaggataggcagtaacacattggagatcgggctgagaacaagaatcaggaaaatgttagaggagcacaaggagccgtcacctctcattaccgccgaggacgtacaagaagctaagtgcgcagccgatgaggctaaggaggtgcgtgaagccgaggagttgcgcgcagctctaccacctttggcagctgatgttgaggagcccactctggaagccgatgtcgacttgatgttacaagaggctggggccggctcagtggagacacctcgtggcttgataaaggttaccagctacgatggcgaggacaagatcggctcttacgctgtgctttctccgcaggctgtactcaagagtgaaaaattatcttgcatccaccctctcgctgaacaagtcatagtgataacacactctggccgaaaagggcgttatgccgtggaaccataccatggtaaagtagtggtgccagagggacatgcaatacccgtccaggactttcaagctctgagtgaaagtgccaccattgtgtacaacgaacgtgagttcgtaaacaggtacctgcaccatattgccacacatggaggagcgctgaacactgatgaagaatattacaaaactgtcaagcccagcgagcacgacggcgaatacctgtacgacatcgacaggaaacagtgcgtcaagaaagaactagtcactgggctagggctcacaggcgagctggtggatcctcccttccatgaattcgcctacgagagtctgagaacacgaccagccgctccttaccaagtaccaaccataggggtgtatggcgtgccaggatcaggcaagtctggcatcattaaaagcgcagtcaccaaaaaagatctagtggtgagcgccaagaaagaaaactgtgcagaaattataagggacgtcaagaaaatgaaagggctggacgtcaatgccagaactgtggactcagtgctcttgaatggatgcaaacaccccgtagagaccctgtatattgacgaagcttttgcttgtcatgcaggtactctcagagcgctcatagccattataagacctaaaaaggcagtgctctgcggggatcccaaacagtgcggtttttttaacatgatgtgcctgaaagtgcattttaaccacgagatttgcacacaagtcttccacaaaagcatctctcgccgttgcactaaatctgtgacttcggtcgtctcaaccttgttttacgacaaaaaaatgagaacgacgaatccgaaagagactaagattgtgattgacactaccggcagtaccaaacctaagcaggacgatctcattctcacttgtttcagagggtgggtgaagcagttgcaaatagattacaaaggcaacgaaataatgacggcagctgcctctcaagggctgacccgtaaaggtgtgtatgccgttcggtacaaggtgaatgaaaatcctctgtacgcacccacctcagaacatgtgaacgtcctactgacccgcacggaggaccgcatcgtgtggaaaacactagccggcgacccatggataaaaacactgactgccaagtaccctgggaatttcactgccacgatagaggagtggcaagcagagcatgatgccatcatgaggcacatcttggagagaccggaccctaccgacgtcttccagaataaggcaaacgtgtgttgggccaaggctttagtgccggtgctgaagaccgctggcatagacatgaccactgaacaatggaacactgtggattattttgaaacggacaaagctcactcagcagagatagtattgaaccaactatgcgtgaggttctttggactcgatctggactccggtctattttctgcacccactgttccgttatccattaggaataatcactgggataactccccgtcgcctaacatgtacgggctgaataaagaagtggtccgtcagctctctcgcaggtacccacaactgcctcgggcagttgccactggaagagtctatgacatgaacactggtacactgcgcaattatgatccgcgcataaacctagtacctgtaaacagaagactgcctcatgctttagtcctccaccataatgaacacccacagagtgacttttcttcattcgtcagcaaattgaagggcagaactgtcctggtggtcggggaaaagttgtccgtcccaggcaaaatggttgactggttgtcagaccggcctgaggctaccttcagagctcggctggatttaggcatcccaggtgatgtgcccaaatatgacataatatttgttaatgtgaggaccccatataaataccatcactatcagcagtgtgaagaccatgccattaagcttagcatgttgaccaagaaagcttgtctgcatctgaatcccggcggaacctgtgtcagcataggttatggttacgctgacagggccagcgaaagcatcattggtgctatagcgcggcagttcaagttttcccgggtatgcaaaccgaaatcctcacttgaagagacggaagttctgtttgtattcattgggtacgatcgcaaggcccgtacgcacaatccttacaagctttcatcaaccttgaccaacatttatacaggttccagactccacgaagccggatgtgcaccctcatatcatgtggtgcgaggggatattgccacggccaccgaaggagtgattataaatgctgctaacagcaaaggacaacctggcggaggggtgtgcggagcgctgtataagaaattcccggaaagcttcgatttacagccgatcgaagtaggaaaagcgcgactggtcaaaggtgcagctaaacatatcattcatgccgtaggaccaaacttcaacaaagtttcggaggttgaaggtgacaaacagttggcagaggcttatgagtccatcgctaagattgtcaacgataacaattacaagtcagtagcgattccactgttgtccaccggcatcttttccgggaacaaagatcgactaacccaatcattgaaccatttgctgacagctttagacaccactgatgcagatgtagccatatactgcagggacaagaaatgggaaatgactctcaaggaagcagtggctaggagagaagcagtggaggagatatgcatatccgacgactcttcagtgacagaacctgatgcagagctggtgagggtgcatccgaagagttctttggctggaaggaagggctacagcacaagcgatggcaaaactttctcatatttggaagggaccaagtttcaccaggcggccaaggatatagcagaaattaatgccatgtggcccgttgcaacggaggccaatgagcaggtatgcatgtatatcctcggagaaagcatgagcagtattaggtcgaaatgccccgtcgaagagtcggaagcctccacaccacctagcacgctgccttgcttgtgcatccatgccatgactccagaaagagtacagcgcctaaaagcctcacgtccagaacaaattactgtgtgctcatcctttccattgccgaagtatagaatcactggtgtgcagaagatccaatgctcccagcctatattgttctcaccgaaagtgcctgcgtatattcatccaaggaagtatctcgtggaaacaccaccggtagacgagactccggagccatcggcagagaaccaatccacagaggggacacctgaacaaccaccacttataaccgaggatgagaccaggactagaacgcctgagccgatcatcatcgaagaggaagaagaggatagcataagtttgctgtcagatggcccgacccaccaggtgctgcaagtcgaggcagacattcacgggccgccctctgtatctagctcatcctggtccattcctcatgcatccgactttgatgtggacagtttatccatacttgacaccctggagggagctagcgtgaccagcggggcaacgtcagccgagactaactcttacttcgcaaagagtatggagtttctggcgcgaccggtgcctgcgcctcgaacagtattcaggaaccctccacatcccgctccgcgcacaagaacaccgtcacttgcacccagcagggcctgctcgagaaccagcctagtttccaccccgccaggcgtgaatagggtgatcactagagaggagctcgaggcgcttaccccgtcacgcactcctagcaggtcggtctcgagaaccagcctggtctccaacccgccaggcgtaaatagggtgattacaagagaggagtttgaggcgttcgtagcacaacaacaatgacggtttgatgcgggtgcatacatcttttcctccgacaccggtcaagggcatttacaacaaaaatcagtaaggcaaacggtgctatccgaagtggtgttggagaggaccgaattggagatttcgtatgccccgcgcctcgaccaagaaaaagaagaattactacgcaagaaattacagttaaatcccacacctgctaacagaagcagataccagtccaggaaggtggagaacatgaaagccataacagctagacgtattctgcaaggcctagggcattatttgaaggcagaaggaaaagtggagtgctaccgaaccctgcatcctgttcctttgtattcatctagtgtgaaccgtgccttttcaagccccaaggtcgcagtggaagcctgtaacgccatgttgaaagagaactttccgactgtggcttcttactgtattattccagagtacgatgcctatttggacatggttgacggagcttcatgctgcttagacactgccagtttttgccctgcaaagctgcgcagctttccaaagaaacactcctatttggaacccacaatacgatcggcagtgccttcagcgatccagaacacgctccagaacgtcctggcagctgccacaaaaagaaattgcaatgtcacgcaaatgagagaattgcccgtattggattcggcggcctttaatgtggaatgcttcaagaaatatgcgtgtaataatgaatattgggaaacgtttaaagaaaaccccatcaggcttactgaagaaaacgtggtaaattacattaccaaattaaaaggaccaaaagctgctgctctttttgcgaagacacataatttgaatatgttgcaggacataccaatggacaggtttgtaatggacttaaagagagacgtgaaagtgactccaggaacaaaacatactgaagaacggcccaaggtacaggtgatccaggctgccgatccgctagcaacagcgtatctgtgcggaatccaccgagagctggttaggagattaaatgcggtcctgcttccgaacattcatacactgtttgatatgtcggctgaagactttgacgctattatagccgagcacttccagcctggggattgtgttctggaaactgacatcgcgtcgtttgataaaagtgaggacgacgccatggctctgaccgcgttaatgattctggaagacttaggtgtggacgcagagctgttgacgctgattgaggcggctttcggcgaaatttcatcaatacatttgcccactaaaactaaatttaaattcggagccatgatgaaatctggaatgttcctcacactgtttgtgaacacagtcattaacattgtaatcgcaagcagagtgttgagagaacggctaaccggatcaccatgtgcagcattcattggagatgacaatatcgtgaaaggagtcaaatcggacaaattaatggcagacaggtgcgccacctggttgaatatggaagtcaagattatagatgctgtggtgggcgagaaagcgccttatttctgtggagggtttattttgtgtgactccgtgaccggcacagcgtgccgtgtggcagaccccctaaaaaggctgtttaagcttggcaaacctctggcagcagacgatgaacatgatgatgacaggagaagggcattgcatgaagagtcaacacgctggaaccgagtgggtattctttcagagctgtgcaaggcagtagaatcaaggtatgaaaccgtaggaacttccatcatagttatggccatgactactctagctagcagtgttaaatcattcagctacctgagaggggcccctataactctctacggctaacctgaatggactacgactatcacgcccaaacatttacagccgcggtgtcaaaaaccgcgtggacgtggttaacatccctgctgggaggatcagccgtaattattataattggcttggtgctggctactattgtggccatgtacgtgctgaccaaccagaaacataattgaatacagcagcaattggcaagctgcttacatagaactcgcggcgattggcatgccgccttaaaatttttattttatttttcttttcttttccgaatcggattttgtttttaatatttcaaaaaaaaaaaaaaaaaaaaaaaaaaaaaaaaaaaaaaaaaaaaaaaaaaaaaaaaaaaaaaaaaaaaaaaaaaaaaaaa

SEQ ID NO: 8 - DNA, 7927 bp, synthetic construct
  misc_feature 1..7927: note = Description of Artificial Sequence: Synthetic polynucleotide
  source 1..7927: mol_type = other DNA
taatacgactcactataggatgggcggcgcatgagagaagcccagaccaattacctacccaaaatggagaaagttcacgttgacatcgaggaagacagcccattcctcagagctttgcagcggagcttcccgcagtttgaggtagaagccaagcaggtcactgataatgaccatgctaatgccagagcgttttcgcatctggcttcaaaactgatcgaaacggaggtggacccatccgacacgatccttgacattggaagtgcgcccgcccgcagaatgtattctaagcacaagtatcattgtatctgtccgatgagatgtgcggaagatccggacagattgtataagtatgcaactaagctgaagaaaaactgtaaggaaataactgataaggaattggacaagaaaatgaaggagctcgccgccgtcatgagcgaccctgacctggaaactgagactatgtgcctccacgacgacgagtcgtgtcgctacgaagggcaagtcgctgtttaccaggatgtatacgcggttgacggaccgacaagtctctatcaccaagccaataagggagttagagtcgcctactggataggctttgacaccaccccttttatgtttaagaacttggctggagcatatccatcatactctaccaactgggccgacgaaaccgtgttaacggctcgtaacataggcctatgcagctctgacgttatggagcggtcacgtagagggatgtccattcttagaaagaagtatttgaaaccatccaacaatgttctattctctgttggctcgaccatctaccacgagaagagggacttactgaggagctggcacctgccgtctgtatttcacttacgtggcaagcaaaattacacatgtcggtgtgagactatagttagttgcgacgggtacgtcgttaaaagaatagctatcagtccaggcctgtatgggaagccttcaggctatgctgctacgatgcaccgcgagggattcttgtgctgcaaagtgacagacacattgaacggggagagggtctcttttcccgtgtgcacgtatgtgccagctacattgtgtgaccaaatgactggcatactggcaacagatgtcagtgcggacgacgcgcaaaaactgctggttgggctcaaccagcgtatagtcgtcaacggtcgcacccagagaaacaccaataccatgaaaaattaccttttgcccgtagtggcccaggcatttgctaggtgggcaaaggaatataaggaagatcaagaagatgaaaggccactaggactacgagatagacagttagtcatggggtgttgttgggcttttagaaggcacaagataacatctatttataagcgcccggatacccaaaccatcatcaaagtgaacagcgatttccactcattcgtgctgcccaggataggcagtaacacattggagatcgggctgagaacaagaatcaggaaaatgttagaggagcacaaggagccgtcacctctcattaccgccgaggacgtacaagaagctaagtgcgcagccgatgaggctaaggaggtgcgtgaagccgaggagttgcgcgcagctctaccacctttggcagctgatgttgaggagcccactctggaagccgatgtcgacttgatgttacaagaggctggggccggctcagtggagacacctcgtggcttgataaaggttaccagctacgctggcgaggacaagatcggctcttacgctgtgctttctccgcaggctgtactcaagagtgaaaaattatcttgcatccaccctctcgctgaacaagtcatagtgataacacactctggccgaaaagggcgttatgccgtggaaccataccatggtaaagtagtggtgccagagggacatgcaatacccgtccaggactttcaagctctgagtgaaagtgccaccattgtgtacaacgaacgtgagttcgtaaacaggtacctgcaccatattgccacacatggaggagcgctgaacactgatgaagaatattacaaaactgtcaagcccagcgagcacgacggcgaatacctgtacgacatcgacaggaaacagtgcgtcaagaaagaactagtcactgggctagggctcacaggcgagctggtggatcctcccttccatgaattcgcctacgagagtctgagaacacgaccagccgctccttaccaagtaccaaccataggggtgtatggcgtgccaggatcaggcaagtctggcatcattaaaagcgcagtcaccaaaaaagatctagtggtgagcgccaagaaagaaaactgtgcagaaattataagggacgtcaagaaaatgaaagggctggacgtcaatgccagaactgtggactcagtgctcttgaatggatgcaaacaccccgtagagaccctgtatattgacgaagcttttgcttgtcatgcaggtactctcagagcgctcatagccattataagacctaaaaaggcagtgctctgcggggatcccaaacagtgcggtttttttaacatgatgtgcctgaaagtgcattttaaccacgagatttgcacacaagtcttccacaaaagcatctctcgccgttgcactaaatctgtgacttcggtcgtctcaaccttgttttacgacaaaaaaatgagaacgacgaatccgaaagagactaagattgtgattgacactaccggcagtaccaaacctaagcaggacgatctcattctcacttgtttcagagggtgggtgaagcagttgcaaatagattacaaaggcaacgaaataatgacggcagctgcctctcaagggctgacccgtaaaggtgtgtatgccgttcggtacaaggtgaatgaaaatcctctgtacgcacccacctcagaacatgtgaacgtcctactgacccgcacggaggaccgcatcgtgtggaaaacactagccggcgacccatggataaaaacactgactgccaagtaccctgggaatttcactgccacgatagaggagtggcaagcagagcatgatgccatcatgaggcacatcttggagagaccggaccctaccgacgtcttccagaataaggcaaacgtgtgttgggccaaggctttagtgccggtgctgaagaccgctggcatagacatgaccactgaacaatggaacactgtggattattttgaaacggacaaagctcactcagcagagatagtattgaaccaactatgcgtgaggttctttggactcgatctggactccggtctattttctgcacccactgttccgttatccattaggaataatcactgggataactccccgtcgcctaacatgtacgggctgaataaagaagtggtccgtcagctctctcgcaggtacccacaactgcctcgggcagttgccactggaagagtctatgacatgaacactggtacactgcgcaattatgatccgcgcataaacctagtacctgtaaacagaagactgcctcatgctttagtcctccaccataatgaacacccacagagtgacttttcttcattcgtcagcaaattgaagggcagaactgtcctggtggtcggggaaaagttgtccgtcccaggcaaaatggttgactggttgtcagaccggcctgaggctaccttcagagctcggctggatttaggcatcccaggtgatgtgcccaaatatgacataatatttgttaatgtgaggaccccatataaataccatcactatcagcagtgtgaagaccatgccattaagcttagcatgttgaccaagaaagcttgtctgcatctgaatcccggcggaacctgtgtcagcataggttatggttacgctgacagggccagcgaaagcatcattggtgctatagcgcggcagttcaagttttcccgggtatgcaaaccgaaatcctcacttgaagagacggaagttctgtttgtattcattgggtacgatcgcaaggcccgtacgcacaatccttacaagctttcatcaaccttgaccaacatttatacaggttccagactccacgaagccggatgtgcaccctcatatcatgtggtgcgaggggatattgccacggccaccgaaggagtgattataaatgctgctaacagcaaaggacaacctggcggaggggtgtgcggagcgctgtataagaaattcccggaaagcttcgatttacagccgatcgaagtaggaaaagcgcgactggtcaaaggtgcagctaaacatatcattcatgccgtaggaccaaacttcaacaaagtttcggaggttgaaggtgacaaacagttggcagaggcttatgagtccatcgctaagattgtcaacgataacaattacaagtcagtagcgattccactgttgtccaccggcatcttttccgggaacaaagatcgactaacccaatcattgaaccatttgctgacagctttagacaccactgatgcagatgtagccatatactgcagggacaagaaatgggaaatgactctcaaggaagcagtggctaggagagaagcagtggaggagatatgcatatccgacgactcttcagtgacagaacctgatgcagagctggtgagggtgcatccgaagagttctttggctggaaggaagggctacagcacaagcgatggcaaaactttctcatatttggaagggaccaagtttcaccaggcggccaaggatatagcagaaattaatgccatgtggcccgttgcaacggaggccaatgagcaggtatgcatgtatatcctcggagaaagcatgagcagtattaggtcgaaatgccccgtcgaagagtcggaagcctccacaccacctagcacgctgccttgcttgtgcatccatgccatgactccagaaagagtacagcgcctaaaagcctcacgtccagaacaaattactgtgtgctcatcctttccattgccgaagtatagaatcactggtgtgcagaagatccaatgctcccagcctatattgttctcaccgaaagtgcctgcgtatattcatccaaggaagtatctcgtggaaacaccaccggtagacgagactccggagccatcggcagagaaccaatccacagaggggacacctgaacaaccaccacttataaccgaggatgagaccaggactagaacgcctgagccgatcatcatcgaagaggaagaagaggatagcataagtttgctgtcagatggcccgacccaccaggtgctgcaagtcgaggcagacattcacgggccgccctctgtatctagctcatcctggtccattcctcatgcatccgactttgatgtggacagtttatccatacttgacaccctggagggagctagcgtgaccagcggggcaacgtcagccgagactaactcttacttcgcaaagagtatggagtttctggcgcgaccggtgcctgcgcctcgaacagtattcaggaaccctccacatcccgctccgcgcacaagaacaccgtcacttgcacccagcagggcctgctcgagaaccagcctagtttccaccccgccaggcgtgaatagggtgatcactagagaggagctcgaggcgcttaccccgtcacgcactcctagcaggtcggtctcgagaaccagcctggtctccaacccgccaggcgtaaatagggtgattacaagagaggagtttgaggcgttcgtagcacaacaacaatgacggtttgatgcgggtgcatacatcttttcctccgacaccggtcaagggcatttacaacaaaaatcagtaaggcaaacggtgctatccgaagtggtgttggagaggaccgaattggagatttcgtatgccccgcgcctcgaccaagaaaaagaagaattactacgcaagaaattacagttaaatcccacacctgctaacagaagcagataccagtccaggaaggtggagaacatgaaagccataacagctagacgtattctgcaaggcctagggcattatttgaaggcagaaggaaaagtggagtgctaccgaaccctgcatcctgttcctttgtattcatctagtgtgaaccgtgccttttcaagccccaaggtcgcagtggaagcctgtaacgccatgttgaaagagaactttccgactgtggcttcttactgtattattccagagtacgatgcctatttggacatggttgacggagcttcatgctgcttagacactgccagtttttgccctgcaaagctgcgcagctttccaaagaaacactcctatttggaacccacaatacgatcggcagtgccttcagcgatccagaacacgctccagaacgtcctggcagctgccacaaaaagaaattgcaatgtcacgcaaatgagagaattgcccgtattggattcggcggcctttaatgtggaatgcttcaagaaatatgcgtgtaataatgaatattgggaaacgtttaaagaaaaccccatcaggcttactgaagaaaacgtggtaaattacattaccaaattaaaaggaccaaaagctgctgctctttttgcgaagacacataatttgaatatgttgcaggacataccaatggacaggtttgtaatggacttaaagagagacgtgaaagtgactccaggaacaaaacatactgaagaacggcccaaggtacaggtgatccaggctgccgatccgctagcaacagcgtatctgtgcggaatccaccgagagctggttaggagattaaatgcggtcctgcttccgaacattcatacactgtttgatatgtcggctgaagactttgacgctattatagccgagcacttccagcctggggattgtgttctggaaactgacatcgcgtcgtttgataaaagtgaggacgacgccatggctctgaccgcgttaatgattctggaagacttaggtgtggacgcagagctgttgacgctgattgaggcggctttcggcgaaatttcatcaatacatttgcccactaaaactaaatttaaattcggagccatgatgaaatctggaatgttcctcacactgtttgtgaacacagtcattaacattgtaatcgcaagcagagtgttgagagaacggctaaccggatcaccatgtgcagcattcattggagatgacaatatcgtgaaaggagtcaaatcggacaaattaatggcagacaggtgcgccacctggttgaatatggaagtcaagattatagatgctgtggtgggcgagaaagcgccttatttctgtggagggtttattttgtgtgactccgtgaccggcacagcgtgccgtgtggcagaccccctaaaaaggctgtttaagcttggcaaacctctggcagcagacgatgaacatgatgatgacaggagaagggcattgcatgaagagtcaacacgctggaaccgagtgggtattctttcagagctgtgcaaggcagtagaatcaaggtatgaaaccgtaggaacttccatcatagttatggccatgactactctagctagcagtgttaaatcattcagctacctgagaggggcccctataactctctacggctaacctgaatggactacgactatcacgcccaaacatttacagccgcggtgtcaaaaaccgcgtggacgtggttaacatccctgctgggaggatcagccgtaattattataattggcttggtgctggctactattgtggccatgtacgtgctgaccaaccagaaacataattgaatacagcagcaattggcaagctgcttacatagaactcgcggcgattggcatgccgccttaaaatttttattttattttttcttttcttttccgaatcggattttgtttttaatatttcaaaaaaaaaaaaaaaaaaaaaaaaaaaaaaaaaaaaaaaaaaaaaaaaaaaaaaaaaaaaaaaaaaaaaaaaaaaaaaaatacgtagtttaaac

SEQ ID NO: 9 - DNA, 7926 bp, synthetic construct
  misc_feature 1..7926: note = Description of Artificial Sequence: Synthetic polynucleotide
  source 1..7926: mol_type = other DNA
taatacgactcactataggataggcggcgcatgagagaagcccagaccaattacctacccaaaatggagaaagttcacgttgacatcgaggaagacagcccattcctcagagctttgcagcggagcttcccgcagtttgaggtagaagccaagcaggtcactgataatgaccatgctaatgccagagcgttttcgcatctggcttcaaaactgatcgaaacggaggtggacccatccgacacgatccttgacattggaagtgcgcccgcccgcagaatgtattctaagcacaagtatcattgtatctgtccgatgagatgtgcggaagatccggacagattgtataagtatgcaactaagctgaagaaaaactgtaaggaaataactgataaggaattggacaagaaaatgaaggagctcgccgccgtcatgagcgaccctgacctggaaactgagactatgtgcctccacgacgacgagtcgtgtcgctacgaagggcaagtcgctgtttaccaggatgtatacgcggttgacggaccgacaagtctctatcaccaagccaataagggagttagagtcgcctactggataggctttgacaccaccccttttatgtttaagaacttggctggagcatatccatcatactctaccaactgggccgacgaaaccgtgttaacggctcgtaacataggcctatgcagctctgacgttatggagcggtcacgtagagggatgtccattcttagaaagaagtatttgaaaccatccaacaatgttctattctctgttggctcgaccatctaccacgagaagagggacttactgaggagctggcacctgccgtctgtatttcacttacgtggcaagcaaaattacacatgtcggtgtgagactatagttagttgcgacgggtacgtcgttaaaagaatagctatcagtccaggcctgtatgggaagccttcaggctatgctgctacgatgcaccgcgagggattcttgtgctgcaaagtgacagacacattgaacggggagagggtctcttttcccgtgtgcacgtatgtgccagctacattgtgtgaccaaatgactggcatactggcaacagatgtcagtgcggacgacgcgcaaaaactgctggttgggctcaaccagcgtatagtcgtcaacggtcgcacccagagaaacaccaataccatgaaaaattaccttttgcccgtagtggcccaggcatttgctaggtgggcaaaggaatataaggaagatcaagaagatgaaaggccactaggactacgagatagacagttagtcatggggtgttgttgggcttttagaaggcacaagataacatctatttataagcgcccggatacccaaaccatcatcaaagtgaacagcgatttccactcattcgtgctgcccaggataggcagtaacacattggagatcgggctgagaacaagaatcaggaaaatgttagaggagcacaaggagccgtcacctctcattaccgccgaggacgtacaagaagctaagtgcgcagccgatgaggctaaggaggtgcgtgaagccgaggagttgcgcgcagctctaccacctttggcagctgatgttgaggagcccactctggaagccgatgtcgacttgatgttacaagaggctggggccggctcagtggagacacctcgtggcttgataaaggttaccagctacgatggcgaggacaagatcggctcttacgctgtgctttctccgcaggctgtactcaagagtgaaaaattatcttgcatccaccctctcgctgaacaagtcatagtgataacacactctggccgaaaagggcgttatgccgtggaaccataccatggtaaagtagtggtgccagagggacatgcaatacccgtccaggactttcaagctctgagtgaaagtgccaccattgtgtacaacgaacgtgagttcgtaaacaggtacctgcaccatattgccacacatggaggagcgctgaacactgatgaagaatattacaaaactgtcaagcccagcgagcacgacggcgaatacctgtacgacatcgacaggaaacagtgcgtcaagaaagaactagtcactgggctagggctcacaggcgagctggtggatcctcccttccatgaattcgcctacgagagtctgagaacacgaccagccgctccttaccaagtaccaaccataggggtgtatggcgtgccaggatcaggcaagtctggcatcattaaaagcgcagtcaccaaaaaagatctagtggtgagcgccaagaaagaaaactgtgcagaaattataagggacgtcaagaaaatgaaagggctggacgtcaatgccagaactgtggactcagtgctcttgaatggatgcaaacaccccgtagagaccctgtatattgacgaagcttttgcttgtcatgcaggtactctcagagcgctcatagccattataagacctaaaaaggcagtgctctgcggggatcccaaacagtgcggtttttttaacatgatgtgcctgaaagtgcattttaaccacgagatttgcacacaagtcttccacaaaagcatctctcgccgttgcactaaatctgtgacttcggtcgtctcaaccttgttttacgacaaaaaaatgagaacgacgaatccgaaagagactaagattgtgattgacactaccggcagtaccaaacctaagcaggacgatctcattctcacttgtttcagagggtgggtgaagcagttgcaaatagattacaaaggcaacgaaataatgacggcagctgcctctcaagggctgacccgtaaaggtgtgtatgccgttcggtacaaggtgaatgaaaatcctctgtacgcacccacctcagaacatgtgaacgtcctactgacccgcacggaggaccgcatcgtgtggaaaacactagccggcgacccatggataaaaacactgactgccaagtaccctgggaatttcactgccacgatagaggagtggcaagcagagcatgatgccatcatgaggcacatcttggagagaccggaccctaccgacgtcttccagaataaggcaaacgtgtgttgggccaaggctttagtgccggtgctgaagaccgctggcatagacatgaccactgaacaatggaacactgtggattattttgaaacggacaaagctcactcagcagagatagtattgaaccaactatgcgtgaggttctttggactcgatctggactccggtctattttctgcacccactgttccgttatccattaggaataatcactgggataactccccgtcgcctaacatgtacgggctgaataaagaagtggtccgtcagctctctcgcaggtacccacaactgcctcgggcagttgccactggaagagtctatgacatgaacactggtacactgcgcaattatgatccgcgcataaacctagtacctgtaaacagaagactgcctcatgctttagtcctccaccataatgaacacccacagagtgacttttcttcattcgtcagcaaattgaagggcagaactgtcctggtggtcggggaaaagttgtccgtcccaggcaaaatggttgactggttgtcagaccggcctgaggctaccttcagagctcggctggatttaggcatcccaggtgatgtgcccaaatatgacataatatttgttaatgtgaggaccccatataaataccatcactatcagcagtgtgaagaccatgccattaagcttagcatgttgaccaagaaagcttgtctgcatctgaatcccggcggaacctgtgtcagcataggttatggttacgctgacagggccagcgaaagcatcattggtgctatagcgcggcagttcaagttttcccgggtatgcaaaccgaaatcctcacttgaagagacggaagttctgtttgtattcattgggtacgatcgcaaggcccgtacgcacaatccttacaagctttcatcaaccttgaccaacatttatacaggttccagactccacgaagccggatgtgcaccctcatatcatgtggtgcgaggggatattgccacggccaccgaaggagtgattataaatgctgctaacagcaaaggacaacctggcggaggggtgtgcggagcgctgtataagaaattcccggaaagcttcgatttacagccgatcgaagtaggaaaagcgcgactggtcaaaggtgcagctaaacatatcattcatgccgtaggaccaaacttcaacaaagtttcggaggttgaaggtgacaaacagttggcagaggcttatgagtccatcgctaagattgtcaacgataacaattacaagtcagtagcgattccactgttgtccaccggcatcttttccgggaacaaagatcgactaacccaatcattgaaccatttgctgacagctttagacaccactgatgcagatgtagccatatactgcagggacaagaaatgggaaatgactctcaaggaagcagtggctaggagagaagcagtggaggagatatgcatatccgacgactcttcagtgacagaacctgatgcagagctggtgagggtgcatccgaagagttctttggctggaaggaagggctacagcacaagcgatggcaaaactttctcatatttggaagggaccaagtttcaccaggcggccaaggatatagcagaaattaatgccatgtggcccgttgcaacggaggccaatgagcaggtatgcatgtatatcctcggagaaagcatgagcagtattaggtcgaaatgccccgtcgaagagtcggaagcctccacaccacctagcacgctgccttgcttgtgcatccatgccatgactccagaaagagtacagcgcctaaaagcctcacgtccagaacaaattactgtgtgctcatcctttccattgccgaagtatagaatcactggtgtgcagaagatccaatgctcccagcctatattgttctcaccgaaagtgcctgcgtatattcatccaaggaagtatctcgtggaaacaccaccggtagacgagactccggagccatcggcagagaaccaatccacagaggggacacctgaacaaccaccacttataaccgaggatgagaccaggactagaacgcctgagccgatcatcatcgaagaggaagaagaggatagcataagtttgctgtcagatggcccgacccaccaggtgctgcaagtcgaggcagacattcacgggccgccctctgtatctagctcatcctggtccattcctcatgcatccgactttgatgtggacagtttatccatacttgacaccctggagggagctagcgtgaccagcggggcaacgtcagccgagactaactcttacttcgcaaagagtatggagtttctggcgcgaccggtgcctgcgcctcgaacagtattcaggaaccctccacatcccgctccgcgcacaagaacaccgtcacttgcacccagcagggcctgctcgagaaccagcctagtttccaccccgccaggcgtgaatagggtgatcactagagaggagctcgaggcgcttaccccgtcacgcactcctagcaggtcggtctcgagaaccagcctggtctccaacccgccaggcgtaaatagggtgattacaagagaggagtttgaggcgttcgtagcacaacaacaatgacggtttgatgcgggtgcatacatcttttcctccgacaccggtcaagggcatttacaacaaaaatcagtaaggcaaacggtgctatccgaagtggtgttggagaggaccgaattggagatttcgtatgccccgcgcctcgaccaagaaaaagaagaattactacgcaagaaattacagttaaatcccacacctgctaacagaagcagataccagtccaggaaggtggagaacatgaaagccataacagctagacgtattctgcaaggcctagggcattatttgaaggcagaaggaaaagtggagtgctaccgaaccctgcatcctgttcctttgtattcatctagtgtgaaccgtgccttttcaagccccaaggtcgcagtggaagcctgtaacgccatgttgaaagagaactttccgactgtggcttcttactgtattattccagagtacgatgcctatttggacatggttgacggagcttcatgctgcttagacactgccagtttttgccctgcaaagctgcgcagctttccaaagaaacactcctatttggaacccacaatacgatcggcagtgccttcagcgatccagaacacgctccagaacgtcctggcagctgccacaaaaagaaattgcaatgtcacgcaaatgagagaattgcccgtattggattcggcggcctttaatgtggaatgcttcaagaaatatgcgtgtaataatgaatattgggaaacgtttaaagaaaaccccatcaggcttactgaagaaaacgtggtaaattacattaccaaattaaaaggaccaaaagctgctgctctttttgcgaagacacataatttgaatatgttgcaggacataccaatggacaggtttgtaatggacttaaagagagacgtgaaagtgactccaggaacaaaacatactgaagaacggcccaaggtacaggtgatccaggctgccgatccgctagcaacagcgtatctgtgcggaatccaccgagagctggttaggagattaaatgcggtcctgcttccgaacattcatacactgtttgatatgtcggctgaagactttgacgctattatagccgagcacttccagcctggggattgtgttctggaaactgacatcgcgtcgtttgataaaagtgaggacgacgccatggctctgaccgcgttaatgattctggaagacttaggtgtggacgcagagctgttgacgctgattgaggcggctttcggcgaaatttcatcaatacatttgcccactaaaactaaatttaaattcggagccatgatgaaatctggaatgttcctcacactgtttgtgaacacagtcattaacattgtaatcgcaagcagagtgttgagagaacggctaaccggatcaccatgtgcagcattcattggagatgacaatatcgtgaaaggagtcaaatcggacaaattaatggcagacaggtgcgccacctggttgaatatggaagtcaagattatagatgctgtggtgggcgagaaagcgccttatttctgtggagggtttattttgtgtgactccgtgaccggcacagcgtgccgtgtggcagaccccctaaaaaggctgtttaagcttggcaaacctctggcagcagacgatgaacatgatgatgacaggagaagggcattgcatgaagagtcaacacgctggaaccgagtgggtattctttcagagctgtgcaaggcagtagaatcaaggtatgaaaccgtaggaacttccatcatagttatggccatgactactctagctagcagtgttaaatcattcagctacctgagaggggcccctataactctctacggctaacctgaatggactacgactatcacgcccaaacatttacagccgcggtgtcaaaaaccgcgtggacgtggttaacatccctgctgggaggatcagccgtaattattataattggcttggtgctggctactattgtggccatgtacgtgctgaccaaccagaaacataattgaatacagcagcaattggcaagctgcttacatagaactcgcggcgattggcatgccgccttaaaatttttattttatttttcttttcttttccgaatcggattttgtttttaatatttcaaaaaaaaaaaaaaaaaaaaaaaaaaaaaaaaaaaaaaaaaaaaaaaaaaaaaaaaaaaaaaaaaaaaaaaaaaaaaaaatacgtagtttaaac

SEQ ID NO: 10 - DNA, 36519 bp, synthetic construct
  misc_feature 1..36519: note = Description of Artificial Sequence: Synthetic polynucleotide
  source 1..36519: mol_type = other DNA
ccatcttcaataatatacctcaaactttttgtgcgcgttaatatgcaaatgaggcgtttgaatttggggaggaagggcggtgattggtcgagggatgagcgaccgttaggggcggggcgagtgacgttttgatgacgtggttgcgaggaggagccagtttgcaagttctcgtgggaaaagtgacgtcaaacgaggtgtggtttgaacacggaaatactcaattttcccgcgctctctgacaggaaatgaggtgtttctgggcggatgcaagtgaaaacgggccattttcgcgcgaaaactgaatgaggaagtgaaaatctgagtaatttcgcgtttatggcagggaggagtatttgccgagggccgagtagactttgaccgattacgtgggggtttcgattaccgtgtttttcacctaaatttccgcgtacggtgtcaaagtccggtgtttttacgtaggtgtcagctgatcgccagggtatttaaacctgcgctctccagtcaagaggccactcttgagtgccagcgagaagagttttctcctccgcgccgcgagtcagatctacactttgaaagatgaggcacctgagagacctgcccgatgagaaaatcatcatcgcttccgggaacgagattctggaactggtggtaaatgccatgatgggcgacgaccctccggagccccccaccccatttgagacaccttcgctgcacgatttgtatgatctggaggtggatgtgcccgaggacgatcccaatgaggaggcggtaaatgatttttttagcgatgccgcgctgctagctgccgaggaggcttcgagctctagctcagacagcgactcttcactgcatacccctagacccggcagaggtgagaaaaagatccccgagcttaaaggggaagagatggacttgcgctgctatgaggaatgcttgcccccgagcgatgatgaggacgagcaggcgatccagaacgcagcgagccagggagtgcaagccgccagcgagagctttgcgctggactgcccgcctctgcccggacacggctgtaagtcttgtgaatttcatcgcatgaatactggagataaagctgtgttgtgtgcactttgctatatgagagcttacaaccattgtgtttacagtaagtgtgattaagttgaactttagagggaggcagagagcagggtgactgggcgatgactggtttatttatgtatatatgttctttatataggtcccgtctctgacgcagatgatgagacccccactacaaagtccacttcgtcacccccagaaattggcacatctccacctgagaatattgttagaccagttcctgttagagccactgggaggagagcagctgtggaatgtttggatgacttgctacagggtggggttgaacctttggacttgtgtacccggaaacgccccaggcactaagtgccacacatgtgtgtttacttgaggtgatgtcagtatttatagggtgtggagtgcaataaaaaatgtgttgactttaagtgcgtggtttatgactcaggggtggggactgtgagtatataagcaggtgcagacctgtgtggttagctcagagcggcatggagatttggacggtcttggaagactttcacaagactagacagctgctagagaacgcctcgaacggagtctcttacctgtggagattctgcttcggtggcgacctagctaggctagtctacagggccaaacaggattatagtgaacaatttgaggttattttgagagagtgttctggtctttttgacgctcttaacttgggccatcagtctcactttaaccagaggatttcgagagcccttgattttactactcctggcagaaccactgcagcagtagccttttttgcttttattcttgacaaatggagtcaagaaacccatttcagcagggattaccagctggatttcttagcagtagctttgtggagaacatggaagtgccagcgcctgaatgcaatctccggctacttgccggtacagccgctagacactctgaggatcctgaatctccaggagagtcccagggcacgccaacgtcgccagcagcagcagcaggaggaggatcaagaagagaacccgagagccggcctggaccctccggcggaggaggaggagtagctgacctgtttcctgaactgcgccgggtgctgactaggtcttcgagtggtcgggagagggggattaagcgggagaggcatgatgagactaatcacagaactgaactgactgtgggtctgatgagtcgcaagcgcccagaaacagtgtggtggcatgaggtgcagtcgactggcacagatgaggtgtcggtgatgcatgagaggttttctctagaacaagtcaagacttgttggttagagcctgaggatgattgggaggtagccatcaggaattatgccaagctggctctgaggccagacaagaagtacaagattactaagctgataaatatcagaaatgcctgctacatctcagggaatggggctgaagtggagatctgtctccaggaaagggtggctttcagatgctgcatgatgaatatgtacccgggagtggtgggcatggatggggttacctttatgaacatgaggttcaggggagatgggtataatggcacggtctttatggccaataccaagctgacagtccatggctgctccttctttgggtttaataacacctgcatcgaggcctggggtcaggtcggtgtgaggggctgcagtttttcagccaactggatgggggtcgtgggcaggaccaagagtatgctgtccgtgaagaaatgcttgtttgagaggtgccacctgggggtgatgagcgagggcgaagccagaatccgccactgcgcctctaccgagacgggctgctttgtgctgtgcaagggcaatgctaagatcaagcataatatgatctgtggagcctcggacgagcgcggctaccagatgctgacctgcgccggcgggaacagccatatgctggccaccgtacatgtggcttcccatgctcgcaagccctggcccgagttcgagcacaatgtcatgaccaggtgcaatatgcatctggggtcccgccgaggcatgttcatgccctaccagtgcaacctgaattatgtgaaggtgctgctggagcccgatgccatgtccagagtgagcctgacgggggtgtttgacatgaatgtggaggtgtggaagattctgagatatgatgaatccaagaccaggtgccgagcctgcgagtgcggagggaagcatgccaggttccagcccgtgtgtgtggatgtgacggaggacctgcgacccgatcatttggtgttgccctgcaccgggacggagttcggttccagcggggaagaatctgactagagtgagtagtgttctggggcgggggaggacctgcatgagggccagaataactgaaatctgtgcttttctgtgtgttgcagcagcatgagcggaagcggctcctttgagggaggggtattcagcccttatctgacggggcgtctcccctcctgggcgggagtgcgtcagaatgtgatgggatccacggtggacggccggcccgtgcagcccgcgaactcttcaaccctgacctatgcaaccctgagctcttcgtcgttggacgcagctgccgccgcagctgctgcatctgccgccagcgccgtgcgcggaatggccatgggcgccggctactacggcactctggtggccaactcgagttccaccaataatcccgccagcctgaacgaggagaagctgttgctgctgatggcccagctcgaggccttgacccagcgcctgggcgagctgacccagcaggtggctcagctgcaggagcagacgcgggccgcggttgccacggtgaaatccaaataaaaaatgaatcaataaataaacggagacggttgttgattttaacacagagtctgaatctttatttgatttttcgcgcgcggtaggccctggaccaccggtctcgatcattgagcacccggtggatcttttccaggacccggtagaggtgggcttggatgttgaggtacatgggcatgagcccgtcccgggggtggaggtagctccattgcagggcctcgtgctcgggggtggtgttgtaaatcacccagtcatagcaggggcgcagggcatggtgttgcacaatatctttgaggaggagactgatggccacgggcagccctttggtgtaggtgtttacaaatctgttgagctgggagggatgcatgcggggggagatgaggtgcatcttggcctggatcttgagattggcgatgttaccgcccagatcccgcctggggttcatgttgtgcaggaccaccagcacggtgtatccggtgcacttggggaatttatcatgcaacttggaagggaaggcgtgaaagaatttggcgacgcctttgtgcccgcccaggttttccatgcactcatccatgatgatggcgatgggcccgtgggcggcggcctgggcaaagacgtttcgggggtcggacacatcatagttgtggtcctgggtgaggtcatcataggccattttaatgaatttggggcggagggtgccggactgggggacaaaggtaccctcgatcccgggggcgtagttcccctcacagatctgcatctcccaggctttgagctcggagggggggatcatgtccacctgcggggcgataaagaacacggtttccggggcgggggagatgagctgggccgaaagcaagttccggagcagctgggacttgccgcagccggtggggccgtagatgaccccgatgaccggctgcaggtggtagttgagggagagacagctgccgtcctcccggaggaggggggccacctcgttcatcatctcgcgcacgtgcatgttctcgcgcaccagttccgccaggaggcgctctccccccagggataggagctcctggagcgaggcgaagtttttcagcggcttgagtccgtcggccatgggcattttggagagggtttgttgcaagagttccaggcggtcccagagctcggtgatgtgctctacggcatctcgatccagcagacctcctcgtttcgcgggttgggacggctgcgggagtagggcaccagacgatgggcgtccagcgcagccagggtccggtccttccagggtcgcagcgtccgcgtcagggtggtctccgtcacggtgaaggggtgcgcgccgggctgggcgcttgcgagggtgcgcttcaggctcatccggctggtcgaaaaccgctcccgatcggcgccctgcgcgtcggccaggtagcaattgaccatgagttcgtagttgagcgcctcggccgcgtggcctttggcgcggagcttacctttggaagtctgcccgcaggcgggacagaggagggacttgagggcgtagagcttgggggcgaggaagacggactcgggggcgtaggcgtccgcgccgcagtgggcgcagacggtctcgcactccacgagccaggtgaggtcgggctggtcggggtcaaaaaccagtttcccgccgttctttttgatgcgtttcttacctttggtctccatgagctcgtgtccccgctgggtgacaaagaggctgtccgtgtccccgtagaccgactttatgggccggtcctcgagcggtgtgccgcggtcctcctcgtagaggaaccccgcccactccgagacgaaagcccgggtccaggccagcacgaaggaggccacgtgggacgggtagcggtcgttgtccaccagcgggtccaccttttccagggtatgcaaacacatgtccccctcgtccacatccaggaaggtgattggcttgtaagtgtaggccacgtgaccgggggtcccggccgggggggtataaaagggtgcgggtccctgctcgtcctcactgtcttccggatcgctgtccaggagcgccagctgttggggtaggtattccctctcgaaggcgggcatgacctcggcactcaggttgtcagtttctagaaacgaggaggatttgatattgacggtgccggcggagatgcctttcaagagcccctcgtccatctggtcagaaaagacgatctttttgttgtcgagcttggtggcgaaggagccgtagagggcgttggagaggagcttggcgatggagcgcatggtctggtttttttccttgtcggcgcgctccttggcggcgatgttgagctgcacgtactcgcgcgccacgcacttccattcggggaagacggtggtcagctcgtcgggcacgattctgacctgccagccccgattatgcagggtgatgaggtccacactggtggccacctcgccgcgcaggggctcattagtccagcagaggcgtccgcccttgcgcgagcagaaggggggcagggggtccagcatgacctcgtcgggggggtcggcatcgatggtgaagatgccgggcaggaggtcggggtcaaagtagctgatggaagtggccagatcgtccagggcagcttgccattcgcgcacggccagcgcgcgctcgtagggactgaggggcgtgccccagggcatgggatgggtaagcgcggaggcgtacatgccgcagatgtcgtagacgtagaggggctcctcgaggatgccgatgtaggtggggtagcagcgccccccgcggatgctggcgcgcacgtagtcatacagctcgtgcgagggggcgaggagccccgggcccaggttggtgcgactgggcttttcggcgcggtagacgatctggcggaaaatggcatgcgagttggaggagatggtgggcctttggaagatgttgaagtgggcgtggggcagtccgaccgagtcgcggatgaagtgggcgtaggagtcttgcagcttggcgacgagctcggcggtgactaggacgtccagagcgcagtagtcgagggtctcctggatgatgtcatacttgagctgtcccttttgtttccacagctcgcggttgagaaggaactcttcgcggtccttccagtactcttcgagggggaacccgtcctgatctgcacggtaagagcctagcatgtagaactggttgacggccttgtaggcgcagcagcccttctccacggggagggcgtaggcctgggcggccttgcgcagggaggtgtgcgtgagggcgaaagtgtccctgaccatgaccttgaggaactggtgcttgaagtcgatatcgtcgcagcccccctgctcccagagctggaagtccgtgcgcttcttgtaggcggggttgggcaaagcgaaagtaacatcgttgaagaggatcttgcccgcgcggggcataaagttgcgagtgatgcggaaaggttggggcacctcggcccggttgttgatgacctgggcggcgagcacgatctcgtcgaagccgttgatgttgtggcccacgatgtagagttccacgaatcgcggacggcccttgacgtggggcagtttcttgagctcctcgtaggtgagctcgtcggggtcgctgagcccgtgctgctcgagcgcccagtcggcgagatgggggttggcgcggaggaaggaagtccagagatccacggccagggcggtttgcagacggtcccggtactgacggaactgctgcccgacggccattttttcgggggtgacgcagtagaaggtgcgggggtccccgtgccagcgatcccatttgagctggagggcgagatcgagggcgagctcgacgagccggtcgtccccggagagtttcatgaccagcatgaaggggacgagctgcttgccgaaggaccccatccaggtgtaggtttccacatcgtaggtgaggaagagcctttcggtgcgaggatgcgagccgatggggaagaactggatctcctgccaccaattggaggaatggctgttgatgtgatggaagtagaaatgccgacggcgcgccgaacactcgtgcttgtgtttatacaagcggccacagtgctcgcaacgctgcacgggatgcacgtgctgcacgagctgtacctgagttcctttgacgaggaatttcagtgggaagtggagtcgtggcgcctgcatctcgtgctgtactacgtcgtggtggtcggcctggccctcttctgcctcgatggtggtcatgctgacgagcccgcgcgggaggcaggtccagacctcggcgcgagcgggtcggagagcgaggacgagggcgcgcaggccggagctgtccagggtcctgagacgctgcggagtcaggtcagtgggcagcggcggcgcgcggttgacttgcaggagtttttccagggcgcgcgggaggtccagatggtacttgatctccaccgcgccattggtggcgacgtcgatggcttgcagggtcccgtgcccctggggtgtgaccaccgtcccccgtttcttcttgggcggctggggcgacgggggcggtgcctcttccatggttagaagcggcggcgaggacgcgcgccgggcggcaggggcggctcggggcccggaggcaggggcggcaggggcacgtcggcgccgcgcgcgggtaggttctggtactgcgcccggagaagactggcgtgagcgacgacgcgacggttgacgtcctggatctgacgcctctgggtgaaggccacgggacccgtgagtttgaacctgaaagagagttcgacagaatcaatctcggtatcgttgacggcggcctgccgcaggatctcttgcacgtcgcccgagttgtcctggtaggcgatctcggtcatgaactgctcgatctcctcctcttgaaggtctccgcggccggcgcgctccacggtggccgcgaggtcgttggagatgcggcccatgagctgcgagaaggcgttcatgcccgcctcgttccagacgcggctgtagaccacgacgccctcgggatcgcgggcgcgcatgaccacctgggcgaggttgagctccacgtggcgcgtgaagaccgcgtagttgcagaggcgctggtagaggtagttgagcgtggtggcgatgtgctcggtgacgaagaaatacatgatccagcggcggagcggcatctcgctgacgtcgcccagcgcctccaaacgttccatggcctcgtaaaagtccacggcgaagttgaaaaactgggagttgcgcgccgagacggtcaactcctcctccagaagacggatgagctcggcgatggtggcgcgcacctcgcgctcgaaggcccccgggagttcctccacttcctcttcttcctcctccactaacatctcttctacttcctcctcaggcggcagtggtggcgggggagggggcctgcgtcgccggcggcgcacgggcagacggtcgatgaagcgctcgatggtctcgccgcgccggcgtcgcatggtctcggtgacggcgcgcccgtcctcgcggggccgcagcgtgaagacgccgccgcgcatctccaggtggccgggggggtccccgttgggcagggagagggcgctgacgatgcatcttatcaattgccccgtagggactccgcgcaaggacctgagcgtctcgagatccacgggatctgaaaaccgctgaacgaaggcttcgagccagtcgcagtcgcaaggtaggctgagcacggtttcttctggcgggtcatgttggttgggagcggggcgggcgatgctgctggtgatgaagttgaaataggcggttctgagacggcggatggtggcgaggagcaccaggtctttgggcccggcttgctggatgcgcagacggtcggccatgccccaggcgtggtcctgacacctggccaggtccttgtagtagtcctgcatgagccgctccacgggcacctcctcctcgcccgcgcggccgtgcatgcgcgtgagcccgaagccgcgctggggctggacgagcgccaggtcggcgacgacgcgctcggcgaggatggcttgctggatctgggtgagggtggtctggaagtcatcaaagtcgacgaagcggtggtaggctccggtgttgatggtgtaggagcagttggccatgacggaccagttgacggtctggtggcccggacgcacgagctcgtggtacttgaggcgcgagtaggcgcgcgtgtcgaagatgtagtcgttgcaggtgcgcaccaggtactggtagccgatgaggaagtgcggcggcggctggcggtagagcggccatcgctcggtggcgggggcgccgggcgcgaggtcctcgagcatggtgcggtggtagccgtagatgtacctggacatccaggtgatgccggcggcggtggtggaggcgcgcgggaactcgcggacgcggttccagatgttgcgcagcggcaggaagtagttcatggtgggcacggtctggcccgtgaggcgcgcgcagtcgtggatgctctatacgggcaaaaacgaaagcggtcagcggctcgactccgtggcctggaggctaagcgaacgggttgggctgcgcgtgtaccccggttcgaatctcgaatcaggctggagccgcagctaacgtggtattggcactcccgtctcgacccaagcctgcaccaaccctccaggatacggaggcgggtcgttttgcaacttttttttggaggccggatgagactagtaagcgcggaaagcggccgaccgcgatggctcgctgccgtagtctggagaagaatcgccagggttgcgttgcggtgtgccccggttcgaggccggccggattccgcggctaacgagggcgtggctgccccgtcgtttccaagaccccatagccagccgacttctccagttacggagcgagcccctcttttgttttgtttgtttttgccagatgcatcccgtactgcggcagatgcgcccccaccaccctccaccgcaacaacagccccctccacagccggcgcttctgcccccgccccagcagcaacttccagccacgaccgccgcggccgccgtgagcggggctggacagagttatgatcaccagctggccttggaagagggcgaggggctggcgcgcctgggggcgtcgtcgccggagcggcacccgcgcgtgcagatgaaaagggacgctcgcgaggcctacgtgcccaagcagaacctgttcagagacaggagcggcgaggagcccgaggagatgcgcgcggcccggttccacgcggggcgggagctgcggcgcggcctggaccgaaagagggtgctgagggacgaggatttcgaggcggacgagctgacggggatcagccccgcgcgcgcgcacgtggccgcggccaacctggtcacggcgtacgagcagaccgtgaaggaggagagcaacttccaaaaatccttcaacaaccacgtgcgcaccctgatcgcgcgcgaggaggtgaccctgggcctgatgcacctgtgggacctgctggaggccatcgtgcagaaccccaccagcaagccgctgacggcgcagctgttcctggtggtgcagcatagtcgggacaacgaagcgttcagggaggcgctgctgaatatcaccgagcccgagggccgctggctcctggacctggtgaacattctgcagagcatcgtggtgcaggagcgcgggctgccgctgtccgagaagctggcggccatcaacttctcggtgctgagtttgggcaagtactacgctaggaagatctacaagaccccgtacgtgcccatagacaaggaggtgaagatcgacgggttttacatgcgcatgaccctgaaagtgctgaccctgagcgacgatctgggggtgtaccgcaacgacaggatgcaccgtgcggtgagcgccagcaggcggcgcgagctgagcgaccaggagctgatgcatagtctgcagcgggccctgaccggggccgggaccgagggggagagctactttgacatgggcgcggacctgcactggcagcccagccgccgggccttggaggcggcggcaggaccctacgtagaagaggtggacgatgaggtggacgaggagggcgagtacctggaagactgatggcgcgaccgtatttttgctagatgcaacaacaacagccacctcctgatcccgcgatgcgggcggcgctgcagagccagccgtccggcattaactcctcggacgattggacccaggccatgcaacgcatcatggcgctgacgacccgcaaccccgaagcctttagacagcagccccaggccaaccggctctcggccatcctggaggccgtggtgccctcgcgctccaaccccacgcacgagaaggtcctggccatcgtgaacgcgctggtggagaacaaggccatccgcggcgacgaggccggcctggtgtacaacgcgctgctggagcgcgtggcccgctacaacagcaccaacgtgcagaccaacctggaccgcatggtgaccgacgtgcgcgaggccgtggcccagcgcgagcggttccaccgcgagtccaacctgggatccatggtggcgctgaacgccttcctcagcacccagcccgccaacgtgccccggggccaggaggactacaccaacttcatcagcgccctgcgcctgatggtgaccgaggtgccccagagcgaggtgtaccagtccgggccggactacttcttccagaccagtcgccagggcttgcagaccgtgaacctgagccaggctttcaagaacttgcagggcctgtggggcgtgcaggccccggtcggggaccgcgcgacggtgtcgagcctgctgacgccgaactcgcgcctgctgctgctgctggtggcccccttcacggacagcggcagcatcaaccgcaactcgtacctgggctacctgattaacctgtaccgcgaggccatcggccaggcgcacgtggacgagcagacctaccaggagatcacccacgtgagccgcgccctgggccaggacgacccgggcaacctggaagccaccctgaactttttgctgaccaaccggtcgcagaagatcccgccccagtacgcgctcagcaccgaggaggagcgcatcctgcgttacgtgcagcagagcgtgggcctgttcctgatgcaggagggggccacccccagcgccgcgctcgacatgaccgcgcgcaacatggagcccagcatgtacgccagcaaccgcccgttcatcaataaactgatggactacttgcatcgggcggccgccatgaactctgactatttcaccaacgccatcctgaatccccactggctcccgccgccggggttctacacgggcgagtacgacatgcccgaccccaatgacgggttcctgtgggacgatgtggacagcagcgtgttctccccccgaccgggtgctaacgagcgccccttgtggaagaaggaaggcagcgaccgacgcccgtcctcggcgctgtccggccgcgagggtgctgccgcggcggtgcccgaggccgccagtcctttcccgagcttgcccttctcgctgaacagtatccgcagcagcgagctgggcaggatcacgcgcccgcgcttgctgggcgaagaggagtacttgaatgactcgctgttgagacccgagcgggagaagaacttccccaataacgggatagaaagcctggtggacaagatgagccgctggaagacgtatgcgcaggagcacagggacgatccccgggcgtcgcagggggccacgagccggggcagcgccgcccgtaaacgccggtggcacgacaggcagcggggacagatgtgggacgatgaggactccgccgacgacagcagcgtgttggacttgggtgggagtggtaacccgttcgctcacctgcgcccccgtatcgggcgcatgatgtaagagaaaccgaaaataaatgatactcaccaaggccatggcgaccagcgtgcgttcgtttcttctctgttgttgttgtatctagtatgatgaggcgtgcgtacccggagggtcctcctccctcgtacgagagcgtgatgcagcaggcgatggcggcggcggcgatgcagcccccgctggaggctccttacgtgcccccgcggtacctggcgcctacggaggggcggaacagcattcgttactcggagctggcacccttgtacgataccacccggttgtacctggtggacaacaagtcggcggacatcgcctcgctgaactaccagaacgaccacagcaacttcctgaccaccgtggtgcagaacaatgacttcacccccacggaggccagcacccagaccatcaactttgacgagcgctcgcggtggggcggccagctgaaaaccatcatgcacaccaacatgcccaacgtgaacgagttcatgtacagcaacaagttcaaggcgcgggtgatggtctcccgcaagacccccaatggggtgacagtgacagaggattatgatggtagtcaggatgagctgaagtatgaatgggtggaatttgagctgcccgaaggcaacttctcggtgaccatgaccatcgacctgatgaacaacgccatcatcgacaattacttggcggtggggcggcagaacggggtgctggagagcgacatcggcgtgaagttcgacactaggaacttcaggctgggctgggaccccgtgaccgagctggtcatgcccggggtgtacaccaacgaggctttccatcccgatattgtcttgctgcccggctgcggggtggacttcaccgagagccgcctcagcaacctgctgggcattcgcaagaggcagcccttccaggaaggcttccagatcatgtacgaggatctggaggggggcaacatccccgcgctcctggatgtcgacgcctatgagaaaagcaaggaggatgcagcagctgaagcaactgcagccgtagctaccgcctctaccgaggtcaggggcgataattttgcaagcgccgcagcagtggcagcggccgaggcggctgaaaccgaaagtaagatagtcattcagccggtggagaaggatagcaagaacaggagctacaacgtactaccggacaagataaacaccgcctaccgcagctggtacctagcctacaactatggcgaccccgagaagggcgtgcgctcctggacgctgctcaccacctcggacgtcacctgcggcgtggagcaagtctactggtcgctgcccgacatgatgcaagacccggtcaccttccgctccacgcgtcaagttagcaactacccggtggtgggcgccgagctcctgcccgtctactccaagagcttcttcaacgagcaggccgtctactcgcagcagctgcgcgccttcacctcgcttacgcacgtcttcaaccgcttccccgagaaccagatcctcgtccgcccgcccgcgcccaccattaccaccgtcagtgaaaacgttcctgctctcacagatcacgggaccctgccgctgcgcagcagtatccggggagtccagcgcgtgaccgttactgacgccagacgccgcacctgcccctacgtctacaaggccctgggcatagtcgcgccgcgcgtcctctcgagccgcaccttctaaatgtccattctcatctcgcccagtaataacaccggttggggcctgcgcgcgcccagcaagatgtacggaggcgctcgccaacgctccacgcaacaccccgtgcgcgtgcgcgggcacttccgcgctccctggggcgccctcaagggccgcgtgcggtcgcgcaccaccgtcgacgacgtgatcgaccaggtggtggccgacgcgcgcaactacacccccgccgccgcgcccgtctccaccgtggacgccgtcatcgacagcgtggtggccgacgcgcgccggtacgcccgcgccaagagccggcggcggcgcatcgcccggcggcaccggagcacccccgccatgcgcgcggcgcgagccttgctgcgcagggccaggcgcacgggacgcagggccatgctcagggcggccagacgcgcggcttcaggcgccagcgccggcaggacccggagacgcgcggccacggcggcggcagcggccatcgccagcatgtcccgcccgcggcgagggaacgtgtactgggtgcgcgacgccgccaccggtgtgcgcgtgcccgtgcgcacccgcccccctcgcacttgaagatgttcacttcgcgatgttgatgtgtcccagcggcgaggaggatgtccaagcgcaaattcaaggaagagatgctccaggtcatcgcgcctgagatctacggccctgcggtggtgaaggaggaaagaaagccccgcaaaatcaagcgggtcaaaaaggacaaaaaggaagaagaaagtgatgtggacggattggtggagtttgtgcgcgagttcgccccccggcggcgcgtgcagtggcgcgggcggaaggtgcaaccggtgctgagacccggcaccaccgtggtcttcacgcccggcgagcgctccggcaccgcttccaagcgctcctacgacgaggtgtacggggatgatgatattctggagcaggcggccgagcgcctgggcgagtttgcttacggcaagcgcagccgttccgcaccgaaggaagaggcggtgtccatcccgctggaccacggcaaccccacgccgagcctcaagcccgtgaccttgcagcaggtgctgccgaccgcggcgccgcgccgggggttcaagcgcgagggcgaggatctgtaccccaccatgcagctgatggtgcccaagcgccagaagctggaagacgtgctggagaccatgaaggtggacccggacgtgcagcccgaggtcaaggtgcggcccatcaagcaggtggccccgggcctgggcgtgcagaccgtggacatcaagattcccacggagcccatggaaacgcagaccgagcccatgatcaagcccagcaccagcaccatggaggtgcagacggatccctggatgccatcggctcctagtcgaagaccccggcgcaagtacggcgcggccagcctgctgatgcccaactacgcgctgcatccttccatcatccccacgccgggctaccgcggcacgcgcttctaccgcggtcataccagcagccgccgccgcaagaccaccactcgccgccgccgtcgccgcaccgccgctgcaaccacccctgccgccctggtgcggagagtgtaccgccgcggccgcgcacctctgaccctgccgcgcgcgcgctaccacccgagcatcgccatttaaactttcgcctgctttgcagatcaatggccctcacatgccgccttcgcgttcccattacgggctaccgaggaagaaaaccgcgccgtagaaggctggcggggaacgggatgcgtcgccaccaccaccggcggcggcgcgccatcagcaagcggttggggggaggcttcctgcccgcgctgatccccatcatcgccgcggcgatcggggcgatccccggcattgcttccgtggcggtgcaggcctctcagcgccactgagacacacttggaaacatcttgtaataaaccaatggactctgacgctcctggtcctgtgatgtgttttcgtagacagatggaagacatcaatttttcgtccctggctccgcgacacggcacgcggccgttcatgggcacctggagcgacatcggcaccagccaactgaacgggggcgccttcaattggagcagtctctggagcgggcttaagaatttcgggtccacgcttaaaacctatggcagcaaggcgtggaacagcaccacagggcaggcgctgagggataagctgaaagagcagaacttccagcagaaggtggtcgatgggctcgcctcgggcatcaacggggtggtggacctggccaaccaggccgtgcagcggcagatcaacagccgcctggacccggtgccgcccgccggctccgtggagatgccgcaggtggaggaggagctgcctcccctggacaagcggggcgagaagcgaccccgccccgatgcggaggagacgctgctgacgcacacggacgagccgcccccgtacgaggaggcggtgaaactgggtctgcccaccacgcggcccatcgcgcccctggccaccggggtgctgaaacccgaaaagcccgcgaccctggacttgcctcctccccagccttcccgcccctctacagtggctaagcccctgccgccggtggccgtggcccgcgcgcgacccgggggcaccgcccgccctcatgcgaactggcagagcactctgaacagcatcgtgggtctgggagtgcagagtgtgaagcgccgccgctgctattaaacctaccgtagcgcttaacttgcttgtctgtgtgtgtatgtattatgtcgccgccgccgctgtccaccagaaggaggagtgaagaggcgcgtcgccgagttgcaagatggccaccccatcgatgctgccccagtgggcgtacatgcacatcgccggacaggacgcttcggagtacctgagtccgggtctggtgcagtttgcccgcgccacagacacctacttcagtctggggaacaagtttaggaaccccacggtggcgcccacgcacgatgtgaccaccgaccgcagccagcggctgacgctgcgcttcgtgcccgtggaccgcgaggacaacacctactcgtacaaagtgcgctacacgctggccgtgggcgacaaccgcgtgctggacatggccagcacctactttgacatccgcggcgtgctggatcggggccctagcttcaaaccctactccggcaccgcctacaacagtctggcccccaagggagcacccaacacttgtcagtggacatataaagccgatggtgaaactgccacagaaaaaacctatacatatggaaatgcacccgtgcagggcattaacatcacaaaagatggtattcaacttggaactgacaccgatgatcagccaatctacgcagataaaacctatcagcctgaacctcaagtgggtgatgctgaatggcatgacatcactggtactgatgaaaagtatggaggcagagctcttaagcctgataccaaaatgaagccttgttatggttcttttgccaagcctactaataaagaaggaggtcaggcaaatgtgaaaacaggaacaggcactactaaagaatatgacatagacatggctttctttgacaacagaagtgcggctgctgctggcctagctccagaaattgttttgtatactgaaaatgtggatttggaaactccagatacccatattgtatacaaagcaggcacagatgacagcagctcttctattaatttgggtcagcaagccatgcccaacagacctaactacattggtttcagagacaactttatcgggctcatgtactacaacagcactggcaatatgggggtgctggccggtcaggcttctcagctgaatgctgtggttgacttgcaagacagaaacaccgagctgtcctaccagctcttgcttgactctctgggtgacagaacccggtatttcagtatgtggaatcaggcggtggacagctatgatcctgatgtgcgcattattgaaaatcatggtgtggaggatgaacttcccaactattgtttccctctggatgctgttggcagaacagatacttatcagggaattaaggctaatggaactgatcaaaccacatggaccaaagatgacagtgtcaatgatgctaatgagataggcaagggtaatccattcgccatggaaatcaacatccaagccaacctgtggaggaacttcctctacgccaacgtggccctgtacctgcccgactcttacaagtacacgccggccaatgttaccctgcccaccaacaccaacacctacgattacatgaacggccgggtggtggcgccctcgctggtggactcctacatcaacatcggggcgcgctggtcgctggatcccatggacaacgtgaaccccttcaaccaccaccgcaatgcggggctgcgctaccgctccatgctcctgggcaacgggcgctacgtgcccttccacatccaggtgccccagaaatttttcgccatcaagagcctcctgctcctgcccgggtcctacacctacgagtggaacttccgcaaggacgtcaacatgatcctgcagagctccctcggcaacgacctgcgcacggacggggcctccatctccttcaccagcatcaacctctacgccaccttcttccccatggcgcacaacacggcctccacgctcgaggccatgctgcgcaacgacaccaacgaccagtccttcaacgactacctctcggcggccaacatgctctaccccatcccggccaacgccaccaacgtgcccatctccatcccctcgcgcaactgggccgccttccgcggctggtccttcacgcgtctcaagaccaaggagacgccctcgctgggctccgggttcgacccctacttcgtctactcgggctccatcccctacctcgacggcaccttctacctcaaccacaccttcaagaaggtctccatcaccttcgactcctccgtcagctggcccggcaacgaccggctcctgacgcccaacgagttcgaaatcaagcgcaccgtcgacggcgagggctacaacgtggcccagtgcaacatgaccaaggactggttcctggtccagatgctggcccactacaacatcggctaccagggcttctacgtgcccgagggctacaaggaccgcatgtactccttcttccgcaacttccagcccatgagccgccaggtggtggacgaggtcaactacaaggactaccaggccgtcaccctggcctaccagcacaacaactcgggcttcgtcggctacctcgcgcccaccatgcgccagggccagccctaccccgccaactacccctacccgctcatcggcaagagcgccgtcaccagcgtcacccagaaaaagttcctctgcgacagggtcatgtggcgcatccccttctccagcaacttcatgtccatgggcgcgctcaccgacctcggccagaacatgctctatgccaactccgcccacgcgctagacatgaatttcgaagtcgaccccatggatgagtccacccttctctatgttgtcttcgaagtcttcgacgtcgtccgagtgcaccagccccaccgcggcgtcatcgaggccgtctacctgcgcacccccttctcggccggtaacgccaccacctaagctcttgcttcttgcaagccatggccgcgggctccggcgagcaggagctcagggccatcatccgcgacctgggctgcgggccctacttcctgggcaccttcgataagcgcttcccgggattcatggccccgcacaagctggcctgcgccatcgtcaacacggccggccgcgagaccgggggcgagcactggctggccttcgcctggaacccgcgctcgaacacctgctacctcttcgaccccttcgggttctcggacgagcgcctcaagcagatctaccagttcgagtacgagggcctgctgcgccgcagcgccctggccaccgaggaccgctgcgtcaccctggaaaagtccacccagaccgtgcagggtccgcgctcggccgcctgcgggctcttctgctgcatgttcctgcacgccttcgtgcactggcccgaccgccccatggacaagaaccccaccatgaacttgctgacgggggtgcccaacggcatgctccagtcgccccaggtggaacccaccctgcgccgcaaccaggaggcgctctaccgcttcctcaactcccactccgcctactttcgctcccaccgcgcgcgcatcgagaaggccaccgccttcgaccgcatgaatcaagacatgtaaaccgtgtgtgtatgttaaatgtctttaataaacagcactttcatgttacacatgcatctgagatgatttatttagaaatcgaaagggttctgccgggtctcggcatggcccgcgggcagggacacgttgcggaactggtacttggccagccacttgaactcggggatcagcagtttgggcagcggggtgtcggggaaggagtcggtccacagcttccgcgtcagttgcagggcgcccagcaggtcgggcgcggagatcttgaaatcgcagttgggacccgcgttctgcgcgcgggagttgcggtacacggggttgcagcactggaacaccatcagggccgggtgcttcacgctcgccagcaccgtcgcgtcggtgatgctctccacgtcgaggtcctcggcgttggccatcccgaagggggtcatcttgcaggtctgccttcccatggtgggcacgcacccgggcttgtggttgcaatcgcagtgcagggggatcagcatcatctgggcctggtcggcgttcatccccgggtacatggccttcatgaaagcctccaattgcctgaacgcctgctgggccttggctccctcggtgaagaagaccccgcaggacttgctagagaactggttggtggcgcacccggcgtcgtgcacgcagcagcgcgcgtcgttgttggccagctgcaccacgctgcgcccccagcggttctgggtgatcttggcccggtcggggttctccttcagcgcgcgctgcccgttctcgctcgccacatccatctcgatcatgtgctccttctggatcatggtggtcccgtgcaggcaccgcagcttgccctcggcctcggtgcacccgtgcagccacagcgcgcacccggtgcactcccagttcttgtgggcgatctgggaatgcgcgtgcacgaagccctgcaggaagcggcccatcatggtggtcagggtcttgttgctagtgaaggtcagcggaatgccgcggtgctcctcgttgatgtacaggtggcagatgcggcggtacacctcgccctgctcgggcatcagctggaagttggctttcaggtcggtctccacgcggtagcggtccatcagcatagtcatgatttccatacccttctcccaggccgagacgatgggcaggctcatagggttcttcaccatcatcttagcgctagcagccgcggccagggggtcgctctcgtccagggtctcaaagctccgcttgccgtccttctcggtgatccgcaccggggggtagctgaagcccacggccgccagctcctcctcggcctgtctttcgtcctcgctgtcctggctgacgtcctgcaggaccacatgcttggtcttgcggggtttcttcttgggcggcagcggcggcggagatgttggagatggcgagggggagcgcgagttctcgctcaccactactatctcttcctcttcttggtccgaggccacgcggcggtaggtatgtctcttcgggggcagaggcggaggcgacgggctctcgccgccgcgacttggcggatggctggcagagccccttccgcgttcgggggtgcgctcccggcggcgctctgactgacttcctccgcggccggccattgtgttctcctagggaggaacaacaagcatggagactcagccatcgccaacctcgccatctgcccccaccgccgacgagaagcagcagcagcagaatgaaagcttaaccgccccgccgcccagccccgccacctccgacgcggccgtcccagacatgcaagagatggaggaatccatcgagattgacctgggctatgtgacgcccgcggagcacgaggaggagctggcagtgcgcttttcacaagaagagatacaccaagaacagccagagcaggaagcagagaatgagcagagtcaggctgggctcgagcatgacggcgactacctccacctgagcgggggggaggacgcgctcatcaagcatctggcccggcaggccaccatcgtcaaggatgcgctgctcgaccgcaccgaggtgcccctcagcgtggaggagctcagccgcgcctacgagttgaacctcttctcgccgcgcgtgccccccaagcgccagcccaatggcacctgcgagcccaacccgcgcctcaacttctacccggtcttcgcggtgcccgaggccctggccacctaccacatctttttcaagaaccaaaagatccccgtctcctgccgcgccaaccgcacccgcgccgacgcccttttcaacctgggtcccggcgcccgcctacctgatatcgcctccttggaagaggttcccaagatcttcgagggtctgggcagcgacgagactcgggccgcgaacgctctgcaaggagaaggaggagagcatgagcaccacagcgccctggtcgagttggaaggcgacaacgcgcggctggcggtgctcaaacgcacggtcgagctgacccatttcgcctacccggctctgaacctgccccccaaagtcatgagcgcggtcatggaccaggtgctcatcaagcgcgcgtcgcccatctccgaggacgagggcatgcaagactccgaggagggcaagcccgtggtcagcgacgagcagctggcccggtggctgggtcctaatgctagtccccagagtttggaagagcggcgcaaactcatgatggccgtggtcctggtgaccgtggagctggagtgcctgcgccgcttcttcgccgacgcggagaccctgcgcaaggtcgaggagaacctgcactacctcttcaggcacgggttcgtgcgccaggcctgcaagatctccaacgtggagctgaccaacctggtctcctacatgggcatcttgcacgagaaccgcctggggcagaacgtgctgcacaccaccctgcgcggggaggcccggcgcgactacatccgcgactgcgtctacctctacctctgccacacctggcagacgggcatgggcgtgtggcagcagtgtctggaggagcagaacctgaaagagctctgcaagctcctgcagaagaacctcaagggtctgtggaccgggttcgacgagcgcaccaccgcctcggacctggccgacctcattttccccgagcgcctcaggctgacgctgcgcaacggcctgcccgactttatgagccaaagcatgttgcaaaactttcgctctttcatcctcgaacgctccggaatcctgcccgccacctgctccgcgctgccctcggacttcgtgccgctgaccttccgcgagtgccccccgccgctgtggagccactgctacctgctgcgcctggccaactacctggcctaccactcggacgtgatcgaggacgtcagcggcgagggcctgctcgagtgccactgccgctgcaacctctgcacgccgcaccgctccctggcctgcaacccccagctgctgagcgagacccagatcatcggcaccttcgagttgcaagggcccagcgaaggcgagggttcagccgccaaggggggtctgaaactcaccccggggctgtggacctcggcctacttgcgcaagttcgtgcccgaggactaccatcccttcgagatcaggttctacgaggaccaatcccatccgcccaaggccgagctgtcggcctgcgtcatcacccagggggcgatcctggcccaattgcaagccatccagaaatcccgccaagaattcttgctgaaaaagggccgcggggtctacctcgacccccagaccggtgaggagctcaaccccggcttcccccaggatgccccgaggaaacaagaagctgaaagtggagctgccgcccgtggaggatttggaggaagactgggagaacagcagtcaggcagaggaggaggagatggaggaagactgggacagcactcaggcagaggaggacagcctgcaagacagtctggaggaagacgaggaggaggcagaggaggaggtggaagaagcagccgccgccagaccgtcgtcctcggcgggggagaaagcaagcagcacggataccatctccgctccgggtcggggtcccgctcgaccacacagtagatgggacgagaccggacgattcccgaaccccaccacccagaccggtaagaaggagcggcagggatacaagtcctggcgggggcacaaaaacgccatcgtctcctgcttgcaggcctgcgggggcaacatctccttcacccggcgctacctgctcttccaccgcggggtgaactttccccgcaacatcttgcattactaccgtcacctccacagcccctactacttccaagaagaggcagcagcagcagaaaaagaccagcagaaaaccagcagctagaaaatccacagcggcggcagcaggtggactgaggatcgcggcgaacgagccggcgcaaacccgggagctgaggaaccggatctttcccaccctctatgccatcttccagcagagtcgggggcaggagcaggaactgaaagtcaagaaccgttctctgcgctcgctcacccgcagttgtctgtatcacaagagcgaagaccaacttcagcgcactctcgaggacgccgaggctctcttcaacaagtactgcgcgctcactcttaaagagtagcccgcgcccgcccagtcgcagaaaaaggcgggaattacgtcacctgtgcccttcgccctagccgcctccacccatcatcatgagcaaagagattcccacgccttacatgtggagctaccagccccagatgggcctggccgccggtgccgcccaggactactccacccgcatgaattggctcagcgccgggcccgcgatgatctcacgggtgaatgacatccgcgcccaccgaaaccagatactcctagaacagtcagcgctcaccgccacgccccgcaatcacctcaatccgcgtaattggcccgccgccctggtgtaccaggaaattccccagcccacgaccgtactacttccgcgagacgcccaggccgaagtccagctgactaactcaggtgtccagctggcgggcggcgccaccctgtgtcgtcaccgccccgctcagggtataaagcggctggtgatccggggcagaggcacacagctcaacgacgaggtggtgagctcttcgctgggtctgcgacctgacggagtcttccaactcgccggatcggggagatcttccttcacgcctcgtcaggccgtcctgactttggagagttcgtcctcgcagccccgctcgggtggcatcggcactctccagttcgtggaggagttcactccctcggtctacttcaaccccttctccggctcccccggccactacccggacgagttcatcccgaacttcgacgccatcagcgagtcggtggacggctacgattgaatgtcccatggtggcgcagctgacctagctcggcttcgacacctggaccactgccgccgcttccgctgcttcgctcgggatctcgccgagtttgcctactttgagctgcccgaggagcaccctcagggcccggcccacggagtgcggatcgtcgtcgaagggggcctcgactcccacctgcttcggatcttcagccagcgtccgatcctggtcgagcgcgagcaaggacagacccttctgactctgtactgcatctgcaaccaccccggcctgcatgaaagtctttgttgtctgctgtgtactgagtataataaaagctgagatcagcgactactccggacttccgtgtgttcctgaatccatcaaccagtctttgttcttcaccgggaacgagaccgagctccagctccagtgtaagccccacaagaagtacctcacctggctgttccagggctccccgatcgccgttgtcaaccactgcgacaacgacggagtcctgctgagcggccctgccaaccttactttttccacccgcagaagcaagctccagctcttccaacccttcctccccgggacctatcagtgcgtctcgggaccctgccatcacaccttccacctgatcccgaataccacagcgtcgctccccgctactaacaaccaaactaacctccaccaacgccaccgtcgcgacctttctgaatctaatactaccacccacaccggaggtgagctccgaggtcaaccaacctctgggatttactacggcccctgggaggtggttgggttaatagcgctaggcctagttgcgggtgggcttttggttctctgctacctatacctcccttgctgttcgtacttagtggtgctgtgttgctggtttaagaaatggggaagatcaccctagtgagctgcggtgcgctggtggcggtgttgctttcgattgtgggactgggcggtgcggctgtagtgaaggagaaggccgatccctgcttgcatttcaatcccaacaaatgccagctgagttttcagcccgatggcaatcggtgcgcggtactgatcaagtgcggatgggaatgcgagaacgtgagaatcgagtacaataacaagactcggaacaatactctcgcgtccgtgtggcagcccggggaccccgagtggtacaccgtctctgtccccggtgctgacggctccccgcgcaccgtgaataatactttcatttttgcgcacatgtgcgacacggtcatgtggatgagcaagcagtacgatatgtggccccccacgaaggagaacatcgtggtcttctccatcgcttacagcctgtgcacggcgctaatcaccgctatcgtgtgcctgagcattcacatgctcatcgctattcgccccagaaataatgccgaaaaagaaaaacagccataacgttttttttcacacctttttcagaccatggcctctgttaaatttttgcttttatttgccagtctcattgccgtcattcatggaatgagtaatgagaaaattactatttacactggcactaatcacacattgaaaggtccagaaaaagccacagaagtttcatggtattgttattttaatgaatcagatgtatctactgaactctgtggaaacaataacaaaaaaaatgagagcattactctcatcaagtttcaatgtggatctgacttaaccctaattaacatcactagagactatgtaggtatgtattatggaactacagcaggcatttcggacatggaattttatcaagtttctgtgtctgaacccaccacgcctagaatgaccacaaccacaaaaactacacctgttaccactatgcagctcactaccaataacatttttgccatgcgtcaaatggtcaacaatagcactcaacccaccccacccagtgaggaaattcccaaatccatgattggcattattgttgctgtagtggtgtgcatgttgatcatcgccttgtgcatggtgtactatgccttctgctacagaaagcacagactgaacgacaagctggaacacttactaagtgttgaattttaattttttagaaccatgaagatcctaggccttttaattttttctatcattacctctgctctatgcaattctgacaatgaggacgttactgtcgttgtcggatcaaattatacactgaaaggtccagcgaagggtatgctttcgtggtattgctattttggatctgacactacagaaactgaattatgcaatcttaagaatggcaaaattcaaaattctaaaattaacaattatatatgcaatggtactgatctgatactcctcaatatcacgaaatcatatgctggcagttacacctgccctggagatgatgctgacagtatgattttttacaaagtaactgttgttgatcccactactccacctccacccaccacaactactcacaccacacacacagatcaaaccgcagcagaggaggcagcaaagttagccttgcaggtccaagacagttcatttgttggcattacccctacacctgatcagcggtgtccggggctgctagtcagcggcattgtcggtgtgctttcgggattagcagtcataatcatctgcatgttcatttttgcttgctgctatagaaggctttaccgacaaaaatcagacccactgctgaacctctatgtttaattttttccagagtcatgaaggcagttagcgctctagttttttgttctttgattggcattgttttttgcaatcctattcctaaagttagctttattaaagatgtgaatgttactgaggggggcaatgtgacactggtaggtgtagagggtgctgaaaacaccacctggacaaaataccacctcaatgggtggaaagatatttgcaattggagtgtattagtttatacatgtgagggagttaatcttaccattgtcaatgccacctcagctcaaaatggtagaattcaaggacaaagtgtcagtgtatctaatgggtattttacccaacatacttttatctatgacgttaaagtcataccactgcctacgcctagcccacctagcactaccacacagacaacccacactacacagacaaccacatacagtacattaaatcagcctaccaccactacagcagcagaggttgccagctcgtctggggtccgagtggcatttttgatgttggccccatctagcagtcccactgctagtaccaatgagcagactactgaatttttgtccactgtcgagagccacaccacagctacctccagtgccttctctagcaccgccaatctctcctcgctttcctctacaccaatcagtcccgctactactcctagccccgctcctcttcccactcccctgaagcaaacagacggcggcatgcaatggcagatcaccctgctcattgtgatcgggttggtcatcctggccgtgttgctctactacatcttctgccgccgcattcccaacgcgcaccgcaagccggtctacaagcccatcattgtcgggcagccggagccgcttcaggtggaagggggtctaaggaatcttctcttctcttttacagtatggtgattgaactatgattcctagacaattcttgatcactattcttatctgcctcctccaagtctgtgccaccctcgctctggtggccaacgccagtccagactgtattgggcccttcgcctcctacgtgctctttgccttcaccacctgcatctgctgctgtagcatagtctgcctgcttatcaccttcttccagttcattgactggatctttgtgcgcatcgcctacctgcgccaccacccccagtaccgcgaccagcgagtggcgcggctgctcaggctcctctgataagcatgcgggctctgctacttctcgcgcttctgctgttagtgctcccccgtcccgtcgacccccggtcccccacccagtcccccgaggaggtccgcaaatgcaaattccaagaaccctggaaattcctcaaatgctaccgccaaaaatcagacatgcatcccagctggatcatgatcattgggatcgtgaacattctggcctgcaccctcatctcctttgtgatttacccctgctttgactttggttggaactcgccagaggcgctctatctcccgcctgaacctgacacaccaccacagcaacctcaggcacacgcactaccaccactacagcctaggccacaatacatgcccatattagactatgaggccgagccacagcgacccatgctccccgctattagttacttcaatctaaccggcggagatgactgacccactggccaacaacaacgtcaacgaccttctcctggacatggacggccgcgcctcggagcagcgactcgcccaacttcgcattcgccagcagcaggagagagccgtcaaggagctgcaggatgcggtggccatccaccagtgcaagagaggcatcttctgcctggtgaaacaggccaagatctcctacgaggtcactccaaacgaccatcgcctctcctacgagctcctgcagcagcgccagaagttcacctgcctggtcggagtcaaccccatcgtcatcacccagcagtctggcgataccaaggggtgcatccactgctcctgcgactcccccgactgcgtccacactctgatcaagaccctctgcggcctccgcgacctcctccccatgaactaatcacccccttatccagtgaaataaagatcatattgatgatgattttacagaaataaaaaataatcatttgatttgaaataaagatacaatcatattgatgatttgagtttaacaaaaaaataaagaatcacttacttgaaatctgataccaggtctctgtccatgttttctgccaacaccacttcactcccctcttcccagctctggtactgcaggccccggcgggctgcaaacttcctccacacgctgaaggggatgtcaaattcctcctgtccctcaatcttcattttatcttctatcagatgtccaaaaagcgcgtccgggtggatgatgacttcgaccccgtctacccctacgatgcagacaacgcaccgaccgtgcccttcatcaacccccccttcgtctcttcagatggattccaagagaagcccctgggggtgttgtccctgcgactggccgaccccgtcaccaccaagaacggggaaatcaccctcaagctgggagagggggtggacctcgattcctcgggaaaactcatctccaacacggccaccaaggccgccgcccctctcagtttttccaacaacaccatttcccttaacatggatcaccccttttacactaaagatggaaaattatccttacaagtttctccaccattaaatatactgagaacaagcattctaaacacactagctttaggttttggatcaggtttaggactccgtggctctgccttggcagtacagttagtctctccacttacatttgatactgatggaaacataaagcttaccttagacagaggtttgcatgttacaacaggagatgcaattgaaagcaacataagctgggctaaaggtttaaaatttgaagatggagccatagcaaccaacattggaaatgggttagagtttggaagcagtagtacagaaacaggtgttgatgatgcttacccaatccaagttaaacttggatctggccttagctttgacagtacaggagccataatggctggtaacaaagaagacgataaactcactttgtggacaacacctgatccatcaccaaactgtcaaatactcgcagaaaatgatgcaaaactaacactttgcttgactaaatgtggtagtcaaatactggccactgtgtcagtcttagttgtaggaagtggaaacctaaaccccattactggcaccgtaagcagtgctcaggtgtttctacgttttgatgcaaacggtgttcttttaacagaacattctacactaaaaaaatactgggggtataggcagggagatagcatagatggcactccatataccaatgctgtaggattcatgcccaatttaaaagcttatccaaagtcacaaagttctactactaaaaataatatagtagggcaagtatacatgaatggagatgtttcaaaacctatgcttctcactataaccctcaatggtactgatgacagcaacagtacatattcaatgtcattttcatacacctggactaatggaagctatgttggagcaacatttggggctaactcttataccttctcatacatcgcccaagaatgaacactgtatcccaccctgcatgccaacccttcccaccccactctgtggaacaaactctgaaacacaaaataaaataaagttcaagtgttttattgattcaacagttttacaggattcgagcagttatttttcctccaccctcccaggacatggaatacaccaccctctccccccgcacagccttgaacatctgaatgccattggtgatggacatgcttttggtctccacgttccacacagtttcagagcgagccagtctcgggtcggtcagggagatgaaaccctccgggcactcccgcatctgcacctcacagctcaacagctgaggattgtcctcggtggtcgggatcacggttatctggaagaagcagaagagcggcggtgggaatcatagtccgcgaacgggatcggccggtggtgtcgcatcaggccccgcagcagtcgctgccgccgccgctccgtcaagctgctgctcagggggtccgggtccagggactccctcagcatgatgcccacggccctcagcatcagtcgtctggtgcggcgggcgcagcagcgcatgcggatctcgctcaggtcgctgcagtacgtgcaacacagaaccaccaggttgttcaacagtccatagttcaacacgctccagccgaaactcatcgcgggaaggatgctacccacgtggccgtcgtaccagatcctcaggtaaatcaagtggtgccccctccagaacacgctgcccacgtacatgatctccttgggcatgtggcggttcaccacctcccggtaccacatcaccctctggttgaacatgcagccccggatgatcctgcggaaccacagggccagcaccgccccgcccgccatgcagcgaagagaccccgggtcccggcaatggcaatggaggacccaccgctcgtacccgtggatcatctgggagctgaacaagtctatgttggcacagcacaggcatatgctcatgcatctcttcagcactctcaactcctcgggggtcaaaaccatatcccagggcacggggaactcttgcaggacagcgaaccccgcagaacagggcaatcctcgcacagaacttacattgtgcatggacagggtatcgcaatcaggcagcaccgggtgatcctccaccagagaagcgcgggtctcggtctcctcacagcgtggtaagggggccggccgatacgggtgatggcgggacgcggctgatcgtgttcgcgaccgtgtcatgatgcagttgctttcggacattttcgtacttgctgtagcagaacctggtccgggcgctgcacaccgatcgccggcggcggtctcggcgcttggaacgctcggtgttgaaattgtaaaacagccactctctcagaccgtgcagcagatctagggcctcaggagtgatgaagatcccatcatgcctgatggctctgatcacatcgaccaccgtggaatgggccagacccagccagatgatgcaattttgttgggtttcggtgacggcgggggagggaagaacaggaagaaccatgattaacttttaatccaaacggtctcggagtacttcaaaatgaagatcgcggagatggcacctctcgcccccgctgtgttggtggaaaataacagccaggtcaaaggtgatacggttctcgagatgttccacggtggcttccagcaaagcctccacgcgcacatccagaaacaagacaatagcgaaagcgggagggttctctaattcctcaatcatcatgttacactcctgcaccatccccagataattttcatttttccagccttgaatgattcgaactagttcctgaggtaaatccaagccagccatgataaagagctcgcgcagagcgccctccaccggcattcttaagcacaccctcataattccaagatattctgctcctggttcacctgcagcagattgacaagcggaatatcaaaatctctgccgcgatccctgagctcctccctcagcaataactgtaagtactctttcatatcctctccgaaatttttagccataggaccaccaggaataagattagggcaagccacagtacagataaaccgaagtcctccccagtgagcattgccaaatgcaagactgctataagcatgctggctagacccggtgatatcttccagataactggacagaaaatcgcccaggcaatttttaagaaaatcaacaaaagaaaaatcctccaggtggacgtttagagcctcgggaacaacgatgaagtaaatgcaagcggtgcgttccagcatggttagttagctgatctgtagaaaaaacaaaaatgaacattaaaccatgctagcctggcgaacaggtgggtaaatcgttctctccagcaccaggcaggccacggggtctccggcgcgaccctcgtaaaaattgtcgctatgattgaaaaccatcacagagagacgttcccggtggccggcgtgaatgattcgacaagatgaatacacccccggaacattggcgtccgcgagtgaaaaaaagcgcccgaggaagcaataaggcactacaatgctcagtctcaagtccagcaaagcgatgccatgcggatgaagcacaaaattctcaggtgcgtacaaaatgtaattactcccctcctgcacaggcagcaaagcccccgatccctccaggtacacatacaaagcctcagcgtccatagcttaccgagcagcagcacacaacaggcgcaagagtcagagaaaggctgagctctaacctgtccacccgctctctgctcaatatatagcccagatctacactgacgtaaaggccaaagtctaaaaatacccgccaaataatcacacacgcccagcacacgcccagaaaccggtgacacactcaaaaaaatacgcgcacttcctcaaacgcccaaaactgccgtcatttccgggttcccacgctacgtcatcaaaacacgactttcaaattccgtcgaccgttaaaaacgtcacccgccccgcccctaacggtcgcccgtctctcagccaatcagcgccccgcatccccaaattcaaacacctcatttgcatattaacgcgcacaaaaagtttgaggtatattattgatgatgg

SEQ ID NO: 11 - DNA, 31867 bp, synthetic construct
  misc_feature 1..31867: note = Description of Artificial Sequence: Synthetic polynucleotide
  source 1..31867: mol_type = other DNA
ccatcttcaataatatacctcaaactttttgtgcgcgttaatatgcaaatgaggcgtttgaatttggggaggaagggcggtgattggtcgagggatgagcgaccgttaggggcggggcgagtgacgttttgatgacgtggttgcgaggaggagccagtttgcaagttctcgtgggaaaagtgacgtcaaacgaggtgtggtttgaacacggaaatactcaattttcccgcgctctctgacaggaaatgaggtgtttctgggcggatgcaagtgaaaacgggccattttcgcgcgaaaactgaatgaggaagtgaaaatctgagtaatttcgcgtttatggcagggaggagtatttgccgagggccgagtagactttgaccgattacgtgggggtttcgattaccgtgtttttcacctaaatttccgcgtacggtgtcaaagtccggtgtttttacgtaggtgtcagctgatcgccagggtatttaaacctgcgctctccagtcaagaggccactcttgagtgccagcgagaagagttttctcctccgcgccgcgagtcagatctacactttgaaagtagggataacagggtaatgacattgattattgactagttgttaatagtaatcaattacggggtcattagttcatagcccatatatggagttccgcgttacataacttacggtaaatggcccgcctggctgaccgcccaacgacccccgcccattgacgtcaataatgacgtatgttcccatagtaacgccaatagggactttccattgacgtcaatgggtggagtatttacggtaaactgcccacttggcagtacatcaagtgtatcatatgccaagtccgccccctattgacgtcaatgacggtaaatggcccgcctggcattatgcccagtacatgaccttacgggactttcctacttggcagtacatctacgtattagtcatcgctattaccatggtgatgcggttttggcagtacaccaatgggcgtggatagcggtttgactcacggggatttccaagtctccaccccattgacgtcaatgggagtttgttttggcaccaaaatcaacgggactttccaaaatgtcgtaataaccccgccccgttgacgcaaatgggcggtaggcgtgtacggtgggaggtctatataagcagagctcgtttagtgaaccgtcagatcgcctggaacgccatccacgctgttttgacctccatagaagacagcgatcgcgccaccatggtgagcaagggcgaggagctgttcaccggggtggtgcccatcctggtcgagctggacggcgacgtaaacggccacaagttcagcgtgtccggcgagggcgagggcgatgccacctacggcaagctgaccctgaagttcatctgcaccaccggcaagctgcccgtgccctggcccaccctcgtgaccaccctgacctacggcgtgcagtgcttcagccgctaccccgaccacatgaagcagcacgacttcttcaagtccgccatgcccgaaggctacgtccaggagcgcaccatcttcttcaaggacgacggcaactacaagacccgcgccgaggtgaagttcgagggcgacaccctggtgaaccgcatcgagctgaagggcatcgacttcaaggaggacggcaacatcctggggcacaagctggagtacaactacaacagccacaacgtctatatcatggccgacaagcagaagaacggcatcaaggtgaacttcaagatccgccacaacatcgaggacggcagcgtgcagctcgccgaccactaccagcagaacacccccatcggcgacggccccgtgctgctgcccgacaaccactacctgagcacccagtccgccctgagcaaagaccccaacgagaagcgcgatcacatggtcctgctggagttcgtgaccgccgccgggatcactctcggcatggacgagctttacaagtagtgagtttaaactcccatttaaatgtgagggttaatgcttcgagcagacatgataagatacattgatgagtttggacaaaccacaactagaatgcagtgaaaaaaatgctttatttgtgaaatttgtgatgctattgctttatttgtaaccattataagctgcaataaacaagttaacaacaacaattgcattcattttatgtttcaggttcagggggagatgtgggaggttttttaaagcaagtaaaacctctacaaatgtggtaaaataactataacggtcctaaggtagcgagtgagtagtgttctggggcgggggaggacctgcatgagggccagaataactgaaatctgtgcttttctgtgtgttgcagcagcatgagcggaagcggctcctttgagggaggggtattcagcccttatctgacggggcgtctcccctcctgggcgggagtgcgtcagaatgtgatgggatccacggtggacggccggcccgtgcagcccgcgaactcttcaaccctgacctatgcaaccctgagctcttcgtcgttggacgcagctgccgccgcagctgctgcatctgccgccagcgccgtgcgcggaatggccatgggcgccggctactacggcactctggtggccaactcgagttccaccaataatcccgccagcctgaacgaggagaagctgttgctgctgatggcccagctcgaggccttgacccagcgcctgggcgagctgacccagcaggtggctcagctgcaggagcagacgcgggccgcggttgccacggtgaaatccaaataaaaaatgaatcaataaataaacggagacggttgttgattttaacacagagtctgaatctttatttgatttttcgcgcgcggtaggccctggaccaccggtctcgatcattgagcacccggtggatcttttccaggacccggtagaggtgggcttggatgttgaggtacatgggcatgagcccgtcccgggggtggaggtagctccattgcagggcctcgtgctcgggggtggtgttgtaaatcacccagtcatagcaggggcgcagggcatggtgttgcacaatatctttgaggaggagactgatggccacgggcagccctttggtgtaggtgtttacaaatctgttgagctgggagggatgcatgcggggggagatgaggtgcatcttggcctggatcttgagattggcgatgttaccgcccagatcccgcctggggttcatgttgtgcaggaccaccagcacggtgtatccggtgcacttggggaatttatcatgcaacttggaagggaaggcgtgaaagaatttggcgacgcctttgtgcccgcccaggttttccatgcactcatccatgatgatggcgatgggcccgtgggcggcggcctgggcaaagacgtttcgggggtcggacacatcatagttgtggtcctgggtgaggtcatcataggccattttaatgaatttggggcggagggtgccggactgggggacaaaggtaccctcgatcccgggggcgtagttcccctcacagatctgcatctcccaggctttgagctcggagggggggatcatgtccacctgcggggcgataaagaacacggtttccggggcgggggagatgagctgggccgaaagcaagttccggagcagctgggacttgccgcagccggtggggccgtagatgaccccgatgaccggctgcaggtggtagttgagggagagacagctgccgtcctcccggaggaggggggccacctcgttcatcatctcgcgcacgtgcatgttctcgcgcaccagttccgccaggaggcgctctccccccagggataggagctcctggagcgaggcgaagtttttcagcggcttgagtccgtcggccatgggcattttggagagggtttgttgcaagagttccaggcggtcccagagctcggtgatgtgctctacggcatctcgatccagcagacctcctcgtttcgcgggttgggacggctgcgggagtagggcaccagacgatgggcgtccagcgcagccagggtccggtccttccagggtcgcagcgtccgcgtcagggtggtctccgtcacggtgaaggggtgcgcgccgggctgggcgcttgcgagggtgcgcttcaggctcatccggctggtcgaaaaccgctcccgatcggcgccctgcgcgtcggccaggtagcaattgaccatgagttcgtagttgagcgcctcggccgcgtggcctttggcgcggagcttacctttggaagtctgcccgcaggcgggacagaggagggacttgagggcgtagagcttgggggcgaggaagacggactcgggggcgtaggcgtccgcgccgcagtgggcgcagacggtctcgcactccacgagccaggtgaggtcgggctggtcggggtcaaaaaccagtttcccgccgttctttttgatgcgtttcttacctttggtctccatgagctcgtgtccccgctgggtgacaaagaggctgtccgtgtccccgtagaccgactttatgggccggtcctcgagcggtgtgccgcggtcctcctcgtagaggaaccccgcccactccgagacgaaagcccgggtccaggccagcacgaaggaggccacgtgggacgggtagcggtcgttgtccaccagcgggtccaccttttccagggtatgcaaacacatgtccccctcgtccacatccaggaaggtgattggcttgtaagtgtaggccacgtgaccgggggtcccggccgggggggtataaaagggtgcgggtccctgctcgtcctcactgtcttccggatcgctgtccaggagcgccagctgttggggtaggtattccctctcgaaggcgggcatgacctcggcactcaggttgtcagtttctagaaacgaggaggatttgatattgacggtgccggcggagatgcctttcaagagcccctcgtccatctggtcagaaaagacgatctttttgttgtcgagcttggtggcgaaggagccgtagagggcgttggagaggagcttggcgatggagcgcatggtctggtttttttccttgtcggcgcgctccttggcggcgatgttgagctgcacgtactcgcgcgccacgcacttccattcggggaagacggtggtcagctcgtcgggcacgattctgacctgccagccccgattatgcagggtgatgaggtccacactggtggccacctcgccgcgcaggggctcattagtccagcagaggcgtccgcccttgcgcgagcagaaggggggcagggggtccagcatgacctcgtcgggggggtcggcatcgatggtgaagatgccgggcaggaggtcggggtcaaagtagctgatggaagtggccagatcgtccagggcagcttgccattcgcgcacggccagcgcgctctcgtagggactgaggggcgtgccccagggcatgggatgggtaagcgcggaggcgtacatgccgcagatgtcgtagacgtagaggggctcctcgaggatgccgatgtaggtggggtagcagcgccccccgcggatgctggcgcgcacgtagtcatacagctcgtgcgagggggcgaggagccccgggcccaggttggtgcgactgggcttttcggcgcggtagacgatctggcggaaaatggcatgcgagttggaggagatggtgggcctttggaagatgttgaagtgggcgtggggcagtccgaccgagtcgcggatgaagtgggcgtaggagtcttgcagcttggcgacgagctcggcggtgactaggacgtccagagcgcagtagtcgagggtctcctggatgatgtcatacttgagctgtcccttttgtttccacagctcgcggttgagaaggaactcttcgcggtccttccagtactcttcgagggggaacccgtcctgatctgcacggtaagagcctagcatgtagaactggttgacggccttgtaggcgcagcagcccttctccacggggagggcgtaggcctgggcggccttgcgcagggaggtgtgcgtgagggcgaaagtgtccctgaccatgaccttgaggaactggtgcttgaagtcgatatcgtcgcagcccccctgctcccagagctggaagtccgtgcgcttcttgtaggcggggttgggcaaagcgaaagtaacatcgttgaagaggatcttgcccgcgcggggcataaagttgcgagtgatgcggaaaggttggggcacctcggcccggttgttgatgacctgggcggcgagcacgatctcgtcgaagccgttgatgttgtggcccacgatgtagagttccacgaatcgcggacggcccttgacgtggggcagtttcttgagctcctcgtaggtgagctcgtcggggtcgctgagcccgtgctgctcgagcgcccagtcggcgagatgggggttggcgcggaggaaggaagtccagagatccacggccagggcggtttgcagacggtcccggtactgacggaactgctgcccgacggccattttttcgggggtgacgcagtagaaggtgcgggggtccccgtgccagcgatcccatttgagctggagggcgagatcgagggcgagctcgacgagccggtcgtccccggagagtttcatgaccagcatgaaggggacgagctgcttgccgaaggaccccatccaggtgtaggtttccacatcgtaggtgaggaagagcctttcggtgcgaggatgcgagccgatggggaagaactggatctcctgccaccaattggaggaatggctgttgatgtgatggaagtagaaatgccgacggcgcgccgaacactcgtgcttgtgtttatacaagcggccacagtgctcgcaacgctgcacgggatgcacgtgctgcacgagctgtacctgagttcctttgacgaggaatttcagtgggaagtggagtcgtggcgcctgcatctcgtgctgtactacgtcgtggtggtcggcctggccctcttctgcctcgatggtggtcatgctgacgagcccgcgcgggaggcaggtccagacctcggcgcgagcgggtcggagagcgaggacgagggcgcgcaggccggagctgtccagggtcctgagacgctgcggagtcaggtcagtgggcagcggcggcgcgcggttgacttgcaggagtttttccagggcgcgcgggaggtccagatggtacttgatctccaccgcgccattggtggcgacgtcgatggcttgcagggtcccgtgcccctggggtgtgaccaccgtcccccgtttcttcttgggcggctggggcgacgggggcggtgcctcttccatggttagaagcggcggcgaggacgcgcgccgggcggcaggggcggctcggggcccggaggcaggggcggcaggggcacgtcggcgccgcgcgcgggtaggttctggtactgcgcccggagaagactggcgtgagcgacgacgcgacggttgacgtcctggatctgacgcctctgggtgaaggccacgggacccgtgagtttgaacctgaaagagagttcgacagaatcaatctcggtatcgttgacggcggcctgccgcaggatctcttgcacgtcgcccgagttgtcctggtaggcgatctcggtcatgaactgctcgatctcctcctcttgaaggtctccgcggccggcgcgctccacggtggccgcgaggtcgttggagatgcggcccatgagctgcgagaaggcgttcatgcccgcctcgttccagacgcggctgtagaccacgacgccctcgggatcgcgggcgcgcatgaccacctgggcgaggttgagctccacgtggcgcgtgaagaccgcgtagttgcagaggcgctggtagaggtagttgagcgtggtggcgatgtgctcggtgacgaagaaatacatgatccagcggcggagcggcatctcgctgacgtcgcccagcgcctccaaacgttccatggcctcgtaaaagtccacggcgaagttgaaaaactgggagttgcgcgccgagacggtcaactcctcctccagaagacggatgagctcggcgatggtggcgcgcacctcgcgctcgaaggcccccgggagttcctccacttcctcttcttcctcctccactaacatctcttctacttcctcctcaggcggcagtggtggcgggggagggggcctgcgtcgccggcggcgcacgggcagacggtcgatgaagcgctcgatggtctcgccgcgccggcgtcgcatggtctcggtgacggcgcgcccgtcctcgcggggccgcagcgtgaagacgccgccgcgcatctccaggtggccgggggggtccccgttgggcagggagagggcgctgacgatgcatcttatcaattgccccgtagggactccgcgcaaggacctgagcgtctcgagatccacgggatctgaaaaccgctgaacgaaggcttcgagccagtcgcagtcgcaaggtaggctgagcacggtttcttctggcgggtcatgttggttgggagcggggcgggcgatgctgctggtgatgaagttgaaataggcggttctgagacggcggatggtggcgaggagcaccaggtctttgggcccggcttgctggatgcgcagacggtcggccatgccccaggcgtggtcctgacacctggccaggtccttgtagtagtcctgcatgagccgctccacgggcacctcctcctcgcccgcgcggccgtgcatgcgcgtgagcccgaagccgcgctggggctggacgagcgccaggtcggcgacgacgcgctcggcgaggatggcttgctggatctgggtgagggtggtctggaagtcatcaaagtcgacgaagcggtggtaggctccggtgttgatggtgtaggagcagttggccatgacggaccagttgacggtctggtggcccggacgcacgagctcgtggtacttgaggcgcgagtaggcgcgcgtgtcgaagatgtagtcgttgcaggtgcgcaccaggtactggtagccgatgaggaagtgcggcggcggctggcggtagagcggccatcgctcggtggcgggggcgccgggcgcgaggtcctcgagcatggtgcggtggtagccgtagatgtacctggacatccaggtgatgccggcggcggtggtggaggcgcgcgggaactcgcggacgcggttccagatgttgcgcagcggcaggaagtagttcatggtgggcacggtctggcccgtgaggcgcgcgcagtcgtggatgctctatacgggcaaaaacgaaagcggtcagcggctcgactccgtggcctggaggctaagcgaacgggttgggctgcgcgtgtaccccggttcgaatctcgaatcaggctggagccgcagctaacgtggtattggcactcccgtctcgacccaagcctgcaccaaccctccaggatacggaggcgggtcgttttgcaacttttttttggaggccggatgagactagtaagcgcggaaagcggccgaccgcgatggctcgctgccgtagtctggagaagaatcgccagggttgcgttgcggtgtgccccggttcgaggccggccggattccgcggctaacgagggcgtggctgccccgtcgtttccaagaccccatagccagccgacttctccagttacggagcgagcccctcttttgttttgtttgtttttgccagatgcatcccgtactgcggcagatgcgcccccaccaccctccaccgcaacaacagccccctccacagccggcgcttctgcccccgccccagcagcaacttccagccacgaccgccgcggccgccgtgagcggggctggacagagttatgatcaccagctggccttggaagagggcgaggggctggcgcgcctgggggcgtcgtcgccggagcggcacccgcgcgtgcagatgaaaagggacgctcgcgaggcctacgtgcccaagcagaacctgttcagagacaggagcggcgaggagcccgaggagatgcgcgcggcccggttccacgcggggcgggagctgcggcgcggcctggaccgaaagagggtgctgagggacgaggatttcgaggcggacgagctgacggggatcagccccgcgcgcgcgcacgtggccgcggccaacctggtcacggcgtacgagcagaccgtgaaggaggagagcaacttccaaaaatccttcaacaaccacgtgcgcaccctgatcgcgcgcgaggaggtgaccctgggcctgatgcacctgtgggacctgctggaggccatcgtgcagaaccccaccagcaagccgctgacggcgcagctgttcctggtggtgcagcatagtcgggacaacgaagcgttcagggaggcgctgctgaatatcaccgagcccgagggccgctggctcctggacctggtgaacattctgcagagcatcgtggtgcaggagcgcgggctgccgctgtccgagaagctggcggccatcaacttctcggtgctgagtttgggcaagtactacgctaggaagatctacaagaccccgtacgtgcccatagacaaggaggtgaagatcgacgggttttacatgcgcatgaccctgaaagtgctgaccctgagcgacgatctgggggtgtaccgcaacgacaggatgcaccgtgcggtgagcgccagcaggcggcgcgagctgagcgaccaggagctgatgcatagtctgcagcgggccctgaccggggccgggaccgagggggagagctactttgacatgggcgcggacctgcactggcagcccagccgccgggccttggaggcggcggcaggaccctacgtagaagaggtggacgatgaggtggacgaggagggcgagtacctggaagactgatggcgcgaccgtatttttgctagatgcaacaacaacagccacctcctgatcccgcgatgcgggcggcgctgcagagccagccgtccggcattaactcctcggacgattggacccaggccatgcaacgcatcatggcgctgacgacccgcaaccccgaagcctttagacagcagccccaggccaaccggctctcggccatcctggaggccgtggtgccctcgcgctccaaccccacgcacgagaaggtcctggccatcgtgaacgcgctggtggagaacaaggccatccgcggcgacgaggccggcctggtgtacaacgcgctgctggagcgcgtggcccgctacaacagcaccaacgtgcagaccaacctggaccgcatggtgaccgacgtgcgcgaggccgtggcccagcgcgagcggttccaccgcgagtccaacctgggatccatggtggcgctgaacgccttcctcagcacccagcccgccaacgtgccccggggccaggaggactacaccaacttcatcagcgccctgcgcctgatggtgaccgaggtgccccagagcgaggtgtaccagtccgggccggactacttcttccagaccagtcgccagggcttgcagaccgtgaacctgagccaggctttcaagaacttgcagggcctgtggggcgtgcaggccccggtcggggaccgcgcgacggtgtcgagcctgctgacgccgaactcgcgcctgctgctgctgctggtggcccccttcacggacagcggcagcatcaaccgcaactcgtacctgggctacctgattaacctgtaccgcgaggccatcggccaggcgcacgtggacgagcagacctaccaggagatcacccacgtgagccgcgccctgggccaggacgacccgggcaacctggaagccaccctgaactttttgctgaccaaccggtcgcagaagatcccgccccagtacgcgctcagcaccgaggaggagcgcatcctgcgttacgtgcagcagagcgtgggcctgttcctgatgcaggagggggccacccccagcgccgcgctcgacatgaccgcgcgcaacatggagcccagcatgtacgccagcaaccgcccgttcatcaataaactgatggactacttgcatcgggcggccgccatgaactctgactatttcaccaacgccatcctgaatccccactggctcccgccgccggggttctacacgggcgagtacgacatgcccgaccccaatgacgggttcctgtgggacgatgtggacagcagcgtgttctccccccgaccgggtgctaacgagcgccccttgtggaagaaggaaggcagcgaccgacgcccgtcctcggcgctgtccggccgcgagggtgctgccgcggcggtgcccgaggccgccagtcctttcccgagcttgcccttctcgctgaacagtatccgcagcagcgagctgggcaggatcacgcgcccgcgcttgctgggcgaagaggagtacttgaatgactcgctgttgagacccgagcgggagaagaacttccccaataacgggatagaaagcctggtggacaagatgagccgctggaagacgtatgcgcaggagcacagggacgatccccgggcgtcgcagggggccacgagccggggcagcgccgcccgtaaacgccggtggcacgacaggcagcggggacagatgtgggacgatgaggactccgccgacgacagcagcgtgttggacttgggtgggagtggtaacccgttcgctcacctgcgcccccgtatcgggcgcatgatgtaagagaaaccgaaaataaatgatactcaccaaggccatggcgaccagcgtgcgttcgtttcttctctgttgttgttgtatctagtatgatgaggcgtgcgtacccggagggtcctcctccctcgtacgagagcgtgatgcagcaggcgatggcggcggcggcgatgcagcccccgctggaggctccttacgtgcccccgcggtacctggcgcctacggaggggcggaacagcattcgttactcggagctggcacccttgtacgataccacccggttgtacctggtggacaacaagtcggcggacatcgcctcgctgaactaccagaacgaccacagcaacttcctgaccaccgtggtgcagaacaatgacttcacccccacggaggccagcacccagaccatcaactttgacgagcgctcgcggtggggcggccagctgaaaaccatcatgcacaccaacatgcccaacgtgaacgagttcatgtacagcaacaagttcaaggcgcgggtgatggtctcccgcaagacccccaatggggtgacagtgacagaggattatgatggtagtcaggatgagctgaagtatgaatgggtggaatttgagctgcccgaaggcaacttctcggtgaccatgaccatcgacctgatgaacaacgccatcatcgacaattacttggcggtggggcggcagaacggggtgctggagagcgacatcggcgtgaagttcgacactaggaacttcaggctgggctgggaccccgtgaccgagctggtcatgcccggggtgtacaccaacgaggctttccatcccgatattgtcttgctgcccggctgcggggtggacttcaccgagagccgcctcagcaacctgctgggcattcgcaagaggcagcccttccaggaaggcttccagatcatgtacgaggatctggaggggggcaacatccccgcgctcctggatgtcgacgcctatgagaaaagcaaggaggatgcagcagctgaagcaactgcagccgtagctaccgcctctaccgaggtcaggggcgataattttgcaagcgccgcagcagtggcagcggccgaggcggctgaaaccgaaagtaagatagtcattcagccggtggagaaggatagcaagaacaggagctacaacgtactaccggacaagataaacaccgcctaccgcagctggtacctagcctacaactatggcgaccccgagaagggcgtgcgctcctggacgctgctcaccacctcggacgtcacctgcggcgtggagcaagtctactggtcgctgcccgacatgatgcaagacccggtcaccttccgctccacgcgtcaagttagcaactacccggtggtgggcgccgagctcctgcccgtctactccaagagcttcttcaacgagcaggccgtctactcgcagcagctgcgcgccttcacctcgcttacgcacgtcttcaaccgcttccccgagaaccagatcctcgtccgcccgcccgcgcccaccattaccaccgtcagtgaaaacgttcctgctctcacagatcacgggaccctgccgctgcgcagcagtatccggggagtccagcgcgtgaccgttactgacgccagacgccgcacctgcccctacgtctacaaggccctgggcatagtcgcgccgcgcgtcctctcgagccgcaccttctaaatgtccattctcatctcgcccagtaataacaccggttggggcctgcgcgcgcccagcaagatgtacggaggcgctcgccaacgctccacgcaacaccccgtgcgcgtgcgcgggcacttccgcgctccctggggcgccctcaagggccgcgtgcggtcgcgcaccaccgtcgacgacgtgatcgaccaggtggtggccgacgcgcgcaactacacccccgccgccgcgcccgtctccaccgtggacgccgtcatcgacagcgtggtggccgacgcgcgccggtacgcccgcgccaagagccggcggcggcgcatcgcccggcggcaccggagcacccccgccatgcgcgcggcgcgagccttgctgcgcagggccaggcgcacgggacgcagggccatgctcagggcggccagacgcgcggcttcaggcgccagcgccggcaggacccggagacgcgcggccacggcggcggcagcggccatcgccagcatgtcccgcccgcggcgagggaacgtgtactgggtgcgcgacgccgccaccggtgtgcgcgtgcccgtgcgcacccgcccccctcgcacttgaagatgttcacttcgcgatgttgatgtgtcccagcggcgaggaggatgtccaagcgcaaattcaaggaagagatgctccaggtcatcgcgcctgagatctacggccctgcggtggtgaaggaggaaagaaagccccgcaaaatcaagcgggtcaaaaaggacaaaaaggaagaagaaagtgatgtggacggattggtggagtttgtgcgcgagttcgccccccggcggcgcgtgcagtggcgcgggcggaaggtgcaaccggtgctgagacccggcaccaccgtggtcttcacgcccggcgagcgctccggcaccgcttccaagcgctcctacgacgaggtgtacggggatgatgatattctggagcaggcggccgagcgcctgggcgagtttgcttacggcaagcgcagccgttccgcaccgaaggaagaggcggtgtccatcccgctggaccacggcaaccccacgccgagcctcaagcccgtgaccttgcagcaggtgctgccgaccgcggcgccgcgccgggggttcaagcgcgagggcgaggatctgtaccccaccatgcagctgatggtgcccaagcgccagaagctggaagacgtgctggagaccatgaaggtggacccggacgtgcagcccgaggtcaaggtgcggcccatcaagcaggtggccccgggcctgggcgtgcagaccgtggacatcaagattcccacggagcccatggaaacgcagaccgagcccatgatcaagcccagcaccagcaccatggaggtgcagacggatccctggatgccatcggctcctagtcgaagaccccggcgcaagtacggcgcggccagcctgctgatgcccaactacgcgctgcatccttccatcatccccacgccgggctaccgcggcacgcgcttctaccgcggtcataccagcagccgccgccgcaagaccaccactcgccgccgccgtcgccgcaccgccgctgcaaccacccctgccgccctggtgcggagagtgtaccgccgcggccgcgcacctctgaccctgccgcgcgcgcgctaccacccgagcatcgccatttaaactttcgcctgctttgcagatcaatggccctcacatgccgccttcgcgttcccattacgggctaccgaggaagaaaaccgcgccgtagaaggctggcggggaacgggatgcgtcgccaccaccaccggcggcggcgcgccatcagcaagcggttggggggaggcttcctgcccgcgctgatccccatcatcgccgcggcgatcggggcgatccccggcattgcttccgtggcggtgcaggcctctcagcgccactgagacacacttggaaacatcttgtaataaaccaatggactctgacgctcctggtcctgtgatgtgttttcgtagacagatggaagacatcaatttttcgtccctggctccgcgacacggcacgcggccgttcatgggcacctggagcgacatcggcaccagccaactgaacgggggcgccttcaattggagcagtctctggagcgggcttaagaatttcgggtccacgcttaaaacctatggcagcaaggcgtggaacagcaccacagggcaggcgctgagggataagctgaaagagcagaacttccagcagaaggtggtcgatgggctcgcctcgggcatcaacggggtggtggacctggccaaccaggccgtgcagcggcagatcaacagccgcctggacccggtgccgcccgccggctccgtggagatgccgcaggtggaggaggagctgcctcccctggacaagcggggcgagaagcgaccccgccccgatgcggaggagacgctgctgacgcacacggacgagccgcccccgtacgaggaggcggtgaaactgggtctgcccaccacgcggcccatcgcgcccctggccaccggggtgctgaaacccgaaaagcccgcgaccctggacttgcctcctccccagccttcccgcccctctacagtggctaagcccctgccgccggtggccgtggcccgcgcgcgacccgggggcaccgcccgccctcatgcgaactggcagagcactctgaacagcatcgtgggtctgggagtgcagagtgtgaagcgccgccgctgctattaaacctaccgtagcgcttaacttgcttgtctgtgtgtgtatgtattatgtcgccgccgccgctgtccaccagaaggaggagtgaagaggcgcgtcgccgagttgcaagatggccaccccatcgatgctgccccagtgggcgtacatgcacatcgccggacaggacgcttcggagtacctgagtccgggtctggtgcagtttgcccgcgccacagacacctacttcagtctggggaacaagtttaggaaccccacggtggcgcccacgcacgatgtgaccaccgaccgcagccagcggctgacgctgcgcttcgtgcccgtggaccgcgaggacaacacctactcgtacaaagtgcgctacacgctggccgtgggcgacaaccgcgtgctggacatggccagcacctactttgacatccgcggcgtgctggatcggggccctagcttcaaaccctactccggcaccgcctacaacagtctggcccccaagggagcacccaacacttgtcagtggacatataaagccgatggtgaaactgccacagaaaaaacctatacatatggaaatgcacccgtgcagggcattaacatcacaaaagatggtattcaacttggaactgacaccgatgatcagccaatctacgcagataaaacctatcagcctgaacctcaagtgggtgatgctgaatggcatgacatcactggtactgatgaaaagtatggaggcagagctcttaagcctgataccaaaatgaagccttgttatggttcttttgccaagcctactaataaagaaggaggtcaggcaaatgtgaaaacaggaacaggcactactaaagaatatgacatagacatggctttctttgacaacagaagtgcggctgctgctggcctagctccagaaattgttttgtatactgaaaatgtggatttggaaactccagatacccatattgtatacaaagcaggcacagatgacagcagctcttctattaatttgggtcagcaagccatgcccaacagacctaactacattggtttcagagacaactttatcgggctcatgtactacaacagcactggcaatatgggggtgctggccggtcaggcttctcagctgaatgctgtggttgacttgcaagacagaaacaccgagctgtcctaccagctcttgcttgactctctgggtgacagaacccggtatttcagtatgtggaatcaggcggtggacagctatgatcctgatgtgcgcattattgaaaatcatggtgtggaggatgaacttcccaactattgtttccctctggatgctgttggcagaacagatacttatcagggaattaaggctaatggaactgatcaaaccacatggaccaaagatgacagtgtcaatgatgctaatgagataggcaagggtaatccattcgccatggaaatcaacatccaagccaacctgtggaggaacttcctctacgccaacgtggccctgtacctgcccgactcttacaagtacacgccggccaatgttaccctgcccaccaacaccaacacctacgattacatgaacggccgggtggtggcgccctcgctggtggactcctacatcaacatcggggcgcgctggtcgctggatcccatggacaacgtgaaccccttcaaccaccaccgcaatgcggggctgcgctaccgctccatgctcctgggcaacgggcgctacgtgcccttccacatccaggtgccccagaaatttttcgccatcaagagcctcctgctcctgcccgggtcctacacctacgagtggaacttccgcaaggacgtcaacatgatcctgcagagctccctcggcaacgacctgcgcacggacggggcctccatctccttcaccagcatcaacctctacgccaccttcttccccatggcgcacaacacggcctccacgctcgaggccatgctgcgcaacgacaccaacgaccagtccttcaacgactacctctcggcggccaacatgctctaccccatcccggccaacgccaccaacgtgcccatctccatcccctcgcgcaactgggccgccttccgcggctggtccttcacgcgtctcaagaccaaggagacgccctcgctgggctccgggttcgacccctacttcgtctactcgggctccatcccctacctcgacggcaccttctacctcaaccacaccttcaagaaggtctccatcaccttcgactcctccgtcagctggcccggcaacgaccggctcctgacgcccaacgagttcgaaatcaagcgcaccgtcgacggcgagggctacaacgtggcccagtgcaacatgaccaaggactggttcctggtccagatgctggcccactacaacatcggctaccagggcttctacgtgcccgagggctacaaggaccgcatgtactccttcttccgcaacttccagcccatgagccgccaggtggtggacgaggtcaactacaaggactaccaggccgtcaccctggcctaccagcacaacaactcgggcttcgtcggctacctcgcgcccaccatgcgccagggccagccctaccccgccaactacccctacccgctcatcggcaagagcgccgtcaccagcgtcacccagaaaaagttcctctgcgacagggtcatgtggcgcatccccttctccagcaacttcatgtccatgggcgcgctcaccgacctcggccagaacatgctctatgccaactccgcccacgcgctagacatgaatttcgaagtcgaccccatggatgagtccacccttctctatgttgtcttcgaagtcttcgacgtcgtccgagtgcaccagccccaccgcggcgtcatcgaggccgtctacctgcgcacccccttctcggccggtaacgccaccacctaagctcttgcttcttgcaagccatggccgcgggctccggcgagcaggagctcagggccatcatccgcgacctgggctgcgggccctacttcctgggcaccttcgataagcgcttcccgggattcatggccccgcacaagctggcctgcgccatcgtcaacacggccggccgcgagaccgggggcgagcactggctggccttcgcctggaacccgcgctcgaacacctgctacctcttcgaccccttcgggttctcggacgagcgcctcaagcagatctaccagttcgagtacgagggcctgctgcgccgcagcgccctggccaccgaggaccgctgcgtcaccctggaaaagtccacccagaccgtgcagggtccgcgctcggccgcctgcgggctcttctgctgcatgttcctgcacgccttcgtgcactggcccgaccgccccatggacaagaaccccaccatgaacttgctgacgggggtgcccaacggcatgctccagtcgccccaggtggaacccaccctgcgccgcaaccaggaggcgctctaccgcttcctcaactcccactccgcctactttcgctcccaccgcgcgcgcatcgagaaggccaccgccttcgaccgcatgaatcaagacatgtaaaccgtgtgtgtatgttaaatgtctttaataaacagcactttcatgttacacatgcatctgagatgatttatttagaaatcgaaagggttctgccgggtctcggcatggcccgcgggcagggacacgttgcggaactggtacttggccagccacttgaactcggggatcagcagtttgggcagcggggtgtcggggaaggagtcggtccacagcttccgcgtcagttgcagggcgcccagcaggtcgggcgcggagatcttgaaatcgcagttgggacccgcgttctgcgcgcgggagttgcggtacacggggttgcagcactggaacaccatcagggccgggtgcttcacgctcgccagcaccgtcgcgtcggtgatgctctccacgtcgaggtcctcggcgttggccatcccgaagggggtcatcttgcaggtctgccttcccatggtgggcacgcacccgggcttgtggttgcaatcgcagtgcagggggatcagcatcatctgggcctggtcggcgttcatccccgggtacatggccttcatgaaagcctccaattgcctgaacgcctgctgggccttggctccctcggtgaagaagaccccgcaggacttgctagagaactggttggtggcgcacccggcgtcgtgcacgcagcagcgcgcgtcgttgttggccagctgcaccacgctgcgcccccagcggttctgggtgatcttggcccggtcggggttctccttcagcgcgcgctgcccgttctcgctcgccacatccatctcgatcatgtgctccttctggatcatggtggtcccgtgcaggcaccgcagcttgccctcggcctcggtgcacccgtgcagccacagcgcgcacccggtgcactcccagttcttgtgggcgatctgggaatgcgcgtgcacgaagccctgcaggaagcggcccatcatggtggtcagggtcttgttgctagtgaaggtcagcggaatgccgcggtgctcctcgttgatgtacaggtggcagatgcggcggtacacctcgccctgctcgggcatcagctggaagttggctttcaggtcggtctccacgcggtagcggtccatcagcatagtcatgatttccatacccttctcccaggccgagacgatgggcaggctcatagggttcttcaccatcatcttagcgctagcagccgcggccagggggtcgctctcgtccagggtctcaaagctccgcttgccgtccttctcggtgatccgcaccggggggtagctgaagcccacggccgccagctcctcctcggcctgtctttcgtcctcgctgtcctggctgacgtcctgcaggaccacatgcttggtcttgcggggtttcttcttgggcggcagcggcggcggagatgttggagatggcgagggggagcgcgagttctcgctcaccactactatctcttcctcttcttggtccgaggccacgcggcggtaggtatgtctcttcgggggcagaggcggaggcgacgggctctcgccgccgcgacttggcggatggctggcagagccccttccgcgttcgggggtgcgctcccggcggcgctctgactgacttcctccgcggccggccattgtgttctcctagggaggaacaacaagcatggagactcagccatcgccaacctcgccatctgcccccaccgccgacgagaagcagcagcagcagaatgaaagcttaaccgccccgccgcccagccccgccacctccgacgcggccgtcccagacatgcaagagatggaggaatccatcgagattgacctgggctatgtgacgcccgcggagcacgaggaggagctggcagtgcgcttttcacaagaagagatacaccaagaacagccagagcaggaagcagagaatgagcagagtcaggctgggctcgagcatgacggcgactacctccacctgagcgggggggaggacgcgctcatcaagcatctggcccggcaggccaccatcgtcaaggatgcgctgctcgaccgcaccgaggtgcccctcagcgtggaggagctcagccgcgcctacgagttgaacctcttctcgccgcgcgtgccccccaagcgccagcccaatggcacctgcgagcccaacccgcgcctcaacttctacccggtcttcgcggtgcccgaggccctggccacctaccacatctttttcaagaaccaaaagatccccgtctcctgccgcgccaaccgcacccgcgccgacgcccttttcaacctgggtcccggcgcccgcctacctgatatcgcctccttggaagaggttcccaagatcttcgagggtctgggcagcgacgagactcgggccgcgaacgctctgcaaggagaaggaggagagcatgagcaccacagcgccctggtcgagttggaaggcgacaacgcgcggctggcggtgctcaaacgcacggtcgagctgacccatttcgcctacccggctctgaacctgccccccaaagtcatgagcgcggtcatggaccaggtgctcatcaagcgcgcgtcgcccatctccgaggacgagggcatgcaagactccgaggagggcaagcccgtggtcagcgacgagcagctggcccggtggctgggtcctaatgctagtccccagagtttggaagagcggcgcaaactcatgatggccgtggtcctggtgaccgtggagctggagtgcctgcgccgcttcttcgccgacgcggagaccctgcgcaaggtcgaggagaacctgcactacctcttcaggcacgggttcgtgcgccaggcctgcaagatctccaacgtggagctgaccaacctggtctcctacatgggcatcttgcacgagaaccgcctggggcagaacgtgctgcacaccaccctgcgcggggaggcccggcgcgactacatccgcgactgcgtctacctctacctctgccacacctggcagacgggcatgggcgtgtggcagcagtgtctggaggagcagaacctgaaagagctctgcaagctcctgcagaagaacctcaagggtctgtggaccgggttcgacgagcgcaccaccgcctcggacctggccgacctcattttccccgagcgcctcaggctgacgctgcgcaacggcctgcccgactttatgagccaaagcatgttgcaaaactttcgctctttcatcctcgaacgctccggaatcctgcccgccacctgctccgcgctgccctcggacttcgtgccgctgaccttccgcgagtgccccccgccgctgtggagccactgctacctgctgcgcctggccaactacctggcctaccactcggacgtgatcgaggacgtcagcggcgagggcctgctcgagtgccactgccgctgcaacctctgcacgccgcaccgctccctggcctgcaacccccagctgctgagcgagacccagatcatcggcaccttcgagttgcaagggcccagcgaaggcgagggttcagccgccaaggggggtctgaaactcaccccggggctgtggacctcggcctacttgcgcaagttcgtgcccgaggactaccatcccttcgagatcaggttctacgaggaccaatcccatccgcccaaggccgagctgtcggcctgcgtcatcacccagggggcgatcctggcccaattgcaagccatccagaaatcccgccaagaattcttgctgaaaaagggccgcggggtctacctcgacccccagaccggtgaggagctcaaccccggcttcccccaggatgccccgaggaaacaagaagctgaaagtggagctgccgcccgtggaggatttggaggaagactgggagaacagcagtcaggcagaggaggaggagatggaggaagactgggacagcactcaggcagaggaggacagcctgcaagacagtctggaggaagacgaggaggaggcagaggaggaggtggaagaagcagccgccgccagaccgtcgtcctcggcgggggagaaagcaagcagcacggataccatctccgctccgggtcggggtcccgctcgaccacacagtagatgggacgagaccggacgattcccgaaccccaccacccagaccggtaagaaggagcggcagggatacaagtcctggcgggggcacaaaaacgccatcgtctcctgcttgcaggcctgcgggggcaacatctccttcacccggcgctacctgctcttccaccgcggggtgaactttccccgcaacatcttgcattactaccgtcacctccacagcccctactacttccaagaagaggcagcagcagcagaaaaagaccagcagaaaaccagcagctagaaaatccacagcggcggcagcaggtggactgaggatcgcggcgaacgagccggcgcaaacccgggagctgaggaaccggatctttcccaccctctatgccatcttccagcagagtcgggggcaggagcaggaactgaaagtcaagaaccgttctctgcgctcgctcacccgcagttgtctgtatcacaagagcgaagaccaacttcagcgcactctcgaggacgccgaggctctcttcaacaagtactgcgcgctcactcttaaagagtagcccgcgcccgcccagtcgcagaaaaaggcgggaattacgtcacctgtgcccttcgccctagccgcctccacccatcatcatgagcaaagagattcccacgccttacatgtggagctaccagccccagatgggcctggccgccggtgccgcccaggactactccacccgcatgaattggctcagcgccgggcccgcgatgatctcacgggtgaatgacatccgcgcccaccgaaaccagatactcctagaacagtcagcgctcaccgccacgccccgcaatcacctcaatccgcgtaattggcccgccgccctggtgtaccaggaaattccccagcccacgaccgtactacttccgcgagacgcccaggccgaagtccagctgactaactcaggtgtccagctggcgggcggcgccaccctgtgtcgtcaccgccccgctcagggtataaagcggctggtgatccggggcagaggcacacagctcaacgacgaggtggtgagctcttcgctgggtctgcgacctgacggagtcttccaactcgccggatcggggagatcttccttcacgcctcgtcaggccgtcctgactttggagagttcgtcctcgcagccccgctcgggtggcatcggcactctccagttcgtggaggagttcactccctcggtctacttcaaccccttctccggctcccccggccactacccggacgagttcatcccgaacttcgacgccatcagcgagtcggtggacggctacgattgaatgtcccatggtggcgcagctgacctagctcggcttcgacacctggaccactgccgccgcttccgctgcttcgctcgggatctcgccgagtttgcctactttgagctgcccgaggagcaccctcagggcccggcccacggagtgcggatcgtcgtcgaagggggcctcgactcccacctgcttcggatcttcagccagcgtccgatcctggtcgagcgcgagcaaggacagacccttctgactctgtactgcatctgcaaccaccccggcctgcatgaaagtctttgttgtctgctgtgtactgagtataataaaagctgagatcagcgactactccggacttccgtgtgttcctgaatccatcaaccagtctttgttcttcaccgggaacgagaccgagctccagctccagtgtaagccccacaagaagtacctcacctggctgttccagggctccccgatcgccgttgtcaaccactgcgacaacgacggagtcctgctgagcggccctgccaaccttactttttccacccgcagaagcaagctccagctcttccaacccttcctccccgggacctatcagtgcgtctcgggaccctgccatcacaccttccacctgatcccgaataccacagcgtcgctccccgctactaacaaccaaactaacctccaccaacgccaccgtcgcgacggccacaatacatgcccatattagactatgaggccgagccacagcgacccatgctccccgctattagttacttcaatctaaccggcggagatgactgacccactggccaacaacaacgtcaacgaccttctcctggacatggacggccgcgcctcggagcagcgactcgcccaacttcgcattcgccagcagcaggagagagccgtcaaggagctgcaggatgcggtggccatccaccagtgcaagagaggcatcttctgcctggtgaaacaggccaagatctcctacgaggtcactccaaacgaccatcgcctctcctacgagctcctgcagcagcgccagaagttcacctgcctggtcggagtcaaccccatcgtcatcacccagcagtctggcgataccaaggggtgcatccactgctcctgcgactcccccgactgcgtccacactctgatcaagaccctctgcggcctccgcgacctcctccccatgaactaatcacccccttatccagtgaaataaagatcatattgatgatgattttacagaaataaaaaataatcatttgatttgaaataaagatacaatcatattgatgatttgagtttaacaaaaaaataaagaatcacttacttgaaatctgataccaggtctctgtccatgttttctgccaacaccacttcactcccctcttcccagctctggtactgcaggccccggcgggctgcaaacttcctccacacgctgaaggggatgtcaaattcctcctgtccctcaatcttcattttatcttctatcagatgtccaaaaagcgcgtccgggtggatgatgacttcgaccccgtctacccctacgatgcagacaacgcaccgaccgtgcccttcatcaacccccccttcgtctcttcagatggattccaagagaagcccctgggggtgttgtccctgcgactggccgaccccgtcaccaccaagaacggggaaatcaccctcaagctgggagagggggtggacctcgattcctcgggaaaactcatctccaacacggccaccaaggccgccgcccctctcagtttttccaacaacaccatttcccttaacatggatcaccccttttacactaaagatggaaaattatccttacaagtttctccaccattaaatatactgagaacaagcattctaaacacactagctttaggttttggatcaggtttaggactccgtggctctgccttggcagtacagttagtctctccacttacatttgatactgatggaaacataaagcttaccttagacagaggtttgcatgttacaacaggagatgcaattgaaagcaacataagctgggctaaaggtttaaaatttgaagatggagccatagcaaccaacattggaaatgggttagagtttggaagcagtagtacagaaacaggtgttgatgatgcttacccaatccaagttaaacttggatctggccttagctttgacagtacaggagccataatggctggtaacaaagaagacgataaactcactttgtggacaacacctgatccatcaccaaactgtcaaatactcgcagaaaatgatgcaaaactaacactttgcttgactaaatgtggtagtcaaatactggccactgtgtcagtcttagttgtaggaagtggaaacctaaaccccattactggcaccgtaagcagtgctcaggtgtttctacgttttgatgcaaacggtgttcttttaacagaacattctacactaaaaaaatactgggggtataggcagggagatagcatagatggcactccatataccaatgctgtaggattcatgcccaatttaaaagcttatccaaagtcacaaagttctactactaaaaataatatagtagggcaagtatacatgaatggagatgtttcaaaacctatgcttctcactataaccctcaatggtactgatgacagcaacagtacatattcaatgtcattttcatacacctggactaatggaagctatgttggagcaacatttggggctaactcttataccttctcatacatcgcccaagaatgaacactgtatcccaccctgcatgccaacccttcccaccccactctgtggaacaaactctgaaacacaaaataaaataaagttcaagtgttttattgattcaacagttttacaggattcgagcagttatttttcctccaccctcccaggacatggaatacaccaccctctccccccgcacagccttgaacatctgaatgccattggtgatggacatgcttttggtctccacgttccacacagtttcagagcgagccagtctcgggtcggtcagggagatgaaaccctccgggcactcccgcatctgcacctcacagctcaacagctgaggattgtcctcggtggtcgggatcacggttatctggaagaagcagaagagcggcggtgggaatcatagtccgcgaacgggatcggccggtggtgtcgcatcaggccccgcagcagtcgctgccgccgccgctccgtcaagctgctgctcagggggtccgggtccagggactccctcagcatgatgcccacggccctcagcatcagtcgtctggtgcggcgggcgcagcagcgcatgcggatctcgctcaggtcgctgcagtacgtgcaacacagaaccaccaggttgttcaacagtccatagttcaacacgctccagccgaaactcatcgcgggaaggatgctacccacgtggccgtcgtaccagatcctcaggtaaatcaagtggtgccccctccagaacacgctgcccacgtacatgatctccttgggcatgtggcggttcaccacctcccggtaccacatcaccctctggttgaacatgcagccccggatgatcctgcggaaccacagggccagcaccgccccgcccgccatgcagcgaagagaccccgggtcccggcaatggcaatggaggacccaccgctcgtacccgtggatcatctgggagctgaacaagtctatgttggcacagcacaggcatatgctcatgcatctcttcagcactctcaactcctcgggggtcaaaaccatatcccagggcacggggaactcttgcaggacagcgaaccccgcagaacagggcaatcctcgcacagaacttacattgtgcatggacagggtatcgcaatcaggcagcaccgggtgatcctccaccagagaagcgcgggtctcggtctcctcacagcgtggtaagggggccggccgatacgggtgatggcgggacgcggctgatcgtgttcgcgaccgtgtcatgatgcagttgctttcggacattttcgtacttgctgtagcagaacctggtccgggcgctgcacaccgatcgccggcggcggtctcggcgcttggaacgctcggtgttgaaattgtaaaacagccactctctcagaccgtgcagcagatctagggcctcaggagtgatgaagatcccatcatgcctgatggctctgatcacatcgaccaccgtggaatgggccagacccagccagatgatgcaattttgttgggtttcggtgacggcgggggagggaagaacaggaagaaccatgattaacttttaatccaaacggtctcggagtacttcaaaatgaagatcgcggagatggcacctctcgcccccgctgtgttggtggaaaataacagccaggtcaaaggtgatacggttctcgagatgttccacggtggcttccagcaaagcctccacgcgcacatccagaaacaagacaatagcgaaagcgggagggttctctaattcctcaatcatcatgttacactcctgcaccatccccagataattttcatttttccagccttgaatgattcgaactagttcgtgaggtaaatccaagccagccatgataaagagctcgcgcagagcgccctccaccggcattcttaagcacaccctcataattccaagatattctgctcctggttcacctgcagcagattgacaagcggaatatcaaaatctctgccgcgatccctgagctcctccctcagcaataactgtaagtactctttcatatcctctccgaaatttttagccataggaccaccaggaataagattagggcaagccacagtacagataaaccgaagtcctccccagtgagcattgccaaatgcaagactgctataagcatgctggctagacccggtgatatcttccagataactggacagaaaatcgcccaggcaatttttaagaaaatcaacaaaagaaaaatcctccaggtggacgtttagagcctcgggaacaacgatgaagtaaatgcaagcggtgcgttccagcatggttagttagctgatctgtagaaaaaacaaaaatgaacattaaaccatgctagcctggcgaacaggtgggtaaatcgttctctccagcaccaggcaggccacggggtctccggcgcgaccctcgtaaaaattgtcgctatgattgaaaaccatcacagagagacgttcccggtggccggcgtgaatgattcgacaagatgaatacacccccggaacattggcgtccgcgagtgaaaaaaagcgcccgaggaagcaataaggcactacaatgctcagtctcaagtccagcaaagcgatgccatgcggatgaagcacaaaattctcaggtgcgtacaaaatgtaattactcccctcctgcacaggcagcaaagcccccgatccctccaggtacacatacaaagcctcagcgtccatagcttaccgagcagcagcacacaacaggcgcaagagtcagagaaaggctgagctctaacctgtccacccgctctctgctcaatatatagcccagatctacactgacgtaaaggccaaagtctaaaaatacccgccaaataatcacacacgcccagcacacgcccagaaaccggtgacacactcaaaaaaatacgcgcacttcctcaaacgcccaaaactgccgtcatttccgggttcccacgctacgtcatcaaaacacgactttcaaattccgtcgaccgttaaaaacgtcacccgccccgcccctaacggtcgcccgtctctcagccaatcagcgccccgcatccccaaattcaaacacctcatttgcatattaacgcgcacaaaaagtttgaggtatattattgatgatgg

SEQ ID NO: 12 - DNA, 32788 bp, synthetic construct
  misc_feature 1..32788: note = Description of Artificial Sequence: Synthetic polynucleotide
  source 1..32788: mol_type = other DNA
ccatcttcaataatatacctcaaactttttgtgcgcgttaatatgcaaatgaggcgtttgaatttggggaggaagggcggtgattggtcgagggatgagcgaccgttaggggcggggcgagtgacgttttgatgacgtggttgcgaggaggagccagtttgcaagttctcgtgggaaaagtgacgtcaaacgaggtgtggtttgaacacggaaatactcaattttcccgcgctctctgacaggaaatgaggtgtttctgggcggatgcaagtgaaaacgggccattttcgcgcgaaaactgaatgaggaagtgaaaatctgagtaatttcgcgtttatggcagggaggagtatttgccgagggccgagtagactttgaccgattacgtgggggtttcgattaccgtgtttttcacctaaatttccgcgtacggtgtcaaagtccggtgtttttacgtaggtgtcagctgatcgccagggtatttaaacctgcgctctccagtcaagaggccactcttgagtgccagcgagaagagttttctcctccgcgccgcgagtcagatctacactttgaaagtagggataacagggtaatgacattgattattgactagttgttaatagtaatcaattacggggtcattagttcatagcccatatatggagttccgcgttacataacttacggtaaatggcccgcctggctgaccgcccaacgacccccgcccattgacgtcaataatgacgtatgttcccatagtaacgccaatagggactttccattgacgtcaatgggtggagtatttacggtaaactgcccacttggcagtacatcaagtgtatcatatgccaagtccgccccctattgacgtcaatgacggtaaatggcccgcctggcattatgcccagtacatgaccttacgggactttcctacttggcagtacatctacgtattagtcatcgctattaccatggtgatgcggttttggcagtacaccaatgggcgtggatagcggtttgactcacggggatttccaagtctccaccccattgacgtcaatgggagtttgttttggcaccaaaatcaacgggactttccaaaatgtcgtaataaccccgccccgttgacgcaaatgggcggtaggcgtgtacggtgggaggtctatataagcagagctcgtttagtgaaccgtcagatcgcctggaacgccatccacgctgttttgacctccatagaagacagcgatcgcgccaccatggccgggatgttccaggcactgtccgaaggctgcacaccctatgatattaaccagatgctgaatgtcctgggagaccaccaggtctctggcctggagcagctggagagcatcatcaacttcgagaagctgaccgagtggacaagctccaatgtgatgcctatcctgtccccactgaccaagggcatcctgggcttcgtgtttaccctgacagtgccttctgagcggggcctgtcttgcatcagcgaggcagacgcaaccacaccagagtccgccaatctgggcgaggagatcctgtctcagctgtacctgtggccccgggtgacatatcactccccttcttacgcctatcaccagttcgagcggagagccaagtacaagagacacttcccaggctttggccagtctctgctgttcggctaccccgtgtacgtgttcggcgattgcgtgcagggcgactgggatgccatccggtttagatactgcgcaccacctggatatgcactgctgaggtgtaacgacaccaattattccgccctgctggcagtgggcgccctggagggccctcgcaatcaggattggctgggcgtgccaaggcagctggtgacacgcatgcaggccatccagaacgcaggcctgtgcaccctggtggcaatgctggaggagacaatcttctggctgcaggcctttctgatggccctgaccgacagcggccccaagacaaacatcatcgtggattcccagtacgtgatgggcatctccaagccttctttccaggagtttgtggactgggagaacgtgagcccagagctgaattccaccgatcagccattctggcaggcaggaatcctggcaaggaacctggtgcctatggtggccacagtgcagggccagaatctgaagtaccagggccagagcctggtcatcagcgcctccatcatcgtgtttaacctgctggagctggagggcgactatcgggacgatggcaacgtgtgggtgcacaccccactgagccccagaacactgaacgcctgggtgaaggccgtggaggagaagaagggcatcccagtgcacctggagctggcctccatgaccaatatggagctgatgtctagcatcgtgcaccagcaggtgaggacatacggacccgtgttcatgtgcctgggaggcctgctgaccatggtggcaggagccgtgtggctgacagtgcgggtgctggagctgttcagagccgcccagctggccaacgatgtggtgctgcagatcatggagctgtgcggagcagcctttcgccaggtgtgccacaccacagtgccatggcccaatgcctccctgacccccaagtggaacaatgagacaacacagcctcagatcgccaactgtagcgtgtacgacttcttcgtgtggctgcactactatagcgtgagggataccctgtggccccgcgtgacataccacatgaataagtacgcctatcacatgctggagaggcgcgccaagtataagagaggccctggcccaggcgcaaagtttgtggcagcatggaccctgaaggccgccgccggccccggccccggccagtatatcaaggctaacagtaagttcattggaatcacagagctgggacccggacctggataatgagtttaaactcccatttaaatgtgagggttaatgcttcgagcagacatgataagatacattgatgagtttggacaaaccacaactagaatgcagtgaaaaaaatgctttatttgtgaaatttgtgatgctattgctttatttgtaaccattataagctgcaataaacaagttaacaacaacaattgcattcattttatgtttcaggttcagggggagatgtgggaggttttttaaagcaagtaaaacctctacaaatgtggtaaaataactataacggtcctaaggtagcgagtgagtagtgttctggggcgggggaggacctgcatgagggccagaataactgaaatctgtgcttttctgtgtgttgcagcagcatgagcggaagcggctcctttgagggaggggtattcagcccttatctgacggggcgtctcccctcctgggcgggagtgcgtcagaatgtgatgggatccacggtggacggccggcccgtgcagcccgcgaactcttcaaccctgacctatgcaaccctgagctcttcgtcgttggacgcagctgccgccgcagctgctgcatctgccgccagcgccgtgcgcggaatggccatgggcgccggctactacggcactctggtggccaactcgagttccaccaataatcccgccagcctgaacgaggagaagctgttgctgctgatggcccagctcgaggccttgacccagcgcctgggcgagctgacccagcaggtggctcagctgcaggagcagacgcgggccgcggttgccacggtgaaatccaaataaaaaatgaatcaataaataaacggagacggttgttgattttaacacagagtctgaatctttatttgatttttcgcgcgcggtaggccctggaccaccggtctcgatcattgagcacccggtggatcttttccaggacccggtagaggtgggcttggatgttgaggtacatgggcatgagcccgtcccgggggtggaggtagctccattgcagggcctcgtgctcgggggtggtgttgtaaatcacccagtcatagcaggggcgcagggcatggtgttgcacaatatctttgaggaggagactgatggccacgggcagccctttggtgtaggtgtttacaaatctgttgagctgggagggatgcatgcggggggagatgaggtgcatcttggcctggatcttgagattggcgatgttaccgcccagatcccgcctggggttcatgttgtgcaggaccaccagcacggtgtatccggtgcacttggggaatttatcatgcaacttggaagggaaggcgtgaaagaatttggcgacgcctttgtgcccgcccaggttttccatgcactcatccatgatgatggcgatgggcccgtgggcggcggcctgggcaaagacgtttcgggggtcggacacatcatagttgtggtcctgggtgaggtcatcataggccattttaatgaatttggggcggagggtgccggactgggggacaaaggtaccctcgatcccgggggcgtagttcccctcacagatctgcatctcccaggctttgagctcggagggggggatcatgtccacctgcggggcgataaagaacacggtttccggggcgggggagatgagctgggccgaaagcaagttccggagcagctgggacttgccgcagccggtggggccgtagatgaccccgatgaccggctgcaggtggtagttgagggagagacagctgccgtcctcccggaggaggggggccacctcgttcatcatctcgcgcacgtgcatgttctcgcgcaccagttccgccaggaggcgctctccccccagggataggagctcctggagcgaggcgaagtttttcagcggcttgagtccgtcggccatgggcattttggagagggtttgttgcaagagttccaggcggtcccagagctcggtgatgtgctctacggcatctcgatccagcagacctcctcgtttcgcgggttgggacggctgcgggagtagggcaccagacgatgggcgtccagcgcagccagggtccggtccttccagggtcgcagcgtccgcgtcagggtggtctccgtcacggtgaaggggtgcgcgccgggctgggcgcttgcgagggtgcgcttcaggctcatccggctggtcgaaaaccgctcccgatcggcgccctgcgcgtcggccaggtagcaattgaccatgagttcgtagttgagcgcctcggccgcgtggcctttggcgcggagcttacctttggaagtctgcccgcaggcgggacagaggagggacttgagggcgtagagcttgggggcgaggaagacggactcgggggcgtaggcgtccgcgccgcagtgggcgcagacggtctcgcactccacgagccaggtgaggtcgggctggtcggggtcaaaaaccagtttcccgccgttctttttgatgcgtttcttacctttggtctccatgagctcgtgtccccgctgggtgacaaagaggctgtccgtgtccccgtagaccgactttatgggccggtcctcgagcggtgtgccgcggtcctcctcgtagaggaaccccgcccactccgagacgaaagcccgggtccaggccagcacgaaggaggccacgtgggacgggtagcggtcgttgtccaccagcgggtccaccttttccagggtatgcaaacacatgtccccctcgtccacatccaggaaggtgattggcttgtaagtgtaggccacgtgaccgggggtcccggccgggggggtataaaagggtgcgggtccctgctcgtcctcactgtcttccggatcgctgtccaggagcgccagctgttggggtaggtattccctctcgaaggcgggcatgacctcggcactcaggttgtcagtttctagaaacgaggaggatttgatattgacggtgccggcggagatgcctttcaagagcccctcgtccatctggtcagaaaagacgatctttttgttgtcgagcttggtggcgaaggagccgtagagggcgttggagaggagcttggcgatggagcgcatggtctggtttttttccttgtcggcgcgctccttggcggcgatgttgagctgcacgtactcgcgcgccacgcacttccattcggggaagacggtggtcagctcgtcgggcacgattctgacctgccagccccgattatgcagggtgatgaggtccacactggtggccacctcgccgcgcaggggctcattagtccagcagaggcgtccgcccttgcgcgagcagaaggggggcagggggtccagcatgacctcgtcgggggggtcggcatcgatggtgaagatgccgggcaggaggtcggggtcaaagtagctgatggaagtggccagatcgtccagggcagcttgccattcgcgcacggccagcgcgctctcgtagggactgaggggcgtgccccagggcatgggatgggtaagcgcggaggcgtacatgccgcagatgtcgtagacgtagaggggctcctcgaggatgccgatgtaggtggggtagcagcgccccccgcggatgctggcgcgcacgtagtcatacagctcgtgcgagggggcgaggagccccgggcccaggttggtgcgactgggcttttcggcgcggtagacgatctggcggaaaatggcatgcgagttggaggagatggtgggcctttggaagatgttgaagtgggcgtggggcagtccgaccgagtcgcggatgaagtgggcgtaggagtcttgcagcttggcgacgagctcggcggtgactaggacgtccagagcgcagtagtcgagggtctcctggatgatgtcatacttgagctgtcccttttgtttccacagctcgcggttgagaaggaactcttcgcggtccttccagtactcttcgagggggaacccgtcctgatctgcacggtaagagcctagcatgtagaactggttgacggccttgtaggcgcagcagcccttctccacggggagggcgtaggcctgggcggccttgcgcagggaggtgtgcgtgagggcgaaagtgtccctgaccatgaccttgaggaactggtgcttgaagtcgatatcgtcgcagcccccctgctcccagagctggaagtccgtgcgcttcttgtaggcggggttgggcaaagcgaaagtaacatcgttgaagaggatcttgcccgcgcggggcataaagttgcgagtgatgcggaaaggttggggcacctcggcccggttgttgatgacctgggcggcgagcacgatctcgtcgaagccgttgatgttgtggcccacgatgtagagttccacgaatcgcggacggcccttgacgtggggcagtttcttgagctcctcgtaggtgagctcgtcggggtcgctgagcccgtgctgctcgagcgcccagtcggcgagatgggggttggcgcggaggaaggaagtccagagatccacggccagggcggtttgcagacggtcccggtactgacggaactgctgcccgacggccattttttcgggggtgacgcagtagaaggtgcgggggtccccgtgccagcgatcccatttgagctggagggcgagatcgagggcgagctcgacgagccggtcgtccccggagagtttcatgaccagcatgaaggggacgagctgcttgccgaaggaccccatccaggtgtaggtttccacatcgtaggtgaggaagagcctttcggtgcgaggatgcgagccgatggggaagaactggatctcctgccaccaattggaggaatggctgttgatgtgatggaagtagaaatgccgacggcgcgccgaacactcgtgcttgtgtttatacaagcggccacagtgctcgcaacgctgcacgggatgcacgtgctgcacgagctgtacctgagttcctttgacgaggaatttcagtgggaagtggagtcgtggcgcctgcatctcgtgctgtactacgtcgtggtggtcggcctggccctcttctgcctcgatggtggtcatgctgacgagcccgcgcgggaggcaggtccagacctcggcgcgagcgggtcggagagcgaggacgagggcgcgcaggccggagctgtccagggtcctgagacgctgcggagtcaggtcagtgggcagcggcggcgcgcggttgacttgcaggagtttttccagggcgcgcgggaggtccagatggtacttgatctccaccgcgccattggtggcgacgtcgatggcttgcagggtcccgtgcccctggggtgtgaccaccgtcccccgtttcttcttgggcggctggggcgacgggggcggtgcctcttccatggttagaagcggcggcgaggacgcgcgccgggcggcaggggcggctcggggcccggaggcaggggcggcaggggcacgtcggcgccgcgcgcgggtaggttctggtactgcgcccggagaagactggcgtgagcgacgacgcgacggttgacgtcctggatctgacgcctctgggtgaaggccacgggacccgtgagtttgaacctgaaagagagttcgacagaatcaatctcggtatcgttgacggcggcctgccgcaggatctcttgcacgtcgcccgagttgtcctggtaggcgatctcggtcatgaactgctcgatctcctcctcttgaaggtctccgcggccggcgcgctccacggtggccgcgaggtcgttggagatgcggcccatgagctgcgagaaggcgttcatgcccgcctcgttccagacgcggctgtagaccacgacgccctcgggatcgcgggcgcgcatgaccacctgggcgaggttgagctccacgtggcgcgtgaagaccgcgtagttgcagaggcgctggtagaggtagttgagcgtggtggcgatgtgctcggtgacgaagaaatacatgatccagcggcggagcggcatctcgctgacgtcgcccagcgcctccaaacgttccatggcctcgtaaaagtccacggcgaagttgaaaaactgggagttgcgcgccgagacggtcaactcctcctccagaagacggatgagctcggcgatggtggcgcgcacctcgcgctcgaaggcccccgggagttcctccacttcctcttcttcctcctccactaacatctcttctacttcctcctcaggcggcagtggtggcgggggagggggcctgcgtcgccggcggcgcacgggcagacggtcgatgaagcgctcgatggtctcgccgcgccggcgtcgcatggtctcggtgacggcgcgcccgtcctcgcggggccgcagcgtgaagacgccgccgcgcatctccaggtggccgggggggtccccgttgggcagggagagggcgctgacgatgcatcttatcaattgccccgtagggactccgcgcaaggacctgagcgtctcgagatccacgggatctgaaaaccgctgaacgaaggcttcgagccagtcgcagtcgcaaggtaggctgagcacggtttcttctggcgggtcatgttggttgggagcggggcgggcgatgctgctggtgatgaagttgaaataggcggttctgagacggcggatggtggcgaggagcaccaggtctttgggcccggcttgctggatgcgcagacggtcggccatgccccaggcgtggtcctgacacctggccaggtccttgtagtagtcctgcatgagccgctccacgggcacctcctcctcgcccgcgcggccgtgcatgcgcgtgagcccgaagccgcgctggggctggacgagcgccaggtcggcgacgacgcgctcggcgaggatggcttgctggatctgggtgagggtggtctggaagtcatcaaagtcgacgaagcggtggtaggctccggtgttgatggtgtaggagcagttggccatgacggaccagttgacggtctggtggcccggacgcacgagctcgtggtacttgaggcgcgagtaggcgcgcgtgtcgaagatgtagtcgttgcaggtgcgcaccaggtactggtagccgatgaggaagtgcggcggcggctggcggtagagcggccatcgctcggtggcgggggcgccgggcgcgaggtcctcgagcatggtgcggtggtagccgtagatgtacctggacatccaggtgatgccggcggcggtggtggaggcgcgcgggaactcgcggacgcggttccagatgttgcgcagcggcaggaagtagttcatggtgggcacggtctggcccgtgaggcgcgcgcagtcgtggatgctctatacgggcaaaaacgaaagcggtcagcggctcgactccgtggcctggaggctaagcgaacgggttgggctgcgcgtgtaccccggttcgaatctcgaatcaggctggagccgcagctaacgtggtattggcactcccgtctcgacccaagcctgcaccaaccctccaggatacggaggcgggtcgttttgcaacttttttttggaggccggatgagactagtaagcgcggaaagcggccgaccgcgatggctcgctgccgtagtctggagaagaatcgccagggttgcgttgcggtgtgccccggttcgaggccggccggattccgcggctaacgagggcgtggctgccccgtcgtttccaagaccccatagccagccgacttctccagttacggagcgagcccctcttttgttttgtttgtttttgccagatgcatcccgtactgcggcagatgcgcccccaccaccctccaccgcaacaacagccccctccacagccggcgcttctgcccccgccccagcagcaacttccagccacgaccgccgcggccgccgtgagcggggctggacagagttatgatcaccagctggccttggaagagggcgaggggctggcgcgcctgggggcgtcgtcgccggagcggcacccgcgcgtgcagatgaaaagggacgctcgcgaggcctacgtgcccaagcagaacctgttcagagacaggagcggcgaggagcccgaggagatgcgcgcggcccggttccacgcggggcgggagctgcggcgcggcctggaccgaaagagggtgctgagggacgaggatttcgaggcggacgagctgacggggatcagccccgcgcgcgcgcacgtggccgcggccaacctggtcacggcgtacgagcagaccgtgaaggaggagagcaacttccaaaaatccttcaacaaccacgtgcgcaccctgatcgcgcgcgaggaggtgaccctgggcctgatgcacctgtgggacctgctggaggccatcgtgcagaaccccaccagcaagccgctgacggcgcagctgttcctggtggtgcagcatagtcgggacaacgaagcgttcagggaggcgctgctgaatatcaccgagcccgagggccgctggctcctggacctggtgaacattctgcagagcatcgtggtgcaggagcgcgggctgccgctgtccgagaagctggcggccatcaacttctcggtgctgagtttgggcaagtactacgctaggaagatctacaagaccccgtacgtgcccatagacaaggaggtgaagatcgacgggttttacatgcgcatgaccctgaaagtgctgaccctgagcgacgatctgggggtgtaccgcaacgacaggatgcaccgtgcggtgagcgccagcaggcggcgcgagctgagcgaccaggagctgatgcatagtctgcagcgggccctgaccggggccgggaccgagggggagagctactttgacatgggcgcggacctgcactggcagcccagccgccgggccttggaggcggcggcaggaccctacgtagaagaggtggacgatgaggtggacgaggagggcgagtacctggaagactgatggcgcgaccgtatttttgctagatgcaacaacaacagccacctcctgatcccgcgatgcgggcggcgctgcagagccagccgtccggcattaactcctcggacgattggacccaggccatgcaacgcatcatggcgctgacgacccgcaaccccgaagcctttagacagcagccccaggccaaccggctctcggccatcctggaggccgtggtgccctcgcgctccaaccccacgcacgagaaggtcctggccatcgtgaacgcgctggtggagaacaaggccatccgcggcgacgaggccggcctggtgtacaacgcgctgctggagcgcgtggcccgctacaacagcaccaacgtgcagaccaacctggaccgcatggtgaccgacgtgcgcgaggccgtggcccagcgcgagcggttccaccgcgagtccaacctgggatccatggtggcgctgaacgccttcctcagcacccagcccgccaacgtgccccggggccaggaggactacaccaacttcatcagcgccctgcgcctgatggtgaccgaggtgccccagagcgaggtgtaccagtccgggccggactacttcttccagaccagtcgccagggcttgcagaccgtgaacctgagccaggctttcaagaacttgcagggcctgtggggcgtgcaggccccggtcggggaccgcgcgacggtgtcgagcctgctgacgccgaactcgcgcctgctgctgctgctggtggcccccttcacggacagcggcagcatcaaccgcaactcgtacctgggctacctgattaacctgtaccgcgaggccatcggccaggcgcacgtggacgagcagacctaccaggagatcacccacgtgagccgcgccctgggccaggacgacccgggcaacctggaagccaccctgaactttttgctgaccaaccggtcgcagaagatcccgccccagtacgcgctcagcaccgaggaggagcgcatcctgcgttacgtgcagcagagcgtgggcctgttcctgatgcaggagggggccacccccagcgccgcgctcgacatgaccgcgcgcaacatggagcccagcatgtacgccagcaaccgcccgttcatcaataaactgatggactacttgcatcgggcggccgccatgaactctgactatttcaccaacgccatcctgaatccccactggctcccgccgccggggttctacacgggcgagtacgacatgcccgaccccaatgacgggttcctgtgggacgatgtggacagcagcgtgttctccccccgaccgggtgctaacgagcgccccttgtggaagaaggaaggcagcgaccgacgcccgtcctcggcgctgtccggccgcgagggtgctgccgcggcggtgcccgaggccgccagtcctttcccgagcttgcccttctcgctgaacagtatccgcagcagcgagctgggcaggatcacgcgcccgcgcttgctgggcgaagaggagtacttgaatgactcgctgttgagacccgagcgggagaagaacttccccaataacgggatagaaagcctggtggacaagatgagccgctggaagacgtatgcgcaggagcacagggacgatccccgggcgtcgcagggggccacgagccggggcagcgccgcccgtaaacgccggtggcacgacaggcagcggggacagatgtgggacgatgaggactccgccgacgacagcagcgtgttggacttgggtgggagtggtaacccgttcgctcacctgcgcccccgtatcgggcgcatgatgtaagagaaaccgaaaataaatgatactcaccaaggccatggcgaccagcgtgcgttcgtttcttctctgttgttgttgtatctagtatgatgaggcgtgcgtacccggagggtcctcctccctcgtacgagagcgtgatgcagcaggcgatggcggcggcggcgatgcagcccccgctggaggctccttacgtgcccccgcggtacctggcgcctacggaggggcggaacagcattcgttactcggagctggcacccttgtacgataccacccggttgtacctggtggacaacaagtcggcggacatcgcctcgctgaactaccagaacgaccacagcaacttcctgaccaccgtggtgcagaacaatgacttcacccccacggaggccagcacccagaccatcaactttgacgagcgctcgcggtggggcggccagctgaaaaccatcatgcacaccaacatgcccaacgtgaacgagttcatgtacagcaacaagttcaaggcgcgggtgatggtctcccgcaagacccccaatggggtgacagtgacagaggattatgatggtagtcaggatgagctgaagtatgaatgggtggaatttgagctgcccgaaggcaacttctcggtgaccatgaccatcgacctgatgaacaacgccatcatcgacaattacttggcggtggggcggcagaacggggtgctggagagcgacatcggcgtgaagttcgacactaggaacttcaggctgggctgggaccccgtgaccgagctggtcatgcccggggtgtacaccaacgaggctttccatcccgatattgtcttgctgcccggctgcggggtggacttcaccgagagccgcctcagcaacctgctgggcattcgcaagaggcagcccttccaggaaggcttccagatcatgtacgaggatctggaggggggcaacatccccgcgctcctggatgtcgacgcctatgagaaaagcaaggaggatgcagcagctgaagcaactgcagccgtagctaccgcctctaccgaggtcaggggcgataattttgcaagcgccgcagcagtggcagcggccgaggcggctgaaaccgaaagtaagatagtcattcagccggtggagaaggatagcaagaacaggagctacaacgtactaccggacaagataaacaccgcctaccgcagctggtacctagcctacaactatggcgaccccgagaagggcgtgcgctcctggacgctgctcaccacctcggacgtcacctgcggcgtggagcaagtctactggtcgctgcccgacatgatgcaagacccggtcaccttccgctccacgcgtcaagttagcaactacccggtggtgggcgccgagctcctgcccgtctactccaagagcttcttcaacgagcaggccgtctactcgcagcagctgcgcgccttcacctcgcttacgcacgtcttcaaccgcttccccgagaaccagatcctcgtccgcccgcccgcgcccaccattaccaccgtcagtgaaaacgttcctgctctcacagatcacgggaccctgccgctgcgcagcagtatccggggagtccagcgcgtgaccgttactgacgccagacgccgcacctgcccctacgtctacaaggccctgggcatagtcgcgccgcgcgtcctctcgagccgcaccttctaaatgtccattctcatctcgcccagtaataacaccggttggggcctgcgcgcgcccagcaagatgtacggaggcgctcgccaacgctccacgcaacaccccgtgcgcgtgcgcgggcacttccgcgctccctggggcgccctcaagggccgcgtgcggtcgcgcaccaccgtcgacgacgtgatcgaccaggtggtggccgacgcgcgcaactacacccccgccgccgcgcccgtctccaccgtggacgccgtcatcgacagcgtggtggccgacgcgcgccggtacgcccgcgccaagagccggcggcggcgcatcgcccggcggcaccggagcacccccgccatgcgcgcggcgcgagccttgctgcgcagggccaggcgcacgggacgcagggccatgctcagggcggccagacgcgcggcttcaggcgccagcgccggcaggacccggagacgcgcggccacggcggcggcagcggccatcgccagcatgtcccgcccgcggcgagggaacgtgtactgggtgcgcgacgccgccaccggtgtgcgcgtgcccgtgcgcacccgcccccctcgcacttgaagatgttcacttcgcgatgttgatgtgtcccagcggcgaggaggatgtccaagcgcaaattcaaggaagagatgctccaggtcatcgcgcctgagatctacggccctgcggtggtgaaggaggaaagaaagccccgcaaaatcaagcgggtcaaaaaggacaaaaaggaagaagaaagtgatgtggacggattggtggagtttgtgcgcgagttcgccccccggcggcgcgtgcagtggcgcgggcggaaggtgcaaccggtgctgagacccggcaccaccgtggtcttcacgcccggcgagcgctccggcaccgcttccaagcgctcctacgacgaggtgtacggggatgatgatattctggagcaggcggccgagcgcctgggcgagtttgcttacggcaagcgcagccgttccgcaccgaaggaagaggcggtgtccatcccgctggaccacggcaaccccacgccgagcctcaagcccgtgaccttgcagcaggtgctgccgaccgcggcgccgcgccgggggttcaagcgcgagggcgaggatctgtaccccaccatgcagctgatggtgcccaagcgccagaagctggaagacgtgctggagaccatgaaggtggacccggacgtgcagcccgaggtcaaggtgcggcccatcaagcaggtggccccgggcctgggcgtgcagaccgtggacatcaagattcccacggagcccatggaaacgcagaccgagcccatgatcaagcccagcaccagcaccatggaggtgcagacggatccctggatgccatcggctcctagtcgaagaccccggcgcaagtacggcgcggccagcctgctgatgcccaactacgcgctgcatccttccatcatccccacgccgggctaccgcggcacgcgcttctaccgcggtcataccagcagccgccgccgcaagaccaccactcgccgccgccgtcgccgcaccgccgctgcaaccacccctgccgccctggtgcggagagtgtaccgccgcggccgcgcacctctgaccctgccgcgcgcgcgctaccacccgagcatcgccatttaaactttcgcctgctttgcagatcaatggccctcacatgccgccttcgcgttcccattacgggctaccgaggaagaaaaccgcgccgtagaaggctggcggggaacgggatgcgtcgccaccaccaccggcggcggcgcgccatcagcaagcggttggggggaggcttcctgcccgcgctgatccccatcatcgccgcggcgatcggggcgatccccggcattgcttccgtggcggtgcaggcctctcagcgccactgagacacacttggaaacatcttgtaataaaccaatggactctgacgctcctggtcctgtgatgtgttttcgtagacagatggaagacatcaatttttcgtccctggctccgcgacacggcacgcggccgttcatgggcacctggagcgacatcggcaccagccaactgaacgggggcgccttcaattggagcagtctctggagcgggcttaagaatttcgggtccacgcttaaaacctatggcagcaaggcgtggaacagcaccacagggcaggcgctgagggataagctgaaagagcagaacttccagcagaaggtggtcgatgggctcgcctcgggcatcaacggggtggtggacctggccaaccaggccgtgcagcggcagatcaacagccgcctggacccggtgccgcccgccggctccgtggagatgccgcaggtggaggaggagctgcctcccctggacaagcggggcgagaagcgaccccgccccgatgcggaggagacgctgctgacgcacacggacgagccgcccccgtacgaggaggcggtgaaactgggtctgcccaccacgcggcccatcgcgcccctggccaccggggtgctgaaacccgaaaagcccgcgaccctggacttgcctcctccccagccttcccgcccctctacagtggctaagcccctgccgccggtggccgtggcccgcgcgcgacccgggggcaccgcccgccctcatgcgaactggcagagcactctgaacagcatcgtgggtctgggagtgcagagtgtgaagcgccgccgctgctattaaacctaccgtagcgcttaacttgcttgtctgtgtgtgtatgtattatgtcgccgccgccgctgtccaccagaaggaggagtgaagaggcgcgtcgccgagttgcaagatggccaccccatcgatgctgccccagtgggcgtacatgcacatcgccggacaggacgcttcggagtacctgagtccgggtctggtgcagtttgcccgcgccacagacacctacttcagtctggggaacaagtttaggaaccccacggtggcgcccacgcacgatgtgaccaccgaccgcagccagcggctgacgctgcgcttcgtgcccgtggaccgcgaggacaacacctactcgtacaaagtgcgctacacgctggccgtgggcgacaaccgcgtgctggacatggccagcacctactttgacatccgcggcgtgctggatcggggccctagcttcaaaccctactccggcaccgcctacaacagtctggcccccaagggagcacccaacacttgtcagtggacatataaagccgatggtgaaactgccacagaaaaaacctatacatatggaaatgcacccgtgcagggcattaacatcacaaaagatggtattcaacttggaactgacaccgatgatcagccaatctacgcagataaaacctatcagcctgaacctcaagtgggtgatgctgaatggcatgacatcactggtactgatgaaaagtatggaggcagagctcttaagcctgataccaaaatgaagccttgttatggttcttttgccaagcctactaataaagaaggaggtcaggcaaatgtgaaaacaggaacaggcactactaaagaatatgacatagacatggctttctttgacaacagaagtgcggctgctgctggcctagctccagaaattgttttgtatactgaaaatgtggatttggaaactccagatacccatattgtatacaaagcaggcacagatgacagcagctcttctattaatttgggtcagcaagccatgcccaacagacctaactacattggtttcagagacaactttatcgggctcatgtactacaacagcactggcaatatgggggtgctggccggtcaggcttctcagctgaatgctgtggttgacttgcaagacagaaacaccgagctgtcctaccagctcttgcttgactctctgggtgacagaacccggtatttcagtatgtggaatcaggcggtggacagctatgatcctgatgtgcgcattattgaaaatcatggtgtggaggatgaacttcccaactattgtttccctctggatgctgttggcagaacagatacttatcagggaattaaggctaatggaactgatcaaaccacatggaccaaagatgacagtgtcaatgatgctaatgagataggcaagggtaatccattcgccatggaaatcaacatccaagccaacctgtggaggaacttcctctacgccaacgtggccctgtacctgcccgactcttacaagtacacgccggccaatgttaccctgcccaccaacaccaacacctacgattacatgaacggccgggtggtggcgccctcgctggtggactcctacatcaacatcggggcgcgctggtcgctggatcccatggacaacgtgaaccccttcaaccaccaccgcaatgcggggctgcgctaccgctccatgctcctgggcaacgggcgctacgtgcccttccacatccaggtgccccagaaatttttcgccatcaagagcctcctgctcctgcccgggtcctacacctacgagtggaacttccgcaaggacgtcaacatgatcctgcagagctccctcggcaacgacctgcgcacggacggggcctccatctccttcaccagcatcaacctctacgccaccttcttccccatggcgcacaacacggcctccacgctcgaggccatgctgcgcaacgacaccaacgaccagtccttcaacgactacctctcggcggccaacatgctctaccccatcccggccaacgccaccaacgtgcccatctccatcccctcgcgcaactgggccgccttccgcggctggtccttcacgcgtctcaagaccaaggagacgccctcgctgggctccgggttcgacccctacttcgtctactcgggctccatcccctacctcgacggcaccttctacctcaaccacaccttcaagaaggtctccatcaccttcgactcctccgtcagctggcccggcaacgaccggctcctgacgcccaacgagttcgaaatcaagcgcaccgtcgacggcgagggctacaacgtggcccagtgcaacatgaccaaggactggttcctggtccagatgctggcccactacaacatcggctaccagggcttctacgtgcccgagggctacaaggaccgcatgtactccttcttccgcaacttccagcccatgagccgccaggtggtggacgaggtcaactacaaggactaccaggccgtcaccctggcctaccagcacaacaactcgggcttcgtcggctacctcgcgcccaccatgcgccagggccagccctaccccgccaactacccctacccgctcatcggcaagagcgccgtcaccagcgtcacccagaaaaagttcctctgcgacagggtcatgtggcgcatccccttctccagcaacttcatgtccatgggcgcgctcaccgacctcggccagaacatgctctatgccaactccgcccacgcgctagacatgaatttcgaagtcgaccccatggatgagtccacccttctctatgttgtcttcgaagtcttcgacgtcgtccgagtgcaccagccccaccgcggcgtcatcgaggccgtctacctgcgcacccccttctcggccggtaacgccaccacctaagctcttgcttcttgcaagccatggccgcgggctccggcgagcaggagctcagggccatcatccgcgacctgggctgcgggccctacttcctgggcaccttcgataagcgcttcccgggattcatggccccgcacaagctggcctgcgccatcgtcaacacggccggccgcgagaccgggggcgagcactggctggccttcgcctggaacccgcgctcgaacacctgctacctcttcgaccccttcgggttctcggacgagcgcctcaagcagatctaccagttcgagtacgagggcctgctgcgccgcagcgccctggccaccgaggaccgctgcgtcaccctggaaaagtccacccagaccgtgcagggtccgcgctcggccgcctgcgggctcttctgctgcatgttcctgcacgccttcgtgcactggcccgaccgccccatggacaagaaccccaccatgaacttgctgacgggggtgcccaacggcatgctccagtcgccccaggtggaacccaccctgcgccgcaaccaggaggcgctctaccgcttcctcaactcccactccgcctactttcgctcccaccgcgcgcgcatcgagaaggccaccgccttcgaccgcatgaatcaagacatgtaaaccgtgtgtgtatgttaaatgtctttaataaacagcactttcatgttacacatgcatctgagatgatttatttagaaatcgaaagggttctgccgggtctcggcatggcccgcgggcagggacacgttgcggaactggtacttggccagccacttgaactcggggatcagcagtttgggcagcggggtgtcggggaaggagtcggtccacagcttccgcgtcagttgcagggcgcccagcaggtcgggcgcggagatcttgaaatcgcagttgggacccgcgttctgcgcgcgggagttgcggtacacggggttgcagcactggaacaccatcagggccgggtgcttcacgctcgccagcaccgtcgcgtcggtgatgctctccacgtcgaggtcctcggcgttggccatcccgaagggggtcatcttgcaggtctgccttcccatggtgggcacgcacccgggcttgtggttgcaatcgcagtgcagggggatcagcatcatctgggcctggtcggcgttcatccccgggtacatggccttcatgaaagcctccaattgcctgaacgcctgctgggccttggctccctcggtgaagaagaccccgcaggacttgctagagaactggttggtggcgcacccggcgtcgtgcacgcagcagcgcgcgtcgttgttggccagctgcaccacgctgcgcccccagcggttctgggtgatcttggcccggtcggggttctccttcagcgcgcgctgcccgttctcgctcgccacatccatctcgatcatgtgctccttctggatcatggtggtcccgtgcaggcaccgcagcttgccctcggcctcggtgcacccgtgcagccacagcgcgcacccggtgcactcccagttcttgtgggcgatctgggaatgcgcgtgcacgaagccctgcaggaagcggcccatcatggtggtcagggtcttgttgctagtgaaggtcagcggaatgccgcggtgctcctcgttgatgtacaggtggcagatgcggcggtacacctcgccctgctcgggcatcagctggaagttggctttcaggtcggtctccacgcggtagcggtccatcagcatagtcatgatttccatacccttctcccaggccgagacgatgggcaggctcatagggttcttcaccatcatcttagcgctagcagccgcggccagggggtcgctctcgtccagggtctcaaagctccgcttgccgtccttctcggtgatccgcaccggggggtagctgaagcccacggccgccagctcctcctcggcctgtctttcgtcctcgctgtcctggctgacgtcctgcaggaccacatgcttggtcttgcggggtttcttcttgggcggcagcggcggcggagatgttggagatggcgagggggagcgcgagttctcgctcaccactactatctcttcctcttcttggtccgaggccacgcggcggtaggtatgtctcttcgggggcagaggcggaggcgacgggctctcgccgccgcgacttggcggatggctggcagagccccttccgcgttcgggggtgcgctcccggcggcgctctgactgacttcctccgcggccggccattgtgttctcctagggaggaacaacaagcatggagactcagccatcgccaacctcgccatctgcccccaccgccgacgagaagcagcagcagcagaatgaaagcttaaccgccccgccgcccagccccgccacctccgacgcggccgtcccagacatgcaagagatggaggaatccatcgagattgacctgggctatgtgacgcccgcggagcacgaggaggagctggcagtgcgcttttcacaagaagagatacaccaagaacagccagagcaggaagcagagaatgagcagagtcaggctgggctcgagcatgacggcgactacctccacctgagcgggggggaggacgcgctcatcaagcatctggcccggcaggccaccatcgtcaaggatgcgctgctcgaccgcaccgaggtgcccctcagcgtggaggagctcagccgcgcctacgagttgaacctcttctcgccgcgcgtgccccccaagcgccagcccaatggcacctgcgagcccaacccgcgcctcaacttctacccggtcttcgcggtgcccgaggccctggccacctaccacatctttttcaagaaccaaaagatccccgtctcctgccgcgccaaccgcacccgcgccgacgcccttttcaacctgggtcccggcgcccgcctacctgatatcgcctccttggaagaggttcccaagatcttcgagggtctgggcagcgacgagactcgggccgcgaacgctctgcaaggagaaggaggagagcatgagcaccacagcgccctggtcgagttggaaggcgacaacgcgcggctggcggtgctcaaacgcacggtcgagctgacccatttcgcctacccggctctgaacctgccccccaaagtcatgagcgcggtcatggaccaggtgctcatcaagcgcgcgtcgcccatctccgaggacgagggcatgcaagactccgaggagggcaagcccgtggtcagcgacgagcagctggcccggtggctgggtcctaatgctagtccccagagtttggaagagcggcgcaaactcatgatggccgtggtcctggtgaccgtggagctggagtgcctgcgccgcttcttcgccgacgcggagaccctgcgcaaggtcgaggagaacctgcactacctcttcaggcacgggttcgtgcgccaggcctgcaagatctccaacgtggagctgaccaacctggtctcctacatgggcatcttgcacgagaaccgcctggggcagaacgtgctgcacaccaccctgcgcggggaggcccggcgcgactacatccgcgactgcgtctacctctacctctgccacacctggcagacgggcatgggcgtgtggcagcagtgtctggaggagcagaacctgaaagagctctgcaagctcctgcagaagaacctcaagggtctgtggaccgggttcgacgagcgcaccaccgcctcggacctggccgacctcattttccccgagcgcctcaggctgacgctgcgcaacggcctgcccgactttatgagccaaagcatgttgcaaaactttcgctctttcatcctcgaacgctccggaatcctgcccgccacctgctccgcgctgccctcggacttcgtgccgctgaccttccgcgagtgccccccgccgctgtggagccactgctacctgctgcgcctggccaactacctggcctaccactcggacgtgatcgaggacgtcagcggcgagggcctgctcgagtgccactgccgctgcaacctctgcacgccgcaccgctccctggcctgcaacccccagctgctgagcgagacccagatcatcggcaccttcgagttgcaagggcccagcgaaggcgagggttcagccgccaaggggggtctgaaactcaccccggggctgtggacctcggcctacttgcgcaagttcgtgcccgaggactaccatcccttcgagatcaggttctacgaggaccaatcccatccgcccaaggccgagctgtcggcctgcgtcatcacccagggggcgatcctggcccaattgcaagccatccagaaatcccgccaagaattcttgctgaaaaagggccgcggggtctacctcgacccccagaccggtgaggagctcaaccccggcttcccccaggatgccccgaggaaacaagaagctgaaagtggagctgccgcccgtggaggatttggaggaagactgggagaacagcagtcaggcagaggaggaggagatggaggaagactgggacagcactcaggcagaggaggacagcctgcaagacagtctggaggaagacgaggaggaggcagaggaggaggtggaagaagcagccgccgccagaccgtcgtcctcggcgggggagaaagcaagcagcacggataccatctccgctccgggtcggggtcccgctcgaccacacagtagatgggacgagaccggacgattcccgaaccccaccacccagaccggtaagaaggagcggcagggatacaagtcctggcgggggcacaaaaacgccatcgtctcctgcttgcaggcctgcgggggcaacatctccttcacccggcgctacctgctcttccaccgcggggtgaactttccccgcaacatcttgcattactaccgtcacctccacagcccctactacttccaagaagaggcagcagcagcagaaaaagaccagcagaaaaccagcagctagaaaatccacagcggcggcagcaggtggactgaggatcgcggcgaacgagccggcgcaaacccgggagctgaggaaccggatctttcccaccctctatgccatcttccagcagagtcgggggcaggagcaggaactgaaagtcaagaaccgttctctgcgctcgctcacccgcagttgtctgtatcacaagagcgaagaccaacttcagcgcactctcgaggacgccgaggctctcttcaacaagtactgcgcgctcactcttaaagagtagcccgcgcccgcccagtcgcagaaaaaggcgggaattacgtcacctgtgcccttcgccctagccgcctccacccatcatcatgagcaaagagattcccacgccttacatgtggagctaccagccccagatgggcctggccgccggtgccgcccaggactactccacccgcatgaattggctcagcgccgggcccgcgatgatctcacgggtgaatgacatccgcgcccaccgaaaccagatactcctagaacagtcagcgctcaccgccacgccccgcaatcacctcaatccgcgtaattggcccgccgccctggtgtaccaggaaattccccagcccacgaccgtactacttccgcgagacgcccaggccgaagtccagctgactaactcaggtgtccagctggcgggcggcgccaccctgtgtcgtcaccgccccgctcagggtataaagcggctggtgatccggggcagaggcacacagctcaacgacgaggtggtgagctcttcgctgggtctgcgacctgacggagtcttccaactcgccggatcggggagatcttccttcacgcctcgtcaggccgtcctgactttggagagttcgtcctcgcagccccgctcgggtggcatcggcactctccagttcgtggaggagttcactccctcggtctacttcaaccccttctccggctcccccggccactacccggacgagttcatcccgaacttcgacgccatcagcgagtcggtggacggctacgattgaatgtcccatggtggcgcagctgacctagctcggcttcgacacctggaccactgccgccgcttccgctgcttcgctcgggatctcgccgagtttgcctactttgagctgcccgaggagcaccctcagggcccggcccacggagtgcggatcgtcgtcgaagggggcctcgactcccacctgcttcggatcttcagccagcgtccgatcctggtcgagcgcgagcaaggacagacccttctgactctgtactgcatctgcaaccaccccggcctgcatgaaagtctttgttgtctgctgtgtactgagtataataaaagctgagatcagcgactactccggacttccgtgtgttcctgaatccatcaaccagtctttgttcttcaccgggaacgagaccgagctccagctccagtgtaagccccacaagaagtacctcacctggctgttccagggctccccgatcgccgttgtcaaccactgcgacaacgacggagtcctgctgagcggccctgccaaccttactttttccacccgcagaagcaagctccagctcttccaacccttcctccccgggacctatcagtgcgtctcgggaccctgccatcacaccttccacctgatcccgaataccacagcgtcgctccccgctactaacaaccaaactaacctccaccaacgccaccgtcgcgacggccacaatacatgcccatattagactatgaggccgagccacagcgacccatgctccccgctattagttacttcaatctaaccggcggagatgactgacccactggccaacaacaacgtcaacgaccttctcctggacatggacggccgcgcctcggagcagcgactcgcccaacttcgcattcgccagcagcaggagagagccgtcaaggagctgcaggatgcggtggccatccaccagtgcaagagaggcatcttctgcctggtgaaacaggccaagatctcctacgaggtcactccaaacgaccatcgcctctcctacgagctcctgcagcagcgccagaagttcacctgcctggtcggagtcaaccccatcgtcatcacccagcagtctggcgataccaaggggtgcatccactgctcctgcgactcccccgactgcgtccacactctgatcaagaccctctgcggcctccgcgacctcctccccatgaactaatcacccccttatccagtgaaataaagatcatattgatgatgattttacagaaataaaaaataatcatttgatttgaaataaagatacaatcatattgatgatttgagtttaacaaaaaaataaagaatcacttacttgaaatctgataccaggtctctgtccatgttttctgccaacaccacttcactcccctcttcccagctctggtactgcaggccccggcgggctgcaaacttcctccacacgctgaaggggatgtcaaattcctcctgtccctcaatcttcattttatcttctatcagatgtccaaaaagcgcgtccgggtggatgatgacttcgaccccgtctacccctacgatgcagacaacgcaccgaccgtgcccttcatcaacccccccttcgtctcttcagatggattccaagagaagcccctgggggtgttgtccctgcgactggccgaccccgtcaccaccaagaacggggaaatcaccctcaagctgggagagggggtggacctcgattcctcgggaaaactcatctccaacacggccaccaaggccgccgcccctctcagtttttccaacaacaccatttcccttaacatggatcaccccttttacactaaagatggaaaattatccttacaagtttctccaccattaaatatactgagaacaagcattctaaacacactagctttaggttttggatcaggtttaggactccgtggctctgccttggcagtacagttagtctctccacttacatttgatactgatggaaacataaagcttaccttagacagaggtttgcatgttacaacaggagatgcaattgaaagcaacataagctgggctaaaggtttaaaatttgaagatggagccatagcaaccaacattggaaatgggttagagtttggaagcagtagtacagaaacaggtgttgatgatgcttacccaatccaagttaaacttggatctggccttagctttgacagtacaggagccataatggctggtaacaaagaagacgataaactcactttgtggacaacacctgatccatcaccaaactgtcaaatactcgcagaaaatgatgcaaaactaacactttgcttgactaaatgtggtagtcaaatactggccactgtgtcagtcttagttgtaggaagtggaaacctaaaccccattactggcaccgtaagcagtgctcaggtgtttctacgttttgatgcaaacggtgttcttttaacagaacattctacactaaaaaaatactgggggtataggcagggagatagcatagatggcactccatataccaatgctgtaggattcatgcccaatttaaaagcttatccaaagtcacaaagttctactactaaaaataatatagtagggcaagtatacatgaatggagatgtttcaaaacctatgcttctcactataaccctcaatggtactgatgacagcaacagtacatattcaatgtcattttcatacacctggactaatggaagctatgttggagcaacatttggggctaactcttataccttctcatacatcgcccaagaatgaacactgtatcccaccctgcatgccaacccttcccaccccactctgtggaacaaactctgaaacacaaaataaaataaagttcaagtgttttattgattcaacagttttacaggattcgagcagttatttttcctccaccctcccaggacatggaatacaccaccctctccccccgcacagccttgaacatctgaatgccattggtgatggacatgcttttggtctccacgttccacacagtttcagagcgagccagtctcgggtcggtcagggagatgaaaccctccgggcactcccgcatctgcacctcacagctcaacagctgaggattgtcctcggtggtcgggatcacggttatctggaagaagcagaagagcggcggtgggaatcatagtccgcgaacgggatcggccggtggtgtcgcatcaggccccgcagcagtcgctgccgccgccgctccgtcaagctgctgctcagggggtccgggtccagggactccctcagcatgatgcccacggccctcagcatcagtcgtctggtgcggcgggcgcagcagcgcatgcggatctcgctcaggtcgctgcagtacgtgcaacacagaaccaccaggttgttcaacagtccatagttcaacacgctccagccgaaactcatcgcgggaaggatgctacccacgtggccgtcgtaccagatcctcaggtaaatcaagtggtgccccctccagaacacgctgcccacgtacatgatctccttgggcatgtggcggttcaccacctcccggtaccacatcaccctctggttgaacatgcagccccggatgatcctgcggaaccacagggccagcaccgccccgcccgccatgcagcgaagagaccccgggtcccggcaatggcaatggaggacccaccgctcgtacccgtggatcatctgggagctgaacaagtctatgttggcacagcacaggcatatgctcatgcatctcttcagcactctcaactcctcgggggtcaaaaccatatcccagggcacggggaactcttgcaggacagcgaaccccgcagaacagggcaatcctcgcacagaacttacattgtgcatggacagggtatcgcaatcaggcagcaccgggtgatcctccaccagagaagcgcgggtctcggtctcctcacagcgtggtaagggggccggccgatacgggtgatggcgggacgcggctgatcgtgttcgcgaccgtgtcatgatgcagttgctttcggacattttcgtacttgctgtagcagaacctggtccgggcgctgcacaccgatcgccggcggcggtctcggcgcttggaacgctcggtgttgaaattgtaaaacagccactctctcagaccgtgcagcagatctagggcctcaggagtgatgaagatcccatcatgcctgatggctctgatcacatcgaccaccgtggaatgggccagacccagccagatgatgcaattttgttgggtttcggtgacggcgggggagggaagaacaggaagaaccatgattaacttttaatccaaacggtctcggagtacttcaaaatgaagatcgcggagatggcacctctcgcccccgctgtgttggtggaaaataacagccaggtcaaaggtgatacggttctcgagatgttccacggtggcttccagcaaagcctccacgcgcacatccagaaacaagacaatagcgaaagcgggagggttctctaattcctcaatcatcatgttacactcctgcaccatccccagataattttcatttttccagccttgaatgattcgaactagttcgtgaggtaaatccaagccagccatgataaagagctcgcgcagagcgccctccaccggcattcttaagcacaccctcataattccaagatattctgctcctggttcacctgcagcagattgacaagcggaatatcaaaatctctgccgcgatccctgagctcctccctcagcaataactgtaagtactctttcatatcctctccgaaatttttagccataggaccaccaggaataagattagggcaagccacagtacagataaaccgaagtcctccccagtgagcattgccaaatgcaagactgctataagcatgctggctagacccggtgatatcttccagataactggacagaaaatcgcccaggcaatttttaagaaaatcaacaaaagaaaaatcctccaggtggacgtttagagcctcgggaacaacgatgaagtaaatgcaagcggtgcgttccagcatggttagttagctgatctgtagaaaaaacaaaaatgaacattaaaccatgctagcctggcgaacaggtgggtaaatcgttctctccagcaccaggcaggccacggggtctccggcgcgaccctcgtaaaaattgtcgctatgattgaaaaccatcacagagagacgttcccggtggccggcgtgaatgattcgacaagatgaatacacccccggaacattggcgtccgcgagtgaaaaaaagcgcccgaggaagcaataaggcactacaatgctcagtctcaagtccagcaaagcgatgccatgcggatgaagcacaaaattctcaggtgcgtacaaaatgtaattactcccctcctgcacaggcagcaaagcccccgatccctccaggtacacatacaaagcctcagcgtccatagcttaccgagcagcagcacacaacaggcgcaagagtcagagaaaggctgagctctaacctgtccacccgctctctgctcaatatatagcccagatctacactgacgtaaaggccaaagtctaaaaatacccgccaaataatcacacacgcccagcacacgcccagaaaccggtgacacactcaaaaaaatacgcgcacttcctcaaacgcccaaaactgccgtcatttccgggttcccacgctacgtcatcaaaacacgactttcaaattccgtcgaccgttaaaaacgtcacccgccccgcccctaacggtcgcccgtctctcagccaatcagcgccccgcatccccaaattcaaacacctcatttgcatattaacgcgcacaaaaagtttgaggtatattattgatgatgg

SEQ ID NO: 13 - DNA, 30684 bp, synthetic construct
  misc_feature 1..30684: note = Description of Artificial Sequence: Synthetic polynucleotide
  source 1..30684: mol_type = other DNA
ccatcttcaataatatacctcaaactttttgtgcgcgttaatatgcaaatgaggcgtttgaatttggggaggaagggcggtgattggtcgagggatgagcgaccgttaggggcggggcgagtgacgttttgatgacgtggttgcgaggaggagccagtttgcaagttctcgtgggaaaagtgacgtcaaacgaggtgtggtttgaacacggaaatactcaattttcccgcgctctctgacaggaaatgaggtgtttctgggcggatgcaagtgaaaacgggccattttcgcgcgaaaactgaatgaggaagtgaaaatctgagtaatttcgcgtttatggcagggaggagtatttgccgagggccgagtagactttgaccgattacgtgggggtttcgattaccgtgtttttcacctaaatttccgcgtacggtgtcaaagtccggtgtttttacgtaggtgtcagctgatcgccagggtatttaaacctgcgctctccagtcaagaggccactcttgagtgccagcgagaagagttttctcctccgcgccgcgagtcagatctacactttgaaagtagggataacagggtaatgacattgattattgactagttgttaatagtaatcaattacggggtcattagttcatagcccatatatggagttccgcgttacataacttacggtaaatggcccgcctggctgaccgcccaacgacccccgcccattgacgtcaataatgacgtatgttcccatagtaacgccaatagggactttccattgacgtcaatgggtggagtatttacggtaaactgcccacttggcagtacatcaagtgtatcatatgccaagtccgccccctattgacgtcaatgacggtaaatggcccgcctggcattatgcccagtacatgaccttacgggactttcctacttggcagtacatctacgtattagtcatcgctattaccatggtgatgcggttttggcagtacaccaatgggcgtggatagcggtttgactcacggggatttccaagtctccaccccattgacgtcaatgggagtttgttttggcaccaaaatcaacgggactttccaaaatgtcgtaataaccccgccccgttgacgcaaatgggcggtaggcgtgtacggtgggaggtctatataagcagagctcgtttagtgaaccgtcagatcgcctggaacgccatccacgctgttttgacctccatagaagacagcgatcgcgccaccatggtgagcaagggcgaggagctgttcaccggggtggtgcccatcctggtcgagctggacggcgacgtaaacggccacaagttcagcgtgtccggcgagggcgagggcgatgccacctacggcaagctgaccctgaagttcatctgcaccaccggcaagctgcccgtgccctggcccaccctcgtgaccaccctgacctacggcgtgcagtgcttcagccgctaccccgaccacatgaagcagcacgacttcttcaagtccgccatgcccgaaggctacgtccaggagcgcaccatcttcttcaaggacgacggcaactacaagacccgcgccgaggtgaagttcgagggcgacaccctggtgaaccgcatcgagctgaagggcatcgacttcaaggaggacggcaacatcctggggcacaagctggagtacaactacaacagccacaacgtctatatcatggccgacaagcagaagaacggcatcaaggtgaacttcaagatccgccacaacatcgaggacggcagcgtgcagctcgccgaccactaccagcagaacacccccatcggcgacggccccgtgctgctgcccgacaaccactacctgagcacccagtccgccctgagcaaagaccccaacgagaagcgcgatcacatggtcctgctggagttcgtgaccgccgccgggatcactctcggcatggacgagctttacaagtagtgagtttaaactcccatttaaatgtgagggttaatgcttcgagcagacatgataagatacattgatgagtttggacaaaccacaactagaatgcagtgaaaaaaatgctttatttgtgaaatttgtgatgctattgctttatttgtaaccattataagctgcaataaacaagttaacaacaacaattgcattcattttatgtttcaggttcagggggagatgtgggaggttttttaaagcaagtaaaacctctacaaatgtggtaaaataactataacggtcctaaggtagcgagtgagtagtgttctggggcgggggaggacctgcatgagggccagaataactgaaatctgtgcttttctgtgtgttgcagcagcatgagcggaagcggctcctttgagggaggggtattcagcccttatctgacggggcgtctcccctcctgggcgggagtgcgtcagaatgtgatgggatccacggtggacggccggcccgtgcagcccgcgaactcttcaaccctgacctatgcaaccctgagctcttcgtcgttggacgcagctgccgccgcagctgctgcatctgccgccagcgccgtgcgcggaatggccatgggcgccggctactacggcactctggtggccaactcgagttccaccaataatcccgccagcctgaacgaggagaagctgttgctgctgatggcccagctcgaggccttgacccagcgcctgggcgagctgacccagcaggtggctcagctgcaggagcagacgcgggccgcggttgccacggtgaaatccaaataaaaaatgaatcaataaataaacggagacggttgttgattttaacacagagtctgaatctttatttgatttttcgcgcgcggtaggccctggaccaccggtctcgatcattgagcacccggtggatcttttccaggacccggtagaggtgggcttggatgttgaggtacatgggcatgagcccgtcccgggggtggaggtagctccattgcagggcctcgtgctcgggggtggtgttgtaaatcacccagtcatagcaggggcgcagggcatggtgttgcacaatatctttgaggaggagactgatggccacgggcagccctttggtgtaggtgtttacaaatctgttgagctgggagggatgcatgcggggggagatgaggtgcatcttggcctggatcttgagattggcgatgttaccgcccagatcccgcctggggttcatgttgtgcaggaccaccagcacggtgtatccggtgcacttggggaatttatcatgcaacttggaagggaaggcgtgaaagaatttggcgacgcctttgtgcccgcccaggttttccatgcactcatccatgatgatggcgatgggcccgtgggcggcggcctgggcaaagacgtttcgggggtcggacacatcatagttgtggtcctgggtgaggtcatcataggccattttaatgaatttggggcggagggtgccggactgggggacaaaggtaccctcgatcccgggggcgtagttcccctcacagatctgcatctcccaggctttgagctcggagggggggatcatgtccacctgcggggcgataaagaacacggtttccggggcgggggagatgagctgggccgaaagcaagttccggagcagctgggacttgccgcagccggtggggccgtagatgaccccgatgaccggctgcaggtggtagttgagggagagacagctgccgtcctcccggaggaggggggccacctcgttcatcatctcgcgcacgtgcatgttctcgcgcaccagttccgccaggaggcgctctccccccagggataggagctcctggagcgaggcgaagtttttcagcggcttgagtccgtcggccatgggcattttggagagggtttgttgcaagagttccaggcggtcccagagctcggtgatgtgctctacggcatctcgatccagcagacctcctcgtttcgcgggttgggacggctgcgggagtagggcaccagacgatgggcgtccagcgcagccagggtccggtccttccagggtcgcagcgtccgcgtcagggtggtctccgtcacggtgaaggggtgcgcgccgggctgggcgcttgcgagggtgcgcttcaggctcatccggctggtcgaaaaccgctcccgatcggcgccctgcgcgtcggccaggtagcaattgaccatgagttcgtagttgagcgcctcggccgcgtggcctttggcgcggagcttacctttggaagtctgcccgcaggcgggacagaggagggacttgagggcgtagagcttgggggcgaggaagacggactcgggggcgtaggcgtccgcgccgcagtgggcgcagacggtctcgcactccacgagccaggtgaggtcgggctggtcggggtcaaaaaccagtttcccgccgttctttttgatgcgtttcttacctttggtctccatgagctcgtgtccccgctgggtgacaaagaggctgtccgtgtccccgtagaccgactttatgggccggtcctcgagcggtgtgccgcggtcctcctcgtagaggaaccccgcccactccgagacgaaagcccgggtccaggccagcacgaaggaggccacgtgggacgggtagcggtcgttgtccaccagcgggtccaccttttccagggtatgcaaacacatgtccccctcgtccacatccaggaaggtgattggcttgtaagtgtaggccacgtgaccgggggtcccggccgggggggtataaaagggtgcgggtccctgctcgtcctcactgtcttccggatcgctgtccaggagcgccagctgttggggtaggtattccctctcgaaggcgggcatgacctcggcactcaggttgtcagtttctagaaacgaggaggatttgatattgacggtgccggcggagatgcctttcaagagcccctcgtccatctggtcagaaaagacgatctttttgttgtcgagcttggtggcgaaggagccgtagagggcgttggagaggagcttggcgatggagcgcatggtctggtttttttccttgtcggcgcgctccttggcggcgatgttgagctgcacgtactcgcgcgccacgcacttccattcggggaagacggtggtcagctcgtcgggcacgattctgacctgccagccccgattatgcagggtgatgaggtccacactggtggccacctcgccgcgcaggggctcattagtccagcagaggcgtccgcccttgcgcgagcagaaggggggcagggggtccagcatgacctcgtcgggggggtcggcatcgatggtgaagatgccgggcaggaggtcggggtcaaagtagctgatggaagtggccagatcgtccagggcagcttgccattcgcgcacggccagcgcgcgctcgtagggactgaggggcgtgccccagggcatgggatgggtaagcgcggaggcgtacatgccgcagatgtcgtagacgtagaggggctcctcgaggatgccgatgtaggtggggtagcagcgccccccgcggatgctggcgcgcacgtagtcatacagctcgtgcgagggggcgaggagccccgggcccaggttggtgcgactgggcttttcggcgcggtagacgatctggcggaaaatggcatgcgagttggaggagatggtgggcctttggaagatgttgaagtgggcgtggggcagtccgaccgagtcgcggatgaagtgggcgtaggagtcttgcagcttggcgacgagctcggcggtgactaggacgtccagagcgcagtagtcgagggtctcctggatgatgtcatacttgagctgtcccttttgtttccacagctcgcggttgagaaggaactcttcgcggtccttccagtactcttcgagggggaacccgtcctgatctgcacggtaagagcctagcatgtagaactggttgacggccttgtaggcgcagcagcccttctccacggggagggcgtaggcctgggcggccttgcgcagggaggtgtgcgtgagggcgaaagtgtccctgaccatgaccttgaggaactggtgcttgaagtcgatatcgtcgcagcccccctgctcccagagctggaagtccgtgcgcttcttgtaggcggggttgggcaaagcgaaagtaacatcgttgaagaggatcttgcccgcgcggggcataaagttgcgagtgatgcggaaaggttggggcacctcggcccggttgttgatgacctgggcggcgagcacgatctcgtcgaagccgttgatgttgtggcccacgatgtagagttccacgaatcgcggacggcccttgacgtggggcagtttcttgagctcctcgtaggtgagctcgtcggggtcgctgagcccgtgctgctcgagcgcccagtcggcgagatgggggttggcgcggaggaaggaagtccagagatccacggccagggcggtttgcagacggtcccggtactgacggaactgctgcccgacggccattttttcgggggtgacgcagtagaaggtgcgggggtccccgtgccagcgatcccatttgagctggagggcgagatcgagggcgagctcgacgagccggtcgtccccggagagtttcatgaccagcatgaaggggacgagctgcttgccgaaggaccccatccaggtgtaggtttccacatcgtaggtgaggaagagcctttcggtgcgaggatgcgagccgatggggaagaactggatctcctgccaccaattggaggaatggctgttgatgtgatggaagtagaaatgccgacggcgcgccgaacactcgtgcttgtgtttatacaagcggccacagtgctcgcaacgctgcacgggatgcacgtgctgcacgagctgtacctgagttcctttgacgaggaatttcagtgggaagtggagtcgtggcgcctgcatctcgtgctgtactacgtcgtggtggtcggcctggccctcttctgcctcgatggtggtcatgctgacgagcccgcgcgggaggcaggtccagacctcggcgcgagcgggtcggagagcgaggacgagggcgcgcaggccggagctgtccagggtcctgagacgctgcggagtcaggtcagtgggcagcggcggcgcgcggttgacttgcaggagtttttccagggcgcgcgggaggtccagatggtacttgatctccaccgcgccattggtggcgacgtcgatggcttgcagggtcccgtgcccctggggtgtgaccaccgtcccccgtttcttcttgggcggctggggcgacgggggcggtgcctcttccatggttagaagcggcggcgaggacgcgcgccgggcggcaggggcggctcggggcccggaggcaggggcggcaggggcacgtcggcgccgcgcgcgggtaggttctggtactgcgcccggagaagactggcgtgagcgacgacgcgacggttgacgtcctggatctgacgcctctgggtgaaggccacgggacccgtgagtttgaacctgaaagagagttcgacagaatcaatctcggtatcgttgacggcggcctgccgcaggatctcttgcacgtcgcccgagttgtcctggtaggcgatctcggtcatgaactgctcgatctcctcctcttgaaggtctccgcggccggcgcgctccacggtggccgcgaggtcgttggagatgcggcccatgagctgcgagaaggcgttcatgcccgcctcgttccagacgcggctgtagaccacgacgccctcgggatcgcgggcgcgcatgaccacctgggcgaggttgagctccacgtggcgcgtgaagaccgcgtagttgcagaggcgctggtagaggtagttgagcgtggtggcgatgtgctcggtgacgaagaaatacatgatccagcggcggagcggcatctcgctgacgtcgcccagcgcctccaaacgttccatggcctcgtaaaagtccacggcgaagttgaaaaactgggagttgcgcgccgagacggtcaactcctcctccagaagacggatgagctcggcgatggtggcgcgcacctcgcgctcgaaggcccccgggagttcctccacttcctcttcttcctcctccactaacatctcttctacttcctcctcaggcggcagtggtggcgggggagggggcctgcgtcgccggcggcgcacgggcagacggtcgatgaagcgctcgatggtctcgccgcgccggcgtcgcatggtctcggtgacggcgcgcccgtcctcgcggggccgcagcgtgaagacgccgccgcgcatctccaggtggccgggggggtccccgttgggcagggagagggcgctgacgatgcatcttatcaattgccccgtagggactccgcgcaaggacctgagcgtctcgagatccacgggatctgaaaaccgctgaacgaaggcttcgagccagtcgcagtcgcaaggtaggctgagcacggtttcttctggcgggtcatgttggttgggagcggggcgggcgatgctgctggtgatgaagttgaaataggcggttctgagacggcggatggtggcgaggagcaccaggtctttgggcccggcttgctggatgcgcagacggtcggccatgccccaggcgtggtcctgacacctggccaggtccttgtagtagtcctgcatgagccgctccacgggcacctcctcctcgcccgcgcggccgtgcatgcgcgtgagcccgaagccgcgctggggctggacgagcgccaggtcggcgacgacgcgctcggcgaggatggcttgctggatctgggtgagggtggtctggaagtcatcaaagtcgacgaagcggtggtaggctccggtgttgatggtgtaggagcagttggccatgacggaccagttgacggtctggtggcccggacgcacgagctcgtggtacttgaggcgcgagtaggcgcgcgtgtcgaagatgtagtcgttgcaggtgcgcaccaggtactggtagccgatgaggaagtgcggcggcggctggcggtagagcggccatcgctcggtggcgggggcgccgggcgcgaggtcctcgagcatggtgcggtggtagccgtagatgtacctggacatccaggtgatgccggcggcggtggtggaggcgcgcgggaactcgcggacgcggttccagatgttgcgcagcggcaggaagtagttcatggtgggcacggtctggcccgtgaggcgcgcgcagtcgtggatgctctatacgggcaaaaacgaaagcggtcagcggctcgactccgtggcctggaggctaagcgaacgggttgggctgcgcgtgtaccccggttcgaatctcgaatcaggctggagccgcagctaacgtggtattggcactcccgtctcgacccaagcctgcaccaaccctccaggatacggaggcgggtcgttttgcaacttttttttggaggccggatgagactagtaagcgcggaaagcggccgaccgcgatggctcgctgccgtagtctggagaagaatcgccagggttgcgttgcggtgtgccccggttcgaggccggccggattccgcggctaacgagggcgtggctgccccgtcgtttccaagaccccatagccagccgacttctccagttacggagcgagcccctcttttgttttgtttgtttttgccagatgcatcccgtactgcggcagatgcgcccccaccaccctccaccgcaacaacagccccctccacagccggcgcttctgcccccgccccagcagcaacttccagccacgaccgccgcggccgccgtgagcggggctggacagagttatgatcaccagctggccttggaagagggcgaggggctggcgcgcctgggggcgtcgtcgccggagcggcacccgcgcgtgcagatgaaaagggacgctcgcgaggcctacgtgcccaagcagaacctgttcagagacaggagcggcgaggagcccgaggagatgcgcgcggcccggttccacgcggggcgggagctgcggcgcggcctggaccgaaagagggtgctgagggacgaggatttcgaggcggacgagctgacggggatcagccccgcgcgcgcgcacgtggccgcggccaacctggtcacggcgtacgagcagaccgtgaaggaggagagcaacttccaaaaatccttcaacaaccacgtgcgcaccctgatcgcgcgcgaggaggtgaccctgggcctgatgcacctgtgggacctgctggaggccatcgtgcagaaccccaccagcaagccgctgacggcgcagctgttcctggtggtgcagcatagtcgggacaacgaagcgttcagggaggcgctgctgaatatcaccgagcccgagggccgctggctcctggacctggtgaacattctgcagagcatcgtggtgcaggagcgcgggctgccgctgtccgagaagctggcggccatcaacttctcggtgctgagtttgggcaagtactacgctaggaagatctacaagaccccgtacgtgcccatagacaaggaggtgaagatcgacgggttttacatgcgcatgaccctgaaagtgctgaccctgagcgacgatctgggggtgtaccgcaacgacaggatgcaccgtgcggtgagcgccagcaggcggcgcgagctgagcgaccaggagctgatgcatagtctgcagcgggccctgaccggggccgggaccgagggggagagctactttgacatgggcgcggacctgcactggcagcccagccgccgggccttggaggcggcggcaggaccctacgtagaagaggtggacgatgaggtggacgaggagggcgagtacctggaagactgatggcgcgaccgtatttttgctagatgcaacaacaacagccacctcctgatcccgcgatgcgggcggcgctgcagagccagccgtccggcattaactcctcggacgattggacccaggccatgcaacgcatcatggcgctgacgacccgcaaccccgaagcctttagacagcagccccaggccaaccggctctcggccatcctggaggccgtggtgccctcgcgctccaaccccacgcacgagaaggtcctggccatcgtgaacgcgctggtggagaacaaggccatccgcggcgacgaggccggcctggtgtacaacgcgctgctggagcgcgtggcccgctacaacagcaccaacgtgcagaccaacctggaccgcatggtgaccgacgtgcgcgaggccgtggcccagcgcgagcggttccaccgcgagtccaacctgggatccatggtggcgctgaacgccttcctcagcacccagcccgccaacgtgccccggggccaggaggactacaccaacttcatcagcgccctgcgcctgatggtgaccgaggtgccccagagcgaggtgtaccagtccgggccggactacttcttccagaccagtcgccagggcttgcagaccgtgaacctgagccaggctttcaagaacttgcagggcctgtggggcgtgcaggccccggtcggggaccgcgcgacggtgtcgagcctgctgacgccgaactcgcgcctgctgctgctgctggtggcccccttcacggacagcggcagcatcaaccgcaactcgtacctgggctacctgattaacctgtaccgcgaggccatcggccaggcgcacgtggacgagcagacctaccaggagatcacccacgtgagccgcgccctgggccaggacgacccgggcaacctggaagccaccctgaactttttgctgaccaaccggtcgcagaagatcccgccccagtacgcgctcagcaccgaggaggagcgcatcctgcgttacgtgcagcagagcgtgggcctgttcctgatgcaggagggggccacccccagcgccgcgctcgacatgaccgcgcgcaacatggagcccagcatgtacgccagcaaccgcccgttcatcaataaactgatggactacttgcatcgggcggccgccatgaactctgactatttcaccaacgccatcctgaatccccactggctcccgccgccggggttctacacgggcgagtacgacatgcccgaccccaatgacgggttcctgtgggacgatgtggacagcagcgtgttctccccccgaccgggtgctaacgagcgccccttgtggaagaaggaaggcagcgaccgacgcccgtcctcggcgctgtccggccgcgagggtgctgccgcggcggtgcccgaggccgccagtcctttcccgagcttgcccttctcgctgaacagtatccgcagcagcgagctgggcaggatcacgcgcccgcgcttgctgggcgaagaggagtacttgaatgactcgctgttgagacccgagcgggagaagaacttccccaataacgggatagaaagcctggtggacaagatgagccgctggaagacgtatgcgcaggagcacagggacgatccccgggcgtcgcagggggccacgagccggggcagcgccgcccgtaaacgccggtggcacgacaggcagcggggacagatgtgggacgatgaggactccgccgacgacagcagcgtgttggacttgggtgggagtggtaacccgttcgctcacctgcgcccccgtatcgggcgcatgatgtaagagaaaccgaaaataaatgatactcaccaaggccatggcgaccagcgtgcgttcgtttcttctctgttgttgttgtatctagtatgatgaggcgtgcgtacccggagggtcctcctccctcgtacgagagcgtgatgcagcaggcgatggcggcggcggcgatgcagcccccgctggaggctccttacgtgcccccgcggtacctggcgcctacggaggggcggaacagcattcgttactcggagctggcacccttgtacgataccacccggttgtacctggtggacaacaagtcggcggacatcgcctcgctgaactaccagaacgaccacagcaacttcctgaccaccgtggtgcagaacaatgacttcacccccacggaggccagcacccagaccatcaactttgacgagcgctcgcggtggggcggccagctgaaaaccatcatgcacaccaacatgcccaacgtgaacgagttcatgtacagcaacaagttcaaggcgcgggtgatggtctcccgcaagacccccaatggggtgacagtgacagaggattatgatggtagtcaggatgagctgaagtatgaatgggtggaatttgagctgcccgaaggcaacttctcggtgaccatgaccatcgacctgatgaacaacgccatcatcgacaattacttggcggtggggcggcagaacggggtgctggagagcgacatcggcgtgaagttcgacactaggaacttcaggctgggctgggaccccgtgaccgagctggtcatgcccggggtgtacaccaacgaggctttccatcccgatattgtcttgctgcccggctgcggggtggacttcaccgagagccgcctcagcaacctgctgggcattcgcaagaggcagcccttccaggaaggcttccagatcatgtacgaggatctggaggggggcaacatccccgcgctcctggatgtcgacgcctatgagaaaagcaaggaggatgcagcagctgaagcaactgcagccgtagctaccgcctctaccgaggtcaggggcgataattttgcaagcgccgcagcagtggcagcggccgaggcggctgaaaccgaaagtaagatagtcattcagccggtggagaaggatagcaagaacaggagctacaacgtactaccggacaagataaacaccgcctaccgcagctggtacctagcctacaactatggcgaccccgagaagggcgtgcgctcctggacgctgctcaccacctcggacgtcacctgcggcgtggagcaagtctactggtcgctgcccgacatgatgcaagacccggtcaccttccgctccacgcgtcaagttagcaactacccggtggtgggcgccgagctcctgcccgtctactccaagagcttcttcaacgagcaggccgtctactcgcagcagctgcgcgccttcacctcgcttacgcacgtcttcaaccgcttccccgagaaccagatcctcgtccgcccgcccgcgcccaccattaccaccgtcagtgaaaacgttcctgctctcacagatcacgggaccctgccgctgcgcagcagtatccggggagtccagcgcgtgaccgttactgacgccagacgccgcacctgcccctacgtctacaaggccctgggcatagtcgcgccgcgcgtcctctcgagccgcaccttctaaatgtccattctcatctcgcccagtaataacaccggttggggcctgcgcgcgcccagcaagatgtacggaggcgctcgccaacgctccacgcaacaccccgtgcgcgtgcgcgggcacttccgcgctccctggggcgccctcaagggccgcgtgcggtcgcgcaccaccgtcgacgacgtgatcgaccaggtggtggccgacgcgcgcaactacacccccgccgccgcgcccgtctccaccgtggacgccgtcatcgacagcgtggtggccgacgcgcgccggtacgcccgcgccaagagccggcggcggcgcatcgcccggcggcaccggagcacccccgccatgcgcgcggcgcgagccttgctgcgcagggccaggcgcacgggacgcagggccatgctcagggcggccagacgcgcggcttcaggcgccagcgccggcaggacccggagacgcgcggccacggcggcggcagcggccatcgccagcatgtcccgcccgcggcgagggaacgtgtactgggtgcgcgacgccgccaccggtgtgcgcgtgcccgtgcgcacccgcccccctcgcacttgaagatgttcacttcgcgatgttgatgtgtcccagcggcgaggaggatgtccaagcgcaaattcaaggaagagatgctccaggtcatcgcgcctgagatctacggccctgcggtggtgaaggaggaaagaaagccccgcaaaatcaagcgggtcaaaaaggacaaaaaggaagaagaaagtgatgtggacggattggtggagtttgtgcgcgagttcgccccccggcggcgcgtgcagtggcgcgggcggaaggtgcaaccggtgctgagacccggcaccaccgtggtcttcacgcccggcgagcgctccggcaccgcttccaagcgctcctacgacgaggtgtacggggatgatgatattctggagcaggcggccgagcgcctgggcgagtttgcttacggcaagcgcagccgttccgcaccgaaggaagaggcggtgtccatcccgctggaccacggcaaccccacgccgagcctcaagcccgtgaccttgcagcaggtgctgccgaccgcggcgccgcgccgggggttcaagcgcgagggcgaggatctgtaccccaccatgcagctgatggtgcccaagcgccagaagctggaagacgtgctggagaccatgaaggtggacccggacgtgcagcccgaggtcaaggtgcggcccatcaagcaggtggccccgggcctgggcgtgcagaccgtggacatcaagattcccacggagcccatggaaacgcagaccgagcccatgatcaagcccagcaccagcaccatggaggtgcagacggatccctggatgccatcggctcctagtcgaagaccccggcgcaagtacggcgcggccagcctgctgatgcccaactacgcgctgcatccttccatcatccccacgccgggctaccgcggcacgcgcttctaccgcggtcataccagcagccgccgccgcaagaccaccactcgccgccgccgtcgccgcaccgccgctgcaaccacccctgccgccctggtgcggagagtgtaccgccgcggccgcgcacctctgaccctgccgcgcgcgcgctaccacccgagcatcgccatttaaactttcgcctgctttgcagatcaatggccctcacatgccgccttcgcgttcccattacgggctaccgaggaagaaaaccgcgccgtagaaggctggcggggaacgggatgcgtcgccaccaccaccggcggcggcgcgccatcagcaagcggttggggggaggcttcctgcccgcgctgatccccatcatcgccgcggcgatcggggcgatccccggcattgcttccgtggcggtgcaggcctctcagcgccactgagacacacttggaaacatcttgtaataaaccaatggactctgacgctcctggtcctgtgatgtgttttcgtagacagatggaagacatcaatttttcgtccctggctccgcgacacggcacgcggccgttcatgggcacctggagcgacatcggcaccagccaactgaacgggggcgccttcaattggagcagtctctggagcgggcttaagaatttcgggtccacgcttaaaacctatggcagcaaggcgtggaacagcaccacagggcaggcgctgagggataagctgaaagagcagaacttccagcagaaggtggtcgatgggctcgcctcgggcatcaacggggtggtggacctggccaaccaggccgtgcagcggcagatcaacagccgcctggacccggtgccgcccgccggctccgtggagatgccgcaggtggaggaggagctgcctcccctggacaagcggggcgagaagcgaccccgccccgatgcggaggagacgctgctgacgcacacggacgagccgcccccgtacgaggaggcggtgaaactgggtctgcccaccacgcggcccatcgcgcccctggccaccggggtgctgaaacccgaaaagcccgcgaccctggacttgcctcctccccagccttcccgcccctctacagtggctaagcccctgccgccggtggccgtggcccgcgcgcgacccgggggcaccgcccgccctcatgcgaactggcagagcactctgaacagcatcgtgggtctgggagtgcagagtgtgaagcgccgccgctgctattaaacctaccgtagcgcttaacttgcttgtctgtgtgtgtatgtattatgtcgccgccgccgctgtccaccagaaggaggagtgaagaggcgcgtcgccgagttgcaagatggccaccccatcgatgctgccccagtgggcgtacatgcacatcgccggacaggacgcttcggagtacctgagtccgggtctggtgcagtttgcccgcgccacagacacctacttcagtctggggaacaagtttaggaaccccacggtggcgcccacgcacgatgtgaccaccgaccgcagccagcggctgacgctgcgcttcgtgcccgtggaccgcgaggacaacacctactcgtacaaagtgcgctacacgctggccgtgggcgacaaccgcgtgctggacatggccagcacctactttgacatccgcggcgtgctggatcggggccctagcttcaaaccctactccggcaccgcctacaacagtctggcccccaagggagcacccaacacttgtcagtggacatataaagccgatggtgaaactgccacagaaaaaacctatacatatggaaatgcacccgtgcagggcattaacatcacaaaagatggtattcaacttggaactgacaccgatgatcagccaatctacgcagataaaacctatcagcctgaacctcaagtgggtgatgctgaatggcatgacatcactggtactgatgaaaagtatggaggcagagctcttaagcctgataccaaaatgaagccttgttatggttcttttgccaagcctactaataaagaaggaggtcaggcaaatgtgaaaacaggaacaggcactactaaagaatatgacatagacatggctttctttgacaacagaagtgcggctgctgctggcctagctccagaaattgttttgtatactgaaaatgtggatttggaaactccagatacccatattgtatacaaagcaggcacagatgacagcagctcttctattaatttgggtcagcaagccatgcccaacagacctaactacattggtttcagagacaactttatcgggctcatgtactacaacagcactggcaatatgggggtgctggccggtcaggcttctcagctgaatgctgtggttgacttgcaagacagaaacaccgagctgtcctaccagctcttgcttgactctctgggtgacagaacccggtatttcagtatgtggaatcaggcggtggacagctatgatcctgatgtgcgcattattgaaaatcatggtgtggaggatgaacttcccaactattgtttccctctggatgctgttggcagaacagatacttatcagggaattaaggctaatggaactgatcaaaccacatggaccaaagatgacagtgtcaatgatgctaatgagataggcaagggtaatccattcgccatggaaatcaacatccaagccaacctgtggaggaacttcctctacgccaacgtggccctgtacctgcccgactcttacaagtacacgccggccaatgttaccctgcccaccaacaccaacacctacgattacatgaacggccgggtggtggcgccctcgctggtggactcctacatcaacatcggggcgcgctggtcgctggatcccatggacaacgtgaaccccttcaaccaccaccgcaatgcggggctgcgctaccgctccatgctcctgggcaacgggcgctacgtgcccttccacatccaggtgccccagaaatttttcgccatcaagagcctcctgctcctgcccgggtcctacacctacgagtggaacttccgcaaggacgtcaacatgatcctgcagagctccctcggcaacgacctgcgcacggacggggcctccatctccttcaccagcatcaacctctacgccaccttcttccccatggcgcacaacacggcctccacgctcgaggccatgctgcgcaacgacaccaacgaccagtccttcaacgactacctctcggcggccaacatgctctaccccatcccggccaacgccaccaacgtgcccatctccatcccctcgcgcaactgggccgccttccgcggctggtccttcacgcgtctcaagaccaaggagacgccctcgctgggctccgggttcgacccctacttcgtctactcgggctccatcccctacctcgacggcaccttctacctcaaccacaccttcaagaaggtctccatcaccttcgactcctccgtcagctggcccggcaacgaccggctcctgacgcccaacgagttcgaaatcaagcgcaccgtcgacggcgagggctacaacgtggcccagtgcaacatgaccaaggactggttcctggtccagatgctggcccactacaacatcggctaccagggcttctacgtgcccgagggctacaaggaccgcatgtactccttcttccgcaacttccagcccatgagccgccaggtggtggacgaggtcaactacaaggactaccaggccgtcaccctggcctaccagcacaacaactcgggcttcgtcggctacctcgcgcccaccatgcgccagggccagccctaccccgccaactacccctacccgctcatcggcaagagcgccgtcaccagcgtcacccagaaaaagttcctctgcgacagggtcatgtggcgcatccccttctccagcaacttcatgtccatgggcgcgctcaccgacctcggccagaacatgctctatgccaactccgcccacgcgctagacatgaatttcgaagtcgaccccatggatgagtccacccttctctatgttgtcttcgaagtcttcgacgtcgtccgagtgcaccagccccaccgcggcgtcatcgaggccgtctacctgcgcacccccttctcggccggtaacgccaccacctaagctcttgcttcttgcaagccatggccgcgggctccggcgagcaggagctcagggccatcatccgcgacctgggctgcgggccctacttcctgggcaccttcgataagcgcttcccgggattcatggccccgcacaagctggcctgcgccatcgtcaacacggccggccgcgagaccgggggcgagcactggctggccttcgcctggaacccgcgctcgaacacctgctacctcttcgaccccttcgggttctcggacgagcgcctcaagcagatctaccagttcgagtacgagggcctgctgcgccgcagcgccctggccaccgaggaccgctgcgtcaccctggaaaagtccacccagaccgtgcagggtccgcgctcggccgcctgcgggctcttctgctgcatgttcctgcacgccttcgtgcactggcccgaccgccccatggacaagaaccccaccatgaacttgctgacgggggtgcccaacggcatgctccagtcgccccaggtggaacccaccctgcgccgcaaccaggaggcgctctaccgcttcctcaactcccactccgcctactttcgctcccaccgcgcgcgcatcgagaaggccaccgccttcgaccgcatgaatcaagacatgtaaaccgtgtgtgtatgttaaatgtctttaataaacagcactttcatgttacacatgcatctgagatgatttatttagaaatcgaaagggttctgccgggtctcggcatggcccgcgggcagggacacgttgcggaactggtacttggccagccacttgaactcggggatcagcagtttgggcagcggggtgtcggggaaggagtcggtccacagcttccgcgtcagttgcagggcgcccagcaggtcgggcgcggagatcttgaaatcgcagttgggacccgcgttctgcgcgcgggagttgcggtacacggggttgcagcactggaacaccatcagggccgggtgcttcacgctcgccagcaccgtcgcgtcggtgatgctctccacgtcgaggtcctcggcgttggccatcccgaagggggtcatcttgcaggtctgccttcccatggtgggcacgcacccgggcttgtggttgcaatcgcagtgcagggggatcagcatcatctgggcctggtcggcgttcatccccgggtacatggccttcatgaaagcctccaattgcctgaacgcctgctgggccttggctccctcggtgaagaagaccccgcaggacttgctagagaactggttggtggcgcacccggcgtcgtgcacgcagcagcgcgcgtcgttgttggccagctgcaccacgctgcgcccccagcggttctgggtgatcttggcccggtcggggttctccttcagcgcgcgctgcccgttctcgctcgccacatccatctcgatcatgtgctccttctggatcatggtggtcccgtgcaggcaccgcagcttgccctcggcctcggtgcacccgtgcagccacagcgcgcacccggtgcactcccagttcttgtgggcgatctgggaatgcgcgtgcacgaagccctgcaggaagcggcccatcatggtggtcagggtcttgttgctagtgaaggtcagcggaatgccgcggtgctcctcgttgatgtacaggtggcagatgcggcggtacacctcgccctgctcgggcatcagctggaagttggctttcaggtcggtctccacgcggtagcggtccatcagcatagtcatgatttccatacccttctcccaggccgagacgatgggcaggctcatagggttcttcaccatcatcttagcgctagcagccgcggccagggggtcgctctcgtccagggtctcaaagctccgcttgccgtccttctcggtgatccgcaccggggggtagctgaagcccacggccgccagctcctcctcggcctgtctttcgtcctcgctgtcctggctgacgtcctgcaggaccacatgcttggtcttgcggggtttcttcttgggcggcagcggcggcggagatgttggagatggcgagggggagcgcgagttctcgctcaccactactatctcttcctcttcttggtccgaggccacgcggcggtaggtatgtctcttcgggggcagaggcggaggcgacgggctctcgccgccgcgacttggcggatggctggcagagccccttccgcgttcgggggtgcgctcccggcggcgctctgactgacttcctccgcggccggccattgtgttctcctagggaggaacaacaagcatggagactcagccatcgccaacctcgccatctgcccccaccgccgacgagaagcagcagcagcagaatgaaagcttaaccgccccgccgcccagccccgccacctccgacgcggccgtcccagacatgcaagagatggaggaatccatcgagattgacctgggctatgtgacgcccgcggagcacgaggaggagctggcagtgcgcttttcacaagaagagatacaccaagaacagccagagcaggaagcagagaatgagcagagtcaggctgggctcgagcatgacggcgactacctccacctgagcgggggggaggacgcgctcatcaagcatctggcccggcaggccaccatcgtcaaggatgcgctgctcgaccgcaccgaggtgcccctcagcgtggaggagctcagccgcgcctacgagttgaacctcttctcgccgcgcgtgccccccaagcgccagcccaatggcacctgcgagcccaacccgcgcctcaacttctacccggtcttcgcggtgcccgaggccctggccacctaccacatctttttcaagaaccaaaagatccccgtctcctgccgcgccaaccgcacccgcgccgacgcccttttcaacctgggtcccggcgcccgcctacctgatatcgcctccttggaagaggttcccaagatcttcgagggtctgggcagcgacgagactcgggccgcgaacgctctgcaaggagaaggaggagagcatgagcaccacagcgccctggtcgagttggaaggcgacaacgcgcggctggcggtgctcaaacgcacggtcgagctgacccatttcgcctacccggctctgaacctgccccccaaagtcatgagcgcggtcatggaccaggtgctcatcaagcgcgcgtcgcccatctccgaggacgagggcatgcaagactccgaggagggcaagcccgtggtcagcgacgagcagctggcccggtggctgggtcctaatgctagtccccagagtttggaagagcggcgcaaactcatgatggccgtggtcctggtgaccgtggagctggagtgcctgcgccgcttcttcgccgacgcggagaccctgcgcaaggtcgaggagaacctgcactacctcttcaggcacgggttcgtgcgccaggcctgcaagatctccaacgtggagctgaccaacctggtctcctacatgggcatcttgcacgagaaccgcctggggcagaacgtgctgcacaccaccctgcgcggggaggcccggcgcgactacatccgcgactgcgtctacctctacctctgccacacctggcagacgggcatgggcgtgtggcagcagtgtctggaggagcagaacctgaaagagctctgcaagctcctgcagaagaacctcaagggtctgtggaccgggttcgacgagcgcaccaccgcctcggacctggccgacctcattttccccgagcgcctcaggctgacgctgcgcaacggcctgcccgactttatgagccaaagcatgttgcaaaactttcgctctttcatcctcgaacgctccggaatcctgcccgccacctgctccgcgctgccctcggacttcgtgccgctgaccttccgcgagtgccccccgccgctgtggagccactgctacctgctgcgcctggccaactacctggcctaccactcggacgtgatcgaggacgtcagcggcgagggcctgctcgagtgccactgccgctgcaacctctgcacgccgcaccgctccctggcctgcaacccccagctgctgagcgagacccagatcatcggcaccttcgagttgcaagggcccagcgaaggcgagggttcagccgccaaggggggtctgaaactcaccccggggctgtggacctcggcctacttgcgcaagttcgtgcccgaggactaccatcccttcgagatcaggttctacgaggaccaatcccatccgcccaaggccgagctgtcggcctgcgtcatcacccagggggcgatcctggcccaattgcaagccatccagaaatcccgccaagaattcttgctgaaaaagggccgcggggtctacctcgacccccagaccggtgaggagctcaaccccggcttcccccaggatgccccgaggaaacaagaagctgaaagtggagctgccgcccgtggaggatttggaggaagactgggagaacagcagtcaggcagaggaggaggagatggaggaagactgggacagcactcaggcagaggaggacagcctgcaagacagtctggaggaagacgaggaggaggcagaggaggaggtggaagaagcagccgccgccagaccgtcgtcctcggcgggggagaaagcaagcagcacggataccatctccgctccgggtcggggtcccgctcgaccacacagtagatgggacgagaccggacgattcccgaaccccaccacccagaccggtaagaaggagcggcagggatacaagtcctggcgggggcacaaaaacgccatcgtctcctgcttgcaggcctgcgggggcaacatctccttcacccggcgctacctgctcttccaccgcggggtgaactttccccgcaacatcttgcattactaccgtcacctccacagcccctactacttccaagaagaggcagcagcagcagaaaaagaccagcagaaaaccagcagctagaaaatccacagcggcggcagcaggtggactgaggatcgcggcgaacgagccggcgcaaacccgggagctgaggaaccggatctttcccaccctctatgccatcttccagcagagtcgggggcaggagcaggaactgaaagtcaagaaccgttctctgcgctcgctcacccgcagttgtctgtatcacaagagcgaagaccaacttcagcgcactctcgaggacgccgaggctctcttcaacaagtactgcgcgctcactcttaaagagtagcccgcgcccgcccagtcgcagaaaaaggcgggaattacgtcacctgtgcccttcgccctagccgcctccacccatcatcatgagcaaagagattcccacgccttacatgtggagctaccagccccagatgggcctggccgccggtgccgcccaggactactccacccgcatgaattggctcagcgccgggcccgcgatgatctcacgggtgaatgacatccgcgcccaccgaaaccagatactcctagaacagtcagcgctcaccgccacgccccgcaatcacctcaatccgcgtaattggcccgccgccctggtgtaccaggaaattccccagcccacgaccgtactacttccgcgagacgcccaggccgaagtccagctgactaactcaggtgtccagctggcgggcggcgccaccctgtgtcgtcaccgccccgctcagggtataaagcggctggtgatccggggcagaggcacacagctcaacgacgaggtggtgagctcttcgctgggtctgcgacctgacggagtcttccaactcgccggatcggggagatcttccttcacgcctcgtcaggccgtcctgactttggagagttcgtcctcgcagccccgctcgggtggcatcggcactctccagttcgtggaggagttcactccctcggtctacttcaaccccttctccggctcccccggccactacccggacgagttcatcccgaacttcgacgccatcagcgagtcggtggacggctacgattgaaactaatcacccccttatccagtgaaataaagatcatattgatgatgattttacagaaataaaaaataatcatttgatttgaaataaagatacaatcatattgatgatttgagtttaacaaaaaaataaagaatcacttacttgaaatctgataccaggtctctgtccatgttttctgccaacaccacttcactcccctcttcccagctctggtactgcaggccccggcgggctgcaaacttcctccacacgctgaaggggatgtcaaattcctcctgtccctcaatcttcattttatcttctatcagatgtccaaaaagcgcgtccgggtggatgatgacttcgaccccgtctacccctacgatgcagacaacgcaccgaccgtgcccttcatcaacccccccttcgtctcttcagatggattccaagagaagcccctgggggtgttgtccctgcgactggccgaccccgtcaccaccaagaacggggaaatcaccctcaagctgggagagggggtggacctcgattcctcgggaaaactcatctccaacacggccaccaaggccgccgcccctctcagtttttccaacaacaccatttcccttaacatggatcaccccttttacactaaagatggaaaattatccttacaagtttctccaccattaaatatactgagaacaagcattctaaacacactagctttaggttttggatcaggtttaggactccgtggctctgccttggcagtacagttagtctctccacttacatttgatactgatggaaacataaagcttaccttagacagaggtttgcatgttacaacaggagatgcaattgaaagcaacataagctgggctaaaggtttaaaatttgaagatggagccatagcaaccaacattggaaatgggttagagtttggaagcagtagtacagaaacaggtgttgatgatgcttacccaatccaagttaaacttggatctggccttagctttgacagtacaggagccataatggctggtaacaaagaagacgataaactcactttgtggacaacacctgatccatcaccaaactgtcaaatactcgcagaaaatgatgcaaaactaacactttgcttgactaaatgtggtagtcaaatactggccactgtgtcagtcttagttgtaggaagtggaaacctaaaccccattactggcaccgtaagcagtgctcaggtgtttctacgttttgatgcaaacggtgttcttttaacagaacattctacactaaaaaaatactgggggtataggcagggagatagcatagatggcactccatataccaatgctgtaggattcatgcccaatttaaaagcttatccaaagtcacaaagttctactactaaaaataatatagtagggcaagtatacatgaatggagatgtttcaaaacctatgcttctcactataaccctcaatggtactgatgacagcaacagtacatattcaatgtcattttcatacacctggactaatggaagctatgttggagcaacatttggggctaactcttataccttctcatacatcgcccaagaatgaacactgtatcccaccctgcatgccaacccttcccaccccactctgtggaacaaactctgaaacacaaaataaaataaagttcaagtgttttattgattcaacagttttacaggattcgagcagttatttttcctccaccctcccaggacatggaatacaccaccctctccccccgcacagccttgaacatctgaatgccattggtgatggacatgcttttggtctccacgttccacacagtttcagagcgagccagtctcgggtcggtcagggagatgaaaccctccgggcactcccgcatctgcacctcacagctcaacagctgaggattgtcctcggtggtcgggatcacggttatctggaagaagcagaagagcggcggtgggaatcatagtccgcgaacgggatcggccggtggtgtcgcatcaggccccgcagcagtcgctgccgccgccgctccgtcaagctgctgctcagggggtccgggtccagggactccctcagcatgatgcccacggccctcagcatcagtcgtctggtgcggcgggcgcagcagcgcatgcggatctcgctcaggtcgctgcagtacgtgcaacacagaaccaccaggttgttcaacagtccatagttcaacacgctccagccgaaactcatcgcgggaaggatgctacccacgtggccgtcgtaccagatcctcaggtaaatcaagtggtgccccctccagaacacgctgcccacgtacatgatctccttgggcatgtggcggttcaccacctcccggtaccacatcaccctctggttgaacatgcagccccggatgatcctgcggaaccacagggccagcaccgccccgcccgccatgcagcgaagagaccccgggtcccggcaatggcaatggaggacccaccgctcgtacccgtggatcatctgggagctgaacaagtctatgttggcacagcacaggcatatgctcatgcatctcttcagcactctcaactcctcgggggtcaaaaccatatcccagggcacggggaactcttgcaggacagcgaaccccgcagaacagggcaatcctcgcacagaacttacattgtgcatggacagggtatcgcaatcaggcagcaccgggtgatcctccaccagagaagcgcgggtctcggtctcctcacagcgtggtaagggggccggccgatacgggtgatggcgggacgcggctgatcgtgttcgcgaccgtgtcatgatgcagttgctttcggacattttcgtacttgctgtagcagaacctggtccgggcgctgcacaccgatcgccggcggcggtctcggcgcttggaacgctcggtgttgaaattgtaaaacagccactctctcagaccgtgcagcagatctagggcctcaggagtgatgaagatcccatcatgcctgatggctctgatcacatcgaccaccgtggaatgggccagacccagccagatgatgcaattttgttgggtttcggtgacggcgggggagggaagaacaggaagaaccatgattaacttttaatccaaacggtctcggagtacttcaaaatgaagatcgcggagatggcacctctcgcccccgctgtgttggtggaaaataacagccaggtcaaaggtgatacggttctcgagatgttccacggtggcttccagcaaagcctccacgcgcacatccagaaacaagacaatagcgaaagcgggagggttctctaattcctcaatcatcatgttacactcctgcaccatccccagataattttcatttttccagccttgaatgattcgaactagttcctgaggtaaatccaagccagccatgataaagagctcgcgcagagcgccctccaccggcattcttaagcacaccctcataattccaagatattctgctcctggttcacctgcagcagattgacaagcggaatatcaaaatctctgccgcgatccctgagctcctccctcagcaataactgtaagtactctttcatatcctctccgaaatttttagccataggaccaccaggaataagattagggcaagccacagtacagataaaccgaagtcctccccagtgagcattgccaaatgcaagactgctataagcatgctggctagacccggtgatatcttccagataactggacagaaaatcgcccaggcaatttttaagaaaatcaacaaaagaaaaatcctccaggtggacgtttagagcctcgggaacaacgatgaagtaaatgcaagcggtgcgttccagcatggttagttagctgatctgtagaaaaaacaaaaatgaacattaaaccatgctagcctggcgaacaggtgggtaaatcgttctctccagcaccaggcaggccacggggtctccggcgcgaccctcgtaaaaattgtcgctatgattgaaaaccatcacagagagacgttcccggtggccggcgtgaatgattcgacaagatgaatacacccccggaacattggcgtccgcgagtgaaaaaaagcgcccgaggaagcaataaggcactacaatgctcagtctcaagtccagcaaagcgatgccatgcggatgaagcacaaaattctcaggtgcgtacaaaatgtaattactcccctcctgcacaggcagcaaagcccccgatccctccaggtacacatacaaagcctcagcgtccatagcttaccgagcagcagcacacaacaggcgcaagagtcagagaaaggctgagctctaacctgtccacccgctctctgctcaatatatagcccagatctacactgacgtaaaggccaaagtctaaaaatacccgccaaataatcacacacgcccagcacacgcccagaaaccggtgacacactcaaaaaaatacgcgcacttcctcaaacgcccaaaactgccgtcatttccgggttcccacgctacgtcatcaaaacacgactttcaaattccgtcgaccgttaaaaacgtcacccgccccgcccctaacggtcgcccgtctctcagccaatcagcgccccgcatccccaaattcaaacacctcatttgcatattaacgcgcacaaaaagtttgaggtatattattgatgatgg

SEQ ID NO: 14 - DNA, 8602 bp, synthetic construct
  misc_feature 1..8602: note = Description of Artificial Sequence: Synthetic polynucleotide
  source 1..8602: mol_type = other DNA
atgggcggcgcatgagagaagcccagaccaattacctacccaaaatggagaaagttcacgttgacatcgaggaagacagcccattcctcagagctttgcagcggagcttcccgcagtttgaggtagaagccaagcaggtcactgataatgaccatgctaatgccagagcgttttcgcatctggcttcaaaactgatcgaaacggaggtggacccatccgacacgatccttgacattggaagtgcgcccgcccgcagaatgtattctaagcacaagtatcattgtatctgtccgatgagatgtgcggaagatccggacagattgtataagtatgcaactaagctgaagaaaaactgtaaggaaataactgataaggaattggacaagaaaatgaaggagctcgccgccgtcatgagcgaccctgacctggaaactgagactatgtgcctccacgacgacgagtcgtgtcgctacgaagggcaagtcgctgtttaccaggatgtatacgcggttgacggaccgacaagtctctatcaccaagccaataagggagttagagtcgcctactggataggctttgacaccaccccttttatgtttaagaacttggctggagcatatccatcatactctaccaactgggccgacgaaaccgtgttaacggctcgtaacataggcctatgcagctctgacgttatggagcggtcacgtagagggatgtccattcttagaaagaagtatttgaaaccatccaacaatgttctattctctgttggctcgaccatctaccacgagaagagggacttactgaggagctggcacctgccgtctgtatttcacttacgtggcaagcaaaattacacatgtcggtgtgagactatagttagttgcgacgggtacgtcgttaaaagaatagctatcagtccaggcctgtatgggaagccttcaggctatgctgctacgatgcaccgcgagggattcttgtgctgcaaagtgacagacacattgaacggggagagggtctcttttcccgtgtgcacgtatgtgccagctacattgtgtgaccaaatgactggcatactggcaacagatgtcagtgcggacgacgcgcaaaaactgctggttgggctcaaccagcgtatagtcgtcaacggtcgcacccagagaaacaccaataccatgaaaaattaccttttgcccgtagtggcccaggcatttgctaggtgggcaaaggaatataaggaagatcaagaagatgaaaggccactaggactacgagatagacagttagtcatggggtgttgttgggcttttagaaggcacaagataacatctatttataagcgcccggatacccaaaccatcatcaaagtgaacagcgatttccactcattcgtgctgcccaggataggcagtaacacattggagatcgggctgagaacaagaatcaggaaaatgttagaggagcacaaggagccgtcacctctcattaccgccgaggacgtacaagaagctaagtgcgcagccgatgaggctaaggaggtgcgtgaagccgaggagttgcgcgcagctctaccacctttggcagctgatgttgaggagcccactctggaagccgatgtcgacttgatgttacaagaggctggggccggctcagtggagacacctcgtggcttgataaaggttaccagctacgctggcgaggacaagatcggctcttacgctgtgctttctccgcaggctgtactcaagagtgaaaaattatcttgcatccaccctctcgctgaacaagtcatagtgataacacactctggccgaaaagggcgttatgccgtggaaccataccatggtaaagtagtggtgccagagggacatgcaatacccgtccaggactttcaagctctgagtgaaagtgccaccattgtgtacaacgaacgtgagttcgtaaacaggtacctgcaccatattgccacacatggaggagcgctgaacactgatgaagaatattacaaaactgtcaagcccagcgagcacgacggcgaatacctgtacgacatcgacaggaaacagtgcgtcaagaaagaactagtcactgggctagggctcacaggcgagctggtggatcctcccttccatgaattcgcctacgagagtctgagaacacgaccagccgctccttaccaagtaccaaccataggggtgtatggcgtgccaggatcaggcaagtctggcatcattaaaagcgcagtcaccaaaaaagatctagtggtgagcgccaagaaagaaaactgtgcagaaattataagggacgtcaagaaaatgaaagggctggacgtcaatgccagaactgtggactcagtgctcttgaatggatgcaaacaccccgtagagaccctgtatattgacgaagcttttgcttgtcatgcaggtactctcagagcgctcatagccattataagacctaaaaaggcagtgctctgcggggatcccaaacagtgcggtttttttaacatgatgtgcctgaaagtgcattttaaccacgagatttgcacacaagtcttccacaaaagcatctctcgccgttgcactaaatctgtgacttcggtcgtctcaaccttgttttacgacaaaaaaatgagaacgacgaatccgaaagagactaagattgtgattgacactaccggcagtaccaaacctaagcaggacgatctcattctcacttgtttcagagggtgggtgaagcagttgcaaatagattacaaaggcaacgaaataatgacggcagctgcctctcaagggctgacccgtaaaggtgtgtatgccgttcggtacaaggtgaatgaaaatcctctgtacgcacccacctcagaacatgtgaacgtcctactgacccgcacggaggaccgcatcgtgtggaaaacactagccggcgacccatggataaaaacactgactgccaagtaccctgggaatttcactgccacgatagaggagtggcaagcagagcatgatgccatcatgaggcacatcttggagagaccggaccctaccgacgtcttccagaataaggcaaacgtgtgttgggccaaggctttagtgccggtgctgaagaccgctggcatagacatgaccactgaacaatggaacactgtggattattttgaaacggacaaagctcactcagcagagatagtattgaaccaactatgcgtgaggttctttggactcgatctggactccggtctattttctgcacccactgttccgttatccattaggaataatcactgggataactccccgtcgcctaacatgtacgggctgaataaagaagtggtccgtcagctctctcgcaggtacccacaactgcctcgggcagttgccactggaagagtctatgacatgaacactggtacactgcgcaattatgatccgcgcataaacctagtacctgtaaacagaagactgcctcatgctttagtcctccaccataatgaacacccacagagtgacttttcttcattcgtcagcaaattgaagggcagaactgtcctggtggtcggggaaaagttgtccgtcccaggcaaaatggttgactggttgtcagaccggcctgaggctaccttcagagctcggctggatttaggcatcccaggtgatgtgcccaaatatgacataatatttgttaatgtgaggaccccatataaataccatcactatcagcagtgtgaagaccatgccattaagcttagcatgttgaccaagaaagcttgtctgcatctgaatcccggcggaacctgtgtcagcataggttatggttacgctgacagggccagcgaaagcatcattggtgctatagcgcggcagttcaagttttcccgggtatgcaaaccgaaatcctcacttgaagagacggaagttctgtttgtattcattgggtacgatcgcaaggcccgtacgcacaatccttacaagctttcatcaaccttgaccaacatttatacaggttccagactccacgaagccggatgtgcaccctcatatcatgtggtgcgaggggatattgccacggccaccgaaggagtgattataaatgctgctaacagcaaaggacaacctggcggaggggtgtgcggagcgctgtataagaaattcccggaaagcttcgatttacagccgatcgaagtaggaaaagcgcgactggtcaaaggtgcagctaaacatatcattcatgccgtaggaccaaacttcaacaaagtttcggaggttgaaggtgacaaacagttggcagaggcttatgagtccatcgctaagattgtcaacgataacaattacaagtcagtagcgattccactgttgtccaccggcatcttttccgggaacaaagatcgactaacccaatcattgaaccatttgctgacagctttagacaccactgatgcagatgtagccatatactgcagggacaagaaatgggaaatgactctcaaggaagcagtggctaggagagaagcagtggaggagatatgcatatccgacgactcttcagtgacagaacctgatgcagagctggtgagggtgcatccgaagagttctttggctggaaggaagggctacagcacaagcgatggcaaaactttctcatatttggaagggaccaagtttcaccaggcggccaaggatatagcagaaattaatgccatgtggcccgttgcaacggaggccaatgagcaggtatgcatgtatatcctcggagaaagcatgagcagtattaggtcgaaatgccccgtcgaagagtcggaagcctccacaccacctagcacgctgccttgcttgtgcatccatgccatgactccagaaagagtacagcgcctaaaagcctcacgtccagaacaaattactgtgtgctcatcctttccattgccgaagtatagaatcactggtgtgcagaagatccaatgctcccagcctatattgttctcaccgaaagtgcctgcgtatattcatccaaggaagtatctcgtggaaacaccaccggtagacgagactccggagccatcggcagagaaccaatccacagaggggacacctgaacaaccaccacttataaccgaggatgagaccaggactagaacgcctgagccgatcatcatcgaagaggaagaagaggatagcataagtttgctgtcagatggcccgacccaccaggtgctgcaagtcgaggcagacattcacgggccgccctctgtatctagctcatcctggtccattcctcatgcatccgactttgatgtggacagtttatccatacttgacaccctggagggagctagcgtgaccagcggggcaacgtcagccgagactaactcttacttcgcaaagagtatggagtttctggcgcgaccggtgcctgcgcctcgaacagtattcaggaaccctccacatcccgctccgcgcacaagaacaccgtcacttgcacccagcagggcctgctcgagaaccagcctagtttccaccccgccaggcgtgaatagggtgatcactagagaggagctcgaggcgcttaccccgtcacgcactcctagcaggtcggtctcgagaaccagcctggtctccaacccgccaggcgtaaatagggtgattacaagagaggagtttgaggcgttcgtagcacaacaacaatgacggtttgatgcgggtgcatacatcttttcctccgacaccggtcaagggcatttacaacaaaaatcagtaaggcaaacggtgctatccgaagtggtgttggagaggaccgaattggagatttcgtatgccccgcgcctcgaccaagaaaaagaagaattactacgcaagaaattacagttaaatcccacacctgctaacagaagcagataccagtccaggaaggtggagaacatgaaagccataacagctagacgtattctgcaaggcctagggcattatttgaaggcagaaggaaaagtggagtgctaccgaaccctgcatcctgttcctttgtattcatctagtgtgaaccgtgccttttcaagccccaaggtcgcagtggaagcctgtaacgccatgttgaaagagaactttccgactgtggcttcttactgtattattccagagtacgatgcctatttggacatggttgacggagcttcatgctgcttagacactgccagtttttgccctgcaaagctgcgcagctttccaaagaaacactcctatttggaacccacaatacgatcggcagtgccttcagcgatccagaacacgctccagaacgtcctggcagctgccacaaaaagaaattgcaatgtcacgcaaatgagagaattgcccgtattggattcggcggcctttaatgtggaatgcttcaagaaatatgcgtgtaataatgaatattgggaaacgtttaaagaaaaccccatcaggcttactgaagaaaacgtggtaaattacattaccaaattaaaaggaccaaaagctgctgctctttttgcgaagacacataatttgaatatgttgcaggacataccaatggacaggtttgtaatggacttaaagagagacgtgaaagtgactccaggaacaaaacatactgaagaacggcccaaggtacaggtgatccaggctgccgatccgctagcaacagcgtatctgtgcggaatccaccgagagctggttaggagattaaatgcggtcctgcttccgaacattcatacactgtttgatatgtcggctgaagactttgacgctattatagccgagcacttccagcctggggattgtgttctggaaactgacatcgcgtcgtttgataaaagtgaggacgacgccatggctctgaccgcgttaatgattctggaagacttaggtgtggacgcagagctgttgacgctgattgaggcggctttcggcgaaatttcatcaatacatttgcccactaaaactaaatttaaattcggagccatgatgaaatctggaatgttcctcacactgtttgtgaacacagtcattaacattgtaatcgcaagcagagtgttgagagaacggctaaccggatcaccatgtgcagcattcattggagatgacaatatcgtgaaaggagtcaaatcggacaaattaatggcagacaggtgcgccacctggttgaatatggaagtcaagattatagatgctgtggtgggcgagaaagcgccttatttctgtggagggtttattttgtgtgactccgtgaccggcacagcgtgccgtgtggcagaccccctaaaaaggctgtttaagcttggcaaacctctggcagcagacgatgaacatgatgatgacaggagaagggcattgcatgaagagtcaacacgctggaaccgagtgggtattctttcagagctgtgcaaggcagtagaatcaaggtatgaaaccgtaggaacttccatcatagttatggccatgactactctagctagcagtgttaaatcattcagctacctgagaggggcccctataactctctacggctaacctgaatggactacgactctagaatagtctttaattaaagtccgccatatgaggccaccatgcagatcttcgtgaagaccctgaccggcaagaccatcaccctagaggtggagcccagtgacaccatcgagaacgtgaaggccaagatccaggataaagagggcatcccccctgaccagcagaggctgatctttgccggcaagcagctggaagatggccgcaccctctctgattacaacatccagaaggagtcaaccctgcacctggtccttcgcctgagaggtggcgctgcttacagtataatcaactttgaaaaactggctgcttacggcatcctgggctttgtgtttacactggctgcctacctgctgtttggctatcctgtgtacgtggccgcttatggactgtgtaccctggtggccatgctggctgcttacaatctggtgcctatggtggccacagtggccgcctattgtcttggcggactgctgacaatggtggcagcctacagcccgagctatgcgtatcatcagtttgcagcctacggcccaggaccaggcgctaaatttgtggctgcctggacactgaaagccgccgctggaccaggtcctggacagtacatcaaggccaacagcaagttcatcggcatcaccgaactcggcccaggaccaggctatccctacgatgtgcctgattacgcctgatagtgatgattcgaacggccgtatcacgcccaaacatttacagccgcggtgtcaaaaaccgcgtggacgtggttaacatccctgctgggaggatcagccgtaattattataattggcttggtgctggctactattgtggccatgtacgtgctgaccaaccagaaacataattgaatacagcagcaattggcaagctgcttacatagaactcgcggcgattggcatgccgccttaaaatttttattttattttttcttttcttttccgaatcggattttgtttttaatatttcaaaaaaaaaaaaaaaaaaaaaaaaaaaaaaaaaaaaaaaaaaaaaaaaaaaaaaaaaaaaaaaaaaaaaaaaaaaaaaaa

SEQ ID NO: 15 - DNA, 9595 bp, synthetic construct
  misc_feature 1..9595: note = Description of Artificial Sequence: Synthetic polynucleotide
  source 1..9595: mol_type = other DNA
atgggcggcgcatgagagaagcccagaccaattacctacccaaaatggagaaagttcacgttgacatcgaggaagacagcccattcctcagagctttgcagcggagcttcccgcagtttgaggtagaagccaagcaggtcactgataatgaccatgctaatgccagagcgttttcgcatctggcttcaaaactgatcgaaacggaggtggacccatccgacacgatccttgacattggaagtgcgcccgcccgcagaatgtattctaagcacaagtatcattgtatctgtccgatgagatgtgcggaagatccggacagattgtataagtatgcaactaagctgaagaaaaactgtaaggaaataactgataaggaattggacaagaaaatgaaggagctcgccgccgtcatgagcgaccctgacctggaaactgagactatgtgcctccacgacgacgagtcgtgtcgctacgaagggcaagtcgctgtttaccaggatgtatacgcggttgacggaccgacaagtctctatcaccaagccaataagggagttagagtcgcctactggataggctttgacaccaccccttttatgtttaagaacttggctggagcatatccatcatactctaccaactgggccgacgaaaccgtgttaacggctcgtaacataggcctatgcagctctgacgttatggagcggtcacgtagagggatgtccattcttagaaagaagtatttgaaaccatccaacaatgttctattctctgttggctcgaccatctaccacgagaagagggacttactgaggagctggcacctgccgtctgtatttcacttacgtggcaagcaaaattacacatgtcggtgtgagactatagttagttgcgacgggtacgtcgttaaaagaatagctatcagtccaggcctgtatgggaagccttcaggctatgctgctacgatgcaccgcgagggattcttgtgctgcaaagtgacagacacattgaacggggagagggtctcttttcccgtgtgcacgtatgtgccagctacattgtgtgaccaaatgactggcatactggcaacagatgtcagtgcggacgacgcgcaaaaactgctggttgggctcaaccagcgtatagtcgtcaacggtcgcacccagagaaacaccaataccatgaaaaattaccttttgcccgtagtggcccaggcatttgctaggtgggcaaaggaatataaggaagatcaagaagatgaaaggccactaggactacgagatagacagttagtcatggggtgttgttgggcttttagaaggcacaagataacatctatttataagcgcccggatacccaaaccatcatcaaagtgaacagcgatttccactcattcgtgctgcccaggataggcagtaacacattggagatcgggctgagaacaagaatcaggaaaatgttagaggagcacaaggagccgtcacctctcattaccgccgaggacgtacaagaagctaagtgcgcagccgatgaggctaaggaggtgcgtgaagccgaggagttgcgcgcagctctaccacctttggcagctgatgttgaggagcccactctggaagccgatgtcgacttgatgttacaagaggctggggccggctcagtggagacacctcgtggcttgataaaggttaccagctacgctggcgaggacaagatcggctcttacgctgtgctttctccgcaggctgtactcaagagtgaaaaattatcttgcatccaccctctcgctgaacaagtcatagtgataacacactctggccgaaaagggcgttatgccgtggaaccataccatggtaaagtagtggtgccagagggacatgcaatacccgtccaggactttcaagctctgagtgaaagtgccaccattgtgtacaacgaacgtgagttcgtaaacaggtacctgcaccatattgccacacatggaggagcgctgaacactgatgaagaatattacaaaactgtcaagcccagcgagcacgacggcgaatacctgtacgacatcgacaggaaacagtgcgtcaagaaagaactagtcactgggctagggctcacaggcgagctggtggatcctcccttccatgaattcgcctacgagagtctgagaacacgaccagccgctccttaccaagtaccaaccataggggtgtatggcgtgccaggatcaggcaagtctggcatcattaaaagcgcagtcaccaaaaaagatctagtggtgagcgccaagaaagaaaactgtgcagaaattataagggacgtcaagaaaatgaaagggctggacgtcaatgccagaactgtggactcagtgctcttgaatggatgcaaacaccccgtagagaccctgtatattgacgaagcttttgcttgtcatgcaggtactctcagagcgctcatagccattataagacctaaaaaggcagtgctctgcggggatcccaaacagtgcggtttttttaacatgatgtgcctgaaagtgcattttaaccacgagatttgcacacaagtcttccacaaaagcatctctcgccgttgcactaaatctgtgacttcggtcgtctcaaccttgttttacgacaaaaaaatgagaacgacgaatccgaaagagactaagattgtgattgacactaccggcagtaccaaacctaagcaggacgatctcattctcacttgtttcagagggtgggtgaagcagttgcaaatagattacaaaggcaacgaaataatgacggcagctgcctctcaagggctgacccgtaaaggtgtgtatgccgttcggtacaaggtgaatgaaaatcctctgtacgcacccacctcagaacatgtgaacgtcctactgacccgcacggaggaccgcatcgtgtggaaaacactagccggcgacccatggataaaaacactgactgccaagtaccctgggaatttcactgccacgatagaggagtggcaagcagagcatgatgccatcatgaggcacatcttggagagaccggaccctaccgacgtcttccagaataaggcaaacgtgtgttgggccaaggctttagtgccggtgctgaagaccgctggcatagacatgaccactgaacaatggaacactgtggattattttgaaacggacaaagctcactcagcagagatagtattgaaccaactatgcgtgaggttctttggactcgatctggactccggtctattttctgcacccactgttccgttatccattaggaataatcactgggataactccccgtcgcctaacatgtacgggctgaataaagaagtggtccgtcagctctctcgcaggtacccacaactgcctcgggcagttgccactggaagagtctatgacatgaacactggtacactgcgcaattatgatccgcgcataaacctagtacctgtaaacagaagactgcctcatgctttagtcctccaccataatgaacacccacagagtgacttttcttcattcgtcagcaaattgaagggcagaactgtcctggtggtcggggaaaagttgtccgtcccaggcaaaatggttgactggttgtcagaccggcctgaggctaccttcagagctcggctggatttaggcatcccaggtgatgtgcccaaatatgacataatatttgttaatgtgaggaccccatataaataccatcactatcagcagtgtgaagaccatgccattaagcttagcatgttgaccaagaaagcttgtctgcatctgaatcccggcggaacctgtgtcagcataggttatggttacgctgacagggccagcgaaagcatcattggtgctatagcgcggcagttcaagttttcccgggtatgcaaaccgaaatcctcacttgaagagacggaagttctgtttgtattcattgggtacgatcgcaaggcccgtacgcacaatccttacaagctttcatcaaccttgaccaacatttatacaggttccagactccacgaagccggatgtgcaccctcatatcatgtggtgcgaggggatattgccacggccaccgaaggagtgattataaatgctgctaacagcaaaggacaacctggcggaggggtgtgcggagcgctgtataagaaattcccggaaagcttcgatttacagccgatcgaagtaggaaaagcgcgactggtcaaaggtgcagctaaacatatcattcatgccgtaggaccaaacttcaacaaagtttcggaggttgaaggtgacaaacagttggcagaggcttatgagtccatcgctaagattgtcaacgataacaattacaagtcagtagcgattccactgttgtccaccggcatcttttccgggaacaaagatcgactaacccaatcattgaaccatttgctgacagctttagacaccactgatgcagatgtagccatatactgcagggacaagaaatgggaaatgactctcaaggaagcagtggctaggagagaagcagtggaggagatatgcatatccgacgactcttcagtgacagaacctgatgcagagctggtgagggtgcatccgaagagttctttggctggaaggaagggctacagcacaagcgatggcaaaactttctcatatttggaagggaccaagtttcaccaggcggccaaggatatagcagaaattaatgccatgtggcccgttgcaacggaggccaatgagcaggtatgcatgtatatcctcggagaaagcatgagcagtattaggtcgaaatgccccgtcgaagagtcggaagcctccacaccacctagcacgctgccttgcttgtgcatccatgccatgactccagaaagagtacagcgcctaaaagcctcacgtccagaacaaattactgtgtgctcatcctttccattgccgaagtatagaatcactggtgtgcagaagatccaatgctcccagcctatattgttctcaccgaaagtgcctgcgtatattcatccaaggaagtatctcgtggaaacaccaccggtagacgagactccggagccatcggcagagaaccaatccacagaggggacacctgaacaaccaccacttataaccgaggatgagaccaggactagaacgcctgagccgatcatcatcgaagaggaagaagaggatagcataagtttgctgtcagatggcccgacccaccaggtgctgcaagtcgaggcagacattcacgggccgccctctgtatctagctcatcctggtccattcctcatgcatccgactttgatgtggacagtttatccatacttgacaccctggagggagctagcgtgaccagcggggcaacgtcagccgagactaactcttacttcgcaaagagtatggagtttctggcgcgaccggtgcctgcgcctcgaacagtattcaggaaccctccacatcccgctccgcgcacaagaacaccgtcacttgcacccagcagggcctgctcgagaaccagcctagtttccaccccgccaggcgtgaatagggtgatcactagagaggagctcgaggcgcttaccccgtcacgcactcctagcaggtcggtctcgagaaccagcctggtctccaacccgccaggcgtaaatagggtgattacaagagaggagtttgaggcgttcgtagcacaacaacaatgacggtttgatgcgggtgcatacatcttttcctccgacaccggtcaagggcatttacaacaaaaatcagtaaggcaaacggtgctatccgaagtggtgttggagaggaccgaattggagatttcgtatgccccgcgcctcgaccaagaaaaagaagaattactacgcaagaaattacagttaaatcccacacctgctaacagaagcagataccagtccaggaaggtggagaacatgaaagccataacagctagacgtattctgcaaggcctagggcattatttgaaggcagaaggaaaagtggagtgctaccgaaccctgcatcctgttcctttgtattcatctagtgtgaaccgtgccttttcaagccccaaggtcgcagtggaagcctgtaacgccatgttgaaagagaactttccgactgtggcttcttactgtattattccagagtacgatgcctatttggacatggttgacggagcttcatgctgcttagacactgccagtttttgccctgcaaagctgcgcagctttccaaagaaacactcctatttggaacccacaatacgatcggcagtgccttcagcgatccagaacacgctccagaacgtcctggcagctgccacaaaaagaaattgcaatgtcacgcaaatgagagaattgcccgtattggattcggcggcctttaatgtggaatgcttcaagaaatatgcgtgtaataatgaatattgggaaacgtttaaagaaaaccccatcaggcttactgaagaaaacgtggtaaattacattaccaaattaaaaggaccaaaagctgctgctctttttgcgaagacacataatttgaatatgttgcaggacataccaatggacaggtttgtaatggacttaaagagagacgtgaaagtgactccaggaacaaaacatactgaagaacggcccaaggtacaggtgatccaggctgccgatccgctagcaacagcgtatctgtgcggaatccaccgagagctggttaggagattaaatgcggtcctgcttccgaacattcatacactgtttgatatgtcggctgaagactttgacgctattatagccgagcacttccagcctggggattgtgttctggaaactgacatcgcgtcgtttgataaaagtgaggacgacgccatggctctgaccgcgttaatgattctggaagacttaggtgtggacgcagagctgttgacgctgattgaggcggctttcggcgaaatttcatcaatacatttgcccactaaaactaaatttaaattcggagccatgatgaaatctggaatgttcctcacactgtttgtgaacacagtcattaacattgtaatcgcaagcagagtgttgagagaacggctaaccggatcaccatgtgcagcattcattggagatgacaatatcgtgaaaggagtcaaatcggacaaattaatggcagacaggtgcgccacctggttgaatatggaagtcaagattatagatgctgtggtgggcgagaaagcgccttatttctgtggagggtttattttgtgtgactccgtgaccggcacagcgtgccgtgtggcagaccccctaaaaaggctgtttaagcttggcaaacctctggcagcagacgatgaacatgatgatgacaggagaagggcattgcatgaagagtcaacacgctggaaccgagtgggtattctttcagagctgtgcaaggcagtagaatcaaggtatgaaaccgtaggaacttccatcatagttatggccatgactactctagctagcagtgttaaatcattcagctacctgagaggggcccctataactctctacggctaacctgaatggactacgactctagaatagtctttaattaaagtccgccatatgagatggaagatgccaaaaacattaagaagggcccagcgccattctacccactcgaagacgggaccgccggcgagcagctgcacaaagccatgaagcgctacgccctggtgcccggcaccatcgcctttaccgacgcacatatcgaggtggacattacctacgccgagtacttcgagatgagcgttcggctggcagaagctatgaagcgctatgggctgaatacaaaccatcggatcgtggtgtgcagcgagaatagcttgcagttcttcatgcccgtgttgggtgccctgttcatcggtgtggctgtggccccagctaacgacatctacaacgagcgcgagctgctgaacagcatgggcatcagccagcccaccgtcgtattcgtgagcaagaaagggctgcaaaagatcctcaacgtgcaaaagaagctaccgatcatacaaaagatcatcatcatggatagcaagaccgactaccagggcttccaaagcatgtacaccttcgtgacttcccatttgccacccggcttcaacgagtacgacttcgtgcccgagagcttcgaccgggacaaaaccatcgccctgatcatgaacagtagtggcagtaccggattgcccaagggcgtagccctaccgcaccgcaccgcttgtgtccgattcagtcatgcccgcgaccccatcttcggcaaccagatcatccccgacaccgctatcctcagcgtggtgccatttcaccacggcttcggcatgttcaccacgctgggctacttgatctgcggctttcgggtcgtgctcatgtaccgcttcgaggaggagctattcttgcgcagcttgcaagactataagattcaatctgccctgctggtgcccacactatttagcttcttcgctaagagcactctcatcgacaagtacgacctaagcaacttgcacgagatcgccagcggcggggcgccgctcagcaaggaggtaggtgaggccgtggccaaacgcttccacctaccaggcatccgccagggctacggcctgacagaaacaaccagcgccattctgatcacccccgaaggggacgacaagcctggcgcagtaggcaaggtggtgcccttcttcgaggctaaggtggtggacttggacaccggtaagacactgggtgtgaaccagcgcggcgagctgtgcgtccgtggccccatgatcatgagcggctacgttaacaaccccgaggctacaaacgctctcatcgacaaggacggctggctgcacagcggcgacatcgcctactgggacgaggacgagcacttcttcatcgtggaccggctgaagagcctgatcaaatacaagggctaccaggtagccccagccgaactggagagcatcctgctgcaacaccccaacatcttcgacgccggggtcgccggcctgcccgacgacgatgccggcgagctgcccgccgcagtcgtcgtgctggaacacggtaaaaccatgaccgagaaggagatcgtggactatgtggccagccaggttacaaccgccaagaagctgcgcggtggtgttgtgttcgtggacgaggtgcctaaaggactgaccggcaagttggacgcccgcaagatccgcgagattctcattaaggccaagaagggcggcaagatcgccgtgtaattcgaacggccgtatcacgcccaaacatttacagccgcggtgtcaaaaaccgcgtggacgtggttaacatccctgctgggaggatcagccgtaattattataattggcttggtgctggctactattgtggccatgtacgtgctgaccaaccagaaacataattgaatacagcagcaattggcaagctgcttacatagaactcgcggcgattggcatgccgccttaaaatttttattttattttttcttttcttttccgaatcggattttgtttttaatatttcaaaaaaaaaaaaaaaaaaaaaaaaaaaaaaaaaaaaaaaaaaaaaaaaaaaaaaaaaaaaaaaaaaaaaaaaaaaaaaaa

SEQ ID NO: 16 - protein, 139 aa, synthetic construct
  REGION 1..139: note = Description of Artificial Sequence: Synthetic polypeptide
PSSLSASVGDRVTITCRASQSINSYLDWYQQKPGKAPKLLIYAASSLQSGVPSRFSGSGSGTDFTLTISSLQPEDFATYYCQQYYSTPFTFGPGTKVEIKRTVAAPSVFIFPPSDEQLKSGTASVVCLLNNFYPREAKV

SEQ ID NO: 17 - protein, 167 aa, synthetic construct
  REGION 1..167: note = Description of Artificial Sequence: Synthetic polypeptide
GVVQPGRSLRLSCAASGFTFSSYGMHWVRQAPGKGLEWVAVIWYDGSNKYYADSVKGRFTISRDNSKNTLYLQMNSLRAEDTAVYYCARDPRGATLYYYYYGMDVWGQGTTVTVSSASTKGPSVFPLAPCSRSTSESTAALGCLVKDYFPEPVTVSWNSGALTSGVH

SEQ ID NO: 18 - protein, 10 aa, synthetic construct
  REGION 1..10: note = Description of Artificial Sequence: Synthetic peptide
GFTFSSYGMH

SEQ ID NO: 19 - protein, 15 aa, synthetic construct
  REGION 1..15: note = Description of Artificial Sequence: Synthetic peptide
VIWYDGSNKYYADSV

SEQ ID NO: 20 - protein, 16 aa, synthetic construct
  REGION 1..16: note = Description of Artificial Sequence: Synthetic peptide
DPRGATLYYYYYGMDV

SEQ ID NO: 21 - protein, 11 aa, synthetic construct
  REGION 1..11: note = Description of Artificial Sequence: Synthetic peptide
RASQSINSYLD

SEQ ID NO: 22 - protein, 7 aa, synthetic construct
  REGION 1..7: note = Description of Artificial Sequence: Synthetic peptide
AASSLQS

SEQ ID NO: 23 - protein, 9 aa, synthetic construct
  REGION 1..9: note = Description of Artificial Sequence: Synthetic peptide
QQYYSTPFT

SEQ ID NO: 24 - protein, 108 aa, synthetic construct
  REGION 1..108: note = Description of Artificial Sequence: Synthetic polypeptide
EIVLTQSPGTLSLSPGERATLSCRASQRVSSSYLAWYQQKPGQAPRLLIYDASSRATGIPDRFSGSGSGTDFTLTISRLEPEDFAVYYCQQYGSLPWTFGQGTKVEIK

SEQ ID NO: 25 - protein, 121 aa, synthetic construct
  REGION 1..121: note = Description of Artificial Sequence: Synthetic polypeptide
EVQLVESGGGLVQPGGSLRLSCAASGFTFSRYWMSWVRQAPGKGLEWVANIKQDGSEKYYVDSVKGRFTISRDNAKNSLYLQMNSLRAEDTAVYYCAREGGWFGELAFDYWGQGTLVTVSS

SEQ ID NO: 26 - protein, 5 aa, synthetic construct
  REGION 1..5: note = Description of Artificial Sequence: Synthetic peptide
RYWMS

SEQ ID NO: 27 - protein, 17 aa, synthetic construct
  REGION 1..17: note = Description of Artificial Sequence: Synthetic peptide
NIKQDGSEKYYVDSVKG

SEQ ID NO: 28 - protein, 12 aa, synthetic construct
  REGION 1..12: note = Description of Artificial Sequence: Synthetic peptide
EGGWFGELAFDY

SEQ ID NO: 29 - protein, 12 aa, synthetic construct
  REGION 1..12: note = Description of Artificial Sequence: Synthetic peptide
RASQRVSSSYLA

SEQ ID NO: 30 - protein, 7 aa, synthetic construct
  REGION 1..7: note = Description of Artificial Sequence: Synthetic peptide
DASSRAT

SEQ ID NO: 31 - protein, 9 aa, synthetic construct
  REGION 1..9: note = Description of Artificial Sequence: Synthetic peptide
QQYGSLPWT

SEQ ID NO: 32 - DNA, 2019 bp, synthetic construct
  misc_feature 1..2019: note = Description of Artificial Sequence: Synthetic polynucleotide
  source 1..2019: mol_type = other DNA
gcccgggcatttaaatgcgatcgcatcgattacgactctagaatagtctagtccgcaggccaccatgcagatcttcgtgaagaccctgaccggcaagaccatcaccctagaggtggagcccagtgacaccatcgagaacgtgaaggccaagatccaggataaagagggcatcccccctgaccagcagaggctgatctttgccggcaagcagctggaagatggccgcaccctctctgattacaacatccagaaggagtcaaccctgcacctggtccttcgcctgagaggtgccatgtttcaggcgctgagcgaaggctgcaccccgtatgatattaaccagatgctgaacgtgctgggcgatcatcaggtctcaggccttgagcagcttgagagtataatcaactttgaaaaactgactgaatggaccagttctaatgttatgcctatcctgtctcctctgacaaagggcatcctgggcttcgtgtttaccctgaccgtgccttctgagagaggacttagctgcattagcgaagcggatgcgaccaccccggaaagcgcgaacctgggcgaagaaattctgagccagctgtatctttggccaagggtgacctaccattcccctagttatgcttaccaccaatttgaaagacgagccaaatataaaagacacttccccggctttggccagagcctgctgtttggctaccctgtgtacgtgttcggcgattgcgtgcagggcgattgggatgcgattcgctttcgctattgcgcgccgccgggctatgcgctgctgcgctgcaacgataccaactatagcgctctgctggctgtgggggccctagaaggacccaggaatcaggactggcttggtgtcccaagacaacttgtaactcggatgcaggctattcagaatgccggcctgtgtaccctggtggccatgctggaagagacaatcttctggctgcaagcgtttctgatggcgctgaccgatagcggcccgaaaaccaacattattgtggatagccagtatgtgatgggcattagcaaaccgagctttcaggaatttgtggattgggaaaacgtgagcccggaactgaacagcaccgatcagccgttttggcaagccggaatcctggccagaaatctggtgcctatggtggccacagtgcagggccagaacctgaagtaccagggtcagtcactagtcatctctgcttctatcattgtcttcaacctgctggaactggaaggtgattatcgagatgatggcaacgtgtgggtgcataccccgctgagcccgcgcaccctgaacgcgtgggtgaaagcggtggaagaaaaaaaaggtattccagttcacctagagctggccagtatgaccaacatggagctcatgagcagtattgtgcatcagcaggtcagaacatacggccccgtgttcatgtgtctcggcggactgcttacaatggtggctggtgctgtgtggctgacagtgcgagtgctcgagctgttccgggccgcgcagctggccaacgacgtggtcctccagatcatggagctttgtggtgcagcgtttcgccaggtgtgccataccaccgtgccgtggccgaacgcgagcctgaccccgaaatggaacaacgaaaccacccagccccagatcgccaactgcagcgtgtatgacttttttgtgtggctccattattattctgttcgagacacactttggccaagggtgacctaccatatgaacaaatatgcgtatcatatgctggaaagacgagccaaatataaaagaggaccaggacctggcgctaaatttgtggccgcctggacactgaaagccgctgctggtcctggacctggccagtacatcaaggccaacagcaagttcatcggcatcaccgaactcggacccggaccaggctgatgatttcgaaatttaaataagcttgcggccgctagggataacagggtaattatcacgcccaaacatttacagccgcggtgtcaaaaaccgcgtgg

SEQ ID NO: 33 - protein, 619 aa, synthetic construct
  REGION 1..619: note = Description of Artificial Sequence: Synthetic polypeptide
MQIFVKTLTGKTITLEVEPSDTIENVKAKIQDKEGIPPDQQRLIFAGKQLEDGRTLSDYNIQKESTLHLVLRLRGAMFQALSEGCTPYDINQMLNVLGDHQVSGLEQLESIINFEKLTEWTSSNVMPILSPLTKGILGFVFTLTVPSERGLSCISEADATTPESANLGEEILSQLYLWPRVTYHSPSYAYHQFERRAKYKRHFPGFGQSLLFGYPVYVFGDCVQGDWDAIRFRYCAPPGYALLRCNDTNYSALLAVGALEGPRNQDWLGVPRQLVTRMQAIQNAGLCTLVAMLEETIFWLQAFLMALTDSGPKTNIIVDSQYVMGISKPSFQEFVDWENVSPELNSTDQPFWQAGILARNLVPMVATVQGQNLKYQGQSLVISASIIVFNLLELEGDYRDDGNVWVHTPLSPRTLNAWVKAVEEKKGIPVHLELASMTNMELMSSIVHQQVRTYGPVFMCLGGLLTMVAGAVWLTVRVLELFRAAQLANDVVLQIMELCGAAFRQVCHTTVPWPNASLTPKWNNETTQPQIANCSVYDFFVWLHYYSVRDTLWPRVTYHMNKYAYHMLERRAKYKRGPGPGAKFVAAWTLKAAAGPGPGQYIKANSKFIGITELGPGPG

SEQ ID NO: 34 - DNA, 1638 bp, synthetic construct
  misc_feature 1..1638: note = Description of Artificial Sequence: Synthetic polynucleotide
  source 1..1638: mol_type = other DNA
atggccgggatgttccaggcactgtccgaaggctgcacaccctatgatattaaccagatgctgaatgtcctgggagaccaccaggtctctggcctggagcagctggagagcatcatcaacttcgagaagctgaccgagtggacaagctccaatgtgatgcctatcctgtccccactgaccaagggcatcctgggcttcgtgtttaccctgacagtgccttctgagcggggcctgtcttgcatcagcgaggcagacgcaaccacaccagagtccgccaatctgggcgaggagatcctgtctcagctgtacctgtggccccgggtgacatatcactccccttcttacgcctatcaccagttcgagcggagagccaagtacaagagacacttcccaggctttggccagtctctgctgttcggctaccccgtgtacgtgttcggcgattgcgtgcagggcgactgggatgccatccggtttagatactgcgcaccacctggatatgcactgctgaggtgtaacgacaccaattattccgccctgctggcagtgggcgccctggagggccctcgcaatcaggattggctgggcgtgccaaggcagctggtgacacgcatgcaggccatccagaacgcaggcctgtgcaccctggtggcaatgctggaggagacaatcttctggctgcaggcctttctgatggccctgaccgacagcggccccaagacaaacatcatcgtggattcccagtacgtgatgggcatctccaagccttctttccaggagtttgtggactgggagaacgtgagcccagagctgaattccaccgatcagccattctggcaggcaggaatcctggcaaggaacctggtgcctatggtggccacagtgcagggccagaatctgaagtaccagggccagagcctggtcatcagcgcctccatcatcgtgtttaacctgctggagctggagggcgactatcgggacgatggcaacgtgtgggtgcacaccccactgagccccagaacactgaacgcctgggtgaaggccgtggaggagaagaagggcatcccagtgcacctggagctggcctccatgaccaatatggagctgatgtctagcatcgtgcaccagcaggtgaggacatacggacccgtgttcatgtgcctgggaggcctgctgaccatggtggcaggagccgtgtggctgacagtgcgggtgctggagctgttcagagccgcccagctggccaacgatgtggtgctgcagatcatggagctgtgcggagcagcctttcgccaggtgtgccacaccacagtgccatggcccaatgcctccctgacccccaagtggaacaatgagacaacacagcctcagatcgccaactgtagcgtgtacgacttcttcgtgtggctgcactactatagcgtgagggataccctgtggccccgcgtgacataccacatgaataagtacgcctatcacatgctggagaggcgcgccaagtataagagaggccctggcccaggcgcaaagtttgtggcagcatggaccctgaaggccgccgccggccccggccccggccagtatatcaaggctaacagtaagttcattggaatcacagagctgggacccggacctgga

SEQ ID NO: 35 - protein, 546 aa, synthetic construct
  REGION 1..546: note = Description of Artificial Sequence: Synthetic polypeptide
MAGMFQALSEGCTPYDINQMLNVLGDHQVSGLEQLESIINFEKLTEWTSSNVMPILSPLTKGILGFVFTLTVPSERGLSCISEADATTPESANLGEEILSQLYLWPRVTYHSPSYAYHQFERRAKYKRHFPGFGQSLLFGYPVYVFGDCVQGDWDAIRFRYCAPPGYALLRCNDTNYSALLAVGALEGPRNQDWLGVPRQLVTRMQAIQNAGLCTLVAMLEETIFWLQAFLMALTDSGPKTNIIVDSQYVMGISKPSFQEFVDWENVSPELNSTDQPFWQAGILARNLVPMVATVQGQNLKYQGQSLVISASIIVFNLLELEGDYRDDGNVWVHTPLSPRTLNAWVKAVEEKKGIPVHLELASMTNMELMSSIVHQQVRTYGPVFMCLGGLLTMVAGAVWLTVRVLELFRAAQLANDVVLQIMELCGAAFRQVCHTTVPWPNASLTPKWNNETTQPQIANCSVYDFFVWLHYYSVRDTLWPRVTYHMNKYAYHMLERRAKYKRGPGPGAKFVAAWTLKAAAGPGPGQYIKANSKFIGITELGPGPG

SEQ ID NO: 36 - DNA, 2019 bp, synthetic construct
  misc_feature 1..2019: note = Description of Artificial Sequence: Synthetic polynucleotide
  source 1..2019: mol_type = other DNA
gcccgggcatttaaatgcgatcgcatcgattacgactctagaatagtctagtccgcaggccaccatgcagatcttcgtgaagaccctgaccggcaagaccatcaccctagaggtggagcccagtgacaccatcgagaacgtgaaggccaagatccaggataaagagggcatcccccctgaccagcagaggctgatctttgccggcaagcagctggaagatggccgcaccctctctgattacaacatccagaaggagtcaaccctgcacctggtccttcgcctgagaggtgccatgtttcaggcgctgagcgaaggctgcaccccgtatgatattaaccagatgctgaacgtgctgggcgatcatcagtttaagcacatcaaagcctttgaccggacatttgctaacaacccaggtcccatggttgtgtttgccacacctgggcctatcctgtctcctctgacaaagggcatcctgggcttcgtgtttaccctgaccgtgccttctgagagaggacttagctgcattagcgaagcggatgcgaccaccccggaaagcgcgaacctgggcgaagaaattctgagccagctgtatctttggccaagggtgacctaccattcccctagttatgcttaccaccaatttgaaagacgagccaaatataaaagacacttccccggctttggccagagcctgctgtttggctaccctgtgtacgtgttcggcgattgcgtgcagggcgattgggatgcgattcgctttcgctattgcgcgccgccgggctatgcgctgctgcgctgcaacgataccaactatagcgctctgctggctgtgggggccctagaaggacccaggaatcaggactggcttggtgtcccaagacaacttgtaactcggatgcaggctattcagaatgccggcctgtgtaccctggtggccatgctggaagagacaatcttctggctgcaagcgtttctgatggcgctgaccgatagcggcccgaaaaccaacattattgtggatagccagtatgtgatgggcattagcaaaccgagctttcaggaatttgtggattgggaaaacgtgagcccggaactgaacagcaccgatcagccgttttggcaagccggaatcctggccagaaatctggtgcctatggtggccacagtgcagggccagaacctgaagtaccagggtcagtcactagtcatctctgcttctatcattgtcttcaacctgctggaactggaaggtgattatcgagatgatggcaacgtgtgggtgcataccccgctgagcccgcgcaccctgaacgcgtgggtgaaagcggtggaagaaaaaaaaggtattccagttcacctagagctggccagtatgaccaacatggagctcatgagcagtattgtgcatcagcaggtcagaacatacggccccgtgttcatgtgtctcggcggactgcttacaatggtggctggtgctgtgtggctgacagtgcgagtgctcgagctgttccgggccgcgcagctggccaacgacgtggtcctccagatcatggagctttgtggtgcagcgtttcgccaggtgtgccataccaccgtgccgtggccgaacgcgagcctgaccccgaaatggaacaacgaaaccacccagccccagatcgccaactgcagcgtgtatgacttttttgtgtggctccattattattctgttcgagacacactttggccaagggtgacctaccatatgaacaaatatgcgtatcatatgctggaaagacgagccaaatataaaagaggaccaggacctggcgctaaatttgtggccgcctggacactgaaagccgctgctggtcctggacctggccagtacatcaaggccaacagcaagttcatcggcatcaccgaactcggacccggaccaggctgatgatttcgaaatttaaataagcttgcggccgctagggataacagggtaattatcacgcccaaacatttacagccgcggtgtcaaaaaccgcgtgg

SEQ ID NO: 37 - protein, 619 aa, synthetic construct
  REGION 1..619: note = Description of Artificial Sequence: Synthetic polypeptide
MQIFVKTLTGKTITLEVEPSDTIENVKAKIQDKEGIPPDQQRLIFAGKQLEDGRTLSDYNIQKESTLHLVLRLRGAMFQALSEGCTPYDINQMLNVLGDHQFKHIKAFDRTFANNPGPMVVFATPGPILSPLTKGILGFVFTLTVPSERGLSCISEADATTPESANLGEEILSQLYLWPRVTYHSPSYAYHQFERRAKYKRHFPGFGQSLLFGYPVYVFGDCVQGDWDAIRFRYCAPPGYALLRCNDTNYSALLAVGALEGPRNQDWLGVPRQLVTRMQAIQNAGLCTLVAMLEETIFWLQAFLMALTDSGPKTNIIVDSQYVMGISKPSFQEFVDWENVSPELNSTDQPFWQAGILARNLVPMVATVQGQNLKYQGQSLVISASIIVFNLLELEGDYRDDGNVWVHTPLSPRTLNAWVKAVEEKKGIPVHLELASMTNMELMSSIVHQQVRTYGPVFMCLGGLLTMVAGAVWLTVRVLELFRAAQLANDVVLQIMELCGAAFRQVCHTTVPWPNASLTPKWNNETTQPQIANCSVYDFFVWLHYYSVRDTLWPRVTYHMNKYAYHMLERRAKYKRGPGPGAKFVAAWTLKAAAGPGPGQYIKANSKFIGITELGPGPG

SEQ ID NO: 38 - DNA, 228 bp, synthetic construct
  misc_feature 1..228: note = Description of Artificial Sequence: Synthetic polynucleotide
  source 1..228: mol_type = other DNA
atgcagatcttcgtgaagaccctgaccggcaagaccatcaccctagaggtggagcccagtgacaccatcgagaacgtgaaggccaagatccaggataaagagggcatcccccctgaccagcagaggctgatctttgccggcaagcagctggaagatggccgcaccctctctgattacaacatccagaaggagtcaaccctgcacctggtccttcgcctgagaggtggc

SEQ ID NO: 39 - DNA, 228 bp, synthetic construct
  misc_feature 1..228: note = Description of Artificial Sequence: Synthetic polynucleotide
  source 1..228: mol_type = other DNA
atgcagatcttcgtgaagaccctgaccggcaagaccatcaccctagaggtggagcccagtgacaccatcgagaacgtgaaggccaagatccaggataaagagggcatcccccctgaccagcagaggctgatctttgccggcaagcagctggaagatggccgcaccctctctgattacaacatccagaaggagtcaaccctgcacctggtccttcgcctgagaggtgcc

SEQ ID NO: 40 - DNA, 78 bp, Homo sapiens
  source 1..78: mol_type = genomic DNA
atggccgtcatggcgccccgaaccctcgtcctgctactctcgggggctctggccctgacccagacctgggcgggctct

SEQ ID NO: 41 - DNA, 201 bp, Homo sapiens
  source 1..201: mol_type = genomic DNA
ccgtcttcccagcccaccatccccatcgtgggcatcattgctggcctggttctctttggagctgtgatcactggagctgtggtcgctgctgtgatgtggaggaggaagagctcagatagaaaaggagggagctactctcaggctgcaagcagtgacagtgcccagggctctgatgtgtctctcacagcttgtaaagtgtga

SEQ ID NO: 42 - DNA, 60 bp, synthetic construct
  misc_feature 1..60: note = Description of Artificial Sequence: Synthetic oligonucleotide
  source 1..60: mol_type = other DNA
atggagaccgatacactgctgctgtgggtgctgctcctgtgggtgccaggaagcacaggc

SEQ ID NO: 43 - DNA, 3178 bp, Homo sapiens
  source 1..3178: mol_type = genomic DNA
ggcaccgattcggggcctgcccggacttcgccgcacgctgcagaacctcgcccagcgcccaccatgccccggcagctcagcgcggcggccgcgctcttcgcgtccctggccgtaattttgcacgatggcagtcaaatgagagcaaaagcatttccagaaaccagagattattctcaacctactgcagcagcaacagtacaggacataaaaaaacctgtccagcaaccagctaagcaagcacctcaccaaactttagcagcaagattcatggatggtcatatcacctttcaaacagcggccacagtaaaaattccaacaactaccccagcaactacaaaaaacactgcaaccaccagcccaattacctacaccctggtcacaacccaggccacacccaacaactcacacacagctcctccagttactgaagttacagtcggccctagcttagccccttattcactgccacccaccatcaccccaccagctcatacagctggaaccagttcatcaaccgtcagccacacaactgggaacaccactcaacccagtaaccagaccacccttccagcaactttatcgatagcactgcacaaaagcacaaccggtcagaagcctgatcaacccacccatgccccaggaacaacggcagctgcccacaataccacccgcacagctgcacctgcctccacggttcctgggcccacccttgcacctcagccatcgtcagtcaagactggaatttatcaggttctaaacggaagcagactctgtataaaagcagagatggggatacagctgattgttcaagacaaggagtcggttttttcacctcggagatacttcaacatcgaccccaacgcaacgcaagcctctgggaactgtggcacccgaaaatccaaccttctgttgaattttcagggcggatttgtgaatctcacatttaccaaggatgaagaatcatattatatcagtgaagtgggagcctatttgaccgtctcagatccagagacagtttaccaaggaatcaaacatgcggtggtgatgttccagacagcagtcgggcattccttcaagtgcgtgagtgaacagagcctccagttgtcagcccacctgcaggtgaaaacaaccgatgtccaacttcaagcctttgattttgaagatgaccactttggaaatgtggatgagtgctcgtctgactacacaattgtgcttcctgtgattggggccatcgtggttggtctctgccttatgggtatgggtgtctataaaatccgcctaaggtgtcaatcatctggataccagagaatctaattgttgcccggggggaatgaaaataatggaatttagagaactctttcatcccttccaggatggatgttgggaaattccctcagagtgtgggtccttcaaacaatgtaaaccaccatcttctattcaaatgaagtgagtcatgtgtgatttaagttcaggcagcacatcaatttctaaatactttttgtttattttatgaaagatatagtgagctgtttattttctagtttcctttagaatattttagccactcaaagtcaacatttgagatatgttgaattaacataatatatgtaaagtagaataagccttcaaattataaaccaagggtcaattgtaactaatactactgtgtgtgcattgaagattttattttacccttgatcttaacaaagcctttgctttgttatcaaatggactttcagtgcttttactatctgtgttttatggtttcatgtaacatacatattcctggtgtagcacttaactccttttccactttaaatttgtttttgttttttgagacggagtttcactcttgtcacccaggctggagtacagtggcacgatctcggcttatggcaacctccgcctcccgggttcaagtgattctcctgcttcagcttcccgagtagctgggattacaggcacacactaccacgcctggctaatttttgtatttttattatagacgggtttcaccatgttggccagactggtcttgaactcttgacctcaggtgatccacccacctcagcctcccaaagtgctgggattacaggcatgagccattgcgcccggccttaaatgttttttttaatcatcaaaaagaacaacatatctcaggttgtctaagtgtttttatgtaaaaccaacaaaaagaacaaatcagcttatattttttatcttgatgactcctgctccagaattgctagactaagaattaggtggctacagatggtagaactaaacaataagcaagagacaataataatggcccttaattattaacaaagtgccagagtctaggctaagcactttatctatatctcatttcattctcacaacttataagtgaatgagtaaactgagacttaagggaactgaatcacttaaatgtcacctggctaactgatggcagagccagagcttgaattcatgttggtctgacatcaaggtctttggtcttctccctacaccaagttacctacaagaacaatgacaccacactctgcctgaaggctcacacctcataccagcatacgctcaccttacagggaaatgggtttatccaggatcatgagacattagggtagatgaaaggagagctttgcagataacaaaatagcctatccttaataaatcctccactctctggaaggagactgaggggctttgtaaaacattagtcagttgctcatttttatgggattgcttagctgggctgtaaagatgaaggcatcaaataaactcaaagtatttttaaatttttttgataatagagaaacttcgctaaccaactgttctttcttgagtgtatagccccatcttgtggtaacttgctgcttctgcacttcatatccatatttcctattgttcactttattctgtagagcagcctgccaagaattttatttctgctgttttttttgctgctaaagaaaggaactaagtcaggatgttaacagaaaagtccacataaccctagaattcttagtcaaggaataattcaagtcagcctagagaccatgttgactttcctcatgtgtttccttatgactcagtaagttggcaaggtcctgactttagtcttaataaaacattgaattgtagtaaaggtttttgcaataaaaacttactttgg

SEQ ID NO: 44 - DNA, 1858 bp, Mus sp.
  source 1..1858: mol_type = genomic DNA
attccggaggtgaaaaacaatggcacaacgtgtataatggccagcttctctgcctcctttctgaccacctacgagactgcgaatggttctcagatcgtgaacatttccctgccagcctctgcagaagtactgaaaaatggcagttcttgtggtaaagaaaatgtttctgaccccagcctcacaattacttttggaagaggatatttactgacactcaacttcacaaaaaatacaacacgttacagtgtccagcatatgtattttacatataacttgtcagatacagaacattttcccaatgccatcagcaaagagatctacaccatggattccacaactgacatcaaggcagacatcaacaaagcataccggtgtgtcagtgatatccgggtctacatgaagaatgtgaccgttgtgctccgggatgccactatccaggcctacctgtcgagtggcaacttcagcaaggaagagacacactgcacacaggatggaccttccccaaccactgggccacccagcccctcaccaccacttgtgcccacaaaccccactgtatccaagtacaatgttactggtaacaacggaacctgcctgctggcctctatggcactgcaactgaatatcacctacctgaaaaaggacaacaagacggtgaccagagcgttcaacatcagcccaaatgacacatctagtgggagttgcggtatcaacttggtgaccctgaaagtggagaacaagaacagagccctggaattgcagtttgggatgaatgccagctctagcctgtttttcttgcaaggagtgcgcttgaatatgactcttcctgatgccctagtgcccacattcagcatctccaaccattcactgaaagctcttcaggccactgtgggaaactcatacaagtgcaacactgaggaacacatctttgtcagcaagatgctctccctcaatgtcttcagtgtgcaggtccaggctttcaaggtggacagtgacaggtttgggtctgtggaagagtgtgttcaggatggtaacaacatgttgatccccattgctgtgggcggtgccctggcagggctgatcctcatcgtcctcattgcctacctcattggcaggaagaggagtcacgccggctatcagaccatctagcctggtgggcaggtgcaccagagatgcacaggggcctgttctcacatccccaagcttagataggtgtggaagggaggcacactttctggcaaactgttttaaaatctgctttatcaaatgtgaagttcatcttgcaacatttactatgcacaaaggaataactattgaaatgacggtgttaattttgctaactgggttaaatattgatgagaaggctccactgatttgacttttaagacttggtgtttggttcttcattcttttactcagatttaagcctatcaaagggatactctggtccagaccttggcctggcaagggtggctgatggttaggctgcacacacttaagaagcaacgggagcagggaaggcttgcacacaggcacgcacagggtcaacctctggacacttggcttgggctacctggccttgggggggctgaactctggcatctggctgggtacacacccccccaatttctgtgctctgccacccgtgagctgccactttcctaaatagaaaatggcattatttttatttacttttttgtaaagtgatttccagtcttgtgttggcgttcagggtggccctgtctctgcactgtgtacaataatagattcacactgctgacgtgtcttgcagcgtaggtgggttgtacactgggcatcagctcacgtaatgcattgcctgtaacgatgctaataaaaa

SEQ ID NO: 45 - DNA, 2339 bp, Homo sapiens
  source 1..2339: mol_type = genomic DNA
ggcccaaccgccgcccgcgcccccgctctccgcaccgtacccggccgcctcgcgccatggcggcccccggcagcgcccggcgacccctgctgctgctactgctgttgctgctgctcggcctcatgcattgtgcgtcagcagcaatgtttatggtgaaaaatggcaacgggaccgcgtgcataatggccaacttctctgctgccttctcagtgaactacgacaccaagagtggccctaagaacatgacctttgacctgccatcagatgccacagtggtgctcaaccgcagctcctgtggaaaagagaacacttctgaccccagtctcgtgattgcttttggaagaggacatacactcactctcaatttcacgagaaatgcaacacgttacagcgtccagctcatgagttttgtttataacttgtcagacacacaccttttccccaatgcgagctccaaagaaatcaagactgtggaatctataactgacatcagggcagatatagataaaaaatacagatgtgttagtggcacccaggtccacatgaacaacgtgaccgtaacgctccatgatgccaccatccaggcgtacctttccaacagcagcttcagcaggggagagacacgctgtgaacaagacaggccttccccaaccacagcgccccctgcgccacccagcccctcgccctcacccgtgcccaagagcccctctgtggacaagtacaacgtgagcggcaccaacgggacctgcctgctggccagcatggggctgcagctgaacctcacctatgagaggaaggacaacacgacggtgacaaggcttctcaacatcaaccccaacaagacctcggccagcgggagctgcggcgcccacctggtgactctggagctgcacagcgagggcaccaccgtcctgctcttccagttcgggatgaatgcaagttctagccggtttttcctacaaggaatccagttgaatacaattcttcctgacgccagagaccctgcctttaaagctgccaacggctccctgcgagcgctgcaggccacagtcggcaattcctacaagtgcaacgcggaggagcacgtccgtgtcacgaaggcgttttcagtcaatatattcaaagtgtgggtccaggctttcaaggtggaaggtggccagtttggctctgtggaggagtgtctgctggacgagaacagcatgctgatccccatcgctgtgggtggtgccctggcggggctggtcctcatcgtcctcatcgcctacctcgtcggcaggaagaggagtcacgcaggctaccagactatctagcctggtgcacgcaggcacagcagctgcaggggcctctgttcctttctctgggcttagggtcctgtcgaaggggaggcacactttctggcaaacgtttctcaaatctgcttcatccaatgtgaagttcatcttgcagcatttactatgcacaacagagtaactatcgaaatgacggtgttaattttgctaactgggttaaatattttgctaactggttaaacattaatatttaccaaagtaggattttgagggtgggggtgctctctctgagggggtgggggtgccgctgtctctgaggggtgggggtgccgctgtctctgaggggtgggggtgccgctctctctgagggggtgggggtgccgctttctctgagggggtgggggtgccgctctctctgagggggtgggggtgctgctctctccgaggggtggaatgccgctgtctctgaggggtgggggtgccgctctaaattggctccatatcatttgagtttagggttctggtgtttggtttcttcattctttactgcactcagatttaagccttacaaagggaaagcctctggccgtcacacgtaggacgcatgaaggtcactcgtggtgaggctgacatgctcacacattacaacagtagagagggaaaatcctaagacagaggaactccagagatgagtgtctggagcgcttcagttcagctttaaaggccaggacgggccacacgtggctggcggcctcgttccagtggcggcacgtccttgggcgtctctaatgtctgcagctcaagggctggcacttttttaaatataaaaatgggtgttatttttatttttttttgtaaagtgatttttggtcttctgttgacattcggggtgatcctgttctgcgctgtgtacaatgtgagatcggtgcgttctcctgatgttttgccgtggcttggggattgtacacgggaccagctcacgtaatgcattgcctgtaacaatgtaataaaaagcctctttcttttaaaaaaaaaaaaaaaaaaaaaaaa

SEQ ID NO: 46 - DNA, 45 bp, synthetic construct
  misc_feature 1..45: note = Description of Artificial Sequence: Synthetic oligonucleotide
  source 1..45: mol_type = other DNA
cagtacatcaaggccaacagcaagttcatcggcatcaccgaactc

SEQ ID NO: 47 - protein, 15 aa, synthetic construct
  REGION 1..15: note = Description of Artificial Sequence: Synthetic peptide
QYIKANSKFIGITEL

SEQ ID NO: 48 - DNA, 39 bp, synthetic construct
  misc_feature 1..39: note = Description of Artificial Sequence: Synthetic oligonucleotide
  source 1..39: mol_type = other DNA
gctaaatttgtggctgcctggacactgaaagccgccgct

SEQ ID NO: 49 - protein, 13 aa, synthetic construct
  REGION 1..13: note = Description of Artificial Sequence: Synthetic peptide
AKFVAAWTLKAAA

SEQ ID NO: 50 - DNA, 593 bp, Woodchuck hepatitis virus
  source 1..593: mol_type = genomic DNA
aatcaacctctggattacaaaatttgtgaaagattgactggtattcttaactatgttgctccttttacgctatgtggatacgctgctttaatgcctttgtatcatgctattgcttcccgtatggctttcattttctcctccttgtataaatcctggttgctgtctctttatgaggagttgtggcccgttgtcaggcaacgtggcgtggtgtgcactgtgtttgctgacgcaacccccactggttggggcattgccaccacctgtcagctcctttccgggactttcgctttccccctccctattgccacggcggaactcatcgccgcctgccttgcccgctgctggacaggggctcggctgttgggcactgacaattccgtggtgttgtcggggaagctgacgtcctttccatggctgctcgcctgtgttgccacctggattctgcgcgggacgtccttctgctacgtcccttcggccctcaatccagcggaccttccttcccgcggcctgctgccggctctgcggcctcttccgcgtcttcgccttcgccctcagacgagtcggatctccctttgggccgcctccccgcctgt

SEQ ID NO: 51 - DNA, 589 bp, synthetic construct
  misc_feature 1..589: note = Description of Artificial Sequence: Synthetic polynucleotide
  source 1..589: mol_type = other DNA
tctcccccccccccctctccctcccccccccctaacgttactggccgaagccgcttggaataaggccggtgtgcgtttgtctatatgttattttccaccatattgccgtcttttggcaatgtgagggcccggaaacctggccctgtcttcttgacgagcattcctaggggtctttcccctctcgccaaaggaatgcaaggtctgttgaatgtcgtgaaggaagcagttcctctggaagcttcttgaagacaaacaacgtctgtagcgaccctttgcaggcagcggaaccccccacctggcgacaggtgcctctgcggccaaaagccacgtgtataagatacacctgcaaaggcggcacaaccccagtgccacgttgtgagttggatagttgtggaaagagtcaaatggctctcctcaagcgtattcaacaaggggctgaaggatgcccagaaggtaccccattgtatgggatctgatctggggcctcggtgcacatgctttacatgtgtttagtcgaggttaaaaaaacgtctaggccccccgaaccacggggacgtggttttcctttgaaaaacacgatgataatatg

SEQ ID NO: 52 - DNA, 720 bp, synthetic construct
  misc_feature 1..720: note = Description of Artificial Sequence: Synthetic polynucleotide
  source 1..720: mol_type = other DNA
atggtgagcaagggcgaggagctgttcaccggggtggtgcccatcctggtcgagctggacggcgacgtaaacggccacaagttcagcgtgtccggcgagggcgagggcgatgccacctacggcaagctgaccctgaagttcatctgcaccaccggcaagctgcccgtgccctggcccaccctcgtgaccaccctgacctacggcgtgcagtgcttcagccgctaccccgaccacatgaagcagcacgacttcttcaagtccgccatgcccgaaggctacgtccaggagcgcaccatcttcttcaaggacgacggcaactacaagacccgcgccgaggtgaagttcgagggcgacaccctggtgaaccgcatcgagctgaagggcatcgacttcaaggaggacggcaacatcctggggcacaagctggagtacaactacaacagccacaacgtctatatcatggccgacaagcagaagaacggcatcaaggtgaacttcaagatccgccacaacatcgaggacggcagcgtgcagctcgccgaccactaccagcagaacacccccatcggcgacggccccgtgctgctgcccgacaaccactacctgagcacccagtccgccctgagcaaagaccccaacgagaagcgcgatcacatggtcctgctggagttcgtgaccgccgccgggatcactctcggcatggacgagctgtacaagtag

SEQ ID NO: 53 - DNA, 1563 bp, synthetic construct
  misc_feature 1..1563: note = Description of Artificial Sequence: Synthetic polynucleotide
  source 1..1563: mol_type = other DNA
atgctgctgctgctgctgctgctgggcctgaggctacagctctccctgggcatcatcccagttgaggaggagaacccggacttctggaaccgcgaggcagccgaggccctgggtgccgccaagaagctgcagcctgcacagacagccgccaagaacctcatcatcttcctgggcgatgggatgggggtgtctacggtgacagctgccaggatcctaaaagggcagaagaaggacaaactggggcctgagatacccctggccatggaccgcttcccatatgtggctctgtccaagacatacaatgtagacaaacatgtgccagacagtggagccacagccacggcctacctgtgcggggtcaagggcaacttccagaccattggcttgagtgcagccgcccgctttaaccagtgcaacacgacacgcggcaacgaggtcatctccgtgatgaatcgggccaagaaagcagggaagtcagtgggagtggtaaccaccacacgagtgcagcacgcctcgccagccggcacctacgcccacacggtgaaccgcaactggtactcggacgccgacgtgcctgcctcggcccgccaggaggggtgccaggacatcgctacgcagctcatctccaacatggacattgacgtgatcctaggtggaggccgaaagtacatgtttcgcatgggaaccccagaccctgagtacccagatgactacagccaaggtgggaccaggctggacgggaagaatctggtgcaggaatggctggcgaagcgccagggtgcccggtatgtgtggaaccgcactgagctcatgcaggcttccctggacccgtctgtgacccatctcatgggtctctttgagcctggagacatgaaatacgagatccaccgagactccacactggacccctccctgatggagatgacagaggctgccctgcgcctgctgagcaggaacccccgcggcttcttcctcttcgtggagggtggtcgcatcgaccatggtcatcatgaaagcagggcttaccgggcactgactgagacgatcatgttcgacgacgccattgagagggcgggccagctcaccagcgaggaggacacgctgagcctcgtcactgccgaccactcccacgtcttctccttcggaggctaccccctgcgagggagctccatcttcgggctggcccctggcaaggcccgggacaggaaggcctacacggtcctcctatacggaaacggtccaggctatgtgctcaaggacggcgcccggccggatgttaccgagagcgagagcgggagccccgagtatcggcagcagtcagcagtgcccctggacgaagagacccacgcaggcgaggacgtggcggtgttcgcgcgcggcccgcaggcgcacctggttcacggcgtgcaggagcagaccttcatagcgcacgtcatggccttcgccgcctgcctggagccctacaccgcctgcgacctggcgccccccgccggcaccaccgacgccgcgcacccgggttactctagagtcggggcggccggccgcttcgagcagacatgataa

SEQ ID NO: 54 - DNA, 1653 bp, synthetic construct
  misc_feature 1..1653: note = Description of Artificial Sequence: Synthetic polynucleotide
  source 1..1653: mol_type = other DNA
atggaagatgccaaaaacattaagaagggcccagcgccattctacccactcgaagacgggaccgccggcgagcagctgcacaaagccatgaagcgctacgccctggtgcccggcaccatcgcctttaccgacgcacatatcgaggtggacattacctacgccgagtacttcgagatgagcgttcggctggcagaagctatgaagcgctatgggctgaatacaaaccatcggatcgtggtgtgcagcgagaatagcttgcagttcttcatgcccgtgttgggtgccctgttcatcggtgtggctgtggccccagctaacgacatctacaacgagcgcgagctgctgaacagcatgggcatcagccagcccaccgtcgtattcgtgagcaagaaagggctgcaaaagatcctcaacgtgcaaaagaagctaccgatcatacaaaagatcatcatcatggatagcaagaccgactaccagggcttccaaagcatgtacaccttcgtgacttcccatttgccacccggcttcaacgagtacgacttcgtgcccgagagcttcgaccgggacaaaaccatcgccctgatcatgaacagtagtggcagtaccggattgcccaagggcgtagccctaccgcaccgcaccgcttgtgtccgattcagtcatgcccgcgaccccatcttcggcaaccagatcatccccgacaccgctatcctcagcgtggtgccatttcaccacggcttcggcatgttcaccacgctgggctacttgatctgcggctttcgggtcgtgctcatgtaccgcttcgaggaggagctattcttgcgcagcttgcaagactataagattcaatctgccctgctggtgcccacactatttagcttcttcgctaagagcactctcatcgacaagtacgacctaagcaacttgcacgagatcgccagcggcggggcgccgctcagcaaggaggtaggtgaggccgtggccaaacgcttccacctaccaggcatccgccagggctacggcctgacagaaacaaccagcgccattctgatcacccccgaaggggacgacaagcctggcgcagtaggcaaggtggtgcccttcttcgaggctaaggtggtggacttggacaccggtaagacactgggtgtgaaccagcgcggcgagctgtgcgtccgtggccccatgatcatgagcggctacgttaacaaccccgaggctacaaacgctctcatcgacaaggacggctggctgcacagcggcgacatcgcctactgggacgaggacgagcacttcttcatcgtggaccggctgaagagcctgatcaaatacaagggctaccaggtagccccagccgaactggagagcatcctgctgcaacaccccaacatcttcgacgccggggtcgccggcctgcccgacgacgatgccggcgagctgcccgccgcagtcgtcgtgctggaacacggtaaaaccatgaccgagaaggagatcgtggactatgtggccagccaggttacaaccgccaagaagctgcgcggtggtgttgtgttcgtggacgaggtgcctaaaggactgaccggcaagttggacgcccgcaagatccgcgagattctcattaaggccaagaagggcggcaagatcgccgtgtaa

SEQ ID NO: 55 - DNA, 66 bp, Foot-and-mouth disease virus
  source 1..66: mol_type = genomic DNA
gtaaagcaaacactgaactttgaccttctcaagttggctggagacgttgagtccaatcctgggccc

SEQ ID NO: 56 - protein, 5 aa, synthetic construct
  REGION 1..5: note = Description of Artificial Sequence: Synthetic peptide
GPGPG

SEQ ID NO: 57 - protein, 5 aa, synthetic construct
  REGION 1..5: note = Description of Artificial Sequence: Synthetic peptide
GPGPG

SEQ ID NO: 58 - protein, 5 aa, synthetic construct
  REGION 1..5: note = Description of Artificial Sequence: Synthetic peptide
GPGPG

SEQ ID NO: 59 - protein, 5 aa, synthetic construct
  REGION 1..5: note = Description of Artificial Sequence: Synthetic peptide
GPGPG

SEQ ID NO: 60 - protein, 5 aa, synthetic construct
  REGION 1..5: note = Description of Artificial Sequence: Synthetic peptide
GPGPG

SEQ ID NO: 61 - protein, 5 aa, synthetic construct
  REGION 1..5: note = Description of Artificial Sequence: Synthetic peptide
GPGPG

SEQ ID NO: 62 - protein, 5 aa, synthetic construct
  REGION 1..5: note = Description of Artificial Sequence: Synthetic peptide
GPGPG

SEQ ID NO: 63 - protein, 5 aa, synthetic construct
  REGION 1..5: note = Description of Artificial Sequence: Synthetic peptide
GPGPG

SEQ ID NO: 64 - protein, 5 aa, synthetic construct
  REGION 1..5: note = Description of Artificial Sequence: Synthetic peptide
GPGPG

SEQ ID NO: 65 - protein, 5 aa, synthetic construct
  REGION 1..5: note = Description of Artificial Sequence: Synthetic peptide
GPGPG

SEQ ID NO: 66 - protein, 5 aa, synthetic construct
  REGION 1..5: note = Description of Artificial Sequence: Synthetic peptide
GPGPG

SEQ ID NO: 67 - protein, 5 aa, synthetic construct
  REGION 1..5: note = Description of Artificial Sequence: Synthetic peptide
GPGPG

SEQ ID NO: 68 - protein, 5 aa, synthetic construct
  REGION 1..5: note = Description of Artificial Sequence: Synthetic peptide
GPGPG

SEQ ID NO: 69 - protein, 5 aa, synthetic construct
  REGION 1..5: note = Description of Artificial Sequence: Synthetic peptide
GPGPG

SEQ ID NO: 70 - protein, 5 aa, synthetic construct
  REGION 1..5: note = Description of Artificial Sequence: Synthetic peptide
GPGPG

SEQ ID NO: 71 - protein, 5 aa, synthetic construct
  REGION 1..5: note = Description of Artificial Sequence: Synthetic peptide
GPGPG

SEQ ID NO: 72 - protein, 5 aa, synthetic construct
  REGION 1..5: note = Description of Artificial Sequence: Synthetic peptide
GPGPG

SEQ ID NO: 73 - protein, 5 aa, synthetic construct
  REGION 1..5: note = Description of Artificial Sequence: Synthetic peptide
GPGPG

SEQ ID NO: 74 - RNA, 100 nt, synthetic construct
  misc_feature 1..100: note = Description of Artificial Sequence: Synthetic polynucleotide
  source 1..100: mol_type = other RNA
aaaaaaaaaaaaaaaaaaaaaaaaaaaaaaaaaaaaaaaaaaaaaaaaaaaaaaaaaaaaaaaaaaaaaaaaaaaaaaaaaaaaaaaaaaaaaaaaaaaa

SEQ ID NO: 75 - protein, 10 aa, synthetic construct
  REGION 1..10: note = Description of Artificial Sequence: Synthetic peptide
  SITE 1..10: note = This sequence may encompass 2-10 residues
GGGGGGGGGG

SEQ ID NO: 76 - protein, 10 aa, synthetic construct
  REGION 1..10: note = Description of Artificial Sequence: Synthetic peptide
  SITE 1..10: note = This sequence may encompass 2-10 residues
AAAAAAAAAA

SEQ ID NO: 77 - protein, 5 aa, synthetic construct
  REGION 1..5: note = Description of Artificial Sequence: Synthetic peptide
GPGPG

SEQ ID NO: 78 - RNA, 90 nt, synthetic construct
  misc_feature 1..90: note = Description of Artificial Sequence: Synthetic oligonucleotide
  misc_feature 1..90: note = This sequence may encompass 20-90 nucleotides
  source 1..90: mol_type = other RNA
aaaaaaaaaaaaaaaaaaaaaaaaaaaaaaaaaaaaaaaaaaaaaaaaaaaaaaaaaaaaaaaaaaaaaaaaaaaaaaaaaaaaaaaaaa

SEQ ID NO: 79 - RNA, 100 nt, synthetic construct; identical to SEQ ID NO: 74
  misc_feature 1..100: note = Description of Artificial Sequence: Synthetic polynucleotide
  source 1..100: mol_type = other RNA

SEQ ID NO: 80 - protein, 8 aa, synthetic construct
  REGION 1..8: note = Description of Artificial Sequence: Synthetic peptide
SIINFEKL

SEQ ID NO: 81 - protein, 9 aa, synthetic construct
  REGION 1..9: note = Description of Artificial Sequence: Synthetic peptide
SPSYAYHQF

SEQ ID NO: 82 - protein, 8 aa, synthetic construct
  REGION 1..8: note = Description of Artificial Sequence: Synthetic peptide
SIINFEKL

SEQ ID NO: 83 - protein, 8 aa, synthetic construct
  REGION 1..8: note = Description of Artificial Sequence: Synthetic peptide
SIINFEKL

SEQ ID NO: 84 - protein, 8 aa, synthetic construct
  REGION 1..8: note = Description of Artificial Sequence: Synthetic peptide
SIINFEKL

SEQ ID NO: 85 - protein, 8 aa, synthetic construct
  REGION 1..8: note = Description of Artificial Sequence: Synthetic peptide
SIINFEKL

SEQ ID NO: 86 - protein, 8 aa, synthetic construct
  REGION 1..8: note = Description of Artificial Sequence: Synthetic peptide
SIINFEKL

SEQ ID NO: 87 - protein, 8 aa, synthetic construct
  REGION 1..8: note = Description of Artificial Sequence: Synthetic peptide
SIINFEKL

SEQ ID NO: 88 - protein, 10 aa, synthetic construct
  REGION 1..10: note = Description of Artificial Sequence: Synthetic peptide
DTIAIAVAGW

SEQ ID NO: 89 - protein, 10 aa, synthetic construct
  REGION 1..10: note = Description of Artificial Sequence: Synthetic peptide
DTIAVAVAEW

SEQ ID NO: 90 - protein, 9 aa, synthetic construct
  REGION 1..9: note = Description of Artificial Sequence: Synthetic peptide
AEVVQKVTM

SEQ ID NO: 91 - protein, 9 aa, synthetic construct
  REGION 1..9: note = Description of Artificial Sequence: Synthetic peptide
AEVVQKVVM

SEQ ID NO: 92 - protein, 9 aa, synthetic construct
  REGION 1..9: note = Description of Artificial Sequence: Synthetic peptide
TESNDTITL

SEQ ID NO: 93 - protein, 9 aa, synthetic construct
  REGION 1..9: note = Description of Artificial Sequence: Synthetic peptide
AEDPEREVL

SEQ ID NO: 94 - protein, 10 aa, synthetic construct
  REGION 1..10: note = Description of Artificial Sequence: Synthetic peptide
YVYVADVAAK

SEQ ID NO: 95 - protein, 9 aa, synthetic construct
  REGION 1..9: note = Description of Artificial Sequence: Synthetic peptide
NLVPMVATV

SEQ ID NO: 96 - protein, 9 aa, synthetic construct
  REGION 1..9: note = Description of Artificial Sequence: Synthetic peptide
CLGGLLTMV

SEQ ID NO: 97 - protein, 9 aa, synthetic construct
  REGION 1..9: note = Description of Artificial Sequence: Synthetic peptide
GILGFVFTL

SEQ ID NO: 98 - protein, 9 aa, synthetic construct
  REGION 1..9: note = Description of Artificial Sequence: Synthetic peptide
LLFGYPVYV

SEQ ID NO: 99 - protein, 9 aa, synthetic construct
  REGION 1..9: note = Description of Artificial Sequence: Synthetic peptide
NLVPMVATV

SEQ ID NO: 100 - protein, 9 aa, synthetic construct
  REGION 1..9: note = Description of Artificial Sequence: Synthetic peptide
CLGGLLTMV

SEQ ID NO: 101 - protein, 9 aa, synthetic construct
  REGION 1..9: note = Description of Artificial Sequence: Synthetic peptide
GLCTLVAML

SEQ ID NO: 102 - protein, 9 aa, synthetic construct
  REGION 1..9: note = Description of Artificial Sequence: Synthetic peptide
LLFGYPVYV

SEQ ID NO: 103 - protein, 9 aa, synthetic construct
  REGION 1..9: note = Description of Artificial Sequence: Synthetic peptide
GILGFVFTL

SEQ ID NO: 104 - protein, 9 aa, synthetic construct
  REGION 1..9: note = Description of Artificial Sequence: Synthetic peptide
WLSLLVPFV

SEQ ID NO: 105 - protein, 8 aa, synthetic construct
  REGION 1..8: note = Description of Artificial Sequence: Synthetic peptide
FLLTRICT

SEQ ID NO: 106 - protein, 9 aa, synthetic construct
  REGION 1..9: note = Description of Artificial Sequence: Synthetic peptide
NLVPMVATV

SEQ ID NO: 107 - protein, 8 aa, synthetic construct
  REGION 1..8: note = Description of Artificial Sequence: Synthetic peptide
WQAGILAR

SEQ ID NO: 108 - protein, 8 aa, synthetic construct
  REGION 1..8: note = Description of Artificial Sequence: Synthetic peptide
QGQNLKYQ

SEQ ID NO: 109 - protein, 25 aa, synthetic construct
  REGION 1..25: note = Description of Artificial Sequence: Synthetic peptide
WQAGILARNLVPMVATVQGQNLKYQ

SEQ ID NO: 110 - protein, 5 aa, synthetic construct
  REGION 1..5: note = Description of Artificial Sequence: Synthetic peptide
GPGPG

SEQ ID NO: 111 - protein, 5 aa, synthetic construct
  REGION 1..5: note = Description of Artificial Sequence: Synthetic peptide
GPGPG

SEQ ID NO: 112 - protein, 8 aa, synthetic construct
  REGION 1..8: note = Description of Artificial Sequence: Synthetic peptide
SINNFEKL

SEQ ID NO: 113 - protein, 8 aa, synthetic construct
  REGION 1..8: note = Description of Artificial Sequence: Synthetic peptide
SIINFEKL

SEQ ID NO: 114 - protein, 8 aa, synthetic construct
  REGION 1..8: note = Description of Artificial Sequence: Synthetic peptide
SIINFEKL

SEQ ID NO: 115 - protein, 8 aa, synthetic construct
  REGION 1..8: note = Description of Artificial Sequence: Synthetic peptide
SIINFEKL

SEQ ID NO: 116 - protein, 8 aa, synthetic construct
  REGION 1..8: note = Description of Artificial Sequence: Synthetic peptide
SIINFEKL

SEQ ID NO: 117 - protein, 8 aa, synthetic construct
  REGION 1..8: note = Description of Artificial Sequence: Synthetic peptide
SIINFEKL

SEQ ID NO: 118 - protein, 8 aa, synthetic construct
  REGION 1..8: note = Description of Artificial Sequence: Synthetic peptide
SIINFEKL

SEQ ID NO: 119 - protein, 8 aa, synthetic construct
  REGION 1..8: note = Description of Artificial Sequence: Synthetic peptide
SIINFEKL

SEQ ID NO: 120 - protein, 8 aa, synthetic construct
  REGION 1..8: note = Description of Artificial Sequence: Synthetic peptide
SIINFEKL

SEQ ID NO: 121 - protein, 8 aa, synthetic construct
  REGION 1..8: note = Description of Artificial Sequence: Synthetic peptide
SIINFEKL

SEQ ID NO: 122 - protein, 8 aa, synthetic construct
  REGION 1..8: note = Description of Artificial Sequence: Synthetic peptide
SIINFEKL

SEQ ID NO: 123 - protein, 8 aa, synthetic construct
  REGION 1..8: note = Description of Artificial Sequence: Synthetic peptide
SIINFEKL

SEQ ID NO: 124 - protein, 8 aa, synthetic construct
  REGION 1..8: note = Description of Artificial Sequence: Synthetic peptide
SIINFEKL

SEQ ID NO: 125 - protein, 8 aa, synthetic construct
  REGION 1..8: note = Description of Artificial Sequence: Synthetic peptide
SIINFEKL

SEQ ID NO: 126 - protein, 8 aa, synthetic construct
  REGION 1..8: note = Description of Artificial Sequence: Synthetic peptide
SIINFEKL

SEQ ID NO: 127 - protein, 8 aa, synthetic construct
  REGION 1..8: note = Description of Artificial Sequence: Synthetic peptide
SIINFEKL

SEQ ID NO: 128 - protein, 8 aa, synthetic construct
  REGION 1..8: note = Description of Artificial Sequence: Synthetic peptide
SIINFEKL

SEQ ID NO: 129 - DNA, 20 bp, synthetic construct
  misc_feature 1..20: note = Description of Artificial Sequence: Synthetic primer
  source 1..20: mol_type = other DNA
gtggtgtgcagcgagaatag

SEQ ID NO: 130 - DNA, 22 bp, synthetic construct
  misc_feature 1..22: note = Description of Artificial Sequence: Synthetic primer
  source 1..22: mol_type = other DNA
cgctcgttgtagatgtcgttag

SEQ ID NO: 131 - DNA, 15 bp, synthetic construct
  misc_feature 1..15: note = Description of Artificial Sequence: Synthetic probe
  source 1..15: mol_type = other DNA
ttcatgcccgtgttg

SEQ ID NO: 132 - DNA, 22 bp, synthetic construct
  misc_feature 1..22: note = Description of Artificial Sequence: Synthetic primer
  source 1..22: mol_type = other DNA
gtttttgatccagacccagatg

SEQ ID NO: 133 - DNA, 21 bp, synthetic construct
  misc_feature 1..21: note = Description of Artificial Sequence: Synthetic primer
  source 1..21: mol_type = other DNA
gcccattattcagagcgagta

SEQ ID NO: 134 - DNA, 14 bp, synthetic construct
  misc_feature 1..14: note = Description of Artificial Sequence: Synthetic probe
  source 1..14: mol_type = other DNA
tcaccaggatccac

SEQ ID NO: 135 - DNA, 17 bp, synthetic construct
  misc_feature 1..17: note = Description of Artificial Sequence: Synthetic primer
  source 1..17: mol_type = other DNA
ccttgcacatgccggag

SEQ ID NO: 136 - DNA, 17 bp, synthetic construct
  misc_feature 1..17: note = Description of Artificial Sequence: Synthetic primer
  source 1..17: mol_type = other DNA
acagagcctcgcctttg

SEQ ID NO: 137 - DNA, 12 bp, synthetic construct
  misc_feature 1..12: note = Description of Artificial Sequence: Synthetic probe
  source 1..12: mol_type = other DNA
gtgagctggcgg

SEQ ID NO: 138 - DNA, 22 bp, synthetic construct
  misc_feature 1..22: note = Description of Artificial Sequence: Synthetic primer
  source 1..22: mol_type = other DNA
ctgaaagctcggtttgctaatg

SEQ ID NO: 139 - DNA, 21 bp, synthetic construct
  misc_feature 1..21: note = Description of Artificial Sequence: Synthetic primer
  source 1..21: mol_type = other DNA
ccatgctggaagagacaatct

SEQ ID NO: 140 - DNA, 15 bp, synthetic construct
  misc_feature 1..15: note = Description of Artificial Sequence: Synthetic probe
  source 1..15: mol_type = other DNA
tggcgctgaccgata

SEQ ID NO: 141 - DNA, 22 bp, synthetic construct
  misc_feature 1..22: note = Description of Artificial Sequence: Synthetic primer
  source 1..22: mol_type = other DNA
tatgcctatcctgtctcctctg

SEQ ID NO: 142 - DNA, 22 bp, synthetic construct
  misc_feature 1..22: note = Description of Artificial Sequence: Synthetic primer
  source 1..22: mol_type = other DNA
gctaatgcagctaagtcctctc

SEQ ID NO: 143 - DNA, 15 bp, synthetic construct
  misc_feature 1..15: note = Description of Artificial Sequence: Synthetic probe
  source 1..15: mol_type = other DNA
tgaccgtgccttctg

SEQ ID NO: 144 - protein, 8 aa, synthetic construct
  REGION 1..8: note = Description of Artificial Sequence: Synthetic peptide
SIINFEKL

SEQ ID NO: 145 - protein, 8 aa, synthetic construct
  REGION 1..8: note = Description of Artificial Sequence: Synthetic peptide
SIINFEKL

SEQ ID NO: 146 - protein, 9 aa, synthetic construct
  REGION 1..9: note = Description of Artificial Sequence: Synthetic peptide
SPSYAYHQF

SEQ ID NO: 147 - protein, 9 aa, synthetic construct
  REGION 1..9: note = Description of Artificial Sequence: Synthetic peptide
SPSYVYHQF

SEQ ID NO: 148 - protein, 9 aa, synthetic construct
  REGION 1..9: note = Description of Artificial Sequence: Synthetic peptide
AEVVQKVTM

SEQ ID NO: 149 - protein, 9 aa, synthetic construct
  REGION 1..9: note = Description of Artificial Sequence: Synthetic peptide
AEVVQKVVM

SEQ ID NO: 150 - protein, 8 aa, synthetic construct
  REGION 1..8: note = Description of Artificial Sequence: Synthetic peptide
SIINFEKL

SEQ ID NO: 151 - protein, 5 aa, synthetic construct
  REGION 1..5: note = Description of Artificial Sequence: Synthetic peptide
GPGPG

SEQ ID NO: 152 - protein, 5 aa, synthetic construct
  REGION 1..5: note = Description of Artificial Sequence: Synthetic peptide
GPGPG

SEQ ID NO: 153 - protein, 5 aa, synthetic construct
  REGION 1..5: note = Description of Artificial Sequence: Synthetic peptide
GPGPG

SEQ ID NO: 154 - protein, 5 aa, synthetic construct
  REGION 1..5: note = Description of Artificial Sequence: Synthetic peptide
GPGPG

SEQ ID NO: 155 - protein, 5 aa, synthetic construct
  REGION 1..5: note = Description of Artificial Sequence: Synthetic peptide
GPGPG

SEQ ID NO: 156 - protein, 5 aa, synthetic construct
  REGION 1..5: note = Description of Artificial Sequence: Synthetic peptide
GPGPG

SEQ ID NO: 157 - protein, 5 aa, synthetic construct
  REGION 1..5: note = Description of Artificial Sequence: Synthetic peptide
GPGPG

SEQ ID NO: 158 - protein, 5 aa, synthetic construct
  REGION 1..5: note = Description of Artificial Sequence: Synthetic peptide
GPGPG

SEQ ID NO: 159 - protein, 5 aa, synthetic construct
  REGION 1..5: note = Description of Artificial Sequence: Synthetic peptide
GPGPG

SEQ ID NO: 160 - protein, 5 aa, synthetic construct
  REGION 1..5: note = Description of Artificial Sequence: Synthetic peptide
GPGPG

SEQ ID NO: 161 - protein, 5 aa, synthetic construct
  REGION 1..5: note = Description of Artificial Sequence: Synthetic peptide
GPGPG

SEQ ID NO: 162 - protein, 5 aa, synthetic construct
  REGION 1..5: note = Description of Artificial Sequence: Synthetic peptide
GPGPG

SEQ ID NO: 163 - protein, 5 aa, synthetic construct
  REGION 1..5: note = Description of Artificial Sequence: Synthetic peptide
GPGPG

SEQ ID NO: 164 - protein, 5 aa, synthetic construct
  REGION 1..5: note = Description of Artificial Sequence: Synthetic peptide
GPGPG

SEQ ID NO: 165 - protein, 5 aa, synthetic construct
  REGION 1..5: note = Description of Artificial Sequence: Synthetic peptide
GPGPG

SEQ ID NO: 166 - protein, 5 aa, synthetic construct
  REGION 1..5: note = Description of Artificial Sequence: Synthetic peptide
GPGPG

SEQ ID NO: 167 - protein, 5 aa, synthetic construct
  REGION 1..5: note = Description of Artificial Sequence: Synthetic peptide
GPGPG

SEQ ID NO: 168 - RNA, 100 nt, synthetic construct; identical to SEQ ID NO: 74
  misc_feature 1..100: note = Description of Artificial Sequence: Synthetic polynucleotide
  source 1..100: mol_type = other RNA

SEQ ID NO: 169 - protein, 10 aa, synthetic construct
  REGION 1..10: note = Description of Artificial Sequence: Synthetic peptide
  REGION 1..10: note = This sequence may encompass 2-10 residues
GGGGGGGGGG

SEQ ID NO: 170 - protein, 10 aa, synthetic construct
  REGION 1..10: note = Description of Artificial Sequence: Synthetic peptide
  REGION 1..10: note = This sequence may encompass 2-10 residues
AAAAAAAAAA

SEQ ID NO: 171 - protein, 5 aa, synthetic construct
  REGION 1..5: note = Description of Artificial Sequence: Synthetic peptide
GPGPG

SEQ ID NO: 172 - RNA, 90 nt, synthetic construct; identical to SEQ ID NO: 78
  misc_feature 1..90: note = Description of Artificial Sequence: Synthetic oligonucleotide
  misc_feature 1..90: note = This sequence may encompass 20-90 nucleotides
  source 1..90: mol_type = other RNA

SEQ ID NO: 173 - RNA, 100 nt, synthetic construct; identical to SEQ ID NO: 74
  misc_feature 1..100: note = Description of Artificial Sequence: Synthetic polynucleotide
  source 1..100: mol_type = other RNA

SEQ ID NO: 174 - protein, 9 aa, synthetic construct
  REGION 1..9: note = Description of Artificial Sequence: Synthetic peptide
GILGFVFTL

SEQ ID NO: 175 - protein, 9 aa, synthetic construct
  REGION 1..9: note = Description of Artificial Sequence: Synthetic peptide
LLFGYPVYV

SEQ ID NO: 176 - protein, 9 aa, synthetic construct
  REGION 1..9: note = Description of Artificial Sequence: Synthetic peptide
GLCTLVAML

SEQ ID NO: 177 - protein, 9 aa, synthetic construct
  REGION 1..9: note = Description of Artificial Sequence: Synthetic peptide
NLVPMVATV

SEQ ID NO: 178 - protein, 9 aa, synthetic construct
  REGION 1..9: note = Description of Artificial Sequence: Synthetic peptide
CLGGLLTMV

SEQ ID NO: 179 - protein, 9 aa, synthetic construct
  REGION 1..9: note = Description of Artificial Sequence: Synthetic peptide
NTDNNLAVY

SEQ ID NO: 180 - protein, 9 aa, synthetic construct
  REGION 1..9: note = Description of Artificial Sequence: Synthetic peptide
EVDPIGHVY

SEQ ID NO: 181 - protein, 9 aa, synthetic construct
  REGION 1..9: note = Description of Artificial Sequence: Synthetic peptide
LLASSILCA

SEQ ID NO: 182 - protein, 10 aa, synthetic construct
  REGION 1..10: note = Description of Artificial Sequence: Synthetic peptide
AIFPGAVPAA

SEQ ID NO: 183 - protein, 9 aa, synthetic construct
  REGION 1..9: note = Description of Artificial Sequence: Synthetic peptide
VYDLSRDIL

SEQ ID NO: 184 - protein, 10 aa, synthetic construct
  REGION 1..10: note = Description of Artificial Sequence: Synthetic peptide
ASSLPTTMNY

SEQ ID NO: 185 - protein, 13 aa, synthetic construct
  REGION 1..13: note = Description of Artificial Sequence: Synthetic peptide
PKYVKQNTLKLAT

SEQ ID NO: 186 - protein, 14 aa, synthetic construct
  REGION 1..14: note = Description of Artificial Sequence: Synthetic peptide
LPLKMLNIPSINVH

SEQ ID NO: 187 - protein, 15 aa, synthetic construct
  REGION 1..15: note = Description of Artificial Sequence: Synthetic peptide
PEQWMFQGAPPSQGT

SEQ ID NO: 188 - protein, 15 aa, synthetic construct
  REGION 1..15: note = Description of Artificial Sequence: Synthetic peptide
EHPTFTSQYRIQGKL

SEQ ID NO: 189 - protein, 25 aa, synthetic construct
  REGION 1..25: note = Description of Artificial Sequence: Synthetic peptide
PILSPLTKGILGFVFTLTVPSERGL

SEQ ID NO: 190 - protein, 25 aa, synthetic construct
  REGION 1..25: note = Description of Artificial Sequence: Synthetic peptide
HFPGFGQSLLFGYPVYVFGDCVQGD

SEQ ID NO: 191 - protein, 25 aa, synthetic construct
  REGION 1..25: note = Description of Artificial Sequence: Synthetic peptide
RMQAIQNAGLCTLVAMLEETIFWLQ

SEQ ID NO: 192 - protein, 25 aa, synthetic construct
  REGION 1..25: note = Description of Artificial Sequence: Synthetic peptide
WQAGILARNLVPMVATVQGQNLKYQ

SEQ ID NO: 193 - protein, 25 aa, synthetic construct
  REGION 1..25: note = Description of Artificial Sequence: Synthetic peptide
RTYGPVFMCLGGLLTMVAGAVWLTV

SEQ ID NO: 194 - protein, 25 aa, synthetic construct
  REGION 1..25: note = Description of Artificial Sequence: Synthetic peptide
SSSGLINSNTDNNLAVYDLSRDILN

SEQ ID NO: 195 - protein, 25 aa, synthetic construct
  REGION 1..25: note = Description of Artificial Sequence: Synthetic peptide
LVFGIELMEVDPIGHVYIFATCLGL

SEQ ID NO: 196 - protein, 25 aa, synthetic construct
  REGION 1..25: note = Description of Artificial Sequence: Synthetic peptide
MNFYLLLASSILCALIVFWKYRRFQ

SEQ ID NO: 197 - protein, 25 aa, synthetic construct
  REGION 1..25: note = Description of Artificial Sequence: Synthetic peptide
AAAAAAAALFPGAVPAARPPYPGAV

SEQ ID NO: 198 - protein, 25 aa, synthetic construct
  REGION 1..25: note = Description of Artificial Sequence: Synthetic peptide
SNTDNNLAVYDLSRDILNNFPHSIA

SEQ ID NO: 199 - protein, 25 aa, synthetic construct
  REGION 1..25: note = Description of Artificial Sequence: Synthetic peptide
DPPQSPQGASSLPTTMNYPLWSQSY

SEQ ID NO: 200 - protein, 25 aa, synthetic construct
  REGION 1..25: note = Description of Artificial Sequence: Synthetic peptide
ITYGACPKYVKQNTLKLATGMRNVP

SEQ ID NO: 201 - protein, 25 aa, synthetic construct
  REGION 1..25: note = Description of Artificial Sequence: Synthetic peptide
SIYVYALPLKMLNIPSINVHHYPSA

SEQ ID NO: 202 - protein, 25 aa, synthetic construct
  REGION 1..25: note = Description of Artificial Sequence: Synthetic peptide
EGPWVPEQWMFQGAPPSQGTDVVQH

SEQ ID NO: 203 - protein, 25 aa, synthetic construct
  REGION 1..25: note = Description of Artificial Sequence: Synthetic peptide
RGPQYSEHPTFTSQYRIQGKLEYRH

SEQ ID NO: 204 - protein, 9 aa, synthetic construct
  REGION 1..9: note = Description of Artificial Sequence: Synthetic peptide
CTPYDINQM

SEQ ID NO: 205 - protein, 8 aa, synthetic construct
  REGION 1..8: note = Description of Artificial Sequence: Synthetic peptide
TTPESANL

SEQ ID NO: 206 - protein, 9 aa, synthetic construct
  REGION 1..9: note = Description of Artificial Sequence: Synthetic peptide
CAPPGYALL

SEQ ID NO: 207 - protein, 9 aa, synthetic construct
  REGION 1..9: note = Description of Artificial Sequence: Synthetic peptide
SGPKTNIIV

SEQ ID NO: 208 - protein, 9 aa, synthetic construct
  REGION 1..9: note = Description of Artificial Sequence: Synthetic peptide
LSPRTLNAW

SEQ ID NO: 209 - protein, 9 aa, synthetic construct
  REGION 1..9: note = Description of Artificial Sequence: Synthetic peptide
TVPWPNASL

SEQ ID NO: 210 - protein, 15 aa, synthetic construct
  REGION 1..15: note = Description of Artificial Sequence: Synthetic peptide
PNGTHSWEYWGAQLN

SEQ ID NO: 211 - protein, 13 aa, synthetic construct
  REGION 1..13: note = Description of Artificial Sequence: Synthetic peptide
YKYKVVKIEPLGV

SEQ ID NO: 212 - protein, 15 aa, synthetic construct
  REGION 1..15: note = Description of Artificial Sequence: Synthetic peptide
TEEAKQIVQRHLVVE

SEQ ID NO: 213 - protein, 13 aa, synthetic construct
  REGION 1..13: note = Description of Artificial Sequence: Synthetic peptide
AGSLQGQWRGAAG

SEQ ID NO: 214 - protein, 16 aa, synthetic construct
  REGION 1..16: note = Description of Artificial Sequence: Synthetic peptide
EISTNIRQAGVQYSRA

SEQ ID NO: 215 - protein, 9 aa, synthetic construct
  REGION 1..9: note = Description of Artificial Sequence: Synthetic peptide
RPKQAWCWF

SEQ ID NO: 216 - protein, 9 aa, synthetic construct
  REGION 1..9: note = Description of Artificial Sequence: Synthetic peptide
RPKVPLRTM

SEQ ID NO: 217 - protein, 9 aa, synthetic construct
  REGION 1..9: note = Description of Artificial Sequence: Synthetic peptide
GPRKPIKCW

SEQ ID NO: 218 - protein, 9 aa, synthetic construct
  REGION 1..9: note = Description of Artificial Sequence: Synthetic peptide
LNMADKKET

SEQ ID NO: 219 - protein, 25 aa, synthetic construct
  REGION 1..25: note = Description of Artificial Sequence: Synthetic peptide
MFQALSEGCTPYDINQMLNVLGDHQ

SEQ ID NO: 220 - protein, 25 aa, synthetic construct
  REGION 1..25: note = Description of Artificial Sequence: Synthetic peptide
SCISEADATTPESANLGEEILSQLY

SEQ ID NO: 221 - protein, 25 aa, synthetic construct
  REGION 1..25: note = Description of Artificial Sequence: Synthetic peptide
WDAIRFRYCAPPGYALLRCNDTNYS

SEQ ID NO: 222 - protein, 25 aa, synthetic construct
  REGION 1..25: note = Description of Artificial Sequence: Synthetic peptide
AFLMALTDSGPKTNIIVDSQYVMGI

SEQ ID NO: 223 - protein, 25 aa, synthetic construct
  REGION 1..25: note = Description of Artificial Sequence: Synthetic peptide
GNVWVHTPLSPRTLNAWVKAVEEKK

SEQ ID NO: 224 - protein, 25 aa, synthetic construct
  REGION 1..25: note = Description of Artificial Sequence: Synthetic peptide
AFRQVCHTTVPWPNASLTPKWNNET

SEQ ID NO: 225 - protein, 25 aa, synthetic construct
  REGION 1..25: note = Description of Artificial Sequence: Synthetic peptide
VFNFPPNGTHSWEYWGAQLNAMKGD

SEQ ID NO: 226 - protein, 25 aa, synthetic construct
  REGION 1..25: note = Description of Artificial Sequence: Synthetic peptide
NWRSELYKYKVVKIEPLGVAPTKAK

SEQ ID NO: 227 - protein, 25 aa, synthetic construct
  REGION 1..25: note = Description of Artificial Sequence: Synthetic peptide
EKVKHTEEAKQIVQRHLVVETGTTE

SEQ ID NO: 228 - protein, 25 aa, synthetic construct
  REGION 1..25: note = Description of Artificial Sequence: Synthetic peptide
DQVESTAGSLQGQWRGAAGTAAQAA

SEQ ID NO: 229 - protein, 25 aa, synthetic construct
  REGION 1..25: note = Description of Artificial Sequence: Synthetic peptide
QELDEISTNIRQAGVQYSRADEEQQ

SEQ ID NO: 230 - protein, 25 aa, synthetic construct
  REGION 1..25: note = Description of Artificial Sequence: Synthetic peptide
FHSQPINERPKQAWCWFGGSWKEAI

SEQ ID NO: 231 - protein, 25 aa, synthetic construct
  REGION 1..25: note = Description of Artificial Sequence: Synthetic peptide
DDIDEEDDDLVGVSVRPKVPLRTMS

SEQ ID NO: 232 - protein, 25 aa, synthetic construct
  REGION 1..25: note = Description of Artificial Sequence: Synthetic peptide
PFAAAQQRGPRKPIKCWNCGKEGHS

SEQ ID NO: 233 - protein, 25 aa, synthetic construct
  REGION 1..25: note = Description of Artificial Sequence: Synthetic peptide
RRLTARGLLNMADKKETRTPKKAKA

SEQ ID NO: 234 - protein, 8 aa, synthetic construct
  REGION 1..8: note = Description of Artificial Sequence: Synthetic peptide
SIINFEKL

SEQ ID NO: 235 - protein, 9 aa, synthetic construct
  REGION 1..9: note = Description of Artificial Sequence: Synthetic peptide
EGPRNQDWL

SEQ ID NO: 236 - protein, 9 aa, synthetic construct
  REGION 1..9: note = Description of Artificial Sequence: Synthetic peptide
TAPDNLGYM

SEQ ID NO: 237 - protein, 9 aa, synthetic construct
  REGION 1..9: note = Description of Artificial Sequence: Synthetic peptide
SVYDFFVWL

SEQ ID NO: 238 - protein, 9 aa, synthetic construct
  REGION 1..9: note = Description of Artificial Sequence: Synthetic peptide
SPSYAYHQF

SEQ ID NO: 239 - protein, 9 aa, synthetic construct
  REGION 1..9: note = Description of Artificial Sequence: Synthetic peptide
MNKYAYHML

SEQ ID NO: 240 - protein, 8 aa, synthetic construct
  REGION 1..8: note = Description of Artificial Sequence: Synthetic peptide
SIIVFNLL

SEQ ID NO: 241 - protein, 9 aa, synthetic construct
  REGION 1..9: note = Description of Artificial Sequence: Synthetic peptide
ASMTNMELM

SEQ ID NO: 242 - protein, 9 aa, synthetic construct
  REGION 1..9: note = Description of Artificial Sequence: Synthetic peptide
AQLANDVVL

SEQ ID NO: 243 - protein, 9 aa, synthetic construct
  REGION 1..9: note = Description of Artificial Sequence: Synthetic peptide
LPYLGWLVF

SEQ ID NO: 244 - protein, 10 aa, synthetic construct
  REGION 1..10: note = Description of Artificial Sequence: Synthetic peptide
GYCGLRGTGV

SEQ ID NO: 245 - protein, 8 aa, synthetic construct
  REGION 1..8: note = Description of Artificial Sequence: Synthetic peptide
LSIFKHKL

SEQ ID NO: 246 - protein, 8 aa, synthetic construct
  REGION 1..8: note = Description of Artificial Sequence: Synthetic peptide
LIWIPALL

SEQ ID NO: 247 - protein, 9 aa, synthetic construct
  REGION 1..9: note = Description of Artificial Sequence: Synthetic peptide
SSGHNECPV

SEQ ID NO: 248 - protein, 9 aa, synthetic construct
  REGION 1..9: note = Description of Artificial Sequence: Synthetic peptide
GQKMNAQAI

SEQ ID NO: 249 - protein, 17 aa, synthetic construct
  REGION 1..17: note = Description of Artificial Sequence: Synthetic peptide
ISQAVHAAHAEINEAGR

SEQ ID NO: 250 - protein, 19 aa, synthetic construct
  REGION 1..19: note = Description of Artificial Sequence: Synthetic peptide
MTEQQWNFAGIEAAASAIQ

SEQ ID NO: 251 - protein, 20 aa, synthetic construct
  REGION 1..20: note = Description of Artificial Sequence: Synthetic peptide
FNNFTVSFWLRVPKVSASHL

SEQ ID NO: 252 - protein, 15 aa, synthetic construct
  REGION 1..15: note = Description of Artificial Sequence: Synthetic peptide
DGSTDYGILQINSRW

SEQ ID NO: 253 - protein, 19 aa, synthetic construct
  REGION 1..19: note = Description of Artificial Sequence: Synthetic peptide
MEVGWYRSPFSRVVHLYRN

SEQ ID NO: 254 - protein, 25 aa, synthetic construct
  REGION 1..25: note = Description of Artificial Sequence: Synthetic peptide
VSGLEQLESIINFEKLTEWTSSNVM

SEQ ID NO: 255 - protein, 25 aa, synthetic construct
  REGION 1..25: note = Description of Artificial Sequence: Synthetic peptide
ALLAVGALEGPRNQDWLGVPRQLVT

SEQ ID NO: 256 - protein, 25 aa, synthetic construct
  REGION 1..25: note = Description of Artificial Sequence: Synthetic peptide
VTNTEMFVTAPDNLGYMYEVQWPGQ

SEQ ID NO: 257 - protein, 25 aa, synthetic construct
  REGION 1..25: note = Description of Artificial Sequence: Synthetic peptide
TQPQIANCSVYDFFVWLHYYSVRDT

SEQ ID NO: 258 - protein, 25 aa, synthetic construct
  REGION 1..25: note = Description of Artificial Sequence: Synthetic peptide
LWPRVTYHSPSYAYHQFERRAKYKR

SEQ ID NO: 259 - protein, 25 aa, synthetic construct
  REGION 1..25: note = Description of Artificial Sequence: Synthetic peptide
LWPRVTYHMNKYAYHMLERRAKYKR

SEQ ID NO: 260 - protein, 25 aa, synthetic construct
  REGION 1..25: note = Description of Artificial Sequence: Synthetic peptide
GQSLVISASIIVFNLLELEGDYRDD

SEQ ID NO: 261 - protein, 25 aa, synthetic construct
  REGION 1..25: note = Description of Artificial Sequence: Synthetic peptide
GIPVHLELASMTNMELMSSIVHQQV

SEQ ID NO: 262 - protein, 25 aa, synthetic construct
  REGION 1..25: note = Description of Artificial Sequence: Synthetic peptide
RVLELFRAAQLANDVVLQIMELCGA

SEQ ID NO: 263 - protein, 25 aa, synthetic construct
  REGION 1..25: note = Description of Artificial Sequence: Synthetic peptide
HRYSLEEILPYLGWLVFAVVTTSFL

SEQ ID NO: 264 - protein, 25 aa, synthetic construct
  REGION 1..25: note = Description of Artificial Sequence: Synthetic peptide
YLSKNPDGYCGLRGTGVSCPMAIKK

SEQ ID NO: 265 - protein, 25 aa, synthetic construct
  REGION 1..25: note = Description of Artificial Sequence: Synthetic peptide
NEIPFTYEQLSIFKHKLDKTYPQGY

SEQ ID NO: 266 - protein, 25 aa, synthetic construct
  REGION 1..25: note = Description of Artificial Sequence: Synthetic peptide
SRASLLGPGFVLIWIPALLPALRLS

SEQ ID NO: 267 - protein, 25 aa, synthetic construct
  REGION 1..25: note = Description of Artificial Sequence: Synthetic peptide
NWHKGWNWSSGHNECPVGASCHPFT

SEQ ID NO: 268 - protein, 25 aa, synthetic construct
  REGION 1..25: note = Description of Artificial Sequence: Synthetic peptide
KTLLKVSKGQKMNAQAIALVACYLR

SEQ ID NO: 269 - protein, 25 aa, synthetic construct
  REGION 1..25: note = Description of Artificial Sequence: Synthetic peptide
ESLKISQAVHAAHAEINEAGREVVG

SEQ ID NO: 270 - protein, 25 aa, synthetic construct
  REGION 1..25: note = Description of Artificial Sequence: Synthetic peptide
MTEQQWNFAGIEAAASAIQGNVTSI

SEQ ID NO: 271 - protein, 25 aa, synthetic construct
  REGION 1..25: note = Description of Artificial Sequence: Synthetic peptide
DMFNNFTVSFWLRVPKVSASHLEQY

SEQ ID NO: 272 - protein, 25 aa, synthetic construct
  REGION 1..25: note = Description of Artificial Sequence: Synthetic peptide
TNRNTDGSTDYGILQINSRWWCNDG

SEQ ID NO: 273 - protein, 25 aa, synthetic construct
  REGION 1..25: note = Description of Artificial Sequence: Synthetic peptide
TGMEVGWYRSPFSRVVHLYRNGKDQ

SEQ ID NO: 274 - protein, 9 aa, synthetic construct
  REGION 1..9: note = Description of Artificial Sequence: Synthetic peptide
NLVPMVATV

SEQ ID NO: 275 - protein, 9 aa, synthetic construct
  REGION 1..9: note = Description of Artificial Sequence: Synthetic peptide
CLGGLLTMV

SEQ ID NO: 276 - protein, 9 aa, synthetic construct
  REGION 1..9: note = Description of Artificial Sequence: Synthetic peptide
GLCTLVAML

SEQ ID NO: 277 - protein, 9 aa, synthetic construct
  REGION 1..9: note = Description of Artificial Sequence: Synthetic peptide
LLFGYPVYV

SEQ ID NO: 278 - protein, 9 aa, synthetic construct
  REGION 1..9: note = Description of Artificial Sequence: Synthetic peptide
GILGFVFTL

SEQ ID NO: 279 - protein, 13 aa, synthetic construct
  REGION 1..13: note = Description of Artificial Sequence: Synthetic peptide
AKFVAAWTLKAAA

SEQ ID NO: 280 - protein, 14 aa, synthetic construct
  REGION 1..14: note = Description of Artificial Sequence: Synthetic peptide
QYIKANSKFIGITE

SEQ ID NO: 281 - protein, 9 aa, synthetic construct
  REGION 1..9: note = Description of Artificial Sequence: Synthetic peptide
NLVPMVATV

SEQ ID NO: 282 - protein, 9 aa, synthetic construct
  REGION 1..9: note = Description of Artificial Sequence: Synthetic peptide
CLGGLLTMV

SEQ ID NO: 283 - protein, 9 aa, synthetic construct
  REGION 1..9: note = Description of Artificial Sequence: Synthetic peptide
GLCTLVAML

SEQ ID NO: 284 - protein, 9 aa, synthetic construct
  REGION 1..9: note = Description of Artificial Sequence: Synthetic peptide
LLFGYPVYV

SEQ ID NO: 285 - protein, 9 aa, synthetic construct
  REGION 1..9: note = Description of Artificial Sequence: Synthetic peptide
GILGFVFTL

SEQ ID NO: 286 - protein, 9 aa, synthetic construct
  REGION 1..9: note = Description of Artificial Sequence: Synthetic peptide
DLMGYIPAV

SEQ ID NO: 287 - protein, 10 aa, synthetic construct
  REGION 1..10: note = Description of Artificial Sequence: Synthetic peptide
FLPSDFFPSV

SEQ ID NO: 288 - protein, 9 aa, synthetic construct
  REGION 1..9: note = Description of Artificial Sequence: Synthetic peptide
FLLTRILTI

SEQ ID NO: 289 - protein, 9 aa, synthetic construct
  REGION 1..9: note = Description of Artificial Sequence: Synthetic peptide
WLSLLVPFV

SEQ ID NO: 290 - protein, 9 aa, synthetic construct
  REGION 1..9: note = Description of Artificial Sequence: Synthetic peptide
FLLSLGIHL

SEQ ID NO: 291 - protein, 9 aa, synthetic construct
  REGION 1..9: note = Description of Artificial Sequence: Synthetic peptide
ILKEPVHGV

SEQ ID NO: 292 - protein, 10 aa, synthetic construct
  REGION 1..10: note = Description of Artificial Sequence: Synthetic peptide
YMLDLQPETT

SEQ ID NO: 293 - protein, 9 aa, synthetic construct
  REGION 1..9: note = Description of Artificial Sequence: Synthetic peptide
CINGVCWTV

SEQ ID NO: 294 - protein, 10 aa, synthetic construct
  REGION 1..10: note = Description of Artificial Sequence: Synthetic peptide
YLLPRRGPRL

SEQ ID NO: 295 - protein, 9 aa, synthetic construct
  REGION 1..9: note = Description of Artificial Sequence: Synthetic peptide
FLYALALLL

SEQ ID NO: 296 - protein, 9 aa, synthetic construct
  REGION 1..9: note = Description of Artificial Sequence: Synthetic peptide
AAGIGILTV

SEQ ID NO: 297 - protein, 9 aa, synthetic construct
  REGION 1..9: note = Description of Artificial Sequence: Synthetic peptide
SLLMWITQV

SEQ ID NO: 298 - protein, 9 aa, synthetic construct
  REGION 1..9: note = Description of Artificial Sequence: Synthetic peptide
KLGGALQAK

SEQ ID NO: 299 - protein, 9 aa, synthetic construct
  REGION 1..9: note = Description of Artificial Sequence: Synthetic peptide
RLRAEAQVK

SEQ ID NO: 300 - protein, 10 aa, synthetic construct
  REGION 1..10: note = Description of Artificial Sequence: Synthetic peptide
EENLLDFVRF

SEQ ID NO: 301 - protein, 9 aa, synthetic construct
  REGION 1..9: note = Description of Artificial Sequence: Synthetic peptide
EEYLQAFTY

SEQ ID NO: 302 - protein, 9 aa, synthetic construct
  REGION 1..9: note = Description of Artificial Sequence: Synthetic peptide
CTPYDINQM

SEQ ID NO: 303 - protein, 8 aa, synthetic construct
  REGION 1..8: note = Description of Artificial Sequence: Synthetic peptide
TTPESANL

SEQ ID NO: 304 - protein, 8 aa, synthetic construct
  REGION 1..8: note = Description of Artificial Sequence: Synthetic peptide
CAPPGALL

SEQ ID NO: 305 - protein, 9 aa, synthetic construct
  REGION 1..9: note = Description of Artificial Sequence: Synthetic peptide
SGPKTNIIV

SEQ ID NO: 306 - protein, 9 aa, synthetic construct
  REGION 1..9: note = Description of Artificial Sequence: Synthetic peptide
LSPRTLNAW

SEQ ID NO: 307 - protein, 9 aa, synthetic construct
  REGION 1..9: note = Description of Artificial Sequence: Synthetic peptide
TVPWPNASL

SEQ ID NO: 308 - protein, 8 aa, synthetic construct
  REGION 1..8: note = Description of Artificial Sequence: Synthetic peptide
SIINFEKL

SEQ ID NO: 309 - protein, 9 aa, synthetic construct
  REGION 1..9: note = Description of Artificial Sequence: Synthetic peptide
SPSYAYHQF

SEQ ID NO: 310 - protein, 9 aa, synthetic construct
  REGION 1..9: note = Description of Artificial Sequence: Synthetic peptide
EGPRNQDWL

SEQ ID NO: 311 - protein, 9 aa, synthetic construct
  REGION 1..9: note = Description of Artificial Sequence: Synthetic peptide
DWENVSPEL

SEQ ID NO: 312 - protein, 8 aa, synthetic construct
  REGION 1..8: note = Description of Artificial Sequence: Synthetic peptide
SIIVFNLL

SEQ ID NO: 313 - protein, 9 aa, synthetic construct
  REGION 1..9: note = Description of Artificial Sequence: Synthetic peptide
ASMTNMELM

SEQ ID NO: 314 - protein, 9 aa, synthetic construct
  REGION 1..9: note = Description of Artificial Sequence: Synthetic peptide
AQLANDVVL

SEQ ID NO: 315 - protein, 9 aa, synthetic construct
  REGION 1..9: note = Description of Artificial Sequence: Synthetic peptide
SVYDFFVWL

SEQ ID NO: 316 - protein, 9 aa, synthetic construct
  REGION 1..9: note = Description of Artificial Sequence: Synthetic peptide
MNKYAYHML

SEQ ID NO: 317 - protein, 9 aa, synthetic construct
  REGION 1..9: note = Description of Artificial Sequence: Synthetic peptide
GILGFVFTL

SEQ ID NO: 318 - protein, 9 aa, synthetic construct
  REGION 1..9: note = Description of Artificial Sequence: Synthetic peptide
LLFGYPVYV

SEQ ID NO: 319 - protein, 9 aa, synthetic construct
  REGION 1..9: note = Description of Artificial Sequence: Synthetic peptide
GLCTLVAML

SEQ ID NO: 320 - protein, 9 aa, synthetic construct
  REGION 1..9: note = Description of Artificial Sequence: Synthetic peptide
NLVPMVATV

SEQ ID NO: 321 - protein, 9 aa, synthetic construct
  REGION 1..9: note = Description of Artificial Sequence: Synthetic peptide
CLGGLLTMV

SEQ ID NO: 322 - protein, 13 aa, synthetic construct
  REGION 1..13: note = Description of Artificial Sequence: Synthetic peptide
AKFVAAWTLKAAA

SEQ ID NO: 323 - protein, 15 aa, synthetic construct
  REGION 1..15: note = Description of Artificial Sequence: Synthetic peptide
QYIKANSKFIGITEL

SEQ ID NO: 324 - protein, 10 aa, synthetic construct
  REGION 1..10: note = Description of Artificial Sequence: Synthetic peptide
YVYVADVAAK

SEQ ID NO: 325 - protein, 9 aa, synthetic construct
  REGION 1..9: note = Description of Artificial Sequence: Synthetic peptide
TTNQKTELY

SEQ ID NO: 326 - protein, 9 aa, synthetic construct
  REGION 1..9: note = Description of Artificial Sequence: Synthetic peptide
GTEELRSLY

SEQ ID NO: 327 - protein, 8 aa, synthetic construct
  REGION 1..8: note = Description of Artificial Sequence: Synthetic peptide
VLDVGDAY

SEQ ID NO: 328 - protein, 10 aa, synthetic construct
  REGION 1..10: note = Description of Artificial Sequence: Synthetic peptide
VTVLDVGDAY

SEQ ID NO: 329 - protein, 9 aa, synthetic construct
  REGION 1..9: note = Description of Artificial Sequence: Synthetic peptide
QLAEVVQKV

SEQ ID NO: 330 - protein, 9 aa, synthetic construct
  REGION 1..9: note = Description of Artificial Sequence: Synthetic peptide
VLAEAMSQV

SEQ ID NO: 331 - protein, 9 aa, synthetic construct
  REGION 1..9: note = Description of Artificial Sequence: Synthetic peptide
SLYNTVATL

SEQ ID NO: 332 - protein, 9 aa, synthetic construct
  REGION 1..9: note = Description of Artificial Sequence: Synthetic peptide
VLAEAMSQA

SEQ ID NO: 333 - protein, 9 aa, synthetic construct
  REGION 1..9: note = Description of Artificial Sequence: Synthetic peptide
ILKEPVHGV

SEQ ID NO: 334 - protein, 9 aa, synthetic construct
  REGION 1..9: note = Description of Artificial Sequence: Synthetic peptide
SLFNTVATL

SEQ ID NO: 335 - protein, 9 aa, synthetic construct
  REGION 1..9: note = Description of Artificial Sequence: Synthetic peptide
SLLETTEGC

SEQ ID NO: 336 - protein, 9 aa, synthetic construct
  REGION 1..9: note = Description of Artificial Sequence: Synthetic peptide
AVLSVINRV

SEQ ID NO: 337 - protein, 9 aa, synthetic construct
  REGION 1..9: note = Description of Artificial Sequence: Synthetic peptide
SLVDTIAIV

SEQ ID NO: 338 - protein, 9 aa, synthetic construct
  REGION 1..9: note = Description of Artificial Sequence: Synthetic peptide
SLAEGKVMI

SEQ ID NO: 339 - protein, 9 aa, synthetic construct
  REGION 1..9: note = Description of Artificial Sequence: Synthetic peptide
GLCKNVSTV

SEQ ID NO: 340 - protein, 11 aa, synthetic construct
  REGION 1..11: note = Description of Artificial Sequence: Synthetic peptide
VMLNIVGGHQA

SEQ ID NO: 341 - protein, 10 aa, synthetic construct
  REGION 1..10: note = Description of Artificial Sequence: Synthetic peptide
TLWQRPLVTV

SEQ ID NO: 342 - protein, 9 aa, synthetic construct
  REGION 1..9: note = Description of Artificial Sequence: Synthetic peptide
GLLETTEGC

SEQ ID NO: 343 - protein, 10 aa, synthetic construct
  REGION 1..10: note = Description of Artificial Sequence: Synthetic peptide
KIIEQLQPSV

SEQ ID NO: 344 - protein, 10 aa, synthetic construct
  REGION 1..10: note = Description of Artificial Sequence: Synthetic peptide
KLVPVDPDEV

SEQ ID NO: 345 - protein, 10 aa, synthetic construct
  REGION 1..10: note = Description of Artificial Sequence: Synthetic peptide
TLWQRPIVTV

SEQ ID NO: 346 - protein, 9 aa, synthetic construct
  REGION 1..9: note = Description of Artificial Sequence: Synthetic peptide
YDLGDINNL

SEQ ID NO: 347 - protein, 9 aa, synthetic construct
  REGION 1..9: note = Description of Artificial Sequence: Synthetic peptide
LLDTIAIAV

SEQ ID NO: 348 - protein, 9 aa, synthetic construct
  REGION 1..9: note = Description of Artificial Sequence: Synthetic peptide
AVLSIISRV

SEQ ID NO: 349 - protein, 9 aa, synthetic construct
  REGION 1..9: note = Description of Artificial Sequence: Synthetic peptide
YDLGNDINL

SEQ ID NO: 350 - protein, 9 aa, synthetic construct
  REGION 1..9: note = Description of Artificial Sequence: Synthetic peptide
AVLSIINRV

SEQ ID NO: 351 - protein, 9 aa, synthetic construct
  REGION 1..9: note = Description of Artificial Sequence: Synthetic peptide
TLNNNTIEM

SEQ ID NO: 352 - protein, 9 aa, synthetic construct
  REGION 1..9: note = Description of Artificial Sequence: Synthetic peptide
IVTDSQYAL

SEQ ID NO: 353 - protein, 10 aa, synthetic construct
  REGION 1..10: note = Description of Artificial Sequence: Synthetic peptide
KLVPVDPEEV

SEQ ID NO: 354 - protein, 9 aa, synthetic construct
  REGION 1..9: note = Description of Artificial Sequence: Synthetic peptide
VLAEAMSQV

SEQ ID NO: 355 - protein, 9 aa, synthetic construct
  REGION 1..9: note = Description of Artificial Sequence: Synthetic peptide
QLAEVVQKV

SEQ ID NO: 356 - protein, 9 aa, synthetic construct
  REGION 1..9: note = Description of Artificial Sequence: Synthetic peptide
ILKEPVHGV

SEQ ID NO: 357 - protein, 9 aa, synthetic construct
  REGION 1..9: note = Description of Artificial Sequence: Synthetic peptide
VLAEAMSQA

SEQ ID NO: 358 - protein, 9 aa, synthetic construct
  REGION 1..9: note = Description of Artificial Sequence: Synthetic peptide
SLYNTVATL

SEQ ID NO: 359 - protein, 9 aa, synthetic construct
  REGION 1..9: note = Description of Artificial Sequence: Synthetic peptide
ILKDPVHGA

SEQ ID NO: 360 - protein, 9 aa, synthetic construct
  REGION 1..9: note = Description of Artificial Sequence: Synthetic peptide
VVKIEPLGV

SEQ ID NO: 361 - protein, 9 aa, synthetic construct
  REGION 1..9: note = Description of Artificial Sequence: Synthetic peptide
SLFNTVATL

SEQ ID NO: 362 - protein, 9 aa, synthetic construct
  REGION 1..9: note = Description of Artificial Sequence: Synthetic peptide
ALRQVVEQL

SEQ ID NO: 363 - protein, 9 aa, synthetic construct
  REGION 1..9: note = Description of Artificial Sequence: Synthetic peptide
ALRTGTEEL

SEQ ID NO: 364 - protein, 9 aa, synthetic construct
  REGION 1..9: note = Description of Artificial Sequence: Synthetic peptide
SISERVLSA

SEQ ID NO: 365 - protein, 10 aa, synthetic construct
  REGION 1..10: note = Description of Artificial Sequence: Synthetic peptide
TLWQRPLVTV

SEQ ID NO: 366 - protein, 10 aa, synthetic construct
  REGION 1..10: note = Description of Artificial Sequence: Synthetic peptide
YLKDQQLLGI

SEQ ID NO: 367 - protein, 10 aa, synthetic construct
  REGION 1..10: note = Description of Artificial Sequence: Synthetic peptide
YLRDQQLLGI

SEQ ID NO: 368 - protein, 10 aa, synthetic construct
  REGION 1..10: note = Description of Artificial Sequence: Synthetic peptide
TLWQRPIVTV

SEQ ID NO: 369 - protein, 9 aa, synthetic construct
  REGION 1..9: note = Description of Artificial Sequence: Synthetic peptide
GLCKNVSTV

SEQ ID NO: 370 - protein, 9 aa, synthetic construct
  REGION 1..9: note = Description of Artificial Sequence: Synthetic peptide
KIKPPLPSV

SEQ ID NO: 371 - protein, 9 aa, synthetic construct
  REGION 1..9: note = Description of Artificial Sequence: Synthetic peptide
NLKKVVVQL

SEQ ID NO: 372 - protein, 9 aa, synthetic construct
  REGION 1..9: note = Description of Artificial Sequence: Synthetic peptide
RIKPPLPSV

SEQ ID NO: 373 - protein, 9 aa, synthetic construct
  REGION 1..9: note = Description of Artificial Sequence: Synthetic peptide
VVKLEPLGV

SEQ ID NO: 374 - protein, 10 aa, synthetic construct
  REGION 1..10: note = Description of Artificial Sequence: Synthetic peptide
AMYAPPIQGV

SEQ ID NO: 375 - protein, 9 aa, synthetic construct
  REGION 1..9: note = Description of Artificial Sequence: Synthetic peptide
RVIEIVQGI

SEQ ID NO: 376 - protein, 9 aa, synthetic construct
  REGION 1..9: note = Description of Artificial Sequence: Synthetic peptide
SLFYKLDVV

SEQ ID NO: 377 - protein, 9 aa, synthetic construct
  REGION 1..9: note = Description of Artificial Sequence: Synthetic peptide
SLAENRTMI

SEQ ID NO: 378 - protein, 9 aa, synthetic construct
  REGION 1..9: note = Description of Artificial Sequence: Synthetic peptide
AVLSIISRV

SEQ ID NO: 379 - protein, 9 aa, synthetic construct
  REGION 1..9: note = Description of Artificial Sequence: Synthetic peptide
ELKSLFNTV

SEQ ID NO: 380 - protein, 9 aa, synthetic construct
  REGION 1..9: note = Description of Artificial Sequence: Synthetic peptide
LLSIVTRTV

SEQ ID NO: 381 - protein, 9 aa, synthetic construct
  REGION 1..9: note = Description of Artificial Sequence: Synthetic peptide
SLVDTIAIV

SEQ ID NO: 382 - protein, 8 aa, synthetic construct
  REGION 1..8: note = Description of Artificial Sequence: Synthetic peptide
VLSIISRV

SEQ ID NO: 383 - protein, 9 aa, synthetic construct
  REGION 1..9: note = Description of Artificial Sequence: Synthetic peptide
QLQARVLAV

SEQ ID NO: 384 - protein, 9 aa, synthetic construct
  REGION 1..9: note = Description of Artificial Sequence: Synthetic peptide
GAASITLTV

SEQ ID NO: 385 - protein, 9 aa, synthetic construct
  REGION 1..9: note = Description of Artificial Sequence: Synthetic peptide
RVIETVQRL

SEQ ID NO: 386 - protein, 8 aa, synthetic construct
  REGION 1..8: note = Description of Artificial Sequence: Synthetic peptide
VLSVINRV

SEQ ID NO: 387 - protein, 9 aa, synthetic construct
  REGION 1..9: note = Description of Artificial Sequence: Synthetic peptide
ALNPGLLET

SEQ ID NO: 388 - protein, 11 aa, synthetic construct
  REGION 1..11: note = Description of Artificial Sequence: Synthetic peptide
FLKEKGGLDGL

SEQ ID NO: 389 - protein, 10 aa, synthetic construct
  REGION 1..10: note = Description of Artificial Sequence: Synthetic peptide
LTRDGGITSA

SEQ ID NO: 390 - protein, 9 aa, synthetic construct
  REGION 1..9: note = Description of Artificial Sequence: Synthetic peptide
SLFYRLDVV

SEQ ID NO: 391 - protein, 9 aa, synthetic construct
  REGION 1..9: note = Description of Artificial Sequence: Synthetic peptide
SLAEGKVMI

SEQ ID NO: 392 - protein, 9 aa, synthetic construct
  REGION 1..9: note = Description of Artificial Sequence: Synthetic peptide
NVKTIIVQL

SEQ ID NO: 393 - protein, 9 aa, synthetic construct
  REGION 1..9: note = Description of Artificial Sequence: Synthetic peptide
AVLSVINRV

SEQ ID NO: 394 - protein, 9 aa, synthetic construct
  REGION 1..9: note = Description of Artificial Sequence: Synthetic peptide
NVKNIIVQL

SEQ ID NO: 395 - protein, 9 aa, synthetic construct
  REGION 1..9: note = Description of Artificial Sequence: Synthetic peptide
SLFYRLDIV

SEQ ID NO: 396 - protein, 9 aa, synthetic construct
  REGION 1..9: note = Description of Artificial Sequence: Synthetic peptide
NQKTELHAV

SEQ ID NO: 397 - protein, 9 aa, synthetic construct
  REGION 1..9: note = Description of Artificial Sequence: Synthetic peptide
ELKKIIGQV

SEQ ID NO: 398 - protein, 9 aa, synthetic construct
  REGION 1..9: note = Description of Artificial Sequence: Synthetic peptide
AVLSIINRV

SEQ ID NO: 399 - protein, 8 aa, synthetic construct
  REGION 1..8: note = Description of Artificial Sequence: Synthetic peptide
VLSIINRV

SEQ ID NO: 400 - protein, 10 aa, synthetic construct
  REGION 1..10: note = Description of Artificial Sequence: Synthetic peptide
KVVKIEPLGV

SEQ ID NO: 401 - protein, 9 aa, synthetic construct
  REGION 1..9: note = Description of Artificial Sequence: Synthetic peptide
TLSERVLST

SEQ ID NO: 402 - protein, 10 aa, synthetic construct
  REGION 1..10: note = Description of Artificial Sequence: Synthetic peptide
GLIGLRIVFA

SEQ ID NO: 403 - protein, 9 aa, synthetic construct
  REGION 1..9: note = Description of Artificial Sequence: Synthetic peptide
SLSPRTLNA

SEQ ID NO: 404 - protein, 9 aa, synthetic construct
  REGION 1..9: note = Description of Artificial Sequence: Synthetic peptide
QLAEVVQKV

SEQ ID NO: 405 - protein, 9 aa, synthetic construct
  REGION 1..9: note = Description of Artificial Sequence: Synthetic peptide
AVLSVINRV

SEQ ID NO: 406 - protein, 9 aa, synthetic construct
  REGION 1..9: note = Description of Artificial Sequence: Synthetic peptide
AVLSIINRV

SEQ ID NO: 407 - protein, 9 aa, synthetic construct
  REGION 1..9: note = Description of Artificial Sequence: Synthetic peptide
SLFNTVATL

SEQ ID NO: 408 - protein, 9 aa, synthetic construct
  REGION 1..9: note = Description of Artificial Sequence: Synthetic peptide
SLYNTVATL

SEQ ID NO: 409 - protein, 9 aa, synthetic construct
  REGION 1..9: note = Description of Artificial Sequence: Synthetic peptide
RVIETVQRL

SEQ ID NO: 410 - protein, 9 aa, synthetic construct
  REGION 1..9: note = Description of Artificial Sequence: Synthetic peptide
AVLSIISRV

SEQ ID NO: 411 - protein, 9 aa, synthetic construct
  REGION 1..9: note = Description of Artificial Sequence: Synthetic peptide
ILKEPVHGV

SEQ ID NO: 412 - protein, 9 aa, synthetic construct
  REGION 1..9: note = Description of Artificial Sequence: Synthetic peptide
LLLYWGREL

SEQ ID NO: 413 - protein, 9 aa, synthetic construct
  REGION 1..9: note = Description of Artificial Sequence: Synthetic peptide
TLHQVVEQL

SEQ ID NO: 414 - protein, 10 aa, synthetic construct
  REGION 1..10: note = Description of Artificial Sequence: Synthetic peptide
TLWQRPLVTV

SEQ ID NO: 415 - protein, 9 aa, synthetic construct
  REGION 1..9: note = Description of Artificial Sequence: Synthetic peptide
SLVDTIAIV

SEQ ID NO: 416 - protein, 9 aa, synthetic construct
  REGION 1..9: note = Description of Artificial Sequence: Synthetic peptide
ILALVVWTI

SEQ ID NO: 417 - protein, 9 aa, synthetic construct
  REGION 1..9: note = Description of Artificial Sequence: Synthetic peptide
ALRQVVEQL

SEQ ID NO: 418 - protein, 10 aa, synthetic construct
  REGION 1..10: note = Description of Artificial Sequence: Synthetic peptide
TLWQRPIVTV

SEQ ID NO: 419 - protein, 9 aa, synthetic construct
  REGION 1..9: note = Description of Artificial Sequence: Synthetic peptide
TLNAWVKVI

SEQ ID NO: 420 - protein, 11 aa, synthetic construct
  REGION 1..11: note = Description of Artificial Sequence: Synthetic peptide
SLFYRLDIVQL

SEQ ID NO: 421 - protein, 9 aa, synthetic construct
  REGION 1..9: note = Description of Artificial Sequence: Synthetic peptide
LLVYWSQEL

SEQ ID NO: 422 - protein, 9 aa, synthetic construct
  REGION 1..9: note = Description of Artificial Sequence: Synthetic peptide
LVSQIIEKL

SEQ ID NO: 423 - protein, 9 aa, synthetic construct
  REGION 1..9: note = Description of Artificial Sequence: Synthetic peptide
NLKKVVVQL

SEQ ID NO: 424 - protein, 9 aa, synthetic construct
  REGION 1..9: note = Description of Artificial Sequence: Synthetic peptide
SLFYKLDVV

SEQ ID NO: 425 - protein, 9 aa, synthetic construct
  REGION 1..9: note = Description of Artificial Sequence: Synthetic peptide
YDLGDINNL

SEQ ID NO: 426 - protein, 10 aa, synthetic construct
  REGION 1..10: note = Description of Artificial Sequence: Synthetic peptide
NLLDTIAIAV

SEQ ID NO: 427 - protein, 9 aa, synthetic construct
  REGION 1..9: note = Description of Artificial Sequence: Synthetic peptide
LVNQIIEKL

SEQ ID NO: 428 - protein, 9 aa, synthetic construct
  REGION 1..9: note = Description of Artificial Sequence: Synthetic peptide
RVIEIVQGI

SEQ ID NO: 429 - protein, 9 aa, synthetic construct
  REGION 1..9: note = Description of Artificial Sequence: Synthetic peptide
KVYSLFYKL

SEQ ID NO: 430 - protein, 9 aa, synthetic construct
  REGION 1..9: note = Description of Artificial Sequence: Synthetic peptide
DISKWLWYI

SEQ ID NO: 431 - protein, 9 aa, synthetic construct
  REGION 1..9: note = Description of Artificial Sequence: Synthetic peptide
LLVYWSREL

SEQ ID NO: 432 - protein, 9 aa, synthetic construct
  REGION 1..9: note = Description of Artificial Sequence: Synthetic peptide
KIKPPLPSV

SEQ ID NO: 433 - protein, 9 aa, synthetic construct
  REGION 1..9: note = Description of Artificial Sequence: Synthetic peptide
NVKNIIVQL

SEQ ID NO: 434 - protein, 9 aa, synthetic construct
  REGION 1..9: note = Description of Artificial Sequence: Synthetic peptide
AIVGLIVAL

SEQ ID NO: 435 - protein, 10 aa, synthetic construct
  REGION 1..10: note = Description of Artificial Sequence: Synthetic peptide
NLYDTIAIAV

SEQ ID NO: 436 - protein, 9 aa, synthetic construct
  REGION 1..9: note = Description of Artificial Sequence: Synthetic peptide
RIKPPLPSV

SEQ ID NO: 437 - protein, 10 aa, synthetic construct
  REGION 1..10: note = Description of Artificial Sequence: Synthetic peptide
KLIEKDKVYL

SEQ ID NO: 438 - protein, 9 aa, synthetic construct
  REGION 1..9: note = Description of Artificial Sequence: Synthetic peptide
KVYSLFYRL

SEQ ID NO: 439 - protein, 9 aa, synthetic construct
  REGION 1..9: note = Description of Artificial Sequence: Synthetic peptide
SLFYRLDVV

SEQ ID NO: 440 - protein, 9 aa, synthetic construct
  REGION 1..9: note = Description of Artificial Sequence: Synthetic peptide
VLAEAMSQV

SEQ ID NO: 441 - protein, 10 aa, synthetic construct
  REGION 1..10: note = Description of Artificial Sequence: Synthetic peptide
ALAWDDLRNL

SEQ ID NO: 442 - protein, 9 aa, synthetic construct
  REGION 1..9: note = Description of Artificial Sequence: Synthetic peptide
IIAIVVWTI

SEQ ID NO: 443 - protein, 9 aa, synthetic construct
  REGION 1..9: note = Description of Artificial Sequence: Synthetic peptide
NVKTIIVQL

SEQ ID NO: 444 - protein, 9 aa, synthetic construct
  REGION 1..9: note = Description of Artificial Sequence: Synthetic peptide
AVAGWTDRV

SEQ ID NO: 445 - protein, 9 aa, synthetic construct
  REGION 1..9: note = Description of Artificial Sequence: Synthetic peptide
HLLSWGFTT

SEQ ID NO: 446 - protein, 9 aa, synthetic construct
  REGION 1..9: note = Description of Artificial Sequence: Synthetic peptide
IVTDSQYAL

SEQ ID NO: 447 - protein, 9 aa, synthetic construct
  REGION 1..9: note = Description of Artificial Sequence: Synthetic peptide
HLEGKVILV

SEQ ID NO: 448 - protein, 9 aa, synthetic construct
  REGION 1..9: note = Description of Artificial Sequence: Synthetic peptide
SIVTRTVEL

SEQ ID NO: 449 - protein, 9 aa, synthetic construct
  REGION 1..9: note = Description of Artificial Sequence: Synthetic peptide
VVAGWTDRV

SEQ ID NO: 450 - protein, 9 aa, synthetic construct
  REGION 1..9: note = Description of Artificial Sequence: Synthetic peptide
TLNNNTIEM

SEQ ID NO: 451 - protein, 9 aa, synthetic construct
  REGION 1..9: note = Description of Artificial Sequence: Synthetic peptide
SLFYRLDIV

SEQ ID NO: 452 - protein, 9 aa, synthetic construct
  REGION 1..9: note = Description of Artificial Sequence: Synthetic peptide
RILQQLLFV

SEQ ID NO: 453 - protein, 9 aa, synthetic construct
  REGION 1..9: note = Description of Artificial Sequence: Synthetic peptide
EISNWLWYI

SEQ ID NO: 454 - protein, 9 aa, synthetic construct
  REGION 1..9: note = Description of Artificial Sequence: Synthetic peptide
IVTDSQYVL

SEQ ID NO: 455 - protein, 9 aa, synthetic construct
  REGION 1..9: note = Description of Artificial Sequence: Synthetic peptide
ALNPGLLET

SEQ ID NO: 456 - protein, 9 aa, synthetic construct
  REGION 1..9: note = Description of Artificial Sequence: Synthetic peptide
KALTDIVTL

SEQ ID NO: 457 - protein, 8 aa, synthetic construct
  REGION 1..8: note = Description of Artificial Sequence: Synthetic peptide
VLSVINRV

SEQ ID NO: 458 - protein, 9 aa, synthetic construct
  REGION 1..9: note = Description of Artificial Sequence: Synthetic peptide
AIIRILQQL

SEQ ID NO: 459 - protein, 11 aa, synthetic construct
  REGION 1..11: note = Description of Artificial Sequence: Synthetic peptide
VQLGIPHPAGL

SEQ ID NO: 460 - protein, 10 aa, synthetic construct
  REGION 1..10: note = Description of Artificial Sequence: Synthetic peptide
RTQDFWEVQL

SEQ ID NO: 461 - protein, 10 aa, synthetic construct
  REGION 1..10: note = Description of Artificial Sequence: Synthetic peptide
YLRDQQLLGI

SEQ ID NO: 462 - protein, 9 aa, synthetic construct
  REGION 1..9: note = Description of Artificial Sequence: Synthetic peptide
LLDTIAIAV

SEQ ID NO: 463 - protein, 9 aa, synthetic construct
  REGION 1..9: note = Description of Artificial Sequence: Synthetic peptide
KIYSLFYRL

SEQ ID NO: 464 - protein, 9 aa, synthetic construct
  REGION 1..9: note = Description of Artificial Sequence: Synthetic peptide
LLSIVTRTV

SEQ ID NO: 465 - protein, 9 aa, synthetic construct
  REGION 1..9: note = Description of Artificial Sequence: Synthetic peptide
EGLKYLWNL

SEQ ID NO: 466 - protein, 9 aa, synthetic construct
  REGION 1..9: note = Description of Artificial Sequence: Synthetic peptide
AVVGLVVAL

SEQ ID NO: 467 - protein, 8 aa, synthetic construct
  REGION 1..8: note = Description of Artificial Sequence: Synthetic peptide
ALTDIVTL

SEQ ID NO: 468 - protein, 9 aa, synthetic construct
  REGION 1..9: note = Description of Artificial Sequence: Synthetic peptide
KLTPLCVTL

SEQ ID NO: 469 - protein, 10 aa, synthetic construct
  REGION 1..10: note = Description of Artificial Sequence: Synthetic peptide
ILIAARTVEL

SEQ ID NO: 470 - protein, 9 aa, synthetic construct
  REGION 1..9: note = Description of Artificial Sequence: Synthetic peptide
RVIETVQRL

SEQ ID NO: 471 - protein, 9 aa, synthetic construct
  REGION 1..9: note = Description of Artificial Sequence: Synthetic peptide
QLAEVVQKV

SEQ ID NO: 472 - protein, 9 aa, synthetic construct
  REGION 1..9: note = Description of Artificial Sequence: Synthetic peptide
RVIEIVQGI

SEQ ID NO: 473 - protein, 11 aa, synthetic construct
  REGION 1..11: note = Description of Artificial Sequence: Synthetic peptide
TQIDPDLADQL

SEQ ID NO: 474 - protein, 9 aa, synthetic construct
  REGION 1..9: note = Description of Artificial Sequence: Synthetic peptide
LVSQIIEKL

SEQ ID NO: 475 - protein, 9 aa, synthetic construct
  REGION 1..9: note = Description of Artificial Sequence: Synthetic peptide
AAVDLSHFL

SEQ ID NO: 476 - protein, 9 aa, synthetic construct
  REGION 1..9: note = Description of Artificial Sequence: Synthetic peptide
RVIEIGQGI

SEQ ID NO: 477 - protein, 9 aa, synthetic construct
  REGION 1..9: note = Description of Artificial Sequence: Synthetic peptide
VLAEAMSQV

SEQ ID NO: 478 - protein, 9 aa, synthetic construct
  REGION 1..9: note = Description of Artificial Sequence: Synthetic peptide
AVVGLVVAL

SEQ ID NO: 479 - protein, 9 aa, synthetic construct
  REGION 1..9: note = Description of Artificial Sequence: Synthetic peptide
VLAEAMSQA

SEQ ID NO: 480 - protein, 9 aa, synthetic construct
  REGION 1..9: note = Description of Artificial Sequence: Synthetic peptide
AVLSVINRV

SEQ ID NO: 481 - protein, 11 aa, synthetic construct
  REGION 1..11: note = Description of Artificial Sequence: Synthetic peptide
TQIDPDQADQL

SEQ ID NO: 482 - protein, 9 aa, synthetic construct
  REGION 1..9: note = Description of Artificial Sequence: Synthetic peptide
AVLSIINRV

SEQ ID NO: 483 - protein, 9 aa, synthetic construct
  REGION 1..9: note = Description of Artificial Sequence: Synthetic peptide
SQVQHTNIM

SEQ ID NO: 484 - protein, 11 aa, synthetic construct
  REGION 1..11: note = Description of Artificial Sequence: Synthetic peptide
VVIQDNSDIKV

SEQ ID NO: 485 - protein, 9 aa, synthetic construct
  REGION 1..9: note = Description of Artificial Sequence: Synthetic peptide
AVLSIISRV

SEQ ID NO: 486 - protein, 9 aa, synthetic construct
  REGION 1..9: note = Description of Artificial Sequence: Synthetic peptide
SAINLLDTI

SEQ ID NO: 487 - protein, 9 aa, synthetic construct
  REGION 1..9: note = Description of Artificial Sequence: Synthetic peptide
NVKNIIVQL

SEQ ID NO: 488 - protein, 9 aa, synthetic construct
  REGION 1..9: note = Description of Artificial Sequence: Synthetic peptide
WTVNDIQKL

SEQ ID NO: 489 - protein, 9 aa, synthetic construct
  REGION 1..9: note = Description of Artificial Sequence: Synthetic peptide
ATLEEMMTA

SEQ ID NO: 490 - protein, 9 aa, synthetic construct
  REGION 1..9: note = Description of Artificial Sequence: Synthetic peptide
GAASITLTV

SEQ ID NO: 491 - protein, 9 aa, synthetic construct
  REGION 1..9: note = Description of Artificial Sequence: Synthetic peptide
YDLGDINNL

SEQ ID NO: 492 - protein, 9 aa, synthetic construct
  REGION 1..9: note = Description of Artificial Sequence: Synthetic peptide
IVTDSQYAL

SEQ ID NO: 493 - protein, 9 aa, synthetic construct
  REGION 1..9: note = Description of Artificial Sequence: Synthetic peptide
TETLLIQNA

SEQ ID NO: 494 - protein, 9 aa, synthetic construct
  REGION 1..9: note = Description of Artificial Sequence: Synthetic peptide
SAVNLYDTI

SEQ ID NO: 495 - protein, 9 aa, synthetic construct
  REGION 1..9: note = Description of Artificial Sequence: Synthetic peptide
EQVPPLVSL

SEQ ID NO: 496 - protein, 9 aa, synthetic construct
  REGION 1..9: note = Description of Artificial Sequence: Synthetic peptide
SIVTRTVEL

SEQ ID NO: 497 - protein, 9 aa, synthetic construct
  REGION 1..9: note = Description of Artificial Sequence: Synthetic peptide
SVKTGTEEL

SEQ ID NO: 498 - protein, 9 aa, synthetic construct
  REGION 1..9: note = Description of Artificial Sequence: Synthetic peptide
QIMEQLQSA

SEQ ID NO: 499 - protein, 9 aa, synthetic construct
  REGION 1..9: note = Description of Artificial Sequence: Synthetic peptide
RTWNATDQL

SEQ ID NO: 500 - protein, 9 aa, synthetic construct
  REGION 1..9: note = Description of Artificial Sequence: Synthetic peptide
SLFNTVATL

SEQ ID NO: 501 - protein, 9 aa, synthetic construct
  REGION 1..9: note = Description of Artificial Sequence: Synthetic peptide
NTIEMKEEV

SEQ ID NO: 502 - protein, 9 aa, synthetic construct
  REGION 1..9: note = Description of Artificial Sequence: Synthetic peptide
NVKTIIVQL

SEQ ID NO: 503 - protein, 9 aa, synthetic construct
  REGION 1..9: note = Description of Artificial Sequence: Synthetic peptide
ASITLTVQA

SEQ ID NO: 504 - protein, 10 aa, synthetic construct
  REGION 1..10: note = Description of Artificial Sequence: Synthetic peptide
SQYALGIIQA

SEQ ID NO: 505 - protein, 9 aa, synthetic construct
  REGION 1..9: note = Description of Artificial Sequence: Synthetic peptide
SQIYAGIKV

SEQ ID NO: 506 - protein, 9 aa, synthetic construct
  REGION 1..9: note = Description of Artificial Sequence: Synthetic peptide
RAIEAQQHL

SEQ ID NO: 507 - protein, 9 aa, synthetic construct
  REGION 1..9: note = Description of Artificial Sequence: Synthetic peptide
AIVGLIVAL

SEQ ID NO: 508 - protein, 9 aa, synthetic construct
  REGION 1..9: note = Description of Artificial Sequence: Synthetic peptide
ALRTGTEEL

SEQ ID NO: 509 - protein, 9 aa, synthetic construct
  REGION 1..9: note = Description of Artificial Sequence: Synthetic peptide
LVNQIIEKL

SEQ ID NO: 510 - protein, 9 aa, synthetic construct
  REGION 1..9: note = Description of Artificial Sequence: Synthetic peptide
SQIYPGIKV

SEQ ID NO: 511 - protein, 9 aa, synthetic construct
  REGION 1..9: note = Description of Artificial Sequence: Synthetic peptide
SISERVLSA

SEQ ID NO: 512 - protein, 11 aa, synthetic construct
  REGION 1..11: note = Description of Artificial Sequence: Synthetic peptide
TQQEINEQELL

SEQ ID NO: 513 - protein, 10 aa, synthetic construct
  REGION 1..10: note = Description of Artificial Sequence: Synthetic peptide
GEIIGDIRKA

SEQ ID NO: 514 - protein, 9 aa, synthetic construct
  REGION 1..9: note = Description of Artificial Sequence: Synthetic peptide
AVAGWTDRV

SEQ ID NO: 515 - protein, 9 aa, synthetic construct
  REGION 1..9: note = Description of Artificial Sequence: Synthetic peptide
SLYNTVATL

SEQ ID NO: 516 - protein, 9 aa, synthetic construct
  REGION 1..9: note = Description of Artificial Sequence: Synthetic peptide
GEVGFPVRP

SEQ ID NO: 517 - protein, 9 aa, synthetic construct
  REGION 1..9: note = Description of Artificial Sequence: Synthetic peptide
VVAGWTDRV

SEQ ID NO: 518 - protein, 9 aa, synthetic construct
  REGION 1..9: note = Description of Artificial Sequence: Synthetic peptide
TETLLVQNA

SEQ ID NO: 519 - protein, 9 aa, synthetic construct
  REGION 1..9: note = Description of Artificial Sequence: Synthetic peptide
IEVKDTKEA

SEQ ID NO: 520 - protein, 9 aa, synthetic construct
  REGION 1..9: note = Description of Artificial Sequence: Synthetic peptide
FTSAAVKAA

SEQ ID NO: 521 - protein, 9 aa, synthetic construct
  REGION 1..9: note = Description of Artificial Sequence: Synthetic peptide
ILKDPVHGA

SEQ ID NO: 522 - protein, 10 aa, synthetic construct
  REGION 1..10: note = Description of Artificial Sequence: Synthetic peptide
KAYDTEVHNV

SEQ ID NO: 523 - protein, 9 aa, synthetic construct
  REGION 1..9: note = Description of Artificial Sequence: Synthetic peptide
ILKEPVHGV

SEQ ID NO: 524 - protein, 10 aa, synthetic construct
  REGION 1..10: note = Description of Artificial Sequence: Synthetic peptide
LTRDGGITSA

SEQ ID NO: 525 - protein, 9 aa, synthetic construct
  REGION 1..9: note = Description of Artificial Sequence: Synthetic peptide
DIIGDIRQA

SEQ ID NO: 526 - protein, 10 aa, synthetic construct
  REGION 1..10: note = Description of Artificial Sequence: Synthetic peptide
RQIDSISERV

SEQ ID NO: 527 - protein, 9 aa, synthetic construct
  REGION 1..9: note = Description of Artificial Sequence: Synthetic peptide
RVIEIVQGI

SEQ ID NO: 528 - protein, 9 aa, synthetic construct
  REGION 1..9: note = Description of Artificial Sequence: Synthetic peptide
RVIETVQRL

SEQ ID NO: 529 - protein, 9 aa, synthetic construct
  REGION 1..9: note = Description of Artificial Sequence: Synthetic peptide
AVLSVINRV

SEQ ID NO: 530 - protein, 9 aa, synthetic construct
  REGION 1..9: note = Description of Artificial Sequence: Synthetic peptide
QLAEVVQKV

SEQ ID NO: 531 - protein, 9 aa, synthetic construct
  REGION 1..9: note = Description of Artificial Sequence: Synthetic peptide
RVIEIGQGI

SEQ ID NO: 532 - protein, 9 aa, synthetic construct
  REGION 1..9: note = Description of Artificial Sequence: Synthetic peptide
IVTDSQYAL

SEQ ID NO: 533 - protein, 9 aa, synthetic construct
  REGION 1..9: note = Description of Artificial Sequence: Synthetic peptide
IQDNSDIKV

SEQ ID NO: 534 - protein, 11 aa, synthetic construct
  REGION 1..11: note = Description of Artificial Sequence: Synthetic peptide
VVIQDNSDIKV

SEQ ID NO: 535 - protein, 9 aa, synthetic construct
  REGION 1..9: note = Description of Artificial Sequence: Synthetic peptide
AVLSIISRV

SEQ ID NO: 536 - protein, 9 aa, synthetic construct
  REGION 1..9: note = Description of Artificial Sequence: Synthetic peptide
AVLSIINRV

SEQ ID NO: 537 - protein, 9 aa, synthetic construct
  REGION 1..9: note = Description of Artificial Sequence: Synthetic peptide
AVVGLVVAL

SEQ ID NO: 538 - protein, 9 aa, synthetic construct
  REGION 1..9: note = Description of Artificial Sequence: Synthetic peptide
AAVDLSHFL

SEQ ID NO: 539 - protein, 9 aa, synthetic construct
  REGION 1..9: note = Description of Artificial Sequence: Synthetic peptide
VLAEAMSQV

SEQ ID NO: 540 - protein, 9 aa, synthetic construct
  REGION 1..9: note = Description of Artificial Sequence: Synthetic peptide
SQIYAGIKV

SEQ ID NO: 541 - protein, 9 aa, synthetic construct
  REGION 1..9: note = Description of Artificial Sequence: Synthetic peptide
YDLGDINNL

SEQ ID NO: 542 - protein, 11 aa, synthetic construct
  REGION 1..11: note = Description of Artificial Sequence: Synthetic peptide
TQIDPDLADQL

SEQ ID NO: 543 - protein, 9 aa, synthetic construct
  REGION 1..9: note = Description of Artificial Sequence: Synthetic peptide
SAINLLDTI

SEQ ID NO: 544 - protein, 9 aa, synthetic construct
  REGION 1..9: note = Description of Artificial Sequence: Synthetic peptide
AIVGLIVAL

SEQ ID NO: 545 - protein, 9 aa, synthetic construct
  REGION 1..9: note = Description of Artificial Sequence: Synthetic peptide
GGIGGFIKV

SEQ ID NO: 546 - protein, 9 aa, synthetic construct
  REGION 1..9: note = Description of Artificial Sequence: Synthetic peptide
IVTDSQYVL

SEQ ID NO: 547 - protein, 9 aa, synthetic construct
  REGION 1..9: note = Description of Artificial Sequence: Synthetic peptide
SQIYPGIKV

SEQ ID NO: 548 - protein, 9 aa, synthetic construct
  REGION 1..9: note = Description of Artificial Sequence: Synthetic peptide
VQLNESVTI

SEQ ID NO: 549 - protein, 9 aa, synthetic construct
  REGION 1..9: note = Description of Artificial Sequence: Synthetic peptide
NTIEMKEEV

SEQ ID NO: 550 - protein, 9 aa, synthetic construct
  REGION 1..9: note = Description of Artificial Sequence: Synthetic peptide
YSTQIDPDL

SEQ ID NO: 551 - protein, 9 aa, synthetic construct
  REGION 1..9: note = Description of Artificial Sequence: Synthetic peptide
KALTDIVTL

SEQ ID NO: 552 - protein, 10 aa, synthetic construct
  REGION 1..10: note = Description of Artificial Sequence: Synthetic peptide
TVLDVGDAYF

SEQ ID NO: 553 - protein, 9 aa, synthetic construct
  REGION 1..9: note = Description of Artificial Sequence: Synthetic peptide
KALTDVVTL

SEQ ID NO: 554 - protein, 9 aa, synthetic construct
  REGION 1..9: note = Description of Artificial Sequence: Synthetic peptide
VLAEAMSQA

SEQ ID NO: 555 - protein, 9 aa, synthetic construct
  REGION 1..9: note = Description of Artificial Sequence: Synthetic peptide
SLVDTIAIV

SEQ ID NO: 556 - protein, 9 aa, synthetic construct
  REGION 1..9: note = Description of Artificial Sequence: Synthetic peptide
EQVPPLVSL

SEQ ID NO: 557 - protein, 10 aa, synthetic construct
  REGION 1..10: note = Description of Artificial Sequence: Synthetic peptide
KVVKIEPLGV

SEQ ID NO: 558 - protein, 11 aa, synthetic construct
  REGION 1..11: note = Description of Artificial Sequence: Synthetic peptide
TQIDPDQADQL

SEQ ID NO: 559 - protein, 9 aa, synthetic construct
  REGION 1..9: note = Description of Artificial Sequence: Synthetic peptide
GAASITLTV

SEQ ID NO: 560 - protein, 9 aa, synthetic construct
  REGION 1..9: note = Description of Artificial Sequence: Synthetic peptide
SIVTRTVEL

SEQ ID NO: 561 - protein, 9 aa, synthetic construct
  REGION 1..9: note = Description of Artificial Sequence: Synthetic peptide
QIMEQLQSA

SEQ ID NO: 562 - protein, 9 aa, synthetic construct
  REGION 1..9: note = Description of Artificial Sequence: Synthetic peptide
YQLEKDPIV

SEQ ID NO: 563 - protein, 9 aa, synthetic construct
  REGION 1..9: note = Description of Artificial Sequence: Synthetic peptide
YDLGNDINL

SEQ ID NO: 564 - protein, 9 aa, synthetic construct
  REGION 1..9: note = Description of Artificial Sequence: Synthetic peptide
YDLGDDNNL

SEQ ID NO: 565 - protein, 9 aa, synthetic construct
  REGION 1..9: note = Description of Artificial Sequence: Synthetic peptide
SAVNLYDTI

SEQ ID NO: 566 - protein, 9 aa, synthetic construct
  REGION 1..9: note = Description of Artificial Sequence: Synthetic peptide
LLDTIAIAV

SEQ ID NO: 567 - protein, 9 aa, synthetic construct
  REGION 1..9: note = Description of Artificial Sequence: Synthetic peptide
YVDRFFKTL

SEQ ID NO: 568 - protein, 9 aa, synthetic construct
  REGION 1..9: note = Description of Artificial Sequence: Synthetic peptide
SLDEIWENM

SEQ ID NO: 569 - protein, 9 aa, synthetic construct
  REGION 1..9: note = Description of Artificial Sequence: Synthetic peptide
QLAEVVQKV

SEQ ID NO: 570 - protein, 9 aa, synthetic construct
  REGION 1..9: note = Description of Artificial Sequence: Synthetic peptide
AVLSVINRV

SEQ ID NO: 571 - protein, 9 aa, synthetic construct
  REGION 1..9: note = Description of Artificial Sequence: Synthetic peptide
YVDRFFKAL

SEQ ID NO: 572 - protein, 9 aa, synthetic construct
  REGION 1..9: note = Description of Artificial Sequence: Synthetic peptide
LVDTIAIVV

SEQ ID NO: 573 - protein, 9 aa, synthetic construct
  REGION 1..9: note = Description of Artificial Sequence: Synthetic peptide
AVLSIINRV

SEQ ID NO: 574 - protein, 10 aa, synthetic construct
  REGION 1..10: note = Description of Artificial Sequence: Synthetic peptide
TLWQRPIVTV

SEQ ID NO: 575 - protein, 9 aa, synthetic construct
  REGION 1..9: note = Description of Artificial Sequence: Synthetic peptide
AVLSIISRV

SEQ ID NO: 576 - protein, 10 aa, synthetic construct
  REGION 1..10: note = Description of Artificial Sequence: Synthetic peptide
TLWQRPLVTV

SEQ ID NO: 577 - protein, 9 aa, synthetic construct
  REGION 1..9: note = Description of Artificial Sequence: Synthetic peptide
WTDRVIETV

SEQ ID NO: 578 - protein, 9 aa, synthetic construct
  REGION 1..9: note = Description of Artificial Sequence: Synthetic peptide
ILKEPVHGV

SEQ ID NO: 579 - protein, 9 aa, synthetic construct
  REGION 1..9: note = Description of Artificial Sequence: Synthetic peptide
QIDSISERV

SEQ ID NO: 580 - protein, 9 aa, synthetic construct
  REGION 1..9: note = Description of Artificial Sequence: Synthetic peptide
RVIETVQRL

SEQ ID NO: 581 - protein, 9 aa, synthetic construct
  REGION 1..9: note = Description of Artificial Sequence: Synthetic peptide
FSPEVIPMF

SEQ ID NO: 582 - protein, 9 aa, synthetic construct
  REGION 1..9: note = Description of Artificial Sequence: Synthetic peptide
YDLGDINNL

SEQ ID NO: 583 - protein, 9 aa, synthetic construct
  REGION 1..9: note = Description of Artificial Sequence: Synthetic peptide
VLAEAMSQV

SEQ ID NO: 584 - protein, 9 aa, synthetic construct
  REGION 1..9: note = Description of Artificial Sequence: Synthetic peptide
IIDIIASDL

SEQ ID NO: 585 - protein, 9 aa, synthetic construct
  REGION 1..9: note = Description of Artificial Sequence: Synthetic peptide
YVDRFFKIL

SEQ ID NO: 586 - protein, 9 aa, synthetic construct
  REGION 1..9: note = Description of Artificial Sequence: Synthetic peptide
RVIEIVQGI

SEQ ID NO: 587 - protein, 9 aa, synthetic construct
  REGION 1..9: note = Description of Artificial Sequence: Synthetic peptide
HLEGKVILV

SEQ ID NO: 588 - protein, 9 aa, synthetic construct
  REGION 1..9: note = Description of Artificial Sequence: Synthetic peptide
RVIETVQRL

SEQ ID NO: 589 - protein, 9 aa, synthetic construct
  REGION 1..9: note = Description of Artificial Sequence: Synthetic peptide
RVIEIVQGI

SEQ ID NO: 590 - protein, 9 aa, synthetic construct
  REGION 1..9: note = Description of Artificial Sequence: Synthetic peptide
LVSQIIEKL

SEQ ID NO: 591 - protein, 9 aa, synthetic construct
  REGION 1..9: note = Description of Artificial Sequence: Synthetic peptide
RVIEIGQGI

SEQ ID NO: 592 - protein, 9 aa, synthetic construct
  REGION 1..9: note = Description of Artificial Sequence: Synthetic peptide
KVISLTETT

SEQ ID NO: 593 - protein, 9 aa, synthetic construct
  REGION 1..9: note = Description of Artificial Sequence: Synthetic peptide
QLAEVVQKV

SEQ ID NO: 594 - protein, 9 aa, synthetic construct
  REGION 1..9: note = Description of Artificial Sequence: Synthetic peptide
AVVGLVVAL

SEQ ID NO: 595 - protein, 10 aa, synthetic construct
  REGION 1..10: note = Description of Artificial Sequence: Synthetic peptide
KVVKIEPLGV

SEQ ID NO: 596 - protein, 9 aa, synthetic construct
  REGION 1..9: note = Description of Artificial Sequence: Synthetic peptide
AVLSVINRV

SEQ ID NO: 597 - protein, 9 aa, synthetic construct
  REGION 1..9: note = Description of Artificial Sequence: Synthetic peptide
AVLSIINRV

SEQ ID NO: 598 - protein, 9 aa, synthetic construct
  REGION 1..9: note = Description of Artificial Sequence: Synthetic peptide
AVLSIISRV

SEQ ID NO: 599 - protein, 9 aa, synthetic construct
  REGION 1..9: note = Description of Artificial Sequence: Synthetic peptide
AIIRTLQQL

SEQ ID NO: 600 - protein, 9 aa, synthetic construct
  REGION 1..9: note = Description of Artificial Sequence: Synthetic peptide
KVVSLTETT

SEQ ID NO: 601 - protein, 9 aa, synthetic construct
  REGION 1..9: note = Description of Artificial Sequence: Synthetic peptide
WTVNDIQKL

SEQ ID NO: 602 - protein, 9 aa, synthetic construct
  REGION 1..9: note = Description of Artificial Sequence: Synthetic peptide
SVKTGTEEL

SEQ ID NO: 603 - protein, 9 aa, synthetic construct
  REGION 1..9: note = Description of Artificial Sequence: Synthetic peptide
AIIRILQQL

SEQ ID NO: 604 - protein, 9 aa, synthetic construct
  REGION 1..9: note = Description of Artificial Sequence: Synthetic peptide
IVTRTVELL

SEQ ID NO: 605 - protein, 9 aa, synthetic construct
  REGION 1..9: note = Description of Artificial Sequence: Synthetic peptide
VLAEAMSQA

SEQ ID NO: 606 - protein, 10 aa, synthetic construct
  REGION 1..10: note = Description of Artificial Sequence: Synthetic peptide
KAYDTEVHNV

SEQ ID NO: 607 - protein, 10 aa, synthetic construct
  REGION 1..10: note = Description of Artificial Sequence: Synthetic peptide
IEIGQGICRA

SEQ ID NO: 608 - protein, 9 aa, synthetic construct
  REGION 1..9: note = Description of Artificial Sequence: Synthetic peptide
LEKDPIVGA

SEQ ID NO: 609 - protein, 10 aa, synthetic construct
  REGION 1..10: note = Description of Artificial Sequence: Synthetic peptide
KIIEQLQPSV

SEQ ID NO: 610 - protein, 9 aa, synthetic construct
  REGION 1..9: note = Description of Artificial Sequence: Synthetic peptide
KIKPPLPSV

SEQ ID NO: 611 - protein, 9 aa, synthetic construct
  REGION 1..9: note = Description of Artificial Sequence: Synthetic peptide
LVNQIIEKL

SEQ ID NO: 612 - protein, 9 aa, synthetic construct
  REGION 1..9: note = Description of Artificial Sequence: Synthetic peptide
AIVGLIVAL

SEQ ID NO: 613 - protein, 9 aa, synthetic construct
  REGION 1..9: note = Description of Artificial Sequence: Synthetic peptide
RTWNATDQL

SEQ ID NO: 614 - protein, 9 aa, synthetic construct
  REGION 1..9: note = Description of Artificial Sequence: Synthetic peptide
VLAEAMSQV

SEQ ID NO: 615 - protein, 9 aa, synthetic construct
  REGION 1..9: note = Description of Artificial Sequence: Synthetic peptide
IIAKEIVAC

SEQ ID NO: 616 - protein, 10 aa, synthetic construct
  REGION 1..10: note = Description of Artificial Sequence: Synthetic peptide
RVLAEAMSQV

SEQ ID NO: 617 - protein, 11 aa, synthetic construct
  REGION 1..11: note = Description of Artificial Sequence: Synthetic peptide
VVIQDNSDIKV

SEQ ID NO: 618 - protein, 9 aa, synthetic construct
  REGION 1..9: note = Description of Artificial Sequence: Synthetic peptide
QIMEQLQSA

SEQ ID NO: 619 - protein, 9 aa, synthetic construct
  REGION 1..9: note = Description of Artificial Sequence: Synthetic peptide
GTAGSTMGA

SEQ ID NO: 620 - protein, 9 aa, synthetic construct
  REGION 1..9: note = Description of Artificial Sequence: Synthetic peptide
NVKNIIVQL

SEQ ID NO: 621 - protein, 10 aa, synthetic construct
  REGION 1..10: note = Description of Artificial Sequence: Synthetic peptide
RVLAEAMSQA

SEQ ID NO: 622 - protein, 10 aa, synthetic construct
  REGION 1..10: note = Description of Artificial Sequence: Synthetic peptide
KQYDQILIEI

SEQ ID NO: 623 - protein, 9 aa, synthetic construct
  REGION 1..9: note = Description of Artificial Sequence: Synthetic peptide
IEVKDTKEA

SEQ ID NO: 624 - protein, 10 aa, synthetic construct
  REGION 1..10: note = Description of Artificial Sequence: Synthetic peptide
KVVKLEPLGV

SEQ ID NO: 625 - protein, 9 aa, synthetic construct
  REGION 1..9: note = Description of Artificial Sequence: Synthetic peptide
ILKEPVHGV

SEQ ID NO: 626 - protein, 9 aa, synthetic construct
  REGION 1..9: note = Description of Artificial Sequence: Synthetic peptide
GEVGFPVRP

SEQ ID NO: 627 - protein, 10 aa, synthetic construct
  REGION 1..10: note = Description of Artificial Sequence: Synthetic peptide
RQIDSISERV

SEQ ID NO: 628 - protein, 10 aa, synthetic construct
  REGION 1..10: note = Description of Artificial Sequence: Synthetic peptide
KQYDQISIEI

SEQ ID NO: 629 - protein, 9 aa, synthetic construct
  REGION 1..9: note = Description of Artificial Sequence: Synthetic peptide
EIIGDIRKA

SEQ ID NO: 630 - protein, 9 aa, synthetic construct
  REGION 1..9: note = Description of Artificial Sequence: Synthetic peptide
VVKIEPLGV

SEQ ID NO: 631 - protein, 9 aa, synthetic construct
  REGION 1..9: note = Description of Artificial Sequence: Synthetic peptide
QIYPGIKVK

SEQ ID NO: 632 - protein, 9 aa, synthetic construct
  REGION 1..9: note = Description of Artificial Sequence: Synthetic peptide
QIYAGIKVK

SEQ ID NO: 633 - protein, 9 aa, synthetic construct
  REGION 1..9: note = Description of Artificial Sequence: Synthetic peptide
RILEPVRSK

SEQ ID NO: 634 - protein, 9 aa, synthetic construct
  REGION 1..9: note = Description of Artificial Sequence: Synthetic peptide
ALKALVTPK

SEQ ID NO: 635 - protein, 9 aa, synthetic construct
  REGION 1..9: note = Description of Artificial Sequence: Synthetic peptide
AIFQSSMTK

SEQ ID NO: 636 - protein, 10 aa, synthetic construct
  REGION 1..10: note = Description of Artificial Sequence: Synthetic peptide
RIKPPLPSVK

SEQ ID NO: 637 - protein, 9 aa, synthetic construct
  REGION 1..9: note = Description of Artificial Sequence: Synthetic peptide
RTNSPTSSR

SEQ ID NO: 638 - protein, 9 aa, synthetic construct
  REGION 1..9: note = Description of Artificial Sequence: Synthetic peptide
AIFQASMTK

SEQ ID NO: 639 - protein, 9 aa, synthetic construct
  REGION 1..9: note = Description of Artificial Sequence: Synthetic peptide
KILEPFRSK

SEQ ID NO: 640 - protein, 9 aa, synthetic construct
  REGION 1..9: note = Description of Artificial Sequence: Synthetic peptide
KILEPYRAK

SEQ ID NO: 641 - protein, 9 aa, synthetic construct
  REGION 1..9: note = Description of Artificial Sequence: Synthetic peptide
ALRALVEPK

SEQ ID NO: 642 - protein, 10 aa, synthetic construct
  REGION 1..10: note = Description of Artificial Sequence: Synthetic peptide
TVYYGVPVWK

SEQ ID NO: 643 - protein, 11 aa, synthetic construct
  REGION 1..11: note = Description of Artificial Sequence: Synthetic peptide
TVNDIQKLVGK

SEQ ID NO: 644 - protein, 11 aa, synthetic construct
  REGION 1..11: note = Description of Artificial Sequence: Synthetic peptide
RIKPPLPSVKK

SEQ ID NO: 645 - protein, 9 aa, synthetic construct
  REGION 1..9: note = Description of Artificial Sequence: Synthetic peptide
IIASDLQTK

SEQ ID NO: 646 - protein, 10 aa, synthetic construct
  REGION 1..10: note = Description of Artificial Sequence: Synthetic peptide
TVYYGVPIWK

SEQ ID NO: 647 - protein, 10 aa, synthetic construct
  REGION 1..10: note = Description of Artificial Sequence: Synthetic peptide
SLFGNDPLSQ

SEQ ID NO: 648 - protein, 9 aa, synthetic construct
  REGION 1..9: note = Description of Artificial Sequence: Synthetic peptide
QIIEKLIGK

SEQ ID NO: 649 - protein, 10 aa, synthetic construct
  REGION 1..10: note = Description of Artificial Sequence: Synthetic peptide
TLNNSTHSNK

SEQ ID NO: 650 - protein, 10 aa, synthetic construct
  REGION 1..10: note = Description of Artificial Sequence: Synthetic peptide
RIRQTPTAAR

SEQ ID NO: 651 - protein, 11 aa, synthetic construct
  REGION 1..11: note = Description of Artificial Sequence: Synthetic peptide
TVNDIQKLVGK

SEQ ID NO: 652 - protein, 10 aa, synthetic construct
  REGION 1..10: note = Description of Artificial Sequence: Synthetic peptide
TVQPINLPEK

SEQ ID NO: 653 - protein, 9 aa, synthetic construct
  REGION 1..9: note = Description of Artificial Sequence: Synthetic peptide
QIYPGIKVK

SEQ ID NO: 654 - protein, 10 aa, synthetic construct
  REGION 1..10: note = Description of Artificial Sequence: Synthetic peptide
TVQPIVLPDK

SEQ ID NO: 655 - protein, 9 aa, synthetic construct
  REGION 1..9: note = Description of Artificial Sequence: Synthetic peptide
GLDGLVYSK

SEQ ID NO: 656 - protein, 10 aa, synthetic construct
  REGION 1..10: note = Description of Artificial Sequence: Synthetic peptide
TVQPIELPEK

SEQ ID NO: 657 - protein, 9 aa, synthetic construct
  REGION 1..9: note = Description of Artificial Sequence: Synthetic peptide
VVNKTEWNK

SEQ ID NO: 658 - protein, 9 aa, synthetic construct
  REGION 1..9: note = Description of Artificial Sequence: Synthetic peptide
AIFQSSMTK

SEQ ID NO: 659 - protein, 9 aa, synthetic construct
  REGION 1..9: note = Description of Artificial Sequence: Synthetic peptide
GLDGLIYSK

SEQ ID NO: 660 - protein, 10 aa, synthetic construct
  REGION 1..10: note = Description of Artificial Sequence: Synthetic peptide
GSNFTSAAVK

SEQ ID NO: 661 - protein, 9 aa, synthetic construct
  REGION 1..9: note = Description of Artificial Sequence: Synthetic peptide
ALKALVTPK

SEQ ID NO: 662 - protein, 9 aa, synthetic construct
  REGION 1..9: note = Description of Artificial Sequence: Synthetic peptide
IIASDLQTK

SEQ ID NO: 663 - protein, 11 aa, synthetic construct
  REGION 1..11: note = Description of Artificial Sequence: Synthetic peptide
KIEPLGVAPTK

SEQ ID NO: 664 - protein, 9 aa, synthetic construct
  REGION 1..9: note = Description of Artificial Sequence: Synthetic peptide
RILEPVRSK

SEQ ID NO: 665 - protein, 11 aa, synthetic construct
  REGION 1..11: note = Description of Artificial Sequence: Synthetic peptide
VVSLTETTNQK

SEQ ID NO: 666 - protein, 9 aa, synthetic construct
  REGION 1..9: note = Description of Artificial Sequence: Synthetic peptide
AVDLSHFLK

SEQ ID NO: 667 - protein, 9 aa, synthetic construct
  REGION 1..9: note = Description of Artificial Sequence: Synthetic peptide
QIYAGIKVK

SEQ ID NO: 668 - protein, 9 aa, synthetic construct
  REGION 1..9: note = Description of Artificial Sequence: Synthetic peptide
QSNPYPEPK

SEQ ID NO: 669 - protein, 11 aa, synthetic construct
  REGION 1..11: note = Description of Artificial Sequence: Synthetic peptide
ATGEIIGDIRK

SEQ ID NO: 670 - protein, 9 aa, synthetic construct
  REGION 1..9: note = Description of Artificial Sequence: Synthetic peptide
APAGFAILK

SEQ ID NO: 671 - protein, 9 aa, synthetic construct
  REGION 1..9: note = Description of Artificial Sequence: Synthetic peptide
AIFQASMTK

SEQ ID NO: 672 - protein, 11 aa, synthetic construct
  REGION 1..11: note = Description of Artificial Sequence: Synthetic peptide
QSQGVVESMNK

SEQ ID NO: 673 - protein, 10 aa, synthetic construct
  REGION 1..10: note = Description of Artificial Sequence: Synthetic peptide
TLNNSTHSNK

SEQ ID NO: 674 - protein, 10 aa, synthetic construct
  REGION 1..10: note = Description of Artificial Sequence: Synthetic peptide
GGLDGLVYSK

SEQ ID NO: 675 - protein, 9 aa, synthetic construct
  REGION 1..9: note = Description of Artificial Sequence: Synthetic peptide
IIATDIQTK

SEQ ID NO: 676 - protein, 9 aa, synthetic construct
  REGION 1..9: note = Description of Artificial Sequence: Synthetic peptide
STITQACPK

SEQ ID NO: 677 - protein, 11 aa, synthetic construct
  REGION 1..11: note = Description of Artificial Sequence: Synthetic peptide
RVIEIVQGIGR

SEQ ID NO: 678 - protein, 11 aa, synthetic construct
  REGION 1..11: note = Description of Artificial Sequence: Synthetic peptide
RVIEIGQGICR

SEQ ID NO: 679 - protein, 10 aa, synthetic construct
  REGION 1..10: note = Description of Artificial Sequence: Synthetic peptide
SVKTGTEELK

SEQ ID NO: 680 - protein, 11 aa, synthetic construct
  REGION 1..11: note = Description of Artificial Sequence: Synthetic peptide
ATDIQTKELQK

SEQ ID NO: 681 - protein, 10 aa, synthetic construct
  REGION 1..10: note = Description of Artificial Sequence: Synthetic peptide
SILDIKQGPK

SEQ ID NO: 682 - protein, 10 aa, synthetic construct
  REGION 1..10: note = Description of Artificial Sequence: Synthetic peptide
VVESMNKELK

SEQ ID NO: 683 - protein, 11 aa, synthetic construct
  REGION 1..11: note = Description of Artificial Sequence: Synthetic peptide
ATGEIIGDIRK

SEQ ID NO: 684 - protein, 9 aa, synthetic construct
  REGION 1..9: note = Description of Artificial Sequence: Synthetic peptide
QIYPGIKVK

SEQ ID NO: 685 - protein, 9 aa, synthetic construct
  REGION 1..9: note = Description of Artificial Sequence: Synthetic peptide
STITQACPK

SEQ ID NO: 686 - protein, 11 aa, synthetic construct
  REGION 1..11: note = Description of Artificial Sequence: Synthetic peptide
TVNDIQKLVGK

SEQ ID NO: 687 - protein, 9 aa, synthetic construct
  REGION 1..9: note = Description of Artificial Sequence: Synthetic peptide
QIYAGIKVK

SEQ ID NO: 688 - protein, 9 aa, synthetic construct
  REGION 1..9: note = Description of Artificial Sequence: Synthetic peptide
APAGFAILK

SEQ ID NO: 689 - protein, 10 aa, synthetic construct
  REGION 1..10: note = Description of Artificial Sequence: Synthetic peptide
TVQPINLPEK

SEQ ID NO: 690 - protein, 9 aa, synthetic construct
  REGION 1..9: note = Description of Artificial Sequence: Synthetic peptide
AVDLSHFLK

SEQ ID NO: 691 - protein, 9 aa, synthetic construct
  REGION 1..9: note = Description of Artificial Sequence: Synthetic peptide
RILEPVRSK

SEQ ID NO: 692 - protein, 9 aa, synthetic construct
  REGION 1..9: note = Description of Artificial Sequence: Synthetic peptide
QSNPYPEPK

SEQ ID NO: 693 - protein, 10 aa, synthetic construct
  REGION 1..10: note = Description of Artificial Sequence: Synthetic peptide
AAVDLSHFLK

SEQ ID NO: 694 - protein, 10 aa, synthetic construct
  REGION 1..10: note = Description of Artificial Sequence: Synthetic peptide
GSNFTSAAVK

SEQ ID NO: 695 - protein, 9 aa, synthetic construct
  REGION 1..9: note = Description of Artificial Sequence: Synthetic peptide
APAGYAILK

SEQ ID NO: 696 - protein, 10 aa, synthetic construct
  REGION 1..10: note = Description of Artificial Sequence: Synthetic peptide
GGLDGLVYSK

SEQ ID NO: 697 - protein, 11 aa, synthetic construct
  REGION 1..11: note = Description of Artificial Sequence: Synthetic peptide
ATDIQTKELQK

SEQ ID NO: 698 - protein, 10 aa, synthetic construct
  REGION 1..10: note = Description of Artificial Sequence: Synthetic peptide
GGLDGLIYSK

SEQ ID NO: 699 - protein, 9 aa, synthetic construct
  REGION 1..9: note = Description of Artificial Sequence: Synthetic peptide
AIFQSSMTK

SEQ ID NO: 700 - protein, 9 aa, synthetic construct
  REGION 1..9: note = Description of Artificial Sequence: Synthetic peptide
GSLQYLALK

SEQ ID NO: 701 - protein, 10 aa, synthetic construct
  REGION 1..10: note = Description of Artificial Sequence: Synthetic peptide
TVQPIELPEK

SEQ ID NO: 702 - protein, 10 aa, synthetic construct
  REGION 1..10: note = Description of Artificial Sequence: Synthetic peptide
TVQPIVLPDK

SEQ ID NO: 703 - protein, 9 aa, synthetic construct
  REGION 1..9: note = Description of Artificial Sequence: Synthetic peptide
VVNKTEWNK

SEQ ID NO: 704 - protein, 10 aa, synthetic construct
  REGION 1..10: note = Description of Artificial Sequence: Synthetic peptide
ASMTLTVQAR

SEQ ID NO: 705 - protein, 11 aa, synthetic construct
  REGION 1..11: note = Description of Artificial Sequence: Synthetic peptide
RVIEIVQGIGR

SEQ ID NO: 706 - protein, 9 aa, synthetic construct
  REGION 1..9: note = Description of Artificial Sequence: Synthetic peptide
QIIEKLIEK

SEQ ID NO: 707 - protein, 11 aa, synthetic construct
  REGION 1..11: note = Description of Artificial Sequence: Synthetic peptide
RVIEIGQGICR

SEQ ID NO: 708 - protein, 11 aa, synthetic construct
  REGION 1..11: note = Description of Artificial Sequence: Synthetic peptide
VVSLTETTNQK

SEQ ID NO: 709 - protein, 9 aa, synthetic construct
  REGION 1..9: note = Description of Artificial Sequence: Synthetic peptide
QIIEKLIGK

SEQ ID NO: 710 - protein, 9 aa, synthetic construct
  REGION 1..9: note = Description of Artificial Sequence: Synthetic peptide
SAITQACPK

SEQ ID NO: 711 - protein, 8 aa, synthetic construct
  REGION 1..8: note = Description of Artificial Sequence: Synthetic peptide
PAGYAILK

SEQ ID NO: 712 - protein, 10 aa, synthetic construct
  REGION 1..10: note = Description of Artificial Sequence: Synthetic peptide
SQIYPGIKVK

SEQ ID NO: 713 - protein, 11 aa, synthetic construct
  REGION 1..11: note = Description of Artificial Sequence: Synthetic peptide
GIGEEIASPPK

SEQ ID NO: 714 - protein, 10 aa, synthetic construct
  REGION 1..10: note = Description of Artificial Sequence: Synthetic peptide
AQQTSIMMQR

SEQ ID NO: 715 - protein, 11 aa, synthetic construct
  REGION 1..11: note = Description of Artificial Sequence: Synthetic peptide
STLNNSTHSNK

SEQ ID NO: 716 - protein, 11 aa, synthetic construct
  REGION 1..11: note = Description of Artificial Sequence: Synthetic peptide
GVVESMNKELK

SEQ ID NO: 717 - protein, 9 aa, synthetic construct
  REGION 1..9: note = Description of Artificial Sequence: Synthetic peptide
GLDGLIYSK

SEQ ID NO: 718 - protein, 9 aa, synthetic construct
  REGION 1..9: note = Description of Artificial Sequence: Synthetic peptide
AIFQASMTK

SEQ ID NO: 719 - protein, 9 aa, synthetic construct
  REGION 1..9: note = Description of Artificial Sequence: Synthetic peptide
SALTQACPK

SEQ ID NO: 720 - protein, 9 aa, synthetic construct
  REGION 1..9: note = Description of Artificial Sequence: Synthetic peptide
GLDGLVYSK

SEQ ID NO: 721 - protein, 10 aa, synthetic construct
  REGION 1..10: note = Description of Artificial Sequence: Synthetic peptide
CTPAGYAILK

SEQ ID NO: 722 - protein, 11 aa, synthetic construct
  REGION 1..11: note = Description of Artificial Sequence: Synthetic peptide
VVMESIVIWGK

SEQ ID NO: 723 - protein, 10 aa, synthetic construct
  REGION 1..10: note = Description of Artificial Sequence: Synthetic peptide
SILDIKQGPK

SEQ ID NO: 724 - protein, 9 aa, synthetic construct
  REGION 1..9: note = Description of Artificial Sequence: Synthetic peptide
RTNSPTSSR

SEQ ID NO: 725 - protein, 11 aa, synthetic construct
  REGION 1..11: note = Description of Artificial Sequence: Synthetic peptide
ASITLTVQARK

SEQ ID NO: 726 - protein, 9 aa, synthetic construct
  REGION 1..9: note = Description of Artificial Sequence: Synthetic peptide
RVIETVQRL

SEQ ID NO: 727 - protein, 9 aa, synthetic construct
  REGION 1..9: note = Description of Artificial Sequence: Synthetic peptide
NYTQIIYNL

SEQ ID NO: 728 - protein, 10 aa, synthetic construct
  REGION 1..10: note = Description of Artificial Sequence: Synthetic peptide
TYFKNKTISF

SEQ ID NO: 729 - protein, 9 aa, synthetic construct
  REGION 1..9: note = Description of Artificial Sequence: Synthetic peptide
NYTIKIYEL

SEQ ID NO: 730 - protein, 9 aa, synthetic construct
  REGION 1..9: note = Description of Artificial Sequence: Synthetic peptide
DYVDRFFKI

SEQ ID NO: 731 - protein, 9 aa, synthetic construct
  REGION 1..9: note = Description of Artificial Sequence: Synthetic peptide
SYLRDQQLL

SEQ ID NO: 732 - protein, 9 aa, synthetic construct
  REGION 1..9: note = Description of Artificial Sequence: Synthetic peptide
VYWSQELKI

SEQ ID NO: 733 - protein, 9 aa, synthetic construct
  REGION 1..9: note = Description of Artificial Sequence: Synthetic peptide
IYQEPFKNL

SEQ ID NO: 734 - protein, 9 aa, synthetic construct
  REGION 1..9: note = Description of Artificial Sequence: Synthetic peptide
TENLWVTVY

SEQ ID NO: 735 - protein, 9 aa, synthetic construct
  REGION 1..9: note = Description of Artificial Sequence: Synthetic peptide
RYLKDQQLL

SEQ ID NO: 736 - protein, 10 aa, synthetic construct
  REGION 1..10: note = Description of Artificial Sequence: Synthetic peptide
KYWNNNTIIF

SEQ ID NO: 737 - protein, 9 aa, synthetic construct
  REGION 1..9: note = Description of Artificial Sequence: Synthetic peptide
NYTNLIYGL

SEQ ID NO: 738 - protein, 9 aa, synthetic construct
  REGION 1..9: note = Description of Artificial Sequence: Synthetic peptide
KQITKIQKF

SEQ ID NO: 739 - protein, 9 aa, synthetic construct
  REGION 1..9: note = Description of Artificial Sequence: Synthetic peptide
RYLRDQQLL

SEQ ID NO: 740 - protein, 9 aa, synthetic construct
  REGION 1..9: note = Description of Artificial Sequence: Synthetic peptide
YDLGDINNL

SEQ ID NO: 741 - protein, 9 aa, synthetic construct
  REGION 1..9: note = Description of Artificial Sequence: Synthetic peptide
AENLWVTVY

SEQ ID NO: 742 - protein, 9 aa, synthetic construct
  REGION 1..9: note = Description of Artificial Sequence: Synthetic peptide
NYTQIIYNL

SEQ ID NO: 743 - protein, 9 aa, synthetic construct
  REGION 1..9: note = Description of Artificial Sequence: Synthetic peptide
SYLRDQQLL

SEQ ID NO: 744 - protein, 10 aa, synthetic construct
  REGION 1..10: note = Description of Artificial Sequence: Synthetic peptide
TYFKNKTISF

SEQ ID NO: 745 - protein, 9 aa, synthetic construct
  REGION 1..9: note = Description of Artificial Sequence: Synthetic peptide
IYQEPFKNL

SEQ ID NO: 746 - protein, 9 aa, synthetic construct
  REGION 1..9: note = Description of Artificial Sequence: Synthetic peptide
FYKLDVVQI

SEQ ID NO: 747 - protein, 9 aa, synthetic construct
  REGION 1..9: note = Description of Artificial Sequence: Synthetic peptide
RYLKDQQLL

SEQ ID NO: 748 - protein, 9 aa, synthetic construct
  REGION 1..9: note = Description of Artificial Sequence: Synthetic peptide
YYDPSKELI

SEQ ID NO: 749 - protein, 9 aa, synthetic construct
  REGION 1..9: note = Description of Artificial Sequence: Synthetic peptide
NYTIKIYEL

SEQ ID NO: 750 - protein, 9 aa, synthetic construct
  REGION 1..9: note = Description of Artificial Sequence: Synthetic peptide
IYNTYGDTW

SEQ ID NO: 751 - protein, 9 aa, synthetic construct
  REGION 1..9: note = Description of Artificial Sequence: Synthetic peptide
DYVDRFFKI

SEQ ID NO: 752 - protein, 8 aa, synthetic construct
  REGION 1..8: note = Description of Artificial Sequence: Synthetic peptide
SYNITTEL

SEQ ID NO: 753 - protein, 9 aa, synthetic construct
  REGION 1..9: note = Description of Artificial Sequence: Synthetic peptide
RYLRDQQLL

SEQ ID NO: 754 - protein, 9 aa, synthetic construct
  REGION 1..9: note = Description of Artificial Sequence: Synthetic peptide
NYTNLIYGL

SEQ ID NO: 755 - protein, 9 aa, synthetic construct
  REGION 1..9: note = Description of Artificial Sequence: Synthetic peptide
YYDPSKDLI

SEQ ID NO: 756 - protein, 10 aa, synthetic construct
  REGION 1..10: note = Description of Artificial Sequence: Synthetic peptide
DTIAIAVAGW

SEQ ID NO: 757 - protein, 10 aa, synthetic construct
  REGION 1..10: note = Description of Artificial Sequence: Synthetic peptide
DTIAIVVAGW

SEQ ID NO: 758 - protein, 10 aa, synthetic construct
  REGION 1..10: note = Description of Artificial Sequence: Synthetic peptide
DTINEEAAEW

SEQ ID NO: 759 - protein, 9 aa, synthetic construct
  REGION 1..9: note = Description of Artificial Sequence: Synthetic peptide
EVIPMFSAL

SEQ ID NO: 760 - protein, 10 aa, synthetic construct
  REGION 1..10: note = Description of Artificial Sequence: Synthetic peptide
EQATQEVKSW

SEQ ID NO: 761 - protein, 10 aa, synthetic construct
  REGION 1..10: note = Description of Artificial Sequence: Synthetic peptide
DSSGLFNSTW

SEQ ID NO: 762 - protein, 10 aa, synthetic construct
  REGION 1..10: note = Description of Artificial Sequence: Synthetic peptide
EQATQEVKGW

SEQ ID NO: 763 - protein, 10 aa, synthetic construct
  REGION 1..10: note = Description of Artificial Sequence: Synthetic peptide
DTINEEAADW

SEQ ID NO: 764 - protein, 9 aa, synthetic construct
  REGION 1..9: note = Description of Artificial Sequence: Synthetic peptide
TIAIAVAGW

SEQ ID NO: 765 - protein, 10 aa, synthetic construct
  REGION 1..10: note = Description of Artificial Sequence: Synthetic peptide
EQATQDVKHW

SEQ ID NO: 766 - protein, 10 aa, synthetic construct
  REGION 1..10: note = Description of Artificial Sequence: Synthetic peptide
NTSGLFNSTW

SEQ ID NO: 767 - protein, 9 aa, synthetic construct
  REGION 1..9: note = Description of Artificial Sequence: Synthetic peptide
TIAIVVAGW

SEQ ID NO: 768 - protein, 9 aa, synthetic construct
  REGION 1..9: note = Description of Artificial Sequence: Synthetic peptide
ETPGTRYQY

SEQ ID NO: 769 - protein, 10 aa, synthetic construct
  REGION 1..10: note = Description of Artificial Sequence: Synthetic peptide
EVNIVTDSQY

SEQ ID NO: 770 - protein, 10 aa, synthetic construct
  REGION 1..10: note = Description of Artificial Sequence: Synthetic peptide
EVNIVTDSQY

SEQ ID NO: 771 - protein, 9 aa, synthetic construct
  REGION 1..9: note = Description of Artificial Sequence: Synthetic peptide
EVIPMFSAL

SEQ ID NO: 772 - protein, 9 aa, synthetic construct
  REGION 1..9: note = Description of Artificial Sequence: Synthetic peptide
ETPGTRYQY

SEQ ID NO: 773 - protein, 10 aa, synthetic construct
  REGION 1..10: note = Description of Artificial Sequence: Synthetic peptide
DTIAIAVAGW

SEQ ID NO: 774 - protein, 9 aa, synthetic construct
  REGION 1..9: note = Description of Artificial Sequence: Synthetic peptide
ETKLGKAGY

SEQ ID NO: 775 - protein, 9 aa, synthetic construct
  REGION 1..9: note = Description of Artificial Sequence: Synthetic peptide
ETPGIRYQY

SEQ ID NO: 776 - protein, 10 aa, synthetic construct
  REGION 1..10: note = Description of Artificial Sequence: Synthetic peptide
ETTNQKTELY

SEQ ID NO: 777 - protein, 10 aa, synthetic construct
  REGION 1..10: note = Description of Artificial Sequence: Synthetic peptide
DTIAIVVAGW

SEQ ID NO: 778 - protein, 10 aa, synthetic construct
  REGION 1..10: note = Description of Artificial Sequence: Synthetic peptide
EVIPAETGQE

SEQ ID NO: 779 - protein, 9 aa, synthetic construct
  REGION 1..9: note = Description of Artificial Sequence: Synthetic peptide
EIIGDIRKA

SEQ ID NO: 780 - protein, 9 aa, synthetic construct
  REGION 1..9: note = Description of Artificial Sequence: Synthetic peptide
DIIGDIRQA

SEQ ID NO: 781 - protein, 10 aa, synthetic construct
  REGION 1..10: note = Description of Artificial Sequence: Synthetic peptide
ETFRPGGGDM

SEQ ID NO: 782 - protein, 9 aa, synthetic construct
  REGION 1..9: note = Description of Artificial Sequence: Synthetic peptide
EVIPAETGQ

SEQ ID NO: 783 - protein, 9 aa, synthetic construct
  REGION 1..9: note = Description of Artificial Sequence: Synthetic peptide
TTNQKTELY

SEQ ID NO: 784 - protein, 9 aa, synthetic construct
  REGION 1..9: note = Description of Artificial Sequence: Synthetic peptide
EVIPMFSAL

SEQ ID NO: 785 - protein, 10 aa, synthetic construct
  REGION 1..10: note = Description of Artificial Sequence: Synthetic peptide
EVNIVTDSQY

SEQ ID NO: 786 - protein, 10 aa, synthetic construct
  REGION 1..10: note = Description of Artificial Sequence: Synthetic peptide
NIVGGHQAAM

SEQ ID NO: 787 - protein, 10 aa, synthetic construct
  REGION 1..10: note = Description of Artificial Sequence: Synthetic peptide
DTIAIAVAGW

SEQ ID NO: 788 - protein, 10 aa, synthetic construct
  REGION 1..10: note = Description of Artificial Sequence: Synthetic peptide
DTIAIVVAGW

SEQ ID NO: 789 - protein, 9 aa, synthetic construct
  REGION 1..9: note = Description of Artificial Sequence: Synthetic peptide
EQVPPLVSL

SEQ ID NO: 790 - protein, 9 aa, synthetic construct
  REGION 1..9: note = Description of Artificial Sequence: Synthetic peptide
NVKNIIVQL

SEQ ID NO: 791 - protein, 9 aa, synthetic construct
  REGION 1..9: note = Description of Artificial Sequence: Synthetic peptide
EVIPMFSAL

SEQ ID NO: 792 - protein, 10 aa, synthetic construct
  REGION 1..10: note = Description of Artificial Sequence: Synthetic peptide
DIIATDIQTR

SEQ ID NO: 793 - protein, 9 aa, synthetic construct
  REGION 1..9: note = Description of Artificial Sequence: Synthetic peptide
EIIGDIRKA

SEQ ID NO: 794 - protein, 9 aa, synthetic construct
  REGION 1..9: note = Description of Artificial Sequence: Synthetic peptide
DIIGDIRQA

SEQ ID NO: 795 - protein, 10 aa, synthetic construct
  REGION 1..10: note = Description of Artificial Sequence: Synthetic peptide
DTIAIAVAGW

SEQ ID NO: 796 - protein, 10 aa, synthetic construct
  REGION 1..10: note = Description of Artificial Sequence: Synthetic peptide
DTIAIVVAGW

SEQ ID NO: 797 - protein, 9 aa, synthetic construct
  REGION 1..9: note = Description of Artificial Sequence: Synthetic peptide
EIVQGIGRA

SEQ ID NO: 798 - protein, 10 aa, synthetic construct
  REGION 1..10: note = Description of Artificial Sequence: Synthetic peptide
DNSDIKVVPR

SEQ ID NO: 799 - protein, 9 aa, synthetic construct
  REGION 1..9: note = Description of Artificial Sequence: Synthetic peptide
GIAPTTAKR

SEQ ID NO: 800 - protein, 9 aa, synthetic construct
  REGION 1..9: note = Description of Artificial Sequence: Synthetic peptide
ESVTINCTR

SEQ ID NO: 801 - protein, 9 aa, synthetic construct
  REGION 1..9: note = Description of Artificial Sequence: Synthetic peptide
IVGGHQAAM

SEQ ID NO: 802 - protein, 9 aa, synthetic construct
  REGION 1..9: note = Description of Artificial Sequence: Synthetic peptide
NITGLILTR

SEQ ID NO: 803 - protein, 9 aa, synthetic construct
  REGION 1..9: note = Description of Artificial Sequence: Synthetic peptide
LFNTVATLY

SEQ ID NO: 804 - protein, 9 aa, synthetic construct
  REGION 1..9: note = Description of Artificial Sequence: Synthetic peptide
TVLDVGDAY

SEQ ID NO: 805 - protein, 9 aa, synthetic construct
  REGION 1..9: note = Description of Artificial Sequence: Synthetic peptide
LYNTVATLY

SEQ ID NO: 806 - protein, 10 aa, synthetic construct
  REGION 1..10: note = Description of Artificial Sequence: Synthetic peptide
VVWTIVGIEY

SEQ ID NO: 807 - protein, 10 aa, synthetic construct
  REGION 1..10: note = Description of Artificial Sequence: Synthetic peptide
VTFEPIPIHY

SEQ ID NO: 808 - protein, 9 aa, synthetic construct
  REGION 1..9: note = Description of Artificial Sequence: Synthetic peptide
SFEPIPIHY

SEQ ID NO: 809 - protein, 9 aa, synthetic construct
  REGION 1..9: note = Description of Artificial Sequence: Synthetic peptide
TFEPIPIHY

SEQ ID NO: 810 - protein, 9 aa, synthetic construct
  REGION 1..9: note = Description of Artificial Sequence: Synthetic peptide
NSSKVSQNY

SEQ ID NO: 811 - protein, 10 aa, synthetic construct
  REGION 1..10: note = Description of Artificial Sequence: Synthetic peptide
FLNKGLGISY

SEQ ID NO: 812 - protein, 9 aa, synthetic construct
  REGION 1..9: note = Description of Artificial Sequence: Synthetic peptide
SSSKVSQNY

SEQ ID NO: 813 - protein, 10 aa, synthetic construct
  REGION 1..10: note = Description of Artificial Sequence: Synthetic peptide
SLYNTVATLY

SEQ ID NO: 814 - protein, 9 aa, synthetic construct
  REGION 1..9: note = Description of Artificial Sequence: Synthetic peptide
TTNQKTELY

SEQ ID NO: 815 - protein, 9 aa, synthetic construct
  REGION 1..9: note = Description of Artificial Sequence: Synthetic peptide
LFNTVATLY

SEQ ID NO: 816 - protein, 9 aa, synthetic construct
  REGION 1..9: note = Description of Artificial Sequence: Synthetic peptide
GFFPDWQNY

SEQ ID NO: 817 - protein, 9 aa, synthetic construct
  REGION 1..9: note = Description of Artificial Sequence: Synthetic peptide
LYNTVATLY

SEQ ID NO: 818 - protein, 9 aa, synthetic construct
  REGION 1..9: note = Description of Artificial Sequence: Synthetic peptide
GYFPDWQNY

SEQ ID NO: 819 - protein, 9 aa, synthetic construct
  REGION 1..9: note = Description of Artificial Sequence: Synthetic peptide
SFEPIPIHY

SEQ ID NO: 820 - protein, 10 aa, synthetic construct
  REGION 1..10: note = Description of Artificial Sequence: Synthetic peptide
VTFEPIPIHY

SEQ ID NO: 821 - protein, 9 aa, synthetic construct
  REGION 1..9: note = Description of Artificial Sequence: Synthetic peptide
TFEPIPIHY

SEQ ID NO: 822 - protein, 9 aa, synthetic construct
  REGION 1..9: note = Description of Artificial Sequence: Synthetic peptide
NSSKVSQNY

SEQ ID NO: 823 - protein, 10 aa, synthetic construct
  REGION 1..10: note = Description of Artificial Sequence: Synthetic peptide
VVWTIVGIEY

SEQ ID NO: 824 - protein, 9 aa, synthetic construct
  REGION 1..9: note = Description of Artificial Sequence: Synthetic peptide
LNKGLGISY

SEQ ID NO: 825 - protein, 9 aa, synthetic construct
  REGION 1..9: note = Description of Artificial Sequence: Synthetic peptide
SSSKVSQNY

SEQ ID NO: 826 - protein, 9 aa, synthetic construct
  REGION 1..9: note = Description of Artificial Sequence: Synthetic peptide
TVLDVGDAY

SEQ ID NO: 827 - protein, 9 aa, synthetic construct
  REGION 1..9: note = Description of Artificial Sequence: Synthetic peptide
KYLGNLLLY

SEQ ID NO: 828 - protein, 9 aa, synthetic construct
  REGION 1..9: note = Description of Artificial Sequence: Synthetic peptide
TTNQKTELY

SEQ ID NO: 829 - protein, 9 aa, synthetic construct
  REGION 1..9: note = Description of Artificial Sequence: Synthetic peptide
KTRPPLPSV

SEQ ID NO: 830 - protein, 9 aa, synthetic construct
  REGION 1..9: note = Description of Artificial Sequence: Synthetic peptide
HEVIFNSTL

SEQ ID NO: 831 - protein, 10 aa, synthetic construct
  REGION 1..10: note = Description of Artificial Sequence: Synthetic peptide
AERQGPEPTF

SEQ ID NO: 832 - protein, 9 aa, synthetic construct
  REGION 1..9: note = Description of Artificial Sequence: Synthetic peptide
AEVVQKVTM

SEQ ID NO: 833 - protein, 10 aa, synthetic construct
  REGION 1..10: note = Description of Artificial Sequence: Synthetic peptide
VETGVGRPQV

SEQ ID NO: 834 - protein, 9 aa, synthetic construct
  REGION 1..9: note = Description of Artificial Sequence: Synthetic peptide
YDLGDINNL

SEQ ID NO: 835 - protein, 10 aa, synthetic construct
  REGION 1..10: note = Description of Artificial Sequence: Synthetic peptide
KEQVPPLVSL

SEQ ID NO: 836 - protein, 10 aa, synthetic construct
  REGION 1..10: note = Description of Artificial Sequence: Synthetic peptide
AERQGTGPTF

SEQ ID NO: 837 - protein, 9 aa, synthetic construct
  REGION 1..9: note = Description of Artificial Sequence: Synthetic peptide
KIKPPLPSV

SEQ ID NO: 838 - protein, 9 aa, synthetic construct
  REGION 1..9: note = Description of Artificial Sequence: Synthetic peptide
AEVVQKVVM

SEQ ID NO: 839 - protein, 10 aa, synthetic construct
  REGION 1..10: note = Description of Artificial Sequence: Synthetic peptide
LTRDGGITSA

SEQ ID NO: 840 - protein, 9 aa, synthetic construct
  REGION 1..9: note = Description of Artificial Sequence: Synthetic peptide
YDLGNDINL

SEQ ID NO: 841 - protein, 10 aa, synthetic construct
  REGION 1..10: note = Description of Artificial Sequence: Synthetic peptide
AEGQGTGPTL

SEQ ID NO: 842 - protein, 9 aa, synthetic construct
  REGION 1..9: note = Description of Artificial Sequence: Synthetic peptide
RIKPPLPSV

SEQ ID NO: 843 - protein, 9 aa, synthetic construct
  REGION 1..9: note = Description of Artificial Sequence: Synthetic peptide
SSSKVSQNY

SEQ ID NO: 844 - protein, 9 aa, synthetic construct
  REGION 1..9: note = Description of Artificial Sequence: Synthetic peptide
TTNQKTELY

SEQ ID NO: 845 - protein, 10 aa, synthetic construct
  REGION 1..10: note = Description of Artificial Sequence: Synthetic peptide
ILKDPVHGAY

SEQ ID NO: 846 - protein, 9 aa, synthetic construct
  REGION 1..9: note = Description of Artificial Sequence: Synthetic peptide
RVMGIERNY

SEQ ID NO: 847 - protein, 9 aa, synthetic construct
  REGION 1..9: note = Description of Artificial Sequence: Synthetic peptide
NSSKVSQNY

SEQ ID NO: 848 - protein, 9 aa, synthetic construct
  REGION 1..9: note = Description of Artificial Sequence: Synthetic peptide
GTEELRSLY

SEQ ID NO: 849 - protein, 10 aa, synthetic construct
  REGION 1..10: note = Description of Artificial Sequence: Synthetic peptide
GSSSKVSQNY

SEQ ID NO: 850 - protein, 9 aa, synthetic construct
  REGION 1..9: note = Description of Artificial Sequence: Synthetic peptide
TVLDVGDAY

SEQ ID NO: 851 - protein, 11 aa, synthetic construct
  REGION 1..11: note = Description of Artificial Sequence: Synthetic peptide
IGNSSKVSQNY

SEQ ID NO: 852 - protein, 11 aa, synthetic construct
  REGION 1..11: note = Description of Artificial Sequence: Synthetic peptide
STNNETPGTRY

SEQ ID NO: 853 - protein, 9 aa, synthetic construct
  REGION 1..9: note = Description of Artificial Sequence: Synthetic peptide
KAQEEHERY

SEQ ID NO: 854 - protein, 10 aa, synthetic construct
  REGION 1..10: note = Description of Artificial Sequence: Synthetic peptide
ILKEPVHGVY

SEQ ID NO: 855 - protein, 10 aa, synthetic construct
  REGION 1..10: note = Description of Artificial Sequence: Synthetic peptide
VQNAQGQMIY

SEQ ID NO: 856 - protein, 8 aa, synthetic construct
  REGION 1..8: note = Description of Artificial Sequence: Synthetic peptide
GQQIYNTY

SEQ ID NO: 857 - protein, 10 aa, synthetic construct
  REGION 1..10: note = Description of Artificial Sequence: Synthetic peptide
SSNNSNSNEY

SEQ ID NO: 858 - protein, 9 aa, synthetic construct
  REGION 1..9: note = Description of Artificial Sequence: Synthetic peptide
SSSKVSQNY

SEQ ID NO: 859 - protein, 9 aa, synthetic construct
  REGION 1..9: note = Description of Artificial Sequence: Synthetic peptide
TTNQKTELY

SEQ ID NO: 860 - protein, 9 aa, synthetic construct
  REGION 1..9: note = Description of Artificial Sequence: Synthetic peptide
RVMGIERNY

SEQ ID NO: 861 - protein, 9 aa, synthetic construct
  REGION 1..9: note = Description of Artificial Sequence: Synthetic peptide
GTEELRSLY

SEQ ID NO: 862 - protein, 10 aa, synthetic construct
  REGION 1..10: note = Description of Artificial Sequence: Synthetic peptide
FLNKGLGISY

SEQ ID NO: 863 - protein, 9 aa, synthetic construct
  REGION 1..9: note = Description of Artificial Sequence: Synthetic peptide
RIGPGQTFY

SEQ ID NO: 864 - protein, 9 aa, synthetic construct
  REGION 1..9: note = Description of Artificial Sequence: Synthetic peptide
NSSKVSQNY

SEQ ID NO: 865 - protein, 9 aa, synthetic construct
  REGION 1..9: note = Description of Artificial Sequence: Synthetic peptide
ITNSSVNMR

SEQ ID NO: 866 - protein, 9 aa, synthetic construct
  REGION 1..9: note = Description of Artificial Sequence: Synthetic peptide
QSNPYPKPR

SEQ ID NO: 867 - protein, 10 aa, synthetic construct
  REGION 1..10: note = Description of Artificial Sequence: Synthetic peptide
AQQTSIMMQR

SEQ ID NO: 868 - protein, 9 aa, synthetic construct
  REGION 1..9: note = Description of Artificial Sequence: Synthetic peptide
QQTSIMMQR

SEQ ID NO: 869 - protein, 11 aa, synthetic construct
  REGION 1..11: note = Description of Artificial Sequence: Synthetic peptide
RVIEIVQGIGR

SEQ ID NO: 870 - protein, 10 aa, synthetic construct
  REGION 1..10: note = Description of Artificial Sequence: Synthetic peptide
KTRPPLPSVR

SEQ ID NO: 871 - protein, 9 aa, synthetic construct
  REGION 1..9: note = Description of Artificial Sequence: Synthetic peptide
SYNVTTVLR

SEQ ID NO: 872 - protein, 11 aa, synthetic construct
  REGION 1..11: note = Description of Artificial Sequence: Synthetic peptide
RLRDLLSIVTR

SEQ ID NO: 873 - protein, 11 aa, synthetic construct
  REGION 1..11: note = Description of Artificial Sequence: Synthetic peptide
RVIEIGQGICR

SEQ ID NO: 874 - protein, 11 aa, synthetic construct
  REGION 1..11: note = Description of Artificial Sequence: Synthetic peptide
RQRQIDTLSER

SEQ ID NO: 875 - protein, 11 aa, synthetic construct
  REGION 1..11: note = Description of Artificial Sequence: Synthetic peptide
RQRQIDSISER

SEQ ID NO: 876 - protein, 9 aa, synthetic construct
  REGION 1..9: note = Description of Artificial Sequence: Synthetic peptide
RTNSPTSSR

SEQ ID NO: 877 - protein, 9 aa, synthetic construct
  REGION 1..9: note = Description of Artificial Sequence: Synthetic peptide
RQIDTLSER

SEQ ID NO: 878 - protein, 9 aa, synthetic construct
  REGION 1..9: note = Description of Artificial Sequence: Synthetic peptide
RQIDSISER

SEQ ID NO: 879 - protein, 10 aa, synthetic construct
  REGION 1..10: note = Description of Artificial Sequence: Synthetic peptide
VQHPNIMMQR

SEQ ID NO: 880 - protein, 11 aa, synthetic construct
  REGION 1..11: note = Description of Artificial Sequence: Synthetic peptide
QSQGVETGVGR

SEQ ID NO: 881 - protein, 9 aa, synthetic construct
  REGION 1..9: note = Description of Artificial Sequence: Synthetic peptide
ATLYCVHQR

SEQ ID NO: 882 - protein, 9 aa, synthetic construct
  REGION 1..9: note = Description of Artificial Sequence: Synthetic peptide
KQIINMWQR

SEQ ID NO: 883 - protein, 11 aa, synthetic construct
  REGION 1..11: note = Description of Artificial Sequence: Synthetic peptide
RVIETVQRLGR

SEQ ID NO: 884 - protein, 10 aa, synthetic construct
  REGION 1..10: note = Description of Artificial Sequence: Synthetic peptide
KIKPPLPSVR

SEQ ID NO: 885 - protein, 11 aa, synthetic construct
  REGION 1..11: note = Description of Artificial Sequence: Synthetic peptide
TVNDIQKLVGK

SEQ ID NO: 886 - protein, 11 aa, synthetic construct
  REGION 1..11: note = Description of Artificial Sequence: Synthetic peptide
QVQHPNIMMQR

SEQ ID NO: 887 - protein, 9 aa, synthetic construct
  REGION 1..9: note = Description of Artificial Sequence: Synthetic peptide
KGLGISYGR

SEQ ID NO: 888 - protein, 10 aa, synthetic construct
  REGION 1..10: note = Description of Artificial Sequence: Synthetic peptide
QVRDQAEHLR

SEQ ID NO: 889 - protein, 9 aa, synthetic construct
  REGION 1..9: note = Description of Artificial Sequence: Synthetic peptide
SYNITTELR

SEQ ID NO: 890 - protein, 11 aa, synthetic construct
  REGION 1..11: note = Description of Artificial Sequence: Synthetic peptide
QVQHTNIMMQR

SEQ ID NO: 891 - protein, 9 aa, synthetic construct
  REGION 1..9: note = Description of Artificial Sequence: Synthetic peptide
ILRQVVSPR

SEQ ID NO: 892 - protein, 9 aa, synthetic construct
  REGION 1..9: note = Description of Artificial Sequence: Synthetic peptide
YDLGDINNL

SEQ ID NO: 893 - protein, 11 aa, synthetic construct
  REGION 1..11: note = Description of Artificial Sequence: Synthetic peptide
VGPTPVNIIGR

SEQ ID NO: 894 - protein, 9 aa, synthetic construct
  REGION 1..9: note = Description of Artificial Sequence: Synthetic peptide
SYRHHFESR

SEQ ID NO: 895 - protein, 11 aa, synthetic construct
  REGION 1..11: note = Description of Artificial Sequence: Synthetic peptide
KTLHQVVEQLR

SEQ ID NO: 896 - protein, 9 aa, synthetic construct
  REGION 1..9: note = Description of Artificial Sequence: Synthetic peptide
VINRVRQGY

SEQ ID NO: 897 - protein, 10 aa, synthetic construct
  REGION 1..10: note = Description of Artificial Sequence: Synthetic peptide
SVINRVRQGY

SEQ ID NO: 898 - protein, 9 aa, synthetic construct
  REGION 1..9: note = Description of Artificial Sequence: Synthetic peptide
IISRVRQGY

SEQ ID NO: 899 - protein, 9 aa, synthetic construct
  REGION 1..9: note = Description of Artificial Sequence: Synthetic peptide
IINRVRQGY

SEQ ID NO: 900 - protein, 11 aa, synthetic construct
  REGION 1..11: note = Description of Artificial Sequence: Synthetic peptide
DSLPSEAGAER

SEQ ID NO: 901 - protein, 11 aa, synthetic construct
  REGION 1..11: note = Description of Artificial Sequence: Synthetic peptide
ETFYVDGAANR

SEQ ID NO: 902 - protein, 10 aa, synthetic construct
  REGION 1..10: note = Description of Artificial Sequence: Synthetic peptide
DNSDIKVVPR

SEQ ID NO: 903 - protein, 9 aa, synthetic construct
  REGION 1..9: note = Description of Artificial Sequence: Synthetic peptide
SYNVTTVLR

SEQ ID NO: 904 - protein, 10 aa, synthetic construct
  REGION 1..10: note = Description of Artificial Sequence: Synthetic peptide
DIIATDIQTR

SEQ ID NO: 905 - protein, 9 aa, synthetic construct
  REGION 1..9: note = Description of Artificial Sequence: Synthetic peptide
SYRHHFESR

SEQ ID NO: 906 - protein, 11 aa, synthetic construct
  REGION 1..11: note = Description of Artificial Sequence: Synthetic peptide
DVKQGPKEPFR

SEQ ID NO: 907 - protein, 9 aa, synthetic construct
  REGION 1..9: note = Description of Artificial Sequence: Synthetic peptide
DSRLALKHR

SEQ ID NO: 908 - protein, 11 aa, synthetic construct
  REGION 1..11: note = Description of Artificial Sequence: Synthetic peptide
DSKLALKHVAR

SEQ ID NO: 909 - protein, 10 aa, synthetic construct
  REGION 1..10: note = Description of Artificial Sequence: Synthetic peptide
DCFSDSAIRR

SEQ ID NO: 910 - protein, 11 aa, synthetic construct
  REGION 1..11: note = Description of Artificial Sequence: Synthetic peptide
ENLAFQQGEAR

SEQ ID NO: 911 - protein, 9 aa, synthetic construct
  REGION 1..9: note = Description of Artificial Sequence: Synthetic peptide
DAWEKIRLR

SEQ ID NO: 912 - protein, 11 aa, synthetic construct
  REGION 1..11: note = Description of Artificial Sequence: Synthetic peptide
EARKFSSEQTR

SEQ ID NO: 913 - protein, 9 aa, synthetic construct
  REGION 1..9: note = Description of Artificial Sequence: Synthetic peptide
QARVLAVER

SEQ ID NO: 914 - protein, 9 aa, synthetic construct
  REGION 1..9: note = Description of Artificial Sequence: Synthetic peptide
SYNITTELR

SEQ ID NO: 915 - protein, 11 aa, synthetic construct
  REGION 1..11: note = Description of Artificial Sequence: Synthetic peptide
DIRQGPKESFR

SEQ ID NO: 916 - protein, 9 aa, synthetic construct
  REGION 1..9: note = Description of Artificial Sequence: Synthetic peptide
EYKKLLKQR

SEQ ID NO: 917 - protein, 9 aa, synthetic construct
  REGION 1..9: note = Description of Artificial Sequence: Synthetic peptide
NITGLILTR

SEQ ID NO: 918 - protein, 11 aa, synthetic construct
  REGION 1..11: note = Description of Artificial Sequence: Synthetic peptide
EPLGVAPTKAR

SEQ ID NO: 919 - protein, 9 aa, synthetic construct
  REGION 1..9: note = Description of Artificial Sequence: Synthetic peptide
DAKAYETEK

SEQ ID NO: 920 - protein, 9 aa, synthetic construct
  REGION 1..9: note = Description of Artificial Sequence: Synthetic peptide
QSNPYPKPR

SEQ ID NO: 921 - protein, 11 aa, synthetic construct
  REGION 1..11: note = Description of Artificial Sequence: Synthetic peptide
ETFYVDGAANR

SEQ ID NO: 922 - protein, 9 aa, synthetic construct
  REGION 1..9: note = Description of Artificial Sequence: Synthetic peptide
ESVTINCTR

SEQ ID NO: 923 - protein, 9 aa, synthetic construct
  REGION 1..9: note = Description of Artificial Sequence: Synthetic peptide
SYNVTTVLR

SEQ ID NO: 924 - protein, 9 aa, synthetic construct
  REGION 1..9: note = Description of Artificial Sequence: Synthetic peptide
ITNSSVNMR

SEQ ID NO: 925 - protein, 9 aa, synthetic construct
  REGION 1..9: note = Description of Artificial Sequence: Synthetic peptide
EYKKLLKQR

SEQ ID NO: 926 - protein, 9 aa, synthetic construct
  REGION 1..9: note = Description of Artificial Sequence: Synthetic peptide
QSNPYPKPR

SEQ ID NO: 927 - protein, 10 aa, synthetic construct
  REGION 1..10: note = Description of Artificial Sequence: Synthetic peptide
DNSDIKVVPR

SEQ ID NO: 928 - protein, 9 aa, synthetic construct
  REGION 1..9: note = Description of Artificial Sequence: Synthetic peptide
QARVLAVER

SEQ ID NO: 929 - protein, 11 aa, synthetic construct
  REGION 1..11: note = Description of Artificial Sequence: Synthetic peptide
EPLGVAPTKAR

SEQ ID NO: 930 - protein, 9 aa, synthetic construct
  REGION 1..9: note = Description of Artificial Sequence: Synthetic peptide
SYNITTELR

SEQ ID NO: 931 - protein, 9 aa, synthetic construct
  REGION 1..9: note = Description of Artificial Sequence: Synthetic peptide
FYVDGAANR

SEQ ID NO: 932 - protein, 11 aa, synthetic construct
  REGION 1..11: note = Description of Artificial Sequence: Synthetic peptide
EPLGVAPTRAR

SEQ ID NO: 933 - protein, 11 aa, synthetic construct
  REGION 1..11: note = Description of Artificial Sequence: Synthetic peptide
TVNDIQKLVGK

SEQ ID NO: 934 - protein, 11 aa, synthetic construct
  REGION 1..11: note = Description of Artificial Sequence: Synthetic peptide
EARKFSSEQTR

SEQ ID NO: 935 - protein, 11 aa, synthetic construct
  REGION 1..11: note = Description of Artificial Sequence: Synthetic peptide
DSLPSEAGAER

SEQ ID NO: 936 - protein, 11 aa, synthetic construct
  REGION 1..11: note = Description of Artificial Sequence: Synthetic peptide
ESNITGLILTR

SEQ ID NO: 937 - protein, 9 aa, synthetic construct
  REGION 1..9: note = Description of Artificial Sequence: Synthetic peptide
NSDIKVVPR

SEQ ID NO: 938 - protein, 8 aa, synthetic construct
  REGION 1..8: note = Description of Artificial Sequence: Synthetic peptide
MTLTVQAR

SEQ ID NO: 939 - protein, 10 aa, synthetic construct
  REGION 1..10: note = Description of Artificial Sequence: Synthetic peptide
EVHIPIGDAR

SEQ ID NO: 940 - protein, 11 aa, synthetic construct
  REGION 1..11: note = Description of Artificial Sequence: Synthetic peptide
QAQQTSIMMQR

SEQ ID NO: 941 - protein, 8 aa, synthetic construct
  REGION 1..8: note = Description of Artificial Sequence: Synthetic peptide
NTSELFNR

SEQ ID NO: 942 - protein, 8 aa, synthetic construct
  REGION 1..8: note = Description of Artificial Sequence: Synthetic peptide
ENLAFQQR

SEQ ID NO: 943 - protein, 10 aa, synthetic construct
  REGION 1..10: note = Description of Artificial Sequence: Synthetic peptide
ELKKIIGQVR

SEQ ID NO: 944 - protein, 8 aa, synthetic construct
  REGION 1..8: note = Description of Artificial Sequence: Synthetic peptide
HTNIMMQR

SEQ ID NO: 945 - protein, 9 aa, synthetic construct
  REGION 1..9: note = Description of Artificial Sequence: Synthetic peptide
IRQTPTAAR

SEQ ID NO: 946 - protein, 9 aa, synthetic construct
  REGION 1..9: note = Description of Artificial Sequence: Synthetic peptide
NITGLILTR

SEQ ID NO: 947 - protein, 11 aa, synthetic construct
  REGION 1..11: note = Description of Artificial Sequence: Synthetic peptide
ETFRPGGGDMR

SEQ ID NO: 948 - protein, 10 aa, synthetic construct
  REGION 1..10: note = Description of Artificial Sequence: Synthetic peptide
QVRDQAEHLR

SEQ ID NO: 949 - protein, 11 aa, synthetic construct
  REGION 1..11: note = Description of Artificial Sequence: Synthetic peptide
QSQGVETGVGR

SEQ ID NO: 950 - protein, 10 aa, synthetic construct
  REGION 1..10: note = Description of Artificial Sequence: Synthetic peptide
DIIATDIQTR

SEQ ID NO: 951 - protein, 9 aa, synthetic construct
  REGION 1..9: note = Description of Artificial Sequence: Synthetic peptide
FNLPPIVAK

SEQ ID NO: 952 - protein, 10 aa, synthetic construct
  REGION 1..10: note = Description of Artificial Sequence: Synthetic peptide
SFQTHTPNPR

SEQ ID NO: 953 - protein, 9 aa, synthetic construct
  REGION 1..9: note = Description of Artificial Sequence: Synthetic peptide
QQTSIMMQR

SEQ ID NO: 954 - protein, 9 aa, synthetic construct
  REGION 1..9: note = Description of Artificial Sequence: Synthetic peptide
MIHQSLSPR

SEQ ID NO: 955 - protein, 10 aa, synthetic construct
  REGION 1..10: note = Description of Artificial Sequence: Synthetic peptide
SNITGLILTR

SEQ ID NO: 956 - protein, 11 aa, synthetic construct
  REGION 1..11: note = Description of Artificial Sequence: Synthetic peptide
ETFYVDGAANR

SEQ ID NO: 957 - protein, 9 aa, synthetic construct
  REGION 1..9: note = Description of Artificial Sequence: Synthetic peptide
ESVTINCTR

SEQ ID NO: 958 - protein, 10 aa, synthetic construct
  REGION 1..10: note = Description of Artificial Sequence: Synthetic peptide
DIIATDIQTR

SEQ ID NO: 959 - protein, 10 aa, synthetic construct
  REGION 1..10: note = Description of Artificial Sequence: Synthetic peptide
DNSDIKVVPR

SEQ ID NO: 960 - protein, 9 aa, synthetic construct
  REGION 1..9: note = Description of Artificial Sequence: Synthetic peptide
NITGLILTR

SEQ ID NO: 961 - protein, 10 aa, synthetic construct
  REGION 1..10: note = Description of Artificial Sequence: Synthetic peptide
DCFSDSAIRR

SEQ ID NO: 962 - protein, 11 aa, synthetic construct
  REGION 1..11: note = Description of Artificial Sequence: Synthetic peptide
QSQGVETGVGR

SEQ ID NO: 963 - protein, 11 aa, synthetic construct
  REGION 1..11: note = Description of Artificial Sequence: Synthetic peptide
TVNDIQKLVGK

SEQ ID NO: 964 - protein, 11 aa, synthetic construct
  REGION 1..11: note = Description of Artificial Sequence: Synthetic peptide
ETFRPGGGDMR

SEQ ID NO: 965 - protein, 9 aa, synthetic construct
  REGION 1..9: note = Description of Artificial Sequence: Synthetic peptide
ITNSSVNMR

SEQ ID NO: 966 - protein, 11 aa, synthetic construct
  REGION 1..11: note = Description of Artificial Sequence: Synthetic peptide
NSITNSSVNMR

SEQ ID NO: 967 - protein, 9 aa, synthetic construct
  REGION 1..9: note = Description of Artificial Sequence: Synthetic peptide
ELVSQIIEK

SEQ ID NO: 968 - protein, 11 aa, synthetic construct
  REGION 1..11: note = Description of Artificial Sequence: Synthetic peptide
DSLPSEAGAER

SEQ ID NO: 969 - protein, 11 aa, synthetic construct
  REGION 1..11: note = Description of Artificial Sequence: Synthetic peptide
QAQQTSIMMQR

SEQ ID NO: 970 - protein, 9 aa, synthetic construct
  REGION 1..9: note = Description of Artificial Sequence: Synthetic peptide
QQTSIMMQR

SEQ ID NO: 971 - protein, 9 aa, synthetic construct
  REGION 1..9: note = Description of Artificial Sequence: Synthetic peptide
ELVNQIIEK

SEQ ID NO: 972 - protein, 11 aa, synthetic construct
  REGION 1..11: note = Description of Artificial Sequence: Synthetic peptide
ESNITGLILTR

SEQ ID NO: 973 - protein, 11 aa, synthetic construct
  REGION 1..11: note = Description of Artificial Sequence: Synthetic peptide
RVIEIVQGIGR

SEQ ID NO: 974 - protein, 10 aa, synthetic construct
  REGION 1..10: note = Description of Artificial Sequence: Synthetic peptide
EVNIVTDSQY

SEQ ID NO: 975 - protein, 9 aa, synthetic construct
  REGION 1..9: note = Description of Artificial Sequence: Synthetic peptide
EPLGVAPTR

SEQ ID NO: 976 - protein, 10 aa, synthetic construct
  REGION 1..10: note = Description of Artificial Sequence: Synthetic peptide
EPAQPLVSLK

SEQ ID NO: 977 - protein, 9 aa, synthetic construct
  REGION 1..9: note = Description of Artificial Sequence: Synthetic peptide
NSDIKVVPR

SEQ ID NO: 978 - protein, 10 aa, synthetic construct
  REGION 1..10: note = Description of Artificial Sequence: Synthetic peptide
ASITLTVQAR

SEQ ID NO: 979 - protein, 10 aa, synthetic construct
  REGION 1..10: note = Description of Artificial Sequence: Synthetic peptide
NTIEMKEEVR

SEQ ID NO: 980 - protein, 11 aa, synthetic construct
  REGION 1..11: note = Description of Artificial Sequence: Synthetic peptide
ESELVSQIIEK

SEQ ID NO: 981 - protein, 9 aa, synthetic construct
  REGION 1..9: note = Description of Artificial Sequence: Synthetic peptide
IIATDIQTR

SEQ ID NO: 982 - protein, 11 aa, synthetic construct
  REGION 1..11: note = Description of Artificial Sequence: Synthetic peptide
TAAEGVGAVSK

SEQ ID NO: 983 - protein, 10 aa, synthetic construct
  REGION 1..10: note = Description of Artificial Sequence: Synthetic peptide
ATGDIIGDIR

SEQ ID NO: 984 - protein, 10 aa, synthetic construct
  REGION 1..10: note = Description of Artificial Sequence: Synthetic peptide
ATGEIIGDIR

SEQ ID NO: 985 - protein, 9 aa, synthetic construct
  REGION 1..9: note = Description of Artificial Sequence: Synthetic peptide
QGVETGVGR

SEQ ID NO: 986 - protein, 9 aa, synthetic construct
  REGION 1..9: note = Description of Artificial Sequence: Synthetic peptide
NITGLLLTR

SEQ ID NO: 987 - protein, 9 aa, synthetic construct
  REGION 1..9: note = Description of Artificial Sequence: Synthetic peptide
GIAPTTAKR

SEQ ID NO: 988 - protein, 11 aa, synthetic construct
  REGION 1..11: note = Description of Artificial Sequence: Synthetic peptide
QSQGTETGVGR

SEQ ID NO: 989 - protein, 10 aa, synthetic construct
  REGION 1..10: note = Description of Artificial Sequence: Synthetic peptide
DIIATDIQTK

SEQ ID NO: 990 - protein, 10 aa, synthetic construct
  REGION 1..10: note = Description of Artificial Sequence: Synthetic peptide
DTIAIVVAGW

SEQ ID NO: 991 - protein, 10 aa, synthetic construct
  REGION 1..10: note = Description of Artificial Sequence: Synthetic peptide
SNITGLILTR

SEQ ID NO: 992 - protein, 10 aa, synthetic construct
  REGION 1..10: note = Description of Artificial Sequence: Synthetic peptide
ASMTLTVQAR

SEQ ID NO: 993 - protein, 9 aa, synthetic construct
  REGION 1..9: note = Description of Artificial Sequence: Synthetic peptide
TPAGYAILK

SEQ ID NO: 994 - protein, 11 aa, synthetic construct
  REGION 1..11: note = Description of Artificial Sequence: Synthetic peptide
VGPTPVNIIGR

SEQ ID NO: 995 - protein, 10 aa, synthetic construct
  REGION 1..10: note = Description of Artificial Sequence: Synthetic peptide
ESWTVNDIQK

SEQ ID NO: 996 - protein, 9 aa, synthetic construct
  REGION 1..9: note = Description of Artificial Sequence: Synthetic peptide
FAVLSVINR

SEQ ID NO: 997 - protein, 10 aa, synthetic construct
  REGION 1..10: note = Description of Artificial Sequence: Synthetic peptide
QTGAISPTSR

SEQ ID NO: 998 - protein, 9 aa, synthetic construct
  REGION 1..9: note = Description of Artificial Sequence: Synthetic peptide
ETAYFLLKL

SEQ ID NO: 999 - protein, 9 aa, synthetic construct
  REGION 1..9: note = Description of Artificial Sequence: Synthetic peptide
LVSQIIEKL

SEQ ID NO: 1000 - protein, 9 aa, synthetic construct
  REGION 1..9: note = Description of Artificial Sequence: Synthetic peptide
QLAEVVQKV

SEQ ID NO: 1001 - protein, 9 aa, synthetic construct
  REGION 1..9: note = Description of Artificial Sequence: Synthetic peptide
NTSAITQAC

SEQ ID NO: 1002 - protein, 9 aa, synthetic construct
  REGION 1..9: note = Description of Artificial Sequence: Synthetic peptide
EISNYTIKI

SEQ ID NO: 1003 - protein, 9 aa, synthetic construct
  REGION 1..9: note = Description of Artificial Sequence: Synthetic peptide
NTSTITQAC

SEQ ID NO: 1004 - protein, 9 aa, synthetic construct
  REGION 1..9: note = Description of Artificial Sequence: Synthetic peptide
NTIEMKEEV

SEQ ID NO: 1005 - protein, 9 aa, synthetic construct
  REGION 1..9: note = Description of Artificial Sequence: Synthetic peptide
TVNDIQKLV

SEQ ID NO: 1006 - protein, 9 aa, synthetic construct
  REGION 1..9: note = Description of Artificial Sequence: Synthetic peptide
EIFGIGEEI

SEQ ID NO: 1007 - protein, 9 aa, synthetic construct
  REGION 1..9: note = Description of Artificial Sequence: Synthetic peptide
NVKTIIVQL

SEQ ID NO: 1008 - protein, 9 aa, synthetic construct
  REGION 1..9: note = Description of Artificial Sequence: Synthetic peptide
NVKNIIVQL

SEQ ID NO: 1009 - protein, 9 aa, synthetic construct
  REGION 1..9: note = Description of Artificial Sequence: Synthetic peptide
YTIKIYELI

SEQ ID NO: 1010 - protein, 9 aa, synthetic construct
  REGION 1..9: note = Description of Artificial Sequence: Synthetic peptide
EVTTHSFNC

SEQ ID NO: 1011 - protein, 9 aa, synthetic construct
  REGION 1..9: note = Description of Artificial Sequence: Synthetic peptide
RVIEIVQGI

SEQ ID NO: 1012 - protein, 10 aa, synthetic construct
  REGION 1..10: note = Description of Artificial Sequence: Synthetic peptide
NTAENLWVTV

SEQ ID NO: 1013 - protein, 9 aa, synthetic construct
  REGION 1..9: note = Description of Artificial Sequence: Synthetic peptide
ETIILPCRI

SEQ ID NO: 1014 - protein, 9 aa, synthetic construct
  REGION 1..9: note = Description of Artificial Sequence: Synthetic peptide
NTVATLYCV

SEQ ID NO: 1015 - protein, 9 aa, synthetic construct
  REGION 1..9: note = Description of Artificial Sequence: Synthetic peptide
GAASITLTV

SEQ ID NO: 1016 - protein, 9 aa, synthetic construct
  REGION 1..9: note = Description of Artificial Sequence: Synthetic peptide
EVIPMFSAL

SEQ ID NO: 1017 - protein, 9 aa, synthetic construct
  REGION 1..9: note = Description of Artificial Sequence: Synthetic peptide
EISNYTNLI

SEQ ID NO: 1018 - protein, 9 aa, synthetic construct
  REGION 1..9: note = Description of Artificial Sequence: Synthetic peptide
DTITLQCRI

SEQ ID NO: 1019 - protein, 9 aa, synthetic construct
  REGION 1..9: note = Description of Artificial Sequence: Synthetic peptide
AVLSIINRV

SEQ ID NO: 1020 - protein, 9 aa, synthetic construct
  REGION 1..9: note = Description of Artificial Sequence: Synthetic peptide
RVIETVQRL

SEQ ID NO: 1021 - protein, 9 aa, synthetic construct
  REGION 1..9: note = Description of Artificial Sequence: Synthetic peptide
AVLSIISRV

SEQ ID NO: 1022 - protein, 11 aa, synthetic construct
  REGION 1..11: note = Description of Artificial Sequence: Synthetic peptide
EVNIVTDSQYV

SEQ ID NO: 1023 - protein, 11 aa, synthetic construct
  REGION 1..11: note = Description of Artificial Sequence: Synthetic peptide
ETFYVDGAANR

SEQ ID NO: 1024 - protein, 9 aa, synthetic construct
  REGION 1..9: note = Description of Artificial Sequence: Synthetic peptide
EALDKIEEI

SEQ ID NO: 1025 - protein, 9 aa, synthetic construct
  REGION 1..9: note = Description of Artificial Sequence: Synthetic peptide
AAVDLSHFL

SEQ ID NO: 1026 - protein, 9 aa, synthetic construct
  REGION 1..9: note = Description of Artificial Sequence: Synthetic peptide
MTSNPPIPV

SEQ ID NO: 1027 - protein, 9 aa, synthetic construct
  REGION 1..9: note = Description of Artificial Sequence: Synthetic peptide
LVNQIIEKL

SEQ ID NO: 1028 - protein, 9 aa, synthetic construct
  REGION 1..9: note = Description of Artificial Sequence: Synthetic peptide
AVLSVINRV

SEQ ID NO: 1029 - protein, 9 aa, synthetic construct
  REGION 1..9: note = Description of Artificial Sequence: Synthetic peptide
MTGNPPIPV

SEQ ID NO: 1030 - protein, 11 aa, synthetic construct
  REGION 1..11: note = Description of Artificial Sequence: Synthetic peptide
EVVQKVVMESI

SEQ ID NO: 1031 - protein, 9 aa, synthetic construct
  REGION 1..9: note = Description of Artificial Sequence: Synthetic peptide
EIFGMREEI

SEQ ID NO: 1032 - protein, 11 aa, synthetic construct
  REGION 1..11: note = Description of Artificial Sequence: Synthetic peptide
ESSNPKVSSEV

SEQ ID NO: 1033 - protein, 10 aa, synthetic construct
  REGION 1..10: note = Description of Artificial Sequence: Synthetic peptide
RPNNNTRTSI

SEQ ID NO: 1034 - protein, 9 aa, synthetic construct
  REGION 1..9: note = Description of Artificial Sequence: Synthetic peptide
SPAIFQSSM

SEQ ID NO: 1035 - protein, 10 aa, synthetic construct
  REGION 1..10: note = Description of Artificial Sequence: Synthetic peptide
SVRIGPGQTF

SEQ ID NO: 1036 - protein, 10 aa, synthetic construct
  REGION 1..10: note = Description of Artificial Sequence: Synthetic peptide
RPNNNTRKSV

SEQ ID NO: 1037 - protein, 10 aa, synthetic construct
  REGION 1..10: note = Description of Artificial Sequence: Synthetic peptide
SIRIGPGQSF

SEQ ID NO: 1038 - protein, 10 aa, synthetic construct
  REGION 1..10: note = Description of Artificial Sequence: Synthetic peptide
RPNNNTRRSV

SEQ ID NO: 1039 - protein, 9 aa, synthetic construct
  REGION 1..9: note = Description of Artificial Sequence: Synthetic peptide
SPAIFQASM

SEQ ID NO: 1040 - protein, 9 aa, synthetic construct
  REGION 1..9: note = Description of Artificial Sequence: Synthetic peptide
GPSHKARVL

SEQ ID NO: 1041 - protein, 10 aa, synthetic construct
  REGION 1..10: note = Description of Artificial Sequence: Synthetic peptide
RPAEPVPLQL

SEQ ID NO: 1042 - protein, 8 aa, synthetic construct
  REGION 1..8: note = Description of Artificial Sequence: Synthetic peptide
KPVVTTQL

SEQ ID NO: 1043 - protein, 8 aa, synthetic construct
  REGION 1..8: note = Description of Artificial Sequence: Synthetic peptide
KPVVSTQL

SEQ ID NO: 1044 - protein, 8 aa, synthetic construct
  REGION 1..8: note = Description of Artificial Sequence: Synthetic peptide
RPVVSTQL

SEQ ID NO: 1045 - protein, 10 aa, synthetic construct
  REGION 1..10: note = Description of Artificial Sequence: Synthetic peptide
SPIETVPVKL

SEQ ID NO: 1046 - protein, 10 aa, synthetic construct
  REGION 1..10: note = Description of Artificial Sequence: Synthetic peptide
SPISTVPVKL

SEQ ID NO: 1047 - protein, 10 aa, synthetic construct
  REGION 1..10: note = Description of Artificial Sequence: Synthetic peptide
VPTDPSPQEL

SEQ ID NO: 1048 - protein, 10 aa, synthetic construct
  REGION 1..10: note = Description of Artificial Sequence: Synthetic peptide
SPAATGVGAV

SEQ ID NO: 1049 - protein, 9 aa, synthetic construct
  REGION 1..9: note = Description of Artificial Sequence: Synthetic peptide
EPAQPLVSL

SEQ ID NO: 1050 - protein, 9 aa, synthetic construct
  REGION 1..9: note = Description of Artificial Sequence: Synthetic peptide
ALRTGTEEL

SEQ ID NO: 1051 - protein, 8 aa, synthetic construct
  REGION 1..8: note = Description of Artificial Sequence: Synthetic peptide
EVVQKVVM

SEQ ID NO: 1052 - protein, 8 aa, synthetic construct
  REGION 1..8: note = Description of Artificial Sequence: Synthetic peptide
EVVQKVTM

SEQ ID NO: 1053 - protein, 9 aa, synthetic construct
  REGION 1..9: note = Description of Artificial Sequence: Synthetic peptide
ESYLRDQQL

SEQ ID NO: 1054 - protein, 9 aa, synthetic construct
  REGION 1..9: note = Description of Artificial Sequence: Synthetic peptide
QLQARVLAL

SEQ ID NO: 1055 - protein, 8 aa, synthetic construct
  REGION 1..8: note = Description of Artificial Sequence: Synthetic peptide
ELLGHSSL

SEQ ID NO: 1056 - protein, 9 aa, synthetic construct
  REGION 1..9: note = Description of Artificial Sequence: Synthetic peptide
YPGIKVKQL

SEQ ID NO: 1057 - protein, 9 aa, synthetic construct
  REGION 1..9: note = Description of Artificial Sequence: Synthetic peptide
TLSERVLST

SEQ ID NO: 1058 - protein, 9 aa, synthetic construct
  REGION 1..9: note = Description of Artificial Sequence: Synthetic peptide
SIVTRTVEL

SEQ ID NO: 1059 - protein, 9 aa, synthetic construct
  REGION 1..9: note = Description of Artificial Sequence: Synthetic peptide
DVKDTKEAL

SEQ ID NO: 1060 - protein, 9 aa, synthetic construct
  REGION 1..9: note = Description of Artificial Sequence: Synthetic peptide
SISERVLSA

SEQ ID NO: 1061 - protein, 9 aa, synthetic construct
  REGION 1..9: note = Description of Artificial Sequence: Synthetic peptide
DSAIRKAIL

SEQ ID NO: 1062 - protein, 9 aa, synthetic construct
  REGION 1..9: note = Description of Artificial Sequence: Synthetic peptide
ELRISATSL

SEQ ID NO: 1063 - protein, 8 aa, synthetic construct
  REGION 1..8: note = Description of Artificial Sequence: Synthetic peptide
TTNQKTEL

SEQ ID NO: 1064 - protein, 8 aa, synthetic construct
  REGION 1..8: note = Description of Artificial Sequence: Synthetic peptide
HLKTAVQM

SEQ ID NO: 1065 - protein, 9 aa, synthetic construct
  REGION 1..9: note = Description of Artificial Sequence: Synthetic peptide
ELKSLFNTV

SEQ ID NO: 1066 - protein, 9 aa, synthetic construct
  REGION 1..9: note = Description of Artificial Sequence: Synthetic peptide
TGHNKVGSL

SEQ ID NO: 1067 - protein, 11 aa, synthetic construct
  REGION 1..11: note = Description of Artificial Sequence: Synthetic peptide
TQIDPDLADQL

SEQ ID NO: 1068 - protein, 11 aa, synthetic construct
  REGION 1..11: note = Description of Artificial Sequence: Synthetic peptide
TQIDPDQADQL

SEQ ID NO: 1069 - protein, 9 aa, synthetic construct
  REGION 1..9: note = Description of Artificial Sequence: Synthetic peptide
AQEEGEVGF

SEQ ID NO: 1070 - protein, 9 aa, synthetic construct
  REGION 1..9: note = Description of Artificial Sequence: Synthetic peptide
GQDQWTYQI

SEQ ID NO: 1071 - protein, 9 aa, synthetic construct
  REGION 1..9: note = Description of Artificial Sequence: Synthetic peptide
KMENVTEEF

SEQ ID NO: 1072 - protein, 9 aa, synthetic construct
  REGION 1..9: note = Description of Artificial Sequence: Synthetic peptide
RVIEIGQGI

SEQ ID NO: 1073 - protein, 9 aa, synthetic construct
  REGION 1..9: note = Description of Artificial Sequence: Synthetic peptide
IQKQGQDQW

SEQ ID NO: 1074 - protein, 10 aa, synthetic construct
  REGION 1..10: note = Description of Artificial Sequence: Synthetic peptide
GQVRDQAEHL

SEQ ID NO: 1075 - protein, 10 aa, synthetic construct
  REGION 1..10: note = Description of Artificial Sequence: Synthetic peptide
RQIDSISERI

SEQ ID NO: 1076 - protein, 9 aa, synthetic construct
  REGION 1..9: note = Description of Artificial Sequence: Synthetic peptide
GITSANETF

SEQ ID NO: 1077 - protein, 9 aa, synthetic construct
  REGION 1..9: note = Description of Artificial Sequence: Synthetic peptide
AQEEEEVGF

SEQ ID NO: 1078 - protein, 9 aa, synthetic construct
  REGION 1..9: note = Description of Artificial Sequence: Synthetic peptide
AQEDDEVGF

SEQ ID NO: 1079 - protein, 10 aa, synthetic construct
  REGION 1..10: note = Description of Artificial Sequence: Synthetic peptide
GVNSSDSETF

SEQ ID NO: 1080 - protein, 8 aa, synthetic construct
  REGION 1..8: note = Description of Artificial Sequence: Synthetic peptide
RQGPEPTF

SEQ ID NO: 1081 - protein, 9 aa, synthetic construct
  REGION 1..9: note = Description of Artificial Sequence: Synthetic peptide
QLAEVVQKV

SEQ ID NO: 1082 - protein, 9 aa, synthetic construct
  REGION 1..9: note = Description of Artificial Sequence: Synthetic peptide
GAASITLTV

SEQ ID NO: 1083 - protein, 9 aa, synthetic construct
  REGION 1..9: note = Description of Artificial Sequence: Synthetic peptide
SQIYAGIKV

SEQ ID NO: 1084 - protein, 9 aa, synthetic construct
  REGION 1..9: note = Description of Artificial Sequence: Synthetic peptide
SQIYPGIKV

SEQ ID NO: 1085 - protein, 9 aa, synthetic construct
  REGION 1..9: note = Description of Artificial Sequence: Synthetic peptide
GQVDCSPGI

SEQ ID NO: 1086 - protein, 9 aa, synthetic construct
  REGION 1..9: note = Description of Artificial Sequence: Synthetic peptide
GAASMTLTV

SEQ ID NO: 1087 - protein, 8 aa, synthetic construct
  REGION 1..8: note = Description of Artificial Sequence: Synthetic peptide
SQVQHPNI

SEQ ID NO: 1088 - protein, 9 aa, synthetic construct
  REGION 1..9: note = Description of Artificial Sequence: Synthetic peptide
GQDQWTYQI

SEQ ID NO: 1089 - protein, 9 aa, synthetic construct
  REGION 1..9: note = Description of Artificial Sequence: Synthetic peptide
VQKVVMESI

SEQ ID NO: 1090 - protein, 9 aa, synthetic construct
  REGION 1..9: note = Description of Artificial Sequence: Synthetic peptide
RVIEIVQGI

SEQ ID NO: 1091 - protein, 9 aa, synthetic construct
  REGION 1..9: note = Description of Artificial Sequence: Synthetic peptide
VQNAQGQMI

SEQ ID NO: 1092 - protein, 9 aa, synthetic construct
  REGION 1..9: note = Description of Artificial Sequence: Synthetic peptide
VQLTEPVNI

SEQ ID NO: 1093 - protein, 9 aa, synthetic construct
  REGION 1..9: note = Description of Artificial Sequence: Synthetic peptide
AVLSVINRV

SEQ ID NO: 1094 - protein, 8 aa, synthetic construct
  REGION 1..8: note = Description of Artificial Sequence: Synthetic peptide
GQMIHQSL

SEQ ID NO: 1095 - protein, 9 aa, synthetic construct
  REGION 1..9: note = Description of Artificial Sequence: Synthetic peptide
VQKVTMESI

SEQ ID NO: 1096 - protein, 9 aa, synthetic construct
  REGION 1..9: note = Description of Artificial Sequence: Synthetic peptide
QQHMLKLTV

SEQ ID NO: 1097 - protein, 9 aa, synthetic construct
  REGION 1..9: note = Description of Artificial Sequence: Synthetic peptide
QQHLLKLTV

SEQ ID NO: 1098 - protein, 9 aa, synthetic construct
  REGION 1..9: note = Description of Artificial Sequence: Synthetic peptide
GQAMYAPPI

SEQ ID NO: 1099 - protein, 9 aa, synthetic construct
  REGION 1..9: note = Description of Artificial Sequence: Synthetic peptide
AVLSIINRV

SEQ ID NO: 1100 - protein, 9 aa, synthetic construct
  REGION 1..9: note = Description of Artificial Sequence: Synthetic peptide
RVIEIGQGI

SEQ ID NO: 1101 - protein, 9 aa, synthetic construct
  REGION 1..9: note = Description of Artificial Sequence: Synthetic peptide
VLAEAMSQV

SEQ ID NO: 1102 - protein, 8 aa, synthetic construct
  REGION 1..8: note = Description of Artificial Sequence: Synthetic peptide
SQAQQTSI

SEQ ID NO: 1103 - protein, 9 aa, synthetic construct
  REGION 1..9: note = Description of Artificial Sequence: Synthetic peptide
AVLSIISRV

SEQ ID NO: 1104 - protein, 9 aa, synthetic construct
  REGION 1..9: note = Description of Artificial Sequence: Synthetic peptide
VQLNESVTI

SEQ ID NO: 1105 - protein, 10 aa, synthetic construct
  REGION 1..10: note = Description of Artificial Sequence: Synthetic peptide
RQIDSISERV

SEQ ID NO: 1106 - protein, 9 aa, synthetic construct
  REGION 1..9: note = Description of Artificial Sequence: Synthetic peptide
SLAEGKVMI

SEQ ID NO: 1107 - protein, 10 aa, synthetic construct
  REGION 1..10: note = Description of Artificial Sequence: Synthetic peptide
RQIDSISERI

SEQ ID NO: 1108 - protein, 9 aa, synthetic construct
  REGION 1..9: note = Description of Artificial Sequence: Synthetic peptide
VVKIEPLGV

SEQ ID NO: 1109 - protein, 8 aa, synthetic construct
  REGION 1..8: note = Description of Artificial Sequence: Synthetic peptide
SQVQHTNI

SEQ ID NO: 1110 - protein, 8 aa, synthetic construct
  REGION 1..8: note = Description of Artificial Sequence: Synthetic peptide
VQLTPLCV

SEQ ID NO: 1111 - protein, 10 aa, synthetic construct
  REGION 1..10: note = Description of Artificial Sequence: Synthetic peptide
KQYDQISIEI

SEQ ID NO: 1112 - protein, 10 aa, synthetic construct
  REGION 1..10: note = Description of Artificial Sequence: Synthetic peptide
KQYDQILIEI

SEQ ID NO: 1113 - protein, 9 aa, synthetic construct
  REGION 1..9: note = Description of Artificial Sequence: Synthetic peptide
RVIETVQRL

SEQ ID NO: 1114 - protein, 9 aa, synthetic construct
  REGION 1..9: note = Description of Artificial Sequence: Synthetic peptide
ALTQACPKV

SEQ ID NO: 1115 - protein, 10 aa, synthetic construct
  REGION 1..10: note = Description of Artificial Sequence: Synthetic peptide
KVVKLEPLGV

SEQ ID NO: 1116 - protein, 8 aa, synthetic construct
  REGION 1..8: note = Description of Artificial Sequence: Synthetic peptide
GQMIYQSM

SEQ ID NO: 1117 - protein, 10 aa, synthetic construct
  REGION 1..10: note = Description of Artificial Sequence: Synthetic peptide
QQSQGVETGV

SEQ ID NO: 1118 - protein, 9 aa, synthetic construct
  REGION 1..9: note = Description of Artificial Sequence: Synthetic peptide
ERYLRDQQL

SEQ ID NO: 1119 - protein, 9 aa, synthetic construct
  REGION 1..9: note = Description of Artificial Sequence: Synthetic peptide
ERFALNPSL

SEQ ID NO: 1120 - protein, 8 aa, synthetic construct
  REGION 1..8: note = Description of Artificial Sequence: Synthetic peptide
ERVLSTCL

SEQ ID NO: 1121 - protein, 9 aa, synthetic construct
  REGION 1..9: note = Description of Artificial Sequence: Synthetic peptide
ERYLKDQQL

SEQ ID NO: 1122 - protein, 8 aa, synthetic construct
  REGION 1..8: note = Description of Artificial Sequence: Synthetic peptide
ERILSTCL

SEQ ID NO: 1123 - protein, 8 aa, synthetic construct
  REGION 1..8: note = Description of Artificial Sequence: Synthetic peptide
ERVLSASL

SEQ ID NO: 1124 - protein, 9 aa, synthetic construct
  REGION 1..9: note = Description of Artificial Sequence: Synthetic peptide
DQNPPSVSL

SEQ ID NO: 1125 - protein, 9 aa, synthetic construct
  REGION 1..9: note = Description of Artificial Sequence: Synthetic peptide
ERFALNPGL

SEQ ID NO: 1126 - protein, 9 aa, synthetic construct
  REGION 1..9: note = Description of Artificial Sequence: Synthetic peptide
ERYLRDQQL

SEQ ID NO: 1127 - protein, 8 aa, synthetic construct
  REGION 1..8: note = Description of Artificial Sequence: Synthetic peptide
GQMIHQSL

SEQ ID NO: 1128 - protein, 9 aa, synthetic construct
  REGION 1..9: note = Description of Artificial Sequence: Synthetic peptide
ERYLKDQQL

SEQ ID NO: 1129 - protein, 9 aa, synthetic construct
  REGION 1..9: note = Description of Artificial Sequence: Synthetic peptide
ESYLRDQQL

SEQ ID NO: 1130 - protein, 8 aa, synthetic construct
  REGION 1..8: note = Description of Artificial Sequence: Synthetic peptide
ELLGHSSL

SEQ ID NO: 1131 - protein, 9 aa, synthetic construct
  REGION 1..9: note = Description of Artificial Sequence: Synthetic peptide
VELLGHSSL

SEQ ID NO: 1132 - protein, 8 aa, synthetic construct
  REGION 1..8: note = Description of Artificial Sequence: Synthetic peptide
ERVLSTCL

SEQ ID NO: 1133 - protein, 8 aa, synthetic construct
  REGION 1..8: note = Description of Artificial Sequence: Synthetic peptide
ERVLSASL

SEQ ID NO: 1134 - protein, 9 aa, synthetic construct
  REGION 1..9: note = Description of Artificial Sequence: Synthetic peptide
ERFALNPSL

SEQ ID NO: 1135 - protein, 9 aa, synthetic construct
  REGION 1..9: note = Description of Artificial Sequence: Synthetic peptide
DQNPPSVSL

SEQ ID NO: 1136 - protein, 8 aa, synthetic construct
  REGION 1..8: note = Description of Artificial Sequence: Synthetic peptide
IQKLVGKL

SEQ ID NO: 1137 - protein, 9 aa, synthetic construct
  REGION 1..9: note = Description of Artificial Sequence: Synthetic peptide
DSAIRRAIL

SEQ ID NO: 1138 - protein, 8 aa, synthetic construct
  REGION 1..8: note = Description of Artificial Sequence: Synthetic peptide
SQVQHTNI

SEQ ID NO: 1139 - protein, 9 aa, synthetic construct
  REGION 1..9: note = Description of Artificial Sequence: Synthetic peptide
SQVQHTNIM

SEQ ID NO: 1140 - protein, 8 aa, synthetic construct
  REGION 1..8: note = Description of Artificial Sequence: Synthetic peptide
GQMIHQSL

SEQ ID NO: 1141 - protein, 10 aa, synthetic construct
  REGION 1..10: note = Description of Artificial Sequence: Synthetic peptide
GVNSSDSETF

SEQ ID NO: 1142 - protein, 9 aa, synthetic construct
  REGION 1..9: note = Description of Artificial Sequence: Synthetic peptide
SQAQQTSIM

SEQ ID NO: 1143 - protein, 8 aa, synthetic construct
  REGION 1..8: note = Description of Artificial Sequence: Synthetic peptide
GQYIYNTY

SEQ ID NO: 1144 - protein, 9 aa, synthetic construct
  REGION 1..9: note = Description of Artificial Sequence: Synthetic peptide
RIGPGQTFY

SEQ ID NO: 1145 - protein, 9 aa, synthetic construct
  REGION 1..9: note = Description of Artificial Sequence: Synthetic peptide
GITSANETF

SEQ ID NO: 1146 - protein, 9 aa, synthetic construct
  REGION 1..9: note = Description of Artificial Sequence: Synthetic peptide
SQVQHTNIM

SEQ ID NO: 1147 - protein, 9 aa, synthetic construct
  REGION 1..9: note = Description of Artificial Sequence: Synthetic peptide
TQACPKVSF

SEQ ID NO: 1148 - protein, 9 aa, synthetic construct
  REGION 1..9: note = Description of Artificial Sequence: Synthetic peptide
TQACPKVTF

SEQ ID NO: 1149 - protein, 9 aa, synthetic construct
  REGION 1..9: note = Description of Artificial Sequence: Synthetic peptide
IRIGPGQSF

SEQ ID NO: 1150 - protein, 9 aa, synthetic construct
  REGION 1..9: note = Description of Artificial Sequence: Synthetic peptide
TQIGCTLNF

SEQ ID NO: 1151 - protein, 8 aa, synthetic construct
  REGION 1..8: note = Description of Artificial Sequence: Synthetic peptide
GQHIYHTY

SEQ ID NO: 1152 - protein, 8 aa, synthetic construct
  REGION 1..8: note = Description of Artificial Sequence: Synthetic peptide
GQQIYNTY

SEQ ID NO: 1153 - protein, 10 aa, synthetic construct
  REGION 1..10: note = Description of Artificial Sequence: Synthetic peptide
ILKDPVHGAY

SEQ ID NO: 1154 - protein, 9 aa, synthetic construct
  REGION 1..9: note = Description of Artificial Sequence: Synthetic peptide
DQNPPSVSL

SEQ ID NO: 1155 - protein, 9 aa, synthetic construct
  REGION 1..9: note = Description of Artificial Sequence: Synthetic peptide
TTNQKTELY

SEQ ID NO: 1156 - protein, 10 aa, synthetic construct
  REGION 1..10: note = Description of Artificial Sequence: Synthetic peptide
GQVVSPRCEY

SEQ ID NO: 1157 - protein, 10 aa, synthetic construct
  REGION 1..10: note = Description of Artificial Sequence: Synthetic peptide
VQNAQGQMIY

SEQ ID NO: 1158 - protein, 9 aa, synthetic construct
  REGION 1..9: note = Description of Artificial Sequence: Synthetic peptide
TVLDVGDAY

SEQ ID NO: 1159 - protein, 9 aa, synthetic construct
  REGION 1..9: note = Description of Artificial Sequence: Synthetic peptide
VRIGPGQTF

SEQ ID NO: 1160 - protein, 9 aa, synthetic construct
  REGION 1..9: note = Description of Artificial Sequence: Synthetic peptide
TLNNNTIEM

SEQ ID NO: 1161 - protein, 10 aa, synthetic construct
  REGION 1..10: note = Description of Artificial Sequence: Synthetic peptide
ILKEPVHGVY

SEQ ID NO: 1162 - protein, 9 aa, synthetic construct
  REGION 1..9: note = Description of Artificial Sequence: Synthetic peptide
QVVSPRCEY

SEQ ID NO: 1163 - protein, 10 aa, synthetic construct
  REGION 1..10: note = Description of Artificial Sequence: Synthetic peptide
SVRIGPGQTF

SEQ ID NO: 1164 - protein, 9 aa, synthetic construct
  REGION 1..9: note = Description of Artificial Sequence: Synthetic peptide
WQTPGQAMY

SEQ ID NO: 1165 - protein, 10 aa, synthetic construct
  REGION 1..10: note = Description of Artificial Sequence: Synthetic peptide
FLNKGLGISY

SEQ ID NO: 1166 - protein, 9 aa, synthetic construct
  REGION 1..9: note = Description of Artificial Sequence: Synthetic peptide
KQIIKIQNF

SEQ ID NO: 1167 - protein, 9 aa, synthetic construct
  REGION 1..9: note = Description of Artificial Sequence: Synthetic peptide
IQQEFGIPY

SEQ ID NO: 1168 - protein, 8 aa, synthetic construct
  REGION 1..8: note = Description of Artificial Sequence: Synthetic peptide
AVHVASGY

SEQ ID NO: 1169 - protein, 11 aa, synthetic construct
  REGION 1..11: note = Description of Artificial Sequence: Synthetic peptide
IQKQGQDQWTY

SEQ ID NO: 1170 - protein, 8 aa, synthetic construct
  REGION 1..8: note = Description of Artificial Sequence: Synthetic peptide
VQHPNIMM

SEQ ID NO: 1171 - protein, 8 aa, synthetic construct
  REGION 1..8: note = Description of Artificial Sequence: Synthetic peptide
AQQTSIMM

SEQ ID NO: 1172 - protein, 8 aa, synthetic construct
  REGION 1..8: note = Description of Artificial Sequence: Synthetic peptide
GQMIYQSM

SEQ ID NO: 1173 - protein, 9 aa, synthetic construct
  REGION 1..9: note = Description of Artificial Sequence: Synthetic peptide
FLGAAGSTM

SEQ ID NO: 1174 - protein, 9 aa, synthetic construct
  REGION 1..9: note = Description of Artificial Sequence: Synthetic peptide
SSSKVSQNY

SEQ ID NO: 1175 - protein, 10 aa, synthetic construct
  REGION 1..10: note = Description of Artificial Sequence: Synthetic peptide
GQGTGPTLSF

SEQ ID NO: 1176 - protein, 9 aa, synthetic construct
  REGION 1..9: note = Description of Artificial Sequence: Synthetic peptide
KQITKIQKF

SEQ ID NO: 1177 - protein, 9 aa, synthetic construct
  REGION 1..9: note = Description of Artificial Sequence: Synthetic peptide
WVNGTTSSM

SEQ ID NO: 1178 - protein, 9 aa, synthetic construct
  REGION 1..9: note = Description of Artificial Sequence: Synthetic peptide
KQGQDQWTY

SEQ ID NO: 1179 - protein, 9 aa, synthetic construct
  REGION 1..9: note = Description of Artificial Sequence: Synthetic peptide
FLGTAGSTM

SEQ ID NO: 1180 - protein, 10 aa, synthetic construct
  REGION 1..10: note = Description of Artificial Sequence: Synthetic peptide
SIRIGPGQSF

SEQ ID NO: 1181 - protein, 9 aa, synthetic construct
  REGION 1..9: note = Description of Artificial Sequence: Synthetic peptide
IQKQGQDQW

SEQ ID NO: 1182 - protein, 8 aa, synthetic construct
  REGION 1..8: note = Description of Artificial Sequence: Synthetic peptide
VQHTNIMM

SEQ ID NO: 1183 - protein, 9 aa, synthetic construct
  REGION 1..9: note = Description of Artificial Sequence: Synthetic peptide
AQEEGEVGF

SEQ ID NO: 1184 - protein, 9 aa, synthetic construct
  REGION 1..9: note = Description of Artificial Sequence: Synthetic peptide
WQRAGQAMY

SEQ ID NO: 1185 - protein, 11 aa, synthetic construct
  REGION 1..11: note = Description of Artificial Sequence: Synthetic peptide
INNGNNSSNLY

SEQ ID NO: 1186 - protein, 9 aa, synthetic construct
  REGION 1..9: note = Description of Artificial Sequence: Synthetic peptide
ALRQVVEQL

SEQ ID NO: 1187 - protein, 9 aa, synthetic construct
  REGION 1..9: note = Description of Artificial Sequence: Synthetic peptide
EQVPPLVSL

SEQ ID NO: 1188 - protein, 9 aa, synthetic construct
  REGION 1..9: note = Description of Artificial Sequence: Synthetic peptide
VQKVTMESI

SEQ ID NO: 1189 - protein, 10 aa, synthetic construct
  REGION 1..10: note = Description of Artificial Sequence: Synthetic peptide
GFLGTAGSTM

SEQ ID NO: 1190 - protein, 8 aa, synthetic construct
  REGION 1..8: note = Description of Artificial Sequence: Synthetic peptide
WQRVGQAM

SEQ ID NO: 1191 - protein, 9 aa, synthetic construct
  REGION 1..9: note = Description of Artificial Sequence: Synthetic peptide
ALRTGTEEL

SEQ ID NO: 1192 - protein, 8 aa, synthetic construct
  REGION 1..8: note = Description of Artificial Sequence: Synthetic peptide
SSKVSQNY

SEQ ID NO: 1193 - protein, 9 aa, synthetic construct
  REGION 1..9: note = Description of Artificial Sequence: Synthetic peptide
DQNPPSVSL

SEQ ID NO: 1194 - protein, 9 aa, synthetic construct
  REGION 1..9: note = Description of Artificial Sequence: Synthetic peptide
TVLDVGDAY

SEQ ID NO: 1195 - protein, 9 aa, synthetic construct
  REGION 1..9: note = Description of Artificial Sequence: Synthetic peptide
FLGAAGSTM

SEQ ID NO: 1196 - protein, 9 aa, synthetic construct
  REGION 1..9: note = Description of Artificial Sequence: Synthetic peptide
TLNNNTIEM

SEQ ID NO: 1197 - protein, 9 aa, synthetic construct
  REGION 1..9: note = Description of Artificial Sequence: Synthetic peptide
FLGTAGSTM

SEQ ID NO: 1198 - protein, 10 aa, synthetic construct
  REGION 1..10: note = Description of Artificial Sequence: Synthetic peptide
FLNKGLGISY

SEQ ID NO: 1199 - protein, 9 aa, synthetic construct
  REGION 1..9: note = Description of Artificial Sequence: Synthetic peptide
SQVQHTNIM

SEQ ID NO: 1200 - protein, 9 aa, synthetic construct
  REGION 1..9: note = Description of Artificial Sequence: Synthetic peptide
TQACPKVSF

SEQ ID NO: 1201 - protein, 10 aa, synthetic construct
  REGION 1..10: note = Description of Artificial Sequence: Synthetic peptide
SIRIGPGQSF

SEQ ID NO: 1202 - protein, 9 aa, synthetic construct
  REGION 1..9: note = Description of Artificial Sequence: Synthetic peptide
WVNGTTSSM

SEQ ID NO: 1203 - protein, 9 aa, synthetic construct
  REGION 1..9: note = Description of Artificial Sequence: Synthetic peptide
EQVPPLVSL

SEQ ID NO: 1204 - protein, 10 aa, synthetic construct
  REGION 1..10: note = Description of Artificial Sequence: Synthetic peptide
SVRIGPGQTF

SEQ ID NO: 1205 - protein, 9 aa, synthetic construct
  REGION 1..9: note = Description of Artificial Sequence: Synthetic peptide
QVVSPRCEY

SEQ ID NO: 1206 - protein, 9 aa, synthetic construct
  REGION 1..9: note = Description of Artificial Sequence: Synthetic peptide
SQAQQTSIM

SEQ ID NO: 1207 - protein, 9 aa, synthetic construct
  REGION 1..9: note = Description of Artificial Sequence: Synthetic peptide
TQACPKVTF

SEQ ID NO: 1208 - protein, 8 aa, synthetic construct
  REGION 1..8: note = Description of Artificial Sequence: Synthetic peptide
EQRWVTVY

SEQ ID NO: 1209 - protein, 9 aa, synthetic construct
  REGION 1..9: note = Description of Artificial Sequence: Synthetic peptide
IRIGPGQSF

SEQ ID NO: 1210 - protein, 9 aa, synthetic construct
  REGION 1..9: note = Description of Artificial Sequence: Synthetic peptide
AAVDLSHFL

SEQ ID NO: 1211 - protein, 10 aa, synthetic construct
  REGION 1..10: note = Description of Artificial Sequence: Synthetic peptide
DIRQGPKESF

SEQ ID NO: 1212 - protein, 10 aa, synthetic construct
  REGION 1..10: note = Description of Artificial Sequence: Synthetic peptide
NIVGGHQAAM

SEQ ID NO: 1213 - protein, 8 aa, synthetic construct
  REGION 1..8: note = Description of Artificial Sequence: Synthetic peptide
DQLIHLHY

SEQ ID NO: 1214 - protein, 8 aa, synthetic construct
  REGION 1..8: note = Description of Artificial Sequence: Synthetic peptide
GQYIYNTY

SEQ ID NO: 1215 - protein, 9 aa, synthetic construct
  REGION 1..9: note = Description of Artificial Sequence: Synthetic peptide
IVGGHQAAM

SEQ ID NO: 1216 - protein, 9 aa, synthetic construct
  REGION 1..9: note = Description of Artificial Sequence: Synthetic peptide
KALTDVVTL

SEQ ID NO: 1217 - protein, 9 aa, synthetic construct
  REGION 1..9: note = Description of Artificial Sequence: Synthetic peptide
DPIAGAETF

SEQ ID NO: 1218 - protein, 9 aa, synthetic construct
  REGION 1..9: note = Description of Artificial Sequence: Synthetic peptide
DIEITTHSF

SEQ ID NO: 1219 - protein, 9 aa, synthetic construct
  REGION 1..9: note = Description of Artificial Sequence: Synthetic peptide
DPIVGAETF

SEQ ID NO: 1220 - protein, 10 aa, synthetic construct
  REGION 1..10: note = Description of Artificial Sequence: Synthetic peptide
EVNIVTDSQY

SEQ ID NO: 1221 - protein, 8 aa, synthetic construct
  REGION 1..8: note = Description of Artificial Sequence: Synthetic peptide
AKIVVRTY

SEQ ID NO: 1222 - protein, 8 aa, synthetic construct
  REGION 1..8: note = Description of Artificial Sequence: Synthetic peptide
GQYIYNTY

SEQ ID NO: 1223 - protein, 9 aa, synthetic construct
  REGION 1..9: note = Description of Artificial Sequence: Synthetic peptide
AKNPDIIIY

SEQ ID NO: 1224 - protein, 9 aa, synthetic construct
  REGION 1..9: note = Description of Artificial Sequence: Synthetic peptide
IRIGPGQSF

SEQ ID NO: 1225 - protein, 8 aa, synthetic construct
  REGION 1..8: note = Description of Artificial Sequence: Synthetic peptide
AKLVVKTY

SEQ ID NO: 1226 - protein, 9 aa, synthetic construct
  REGION 1..9: note = Description of Artificial Sequence: Synthetic peptide
SKNPDIVIY

SEQ ID NO: 1227 - protein, 9 aa, synthetic construct
  REGION 1..9: note = Description of Artificial Sequence: Synthetic peptide
QKTELHAVY

SEQ ID NO: 1228 - protein, 8 aa, synthetic construct
  REGION 1..8: note = Description of Artificial Sequence: Synthetic peptide
GQMIHQSL

SEQ ID NO: 1229 - protein, 9 aa, synthetic construct
  REGION 1..9: note = Description of Artificial Sequence: Synthetic peptide
VRIGPGQTF

SEQ ID NO: 1230 - protein, 9 aa, synthetic construct
  REGION 1..9: note = Description of Artificial Sequence: Synthetic peptide
SKIGPENPY

SEQ ID NO: 1231 - protein, 9 aa, synthetic construct
  REGION 1..9: note = Description of Artificial Sequence: Synthetic peptide
ARVLAVESY

SEQ ID NO: 1232 - protein, 9 aa, synthetic construct
  REGION 1..9: note = Description of Artificial Sequence: Synthetic peptide
GKKAIGTVL

SEQ ID NO: 1233 - protein, 9 aa, synthetic construct
  REGION 1..9: note = Description of Artificial Sequence: Synthetic peptide
LKISAVNLY

SEQ ID NO: 1234 - protein, 9 aa, synthetic construct
  REGION 1..9: note = Description of Artificial Sequence: Synthetic peptide
WQRAGQAMY

SEQ ID NO: 1235 - protein, 10 aa, synthetic construct
  REGION 1..10: note = Description of Artificial Sequence: Synthetic peptide
VQNAQGQMIY

SEQ ID NO: 1236 - protein, 8 aa, synthetic construct
  REGION 1..8: note = Description of Artificial Sequence: Synthetic peptide
NKGLGISY

SEQ ID NO: 1237 - protein, 9 aa, synthetic construct
  REGION 1..9: note = Description of Artificial Sequence: Synthetic peptide
SQVQHTNIM

SEQ ID NO: 1238 - protein, 8 aa, synthetic construct
  REGION 1..8: note = Description of Artificial Sequence: Synthetic peptide
GQHIYHTY

SEQ ID NO: 1239 - protein, 9 aa, synthetic construct
  REGION 1..9: note = Description of Artificial Sequence: Synthetic peptide
SKNPDIIIY

SEQ ID NO: 1240 - protein, 9 aa, synthetic construct
  REGION 1..9: note = Description of Artificial Sequence: Synthetic peptide
QKTELHAIY

SEQ ID NO: 1241 - protein, 9 aa, synthetic construct
  REGION 1..9: note = Description of Artificial Sequence: Synthetic peptide
VKVIEEKAF

SEQ ID NO: 1242 - protein, 9 aa, synthetic construct
  REGION 1..9: note = Description of Artificial Sequence: Synthetic peptide
GKRAIGTVL

SEQ ID NO: 1243 - protein, 9 aa, synthetic construct
  REGION 1..9: note = Description of Artificial Sequence: Synthetic peptide
SQAQQTSIM

SEQ ID NO: 1244 - protein, 10 aa, synthetic construct
  REGION 1..10: note = Description of Artificial Sequence: Synthetic peptide
GQVVSPRCEY

SEQ ID NO: 1245 - protein, 9 aa, synthetic construct
  REGION 1..9: note = Description of Artificial Sequence: Synthetic peptide
TQACPKVSF

SEQ ID NO: 1246 - protein, 9 aa, synthetic construct
  REGION 1..9: note = Description of Artificial Sequence: Synthetic peptide
DQNPPSVSL

SEQ ID NO: 1247 - protein, 9 aa, synthetic construct
  REGION 1..9: note = Description of Artificial Sequence: Synthetic peptide
THTPNPRGL

SEQ ID NO: 1248 - protein, 9 aa, synthetic construct
  REGION 1..9: note = Description of Artificial Sequence: Synthetic peptide
THLEGKVIL

SEQ ID NO: 1249 - protein, 9 aa, synthetic construct
  REGION 1..9: note = Description of Artificial Sequence: Synthetic peptide
EHLKTAVQM

SEQ ID NO: 1250 - protein, 9 aa, synthetic construct
  REGION 1..9: note = Description of Artificial Sequence: Synthetic peptide
YQSMSPRTL

SEQ ID NO: 1251 - protein, 9 aa, synthetic construct
  REGION 1..9: note = Description of Artificial Sequence: Synthetic peptide
EQVPPLVSL

SEQ ID NO: 1252 - protein, 8 aa, synthetic construct
  REGION 1..8: note = Description of Artificial Sequence: Synthetic peptide
MHTDIISL

SEQ ID NO: 1253 - protein, 9 aa, synthetic construct
  REGION 1..9: note = Description of Artificial Sequence: Synthetic peptide
EHLRTAVQM

SEQ ID NO: 1254 - protein, 9 aa, synthetic construct
  REGION 1..9: note = Description of Artificial Sequence: Synthetic peptide
GHQAAMQML

SEQ ID NO: 1255 - protein, 9 aa, synthetic construct
  REGION 1..9: note = Description of Artificial Sequence: Synthetic peptide
SQVQHTNIM

SEQ ID NO: 1256 - protein, 10 aa, synthetic construct
  REGION 1..10: note = Description of Artificial Sequence: Synthetic peptide
HHYESSNPKV

SEQ ID NO: 1257 - protein, 9 aa, synthetic construct
  REGION 1..9: note = Description of Artificial Sequence: Synthetic peptide
HQSLSPRTL

SEQ ID NO: 1258 - protein, 9 aa, synthetic construct
  REGION 1..9: note = Description of Artificial Sequence: Synthetic peptide
THTPNPEGL

SEQ ID NO: 1259 - protein, 9 aa, synthetic construct
  REGION 1..9: note = Description of Artificial Sequence: Synthetic peptide
AHTNDVKQL

SEQ ID NO: 1260 - protein, 8 aa, synthetic construct
  REGION 1..8: note = Description of Artificial Sequence: Synthetic peptide
LHQVVEQL

SEQ ID NO: 1261 - protein, 9 aa, synthetic construct
  REGION 1..9: note = Description of Artificial Sequence: Synthetic peptide
SQAQQTSIM

SEQ ID NO: 1262 - protein, 10 aa, synthetic construct
  REGION 1..10: note = Description of Artificial Sequence: Synthetic peptide
IHQSLSPRTL

SEQ ID NO: 1263 - protein, 9 aa, synthetic construct
  REGION 1..9: note = Description of Artificial Sequence: Synthetic peptide
IRIGPGQSF

SEQ ID NO: 1264 - protein, 9 aa, synthetic construct
  REGION 1..9: note = Description of Artificial Sequence: Synthetic peptide
SQIYPGIKV

SEQ ID NO: 1265 - protein, 8 aa, synthetic construct
  REGION 1..8: note = Description of Artificial Sequence: Synthetic peptide
THLEGKVI

SEQ ID NO: 1266 - protein, 10 aa, synthetic construct
  REGION 1..10: note = Description of Artificial Sequence: Synthetic peptide
SHEVIFNSTL

SEQ ID NO: 1267 - protein, 9 aa, synthetic construct
  REGION 1..9: note = Description of Artificial Sequence: Synthetic peptide
TVLDVGDAY

SEQ ID NO: 1268 - protein, 9 aa, synthetic construct
  REGION 1..9: note = Description of Artificial Sequence: Synthetic peptide
SAVNLYDTI

SEQ ID NO: 1269 - protein, 9 aa, synthetic construct
  REGION 1..9: note = Description of Artificial Sequence: Synthetic peptide
TINEEAAEW

SEQ ID NO: 1270 - protein, 9 aa, synthetic construct
  REGION 1..9: note = Description of Artificial Sequence: Synthetic peptide
TIAIAVAGW

SEQ ID NO: 1271 - protein, 9 aa, synthetic construct
  REGION 1..9: note = Description of Artificial Sequence: Synthetic peptide
DELALLIEM

SEQ ID NO: 1272 - protein, 8 aa, synthetic construct
  REGION 1..8: note = Description of Artificial Sequence: Synthetic peptide
IEITTHSF

SEQ ID NO: 1273 - protein, 8 aa, synthetic construct
  REGION 1..8: note = Description of Artificial Sequence: Synthetic peptide
MENVTEEF

SEQ ID NO: 1274 - protein, 9 aa, synthetic construct
  REGION 1..9: note = Description of Artificial Sequence: Synthetic peptide
TENLWVTVY

SEQ ID NO: 1275 - protein, 11 aa, synthetic construct
  REGION 1..11: note = Description of Artificial Sequence: Synthetic peptide
SEVNIVTDSQY

SEQ ID NO: 1276 - protein, 8 aa, synthetic construct
  REGION 1..8: note = Description of Artificial Sequence: Synthetic peptide
LEITTHSF

SEQ ID NO: 1277 - protein, 8 aa, synthetic construct
  REGION 1..8: note = Description of Artificial Sequence: Synthetic peptide
NETPGIRY

SEQ ID NO: 1278 - protein, 8 aa, synthetic construct
  REGION 1..8: note = Description of Artificial Sequence: Synthetic peptide
HEVIFNST

SEQ ID NO: 1279 - protein, 8 aa, synthetic construct
  REGION 1..8: note = Description of Artificial Sequence: Synthetic peptide
NETPGTRY

SEQ ID NO: 1280 - protein, 9 aa, synthetic construct
  REGION 1..9: note = Description of Artificial Sequence: Synthetic peptide
AEVVQKVTM

SEQ ID NO: 1281 - protein, 9 aa, synthetic construct
  REGION 1..9: note = Description of Artificial Sequence: Synthetic peptide
HEVIFNSTL

SEQ ID NO: 1282 - protein, 9 aa, synthetic construct
  REGION 1..9: note = Description of Artificial Sequence: Synthetic peptide
AEVVQKVVM

SEQ ID NO: 1283 - protein, 8 aa, synthetic construct
  REGION 1..8: note = Description of Artificial Sequence: Synthetic peptide
EEIKNCSY

SEQ ID NO: 1284 - protein, 9 aa, synthetic construct
  REGION 1..9: note = Description of Artificial Sequence: Synthetic peptide
DEVGFPVRP

SEQ ID NO: 1285 - protein, 8 aa, synthetic construct
  REGION 1..8: note = Description of Artificial Sequence: Synthetic peptide
EEIKNCSF

SEQ ID NO: 1286 - protein, 8 aa, synthetic construct
  REGION 1..8: note = Description of Artificial Sequence: Synthetic peptide
VEAIIRTL

SEQ ID NO: 1287 - protein, 9 aa, synthetic construct
  REGION 1..9: note = Description of Artificial Sequence: Synthetic peptide
ARVLAVESY

SEQ ID NO: 1288 - protein, 9 aa, synthetic construct
  REGION 1..9: note = Description of Artificial Sequence: Synthetic peptide
IRIGPGQSF

SEQ ID NO: 1289 - protein, 9 aa, synthetic construct
  REGION 1..9: note = Description of Artificial Sequence: Synthetic peptide
VRIGPGQTF

SEQ ID NO: 1290 - protein, 9 aa, synthetic construct
  REGION 1..9: note = Description of Artificial Sequence: Synthetic peptide
ARVLAVERY

SEQ ID NO: 1291 - protein, 10 aa, synthetic construct
  REGION 1..10: note = Description of Artificial Sequence: Synthetic peptide
VRIGPGQTFY

SEQ ID NO: 1292 - protein, 10 aa, synthetic construct
  REGION 1..10: note = Description of Artificial Sequence: Synthetic peptide
VRQGYSPLSF

SEQ ID NO: 1293 - protein, 10 aa, synthetic construct
  REGION 1..10: note = Description of Artificial Sequence: Synthetic peptide
GGLDGLVYSK

SEQ ID NO: 1294 - protein, 10 aa, synthetic construct
  REGION 1..10: note = Description of Artificial Sequence: Synthetic peptide
GGLDGLIYSK

SEQ ID NO: 1295 - protein, 9 aa, synthetic construct
  REGION 1..9: note = Description of Artificial Sequence: Synthetic peptide
SRIGPENPY

SEQ ID NO: 1296 - protein, 8 aa, synthetic construct
  REGION 1..8: note = Description of Artificial Sequence: Synthetic peptide
LDGLVYSK

SEQ ID NO: 1297 - protein, 9 aa, synthetic construct
  REGION 1..9: note = Description of Artificial Sequence: Synthetic peptide
GLDGLVYSK

SEQ ID NO: 1298 - protein, 9 aa, synthetic construct
  REGION 1..9: note = Description of Artificial Sequence: Synthetic peptide
ERQGPEPTF

SEQ ID NO: 1299 - protein, 9 aa, synthetic construct
  REGION 1..9: note = Description of Artificial Sequence: Synthetic peptide
GLDGLIYSK

SEQ ID NO: 1300 - protein, 9 aa, synthetic construct
  REGION 1..9: note = Description of Artificial Sequence: Synthetic peptide
ILGQVVSPR

SEQ ID NO: 1301 - protein, 10 aa, synthetic construct
  REGION 1..10: note = Description of Artificial Sequence: Synthetic peptide
DQISIEICGK

SEQ ID NO: 1302 - protein, 11 aa, synthetic construct
  REGION 1..11: note = Description of Artificial Sequence: Synthetic peptide
HGLGQQIYNTY

SEQ ID NO: 1303 - protein, 11 aa, synthetic construct
  REGION 1..11: note = Description of Artificial Sequence: Synthetic peptide
YATGEIIGDIR

SEQ ID NO: 1304 - protein, 8 aa, synthetic construct
  REGION 1..8: note = Description of Artificial Sequence: Synthetic peptide
QRVGQAMY

SEQ ID NO: 1305 - protein, 9 aa, synthetic construct
  REGION 1..9: note = Description of Artificial Sequence: Synthetic peptide
GRWPVKVVH

SEQ ID NO: 1306 - protein, 9 aa, synthetic construct
  REGION 1..9: note = Description of Artificial Sequence: Synthetic peptide
IRQTPTAAR

SEQ ID NO: 1307 - protein, 9 aa, synthetic construct
  REGION 1..9: note = Description of Artificial Sequence: Synthetic peptide
IRIGPGQSF

SEQ ID NO: 1308 - protein, 9 aa, synthetic construct
  REGION 1..9: note = Description of Artificial Sequence: Synthetic peptide
SRIGIVRGR

SEQ ID NO: 1309 - protein, 9 aa, synthetic construct
  REGION 1..9: note = Description of Artificial Sequence: Synthetic peptide
ARVLAVERY

SEQ ID NO: 1310 - protein, 9 aa, synthetic construct
  REGION 1..9: note = Description of Artificial Sequence: Synthetic peptide
ARVLAVESY

SEQ ID NO: 1311 - protein, 10 aa, synthetic construct
  REGION 1..10: note = Description of Artificial Sequence: Synthetic peptide
VRIGPGQTFY

SEQ ID NO: 1312 - protein, 9 aa, synthetic construct
  REGION 1..9: note = Description of Artificial Sequence: Synthetic peptide
VRIGPGQTF

SEQ ID NO: 1313 - protein, 9 aa, synthetic construct
  REGION 1..9: note = Description of Artificial Sequence: Synthetic peptide
RRGPPQSNK

SEQ ID NO: 1314 - protein, 9 aa, synthetic construct
  REGION 1..9: note = Description of Artificial Sequence: Synthetic peptide
TRQAPTAAK

SEQ ID NO: 1315 - protein, 9 aa, synthetic construct
  REGION 1..9: note = Description of Artificial Sequence: Synthetic peptide
GRAILNIPR

SEQ ID NO: 1316 - protein, 9 aa, synthetic construct
  REGION 1..9: note = Description of Artificial Sequence: Synthetic peptide
QRIDVKDTK

SEQ ID NO: 1317 - protein, 9 aa, synthetic construct
  REGION 1..9: note = Description of Artificial Sequence: Synthetic peptide
QRIEVKDTK

SEQ ID NO: 1318 - protein, 9 aa, synthetic construct
  REGION 1..9: note = Description of Artificial Sequence: Synthetic peptide
SRIGPENPY

SEQ ID NO: 1319 - protein, 9 aa, synthetic construct
  REGION 1..9: note = Description of Artificial Sequence: Synthetic peptide
TRTSIRIGP

SEQ ID NO: 1320 - protein, 9 aa, synthetic construct
  REGION 1..9: note = Description of Artificial Sequence: Synthetic peptide
DPIAGAETF

SEQ ID NO: 1321 - protein, 11 aa, synthetic construct
  REGION 1..11: note = Description of Artificial Sequence: Synthetic peptide
IPAETGQETAY

SEQ ID NO: 1322 - protein, 9 aa, synthetic construct
  REGION 1..9: note = Description of Artificial Sequence: Synthetic peptide
NPDIIIYQY

SEQ ID NO: 1323 - protein, 9 aa, synthetic construct
  REGION 1..9: note = Description of Artificial Sequence: Synthetic peptide
NPDIVIYQY

SEQ ID NO: 1324 - protein, 9 aa, synthetic construct
  REGION 1..9: note = Description of Artificial Sequence: Synthetic peptide
DPIVGAETF

SEQ ID NO: 1325 - protein, 11 aa, synthetic construct
  REGION 1..11: note = Description of Artificial Sequence: Synthetic peptide
VPIGNNSDSEY

SEQ ID NO: 1326 - protein, 9 aa, synthetic construct
  REGION 1..9: note = Description of Artificial Sequence: Synthetic peptide
DPEVTTHSF

SEQ ID NO: 1327 - protein, 9 aa, synthetic construct
  REGION 1..9: note = Description of Artificial Sequence: Synthetic peptide
TVLDVGDAY

SEQ ID NO: 1328 - protein, 8 aa, synthetic construct
  REGION 1..8: note = Description of Artificial Sequence: Synthetic peptide
TPGPGIRY

SEQ ID NO: 1329 - protein, 9 aa, synthetic construct
  REGION 1..9: note = Description of Artificial Sequence: Synthetic peptide
EALDKIEEM

SEQ ID NO: 1330 - protein, 9 aa, synthetic construct
  REGION 1..9: note = Description of Artificial Sequence: Synthetic peptide
EPAQPLVSL

SEQ ID NO: 1331 - protein, 9 aa, synthetic construct
  REGION 1..9: note = Description of Artificial Sequence: Synthetic peptide
SPAIFQASM

SEQ ID NO: 1332 - protein, 10 aa, synthetic construct
  REGION 1..10: note = Description of Artificial Sequence: Synthetic peptide
NPPIPVGDIY

SEQ ID NO: 1333 - protein, 10 aa, synthetic construct
  REGION 1..10: note = Description of Artificial Sequence: Synthetic peptide
VPLDENFRKY

SEQ ID NO: 1334 - protein, 9 aa, synthetic construct
  REGION 1..9: note = Description of Artificial Sequence: Synthetic peptide
SPAIFQSSM

SEQ ID NO: 1335 - protein, 9 aa, synthetic construct
  REGION 1..9: note = Description of Artificial Sequence: Synthetic peptide
PPIPVGDIY

SEQ ID NO: 1336 - protein, 10 aa, synthetic construct
  REGION 1..10: note = Description of Artificial Sequence: Synthetic peptide
VPLDESFRKY

SEQ ID NO: 1337 - protein, 10 aa, synthetic construct
  REGION 1..10: note = Description of Artificial Sequence: Synthetic peptide
DPIAGAETFY

SEQ ID NO: 1338 - protein, 9 aa, synthetic construct
  REGION 1..9: note = Description of Artificial Sequence: Synthetic peptide
FPISPIETV

SEQ ID NO: 1339 - protein, 9 aa, synthetic construct
  REGION 1..9: note = Description of Artificial Sequence: Synthetic peptide
QPDKSESEL

SEQ ID NO: 1340 - protein, 9 aa, synthetic construct
  REGION 1..9: note = Description of Artificial Sequence: Synthetic peptide
QPDRSESEL

SEQ ID NO: 1341 - protein, 9 aa, synthetic construct
  REGION 1..9: note = Description of Artificial Sequence: Synthetic peptide
DPIAGAETF

SEQ ID NO: 1342 - protein, 9 aa, synthetic construct
  REGION 1..9: note = Description of Artificial Sequence: Synthetic peptide
YSTQIDPDL

SEQ ID NO: 1343 - protein, 9 aa, synthetic construct
  REGION 1..9: note = Description of Artificial Sequence: Synthetic peptide
LVDMGDYDL

SEQ ID NO: 1344 - protein, 8 aa, synthetic construct
  REGION 1..8: note = Description of Artificial Sequence: Synthetic peptide
NVTEDFNM

SEQ ID NO: 1345 - protein, 9 aa, synthetic construct
  REGION 1..9: note = Description of Artificial Sequence: Synthetic peptide
DPNPQEIHL

SEQ ID NO: 1346 - protein, 9 aa, synthetic construct
  REGION 1..9: note = Description of Artificial Sequence: Synthetic peptide
IVTDSQYVL

SEQ ID NO: 1347 - protein, 9 aa, synthetic construct
  REGION 1..9: note = Description of Artificial Sequence: Synthetic peptide
DPSPQELKM

SEQ ID NO: 1348 - protein, 9 aa, synthetic construct
  REGION 1..9: note = Description of Artificial Sequence: Synthetic peptide
FPISPIETV

SEQ ID NO: 1349 - protein, 9 aa, synthetic construct
  REGION 1..9: note = Description of Artificial Sequence: Synthetic peptide
MDDEEKETL

SEQ ID NO: 1350 - protein, 9 aa, synthetic construct
  REGION 1..9: note = Description of Artificial Sequence: Synthetic peptide
DPIAGAETF

SEQ ID NO: 1351 - protein, 9 aa, synthetic construct
  REGION 1..9: note = Description of Artificial Sequence: Synthetic peptide
FPISPIETV

SEQ ID NO: 1352 - protein, 9 aa, synthetic construct
  REGION 1..9: note = Description of Artificial Sequence: Synthetic peptide
EPAQPLVSL

SEQ ID NO: 1353 - protein, 9 aa, synthetic construct
  REGION 1..9: note = Description of Artificial Sequence: Synthetic peptide
HPVHAGPVA

SEQ ID NO: 1354 - protein, 9 aa, synthetic construct
  REGION 1..9: note = Description of Artificial Sequence: Synthetic peptide
TPQDLNVML

SEQ ID NO: 1355 - protein, 9 aa, synthetic construct
  REGION 1..9: note = Description of Artificial Sequence: Synthetic peptide
YSTQIDPDL

SEQ ID NO: 1356 - protein, 9 aa, synthetic construct
  REGION 1..9: note = Description of Artificial Sequence: Synthetic peptide
DPIVGAETF

SEQ ID NO: 1357 - protein, 9 aa, synthetic construct
  REGION 1..9: note = Description of Artificial Sequence: Synthetic peptide
YDLGDDNNL

SEQ ID NO: 1358 - protein, 9 aa, synthetic construct
  REGION 1..9: note = Description of Artificial Sequence: Synthetic peptide
DPNPQEIHL

SEQ ID NO: 1359 - protein, 9 aa, synthetic construct
  REGION 1..9: note = Description of Artificial Sequence: Synthetic peptide
FPISPISTV

SEQ ID NO: 1360 - protein, 9 aa, synthetic construct
  REGION 1..9: note = Description of Artificial Sequence: Synthetic peptide
TPQDLNMML

SEQ ID NO: 1361 - protein, 9 aa, synthetic construct
  REGION 1..9: note = Description of Artificial Sequence: Synthetic peptide
TALNETIIL

SEQ ID NO: 1362 - protein, 9 aa, synthetic construct
  REGION 1..9: note = Description of Artificial Sequence: Synthetic peptide
IVTDSQYVL

SEQ ID NO: 1363 - protein, 9 aa, synthetic construct
  REGION 1..9: note = Description of Artificial Sequence: Synthetic peptide
IVTDSQYAL

SEQ ID NO: 1364 - protein, 10 aa, synthetic construct
  REGION 1..10: note = Description of Artificial Sequence: Synthetic peptide
SPIETVPVKL

SEQ ID NO: 1365 - protein, 9 aa, synthetic construct
  REGION 1..9: note = Description of Artificial Sequence: Synthetic peptide
DQNPPSVSL

SEQ ID NO: 1366 - protein, 10 aa, synthetic construct
  REGION 1..10: note = Description of Artificial Sequence: Synthetic peptide
VPTDPSPQEL

SEQ ID NO: 1367 - protein, 9 aa, synthetic construct
  REGION 1..9: note = Description of Artificial Sequence: Synthetic peptide
YDLGDINNL

SEQ ID NO: 1368 - protein, 9 aa, synthetic construct
  REGION 1..9: note = Description of Artificial Sequence: Synthetic peptide
EALDKIEEM

SEQ ID NO: 1369 - protein, 9 aa, synthetic construct
  REGION 1..9: note = Description of Artificial Sequence: Synthetic peptide
YDLGNDINL

SEQ ID NO: 1370 - protein, 10 aa, synthetic construct
  REGION 1..10: note = Description of Artificial Sequence: Synthetic peptide
SPISTVPVKL

SEQ ID NO: 1371 - protein, 9 aa, synthetic construct
  REGION 1..9: note = Description of Artificial Sequence: Synthetic peptide
QAQQTSIMM

SEQ ID NO: 1372 - protein, 9 aa, synthetic construct
  REGION 1..9: note = Description of Artificial Sequence: Synthetic peptide
QPDKSESEL

SEQ ID NO: 1373 - protein, 9 aa, synthetic construct
  REGION 1..9: note = Description of Artificial Sequence: Synthetic peptide
EQVPPLVSL

SEQ ID NO: 1374 - protein, 11 aa, synthetic construct
  REGION 1..11: note = Description of Artificial Sequence: Synthetic peptide
IPAETGQETAY

SEQ ID NO: 1375 - protein, 9 aa, synthetic construct
  REGION 1..9: note = Description of Artificial Sequence: Synthetic peptide
NPDIVIYQY

SEQ ID NO: 1376 - protein, 9 aa, synthetic construct
  REGION 1..9: note = Description of Artificial Sequence: Synthetic peptide
NPDIIIYQY

SEQ ID NO: 1377 - protein, 11 aa, synthetic construct
  REGION 1..11: note = Description of Artificial Sequence: Synthetic peptide
VPIGNNSDSEY

SEQ ID NO: 1378 - protein, 9 aa, synthetic construct
  REGION 1..9: note = Description of Artificial Sequence: Synthetic peptide
DPIAGAETF

SEQ ID NO: 1379 - protein, 9 aa, synthetic construct
  REGION 1..9: note = Description of Artificial Sequence: Synthetic peptide
DPEVTTHSF

SEQ ID NO: 1380 - protein, 10 aa, synthetic construct
  REGION 1..10: note = Description of Artificial Sequence: Synthetic peptide
NPPIPVGDIY

SEQ ID NO: 1381 - protein, 9 aa, synthetic construct
  REGION 1..9: note = Description of Artificial Sequence: Synthetic peptide
DPIVGAETF

SEQ ID NO: 1382 - protein, 9 aa, synthetic construct
  REGION 1..9: note = Description of Artificial Sequence: Synthetic peptide
FSVPLDESF

SEQ ID NO: 1383 - protein, 9 aa, synthetic construct
  REGION 1..9: note = Description of Artificial Sequence: Synthetic peptide
PPIPVGDIY

SEQ ID NO: 1384 - protein, 9 aa, synthetic construct
  REGION 1..9: note = Description of Artificial Sequence: Synthetic peptide
TVLDVGDAY

SEQ ID NO: 1385 - protein, 9 aa, synthetic construct
  REGION 1..9: note = Description of Artificial Sequence: Synthetic peptide
EALDKIEEM

SEQ ID NO: 1386 - protein, 8 aa, synthetic construct
  REGION 1..8: note = Description of Artificial Sequence: Synthetic peptide
TPGPGIRY

SEQ ID NO: 1387 - protein, 9 aa, synthetic construct
  REGION 1..9: note = Description of Artificial Sequence: Synthetic peptide
QPDKSESEL

SEQ ID NO: 1388 - protein, 9 aa, synthetic construct
  REGION 1..9: note = Description of Artificial Sequence: Synthetic peptide
QPDRSESEL

SEQ ID NO: 1389 - protein, 9 aa, synthetic construct
  REGION 1..9: note = Description of Artificial Sequence: Synthetic peptide
DPIAGAETF

SEQ ID NO: 1390 - protein, 9 aa, synthetic construct
  REGION 1..9: note = Description of Artificial Sequence: Synthetic peptide
DPNPQEIHL

SEQ ID NO: 1391 - protein, 9 aa, synthetic construct
  REGION 1..9: note = Description of Artificial Sequence: Synthetic peptide
DPSPQELKM

SEQ ID NO: 1392 - protein, 9 aa, synthetic construct
  REGION 1..9: note = Description of Artificial Sequence: Synthetic peptide
LVDMGDYDL

SEQ ID NO: 1393 - protein, 9 aa, synthetic construct
  REGION 1..9: note = Description of Artificial Sequence: Synthetic peptide
YSTQIDPDL

SEQ ID NO: 1394 - protein, 8 aa, synthetic construct
  REGION 1..8: note = Description of Artificial Sequence: Synthetic peptide
NVTEDFNM

SEQ ID NO: 1395 - protein, 9 aa, synthetic construct
  REGION 1..9: note = Description of Artificial Sequence: Synthetic peptide
IVTDSQYVL

SEQ ID NO: 1396 - protein, 8 aa, synthetic construct
  REGION 1..8: note = Description of Artificial Sequence: Synthetic peptide
DPDLADQL

SEQ ID NO: 1397 - protein, 9 aa, synthetic construct
  REGION 1..9: note = Description of Artificial Sequence: Synthetic peptide
FPISPIETV

SEQ ID NO: 1398 - protein, 9 aa, synthetic construct
  REGION 1..9: note = Description of Artificial Sequence: Synthetic peptide
SPVSILDVK

SEQ ID NO: 1399 - protein, 9 aa, synthetic construct
  REGION 1..9: note = Description of Artificial Sequence: Synthetic peptide
DPEVTTHSF

SEQ ID NO: 1400 - protein, 9 aa, synthetic construct
  REGION 1..9: note = Description of Artificial Sequence: Synthetic peptide
DPIVGAETF

SEQ ID NO: 1401 - protein, 9 aa, synthetic construct
  REGION 1..9: note = Description of Artificial Sequence: Synthetic peptide
FSVPLDESF

SEQ ID NO: 1402 - protein, 9 aa, synthetic construct
  REGION 1..9: note = Description of Artificial Sequence: Synthetic peptide
TPQDLNVML

SEQ ID NO: 1403 - protein, 9 aa, synthetic construct
  REGION 1..9: note = Description of Artificial Sequence: Synthetic peptide
EPAQPLVSL

SEQ ID NO: 1404 - protein, 9 aa, synthetic construct
  REGION 1..9: note = Description of Artificial Sequence: Synthetic peptide
EALDKIEEM

SEQ ID NO: 1405 - protein, 9 aa, synthetic construct
  REGION 1..9: note = Description of Artificial Sequence: Synthetic peptide
HPVHAGPVA

SEQ ID NO: 1406 - protein, 9 aa, synthetic construct
  REGION 1..9: note = Description of Artificial Sequence: Synthetic peptide
YDLGDINNL

SEQ ID NO: 1407 - protein, 8 aa, synthetic construct
  REGION 1..8: note = Description of Artificial Sequence: Synthetic peptide
IEITTHSF

SEQ ID NO: 1408 - protein, 8 aa, synthetic construct
  REGION 1..8: note = Description of Artificial Sequence: Synthetic peptide
KDAETTLF

SEQ ID NO: 1409 - protein, 10 aa, synthetic construct
  REGION 1..10: note = Description of Artificial Sequence: Synthetic peptide
KEQVPPLVSL

SEQ ID NO: 1410 - protein, 9 aa, synthetic construct
  REGION 1..9: note = Description of Artificial Sequence: Synthetic peptide
AEVVQKVTM

SEQ ID NO: 1411 - protein, 8 aa, synthetic construct
  REGION 1..8: note = Description of Artificial Sequence: Synthetic peptide
MENVTEEF

SEQ ID NO: 1412 - protein, 8 aa, synthetic construct
  REGION 1..8: note = Description of Artificial Sequence: Synthetic peptide
KDAKTTLF

SEQ ID NO: 1413 - protein, 8 aa, synthetic construct
  REGION 1..8: note = Description of Artificial Sequence: Synthetic peptide
IDSISERV

SEQ ID NO: 1414 - protein, 8 aa, synthetic construct
  REGION 1..8: note = Description of Artificial Sequence: Synthetic peptide
YDTIAIAV

SEQ ID NO: 1415 - protein, 9 aa, synthetic construct
  REGION 1..9: note = Description of Artificial Sequence: Synthetic peptide
ADMEREGKI

SEQ ID NO: 1416 - protein, 8 aa, synthetic construct
  REGION 1..8: note = Description of Artificial Sequence: Synthetic peptide
YDTEVHNV

SEQ ID NO: 1417 - protein, 8 aa, synthetic construct
  REGION 1..8: note = Description of Artificial Sequence: Synthetic peptide
AEHLKTAV

SEQ ID NO: 1418 - protein, 10 aa, synthetic construct
  REGION 1..10: note = Description of Artificial Sequence: Synthetic peptide
REPAQPLVSL

SEQ ID NO: 1419 - protein, 8 aa, synthetic construct
  REGION 1..8: note = Description of Artificial Sequence: Synthetic peptide
KDANTTLF

SEQ ID NO: 1420 - protein, 9 aa, synthetic construct
  REGION 1..9: note = Description of Artificial Sequence: Synthetic peptide
AEVVQKVVM

SEQ ID NO: 1421 - protein, 8 aa, synthetic construct
  REGION 1..8: note = Description of Artificial Sequence: Synthetic peptide
KENIIVQL

SEQ ID NO: 1422 - protein, 9 aa, synthetic construct
  REGION 1..9: note = Description of Artificial Sequence: Synthetic peptide
VELLGHSSL

SEQ ID NO: 1423 - protein, 8 aa, synthetic construct
  REGION 1..8: note = Description of Artificial Sequence: Synthetic peptide
TDIQTREL

SEQ ID NO: 1424 - protein, 8 aa, synthetic construct
  REGION 1..8: note = Description of Artificial Sequence: Synthetic peptide
KEFNGTGL

SEQ ID NO: 1425 - protein, 8 aa, synthetic construct
  REGION 1..8: note = Description of Artificial Sequence: Synthetic peptide
AEHLRTAV

SEQ ID NO: 1426 - protein, 9 aa, synthetic construct
  REGION 1..9: note = Description of Artificial Sequence: Synthetic peptide
YDLGDINNL

SEQ ID NO: 1427 - protein, 9 aa, synthetic construct
  REGION 1..9: note = Description of Artificial Sequence: Synthetic peptide
QHSRIGINI

SEQ ID NO: 1428 - protein, 9 aa, synthetic construct
  REGION 1..9: note = Description of Artificial Sequence: Synthetic peptide
THTPNPEGL

SEQ ID NO: 1429 - protein, 9 aa, synthetic construct
  REGION 1..9: note = Description of Artificial Sequence: Synthetic peptide
YDLGDDNNL

SEQ ID NO: 1430 - protein, 9 aa, synthetic construct
  REGION 1..9: note = Description of Artificial Sequence: Synthetic peptide
ERQGPEPTF

SEQ ID NO: 1431 - protein, 9 aa, synthetic construct
  REGION 1..9: note = Description of Artificial Sequence: Synthetic peptide
VHTDNGSNF

SEQ ID NO: 1432 - protein, 9 aa, synthetic construct
  REGION 1..9: note = Description of Artificial Sequence: Synthetic peptide
ERQGTGPTF

SEQ ID NO: 1433 - protein, 9 aa, synthetic construct
  REGION 1..9: note = Description of Artificial Sequence: Synthetic peptide
IRIGPGQSF

SEQ ID NO: 1434 - protein, 9 aa, synthetic construct
  REGION 1..9: note = Description of Artificial Sequence: Synthetic peptide
THLEGKVIL

SEQ ID NO: 1435 - protein, 11 aa, synthetic construct
  REGION 1..11: note = Description of Artificial Sequence: Synthetic peptide
TQIDPDLADQL

SEQ ID NO: 1436 - protein, 11 aa, synthetic construct
  REGION 1..11: note = Description of Artificial Sequence: Synthetic peptide
TQIDPDQADQL

SEQ ID NO: 1437 - protein, 9 aa, synthetic construct
  REGION 1..9: note = Description of Artificial Sequence: Synthetic peptide
NHSGGDPEV

SEQ ID NO: 1438 - protein, 9 aa, synthetic construct
  REGION 1..9: note = Description of Artificial Sequence: Synthetic peptide
YDLGNDINL

SEQ ID NO: 1439 - protein, 10 aa, synthetic construct
  REGION 1..10: note = Description of Artificial Sequence: Synthetic peptide
SHEVIFNSTL

SEQ ID NO: 1440 - protein, 9 aa, synthetic construct
  REGION 1..9: note = Description of Artificial Sequence: Synthetic peptide
VRIGPGQTF

SEQ ID NO: 1441 - protein, 9 aa, synthetic construct
  REGION 1..9: note = Description of Artificial Sequence: Synthetic peptide
TQDFWEVQL

SEQ ID NO: 1442 - protein, 9 aa, synthetic construct
  REGION 1..9: note = Description of Artificial Sequence: Synthetic peptide
DQNPPSVSL

SEQ ID NO: 1443 - protein, 9 aa, synthetic construct
  REGION 1..9: note = Description of Artificial Sequence: Synthetic peptide
EQVPPLVSL

SEQ ID NO: 1444 - protein, 9 aa, synthetic construct
  REGION 1..9: note = Description of Artificial Sequence: Synthetic peptide
GHQAAMQML

SEQ ID NO: 1445 - protein, 9 aa, synthetic construct
  REGION 1..9: note = Description of Artificial Sequence: Synthetic peptide
AHTNDVKQL

SEQ ID NO: 1446 - protein, 9 aa, synthetic construct
  REGION 1..9: note = Description of Artificial Sequence: Synthetic peptide
EHLKTAVQM

SEQ ID NO: 1447 - protein, 10 aa, synthetic construct
  REGION 1..10: note = Description of Artificial Sequence: Synthetic peptide
NYDLGDINNL

SEQ ID NO: 1448 - protein, 10 aa, synthetic construct
  REGION 1..10: note = Description of Artificial Sequence: Synthetic peptide
NYDLGNDINL

SEQ ID NO: 1449 - protein, 8 aa, synthetic construct
  REGION 1..8: note = Description of Artificial Sequence: Synthetic peptide
FHATGDII

SEQ ID NO: 1450 - protein, 10 aa, synthetic construct
  REGION 1..10: note = Description of Artificial Sequence: Synthetic peptide
QIDSISERVL

SEQ ID NO: 1451 - protein, 9 aa, synthetic construct
  REGION 1..9: note = Description of Artificial Sequence: Synthetic peptide
QYDQISIEI

SEQ ID NO: 1452 - protein, 9 aa, synthetic construct
  REGION 1..9: note = Description of Artificial Sequence: Synthetic peptide
DQNPPSVSL

SEQ ID NO: 1453 - protein, 9 aa, synthetic construct
  REGION 1..9: note = Description of Artificial Sequence: Synthetic peptide
EQVPPLVSL

SEQ ID NO: 1454 - protein, 9 aa, synthetic construct
  REGION 1..9: note = Description of Artificial Sequence: Synthetic peptide
ERQGPEPTF

SEQ ID NO: 1455 - protein, 9 aa, synthetic construct
  REGION 1..9: note = Description of Artificial Sequence: Synthetic peptide
ERQGTGPTF

SEQ ID NO: 1456 - protein, 9 aa, synthetic construct
  REGION 1..9: note = Description of Artificial Sequence: Synthetic peptide
THTPNPEGL

SEQ ID NO: 1457 - protein, 11 aa, synthetic construct
  REGION 1..11: note = Description of Artificial Sequence: Synthetic peptide
TQIDPDLADQL

SEQ ID NO: 1458 - protein, 9 aa, synthetic construct
  REGION 1..9: note = Description of Artificial Sequence: Synthetic peptide
IRIGPGQSF

SEQ ID NO: 1459 - protein, 9 aa, synthetic construct
  REGION 1..9: note = Description of Artificial Sequence: Synthetic peptide
YDLGDINNL

SEQ ID NO: 1460 - protein, 11 aa, synthetic construct
  REGION 1..11: note = Description of Artificial Sequence: Synthetic peptide
TQIDPDQADQL

SEQ ID NO: 1461 - protein, 9 aa, synthetic construct
  REGION 1..9: note = Description of Artificial Sequence: Synthetic peptide
NHSGGDPEV

SEQ ID NO: 1462 - protein, 11 aa, synthetic construct
  REGION 1..11: note = Description of Artificial Sequence: Synthetic peptide
VHAGPVAPGQM

SEQ ID NO: 1463 - protein, 9 aa, synthetic construct
  REGION 1..9: note = Description of Artificial Sequence: Synthetic peptide
THLEGKVIL

SEQ ID NO: 1464 - protein, 9 aa, synthetic construct
  REGION 1..9: note = Description of Artificial Sequence: Synthetic peptide
EHLKTAVQM

SEQ ID NO: 1465 - protein, 8 aa, synthetic construct
  REGION 1..8: note = Description of Artificial Sequence: Synthetic peptide
MHTDIISL

SEQ ID NO: 1466 - protein, 9 aa, synthetic construct
  REGION 1..9: note = Description of Artificial Sequence: Synthetic peptide
SQAQQTSIM

SEQ ID NO: 1467 - protein, 9 aa, synthetic construct
  REGION 1..9: note = Description of Artificial Sequence: Synthetic peptide
VRIGPGQTF

SEQ ID NO: 1468 - protein, 9 aa, synthetic construct
  REGION 1..9: note = Description of Artificial Sequence: Synthetic peptide
SQVQHTNIM

SEQ ID NO: 1469 - protein, 9 aa, synthetic construct
  REGION 1..9: note = Description of Artificial Sequence: Synthetic peptide
EGQGTGPTL

SEQ ID NO: 1470 - protein, 10 aa, synthetic construct
  REGION 1..10: note = Description of Artificial Sequence: Synthetic peptide
TQQEINEQEL

SEQ ID NO: 1471 - protein, 9 aa, synthetic construct
  REGION 1..9: note = Description of Artificial Sequence: Synthetic peptide
DREPAQPLV

SEQ ID NO: 1472 - protein, 9 aa, synthetic construct
  REGION 1..9: note = Description of Artificial Sequence: Synthetic peptide
SQVQHPNIM

SEQ ID NO: 1473 - protein, 8 aa, synthetic construct
  REGION 1..8: note = Description of Artificial Sequence: Synthetic peptide
LHQVVEQL

SEQ ID NO: 1474 - protein, 9 aa, synthetic construct
  REGION 1..9: note = Description of Artificial Sequence: Synthetic peptide
VHTDNGSNF

SEQ ID NO: 1475 - protein, 9 aa, synthetic construct
  REGION 1..9: note = Description of Artificial Sequence: Synthetic peptide
YDLGDDNNL

SEQ ID NO: 1476 - protein, 9 aa, synthetic construct
  REGION 1..9: note = Description of Artificial Sequence: Synthetic peptide
THTPNPRGL

SEQ ID NO: 1477 - protein, 9 aa, synthetic construct
  REGION 1..9: note = Description of Artificial Sequence: Synthetic peptide
ERIRQTPTA

SEQ ID NO: 1478 - protein, 10 aa, synthetic construct
  REGION 1..10: note = Description of Artificial Sequence: Synthetic peptide
SQYALGIIQA

SEQ ID NO: 1479 - protein, 8 aa, synthetic construct
  REGION 1..8: note = Description of Artificial Sequence: Synthetic peptide
WQRPIVTV

SEQ ID NO: 1480 - protein, 9 aa, synthetic construct
  REGION 1..9: note = Description of Artificial Sequence: Synthetic peptide
VQLGIPHPA

SEQ ID NO: 1481 - protein, 10 aa, synthetic construct
  REGION 1..10: note = Description of Artificial Sequence: Synthetic peptide
SQYVLGIIQA

SEQ ID NO: 1482 - protein, 8 aa, synthetic construct
  REGION 1..8: note = Description of Artificial Sequence: Synthetic peptide
THGIKPVV

SEQ ID NO: 1483 - protein, 8 aa, synthetic construct
  REGION 1..8: note = Description of Artificial Sequence: Synthetic peptide
THGIRPVV

SEQ ID NO: 1484 - protein, 9 aa, synthetic construct
  REGION 1..9: note = Description of Artificial Sequence: Synthetic peptide
QNYPIVQNA

SEQ ID NO: 1485 - protein, 9 aa, synthetic construct
  REGION 1..9: note = Description of Artificial Sequence: Synthetic peptide
TRDGGITSA

SEQ ID NO: 1486 - protein, 10 aa, synthetic construct
  REGION 1..10: note = Description of Artificial Sequence: Synthetic peptide
ERIRQTPTAA

SEQ ID NO: 1487 - protein, 10 aa, synthetic construct
  REGION 1..10: note = Description of Artificial Sequence: Synthetic peptide
NHPGSQPTTA

SEQ ID NO: 1488 - protein, 8 aa, synthetic construct
  REGION 1..8: note = Description of Artificial Sequence: Synthetic peptide
WQRPLVTV

SEQ ID NO: 1489 - protein, 8 aa, synthetic construct
  REGION 1..8: note = Description of Artificial Sequence: Synthetic peptide
DQISIEIC

SEQ ID NO: 1490 - protein, 8 aa, synthetic construct
  REGION 1..8: note = Description of Artificial Sequence: Synthetic peptide
DQILIEIC

SEQ ID NO: 1491 - protein, 9 aa, synthetic construct
  REGION 1..9: note = Description of Artificial Sequence: Synthetic peptide
QIMEQLQSA

SEQ ID NO: 1492 - protein, 8 aa, synthetic construct
  REGION 1..8: note = Description of Artificial Sequence: Synthetic peptide
SMTLTVQA

SEQ ID NO: 1493 - protein, 8 aa, synthetic construct
  REGION 1..8: note = Description of Artificial Sequence: Synthetic peptide
TRPPLPSV

SEQ ID NO: 1494 - protein, 9 aa, synthetic construct
  REGION 1..9: note = Description of Artificial Sequence: Synthetic peptide
YQLEKDPIA

SEQ ID NO: 1495 - protein, 8 aa, synthetic construct
  REGION 1..8: note = Description of Artificial Sequence: Synthetic peptide
GKVILVAV

SEQ ID NO: 1496 - protein, 9 aa, synthetic construct
  REGION 1..9: note = Description of Artificial Sequence: Synthetic peptide
QRVGQAMYA

SEQ ID NO: 1497 - protein, 10 aa, synthetic construct
  REGION 1..10: note = Description of Artificial Sequence: Synthetic peptide
QQIMEQLQSA

SEQ ID NO: 1498 - protein, 8 aa, synthetic construct
  REGION 1..8: note = Description of Artificial Sequence: Synthetic peptide
MHTDIISL

SEQ ID NO: 1499 - protein, 8 aa, synthetic construct
  REGION 1..8: note = Description of Artificial Sequence: Synthetic peptide
DRLHPVQA

SEQ ID NO: 1500 - protein, 9 aa, synthetic construct
  REGION 1..9: note = Description of Artificial Sequence: Synthetic peptide
AEVVQKVTM

SEQ ID NO: 1501 - protein, 9 aa, synthetic construct
  REGION 1..9: note = Description of Artificial Sequence: Synthetic peptide
AEVVQKVVM

SEQ ID NO: 1502 - protein, 10 aa, synthetic construct
  REGION 1..10: note = Description of Artificial Sequence: Synthetic peptide
AEGQGTGPTL

SEQ ID NO: 1503 - protein, 9 aa, synthetic construct
  REGION 1..9: note = Description of Artificial Sequence: Synthetic peptide
HEVIFNSTL

SEQ ID NO: 1504 - protein, 10 aa, synthetic construct
  REGION 1..10: note = Description of Artificial Sequence: Synthetic peptide
IEVKDTKEAL

SEQ ID NO: 1505 - protein, 10 aa, synthetic construct
  REGION 1..10: note = Description of Artificial Sequence: Synthetic peptide
TETTNQKTEL

SEQ ID NO: 1506 - protein, 9 aa, synthetic construct
  REGION 1..9: note = Description of Artificial Sequence: Synthetic peptide
QEINEQELL

SEQ ID NO: 1507 - protein, 9 aa, synthetic construct
  REGION 1..9: note = Description of Artificial Sequence: Synthetic peptide
MEDEEKEVL

SEQ ID NO: 1508 - protein, 10 aa, synthetic construct
  REGION 1..10: note = Description of Artificial Sequence: Synthetic peptide
REPAQPLVSL

SEQ ID NO: 1509 - protein, 10 aa, synthetic construct
  REGION 1..10: note = Description of Artificial Sequence: Synthetic peptide
KEQVPPLVSL

SEQ ID NO: 1510 - protein, 8 aa, synthetic construct
  REGION 1..8: note = Description of Artificial Sequence: Synthetic peptide
KEFNGTGL

SEQ ID NO: 1511 - protein, 9 aa, synthetic construct
  REGION 1..9: note = Description of Artificial Sequence: Synthetic peptide
KEISNYTNL

SEQ ID NO: 1512 - protein, 9 aa, synthetic construct
  REGION 1..9: note = Description of Artificial Sequence: Synthetic peptide
TEAENNSLL

SEQ ID NO: 1513 - protein, 9 aa, synthetic construct
  REGION 1..9: note = Description of Artificial Sequence: Synthetic peptide
SEGATPQDL

SEQ ID NO: 1514 - protein, 9 aa, synthetic construct
  REGION 1..9: note = Description of Artificial Sequence: Synthetic peptide
VELLGHSSL

SEQ ID NO: 1515 - protein, 8 aa, synthetic construct
  REGION 1..8: note = Description of Artificial Sequence: Synthetic peptide
IETVPVKL

SEQ ID NO: 1516 - protein, 9 aa, synthetic construct
  REGION 1..9: note = Description of Artificial Sequence: Synthetic peptide
IEGQLREAL

SEQ ID NO: 1517 - protein, 9 aa, synthetic construct
  REGION 1..9: note = Description of Artificial Sequence: Synthetic peptide
QEKNEQDLL

SEQ ID NO: 1518 - protein, 9 aa, synthetic construct
  REGION 1..9: note = Description of Artificial Sequence: Synthetic peptide
YDLGDINNL

SEQ ID NO: 1519 - protein, 9 aa, synthetic construct
  REGION 1..9: note = Description of Artificial Sequence: Synthetic peptide
YDLGDDNNL

SEQ ID NO: 1520 - protein, 8 aa, synthetic construct
  REGION 1..8: note = Description of Artificial Sequence: Synthetic peptide
IEAQQHML

SEQ ID NO: 1521 - protein, 9 aa, synthetic construct
  REGION 1..9: note = Description of Artificial Sequence: Synthetic peptide
YDLGNDINL

SEQ ID NO: 1522 - protein, 9 aa, synthetic construct
  REGION 1..9: note = Description of Artificial Sequence: Synthetic peptide
KEISNYTQI

SEQ ID NO: 1523 - protein, 10 aa, synthetic construct
  REGION 1..10: note = Description of Artificial Sequence: Synthetic peptide
AEHLKTAVQM

SEQ ID NO: 1524 - protein, 10 aa, synthetic construct
  REGION 1..10: note = Description of Artificial Sequence: Synthetic peptide
NESDGDREEL

SEQ ID NO: 1525 - protein, 10 aa, synthetic construct
  REGION 1..10: note = Description of Artificial Sequence: Synthetic peptide
AERQGPEPTF

SEQ ID NO: 1526 - protein, 8 aa, synthetic construct
  REGION 1..8: note = Description of Artificial Sequence: Synthetic peptide
IEAQQHLL

SEQ ID NO: 1527 - protein, 10 aa, synthetic construct
  REGION 1..10: note = Description of Artificial Sequence: Synthetic peptide
IEESQTQQEI

SEQ ID NO: 1528 - protein, 9 aa, synthetic construct
  REGION 1..9: note = Description of Artificial Sequence: Synthetic peptide
AEVVQKVTM

SEQ ID NO: 1529 - protein, 9 aa, synthetic construct
  REGION 1..9: note = Description of Artificial Sequence: Synthetic peptide
AEVVQKVVM

SEQ ID NO: 1530 - protein, 10 aa, synthetic construct
  REGION 1..10: note = Description of Artificial Sequence: Synthetic peptide
AEGQGTGPTL

SEQ ID NO: 1531 - protein, 9 aa, synthetic construct
  REGION 1..9: note = Description of Artificial Sequence: Synthetic peptide
HEVIFNSTL

SEQ ID NO: 1532 - protein, 9 aa, synthetic construct
  REGION 1..9: note = Description of Artificial Sequence: Synthetic peptide
YDLGDINNL

SEQ ID NO: 1533 - protein, 10 aa, synthetic construct
  REGION 1..10: note = Description of Artificial Sequence: Synthetic peptide
KEQVPPLVSL

SEQ ID NO: 1534 - protein, 10 aa, synthetic construct
  REGION 1..10: note = Description of Artificial Sequence: Synthetic peptide
AERQGTGPTF

SEQ ID NO: 1535 - protein, 10 aa, synthetic construct
  REGION 1..10: note = Description of Artificial Sequence: Synthetic peptide
TETTNQKTEL

SEQ ID NO: 1536 - protein, 9 aa, synthetic construct
  REGION 1..9: note = Description of Artificial Sequence: Synthetic peptide
YDLGNDINL

SEQ ID NO: 1537 - protein, 10 aa, synthetic construct
  REGION 1..10: note = Description of Artificial Sequence: Synthetic peptide
REPAQPLVSL

SEQ ID NO: 1538 - protein, 10 aa, synthetic construct
  REGION 1..10: note = Description of Artificial Sequence: Synthetic peptide
AERQGPEPTF

SEQ ID NO: 1539 - protein, 8 aa, synthetic construct
  REGION 1..8: note = Description of Artificial Sequence: Synthetic peptide
TDIQTREL

SEQ ID NO: 1540 - protein, 8 aa, synthetic construct
  REGION 1..8: note = Description of Artificial Sequence: Synthetic peptide
TDIQTKEL

SEQ ID NO: 1541 - protein, 8 aa, synthetic construct
  REGION 1..8: note = Description of Artificial Sequence: Synthetic peptide
IEAQQHML

SEQ ID NO: 1542 - protein, 10 aa, synthetic construct
  REGION 1..10: note = Description of Artificial Sequence: Synthetic peptide
AEHLKTAVQM

SEQ ID NO: 1543 - protein, 8 aa, synthetic construct
  REGION 1..8: note = Description of Artificial Sequence: Synthetic peptide
KEFNGTGL

SEQ ID NO: 1544 - protein, 10 aa, synthetic construct
  REGION 1..10: note = Description of Artificial Sequence: Synthetic peptide
VETGVGRTQV

SEQ ID NO: 1545 - protein, 10 aa, synthetic construct
  REGION 1..10: note = Description of Artificial Sequence: Synthetic peptide
VETGVGRPQV

SEQ ID NO: 1546 - protein, 10 aa, synthetic construct
  REGION 1..10: note = Description of Artificial Sequence: Synthetic peptide
AEHLRTAVQM

SEQ ID NO: 1547 - protein, 10 aa, synthetic construct
  REGION 1..10: note = Description of Artificial Sequence: Synthetic peptide
IEVKDTKEAL

SEQ ID NO: 1548 - protein, 8 aa, synthetic construct
  REGION 1..8: note = Description of Artificial Sequence: Synthetic peptide
AEVVQKVV

SEQ ID NO: 1549 - protein, 10 aa, synthetic construct
  REGION 1..10: note = Description of Artificial Sequence: Synthetic peptide
GEIIGDIRKA

SEQ ID NO: 1550 - protein, 9 aa, synthetic construct
  REGION 1..9: note = Description of Artificial Sequence: Synthetic peptide
VELLGHSSL

SEQ ID NO: 1551 - protein, 8 aa, synthetic construct
  REGION 1..8: note = Description of Artificial Sequence: Synthetic peptide
IETVPVKL

SEQ ID NO: 1552 - protein, 9 aa, synthetic construct
  REGION 1..9: note = Description of Artificial Sequence: Synthetic peptide
TEPVNITCI

SEQ ID NO: 1553 - protein, 9 aa, synthetic construct
  REGION 1..9: note = Description of Artificial Sequence: Synthetic peptide
SERVLSASL

SEQ ID NO: 1554 - protein, 10 aa, synthetic construct
  REGION 1..10: note = Description of Artificial Sequence: Synthetic peptide
TETGVGRPQV

SEQ ID NO: 1555 - protein, 8 aa, synthetic construct
  REGION 1..8: note = Description of Artificial Sequence: Synthetic peptide
VEAIIRTL

SEQ ID NO: 1556 - protein, 9 aa, synthetic construct
  REGION 1..9: note = Description of Artificial Sequence: Synthetic peptide
SERVLSTCL

SEQ ID NO: 1557 - protein, 9 aa, synthetic construct
  REGION 1..9: note = Description of Artificial Sequence: Synthetic peptide
QEINEQELL

SEQ ID NO: 1558 - protein, 9 aa, synthetic construct
  REGION 1..9: note = Description of Artificial Sequence: Synthetic peptide
GEVGFPVRP

SEQ ID NO: 1559 - protein, 9 aa, synthetic construct
  REGION 1..9: note = Description of Artificial Sequence: Synthetic peptide
IEGQLREAL

SEQ ID NO: 1560 - protein, 8 aa, synthetic construct
  REGION 1..8: note = Description of Artificial Sequence: Synthetic peptide
SDLQTKEL

SEQ ID NO: 1561 - protein, 8 aa, synthetic construct
  REGION 1..8: note = Description of Artificial Sequence: Synthetic peptide
IEAQQHLL

SEQ ID NO: 1562 - protein, 9 aa, synthetic construct
  REGION 1..9: note = Description of Artificial Sequence: Synthetic peptide
SERILSTCL

SEQ ID NO: 1563 - protein, 11 aa, synthetic construct
  REGION 1..11: note = Description of Artificial Sequence: Synthetic peptide
GDYDLGDDNNL

SEQ ID NO: 1564 - protein, 8 aa, synthetic construct
  REGION 1..8: note = Description of Artificial Sequence: Synthetic peptide
HEVIFNST

SEQ ID NO: 1565 - protein, 8 aa, synthetic construct
  REGION 1..8: note = Description of Artificial Sequence: Synthetic peptide
TDRVIETV

SEQ ID NO: 1566 - protein, 8 aa, synthetic construct
  REGION 1..8: note = Description of Artificial Sequence: Synthetic peptide
KENIIVQL

SEQ ID NO: 1567 - protein, 8 aa, synthetic construct
  REGION 1..8: note = Description of Artificial Sequence: Synthetic peptide
YDTIAIAV

SEQ ID NO: 1568 - protein, 9 aa, synthetic construct
  REGION 1..9: note = Description of Artificial Sequence: Synthetic peptide
SEGATPQDL

SEQ ID NO: 1569 - protein, 9 aa, synthetic construct
  REGION 1..9: note = Description of Artificial Sequence: Synthetic peptide
KEISNYTNL

SEQ ID NO: 1570 - protein, 11 aa, synthetic construct
  REGION 1..11: note = Description of Artificial Sequence: Synthetic peptide
QEINEQELLAL

SEQ ID NO: 1571 - protein, 8 aa, synthetic construct
  REGION 1..8: note = Description of Artificial Sequence: Synthetic peptide
IEITTHSF

SEQ ID NO: 1572 - protein, 9 aa, synthetic construct
  REGION 1..9: note = Description of Artificial Sequence: Synthetic peptide
YDLGDDNNL

SEQ ID NO: 1573 - protein, 11 aa, synthetic construct
  REGION 1..11: note = Description of Artificial Sequence: Synthetic peptide
SELVSQIIEKL

SEQ ID NO: 1574 - protein, 9 aa, synthetic construct
  REGION 1..9: note = Description of Artificial Sequence: Synthetic peptide
LEKDPIVGA

SEQ ID NO: 1575 - protein, 11 aa, synthetic construct
  REGION 1..11: note = Description of Artificial Sequence: Synthetic peptide
VEAIIRTLQQL

SEQ ID NO: 1576 - protein, 9 aa, synthetic construct
  REGION 1..9: note = Description of Artificial Sequence: Synthetic peptide
SESELVNQI

SEQ ID NO: 1577 - protein, 9 aa, synthetic construct
  REGION 1..9: note = Description of Artificial Sequence: Synthetic peptide
GEVGFPVRP

SEQ ID NO: 1578 - protein, 10 aa, synthetic construct
  REGION 1..10: note = Description of Artificial Sequence: Synthetic peptide
GEIIGDIRKA

SEQ ID NO: 1579 - protein, 9 aa, synthetic construct
  REGION 1..9: note = Description of Artificial Sequence: Synthetic peptide
LEKDPIVGA

SEQ ID NO: 1580 - protein, 9 aa, synthetic construct
  REGION 1..9: note = Description of Artificial Sequence: Synthetic peptide
TETLLIQNA

SEQ ID NO: 1581 - protein, 9 aa, synthetic construct
  REGION 1..9: note = Description of Artificial Sequence: Synthetic peptide
LEKDPIAGA

SEQ ID NO: 1582 - protein, 9 aa, synthetic construct
  REGION 1..9: note = Description of Artificial Sequence: Synthetic peptide
KEFNGTGLC

SEQ ID NO: 1583 - protein, 9 aa, synthetic construct
  REGION 1..9: note = Description of Artificial Sequence: Synthetic peptide
TETLLVQNA

SEQ ID NO: 1584 - protein, 9 aa, synthetic construct
  REGION 1..9: note = Description of Artificial Sequence: Synthetic peptide
EEVGFPVRP

SEQ ID NO: 1585 - protein, 9 aa, synthetic construct
  REGION 1..9: note = Description of Artificial Sequence: Synthetic peptide
IEVKDTKEA

SEQ ID NO: 1586 - protein, 9 aa, synthetic construct
  REGION 1..9: note = Description of Artificial Sequence: Synthetic peptide
QEFGIPYNP

SEQ ID NO: 1587 - protein, 8 aa, synthetic construct
  REGION 1..8: note = Description of Artificial Sequence: Synthetic peptide
RDFILIAA

SEQ ID NO: 1588 - protein, 8 aa, synthetic construct
  REGION 1..8: note = Description of Artificial Sequence: Synthetic peptide
AEVVQKVV

SEQ ID NO: 1589 - protein, 8 aa, synthetic construct
  REGION 1..8: note = Description of Artificial Sequence: Synthetic peptide
TDRVIETV

SEQ ID NO: 1590 - protein, 9 aa, synthetic construct
  REGION 1..9: note = Description of Artificial Sequence: Synthetic peptide
GENNSLLHP

SEQ ID NO: 1591 - protein, 8 aa, synthetic construct
  REGION 1..8: note = Description of Artificial Sequence: Synthetic peptide
HEVIFNST

SEQ ID NO: 1592 - protein, 9 aa, synthetic construct
  REGION 1..9: note = Description of Artificial Sequence: Synthetic peptide
SEQTGAISP

SEQ ID NO: 1593 - protein, 8 aa, synthetic construct
  REGION 1..8: note = Description of Artificial Sequence: Synthetic peptide
AETTLFCA

SEQ ID NO: 1594 - protein, 9 aa, synthetic construct
  REGION 1..9: note = Description of Artificial Sequence: Synthetic peptide
AEVVQKVTM

SEQ ID NO: 1595 - protein, 9 aa, synthetic construct
  REGION 1..9: note = Description of Artificial Sequence: Synthetic peptide
AEVVQKVVM

SEQ ID NO: 1596 - protein, 10 aa, synthetic construct
  REGION 1..10: note = Description of Artificial Sequence: Synthetic peptide
AERQGTGPTF

SEQ ID NO: 1597 - protein, 10 aa, synthetic construct
  REGION 1..10: note = Description of Artificial Sequence: Synthetic peptide
AERQGPEPTF

SEQ ID NO: 1598 - protein, 9 aa, synthetic construct
  REGION 1..9: note = Description of Artificial Sequence: Synthetic peptide
HEVIFNSTL

SEQ ID NO: 1599 - protein, 10 aa, synthetic construct
  REGION 1..10: note = Description of Artificial Sequence: Synthetic peptide
AEGQGTGPTL

SEQ ID NO: 1600 - protein, 8 aa, synthetic construct
  REGION 1..8: note = Description of Artificial Sequence: Synthetic peptide
TDIQTKEL

SEQ ID NO: 1601 - protein, 9 aa, synthetic construct
  REGION 1..9: note = Description of Artificial Sequence: Synthetic peptide
SERVLSASL

SEQ ID NO: 1602 - protein, 8 aa, synthetic construct
  REGION 1..8: note = Description of Artificial Sequence: Synthetic peptide
AEVVQKVV

SEQ ID NO: 1603 - protein, 9 aa, synthetic construct
  REGION 1..9: note = Description of Artificial Sequence: Synthetic peptide
SERVLSTCL

SEQ ID NO: 1604 - protein, 8 aa, synthetic construct
  REGION 1..8: note = Description of Artificial Sequence: Synthetic peptide
TDIQTREL

SEQ ID NO: 1605 - protein, 8 aa, synthetic construct
  REGION 1..8: note = Description of Artificial Sequence: Synthetic peptide
IEAQQHML

SEQ ID NO: 1606 - protein, 9 aa, synthetic construct
  REGION 1..9: note = Description of Artificial Sequence: Synthetic peptide
SERILSTCL

SEQ ID NO: 1607 - protein, 8 aa, synthetic construct
  REGION 1..8: note = Description of Artificial Sequence: Synthetic peptide
AEHLRTAV

SEQ ID NO: 1608 - protein, 8 aa, synthetic construct
  REGION 1..8: note = Description of Artificial Sequence: Synthetic peptide
AEHLKTAV

SEQ ID NO: 1609 - protein, 10 aa, synthetic construct
  REGION 1..10: note = Description of Artificial Sequence: Synthetic peptide
KEQVPPLVSL

SEQ ID NO: 1610 - protein, 8 aa, synthetic construct
  REGION 1..8: note = Description of Artificial Sequence: Synthetic peptide
SDLQTKEL

SEQ ID NO: 1611 - protein, 9 aa, synthetic construct
  REGION 1..9: note = Description of Artificial Sequence: Synthetic peptide
GEQDRGRSI

SEQ ID NO: 1612 - protein, 8 aa, synthetic construct
  REGION 1..8: note = Description of Artificial Sequence: Synthetic peptide
KEFNGTGL

SEQ ID NO: 1613 - protein, 9 aa, synthetic construct
  REGION 1..9: note = Description of Artificial Sequence: Synthetic peptide
IEGQLREAL

SEQ ID NO: 1614 - protein, 10 aa, synthetic construct
  REGION 1..10: note = Description of Artificial Sequence: Synthetic peptide
AEHLRTAVQM

SEQ ID NO: 1615 - protein, 9 aa, synthetic construct
  REGION 1..9: note = Description of Artificial Sequence: Synthetic peptide
QEINEQELL

SEQ ID NO: 1616 - protein, 10 aa, synthetic construct
  REGION 1..10: note = Description of Artificial Sequence: Synthetic peptide
TETTNQKTEL

SEQ ID NO: 1617 - protein, 8 aa, synthetic construct
  REGION 1..8: note = Description of Artificial Sequence: Synthetic peptide
VEAIIRTL

SEQ ID NO: 1618 - protein, 9 aa, synthetic construct
  REGION 1..9: note = Description of Artificial Sequence: Synthetic peptide
VELLGHSSL

SEQ ID NO: 1619 - protein, 8 aa, synthetic construct
  REGION 1..8: note = Description of Artificial Sequence: Synthetic peptide
IEAQQHLL

SEQ ID NO: 1620 - protein, 9 aa, synthetic construct
  REGION 1..9: note = Description of Artificial Sequence: Synthetic peptide
QEKNEQDLL

SEQ ID NO: 1621 - protein, 10 aa, synthetic construct
  REGION 1..10: note = Description of Artificial Sequence: Synthetic peptide
REPAQPLVSL

SEQ ID NO: 1622 - protein, 10 aa, synthetic construct
  REGION 1..10: note = Description of Artificial Sequence: Synthetic peptide
VETGVGRTQV

SEQ ID NO: 1623 - protein, 8 aa, synthetic construct
  REGION 1..8: note = Description of Artificial Sequence: Synthetic peptide
IEKDKVYL

SEQ ID NO: 1624 - protein, 8 aa, synthetic construct
  REGION 1..8: note = Description of Artificial Sequence: Synthetic peptide
KENIIVQL

SEQ ID NO: 1625 - protein, 8 aa, synthetic construct
  REGION 1..8: note = Description of Artificial Sequence: Synthetic peptide
TDRVIETV

SEQ ID NO: 1626 - protein, 8 aa, synthetic construct
  REGION 1..8: note = Description of Artificial Sequence: Synthetic peptide
GQMIHQSL

SEQ ID NO: 1627 - protein, 10 aa, synthetic construct
  REGION 1..10: note = Description of Artificial Sequence: Synthetic peptide
AEHLKTAVQM

SEQ ID NO: 1628 - protein, 9 aa, synthetic construct
  REGION 1..9: note = Description of Artificial Sequence: Synthetic peptide
YDLGDINNL

SEQ ID NO: 1629 - protein, 8 aa, synthetic construct
  REGION 1..8: note = Description of Artificial Sequence: Synthetic peptide
TERQANFL

SEQ ID NO: 1630 - protein, 9 aa, synthetic construct
  REGION 1..9: note = Description of Artificial Sequence: Synthetic peptide
MEDEEKEVL

SEQ ID NO: 1631 - protein, 8 aa, synthetic construct
  REGION 1..8: note = Description of Artificial Sequence: Synthetic peptide
IEITTHSF

SEQ ID NO: 1632 - protein, 9 aa, synthetic construct
  REGION 1..9: note = Description of Artificial Sequence: Synthetic peptide
LEKDPIVGA

SEQ ID NO: 1633 - protein, 8 aa, synthetic construct
  REGION 1..8: note = Description of Artificial Sequence: Synthetic peptide
AEVVQKVT

SEQ ID NO: 1634 - protein, 8 aa, synthetic construct
  REGION 1..8: note = Description of Artificial Sequence: Synthetic peptide
IEQLQPSV

SEQ ID NO: 1635 - protein, 8 aa, synthetic construct
  REGION 1..8: note = Description of Artificial Sequence: Synthetic peptide
MEQLQSAL

SEQ ID NO: 1636 - protein, 9 aa, synthetic construct
  REGION 1..9: note = Description of Artificial Sequence: Synthetic peptide
KEKGGLDGL

SEQ ID NO: 1637 - protein, 8 aa, synthetic construct
  REGION 1..8: note = Description of Artificial Sequence: Synthetic peptide
KEQVPPLV

SEQ ID NO: 1638 - protein, 8 aa, synthetic construct
  REGION 1..8: note = Description of Artificial Sequence: Synthetic peptide
IEMGNYDL

SEQ ID NO: 1639 - protein, 9 aa, synthetic construct
  REGION 1..9: note = Description of Artificial Sequence: Synthetic peptide
SEMEKEGKI

SEQ ID NO: 1640 - protein, 9 aa, synthetic construct
  REGION 1..9: note = Description of Artificial Sequence: Synthetic peptide
KDREPAQPL

SEQ ID NO: 1641 - protein, 9 aa, synthetic construct
  REGION 1..9: note = Description of Artificial Sequence: Synthetic peptide
SEQTRTNSP

SEQ ID NO: 1642 - protein, 9 aa, synthetic construct
  REGION 1..9: note = Description of Artificial Sequence: Synthetic peptide
KEISNYTNL

SEQ ID NO: 1643 - protein, 11 aa, synthetic construct
  REGION 1..11: note = Description of Artificial Sequence: Synthetic peptide
AEQATQEVKSW

SEQ ID NO: 1644 - protein, 11 aa, synthetic construct
  REGION 1..11: note = Description of Artificial Sequence: Synthetic peptide
AEQATQDVKHW

SEQ ID NO: 1645 - protein, 11 aa, synthetic construct
  REGION 1..11: note = Description of Artificial Sequence: Synthetic peptide
AEQATQEVKGW

SEQ ID NO: 1646 - protein, 11 aa, synthetic construct
  REGION 1..11: note = Description of Artificial Sequence: Synthetic peptide
SEVNIVTDSQY

SEQ ID NO: 1647 - protein, 9 aa, synthetic construct
  REGION 1..9: note = Description of Artificial Sequence: Synthetic peptide
AENLWVTVY

SEQ ID NO: 1648 - protein, 9 aa, synthetic construct
  REGION 1..9: note = Description of Artificial Sequence: Synthetic peptide
AEVVQKVTM

SEQ ID NO: 1649 - protein, 11 aa, synthetic construct
  REGION 1..11: note = Description of Artificial Sequence: Synthetic peptide
AEIQKQGQDQW

SEQ ID NO: 1650 - protein, 9 aa, synthetic construct
  REGION 1..9: note = Description of Artificial Sequence: Synthetic peptide
AEQRWVTVY

SEQ ID NO: 1651 - protein, 10 aa, synthetic construct
  REGION 1..10: note = Description of Artificial Sequence: Synthetic peptide
AERQGPEPTF

SEQ ID NO: 1652 - protein, 10 aa, synthetic construct
  REGION 1..10: note = Description of Artificial Sequence: Synthetic peptide
AERQGTGPTF

SEQ ID NO: 1653 - protein, 10 aa, synthetic construct
  REGION 1..10: note = Description of Artificial Sequence: Synthetic peptide
AEGQGTGPTL

SEQ ID NO: 1654 - protein, 9 aa, synthetic construct
  REGION 1..9: note = Description of Artificial Sequence: Synthetic peptide
AEVVQKVVM

SEQ ID NO: 1655 - protein, 11 aa, synthetic construct
  REGION 1..11: note = Description of Artificial Sequence: Synthetic peptide
NEQDLLALDKW

SEQ ID NO: 1656 - protein, 10 aa, synthetic construct
  REGION 1..10: note = Description of Artificial Sequence: Synthetic peptide
NETPGTRYQY

SEQ ID NO: 1657 - protein, 9 aa, synthetic construct
  REGION 1..9: note = Description of Artificial Sequence: Synthetic peptide
IELPEKESW

SEQ ID NO: 1658 - protein, 9 aa, synthetic construct
  REGION 1..9: note = Description of Artificial Sequence: Synthetic peptide
SEIWENMTW

SEQ ID NO: 1659 - protein, 10 aa, synthetic construct
  REGION 1..10: note = Description of Artificial Sequence: Synthetic peptide
NETPGIRYQY

SEQ ID NO: 1660 - protein, 9 aa, synthetic construct
  REGION 1..9: note = Description of Artificial Sequence: Synthetic peptide
QELLALDKW

SEQ ID NO: 1661 - protein, 9 aa, synthetic construct
  REGION 1..9: note = Description of Artificial Sequence: Synthetic peptide
YETEKHNVW

SEQ ID NO: 1662 - protein, 9 aa, synthetic construct
  REGION 1..9: note = Description of Artificial Sequence: Synthetic peptide
AETGQETAY

SEQ ID NO: 1663 - protein, 11 aa, synthetic construct
  REGION 1..11: note = Description of Artificial Sequence: Synthetic peptide
NEQELLALDKW

SEQ ID NO: 1664 - protein, 11 aa, synthetic construct
  REGION 1..11: note = Description of Artificial Sequence: Synthetic peptide
SEVNIVTDSQY

SEQ ID NO: 1665 - protein, 11 aa, synthetic construct
  REGION 1..11: note = Description of Artificial Sequence: Synthetic peptide
AEQATQEVKSW

SEQ ID NO: 1666 - protein, 11 aa, synthetic construct
  REGION 1..11: note = Description of Artificial Sequence: Synthetic peptide
AEQATQEVKGW

SEQ ID NO: 1667 - protein, 11 aa, synthetic construct
  REGION 1..11: note = Description of Artificial Sequence: Synthetic peptide
AEQATQDVKHW

SEQ ID NO: 1668 - protein, 9 aa, synthetic construct
  REGION 1..9: note = Description of Artificial Sequence: Synthetic peptide
AEVVQKVTM

SEQ ID NO: 1669 - protein, 11 aa, synthetic construct
  REGION 1..11: note = Description of Artificial Sequence: Synthetic peptide
AEIQKQGQDQW

SEQ ID NO: 1670 - protein, 9 aa, synthetic construct
  REGION 1..9: note = Description of Artificial Sequence: Synthetic peptide
AEVVQKVVM

SEQ ID NO: 1671 - protein, 9 aa, synthetic construct
  REGION 1..9: note = Description of Artificial Sequence: Synthetic peptide
AENLWVTVY

SEQ ID NO: 1672 - protein, 10 aa, synthetic construct
  REGION 1..10: note = Description of Artificial Sequence: Synthetic peptide
NETPGIRYQY

SEQ ID NO: 1673 - protein, 10 aa, synthetic construct
  REGION 1..10: note = Description of Artificial Sequence: Synthetic peptide
NETPGTRYQY

SEQ ID NO: 1674 - protein, 10 aa, synthetic construct
  REGION 1..10: note = Description of Artificial Sequence: Synthetic peptide
AERQGTGPTF

SEQ ID NO: 1675 - protein, 10 aa, synthetic construct
  REGION 1..10: note = Description of Artificial Sequence: Synthetic peptide
AEGQGTGPTL

SEQ ID NO: 1676 - protein, 9 aa, synthetic construct
  REGION 1..9: note = Description of Artificial Sequence: Synthetic peptide
IELPEKESW

SEQ ID NO: 1677 - protein, 10 aa, synthetic construct
  REGION 1..10: note = Description of Artificial Sequence: Synthetic peptide
AERQGPEPTF

SEQ ID NO: 1678 - protein, 11 aa, synthetic construct
  REGION 1..11: note = Description of Artificial Sequence: Synthetic peptide
NEQDLLALDKW

SEQ ID NO: 1679 - protein, 9 aa, synthetic construct
  REGION 1..9: note = Description of Artificial Sequence: Synthetic peptide
SEMEKEGKI

SEQ ID NO: 1680 - protein, 9 aa, synthetic construct
  REGION 1..9: note = Description of Artificial Sequence: Synthetic peptide
SESELVNQI

SEQ ID NO: 1681 - protein, 9 aa, synthetic construct
  REGION 1..9: note = Description of Artificial Sequence: Synthetic peptide
SEIWENMTW

SEQ ID NO: 1682 - protein, 9 aa, synthetic construct
  REGION 1..9: note = Description of Artificial Sequence: Synthetic peptide
YETEKHNVW

SEQ ID NO: 1683 - protein, 9 aa, synthetic construct
  REGION 1..9: note = Description of Artificial Sequence: Synthetic peptide
AEQRWVTVY

SEQ ID NO: 1684 - protein, 9 aa, synthetic construct
  REGION 1..9: note = Description of Artificial Sequence: Synthetic peptide
QELLALDKW

SEQ ID NO: 1685 - protein, 9 aa, synthetic construct
  REGION 1..9: note = Description of Artificial Sequence: Synthetic peptide
SEIWDKMTW

SEQ ID NO: 1686 - protein, 11 aa, synthetic construct
  REGION 1..11: note = Description of Artificial Sequence: Synthetic peptide
TETTNQKTELY

SEQ ID NO: 1687 - protein, 11 aa, synthetic construct
  REGION 1..11: note = Description of Artificial Sequence: Synthetic peptide
NEQELLALDKW

SEQ ID NO: 1688 - protein, 11 aa, synthetic construct
  REGION 1..11: note = Description of Artificial Sequence: Synthetic peptide
QELKISAVNLY

SEQ ID NO: 1689 - protein, 9 aa, synthetic construct
  REGION 1..9: note = Description of Artificial Sequence: Synthetic peptide
AETGQETAY

SEQ ID NO: 1690 - protein, 9 aa, synthetic construct
  REGION 1..9: note = Description of Artificial Sequence: Synthetic peptide
TENLWVTVY

SEQ ID NO: 1691 - protein, 9 aa, synthetic construct
  REGION 1..9: note = Description of Artificial Sequence: Synthetic peptide
SESELVSQI

SEQ ID NO: 1692 - protein, 10 aa, synthetic construct
  REGION 1..10: note = Description of Artificial Sequence: Synthetic peptide
AETGQETAYF

SEQ ID NO: 1693 - protein, 9 aa, synthetic construct
  REGION 1..9: note = Description of Artificial Sequence: Synthetic peptide
DEIWENMTW

SEQ ID NO: 1694 - protein, 8 aa, synthetic construct
  REGION 1..8: note = Description of Artificial Sequence: Synthetic peptide
NETPGIRY

SEQ ID NO: 1695 - protein, 9 aa, synthetic construct
  REGION 1..9: note = Description of Artificial Sequence: Synthetic peptide
YDTEVHNVW

SEQ ID NO: 1696 - protein, 9 aa, synthetic construct
  REGION 1..9: note = Description of Artificial Sequence: Synthetic peptide
HEVIFNSTL

SEQ ID NO: 1697 - protein, 11 aa, synthetic construct
  REGION 1..11: note = Description of Artificial Sequence: Synthetic peptide
MEDEEKEVLKW

SEQ ID NO: 1698 - protein, 9 aa, synthetic construct
  REGION 1..9: note = Description of Artificial Sequence: Synthetic peptide
AEVVQKVTM

SEQ ID NO: 1699 - protein, 10 aa, synthetic construct
  REGION 1..10: note = Description of Artificial Sequence: Synthetic peptide
AEGQGTGPTL

SEQ ID NO: 1700 - protein, 10 aa, synthetic construct
  REGION 1..10: note = Description of Artificial Sequence: Synthetic peptide
AERQGTGPTF

SEQ ID NO: 1701 - protein, 9 aa, synthetic construct
  REGION 1..9: note = Description of Artificial Sequence: Synthetic peptide
AEVVQKVVM

SEQ ID NO: 1702 - protein, 10 aa, synthetic construct
  REGION 1..10: note = Description of Artificial Sequence: Synthetic peptide
AERQGPEPTF

SEQ ID NO: 1703 - protein, 11 aa, synthetic construct
  REGION 1..11: note = Description of Artificial Sequence: Synthetic peptide
AEQATQEVKSW

SEQ ID NO: 1704 - protein, 11 aa, synthetic construct
  REGION 1..11: note = Description of Artificial Sequence: Synthetic peptide
AEQATQEVKGW

SEQ ID NO: 1705 - protein, 11 aa, synthetic construct
  REGION 1..11: note = Description of Artificial Sequence: Synthetic peptide
AEIQKQGQDQW

SEQ ID NO: 1706 - protein, 10 aa, synthetic construct
  REGION 1..10: note = Description of Artificial Sequence: Synthetic peptide
KEQVPPLVSL

SEQ ID NO: 1707 - protein, 11 aa, synthetic construct
  REGION 1..11: note = Description of Artificial Sequence: Synthetic peptide
AEQATQDVKHW

SEQ ID NO: 1708 - protein, 11 aa, synthetic construct
  REGION 1..11: note = Description of Artificial Sequence: Synthetic peptide
SEVNIVTDSQY

SEQ ID NO: 1709 - protein, 10 aa, synthetic construct
  REGION 1..10: note = Description of Artificial Sequence: Synthetic peptide
AETGQETAYF

SEQ ID NO: 1710 - protein, 10 aa, synthetic construct
  REGION 1..10: note = Description of Artificial Sequence: Synthetic peptide
TETTNQKTEL

SEQ ID NO: 1711 - protein, 9 aa, synthetic construct
  REGION 1..9: note = Description of Artificial Sequence: Synthetic peptide
QEINEQELL

SEQ ID NO: 1712 - protein, 9 aa, synthetic construct
  REGION 1..9: note = Description of Artificial Sequence: Synthetic peptide
SEMEKEGKI

SEQ ID NO: 1713 - protein, 9 aa, synthetic construct
  REGION 1..9: note = Description of Artificial Sequence: Synthetic peptide
YDLGDINNL

SEQ ID NO: 1714 - protein, 11 aa, synthetic construct
  REGION 1..11: note = Description of Artificial Sequence: Synthetic peptide
AELELAENREI

SEQ ID NO: 1715 - protein, 10 aa, synthetic construct
  REGION 1..10: note = Description of Artificial Sequence: Synthetic peptide
QELKISAVNL

SEQ ID NO: 1716 - protein, 9 aa, synthetic construct
  REGION 1..9: note = Description of Artificial Sequence: Synthetic peptide
HEVIFNSTL

SEQ ID NO: 1717 - protein, 10 aa, synthetic construct
  REGION 1..10: note = Description of Artificial Sequence: Synthetic peptide
AEHLKTAVQM

SEQ ID NO: 1718 - protein, 9 aa, synthetic construct
  REGION 1..9: note = Description of Artificial Sequence: Synthetic peptide
SESELVNQI

SEQ ID NO: 1719 - protein, 10 aa, synthetic construct
  REGION 1..10: note = Description of Artificial Sequence: Synthetic peptide
AEHLRTAVQM

SEQ ID NO: 1720 - protein, 9 aa, synthetic construct
  REGION 1..9: note = Description of Artificial Sequence: Synthetic peptide
GEQDRGRSI

SEQ ID NO: 1721 - protein, 10 aa, synthetic construct
  REGION 1..10: note = Description of Artificial Sequence: Synthetic peptide
REPAQPLVSL

SEQ ID NO: 1722 - protein, 10 aa, synthetic construct
  REGION 1..10: note = Description of Artificial Sequence: Synthetic peptide
GDIEITTHSF

SEQ ID NO: 1723 - protein, 10 aa, synthetic construct
  REGION 1..10: note = Description of Artificial Sequence: Synthetic peptide
RDQNPPSVSL

SEQ ID NO: 1724 - protein, 9 aa, synthetic construct
  REGION 1..9: note = Description of Artificial Sequence: Synthetic peptide
TEAENNSLL

SEQ ID NO: 1725 - protein, 9 aa, synthetic construct
  REGION 1..9: note = Description of Artificial Sequence: Synthetic peptide
SERVLSASL

SEQ ID NO: 1726 - protein, 9 aa, synthetic construct
  REGION 1..9: note = Description of Artificial Sequence: Synthetic peptide
SEGATPQDL

SEQ ID NO: 1727 - protein, 10 aa, synthetic construct
  REGION 1..10: note = Description of Artificial Sequence: Synthetic peptide
AEIFGIGEEI

SEQ ID NO: 1728 - protein, 11 aa, synthetic construct
  REGION 1..11: note = Description of Artificial Sequence: Synthetic peptide
SENITNNVKTI

SEQ ID NO: 1729 - protein, 11 aa, synthetic construct
  REGION 1..11: note = Description of Artificial Sequence: Synthetic peptide
SELVNQIIEKL

SEQ ID NO: 1730 - protein, 9 aa, synthetic construct
  REGION 1..9: note = Description of Artificial Sequence: Synthetic peptide
SESELVSQI

SEQ ID NO: 1731 - protein, 9 aa, synthetic construct
  REGION 1..9: note = Description of Artificial Sequence: Synthetic peptide
EESQTQQEI

SEQ ID NO: 1732 - protein, 9 aa, synthetic construct
  REGION 1..9: note = Description of Artificial Sequence: Synthetic peptide
KEISNYTQI

SEQ ID NO: 1733 - protein, 9 aa, synthetic construct
  REGION 1..9: note = Description of Artificial Sequence: Synthetic peptide
KEISNYTNL

SEQ ID NO: 1734 - protein, 11 aa, synthetic construct
  REGION 1..11: note = Description of Artificial Sequence: Synthetic peptide
SELVSQIIEKL

SEQ ID NO: 1735 - protein, 9 aa, synthetic construct
  REGION 1..9: note = Description of Artificial Sequence: Synthetic peptide
QEKNEQDLL

SEQ ID NO: 1736 - protein, 9 aa, synthetic construct
  REGION 1..9: note = Description of Artificial Sequence: Synthetic peptide
YDLGNDINL

SEQ ID NO: 1737 - protein, 9 aa, synthetic construct
  REGION 1..9: note = Description of Artificial Sequence: Synthetic peptide
SERVLSTCL

SEQ ID NO: 1738 - protein, 10 aa, synthetic construct
  REGION 1..10: note = Description of Artificial Sequence: Synthetic peptide
GDPEVTTHSF

SEQ ID NO: 1739 - protein, 9 aa, synthetic construct
  REGION 1..9: note = Description of Artificial Sequence: Synthetic peptide
IELPEKESW

SEQ ID NO: 1740 - protein, 9 aa, synthetic construct
  REGION 1..9: note = Description of Artificial Sequence: Synthetic peptide
VELLGHSSL

SEQ ID NO: 1741 - protein, 8 aa, synthetic construct
  REGION 1..8: note = Description of Artificial Sequence: Synthetic peptide
EEIKNCSF

SEQ ID NO: 1742 - protein, 11 aa, synthetic construct
  REGION 1..11: note = Description of Artificial Sequence: Synthetic peptide
LEAQEEGEVGF

SEQ ID NO: 1743 - protein, 10 aa, synthetic construct
  REGION 1..10: note = Description of Artificial Sequence: Synthetic peptide
VETGVGRTQV

SEQ ID NO: 1744 - protein, 9 aa, synthetic construct
  REGION 1..9: note = Description of Artificial Sequence: Synthetic peptide
AEQRWVTVY

SEQ ID NO: 1745 - protein, 9 aa, synthetic construct
  REGION 1..9: note = Description of Artificial Sequence: Synthetic peptide
MESAEADRF

SEQ ID NO: 1746 - protein, 10 aa, synthetic construct
  REGION 1..10: note = Description of Artificial Sequence: Synthetic peptide
ILKDPVHGAY

SEQ ID NO: 1747 - protein, 9 aa, synthetic construct
  REGION 1..9: note = Description of Artificial Sequence: Synthetic peptide
SIVTRTVEL

SEQ ID NO: 1748 - protein, 10 aa, synthetic construct
  REGION 1..10: note = Description of Artificial Sequence: Synthetic peptide
ILKEPVHGVY

SEQ ID NO: 1749 - protein, 10 aa, synthetic construct
  REGION 1..10: note = Description of Artificial Sequence: Synthetic peptide
SIRIGPGQSF

SEQ ID NO: 1750 - protein, 9 aa, synthetic construct
  REGION 1..9: note = Description of Artificial Sequence: Synthetic peptide
RAVGIGAVF

SEQ ID NO: 1751 - protein, 9 aa, synthetic construct
  REGION 1..9: note = Description of Artificial Sequence: Synthetic peptide
FLGTAGSTM

SEQ ID NO: 1752 - protein, 9 aa, synthetic construct
  REGION 1..9: note = Description of Artificial Sequence: Synthetic peptide
TLNNNTIEM

SEQ ID NO: 1753 - protein, 8 aa, synthetic construct
  REGION 1..8: note = Description of Artificial Sequence: Synthetic peptide
GQMIHQSL

SEQ ID NO: 1754 - protein, 9 aa, synthetic construct
  REGION 1..9: note = Description of Artificial Sequence: Synthetic peptide
YDLGDINNL

SEQ ID NO: 1755 - protein, 8 aa, synthetic construct
  REGION 1..8: note = Description of Artificial Sequence: Synthetic peptide
GQGTGPTL

SEQ ID NO: 1756 - protein, 11 aa, synthetic construct
  REGION 1..11: note = Description of Artificial Sequence: Synthetic peptide
GDYDLGDDNNL

SEQ ID NO: 1757 - protein, 9 aa, synthetic construct
  REGION 1..9: note = Description of Artificial Sequence: Synthetic peptide
GCQKIIEQL

SEQ ID NO: 1758 - protein, 9 aa, synthetic construct
  REGION 1..9: note = Description of Artificial Sequence: Synthetic peptide
KALTDIVTL

SEQ ID NO: 1759 - protein, 11 aa, synthetic construct
  REGION 1..11: note = Description of Artificial Sequence: Synthetic peptide
GNYDLGDINNL

SEQ ID NO: 1760 - protein, 10 aa, synthetic construct
  REGION 1..10: note = Description of Artificial Sequence: Synthetic peptide
AQGQMIHQSL

SEQ ID NO: 1761 - protein, 9 aa, synthetic construct
  REGION 1..9: note = Description of Artificial Sequence: Synthetic peptide
GKKAIGTVL

SEQ ID NO: 1762 - protein, 9 aa, synthetic construct
  REGION 1..9: note = Description of Artificial Sequence: Synthetic peptide
YDLGDDNNL

SEQ ID NO: 1763 - protein, 11 aa, synthetic construct
  REGION 1..11: note = Description of Artificial Sequence: Synthetic peptide
GNYDLGNDINL

SEQ ID NO: 1764 - protein, 8 aa, synthetic construct
  REGION 1..8: note = Description of Artificial Sequence: Synthetic peptide
HQAAMQML

SEQ ID NO: 1765 - protein, 9 aa, synthetic construct
  REGION 1..9: note = Description of Artificial Sequence: Synthetic peptide
KALTDVVTL

SEQ ID NO: 1766 - protein, 9 aa, synthetic construct
  REGION 1..9: note = Description of Artificial Sequence: Synthetic peptide
EQVPPLVSL

SEQ ID NO: 1767 - protein, 9 aa, synthetic construct
  REGION 1..9: note = Description of Artificial Sequence: Synthetic peptide
KDFNGTGPC

SEQ ID NO: 1768 - protein, 9 aa, synthetic construct
  REGION 1..9: note = Description of Artificial Sequence: Synthetic peptide
IKPVVSTQL

SEQ ID NO: 1769 - protein, 9 aa, synthetic construct
  REGION 1..9: note = Description of Artificial Sequence: Synthetic peptide
RALGAGATL

SEQ ID NO: 1770 - protein, 9 aa, synthetic construct
  REGION 1..9: note = Description of Artificial Sequence: Synthetic peptide
KALGSGATL

SEQ ID NO: 1771 - protein, 9 aa, synthetic construct
  REGION 1..9: note = Description of Artificial Sequence: Synthetic peptide
SQVQHTNIM

SEQ ID NO: 1772 - protein, 9 aa, synthetic construct
  REGION 1..9: note = Description of Artificial Sequence: Synthetic peptide
RAIEAQQHL

SEQ ID NO: 1773 - protein, 9 aa, synthetic construct
  REGION 1..9: note = Description of Artificial Sequence: Synthetic peptide
IKPVVTTQL

SEQ ID NO: 1774 - protein, 8 aa, synthetic construct
  REGION 1..8: note = Description of Artificial Sequence: Synthetic peptide
RQRQIDTL

SEQ ID NO: 1775 - protein, 11 aa, synthetic construct
  REGION 1..11: note = Description of Artificial Sequence: Synthetic peptide
GAEGQGTGPTL

SEQ ID NO: 1776 - protein, 9 aa, synthetic construct
  REGION 1..9: note = Description of Artificial Sequence: Synthetic peptide
SQVQHPNIM

SEQ ID NO: 1777 - protein, 11 aa, synthetic construct
  REGION 1..11: note = Description of Artificial Sequence: Synthetic peptide
TQIDPDQADQL

SEQ ID NO: 1778 - protein, 11 aa, synthetic construct
  REGION 1..11: note = Description of Artificial Sequence: Synthetic peptide
TQIDPDLADQL

SEQ ID NO: 1779 - protein, 10 aa, synthetic construct
  REGION 1..10: note = Description of Artificial Sequence: Synthetic peptide
AQGQMIYQSM

SEQ ID NO: 1780 - protein, 10 aa, synthetic construct
  REGION 1..10: note = Description of Artificial Sequence: Synthetic peptide
SLFGNDPLSQ

SEQ ID NO: 1781 - protein, 8 aa, synthetic construct
  REGION 1..8: note = Description of Artificial Sequence: Synthetic peptide
KQLQARVL

SEQ ID NO: 1782 - protein, 9 aa, synthetic construct
  REGION 1..9: note = Description of Artificial Sequence: Synthetic peptide
RALGTGATL

SEQ ID NO: 1783 - protein, 9 aa, synthetic construct
  REGION 1..9: note = Description of Artificial Sequence: Synthetic peptide
YDLGNDINL

SEQ ID NO: 1784 - protein, 8 aa, synthetic construct
  REGION 1..8: note = Description of Artificial Sequence: Synthetic peptide
SYNITTEL

SEQ ID NO: 1785 - protein, 8 aa, synthetic construct
  REGION 1..8: note = Description of Artificial Sequence: Synthetic peptide
KKAIGTVL

SEQ ID NO: 1786 - protein, 9 aa, synthetic construct
  REGION 1..9: note = Description of Artificial Sequence: Synthetic peptide
HEVIFNSTL

SEQ ID NO: 1787 - protein, 10 aa, synthetic construct
  REGION 1..10: note = Description of Artificial Sequence: Synthetic peptide
VETGVGRTQV

SEQ ID NO: 1788 - protein, 9 aa, synthetic construct
  REGION 1..9: note = Description of Artificial Sequence: Synthetic peptide
TEPVNITCI

SEQ ID NO: 1789 - protein, 9 aa, synthetic construct
  REGION 1..9: note = Description of Artificial Sequence: Synthetic peptide
KEISNYTQI

SEQ ID NO: 1790 - protein, 9 aa, synthetic construct
  REGION 1..9: note = Description of Artificial Sequence: Synthetic peptide
SESELVNQI

SEQ ID NO: 1791 - protein, 9 aa, synthetic construct
  REGION 1..9: note = Description of Artificial Sequence: Synthetic peptide
YELIEESQI

SEQ ID NO: 1792 - protein, 9 aa, synthetic construct
  REGION 1..9: note = Description of Artificial Sequence: Synthetic peptide
SESELVSQI

SEQ ID NO: 1793 - protein, 9 aa, synthetic construct
  REGION 1..9: note = Description of Artificial Sequence: Synthetic peptide
AEVVQKVTM

SEQ ID NO: 1794 - protein, 10 aa, synthetic construct
  REGION 1..10: note = Description of Artificial Sequence: Synthetic peptide
VETGVGRPQV

SEQ ID NO: 1795 - protein, 8 aa, synthetic construct
  REGION 1..8: note = Description of Artificial Sequence: Synthetic peptide
YESSNPKV

SEQ ID NO: 1796 - protein, 10 aa, synthetic construct
  REGION 1..10: note = Description of Artificial Sequence: Synthetic peptide
AEIFGIGEEI

SEQ ID NO: 1797 - protein, 9 aa, synthetic construct
  REGION 1..9: note = Description of Artificial Sequence: Synthetic peptide
AEVVQKVVM

SEQ ID NO: 1798 - protein, 10 aa, synthetic construct
  REGION 1..10: note = Description of Artificial Sequence: Synthetic peptide
TETGVGRPQV

SEQ ID NO: 1799 - protein, 8 aa, synthetic construct
  REGION 1..8: note = Description of Artificial Sequence: Synthetic peptide
AEVVQKVV

SEQ ID NO: 1800 - protein, 10 aa, synthetic construct
  REGION 1..10: note = Description of Artificial Sequence: Synthetic peptide
CEYQAGHNKV

SEQ ID NO: 1801 - protein, 9 aa, synthetic construct
  REGION 1..9: note = Description of Artificial Sequence: Synthetic peptide
SEMEKEGKI

SEQ ID NO: 1802 - protein, 8 aa, synthetic construct
  REGION 1..8: note = Description of Artificial Sequence: Synthetic peptide
AENLWVTV

SEQ ID NO: 1803 - protein, 8 aa, synthetic construct
  REGION 1..8: note = Description of Artificial Sequence: Synthetic peptide
TENLWVTV

SEQ ID NO: 1804 - protein, 9 aa, synthetic construct
  REGION 1..9: note = Description of Artificial Sequence: Synthetic peptide
KEFNGTGLC

SEQ ID NO: 1805 - protein, 10 aa, synthetic construct
  REGION 1..10: note = Description of Artificial Sequence: Synthetic peptide
EELKSLFNTV

SEQ ID NO: 1806 - protein, 9 aa, synthetic construct
  REGION 1..9: note = Description of Artificial Sequence: Synthetic peptide
VEQMHTDII

SEQ ID NO: 1807 - protein, 10 aa, synthetic construct
  REGION 1..10: note = Description of Artificial Sequence: Synthetic peptide
IEESQTQQEI

SEQ ID NO: 1808 - protein, 8 aa, synthetic construct
  REGION 1..8: note = Description of Artificial Sequence: Synthetic peptide
QELKISAV

SEQ ID NO: 1809 - protein, 8 aa, synthetic construct
  REGION 1..8: note = Description of Artificial Sequence: Synthetic peptide
SENITNNV

SEQ ID NO: 1810 - protein, 10 aa, synthetic construct
  REGION 1..10: note = Description of Artificial Sequence: Synthetic peptide
AELFGMGEEI

SEQ ID NO: 1811 - protein, 10 aa, synthetic construct
  REGION 1..10: note = Description of Artificial Sequence: Synthetic peptide
KEISNYTNLI

SEQ ID NO: 1812 - protein, 8 aa, synthetic construct
  REGION 1..8: note = Description of Artificial Sequence: Synthetic peptide
IEQLQPSV

SEQ ID NO: 1813 - protein, 10 aa, synthetic construct
  REGION 1..10: note = Description of Artificial Sequence: Synthetic peptide
AEGQGTGPTL

SEQ ID NO: 1814 - protein, 9 aa, synthetic construct
  REGION 1..9: note = Description of Artificial Sequence: Synthetic peptide
CESNITGLI

SEQ ID NO: 1815 - protein, 10 aa, synthetic construct
  REGION 1..10: note = Description of Artificial Sequence: Synthetic peptide
AERQGTGPTF

SEQ ID NO: 1816 - protein, 11 aa, synthetic construct
  REGION 1..11: note = Description of Artificial Sequence: Synthetic peptide
AELELAENREI

SEQ ID NO: 1817 - protein, 9 aa, synthetic construct
  REGION 1..9: note = Description of Artificial Sequence: Synthetic peptide
EESQTQQEI

SEQ ID NO: 1818 - protein, 8 aa, synthetic construct
  REGION 1..8: note = Description of Artificial Sequence: Synthetic peptide
SELVSQII

SEQ ID NO: 1819 - protein, 9 aa, synthetic construct
  REGION 1..9: note = Description of Artificial Sequence: Synthetic peptide
YESSNPKVS

SEQ ID NO: 1820 - protein, 8 aa, synthetic construct
  REGION 1..8: note = Description of Artificial Sequence: Synthetic peptide
SESEVNIV

SEQ ID NO: 1821 - protein, 9 aa, synthetic construct
  REGION 1..9: note = Description of Artificial Sequence: Synthetic peptide
GEVGFPVRP

SEQ ID NO: 1822 - protein, 9 aa, synthetic construct
  REGION 1..9: note = Description of Artificial Sequence: Synthetic peptide
LEDLKYEAV

SEQ ID NO: 1823 - protein, 10 aa, synthetic construct
  REGION 1..10: note = Description of Artificial Sequence: Synthetic peptide
KEISNYTQII

SEQ ID NO: 1824 - protein, 10 aa, synthetic construct
  REGION 1..10: note = Description of Artificial Sequence: Synthetic peptide
GEIIGDIRKA

SEQ ID NO: 1825 - protein, 9 aa, synthetic construct
  REGION 1..9: note = Description of Artificial Sequence: Synthetic peptide
GEVGFPVRP

SEQ ID NO: 1826 - protein, 9 aa, synthetic construct
  REGION 1..9: note = Description of Artificial Sequence: Synthetic peptide
IEVKDTKEA

SEQ ID NO: 1827 - protein, 9 aa, synthetic construct
  REGION 1..9: note = Description of Artificial Sequence: Synthetic peptide
LEKDPIVGA

SEQ ID NO: 1828 - protein, 10 aa, synthetic construct
  REGION 1..10: note = Description of Artificial Sequence: Synthetic peptide
GEIIGDIRKA

SEQ ID NO: 1829 - protein, 9 aa, synthetic construct
  REGION 1..9: note = Description of Artificial Sequence: Synthetic peptide
LEKDPIAGA

SEQ ID NO: 1830 - protein, 9 aa, synthetic construct
  REGION 1..9: note = Description of Artificial Sequence: Synthetic peptide
AETFYVDGA

SEQ ID NO: 1831 - protein, 9 aa, synthetic construct
  REGION 1..9: note = Description of Artificial Sequence: Synthetic peptide
RVIEIVQGI

SEQ ID NO: 1832 - protein, 9 aa, synthetic construct
  REGION 1..9: note = Description of Artificial Sequence: Synthetic peptide
RVIETVQRL

SEQ ID NO: 1833 - protein, 10 aa, synthetic construct
  REGION 1..10: note = Description of Artificial Sequence: Synthetic peptide
AVFIGFLGTA

SEQ ID NO: 1834 - protein, 11 aa, synthetic construct
  REGION 1..11: note = Description of Artificial Sequence: Synthetic peptide
TQIDPDLADQL

SEQ ID NO: 1835 - protein, 9 aa, synthetic construct
  REGION 1..9: note = Description of Artificial Sequence: Synthetic peptide
KEFNGTGLC

SEQ ID NO: 1836 - protein, 9 aa, synthetic construct
  REGION 1..9: note = Description of Artificial Sequence: Synthetic peptide
LVSQIIEKL

SEQ ID NO: 1837 - protein, 9 aa, synthetic construct
  REGION 1..9: note = Description of Artificial Sequence: Synthetic peptide
ASITLTVQA

SEQ ID NO: 1838 - protein, 9 aa, synthetic construct
  REGION 1..9: note = Description of Artificial Sequence: Synthetic peptide
QLAEVVQKV

SEQ ID NO: 1839 - protein, 9 aa, synthetic construct
  REGION 1..9: note = Description of Artificial Sequence: Synthetic peptide
RVIEIGQGI

SEQ ID NO: 1840 - protein, 10 aa, synthetic construct
  REGION 1..10: note = Description of Artificial Sequence: Synthetic peptide
AVFIGFLGAA

SEQ ID NO: 1841 - protein, 9 aa, synthetic construct
  REGION 1..9: note = Description of Artificial Sequence: Synthetic peptide
TETLLVQNA

SEQ ID NO: 1842 - protein, 9 aa, synthetic construct
  REGION 1..9: note = Description of Artificial Sequence: Synthetic peptide
TETLLIQNA

SEQ ID NO: 1843 - protein, 10 aa, synthetic construct
  REGION 1..10: note = Description of Artificial Sequence: Synthetic peptide
AETFYVDGAA

SEQ ID NO: 1844 - protein, 9 aa, synthetic construct
  REGION 1..9: note = Description of Artificial Sequence: Synthetic peptide
AETTLFCAS

SEQ ID NO: 1845 - protein, 9 aa, synthetic construct
  REGION 1..9: note = Description of Artificial Sequence: Synthetic peptide
ATLEEMMTA

SEQ ID NO: 1846 - protein, 9 aa, synthetic construct
  REGION 1..9: note = Description of Artificial Sequence: Synthetic peptide
AVFIGFLGA

SEQ ID NO: 1847 - protein, 9 aa, synthetic construct
  REGION 1..9: note = Description of Artificial Sequence: Synthetic peptide
HEVIFNSTL

SEQ ID NO: 1848 - protein, 11 aa, synthetic construct
  REGION 1..11: note = Description of Artificial Sequence: Synthetic peptide
TQIDPDQADQL

SEQ ID NO: 1849 - protein, 8 aa, synthetic construct
  REGION 1..8: note = Description of Artificial Sequence: Synthetic peptide
SEYILINC

SEQ ID NO: 1850 - protein, 8 aa, synthetic construct
  REGION 1..8: note = Description of Artificial Sequence: Synthetic peptide
AETTLFCA

SEQ ID NO: 1851 - protein, 8 aa, synthetic construct
  REGION 1..8: note = Description of Artificial Sequence: Synthetic peptide
HEVIFNST

SEQ ID NO: 1852 - protein, 10 aa, synthetic construct
  REGION 1..10: note = Description of Artificial Sequence: Synthetic peptide
REQAEHLKTA

SEQ ID NO: 1853 - protein, 9 aa, synthetic construct
  REGION 1..9: note = Description of Artificial Sequence: Synthetic peptide
ASMTLTVQA

SEQ ID NO: 1854 - protein, 9 aa, synthetic construct
  REGION 1..9: note = Description of Artificial Sequence: Synthetic peptide
EEVGFPVRP

SEQ ID NO: 1855 - protein, 9 aa, synthetic construct
  REGION 1..9: note = Description of Artificial Sequence: Synthetic peptide
YESSNPKVS

SEQ ID NO: 1856 - protein, 9 aa, synthetic construct
  REGION 1..9: note = Description of Artificial Sequence: Synthetic peptide
FPISPISTV

SEQ ID NO: 1857 - protein, 9 aa, synthetic construct
  REGION 1..9: note = Description of Artificial Sequence: Synthetic peptide
FPISPIETV

SEQ ID NO: 1858 - protein, 9 aa, synthetic construct
  REGION 1..9: note = Description of Artificial Sequence: Synthetic peptide
DAKAYDTEV

SEQ ID NO: 1859 - protein, 8 aa, synthetic construct
  REGION 1..8: note = Description of Artificial Sequence: Synthetic peptide
YAPPIPGV

SEQ ID NO: 1860 - protein, 9 aa, synthetic construct
  REGION 1..9: note = Description of Artificial Sequence: Synthetic peptide
LPPIIAKEI

SEQ ID NO: 1861 - protein, 10 aa, synthetic construct
  REGION 1..10: note = Description of Artificial Sequence: Synthetic peptide
IPYNPQSQGV

SEQ ID NO: 1862 - protein, 9 aa, synthetic construct
  REGION 1..9: note = Description of Artificial Sequence: Synthetic peptide
YAPPIPGVI

SEQ ID NO: 1863 - protein, 8 aa, synthetic construct
  REGION 1..8: note = Description of Artificial Sequence: Synthetic peptide
TAPPAAEI

SEQ ID NO: 1864 - protein, 8 aa, synthetic construct
  REGION 1..8: note = Description of Artificial Sequence: Synthetic peptide
YAPPIQGV

SEQ ID NO: 1865 - protein, 9 aa, synthetic construct
  REGION 1..9: note = Description of Artificial Sequence: Synthetic peptide
LPPIVAKEI

SEQ ID NO: 1866 - protein, 9 aa, synthetic construct
  REGION 1..9: note = Description of Artificial Sequence: Synthetic peptide
IPIGDARIV

SEQ ID NO: 1867 - protein, 9 aa, synthetic construct
  REGION 1..9: note = Description of Artificial Sequence: Synthetic peptide
IPLGDAKLV

SEQ ID NO: 1868 - protein, 8 aa, synthetic construct
  REGION 1..8: note = Description of Artificial Sequence: Synthetic peptide
EPVNITCI

SEQ ID NO: 1869 - protein, 10 aa, synthetic construct
  REGION 1..10: note = Description of Artificial Sequence: Synthetic peptide
IPLGDAKLVV

SEQ ID NO: 1870 - protein, 11 aa, synthetic construct
  REGION 1..11: note = Description of Artificial Sequence: Synthetic peptide
IPYNPQSQGVV

SEQ ID NO: 1871 - protein, 8 aa, synthetic construct
  REGION 1..8: note = Description of Artificial Sequence: Synthetic peptide
SPVSILDI

SEQ ID NO: 1872 - protein, 9 aa, synthetic construct
  REGION 1..9: note = Description of Artificial Sequence: Synthetic peptide
IPLGDAKIV

SEQ ID NO: 1873 - protein, 9 aa, synthetic construct
  REGION 1..9: note = Description of Artificial Sequence: Synthetic peptide
HPVHAGPVA

SEQ ID NO: 1874 - protein, 9 aa, synthetic construct
  REGION 1..9: note = Description of Artificial Sequence: Synthetic peptide
FPISPISTV

SEQ ID NO: 1875 - protein, 9 aa, synthetic construct
  REGION 1..9: note = Description of Artificial Sequence: Synthetic peptide
FPISPIETV

SEQ ID NO: 1876 - protein, 10 aa, synthetic construct
  REGION 1..10: note = Description of Artificial Sequence: Synthetic peptide
EPLGIAPTTA

SEQ ID NO: 1877 - protein, 9 aa, synthetic construct
  REGION 1..9: note = Description of Artificial Sequence: Synthetic peptide
HPGSQPTTA

SEQ ID NO: 1878 - protein, 9 aa, synthetic construct
  REGION 1..9: note = Description of Artificial Sequence: Synthetic peptide
EPIPIHYCA

SEQ ID NO: 1879 - protein, 9 aa, synthetic construct
  REGION 1..9: note = Description of Artificial Sequence: Synthetic peptide
HVASGYIEA

SEQ ID NO: 1880 - protein, 9 aa, synthetic construct
  REGION 1..9: note = Description of Artificial Sequence: Synthetic peptide
NPYNTPIFA

SEQ ID NO: 1881 - protein, 10 aa, synthetic construct
  REGION 1..10: note = Description of Artificial Sequence: Synthetic peptide
TPLEIWSIVG

SEQ ID NO: 1882 - protein, 10 aa, synthetic construct
  REGION 1..10: note = Description of Artificial Sequence: Synthetic peptide
EPLGVAPTKA

SEQ ID NO: 1883 - protein, 11 aa, synthetic construct
  REGION 1..11: note = Description of Artificial Sequence: Synthetic peptide
FPISPISTVPV

SEQ ID NO: 1884 - protein, 9 aa, synthetic construct
  REGION 1..9: note = Description of Artificial Sequence: Synthetic peptide
SPAATGVGA

SEQ ID NO: 1885 - protein, 10 aa, synthetic construct
  REGION 1..10: note = Description of Artificial Sequence: Synthetic peptide
FPQSRPEPTA

SEQ ID NO: 1886 - protein, 10 aa, synthetic construct
  REGION 1..10: note = Description of Artificial Sequence: Synthetic peptide
EPLGVAPTRA

SEQ ID NO: 1887 - protein, 10 aa, synthetic construct
  REGION 1..10: note = Description of Artificial Sequence: Synthetic peptide
FPQSRPEPSA

SEQ ID NO: 1888 - protein, 9 aa, synthetic construct
  REGION 1..9: note = Description of Artificial Sequence: Synthetic peptide
TPLEIWSIV

SEQ ID NO: 1889 - protein, 9 aa, synthetic construct
  REGION 1..9: note = Description of Artificial Sequence: Synthetic peptide
HPSCVWLEA

SEQ ID NO: 1890 - protein, 9 aa, synthetic construct
  REGION 1..9: note = Description of Artificial Sequence: Synthetic peptide
YPIVQNAQG

SEQ ID NO: 1891 - protein, 8 aa, synthetic construct
  REGION 1..8: note = Description of Artificial Sequence: Synthetic peptide
TAFTIPST

SEQ ID NO: 1892 - protein, 11 aa, synthetic construct
  REGION 1..11: note = Description of Artificial Sequence: Synthetic peptide
FPISPIETVPV

SEQ ID NO: 1893 - protein, 8 aa, synthetic construct
  REGION 1..8: note = Description of Artificial Sequence: Synthetic peptide
FPSEQTRA

SEQ ID NO: 1894 - protein, 9 aa, synthetic construct
  REGION 1..9: note = Description of Artificial Sequence: Synthetic peptide
QIMEQLQSA

SEQ ID NO: 1895 - protein, 9 aa, synthetic construct
  REGION 1..9: note = Description of Artificial Sequence: Synthetic peptide
DANTTLFCA

SEQ ID NO: 1896 - protein, 10 aa, synthetic construct
  REGION 1..10: note = Description of Artificial Sequence: Synthetic peptide
HPVHAGPVAP

SEQ ID NO: 1897 - protein, 9 aa, synthetic construct
  REGION 1..9: note = Description of Artificial Sequence: Synthetic peptide
HPVHAGPIP

SEQ ID NO: 1898 - protein, 10 aa, synthetic construct
  REGION 1..10: note = Description of Artificial Sequence: Synthetic peptide
YPEPKGTRQA

SEQ ID NO: 1899 - protein, 9 aa, synthetic construct
  REGION 1..9: note = Description of Artificial Sequence: Synthetic peptide
IPIGDARIV

SEQ ID NO: 1900 - protein, 10 aa, synthetic construct
  REGION 1..10: note = Description of Artificial Sequence: Synthetic peptide
HPVHAGPIPP

SEQ ID NO: 1901 - protein, 9 aa, synthetic construct
  REGION 1..9: note = Description of Artificial Sequence: Synthetic peptide
HPVHAGPVA

SEQ ID NO: 1902 - protein, 9 aa, synthetic construct
  REGION 1..9: note = Description of Artificial Sequence: Synthetic peptide
FPISPISTV

SEQ ID NO: 1903 - protein, 9 aa, synthetic construct
  REGION 1..9: note = Description of Artificial Sequence: Synthetic peptide
IPKQPIPQT

SEQ ID NO: 1904 - protein, 9 aa, synthetic construct
  REGION 1..9: note = Description of Artificial Sequence: Synthetic peptide
FPISPIETV

SEQ ID NO: 1905 - protein, 9 aa, synthetic construct
  REGION 1..9: note = Description of Artificial Sequence: Synthetic peptide
SPAATGVGA

SEQ ID NO: 1906 - protein, 9 aa, synthetic construct
  REGION 1..9: note = Description of Artificial Sequence: Synthetic peptide
RPEPTAPPA

SEQ ID NO: 1907 - protein, 10 aa, synthetic construct
  REGION 1..10: note = Description of Artificial Sequence: Synthetic peptide
YPEPKGTRQA

SEQ ID NO: 1908 - protein, 9 aa, synthetic construct
  REGION 1..9: note = Description of Artificial Sequence: Synthetic peptide
SPAATGVGA

SEQ ID NO: 1909 - protein, 9 aa, synthetic construct
  REGION 1..9: note = Description of Artificial Sequence: Synthetic peptide
HPVHAGPVA

SEQ ID NO: 1910 - protein, 9 aa, synthetic construct
  REGION 1..9: note = Description of Artificial Sequence: Synthetic peptide
FPISPIETV

SEQ ID NO: 1911 - protein, 9 aa, synthetic construct
  REGION 1..9: note = Description of Artificial Sequence: Synthetic peptide
FPISPISTV

SEQ ID NO: 1912 - protein, 10 aa, synthetic construct
  REGION 1..10: note = Description of Artificial Sequence: Synthetic peptide
APTAAKGVGA

SEQ ID NO: 1913 - protein, 10 aa, synthetic construct
  REGION 1..10: note = Description of Artificial Sequence: Synthetic peptide
EPLGIAPTTA

SEQ ID NO: 1914 - protein, 9 aa, synthetic construct
  REGION 1..9: note = Description of Artificial Sequence: Synthetic peptide
HPGSQPTTA

SEQ ID NO: 1915 - protein, 10 aa, synthetic construct
  REGION 1..10: note = Description of Artificial Sequence: Synthetic peptide
IPAETGQETA

SEQ ID NO: 1916 - protein, 9 aa, synthetic construct
  REGION 1..9: note = Description of Artificial Sequence: Synthetic peptide
NPYNTPIFA

SEQ ID NO: 1917 - protein, 9 aa, synthetic construct
  REGION 1..9: note = Description of Artificial Sequence: Synthetic peptide
RPEPTAPPA

SEQ ID NO: 1918 - protein, 10 aa, synthetic construct
  REGION 1..10: note = Description of Artificial Sequence: Synthetic peptide
RPEPTAPPAA

SEQ ID NO: 1919 - protein, 9 aa, synthetic construct
  REGION 1..9: note = Description of Artificial Sequence: Synthetic peptide
QPIPQTQGV

SEQ ID NO: 1920 - protein, 9 aa, synthetic construct
  REGION 1..9: note = Description of Artificial Sequence: Synthetic peptide
IPKQPIPQT

SEQ ID NO: 1921 - protein, 10 aa, synthetic construct
  REGION 1..10: note = Description of Artificial Sequence: Synthetic peptide
TPTAAEGVGA

SEQ ID NO: 1922 - protein, 10 aa, synthetic construct
  REGION 1..10: note = Description of Artificial Sequence: Synthetic peptide
EPLGVAPTKA

SEQ ID NO: 1923 - protein, 10 aa, synthetic construct
  REGION 1..10: note = Description of Artificial Sequence: Synthetic peptide
IPYNPQSQGV

SEQ ID NO: 1924 - protein, 8 aa, synthetic construct
  REGION 1..8: note = Description of Artificial Sequence: Synthetic peptide
SPVSILDV

SEQ ID NO: 1925 - protein, 9 aa, synthetic construct
  REGION 1..9: note = Description of Artificial Sequence: Synthetic peptide
SPAATGVGA

SEQ ID NO: 1926 - protein, 9 aa, synthetic construct
  REGION 1..9: note = Description of Artificial Sequence: Synthetic peptide
HPVHAGPVA

SEQ ID NO: 1927 - protein, 10 aa, synthetic construct
  REGION 1..10: note = Description of Artificial Sequence: Synthetic peptide
APTAAKGVGA

SEQ ID NO: 1928 - protein, 9 aa, synthetic construct
  REGION 1..9: note = Description of Artificial Sequence: Synthetic peptide
FPISPIETV

SEQ ID NO: 1929 - protein, 9 aa, synthetic construct
  REGION 1..9: note = Description of Artificial Sequence: Synthetic peptide
FPISPISTV

SEQ ID NO: 1930 - protein, 9 aa, synthetic construct
  REGION 1..9: note = Description of Artificial Sequence: Synthetic peptide
QPIPQTQGV

SEQ ID NO: 1931 - protein, 10 aa, synthetic construct
  REGION 1..10: note = Description of Artificial Sequence: Synthetic peptide
IPYNPQSQGV

SEQ ID NO: 1932 - protein, 10 aa, synthetic construct
  REGION 1..10: note = Description of Artificial Sequence: Synthetic peptide
APAGFAILKC

SEQ ID NO: 1933 - protein, 10 aa, synthetic construct
  REGION 1..10: note = Description of Artificial Sequence: Synthetic peptide
SPAATGVGAV

SEQ ID NO: 1934 - protein, 9 aa, synthetic construct
  REGION 1..9: note = Description of Artificial Sequence: Synthetic peptide
IPKQPIPQT

SEQ ID NO: 1935 - protein, 9 aa, synthetic construct
  REGION 1..9: note = Description of Artificial Sequence: Synthetic peptide
HPGSQPTTA

SEQ ID NO: 1936 - protein, 10 aa, synthetic construct
  REGION 1..10: note = Description of Artificial Sequence: Synthetic peptide
IPAETGQETA

SEQ ID NO: 1937 - protein, 9 aa, synthetic construct
  REGION 1..9: note = Description of Artificial Sequence: Synthetic peptide
QIMEQLQSA

SEQ ID NO: 1938 - protein, 9 aa, synthetic construct
  REGION 1..9: note = Description of Artificial Sequence: Synthetic peptide
RPEPTAPPA

SEQ ID NO: 1939 - protein, 10 aa, synthetic construct
  REGION 1..10: note = Description of Artificial Sequence: Synthetic peptide
RPNNNTRTSI

SEQ ID NO: 1940 - protein, 10 aa, synthetic construct
  REGION 1..10: note = Description of Artificial Sequence: Synthetic peptide
SPEVIPMFSA

SEQ ID NO: 1941 - protein, 10 aa, synthetic construct
  REGION 1..10: note = Description of Artificial Sequence: Synthetic peptide
LTRDGGITSA

SEQ ID NO: 1942 - protein, 8 aa, synthetic construct
  REGION 1..8: note = Description of Artificial Sequence: Synthetic peptide
SPVSILDV

SEQ ID NO: 1943 - protein, 10 aa, synthetic construct
  REGION 1..10: note = Description of Artificial Sequence: Synthetic peptide
APAGYAILKC

SEQ ID NO: 1944 - protein, 10 aa, synthetic construct
  REGION 1..10: note = Description of Artificial Sequence: Synthetic peptide
RPLVTVKIGG

SEQ ID NO: 1945 - protein, 9 aa, synthetic construct
  REGION 1..9: note = Description of Artificial Sequence: Synthetic peptide
NPYNTPIFA

SEQ ID NO: 1946 - protein, 11 aa, synthetic construct
  REGION 1..11: note = Description of Artificial Sequence: Synthetic peptide
KAYDTEVHNVW

SEQ ID NO: 1947 - protein, 9 aa, synthetic construct
  REGION 1..9: note = Description of Artificial Sequence: Synthetic peptide
LSFPQITLW

SEQ ID NO: 1948 - protein, 9 aa, synthetic construct
  REGION 1..9: note = Description of Artificial Sequence: Synthetic peptide
TTVPWNASW

SEQ ID NO: 1949 - protein, 11 aa, synthetic construct
  REGION 1..11: note = Description of Artificial Sequence: Synthetic peptide
KAYETEKHNVW

SEQ ID NO: 1950 - protein, 10 aa, synthetic construct
  REGION 1..10: note = Description of Artificial Sequence: Synthetic peptide
TTNVPWNNTW

SEQ ID NO: 1951 - protein, 9 aa, synthetic construct
  REGION 1..9: note = Description of Artificial Sequence: Synthetic peptide
TSELFNRTW

SEQ ID NO: 1952 - protein, 9 aa, synthetic construct
  REGION 1..9: note = Description of Artificial Sequence: Synthetic peptide
FSFPQITLW

SEQ ID NO: 1953 - protein, 11 aa, synthetic construct
  REGION 1..11: note = Description of Artificial Sequence: Synthetic peptide
KSVRIGPGQTF

SEQ ID NO: 1954 - protein, 11 aa, synthetic construct
  REGION 1..11: note = Description of Artificial Sequence: Synthetic peptide
GAISPTSRDLW

SEQ ID NO: 1955 - protein, 11 aa, synthetic construct
  REGION 1..11: note = Description of Artificial Sequence: Synthetic peptide
RANSPTSGALW

SEQ ID NO: 1956 - protein, 10 aa, synthetic construct
  REGION 1..10: note = Description of Artificial Sequence: Synthetic peptide
NTSELFNRTW

SEQ ID NO: 1957 - protein, 9 aa, synthetic construct
  REGION 1..9: note = Description of Artificial Sequence: Synthetic peptide
RIKQIINMW

SEQ ID NO: 1958 - protein, 11 aa, synthetic construct
  REGION 1..11: note = Description of Artificial Sequence: Synthetic peptide
RSVRIGPGQTF

SEQ ID NO: 1959 - protein, 9 aa, synthetic construct
  REGION 1..9: note = Description of Artificial Sequence: Synthetic peptide
RSIRLVNGF

SEQ ID NO: 1960 - protein, 10 aa, synthetic construct
  REGION 1..10: note = Description of Artificial Sequence: Synthetic peptide
SSLKGLRLGW

SEQ ID NO: 1961 - protein, 9 aa, synthetic construct
  REGION 1..9: note = Description of Artificial Sequence: Synthetic peptide
TSGLFNSTW

SEQ ID NO: 1962 - protein, 9 aa, synthetic construct
  REGION 1..9: note = Description of Artificial Sequence: Synthetic peptide
KALTDIVTL

SEQ ID NO: 1963 - protein, 9 aa, synthetic construct
  REGION 1..9: note = Description of Artificial Sequence: Synthetic peptide
KVVVQLRTY

SEQ ID NO: 1964 - protein, 9 aa, synthetic construct
  REGION 1..9: note = Description of Artificial Sequence: Synthetic peptide
TIAIVVAGW

SEQ ID NO: 1965 - protein, 9 aa, synthetic construct
  REGION 1..9: note = Description of Artificial Sequence: Synthetic peptide
SSGLFNSTW

SEQ ID NO: 1966 - protein, 9 aa, synthetic construct
  REGION 1..9: note = Description of Artificial Sequence: Synthetic peptide
KALTDVVTL

SEQ ID NO: 1967 - protein, 10 aa, synthetic construct
  REGION 1..10: note = Description of Artificial Sequence: Synthetic peptide
VTVYYGVPVW

SEQ ID NO: 1968 - protein, 10 aa, synthetic construct
  REGION 1..10: note = Description of Artificial Sequence: Synthetic peptide
NTSGLFNSTW

SEQ ID NO: 1969 - protein, 9 aa, synthetic construct
  REGION 1..9: note = Description of Artificial Sequence: Synthetic peptide
LGHGVSIEW

SEQ ID NO: 1970 - protein, 9 aa, synthetic construct
  REGION 1..9: note = Description of Artificial Sequence: Synthetic peptide
QATQDVKHW

SEQ ID NO: 1971 - protein, 9 aa, synthetic construct
  REGION 1..9: note = Description of Artificial Sequence: Synthetic peptide
TNVPWNNTW

SEQ ID NO: 1972 - protein, 9 aa, synthetic construct
  REGION 1..9: note = Description of Artificial Sequence: Synthetic peptide
RVMGIERNY

SEQ ID NO: 1973 - protein, 11 aa, synthetic construct
  REGION 1..11: note = Description of Artificial Sequence: Synthetic peptide
SVLSGGKLDAW

SEQ ID NO: 1974 - protein, 9 aa, synthetic construct
  REGION 1..9: note = Description of Artificial Sequence: Synthetic peptide
RIKQVINMW

SEQ ID NO: 1975 - protein, 11 aa, synthetic construct
  REGION 1..11: note = Description of Artificial Sequence: Synthetic peptide
KSLFNTVATLY

SEQ ID NO: 1976 - protein, 9 aa, synthetic construct
  REGION 1..9: note = Description of Artificial Sequence: Synthetic peptide
VTMESIVIW

SEQ ID NO: 1977 - protein, 9 aa, synthetic construct
  REGION 1..9: note = Description of Artificial Sequence: Synthetic peptide
RSIRLVSGF

SEQ ID NO: 1978 - protein, 10 aa, synthetic construct
  REGION 1..10: note = Description of Artificial Sequence: Synthetic peptide
TSTPQEQLQW

SEQ ID NO: 1979 - protein, 10 aa, synthetic construct
  REGION 1..10: note = Description of Artificial Sequence: Synthetic peptide
GTRFPLTFGW

SEQ ID NO: 1980 - protein, 9 aa, synthetic construct
  REGION 1..9: note = Description of Artificial Sequence: Synthetic peptide
KTAVQMAVF

SEQ ID NO: 1981 - protein, 10 aa, synthetic construct
  REGION 1..10: note = Description of Artificial Sequence: Synthetic peptide
RSKNPDIVIY

SEQ ID NO: 1982 - protein, 9 aa, synthetic construct
  REGION 1..9: note = Description of Artificial Sequence: Synthetic peptide
WSKSSIVGW

SEQ ID NO: 1983 - protein, 11 aa, synthetic construct
  REGION 1..11: note = Description of Artificial Sequence: Synthetic peptide
ATSTPQEQLQW

SEQ ID NO: 1984 - protein, 11 aa, synthetic construct
  REGION 1..11: note = Description of Artificial Sequence: Synthetic peptide
RTLQQLLFVHF

SEQ ID NO: 1985 - protein, 9 aa, synthetic construct
  REGION 1..9: note = Description of Artificial Sequence: Synthetic peptide
QATQEVKSW

SEQ ID NO: 1986 - protein, 11 aa, synthetic construct
  REGION 1..11: note = Description of Artificial Sequence: Synthetic peptide
KSVRIGPGQTF

SEQ ID NO: 1987 - protein, 9 aa, synthetic construct
  REGION 1..9: note = Description of Artificial Sequence: Synthetic peptide
KALTDVVTL

SEQ ID NO: 1988 - protein, 9 aa, synthetic construct
  REGION 1..9: note = Description of Artificial Sequence: Synthetic peptide
KALTDIVTL

SEQ ID NO: 1989 - protein, 11 aa, synthetic construct
  REGION 1..11: note = Description of Artificial Sequence: Synthetic peptide
RSVRIGPGQTF

SEQ ID NO: 1990 - protein, 9 aa, synthetic construct
  REGION 1..9: note = Description of Artificial Sequence: Synthetic peptide
SSSKVSQNY

SEQ ID NO: 1991 - protein, 11 aa, synthetic construct
  REGION 1..11: note = Description of Artificial Sequence: Synthetic peptide
RANSPTSGALW

SEQ ID NO: 1992 - protein, 9 aa, synthetic construct
  REGION 1..9: note = Description of Artificial Sequence: Synthetic peptide
TSGLFNSTW

SEQ ID NO: 1993 - protein, 9 aa, synthetic construct
  REGION 1..9: note = Description of Artificial Sequence: Synthetic peptide
RAVGIGAVF

SEQ ID NO: 1994 - protein, 9 aa, synthetic construct
  REGION 1..9: note = Description of Artificial Sequence: Synthetic peptide
TTNQKTELY

SEQ ID NO: 1995 - protein, 11 aa, synthetic construct
  REGION 1..11: note = Description of Artificial Sequence: Synthetic peptide
KAYDTEVHNVW

SEQ ID NO: 1996 - protein, 8 aa, synthetic construct
  REGION 1..8: note = Description of Artificial Sequence: Synthetic peptide
IEITTHSF

SEQ ID NO: 1997 - protein, 9 aa, synthetic construct
  REGION 1..9: note = Description of Artificial Sequence: Synthetic peptide
RVIETVQRL

SEQ ID NO: 1998 - protein, 9 aa, synthetic construct
  REGION 1..9: note = Description of Artificial Sequence: Synthetic peptide
GTEELRSLY

SEQ ID NO: 1999 - protein, 9 aa, synthetic construct
  REGION 1..9: note = Description of Artificial Sequence: Synthetic peptide
RAIEAQQHL

SEQ ID NO: 2000 - protein, 9 aa, synthetic construct
  REGION 1..9: note = Description of Artificial Sequence: Synthetic peptide
RAIEAQQHM

SEQ ID NO: 2001 - protein, 10 aa, synthetic construct
  REGION 1..10: note = Description of Artificial Sequence: Synthetic peptide
KTLNNNTIEM

SEQ ID NO: 2002 - protein, 9 aa, synthetic construct
  REGION 1..9: note = Description of Artificial Sequence: Synthetic peptide
QATQEVKSW

SEQ ID NO: 2003 - protein, 9 aa, synthetic construct
  REGION 1..9: note = Description of Artificial Sequence: Synthetic peptide
NSSKVSQNY

SEQ ID NO: 2004 - protein, 11 aa, synthetic construct
  REGION 1..11: note = Description of Artificial Sequence: Synthetic peptide
TSIRIGPGQSF

SEQ ID NO: 2005 - protein, 9 aa, synthetic construct
  REGION 1..9: note = Description of Artificial Sequence: Synthetic peptide
SSGLFNSTW

SEQ ID NO: 2006 - protein, 9 aa, synthetic construct
  REGION 1..9: note = Description of Artificial Sequence: Synthetic peptide
TTVPWNASW

SEQ ID NO: 2007 - protein, 11 aa, synthetic construct
  REGION 1..11: note = Description of Artificial Sequence: Synthetic peptide
GAISPTSRDLW

SEQ ID NO: 2008 - protein, 9 aa, synthetic construct
  REGION 1..9: note = Description of Artificial Sequence: Synthetic peptide
AAVDLSHFL

SEQ ID NO: 2009 - protein, 9 aa, synthetic construct
  REGION 1..9: note = Description of Artificial Sequence: Synthetic peptide
KAAVDLSHF

SEQ ID NO: 2010 - protein, 9 aa, synthetic construct
  REGION 1..9: note = Description of Artificial Sequence: Synthetic peptide
TIAIVVAGW

SEQ ID NO: 2011 - protein, 10 aa, synthetic construct
  REGION 1..10: note = Description of Artificial Sequence: Synthetic peptide
TSTPQEQIAW

SEQ ID NO: 2012 - protein, 9 aa, synthetic construct
  REGION 1..9: note = Description of Artificial Sequence: Synthetic peptide
KTAVQMAVF

SEQ ID NO: 2013 - protein, 10 aa, synthetic construct
  REGION 1..10: note = Description of Artificial Sequence: Synthetic peptide
RAIEAQQHLL

SEQ ID NO: 2014 - protein, 10 aa, synthetic construct
  REGION 1..10: note = Description of Artificial Sequence: Synthetic peptide
TTNVPWNNTW

SEQ ID NO: 2015 - protein, 9 aa, synthetic construct
  REGION 1..9: note = Description of Artificial Sequence: Synthetic peptide
HCVVNKTEW

SEQ ID NO: 2016 - protein, 9 aa, synthetic construct
  REGION 1..9: note = Description of Artificial Sequence: Synthetic peptide
FSVPLDESF

SEQ ID NO: 2017 - protein, 8 aa, synthetic construct
  REGION 1..8: note = Description of Artificial Sequence: Synthetic peptide
IAIAVAGW

SEQ ID NO: 2018 - protein, 9 aa, synthetic construct
  REGION 1..9: note = Description of Artificial Sequence: Synthetic peptide
TINEEAAEW

SEQ ID NO: 2019 - protein, 10 aa, synthetic construct
  REGION 1..10: note = Description of Artificial Sequence: Synthetic peptide
TSTPQEQLQW

SEQ ID NO: 2020 - protein, 8 aa, synthetic construct
  REGION 1..8: note = Description of Artificial Sequence: Synthetic peptide
NSPTSGAL

SEQ ID NO: 2021 - protein, 9 aa, synthetic construct
  REGION 1..9: note = Description of Artificial Sequence: Synthetic peptide
NSPTSSRDL

SEQ ID NO: 2022 - protein, 9 aa, synthetic construct
  REGION 1..9: note = Description of Artificial Sequence: Synthetic peptide
YSPVSILDI

SEQ ID NO: 2023 - protein, 9 aa, synthetic construct
  REGION 1..9: note = Description of Artificial Sequence: Synthetic peptide
SIVTRTVEL

SEQ ID NO: 2024 - protein, 9 aa, synthetic construct
  REGION 1..9: note = Description of Artificial Sequence: Synthetic peptide
YSPVSILDV

SEQ ID NO: 2025 - protein, 9 aa, synthetic construct
  REGION 1..9: note = Description of Artificial Sequence: Synthetic peptide
YSPTSILDI

SEQ ID NO: 2026 - protein, 9 aa, synthetic construct
  REGION 1..9: note = Description of Artificial Sequence: Synthetic peptide
YAPPIRGAI

SEQ ID NO: 2027 - protein, 9 aa, synthetic construct
  REGION 1..9: note = Description of Artificial Sequence: Synthetic peptide
RAVGIGAVF

SEQ ID NO: 2028 - protein, 9 aa, synthetic construct
  REGION 1..9: note = Description of Artificial Sequence: Synthetic peptide
AAVDLSHFL

SEQ ID NO: 2029 - protein, 9 aa, synthetic construct
  REGION 1..9: note = Description of Artificial Sequence: Synthetic peptide
TTNQKTELY

SEQ ID NO: 2030 - protein, 9 aa, synthetic construct
  REGION 1..9: note = Description of Artificial Sequence: Synthetic peptide
AEVVQKVTM

SEQ ID NO: 2031 - protein, 8 aa, synthetic construct
  REGION 1..8: note = Description of Artificial Sequence: Synthetic peptide
MENVTEEF

SEQ ID NO: 2032 - protein, 9 aa, synthetic construct
  REGION 1..9: note = Description of Artificial Sequence: Synthetic peptide
GTEELRSLY

SEQ ID NO: 2033 - protein, 9 aa, synthetic construct
  REGION 1..9: note = Description of Artificial Sequence: Synthetic peptide
AEVVQKVVM

SEQ ID NO: 2034 - protein, 8 aa, synthetic construct
  REGION 1..8: note = Description of Artificial Sequence: Synthetic peptide
VLDVGDAY

SEQ ID NO: 2035 - protein, 9 aa, synthetic construct
  REGION 1..9: note = Description of Artificial Sequence: Synthetic peptide
AAVDLSHFL

SEQ ID NO: 2036 - protein, 9 aa, synthetic construct
  REGION 1..9: note = Description of Artificial Sequence: Synthetic peptide
RAIEAQQHL

SEQ ID NO: 2037 - protein, 9 aa, synthetic construct
  REGION 1..9: note = Description of Artificial Sequence: Synthetic peptide
LAWDDLRSL

SEQ ID NO: 2038 - protein, 9 aa, synthetic construct
  REGION 1..9: note = Description of Artificial Sequence: Synthetic peptide
SIVTRTVEL

SEQ ID NO: 2039 - protein, 9 aa, synthetic construct
  REGION 1..9: note = Description of Artificial Sequence: Synthetic peptide
KALGSGATL

SEQ ID NO: 2040 - protein, 9 aa, synthetic construct
  REGION 1..9: note = Description of Artificial Sequence: Synthetic peptide
AAVDLSHFL

SEQ ID NO: 2041 - protein, 9 aa, synthetic construct
  REGION 1..9: note = Description of Artificial Sequence: Synthetic peptide
RAIEAQQHL

SEQ ID NO: 2042 - protein, 9 aa, synthetic construct
  REGION 1..9: note = Description of Artificial Sequence: Synthetic peptide
SIVTRTVEL

SEQ ID NO: 2043 - protein, 9 aa, synthetic construct
  REGION 1..9: note = Description of Artificial Sequence: Synthetic peptide
YSTQIDPDL

SEQ ID NO: 2044 - protein, 9 aa, synthetic construct
  REGION 1..9: note = Description of Artificial Sequence: Synthetic peptide
KALGSGATL

SEQ ID NO: 2045 - protein, 9 aa, synthetic construct
  REGION 1..9: note = Description of Artificial Sequence: Synthetic peptide
ATDIQTKEL

SEQ ID NO: 2046 - protein, 9 aa, synthetic construct
  REGION 1..9: note = Description of Artificial Sequence: Synthetic peptide
YVDRFFKTL

SEQ ID NO: 2047 - protein, 9 aa, synthetic construct
  REGION 1..9: note = Description of Artificial Sequence: Synthetic peptide
LAWDDLRSL

SEQ ID NO: 2048 - protein, 9 aa, synthetic construct
  REGION 1..9: note = Description of Artificial Sequence: Synthetic peptide
YYDPSKELI

SEQ ID NO: 2049 - protein, 9 aa, synthetic construct
  REGION 1..9: note = Description of Artificial Sequence: Synthetic peptide
KFDSSLARV

SEQ ID NO: 2050 - protein, 10 aa, synthetic construct
  REGION 1..10: note = Description of Artificial Sequence: Synthetic peptide
NYDLGNDINL

SEQ ID NO: 2051 - protein, 10 aa, synthetic construct
  REGION 1..10: note = Description of Artificial Sequence: Synthetic peptide
NYDLGDINNL

SEQ ID NO: 2052 - protein, 9 aa, synthetic construct
  REGION 1..9: note = Description of Artificial Sequence: Synthetic peptide
QYDQILIEI

SEQ ID NO: 2053 - protein, 8 aa, synthetic construct
  REGION 1..8: note = Description of Artificial Sequence: Synthetic peptide
HTDNGSNF

SEQ ID NO: 2054 - protein, 8 aa, synthetic construct
  REGION 1..8: note = Description of Artificial Sequence: Synthetic peptide
AVDLSHFL

SEQ ID NO: 2055 - protein, 9 aa, synthetic construct
  REGION 1..9: note = Description of Artificial Sequence: Synthetic peptide
ATDIQTREL

SEQ ID NO: 2056 - protein, 9 aa, synthetic construct
  REGION 1..9: note = Description of Artificial Sequence: Synthetic peptide
VLDVGDAYF

SEQ ID NO: 2057 - protein, 9 aa, synthetic construct
  REGION 1..9: note = Description of Artificial Sequence: Synthetic peptide
IQDNSDIKV

SEQ ID NO: 2058 - protein, 9 aa, synthetic construct
  REGION 1..9: note = Description of Artificial Sequence: Synthetic peptide
QRPLVTVKI

SEQ ID NO: 2059 - protein, 9 aa, synthetic construct
  REGION 1..9: note = Description of Artificial Sequence: Synthetic peptide
QRPLVTVRI

SEQ ID NO: 2060 - protein, 9 aa, synthetic construct
  REGION 1..9: note = Description of Artificial Sequence: Synthetic peptide
FYRLDIVQL

SEQ ID NO: 2061 - protein, 8 aa, synthetic construct
  REGION 1..8: note = Description of Artificial Sequence: Synthetic peptide
IVGLIVAL

SEQ ID NO: 2062 - protein, 9 aa, synthetic construct
  REGION 1..9: note = Description of Artificial Sequence: Synthetic peptide
SAVNLYDTI

SEQ ID NO: 2063 - protein, 9 aa, synthetic construct
  REGION 1..9: note = Description of Artificial Sequence: Synthetic peptide
AAVDLSHFL

SEQ ID NO: 2064 - protein, 9 aa, synthetic construct
  REGION 1..9: note = Description of Artificial Sequence: Synthetic peptide
TLNNNTIEM

SEQ ID NO: 2065 - protein, 9 aa, synthetic construct
  REGION 1..9: note = Description of Artificial Sequence: Synthetic peptide
KALTDVVTL

SEQ ID NO: 2066 - protein, 9 aa, synthetic construct
  REGION 1..9: note = Description of Artificial Sequence: Synthetic peptide
KALTDIVTL

SEQ ID NO: 2067 - protein, 9 aa, synthetic construct
  REGION 1..9: note = Description of Artificial Sequence: Synthetic peptide
SQVQHTNIM

SEQ ID NO: 2068 - protein, 9 aa, synthetic construct
  REGION 1..9: note = Description of Artificial Sequence: Synthetic peptide
HCNVSGSQW

SEQ ID NO: 2069 - protein, 9 aa, synthetic construct
  REGION 1..9: note = Description of Artificial Sequence: Synthetic peptide
DQNPPSVSL

SEQ ID NO: 2070 - protein, 9 aa, synthetic construct
  REGION 1..9: note = Description of Artificial Sequence: Synthetic peptide
FLGAAGSTM

SEQ ID NO: 2071 - protein, 9 aa, synthetic construct
  REGION 1..9: note = Description of Artificial Sequence: Synthetic peptide
SAINLLDTI

SEQ ID NO: 2072 - protein, 11 aa, synthetic construct
  REGION 1..11: note = Description of Artificial Sequence: Synthetic peptide
TQIDPDLADQL

SEQ ID NO: 2073 - protein, 9 aa, synthetic construct
  REGION 1..9: note = Description of Artificial Sequence: Synthetic peptide
WVNGTTSSM

SEQ ID NO: 2074 - protein, 11 aa, synthetic construct
  REGION 1..11: note = Description of Artificial Sequence: Synthetic peptide
TQIDPDQADQL

SEQ ID NO: 2075 - protein, 9 aa, synthetic construct
  REGION 1..9: note = Description of Artificial Sequence: Synthetic peptide
TVLDVGDAY

SEQ ID NO: 2076 - protein, 9 aa, synthetic construct
  REGION 1..9: note = Description of Artificial Sequence: Synthetic peptide
YDLGDINNL

SEQ ID NO: 2077 - protein, 9 aa, synthetic construct
  REGION 1..9: note = Description of Artificial Sequence: Synthetic peptide
IVTDSQYAL

SEQ ID NO: 2078 - protein, 10 aa, synthetic construct
  REGION 1..10: note = Description of Artificial Sequence: Synthetic peptide
NIVGGHQAAM

SEQ ID NO: 2079 - protein, 9 aa, synthetic construct
  REGION 1..9: note = Description of Artificial Sequence: Synthetic peptide
SQAQQTSIM

SEQ ID NO: 2080 - protein, 9 aa, synthetic construct
  REGION 1..9: note = Description of Artificial Sequence: Synthetic peptide
ASDLQTKEL

SEQ ID NO: 2081 - protein, 9 aa, synthetic construct
  REGION 1..9: note = Description of Artificial Sequence: Synthetic peptide
ATDIQTREL

SEQ ID NO: 2082 - protein, 8 aa, synthetic construct
  REGION 1..8: note = Description of Artificial Sequence: Synthetic peptide
AVDLSHFL

SEQ ID NO: 2083 - protein, 9 aa, synthetic construct
  REGION 1..9: note = Description of Artificial Sequence: Synthetic peptide
ATDIQTKEL

SEQ ID NO: 2084 - protein, 9 aa, synthetic construct
  REGION 1..9: note = Description of Artificial Sequence: Synthetic peptide
IIDIIASDL

SEQ ID NO: 2085 - protein, 9 aa, synthetic construct
  REGION 1..9: note = Description of Artificial Sequence: Synthetic peptide
LIDMGNYDL

SEQ ID NO: 2086 - protein, 10 aa, synthetic construct
  REGION 1..10: note = Description of Artificial Sequence: Synthetic peptide
NYDLGDINNL

SEQ ID NO: 2087 - protein, 9 aa, synthetic construct
  REGION 1..9: note = Description of Artificial Sequence: Synthetic peptide
TQDFWEVQL

SEQ ID NO: 2088 - protein, 9 aa, synthetic construct
  REGION 1..9: note = Description of Artificial Sequence: Synthetic peptide
LVDMGDYDL

SEQ ID NO: 2089 - protein, 8 aa, synthetic construct
  REGION 1..8: note = Description of Artificial Sequence: Synthetic peptide
GQMIHQSL

SEQ ID NO: 2090 - protein, 11 aa, synthetic construct
  REGION 1..11: note = Description of Artificial Sequence: Synthetic peptide
GDYDLGDDNNL

SEQ ID NO: 2091 - protein, 9 aa, synthetic construct
  REGION 1..9: note = Description of Artificial Sequence: Synthetic peptide
RALGTGATL

SEQ ID NO: 2092 - protein, 11 aa, synthetic construct
  REGION 1..11: note = Description of Artificial Sequence: Synthetic peptide
SQGTETGVGRP

SEQ ID NO: 2093 - protein, 9 aa, synthetic construct
  REGION 1..9: note = Description of Artificial Sequence: Synthetic peptide
RALGAGATL

SEQ ID NO: 2094 - protein, 9 aa, synthetic construct
  REGION 1..9: note = Description of Artificial Sequence: Synthetic peptide
EQVPPLVSL

SEQ ID NO: 2095 - protein, 9 aa, synthetic construct
  REGION 1..9: note = Description of Artificial Sequence: Synthetic peptide
YDLGDINNL

SEQ ID NO: 2096 - protein, 9 aa, synthetic construct
  REGION 1..9: note = Description of Artificial Sequence: Synthetic peptide
KALTDVVTL

SEQ ID NO: 2097 - protein, 9 aa, synthetic construct
  REGION 1..9: note = Description of Artificial Sequence: Synthetic peptide
KALGSGATL

SEQ ID NO: 2098 - protein, 8 aa, synthetic construct
  REGION 1..8: note = Description of Artificial Sequence: Synthetic peptide
GQGTGPTL

SEQ ID NO: 2099 - protein, 9 aa, synthetic construct
  REGION 1..9: note = Description of Artificial Sequence: Synthetic peptide
KALTDIVTL

SEQ ID NO: 2100 - protein, 9 aa, synthetic construct
  REGION 1..9: note = Description of Artificial Sequence: Synthetic peptide
DQNPPSVSL

SEQ ID NO: 2101 - protein, 10 aa, synthetic construct
  REGION 1..10: note = Description of Artificial Sequence: Synthetic peptide
VTFEPIPIHY

SEQ ID NO: 2102 - protein, 10 aa, synthetic construct
  REGION 1..10: note = Description of Artificial Sequence: Synthetic peptide
VSFEPIPIHY

SEQ ID NO: 2103 - protein, 9 aa, synthetic construct
  REGION 1..9: note = Description of Artificial Sequence: Synthetic peptide
AAVDLSHFL

SEQ ID NO: 2104 - protein, 10 aa, synthetic construct
  REGION 1..10: note = Description of Artificial Sequence: Synthetic peptide
RAKNPDIIIY

SEQ ID NO: 2105 - protein, 9 aa, synthetic construct
  REGION 1..9: note = Description of Artificial Sequence: Synthetic peptide
GAASITLTV

SEQ ID NO: 2106 - protein, 8 aa, synthetic construct
  REGION 1..8: note = Description of Artificial Sequence: Synthetic peptide
SYNITTEL

SEQ ID NO: 2107 - protein, 9 aa, synthetic construct
  REGION 1..9: note = Description of Artificial Sequence: Synthetic peptide
YFKNKTISF

SEQ ID NO: 2108 - protein, 8 aa, synthetic construct
  REGION 1..8: note = Description of Artificial Sequence: Synthetic peptide
SYNVTTVL

SEQ ID NO: 2109 - protein, 9 aa, synthetic construct
  REGION 1..9: note = Description of Artificial Sequence: Synthetic peptide
IYQEPFKNL

SEQ ID NO: 2110 - protein, 10 aa, synthetic construct
  REGION 1..10: note = Description of Artificial Sequence: Synthetic peptide
TYFKNKTISF

SEQ ID NO: 2111 - protein, 8 aa, synthetic construct
  REGION 1..8: note = Description of Artificial Sequence: Synthetic peptide
SFNMTTEL

SEQ ID NO: 2112 - protein, 9 aa, synthetic construct
  REGION 1..9: note = Description of Artificial Sequence: Synthetic peptide
VYYDPSKEL

SEQ ID NO: 2113 - protein, 10 aa, synthetic construct
  REGION 1..10: note = Description of Artificial Sequence: Synthetic peptide
GFLGTAGSTM

SEQ ID NO: 2114 - protein, 9 aa, synthetic construct
  REGION 1..9: note = Description of Artificial Sequence: Synthetic peptide
LYNTVATLY

SEQ ID NO: 2115 - protein, 8 aa, synthetic construct
  REGION 1..8: note = Description of Artificial Sequence: Synthetic peptide
LYNTVATL

SEQ ID NO: 2116 - protein, 9 aa, synthetic construct
  REGION 1..9: note = Description of Artificial Sequence: Synthetic peptide
TYQIYQEPF

SEQ ID NO: 2117 - protein, 8 aa, synthetic construct
  REGION 1..8: note = Description of Artificial Sequence: Synthetic peptide
VYNTQGYF

SEQ ID NO: 2118 - protein, 10 aa, synthetic construct
  REGION 1..10: note = Description of Artificial Sequence: Synthetic peptide
GFLGAAGSTM

SEQ ID NO: 2119 - protein, 10 aa, synthetic construct
  REGION 1..10: note = Description of Artificial Sequence: Synthetic peptide
IYQSMSPRTL

SEQ ID NO: 2120 - protein, 8 aa, synthetic construct
  REGION 1..8: note = Description of Artificial Sequence: Synthetic peptide
VYHTQGYF

SEQ ID NO: 2121 - protein, 9 aa, synthetic construct
  REGION 1..9: note = Description of Artificial Sequence: Synthetic peptide
LFNTVATLY

SEQ ID NO: 2122 - protein, 9 aa, synthetic construct
  REGION 1..9: note = Description of Artificial Sequence: Synthetic peptide
FYRLDIVQL

SEQ ID NO: 2123 - protein, 8 aa, synthetic construct
  REGION 1..8: note = Description of Artificial Sequence: Synthetic peptide
SYNITTEL

SEQ ID NO: 2124 - protein, 8 aa, synthetic construct
  REGION 1..8: note = Description of Artificial Sequence: Synthetic peptide
SYNVTTVL

SEQ ID NO: 2125 - protein, 8 aa, synthetic construct
  REGION 1..8: note = Description of Artificial Sequence: Synthetic peptide
LYNTVATL

SEQ ID NO: 2126 - protein, 8 aa, synthetic construct
  REGION 1..8: note = Description of Artificial Sequence: Synthetic peptide
SFNMTTEL

SEQ ID NO: 2127 - protein, 9 aa, synthetic construct
  REGION 1..9: note = Description of Artificial Sequence: Synthetic peptide
IYQEPFKNL

SEQ ID NO: 2128 - protein, 10 aa, synthetic construct
  REGION 1..10: note = Description of Artificial Sequence: Synthetic peptide
GFLGTAGSTM

SEQ ID NO: 2129 - protein, 9 aa, synthetic construct
  REGION 1..9: note = Description of Artificial Sequence: Synthetic peptide
VYYDPSKEL

SEQ ID NO: 2130 - protein, 10 aa, synthetic construct
  REGION 1..10: note = Description of Artificial Sequence: Synthetic peptide
GFLGAAGSTM

SEQ ID NO: 2131 - protein, 9 aa, synthetic construct
  REGION 1..9: note = Description of Artificial Sequence: Synthetic peptide
TYQIYQEPF

SEQ ID NO: 2132 - protein, 9 aa, synthetic construct
  REGION 1..9: note = Description of Artificial Sequence: Synthetic peptide
LYNTVATLY

SEQ ID NO: 2133 - protein, 8 aa, synthetic construct
  REGION 1..8: note = Description of Artificial Sequence: Synthetic peptide
VYNTQGYF

SEQ ID NO: 2134 - protein, 9 aa, synthetic construct
  REGION 1..9: note = Description of Artificial Sequence: Synthetic peptide
VSNITGLLL

SEQ ID NO: 2135 - protein, 9 aa, synthetic construct
  REGION 1..9: note = Description of Artificial Sequence: Synthetic peptide
RTLQQLLFV

SEQ ID NO: 2136 - protein, 9 aa, synthetic construct
  REGION 1..9: note = Description of Artificial Sequence: Synthetic peptide
KTELHAIYL

SEQ ID NO: 2137 - protein, 9 aa, synthetic construct
  REGION 1..9: note = Description of Artificial Sequence: Synthetic peptide
RVIETVQRL

SEQ ID NO: 2138 - protein, 9 aa, synthetic construct
  REGION 1..9: note = Description of Artificial Sequence: Synthetic peptide
GAASITLTV

SEQ ID NO: 2139 - protein, 9 aa, synthetic construct
  REGION 1..9: note = Description of Artificial Sequence: Synthetic peptide
NASWSNKSY

SEQ ID NO: 2140 - protein, 9 aa, synthetic construct
  REGION 1..9: note = Description of Artificial Sequence: Synthetic peptide
VSSGIRRVL

SEQ ID NO: 2141 - protein, 9 aa, synthetic construct
  REGION 1..9: note = Description of Artificial Sequence: Synthetic peptide
AAVDLSHFL

SEQ ID NO: 2142 - protein, 9 aa, synthetic construct
  REGION 1..9: note = Description of Artificial Sequence: Synthetic peptide
VSSGIRKVL

SEQ ID NO: 2143 - protein, 8 aa, synthetic construct
  REGION 1..8: note = Description of Artificial Sequence: Synthetic peptide
WANVKQEF

SEQ ID NO: 2144 - protein, 10 aa, synthetic construct
  REGION 1..10: note = Description of Artificial Sequence: Synthetic peptide
IATDIQTREL

SEQ ID NO: 2145 - protein, 9 aa, synthetic construct
  REGION 1..9: note = Description of Artificial Sequence: Synthetic peptide
NASWSNKSY

SEQ ID NO: 2146 - protein, 9 aa, synthetic construct
  REGION 1..9: note = Description of Artificial Sequence: Synthetic peptide
AAVDLSHFL

SEQ ID NO: 2147 - protein, 10 aa, synthetic construct
  REGION 1..10: note = Description of Artificial Sequence: Synthetic peptide
IATDIQTKEL

SEQ ID NO: 2148 - protein, 9 aa, synthetic construct
  REGION 1..9: note = Description of Artificial Sequence: Synthetic peptide
RASPAATGV

SEQ ID NO: 2149 - protein, 9 aa, synthetic construct
  REGION 1..9: note = Description of Artificial Sequence: Synthetic peptide
RAIEAQQHL

SEQ ID NO: 2150 - protein, 9 aa, synthetic construct
  REGION 1..9: note = Description of Artificial Sequence: Synthetic peptide
KALTDVVTL

SEQ ID NO: 2151 - protein, 9 aa, synthetic construct
  REGION 1..9: note = Description of Artificial Sequence: Synthetic peptide
RAIEAQQHM

SEQ ID NO: 2152 - protein, 9 aa, synthetic construct
  REGION 1..9: note = Description of Artificial Sequence: Synthetic peptide
GAASITLTV

SEQ ID NO: 2153 - protein, 9 aa, synthetic construct
  REGION 1..9: note = Description of Artificial Sequence: Synthetic peptide
ARVLAVESY

SEQ ID NO: 2154 - protein, 9 aa, synthetic construct
  REGION 1..9: note = Description of Artificial Sequence: Synthetic peptide
VRIGPGQTF

SEQ ID NO: 2155 - protein, 9 aa, synthetic construct
  REGION 1..9: note = Description of Artificial Sequence: Synthetic peptide
IRIGPGQSF

SEQ ID NO: 2156 - protein, 9 aa, synthetic construct
  REGION 1..9: note = Description of Artificial Sequence: Synthetic peptide
AAVDLSHFL

SEQ ID NO: 2157 - protein, 11 aa, synthetic construct
  REGION 1..11: note = Description of Artificial Sequence: Synthetic peptide
AEIQKQGQDQW

SEQ ID NO: 2158 - protein, 11 aa, synthetic construct
  REGION 1..11: note = Description of Artificial Sequence: Synthetic peptide
SEVNIVTDSQY

SEQ ID NO: 2159 - protein, 11 aa, synthetic construct
  REGION 1..11: note = Description of Artificial Sequence: Synthetic peptide
AEQATQEVKGW

SEQ ID NO: 2160 - protein, 10 aa, synthetic construct
  REGION 1..10: note = Description of Artificial Sequence: Synthetic peptide
VRIGPGQTFY

SEQ ID NO: 2161 - protein, 9 aa, synthetic construct
  REGION 1..9: note = Description of Artificial Sequence: Synthetic peptide
AAVDLSHFL

SEQ ID NO: 2162 - protein, 9 aa, synthetic construct
  REGION 1..9: note = Description of Artificial Sequence: Synthetic peptide
KALTDIVTL

SEQ ID NO: 2163 - protein, 9 aa, synthetic construct
  REGION 1..9: note = Description of Artificial Sequence: Synthetic peptide
KALTDVVTL

SEQ ID NO: 2164 - protein, 8 aa, synthetic construct
  REGION 1..8: note = Description of Artificial Sequence: Synthetic peptide
FALNPSLL

SEQ ID NO: 2165 - protein, 8 aa, synthetic construct
  REGION 1..8: note = Description of Artificial Sequence: Synthetic peptide
IAARTVEL

SEQ ID NO: 2166 - protein, 9 aa, synthetic construct
  REGION 1..9: note = Description of Artificial Sequence: Synthetic peptide
ATDLWVTVY

SEQ ID NO: 2167 - protein, 9 aa, synthetic construct
  REGION 1..9: note = Description of Artificial Sequence: Synthetic peptide
NTELIIYQY

SEQ ID NO: 2168 - protein, 10 aa, synthetic construct
  REGION 1..10: note = Description of Artificial Sequence: Synthetic peptide
STEEIKNCSY

SEQ ID NO: 2169 - protein, 9 aa, synthetic construct
  REGION 1..9: note = Description of Artificial Sequence: Synthetic peptide
GTEELKSLY

SEQ ID NO: 2170 - protein, 11 aa, synthetic construct
  REGION 1..11: note = Description of Artificial Sequence: Synthetic peptide
GTEKQGTTHSY

SEQ ID NO: 2171 - protein, 9 aa, synthetic construct
  REGION 1..9: note = Description of Artificial Sequence: Synthetic peptide
GTEELRSLY

SEQ ID NO: 2172 - protein, 10 aa, synthetic construct
  REGION 1..10: note = Description of Artificial Sequence: Synthetic peptide
PTETGQDTAY

SEQ ID NO: 2173 - protein, 10 aa, synthetic construct
  REGION 1..10: note = Description of Artificial Sequence: Synthetic peptide
ATDLWVTVYY

SEQ ID NO: 2174 - protein, 9 aa, synthetic construct
  REGION 1..9: note = Description of Artificial Sequence: Synthetic peptide
KLEEEQNKY

SEQ ID NO: 2175 - protein, 8 aa, synthetic construct
  REGION 1..8: note = Description of Artificial Sequence: Synthetic peptide
VLDVGDAY

SEQ ID NO: 2176 - protein, 9 aa, synthetic construct
  REGION 1..9: note = Description of Artificial Sequence: Synthetic peptide
NTSGSNTLY

SEQ ID NO: 2177 - protein, 10 aa, synthetic construct
  REGION 1..10: note = Description of Artificial Sequence: Synthetic peptide
VTVLDVGDAY

SEQ ID NO: 2178 - protein, 9 aa, synthetic construct
  REGION 1..9: note = Description of Artificial Sequence: Synthetic peptide
PTDPNPQEV

SEQ ID NO: 2179 - protein, 9 aa, synthetic construct
  REGION 1..9: note = Description of Artificial Sequence: Synthetic peptide
VLAEAMSQV

SEQ ID NO: 2180 - protein, 9 aa, synthetic construct
  REGION 1..9: note = Description of Artificial Sequence: Synthetic peptide
VLAEAMSHV

SEQ ID NO: 2181 - protein, 9 aa, synthetic construct
  REGION 1..9: note = Description of Artificial Sequence: Synthetic peptide
SLFGNDPLL

SEQ ID NO: 2182 - protein, 10 aa, synthetic construct
  REGION 1..10: note = Description of Artificial Sequence: Synthetic peptide
TLWNDTLQKV

SEQ ID NO: 2183 - protein, 9 aa, synthetic construct
  REGION 1..9: note = Description of Artificial Sequence: Synthetic peptide
ILKDPVHGV

SEQ ID NO: 2184 - protein, 9 aa, synthetic construct
  REGION 1..9: note = Description of Artificial Sequence: Synthetic peptide
VLAEAMSQI

SEQ ID NO: 2185 - protein, 9 aa, synthetic construct
  REGION 1..9: note = Description of Artificial Sequence: Synthetic peptide
SLYNTVVVL

SEQ ID NO: 2186 - protein, 9 aa, synthetic construct
  REGION 1..9: note = Description of Artificial Sequence: Synthetic peptide
ILAIVVWTV

SEQ ID NO: 2187 - protein, 9 aa, synthetic construct
  REGION 1..9: note = Description of Artificial Sequence: Synthetic peptide
SLAEGKVMI

SEQ ID NO: 2188 - protein, 9 aa, synthetic construct
  REGION 1..9: note = Description of Artificial Sequence: Synthetic peptide
SLLETETGC

SEQ ID NO: 2189 - protein, 9 aa, synthetic construct
  REGION 1..9: note = Description of Artificial Sequence: Synthetic peptide
QLTEAVQKI

SEQ ID NO: 2190 - protein, 9 aa, synthetic construct
  REGION 1..9: note = Description of Artificial Sequence: Synthetic peptide
LLDTIAVAV

SEQ ID NO: 2191 - protein, 10 aa, synthetic construct
  REGION 1..10: note = Description of Artificial Sequence: Synthetic peptide
TLWQRPLVTV

SEQ ID NO: 2192 - protein, 9 aa, synthetic construct
  REGION 1..9: note = Description of Artificial Sequence: Synthetic peptide
AIITVVNRV

SEQ ID NO: 2193 - protein, 10 aa, synthetic construct
  REGION 1..10: note = Description of Artificial Sequence: Synthetic peptide
HLDFGDVNNV

SEQ ID NO: 2194 - protein, 10 aa, synthetic construct
  REGION 1..10: note = Description of Artificial Sequence: Synthetic peptide
NLVDAIAVTV

SEQ ID NO: 2195 - protein, 10 aa, synthetic construct
  REGION 1..10: note = Description of Artificial Sequence: Synthetic peptide
SLAEGGKIMI

SEQ ID NO: 2196 - protein, 9 aa, synthetic construct
  REGION 1..9: note = Description of Artificial Sequence: Synthetic peptide
ALTDIVPLT

SEQ ID NO: 2197 - protein, 10 aa, synthetic construct
  REGION 1..10: note = Description of Artificial Sequence: Synthetic peptide
SLFDTIAVAV

SEQ ID NO: 2198 - protein, 10 aa, synthetic construct
  REGION 1..10: note = Description of Artificial Sequence: Synthetic peptide
KLVPVDPSEV

SEQ ID NO: 2199 - protein, 9 aa, synthetic construct
  REGION 1..9: note = Description of Artificial Sequence: Synthetic peptide
SINNETPGV

SEQ ID NO: 2200 - protein, 9 aa, synthetic construct
  REGION 1..9: note = Description of Artificial Sequence: Synthetic peptide
IVTDSQYAL

SEQ ID NO: 2201 - protein, 9 aa, synthetic construct
  REGION 1..9: note = Description of Artificial Sequence: Synthetic peptide
VLAEAMSQV

SEQ ID NO: 2202 - protein, 9 aa, synthetic construct
  REGION 1..9: note = Description of Artificial Sequence: Synthetic peptide
VLAEAMSHV

SEQ ID NO: 2203 - protein, 9 aa, synthetic construct
  REGION 1..9: note = Description of Artificial Sequence: Synthetic peptide
ILKDPVHGV

SEQ ID NO: 2204 - protein, 9 aa, synthetic construct
  REGION 1..9: note = Description of Artificial Sequence: Synthetic peptide
VLAEAMSQI

SEQ ID NO: 2205 - protein, 9 aa, synthetic construct
  REGION 1..9: note = Description of Artificial Sequence: Synthetic peptide
ILKNPVHGV

SEQ ID NO: 2206 - protein, 9 aa, synthetic construct
  REGION 1..9: note = Description of Artificial Sequence: Synthetic peptide
ILKTPVHGV

SEQ ID NO: 2207 - protein, 9 aa, synthetic construct
  REGION 1..9: note = Description of Artificial Sequence: Synthetic peptide
AIITVVNRV

SEQ ID NO: 2208 - protein, 9 aa, synthetic construct
  REGION 1..9: note = Description of Artificial Sequence: Synthetic peptide
TLNAWVKVV

SEQ ID NO: 2209 - protein, 9 aa, synthetic construct
  REGION 1..9: note = Description of Artificial Sequence: Synthetic peptide
ALKALVAST

SEQ ID NO: 2210 - protein, 10 aa, synthetic construct
  REGION 1..10: note = Description of Artificial Sequence: Synthetic peptide
TLWQRPLVTV

SEQ ID NO: 2211 - protein, 9 aa, synthetic construct
  REGION 1..9: note = Description of Artificial Sequence: Synthetic peptide
AIISVVKRV

SEQ ID NO: 2212 - protein, 10 aa, synthetic construct
  REGION 1..10: note = Description of Artificial Sequence: Synthetic peptide
YLKDQQLLGI

SEQ ID NO: 2213 - protein, 9 aa, synthetic construct
  REGION 1..9: note = Description of Artificial Sequence: Synthetic peptide
TLKKVVEQL

SEQ ID NO: 2214 - protein, 10 aa, synthetic construct
  REGION 1..10: note = Description of Artificial Sequence: Synthetic peptide
AMYAPPIAGV

SEQ ID NO: 2215 - protein, 9 aa, synthetic construct
  REGION 1..9: note = Description of Artificial Sequence: Synthetic peptide
VVKLEPLGV

SEQ ID NO: 2216 - protein, 9 aa, synthetic construct
  REGION 1..9: note = Description of Artificial Sequence: Synthetic peptide
ALKAVVAST

SEQ ID NO: 2217 - protein, 10 aa, synthetic construct
  REGION 1..10: note = Description of Artificial Sequence: Synthetic peptide
KLVPVNPSEV

SEQ ID NO: 2218 - protein, 10 aa, synthetic construct
  REGION 1..10: note = Description of Artificial Sequence: Synthetic peptide
TLWNDTLQKV

SEQ ID NO: 2219 - protein, 9 aa, synthetic construct
  REGION 1..9: note = Description of Artificial Sequence: Synthetic peptide
QLQARVLAV

SEQ ID NO: 2220 - protein, 9 aa, synthetic construct
  REGION 1..9: note = Description of Artificial Sequence: Synthetic peptide
GAASITLTV

SEQ ID NO: 2221 - protein, 10 aa, synthetic construct
  REGION 1..10: note = Description of Artificial Sequence: Synthetic peptide
KLVPVEPSEV

SEQ ID NO: 2222 - protein, 11 aa, synthetic construct
  REGION 1..11: note = Description of Artificial Sequence: Synthetic peptide
FLKEKGGLDGL

SEQ ID NO: 2223 - protein, 9 aa, synthetic construct
  REGION 1..9: note = Description of Artificial Sequence: Synthetic peptide
ALRALVAST

SEQ ID NO: 2224 - protein, 9 aa, synthetic construct
  REGION 1..9: note = Description of Artificial Sequence: Synthetic peptide
QLTEAVQKI

SEQ ID NO: 2225 - protein, 9 aa, synthetic construct
  REGION 1..9: note = Description of Artificial Sequence: Synthetic peptide
IVIAIISVV

SEQ ID NO: 2226 - protein, 9 aa, synthetic construct
  REGION 1..9: note = Description of Artificial Sequence: Synthetic peptide
ILAIVVWTV

SEQ ID NO: 2227 - protein, 9 aa, synthetic construct
  REGION 1..9: note = Description of Artificial Sequence: Synthetic peptide
ILRDKTQKV

SEQ ID NO: 2228 - protein, 9 aa, synthetic construct
  REGION 1..9: note = Description of Artificial Sequence: Synthetic peptide
VIFSVINRV

SEQ ID NO: 2229 - protein, 10 aa, synthetic construct
  REGION 1..10: note = Description of Artificial Sequence: Synthetic peptide
SLFDTIAVAV

SEQ ID NO: 2230 - protein, 9 aa, synthetic construct
  REGION 1..9: note = Description of Artificial Sequence: Synthetic peptide
SLFYRLDVV

SEQ ID NO: 2231 - protein, 9 aa, synthetic construct
  REGION 1..9: note = Description of Artificial Sequence: Synthetic peptide
SLAEGKVMI

SEQ ID NO: 2232 - protein, 9 aa, synthetic construct
  REGION 1..9: note = Description of Artificial Sequence: Synthetic peptide
RTKPPLPSV

SEQ ID NO: 2233 - protein, 10 aa, synthetic construct
  REGION 1..10: note = Description of Artificial Sequence: Synthetic peptide
KLVPVDPSEV

SEQ ID NO: 2234 - protein, 9 aa, synthetic construct
  REGION 1..9: note = Description of Artificial Sequence: Synthetic peptide
SIAARTVTL

SEQ ID NO: 2235 - protein, 9 aa, synthetic construct
  REGION 1..9: note = Description of Artificial Sequence: Synthetic peptide
SLYNTVVVL

SEQ ID NO: 2236 - protein, 9 aa, synthetic construct
  REGION 1..9: note = Description of Artificial Sequence: Synthetic peptide
ELKKIIGQV

SEQ ID NO: 2237 - protein, 9 aa, synthetic construct
  REGION 1..9: note = Description of Artificial Sequence: Synthetic peptide
SLFDTIAVA

SEQ ID NO: 2238 - protein, 8 aa, synthetic construct
  REGION 1..8: note = Description of Artificial Sequence: Synthetic peptide
IITVVNRV

SEQ ID NO: 2239 - protein, 9 aa, synthetic construct
  REGION 1..9: note = Description of Artificial Sequence: Synthetic peptide
KIIGDIRQA

SEQ ID NO: 2240 - protein, 9 aa, synthetic construct
  REGION 1..9: note = Description of Artificial Sequence: Synthetic peptide
IVFAIITVV

SEQ ID NO: 2241 - protein, 10 aa, synthetic construct
  REGION 1..10: note = Description of Artificial Sequence: Synthetic peptide
GLIGLRIVFA

SEQ ID NO: 2242 - protein, 10 aa, synthetic construct
  REGION 1..10: note = Description of Artificial Sequence: Synthetic peptide
YLQDQQLLGL

SEQ ID NO: 2243 - protein, 9 aa, synthetic construct
  REGION 1..9: note = Description of Artificial Sequence: Synthetic peptide
LIAARIVEL

SEQ ID NO: 2244 - protein, 9 aa, synthetic construct
  REGION 1..9: note = Description of Artificial Sequence: Synthetic peptide
VVKIEPLGI

SEQ ID NO: 2245 - protein, 10 aa, synthetic construct
  REGION 1..10: note = Description of Artificial Sequence: Synthetic peptide
AMYAPPIAGI

SEQ ID NO: 2246 - protein, 9 aa, synthetic construct
  REGION 1..9: note = Description of Artificial Sequence: Synthetic peptide
SLYNTIAVL

SEQ ID NO: 2247 - protein, 9 aa, synthetic construct
  REGION 1..9: note = Description of Artificial Sequence: Synthetic peptide
GAASLTLTV

SEQ ID NO: 2248 - protein, 9 aa, synthetic construct
  REGION 1..9: note = Description of Artificial Sequence: Synthetic peptide
GVGGHQISV

SEQ ID NO: 2249 - protein, 9 aa, synthetic construct
  REGION 1..9: note = Description of Artificial Sequence: Synthetic peptide
ILAIVVWTV

SEQ ID NO: 2250 - protein, 9 aa, synthetic construct
  REGION 1..9: note = Description of Artificial Sequence: Synthetic peptide
SITNWLWYI

SEQ ID NO: 2251 - protein, 9 aa, synthetic construct
  REGION 1..9: note = Description of Artificial Sequence: Synthetic peptide
SLFGNDPLL

SEQ ID NO: 2252 - protein, 9 aa, synthetic construct
  REGION 1..9: note = Description of Artificial Sequence: Synthetic peptide
TLNAWVKVV

SEQ ID NO: 2253 - protein, 9 aa, synthetic construct
  REGION 1..9: note = Description of Artificial Sequence: Synthetic peptide
ILKDPVHGV

SEQ ID NO: 2254 - protein, 9 aa, synthetic construct
  REGION 1..9: note = Description of Artificial Sequence: Synthetic peptide
SLYNTVVVL

SEQ ID NO: 2255 - protein, 9 aa, synthetic construct
  REGION 1..9: note = Description of Artificial Sequence: Synthetic peptide
LLLYWGREL

SEQ ID NO: 2256 - protein, 10 aa, synthetic construct
  REGION 1..10: note = Description of Artificial Sequence: Synthetic peptide
TLWNDTLQKV

SEQ ID NO: 2257 - protein, 10 aa, synthetic construct
  REGION 1..10: note = Description of Artificial Sequence: Synthetic peptide
YLQDQQLLGL

SEQ ID NO: 2258 - protein, 9 aa, synthetic construct
  REGION 1..9: note = Description of Artificial Sequence: Synthetic peptide
VIFSVINRV

SEQ ID NO: 2259 - protein, 9 aa, synthetic construct
  REGION 1..9: note = Description of Artificial Sequence: Synthetic peptide
AIITVVNRV

SEQ ID NO: 2260 - protein, 9 aa, synthetic construct
  REGION 1..9: note = Description of Artificial Sequence: Synthetic peptide
ILAIVVWTI

SEQ ID NO: 2261 - protein, 10 aa, synthetic construct
  REGION 1..10: note = Description of Artificial Sequence: Synthetic peptide
TLWQRPLVTV

SEQ ID NO: 2262 - protein, 9 aa, synthetic construct
  REGION 1..9: note = Description of Artificial Sequence: Synthetic peptide
IVNQIIEKL

SEQ ID NO: 2263 - protein, 9 aa, synthetic construct
  REGION 1..9: note = Description of Artificial Sequence: Synthetic peptide
SLYNTIAVL

SEQ ID NO: 2264 - protein, 9 aa, synthetic construct
  REGION 1..9: note = Description of Artificial Sequence: Synthetic peptide
SITEWNATL

SEQ ID NO: 2265 - protein, 9 aa, synthetic construct
  REGION 1..9: note = Description of Artificial Sequence: Synthetic peptide
NISHWLWYI

SEQ ID NO: 2266 - protein, 9 aa, synthetic construct
  REGION 1..9: note = Description of Artificial Sequence: Synthetic peptide
AVAEWTDRV

SEQ ID NO: 2267 - protein, 9 aa, synthetic construct
  REGION 1..9: note = Description of Artificial Sequence: Synthetic peptide
LLVYWGQEL

SEQ ID NO: 2268 - protein, 9 aa, synthetic construct
  REGION 1..9: note = Description of Artificial Sequence: Synthetic peptide
TLQKVVKQL

SEQ ID NO: 2269 - protein, 9 aa, synthetic construct
  REGION 1..9: note = Description of Artificial Sequence: Synthetic peptide
ILKNPVHGV

SEQ ID NO: 2270 - protein, 10 aa, synthetic construct
  REGION 1..10: note = Description of Artificial Sequence: Synthetic peptide
RLLDTIAVAV

SEQ ID NO: 2271 - protein, 9 aa, synthetic construct
  REGION 1..9: note = Description of Artificial Sequence: Synthetic peptide
LVNQIIEKL

SEQ ID NO: 2272 - protein, 10 aa, synthetic construct
  REGION 1..10: note = Description of Artificial Sequence: Synthetic peptide
ILIAARIVEL

SEQ ID NO: 2273 - protein, 9 aa, synthetic construct
  REGION 1..9: note = Description of Artificial Sequence: Synthetic peptide
AIVGLIVAL

SEQ ID NO: 2274 - protein, 9 aa, synthetic construct
  REGION 1..9: note = Description of Artificial Sequence: Synthetic peptide
SLLQAIRTI

SEQ ID NO: 2275 - protein, 10 aa, synthetic construct
  REGION 1..10: note = Description of Artificial Sequence: Synthetic peptide
SLFDTIAVAV

SEQ ID NO: 2276 - protein, 9 aa, synthetic construct
  REGION 1..9: note = Description of Artificial Sequence: Synthetic peptide
RLVNGFFAL

SEQ ID NO: 2277 - protein, 9 aa, synthetic construct
  REGION 1..9: note = Description of Artificial Sequence: Synthetic peptide
ILKTPVHGV

SEQ ID NO: 2278 - protein, 9 aa, synthetic construct
  REGION 1..9: note = Description of Artificial Sequence: Synthetic peptide
AILNIPTRI

SEQ ID NO: 2279 - protein, 9 aa, synthetic construct
  REGION 1..9: note = Description of Artificial Sequence: Synthetic peptide
TLKKVVEQL

SEQ ID NO: 2280 - protein, 9 aa, synthetic construct
  REGION 1..9: note = Description of Artificial Sequence: Synthetic peptide
LIAARIVEL

SEQ ID NO: 2281 - protein, 9 aa, synthetic construct
  REGION 1..9: note = Description of Artificial Sequence: Synthetic peptide
ALTDIVPLT

SEQ ID NO: 2282 - protein, 9 aa, synthetic construct
  REGION 1..9: note = Description of Artificial Sequence: Synthetic peptide
KVYSLFYRL

SEQ ID NO: 2283 - protein, 9 aa, synthetic construct
  REGION 1..9: note = Description of Artificial Sequence: Synthetic peptide
VIIRYLQQL

SEQ ID NO: 2284 - protein, 9 aa, synthetic construct
  REGION 1..9: note = Description of Artificial Sequence: Synthetic peptide
SLFYRLDVV

SEQ ID NO: 2285 - protein, 9 aa, synthetic construct
  REGION 1..9: note = Description of Artificial Sequence: Synthetic peptide
VLAEAMSHV

SEQ ID NO: 2286 - protein, 9 aa, synthetic construct
  REGION 1..9: note = Description of Artificial Sequence: Synthetic peptide
VLAEAMSQV

SEQ ID NO: 2287 - protein, 9 aa, synthetic construct
  REGION 1..9: note = Description of Artificial Sequence: Synthetic peptide
VIWGKIPKF

SEQ ID NO: 2288 - protein, 10 aa, synthetic construct
  REGION 1..10: note = Description of Artificial Sequence: Synthetic peptide
KLIEKERVYL

SEQ ID NO: 2289 - protein, 9 aa, synthetic construct
  REGION 1..9: note = Description of Artificial Sequence: Synthetic peptide
AIIRYLQQL

SEQ ID NO: 2290 - protein, 9 aa, synthetic construct
  REGION 1..9: note = Description of Artificial Sequence: Synthetic peptide
AIISVVKRV

SEQ ID NO: 2291 - protein, 9 aa, synthetic construct
  REGION 1..9: note = Description of Artificial Sequence: Synthetic peptide
HLEGKIIVV

SEQ ID NO: 2292 - protein, 11 aa, synthetic construct
  REGION 1..11: note = Description of Artificial Sequence: Synthetic peptide
SLFYRLDVVQL

SEQ ID NO: 2293 - protein, 9 aa, synthetic construct
  REGION 1..9: note = Description of Artificial Sequence: Synthetic peptide
NTIAVLYYV

SEQ ID NO: 2294 - protein, 9 aa, synthetic construct
  REGION 1..9: note = Description of Artificial Sequence: Synthetic peptide
TYTDIIYML

SEQ ID NO: 2295 - protein, 9 aa, synthetic construct
  REGION 1..9: note = Description of Artificial Sequence: Synthetic peptide
IVTDSQYAL

SEQ ID NO: 2296 - protein, 9 aa, synthetic construct
  REGION 1..9: note = Description of Artificial Sequence: Synthetic peptide
HLEGKVILV

SEQ ID NO: 2297 - protein, 9 aa, synthetic construct
  REGION 1..9: note = Description of Artificial Sequence: Synthetic peptide
KVYSLFYEL

SEQ ID NO: 2298 - protein, 11 aa, synthetic construct
  REGION 1..11: note = Description of Artificial Sequence: Synthetic peptide
SLFYKLDIVQI

SEQ ID NO: 2299 - protein, 9 aa, synthetic construct
  REGION 1..9: note = Description of Artificial Sequence: Synthetic peptide
RIVFAIITV

SEQ ID NO: 2300 - protein, 9 aa, synthetic construct
  REGION 1..9: note = Description of Artificial Sequence: Synthetic peptide
LVNQIIEEL

SEQ ID NO: 2301 - protein, 9 aa, synthetic construct
  REGION 1..9: note = Description of Artificial Sequence: Synthetic peptide
RILQQLLFV

SEQ ID NO: 2302 - protein, 9 aa, synthetic construct
  REGION 1..9: note = Description of Artificial Sequence: Synthetic peptide
NYTNIIYRL

SEQ ID NO: 2303 - protein, 9 aa, synthetic construct
  REGION 1..9: note = Description of Artificial Sequence: Synthetic peptide
RTKPPLPSV

SEQ ID NO: 2304 - protein, 9 aa, synthetic construct
  REGION 1..9: note = Description of Artificial Sequence: Synthetic peptide
KALTDIVTL

SEQ ID NO: 2305 - protein, 9 aa, synthetic construct
  REGION 1..9: note = Description of Artificial Sequence: Synthetic peptide
KIIVVAVHV

SEQ ID NO: 2306 - protein, 10 aa, synthetic construct
  REGION 1..10: note = Description of Artificial Sequence: Synthetic peptide
NLVDAIAVTV

SEQ ID NO: 2307 - protein, 9 aa, synthetic construct
  REGION 1..9: note = Description of Artificial Sequence: Synthetic peptide
HLWRWGILI

SEQ ID NO: 2308 - protein, 9 aa, synthetic construct
  REGION 1..9: note = Description of Artificial Sequence: Synthetic peptide
NYTETIYKL

SEQ ID NO: 2309 - protein, 10 aa, synthetic construct
  REGION 1..10: note = Description of Artificial Sequence: Synthetic peptide
NLLVYWGQEL

SEQ ID NO: 2310 - protein, 9 aa, synthetic construct
  REGION 1..9: note = Description of Artificial Sequence: Synthetic peptide
WMLELLEEL

SEQ ID NO: 2311 - protein, 11 aa, synthetic construct
  REGION 1..11: note = Description of Artificial Sequence: Synthetic peptide
VQLGIPHPAGL

SEQ ID NO: 2312 - protein, 10 aa, synthetic construct
  REGION 1..10: note = Description of Artificial Sequence: Synthetic peptide
RTQDFWEVQL

SEQ ID NO: 2313 - protein, 10 aa, synthetic construct
  REGION 1..10: note = Description of Artificial Sequence: Synthetic peptide
KLVPVEPSEV

SEQ ID NO: 2314 - protein, 9 aa, synthetic construct
  REGION 1..9: note = Description of Artificial Sequence: Synthetic peptide
SINNETPGV

SEQ ID NO: 2315 - protein, 9 aa, synthetic construct
  REGION 1..9: note = Description of Artificial Sequence: Synthetic peptide
SLFDTIAVA

SEQ ID NO: 2316 - protein, 10 aa, synthetic construct
  REGION 1..10: note = Description of Artificial Sequence: Synthetic peptide
YLQDQQLLGI

SEQ ID NO: 2317 - protein, 9 aa, synthetic construct
  REGION 1..9: note = Description of Artificial Sequence: Synthetic peptide
SLFYKLDIV

SEQ ID NO: 2318 - protein, 10 aa, synthetic construct
  REGION 1..10: note = Description of Artificial Sequence: Synthetic peptide
KLVPVNPSEV

SEQ ID NO: 2319 - protein, 9 aa, synthetic construct
  REGION 1..9: note = Description of Artificial Sequence: Synthetic peptide
DLADHLIHL

SEQ ID NO: 2320 - protein, 8 aa, synthetic construct
  REGION 1..8: note = Description of Artificial Sequence: Synthetic peptide
SLFDTIAV

SEQ ID NO: 2321 - protein, 9 aa, synthetic construct
  REGION 1..9: note = Description of Artificial Sequence: Synthetic peptide
IINLWDQSL

SEQ ID NO: 2322 - protein, 8 aa, synthetic construct
  REGION 1..8: note = Description of Artificial Sequence: Synthetic peptide
ALTDIVTL

SEQ ID NO: 2323 - protein, 9 aa, synthetic construct
  REGION 1..9: note = Description of Artificial Sequence: Synthetic peptide
KLTPLCVTL

SEQ ID NO: 2324 - protein, 9 aa, synthetic construct
  REGION 1..9: note = Description of Artificial Sequence: Synthetic peptide
LLDTIAVAV

SEQ ID NO: 2325 - protein, 10 aa, synthetic construct
  REGION 1..10: note = Description of Artificial Sequence: Synthetic peptide
ILIAARTVEL

SEQ ID NO: 2326 - protein, 9 aa, synthetic construct
  REGION 1..9: note = Description of Artificial Sequence: Synthetic peptide
VLAEAMSQI

SEQ ID NO: 2327 - protein, 9 aa, synthetic construct
  REGION 1..9: note = Description of Artificial Sequence: Synthetic peptide
TQSPINEEI

SEQ ID NO: 2328 - protein, 9 aa, synthetic construct
  REGION 1..9: note = Description of Artificial Sequence: Synthetic peptide
AIITVVNRV

SEQ ID NO: 2329 - protein, 9 aa, synthetic construct
  REGION 1..9: note = Description of Artificial Sequence: Synthetic peptide
AVAEWTDRV

SEQ ID NO: 2330 - protein, 11 aa, synthetic construct
  REGION 1..11: note = Description of Artificial Sequence: Synthetic peptide
TQIDPDLADHL

SEQ ID NO: 2331 - protein, 9 aa, synthetic construct
  REGION 1..9: note = Description of Artificial Sequence: Synthetic peptide
NIIGDIRQA

SEQ ID NO: 2332 - protein, 9 aa, synthetic construct
  REGION 1..9: note = Description of Artificial Sequence: Synthetic peptide
VQINSTDNV

SEQ ID NO: 2333 - protein, 9 aa, synthetic construct
  REGION 1..9: note = Description of Artificial Sequence: Synthetic peptide
KAIEAQQQL

SEQ ID NO: 2334 - protein, 9 aa, synthetic construct
  REGION 1..9: note = Description of Artificial Sequence: Synthetic peptide
VLAEAMSQV

SEQ ID NO: 2335 - protein, 9 aa, synthetic construct
  REGION 1..9: note = Description of Artificial Sequence: Synthetic peptide
TVAEGTDRV

SEQ ID NO: 2336 - protein, 9 aa, synthetic construct
  REGION 1..9: note = Description of Artificial Sequence: Synthetic peptide
VLAEAMSHV

SEQ ID NO: 2337 - protein, 9 aa, synthetic construct
  REGION 1..9: note = Description of Artificial Sequence: Synthetic peptide
KIIGDIRQA

SEQ ID NO: 2338 - protein, 9 aa, synthetic construct
  REGION 1..9: note = Description of Artificial Sequence: Synthetic peptide
GAVDLSHFL

SEQ ID NO: 2339 - protein, 9 aa, synthetic construct
  REGION 1..9: note = Description of Artificial Sequence: Synthetic peptide
IVNQIIEKL

SEQ ID NO: 2340 - protein, 11 aa, synthetic construct
  REGION 1..11: note = Description of Artificial Sequence: Synthetic peptide
VVIQDNSDIKV

SEQ ID NO: 2341 - protein, 9 aa, synthetic construct
  REGION 1..9: note = Description of Artificial Sequence: Synthetic peptide
VLAEAMSQI

SEQ ID NO: 2342 - protein, 9 aa, synthetic construct
  REGION 1..9: note = Description of Artificial Sequence: Synthetic peptide
VQFTEPVQI

SEQ ID NO: 2343 - protein, 11 aa, synthetic construct
  REGION 1..11: note = Description of Artificial Sequence: Synthetic peptide
VVIQDNGDIKV

SEQ ID NO: 2344 - protein, 9 aa, synthetic construct
  REGION 1..9: note = Description of Artificial Sequence: Synthetic peptide
SAISLFDTI

SEQ ID NO: 2345 - protein, 9 aa, synthetic construct
  REGION 1..9: note = Description of Artificial Sequence: Synthetic peptide
WTVNDIQKL

SEQ ID NO: 2346 - protein, 9 aa, synthetic construct
  REGION 1..9: note = Description of Artificial Sequence: Synthetic peptide
QAIEAQQHL

SEQ ID NO: 2347 - protein, 9 aa, synthetic construct
  REGION 1..9: note = Description of Artificial Sequence: Synthetic peptide
SAVNLVDAI

SEQ ID NO: 2348 - protein, 9 aa, synthetic construct
  REGION 1..9: note = Description of Artificial Sequence: Synthetic peptide
ATLEEMMTA

SEQ ID NO: 2349 - protein, 9 aa, synthetic construct
  REGION 1..9: note = Description of Artificial Sequence: Synthetic peptide
GAASITLTV

SEQ ID NO: 2350 - protein, 9 aa, synthetic construct
  REGION 1..9: note = Description of Artificial Sequence: Synthetic peptide
IVTDSQYAL

SEQ ID NO: 2351 - protein, 9 aa, synthetic construct
  REGION 1..9: note = Description of Artificial Sequence: Synthetic peptide
EIIGDIRQA

SEQ ID NO: 2352 - protein, 9 aa, synthetic construct
  REGION 1..9: note = Description of Artificial Sequence: Synthetic peptide
KAADLWVTV

SEQ ID NO: 2353 - protein, 9 aa, synthetic construct
  REGION 1..9: note = Description of Artificial Sequence: Synthetic peptide
SQVQNTNIM

SEQ ID NO: 2354 - protein, 9 aa, synthetic construct
  REGION 1..9: note = Description of Artificial Sequence: Synthetic peptide
SQIYAGIQV

SEQ ID NO: 2355 - protein, 9 aa, synthetic construct
  REGION 1..9: note = Description of Artificial Sequence: Synthetic peptide
ILKDPVHGV

SEQ ID NO: 2356 - protein, 9 aa, synthetic construct
  REGION 1..9: note = Description of Artificial Sequence: Synthetic peptide
RVIEIGQRA

SEQ ID NO: 2357 - protein, 9 aa, synthetic construct
  REGION 1..9: note = Description of Artificial Sequence: Synthetic peptide
EQVDKLVSC

SEQ ID NO: 2358 - protein, 9 aa, synthetic construct
  REGION 1..9: note = Description of Artificial Sequence: Synthetic peptide
GQAFYTNEI

SEQ ID NO: 2359 - protein, 9 aa, synthetic construct
  REGION 1..9: note = Description of Artificial Sequence: Synthetic peptide
ASITLTVQA

SEQ ID NO: 2360 - protein, 10 aa, synthetic construct
  REGION 1..10: note = Description of Artificial Sequence: Synthetic peptide
SQYALGIIQA

SEQ ID NO: 2361 - protein, 10 aa, synthetic construct
  REGION 1..10: note = Description of Artificial Sequence: Synthetic peptide
SQIHSTNQNV

SEQ ID NO: 2362 - protein, 9 aa, synthetic construct
  REGION 1..9: note = Description of Artificial Sequence: Synthetic peptide
SLFGNDPLL

SEQ ID NO: 2363 - protein, 9 aa, synthetic construct
  REGION 1..9: note = Description of Artificial Sequence: Synthetic peptide
RVIELGQRI

SEQ ID NO: 2364 - protein, 9 aa, synthetic construct
  REGION 1..9: note = Description of Artificial Sequence: Synthetic peptide
SQIYAGIKV

SEQ ID NO: 2365 - protein, 9 aa, synthetic construct
  REGION 1..9: note = Description of Artificial Sequence: Synthetic peptide
IVIAIISVV

SEQ ID NO: 2366 - protein, 9 aa, synthetic construct
  REGION 1..9: note = Description of Artificial Sequence: Synthetic peptide
AIVGLIVAL

SEQ ID NO: 2367 - protein, 9 aa, synthetic construct
  REGION 1..9: note = Description of Artificial Sequence: Synthetic peptide
LEKEPIAGA

SEQ ID NO: 2368 - protein, 9 aa, synthetic construct
  REGION 1..9: note = Description of Artificial Sequence: Synthetic peptide
KAIEAQQQM

SEQ ID NO: 2369 - protein, 9 aa, synthetic construct
  REGION 1..9: note = Description of Artificial Sequence: Synthetic peptide
QLTEAVQKI

SEQ ID NO: 2370 - protein, 9 aa, synthetic construct
  REGION 1..9: note = Description of Artificial Sequence: Synthetic peptide
TQGENNSLL

SEQ ID NO: 2371 - protein, 9 aa, synthetic construct
  REGION 1..9: note = Description of Artificial Sequence: Synthetic peptide
LVNQIIEKL

SEQ ID NO: 2372 - protein, 9 aa, synthetic construct
  REGION 1..9: note = Description of Artificial Sequence: Synthetic peptide
SIAARTVTL

SEQ ID NO: 2373 - protein, 9 aa, synthetic construct
  REGION 1..9: note = Description of Artificial Sequence: Synthetic peptide
IEVKDTKEA

SEQ ID NO: 2374 - protein, 9 aa, synthetic construct
  REGION 1..9: note = Description of Artificial Sequence: Synthetic peptide
ATSNLQEQI

SEQ ID NO: 2375 - protein, 9 aa, synthetic construct
  REGION 1..9: note = Description of Artificial Sequence: Synthetic peptide
FTSAAVKAA

SEQ ID NO: 2376 - protein, 9 aa, synthetic construct
  REGION 1..9: note = Description of Artificial Sequence: Synthetic peptide
SEVGFPVRP

SEQ ID NO: 2377 - protein, 10 aa, synthetic construct
  REGION 1..10: note = Description of Artificial Sequence: Synthetic peptide
KAYDTEVHNV

SEQ ID NO: 2378 - protein, 9 aa, synthetic construct
  REGION 1..9: note = Description of Artificial Sequence: Synthetic peptide
LVNQIIEEL

SEQ ID NO: 2379 - protein, 10 aa, synthetic construct
  REGION 1..10: note = Description of Artificial Sequence: Synthetic peptide
RQIDSISERV

SEQ ID NO: 2380 - protein, 11 aa, synthetic construct
  REGION 1..11: note = Description of Artificial Sequence: Synthetic peptide
VVIQDNGDIKV

SEQ ID NO: 2381 - protein, 9 aa, synthetic construct
  REGION 1..9: note = Description of Artificial Sequence: Synthetic peptide
AIITVVNRV

SEQ ID NO: 2382 - protein, 9 aa, synthetic construct
  REGION 1..9: note = Description of Artificial Sequence: Synthetic peptide
IQDNGDIKV

SEQ ID NO: 2383 - protein, 9 aa, synthetic construct
  REGION 1..9: note = Description of Artificial Sequence: Synthetic peptide
IVTDSQYAL

SEQ ID NO: 2384 - protein, 9 aa, synthetic construct
  REGION 1..9: note = Description of Artificial Sequence: Synthetic peptide
IQDNSDIKV

SEQ ID NO: 2385 - protein, 11 aa, synthetic construct
  REGION 1..11: note = Description of Artificial Sequence: Synthetic peptide
VVIQDNSDIKV

SEQ ID NO: 2386 - protein, 9 aa, synthetic construct
  REGION 1..9: note = Description of Artificial Sequence: Synthetic peptide
SAISLFDTI

SEQ ID NO: 2387 - protein, 9 aa, synthetic construct
  REGION 1..9: note = Description of Artificial Sequence: Synthetic peptide
VLAEAMSQV

SEQ ID NO: 2388 - protein, 9 aa, synthetic construct
  REGION 1..9: note = Description of Artificial Sequence: Synthetic peptide
KAIEAQQQL

SEQ ID NO: 2389 - protein, 9 aa, synthetic construct
  REGION 1..9: note = Description of Artificial Sequence: Synthetic peptide
SQIYAGIKV

SEQ ID NO: 2390 - protein, 9 aa, synthetic construct
  REGION 1..9: note = Description of Artificial Sequence: Synthetic peptide
VQINSTDNV

SEQ ID NO: 2391 - protein, 9 aa, synthetic construct
  REGION 1..9: note = Description of Artificial Sequence: Synthetic peptide
TQSPINEEI

SEQ ID NO: 2392 - protein, 9 aa, synthetic construct
  REGION 1..9: note = Description of Artificial Sequence: Synthetic peptide
SQIYAGIQV

SEQ ID NO: 2393 - protein, 9 aa, synthetic construct
  REGION 1..9: note = Description of Artificial Sequence: Synthetic peptide
AVAEWTDRV

SEQ ID NO: 2394 - protein, 9 aa, synthetic construct
  REGION 1..9: note = Description of Artificial Sequence: Synthetic peptide
AIVGLIVAL

SEQ ID NO: 2395 - protein, 9 aa, synthetic construct
  REGION 1..9: note = Description of Artificial Sequence: Synthetic peptide
GGIGGFIKV

SEQ ID NO: 2396 - protein, 9 aa, synthetic construct
  REGION 1..9: note = Description of Artificial Sequence: Synthetic peptide
YSTQIDPDL

SEQ ID NO: 2397 - protein, 9 aa, synthetic construct
  REGION 1..9: note = Description of Artificial Sequence: Synthetic peptide
RTPPAAEGV

SEQ ID NO: 2398 - protein, 9 aa, synthetic construct
  REGION 1..9: note = Description of Artificial Sequence: Synthetic peptide
KALTDIVTL

SEQ ID NO: 2399 - protein, 9 aa, synthetic construct
  REGION 1..9: note = Description of Artificial Sequence: Synthetic peptide
AVSPAAPGV

SEQ ID NO: 2400 - protein, 9 aa, synthetic construct
  REGION 1..9: note = Description of Artificial Sequence: Synthetic peptide
TVAEGTDRV

SEQ ID NO: 2401 - protein, 9 aa, synthetic construct
  REGION 1..9: note = Description of Artificial Sequence: Synthetic peptide
VLAEAMSHV

SEQ ID NO: 2402 - protein, 10 aa, synthetic construct
  REGION 1..10: note = Description of Artificial Sequence: Synthetic peptide
TVLDVGDAYF

SEQ ID NO: 2403 - protein, 9 aa, synthetic construct
  REGION 1..9: note = Description of Artificial Sequence: Synthetic peptide
SLFGNDPLL

SEQ ID NO: 2404 - protein, 9 aa, synthetic construct
  REGION 1..9: note = Description of Artificial Sequence: Synthetic peptide
IVIAIISVV

SEQ ID NO: 2405 - protein, 9 aa, synthetic construct
  REGION 1..9: note = Description of Artificial Sequence: Synthetic peptide
GAVDLSHFL

SEQ ID NO: 2406 - protein, 11 aa, synthetic construct
  REGION 1..11: note = Description of Artificial Sequence: Synthetic peptide
TQIDPDLADHL

SEQ ID NO: 2407 - protein, 9 aa, synthetic construct
  REGION 1..9: note = Description of Artificial Sequence: Synthetic peptide
RVIELGQRI

SEQ ID NO: 2408 - protein, 9 aa, synthetic construct
  REGION 1..9: note = Description of Artificial Sequence: Synthetic peptide
NIIGDIRQA

SEQ ID NO: 2409 - protein, 9 aa, synthetic construct
  REGION 1..9: note = Description of Artificial Sequence: Synthetic peptide
VLAEAMSQI

SEQ ID NO: 2410 - protein, 9 aa, synthetic construct
  REGION 1..9: note = Description of Artificial Sequence: Synthetic peptide
LVDAIAVTV

SEQ ID NO: 2411 - protein, 9 aa, synthetic construct
  REGION 1..9: note = Description of Artificial Sequence: Synthetic peptide
GAASITLTV

SEQ ID NO: 2412 - protein, 9 aa, synthetic construct
  REGION 1..9: note = Description of Artificial Sequence: Synthetic peptide
HQISVESSV

SEQ ID NO: 2413 - protein, 9 aa, synthetic construct
  REGION 1..9: note = Description of Artificial Sequence: Synthetic peptide
SAVNLVDAI

SEQ ID NO: 2414 - protein, 9 aa, synthetic construct
  REGION 1..9: note = Description of Artificial Sequence: Synthetic peptide
KIIGDIRQA

SEQ ID NO: 2415 - protein, 9 aa, synthetic construct
  REGION 1..9: note = Description of Artificial Sequence: Synthetic peptide
YQLEQEPIV

SEQ ID NO: 2416 - protein, 9 aa, synthetic construct
  REGION 1..9: note = Description of Artificial Sequence: Synthetic peptide
QLTEAVQKI

SEQ ID NO: 2417 - protein, 9 aa, synthetic construct
  REGION 1..9: note = Description of Artificial Sequence: Synthetic peptide
QAIEAQQHL

SEQ ID NO: 2418 - protein, 9 aa, synthetic construct
  REGION 1..9: note = Description of Artificial Sequence: Synthetic peptide
VQFTEPVQI

SEQ ID NO: 2419 - protein, 9 aa, synthetic construct
  REGION 1..9: note = Description of Artificial Sequence: Synthetic peptide
SAIRLLDTI

SEQ ID NO: 2420 - protein, 9 aa, synthetic construct
  REGION 1..9: note = Description of Artificial Sequence: Synthetic peptide
KATDLWVTV

SEQ ID NO: 2421 - protein, 9 aa, synthetic construct
  REGION 1..9: note = Description of Artificial Sequence: Synthetic peptide
EQVDKLVSC

SEQ ID NO: 2422 - protein, 9 aa, synthetic construct
  REGION 1..9: note = Description of Artificial Sequence: Synthetic peptide
LVDAIAVTV

SEQ ID NO: 2423 - protein, 9 aa, synthetic construct
  REGION 1..9: note = Description of Artificial Sequence: Synthetic peptide
LLDTIAVAV

SEQ ID NO: 2424 - protein, 9 aa, synthetic construct
  REGION 1..9: note = Description of Artificial Sequence: Synthetic peptide
YVDRFFKTL

SEQ ID NO: 2425 - protein, 10 aa, synthetic construct
  REGION 1..10: note = Description of Artificial Sequence: Synthetic peptide
TLWQRPLVTV

SEQ ID NO: 2426 - protein, 9 aa, synthetic construct
  REGION 1..9: note = Description of Artificial Sequence: Synthetic peptide
ILKDPVHGV

SEQ ID NO: 2427 - protein, 9 aa, synthetic construct
  REGION 1..9: note = Description of Artificial Sequence: Synthetic peptide
QIDSISERV

SEQ ID NO: 2428 - protein, 9 aa, synthetic construct
  REGION 1..9: note = Description of Artificial Sequence: Synthetic peptide
VLAEAMSHV

SEQ ID NO: 2429 - protein, 10 aa, synthetic construct
  REGION 1..10: note = Description of Artificial Sequence: Synthetic peptide
TLWNDTLQKV

SEQ ID NO: 2430 - protein, 9 aa, synthetic construct
  REGION 1..9: note = Description of Artificial Sequence: Synthetic peptide
AIITVVNRV

SEQ ID NO: 2431 - protein, 9 aa, synthetic construct
  REGION 1..9: note = Description of Artificial Sequence: Synthetic peptide
ALPVGTEEL

SEQ ID NO: 2432 - protein, 9 aa, synthetic construct
  REGION 1..9: note = Description of Artificial Sequence: Synthetic peptide
VIFSVINRV

SEQ ID NO: 2433 - protein, 9 aa, synthetic construct
  REGION 1..9: note = Description of Artificial Sequence: Synthetic peptide
FSPEVIPMF

SEQ ID NO: 2434 - protein, 9 aa, synthetic construct
  REGION 1..9: note = Description of Artificial Sequence: Synthetic peptide
KIDWLLERI

SEQ ID NO: 2435 - protein, 9 aa, synthetic construct
  REGION 1..9: note = Description of Artificial Sequence: Synthetic peptide
VLAEAMSQV

SEQ ID NO: 2436 - protein, 9 aa, synthetic construct
  REGION 1..9: note = Description of Artificial Sequence: Synthetic peptide
SLFGNDPLL

SEQ ID NO: 2437 - protein, 9 aa, synthetic construct
  REGION 1..9: note = Description of Artificial Sequence: Synthetic peptide
YTDIIYMLL

SEQ ID NO: 2438 - protein, 9 aa, synthetic construct
  REGION 1..9: note = Description of Artificial Sequence: Synthetic peptide
HLEGKVILV

SEQ ID NO: 2439 - protein, 9 aa, synthetic construct
  REGION 1..9: note = Description of Artificial Sequence: Synthetic peptide
KIIGDIRQA

SEQ ID NO: 2440 - protein, 9 aa, synthetic construct
  REGION 1..9: note = Description of Artificial Sequence: Synthetic peptide
AIITVVNRV

SEQ ID NO: 2441 - protein, 9 aa, synthetic construct
  REGION 1..9: note = Description of Artificial Sequence: Synthetic peptide
IVNQIIEKL

SEQ ID NO: 2442 - protein, 9 aa, synthetic construct
  REGION 1..9: note = Description of Artificial Sequence: Synthetic peptide
KAIEAQQQL

SEQ ID NO: 2443 - protein, 9 aa, synthetic construct
  REGION 1..9: note = Description of Artificial Sequence: Synthetic peptide
RTPPAAEGV

SEQ ID NO: 2444 - protein, 9 aa, synthetic construct
  REGION 1..9: note = Description of Artificial Sequence: Synthetic peptide
WTVNDIQKL

SEQ ID NO: 2445 - protein, 9 aa, synthetic construct
  REGION 1..9: note = Description of Artificial Sequence: Synthetic peptide
AIVRILQQL

SEQ ID NO: 2446 - protein, 10 aa, synthetic construct
  REGION 1..10: note = Description of Artificial Sequence: Synthetic peptide
KAYDTEVHNV

SEQ ID NO: 2447 - protein, 10 aa, synthetic construct
  REGION 1..10: note = Description of Artificial Sequence: Synthetic peptide
SQIHSTNQNV

SEQ ID NO: 2448 - protein, 9 aa, synthetic construct
  REGION 1..9: note = Description of Artificial Sequence: Synthetic peptide
ILKDPVHGV

SEQ ID NO: 2449 - protein, 9 aa, synthetic construct
  REGION 1..9: note = Description of Artificial Sequence: Synthetic peptide
EIIGDIRQA

SEQ ID NO: 2450 - protein, 9 aa, synthetic construct
  REGION 1..9: note = Description of Artificial Sequence: Synthetic peptide
KAIEAQQQM

SEQ ID NO: 2451 - protein, 11 aa, synthetic construct
  REGION 1..11: note = Description of Artificial Sequence: Synthetic peptide
VVIQDNGDIKV

SEQ ID NO: 2452 - protein, 11 aa, synthetic construct
  REGION 1..11: note = Description of Artificial Sequence: Synthetic peptide
RTPPAAEGVGA

SEQ ID NO: 2453 - protein, 9 aa, synthetic construct
  REGION 1..9: note = Description of Artificial Sequence: Synthetic peptide
RTKPPLPSV

SEQ ID NO: 2454 - protein, 10 aa, synthetic construct
  REGION 1..10: note = Description of Artificial Sequence: Synthetic peptide
RVIEIGQRAC

SEQ ID NO: 2455 - protein, 9 aa, synthetic construct
  REGION 1..9: note = Description of Artificial Sequence: Synthetic peptide
RVIEIGQRA

SEQ ID NO: 2456 - protein, 9 aa, synthetic construct
  REGION 1..9: note = Description of Artificial Sequence: Synthetic peptide
LVNQIIEKL

SEQ ID NO: 2457 - protein, 10 aa, synthetic construct
  REGION 1..10: note = Description of Artificial Sequence: Synthetic peptide
KAIEAQQQML

SEQ ID NO: 2458 - protein, 9 aa, synthetic construct
  REGION 1..9: note = Description of Artificial Sequence: Synthetic peptide
AIVGLIVAL

SEQ ID NO: 2459 - protein, 9 aa, synthetic construct
  REGION 1..9: note = Description of Artificial Sequence: Synthetic peptide
VLAEAMSQV

SEQ ID NO: 2460 - protein, 9 aa, synthetic construct
  REGION 1..9: note = Description of Artificial Sequence: Synthetic peptide
NIIGDIRQA

SEQ ID NO: 2461 - protein, 9 aa, synthetic construct
  REGION 1..9: note = Description of Artificial Sequence: Synthetic peptide
TQSPINEEI

SEQ ID NO: 2462 - protein, 10 aa, synthetic construct
  REGION 1..10: note = Description of Artificial Sequence: Synthetic peptide
RVLAEAMSQV

SEQ ID NO: 2463 - protein, 11 aa, synthetic construct
  REGION 1..11: note = Description of Artificial Sequence: Synthetic peptide
VVIQDNSDIKV

SEQ ID NO: 2464 - protein, 9 aa, synthetic construct
  REGION 1..9: note = Description of Artificial Sequence: Synthetic peptide
AIISVVKRV

SEQ ID NO: 2465 - protein, 9 aa, synthetic construct
  REGION 1..9: note = Description of Artificial Sequence: Synthetic peptide
RVIELGQRI

SEQ ID NO: 2466 - protein, 9 aa, synthetic construct
  REGION 1..9: note = Description of Artificial Sequence: Synthetic peptide
IEVKDTKEA

SEQ ID NO: 2467 - protein, 9 aa, synthetic construct
  REGION 1..9: note = Description of Artificial Sequence: Synthetic peptide
QIHSTNQNV

SEQ ID NO: 2468 - protein, 10 aa, synthetic construct
  REGION 1..10: note = Description of Artificial Sequence: Synthetic peptide
KVVKLEPLGV

SEQ ID NO: 2469 - protein, 10 aa, synthetic construct
  REGION 1..10: note = Description of Artificial Sequence: Synthetic peptide
KAIEAQQQLL

SEQ ID NO: 2470 - protein, 9 aa, synthetic construct
  REGION 1..9: note = Description of Artificial Sequence: Synthetic peptide
AIIRYLQQL

SEQ ID NO: 2471 - protein, 10 aa, synthetic construct
  REGION 1..10: note = Description of Artificial Sequence: Synthetic peptide
RQIDSISERV

SEQ ID NO: 2472 - protein, 9 aa, synthetic construct
  REGION 1..9: note = Description of Artificial Sequence: Synthetic peptide
VQINSTDNV

SEQ ID NO: 2473 - protein, 9 aa, synthetic construct
  REGION 1..9: note = Description of Artificial Sequence: Synthetic peptide
TVAEGTDRV

SEQ ID NO: 2474 - protein, 9 aa, synthetic construct
  REGION 1..9: note = Description of Artificial Sequence: Synthetic peptide
IVIAIISVV

SEQ ID NO: 2475 - protein, 9 aa, synthetic construct
  REGION 1..9: note = Description of Artificial Sequence: Synthetic peptide
QIIRQLHSA

SEQ ID NO: 2476 - protein, 9 aa, synthetic construct
  REGION 1..9: note = Description of Artificial Sequence: Synthetic peptide
IAARIVELV

SEQ ID NO: 2477 - protein, 9 aa, synthetic construct
  REGION 1..9: note = Description of Artificial Sequence: Synthetic peptide
KIIVVAVHV

SEQ ID NO: 2478 - protein, 9 aa, synthetic construct
  REGION 1..9: note = Description of Artificial Sequence: Synthetic peptide
QIYAGIKVK

SEQ ID NO: 2479 - protein, 9 aa, synthetic construct
  REGION 1..9: note = Description of Artificial Sequence: Synthetic peptide
QIYAGIQVK

SEQ ID NO: 2480 - protein, 10 aa, synthetic construct
  REGION 1..10: note = Description of Artificial Sequence: Synthetic peptide
IVQQQSNLLK

SEQ ID NO: 2481 - protein, 9 aa, synthetic construct
  REGION 1..9: note = Description of Artificial Sequence: Synthetic peptide
AIFQSSMTK

SEQ ID NO: 2482 - protein, 9 aa, synthetic construct
  REGION 1..9: note = Description of Artificial Sequence: Synthetic peptide
KVAEQLREK

SEQ ID NO: 2483 - protein, 9 aa, synthetic construct
  REGION 1..9: note = Description of Artificial Sequence: Synthetic peptide
ILGELVSPK

SEQ ID NO: 2484 - protein, 9 aa, synthetic construct
  REGION 1..9: note = Description of Artificial Sequence: Synthetic peptide
KILEPFRTK

SEQ ID NO: 2485 - protein, 9 aa, synthetic construct
  REGION 1..9: note = Description of Artificial Sequence: Synthetic peptide
KILEPFRSK

SEQ ID NO: 2486 - protein, 10 aa, synthetic construct
  REGION 1..10: note = Description of Artificial Sequence: Synthetic peptide
STNQNVMMQR

SEQ ID NO: 2487 - protein, 9 aa, synthetic construct
  REGION 1..9: note = Description of Artificial Sequence: Synthetic peptide
STWENGTNK

SEQ ID NO: 2488 - protein, 9 aa, synthetic construct
  REGION 1..9: note = Description of Artificial Sequence: Synthetic peptide
ALVASTRTK

SEQ ID NO: 2489 - protein, 9 aa, synthetic construct
  REGION 1..9: note = Description of Artificial Sequence: Synthetic peptide
AVVASTRTK

SEQ ID NO: 2490 - protein, 10 aa, synthetic construct
  REGION 1..10: note = Description of Artificial Sequence: Synthetic peptide
TVYYGVPVWK

SEQ ID NO: 2491 - protein, 11 aa, synthetic construct
  REGION 1..11: note = Description of Artificial Sequence: Synthetic peptide
TVNDIQKLVGK

SEQ ID NO: 2492 - protein, 10 aa, synthetic construct
  REGION 1..10: note = Description of Artificial Sequence: Synthetic peptide
AILGELVSPK

SEQ ID NO: 2493 - protein, 9 aa, synthetic construct
  REGION 1..9: note = Description of Artificial Sequence: Synthetic peptide
GLFNSTWTK

SEQ ID NO: 2494 - protein, 9 aa, synthetic construct
  REGION 1..9: note = Description of Artificial Sequence: Synthetic peptide
RVRDGASRP

SEQ ID NO: 2495 - protein, 11 aa, synthetic construct
  REGION 1..11: note = Description of Artificial Sequence: Synthetic peptide
RTKPPLPSVRK

SEQ ID NO: 2496 - protein, 10 aa, synthetic construct
  REGION 1..10: note = Description of Artificial Sequence: Synthetic peptide
STNTNIMMQR

SEQ ID NO: 2497 - protein, 10 aa, synthetic construct
  REGION 1..10: note = Description of Artificial Sequence: Synthetic peptide
SLFGNDPLSQ

SEQ ID NO: 2498 - protein, 10 aa, synthetic construct
  REGION 1..10: note = Description of Artificial Sequence: Synthetic peptide
ALTDIVTLTK

SEQ ID NO: 2499 - protein, 9 aa, synthetic construct
  REGION 1..9: note = Description of Artificial Sequence: Synthetic peptide
AVLYYVHQK

SEQ ID NO: 2500 - protein, 9 aa, synthetic construct
  REGION 1..9: note = Description of Artificial Sequence: Synthetic peptide
TLWNDTLQK

SEQ ID NO: 2501 - protein, 9 aa, synthetic construct
  REGION 1..9: note = Description of Artificial Sequence: Synthetic peptide
SVITQACPK

SEQ ID NO: 2502 - protein, 10 aa, synthetic construct
  REGION 1..10: note = Description of Artificial Sequence: Synthetic peptide
IVQQQSNLLK

SEQ ID NO: 2503 - protein, 11 aa, synthetic construct
  REGION 1..11: note = Description of Artificial Sequence: Synthetic peptide
TVNDIQKLVGK

SEQ ID NO: 2504 - protein, 9 aa, synthetic construct
  REGION 1..9: note = Description of Artificial Sequence: Synthetic peptide
QIYAGIQVK

SEQ ID NO: 2505 - protein, 10 aa, synthetic construct
  REGION 1..10: note = Description of Artificial Sequence: Synthetic peptide
TVQPIKLPEK

SEQ ID NO: 2506 - protein, 11 aa, synthetic construct
  REGION 1..11: note = Description of Artificial Sequence: Synthetic peptide
KIEPLGIAPTK

SEQ ID NO: 2507 - protein, 9 aa, synthetic construct
  REGION 1..9: note = Description of Artificial Sequence: Synthetic peptide
AIFQSSMTK

SEQ ID NO: 2508 - protein, 9 aa, synthetic construct
  REGION 1..9: note = Description of Artificial Sequence: Synthetic peptide
ILGELVSPK

SEQ ID NO: 2509 - protein, 10 aa, synthetic construct
  REGION 1..10: note = Description of Artificial Sequence: Synthetic peptide
AILGELVSPK

SEQ ID NO: 2510 - protein, 10 aa, synthetic construct
  REGION 1..10: note = Description of Artificial Sequence: Synthetic peptide
STNQNVMMQR

SEQ ID NO: 2511 - protein, 10 aa, synthetic construct
  REGION 1..10: note = Description of Artificial Sequence: Synthetic peptide
ALQTGTEELK

SEQ ID NO: 2512 - protein, 9 aa, synthetic construct
  REGION 1..9: note = Description of Artificial Sequence: Synthetic peptide
AVDLSHFLK

SEQ ID NO: 2513 - protein, 9 aa, synthetic construct
  REGION 1..9: note = Description of Artificial Sequence: Synthetic peptide
QIYAGIKVK

SEQ ID NO: 2514 - protein, 11 aa, synthetic construct
  REGION 1..11: note = Description of Artificial Sequence: Synthetic peptide
QVQNTNIMIQR

SEQ ID NO: 2515 - protein, 10 aa, synthetic construct
  REGION 1..10: note = Description of Artificial Sequence: Synthetic peptide
STNTNIMMQR

SEQ ID NO: 2516 - protein, 11 aa, synthetic construct
  REGION 1..11: note = Description of Artificial Sequence: Synthetic peptide
IVSLTETTNQK

SEQ ID NO: 2517 - protein, 9 aa, synthetic construct
  REGION 1..9: note = Description of Artificial Sequence: Synthetic peptide
SVITQACPK

SEQ ID NO: 2518 - protein, 9 aa, synthetic construct
  REGION 1..9: note = Description of Artificial Sequence: Synthetic peptide
AVLYYVHQK

SEQ ID NO: 2519 - protein, 9 aa, synthetic construct
  REGION 1..9: note = Description of Artificial Sequence: Synthetic peptide
APAGFAILK

SEQ ID NO: 2520 - protein, 11 aa, synthetic construct
  REGION 1..11: note = Description of Artificial Sequence: Synthetic peptide
ASQIYAGIQVK

SEQ ID NO: 2521 - protein, 10 aa, synthetic construct
  REGION 1..10: note = Description of Artificial Sequence: Synthetic peptide
SITEWNATLK

SEQ ID NO: 2522 - protein, 9 aa, synthetic construct
  REGION 1..9: note = Description of Artificial Sequence: Synthetic peptide
STWENGTNK

SEQ ID NO: 2523 - protein, 11 aa, synthetic construct
  REGION 1..11: note = Description of Artificial Sequence: Synthetic peptide
QSQGVVESMNK

SEQ ID NO: 2524 - protein, 10 aa, synthetic construct
  REGION 1..10: note = Description of Artificial Sequence: Synthetic peptide
GLDGLIYSQK

SEQ ID NO: 2525 - protein, 10 aa, synthetic construct
  REGION 1..10: note = Description of Artificial Sequence: Synthetic peptide
RVPTGPEEPK

SEQ ID NO: 2526 - protein, 9 aa, synthetic construct
  REGION 1..9: note = Description of Artificial Sequence: Synthetic peptide
QSNPYPTPR

SEQ ID NO: 2527 - protein, 9 aa, synthetic construct
  REGION 1..9: note = Description of Artificial Sequence: Synthetic peptide
IIATDIQTK

SEQ ID NO: 2528 - protein, 9 aa, synthetic construct
  REGION 1..9: note = Description of Artificial Sequence: Synthetic peptide
STITQACPK

SEQ ID NO: 2529 - protein, 10 aa, synthetic construct
  REGION 1..10: note = Description of Artificial Sequence: Synthetic peptide
ALTDIVTLTK

SEQ ID NO: 2530 - protein, 9 aa, synthetic construct
  REGION 1..9: note = Description of Artificial Sequence: Synthetic peptide
KVAEQLREK

SEQ ID NO: 2531 - protein, 9 aa, synthetic construct
  REGION 1..9: note = Description of Artificial Sequence: Synthetic peptide
GLFNSTWTK

SEQ ID NO: 2532 - protein, 11 aa, synthetic construct
  REGION 1..11: note = Description of Artificial Sequence: Synthetic peptide
SALPVGTEELK

SEQ ID NO: 2533 - protein, 10 aa, synthetic construct
  REGION 1..10: note = Description of Artificial Sequence: Synthetic peptide
ATESIVIWGK

SEQ ID NO: 2534 - protein, 9 aa, synthetic construct
  REGION 1..9: note = Description of Artificial Sequence: Synthetic peptide
VIAIISVVK

SEQ ID NO: 2535 - protein, 9 aa, synthetic construct
  REGION 1..9: note = Description of Artificial Sequence: Synthetic peptide
KQLTEAVQK

SEQ ID NO: 2536 - protein, 11 aa, synthetic construct
  REGION 1..11: note = Description of Artificial Sequence: Synthetic peptide
ATDIQTKELQK

SEQ ID NO: 2537 - protein, 10 aa, synthetic construct
  REGION 1..10: note = Description of Artificial Sequence: Synthetic peptide
SILDIKQGPK

SEQ ID NO: 2538 - protein, 9 aa, synthetic construct
  REGION 1..9: note = Description of Artificial Sequence: Synthetic peptide
VQQQSNLLK

SEQ ID NO: 2539 - protein, 10 aa, synthetic construct
  REGION 1..10: note = Description of Artificial Sequence: Synthetic peptide
VVQLDESENK

SEQ ID NO: 2540 - protein, 11 aa, synthetic construct
  REGION 1..11: note = Description of Artificial Sequence: Synthetic peptide
IVPLTETTNQK

SEQ ID NO: 2541 - protein, 10 aa, synthetic construct
  REGION 1..10: note = Description of Artificial Sequence: Synthetic peptide
VVESMNKELK

SEQ ID NO: 2542 - protein, 10 aa, synthetic construct
  REGION 1..10: note = Description of Artificial Sequence: Synthetic peptide
STNQNVMMQR

SEQ ID NO: 2543 - protein, 10 aa, synthetic construct
  REGION 1..10: note = Description of Artificial Sequence: Synthetic peptide
IVQQQSNLLK

SEQ ID NO: 2544 - protein, 9 aa, synthetic construct
  REGION 1..9: note = Description of Artificial Sequence: Synthetic peptide
SVITQACPK

SEQ ID NO: 2545 - protein, 9 aa, synthetic construct
  REGION 1..9: note = Description of Artificial Sequence: Synthetic peptide
STITQACPK

SEQ ID NO: 2546 - protein, 9 aa, synthetic construct
  REGION 1..9: note = Description of Artificial Sequence: Synthetic peptide
STWENGTNK

SEQ ID NO: 2547 - protein, 10 aa, synthetic construct
  REGION 1..10: note = Description of Artificial Sequence: Synthetic peptide
STNTNIMMQR

SEQ ID NO: 2548 - protein, 9 aa, synthetic construct
  REGION 1..9: note = Description of Artificial Sequence: Synthetic peptide
QIYAGIQVK

SEQ ID NO: 2549 - protein, 11 aa, synthetic construct
  REGION 1..11: note = Description of Artificial Sequence: Synthetic peptide
TVNDIQKLVGK

SEQ ID NO: 2550 - protein, 9 aa, synthetic construct
  REGION 1..9: note = Description of Artificial Sequence: Synthetic peptide
QIYAGIKVK

SEQ ID NO: 2551 - protein, 9 aa, synthetic construct
  REGION 1..9: note = Description of Artificial Sequence: Synthetic peptide
APAGFAILK

SEQ ID NO: 2552 - protein, 9 aa, synthetic construct
  REGION 1..9: note = Description of Artificial Sequence: Synthetic peptide
AVLYYVHQK

SEQ ID NO: 2553 - protein, 9 aa, synthetic construct
  REGION 1..9: note = Description of Artificial Sequence: Synthetic peptide
AVDLSHFLK

SEQ ID NO: 2554 - protein, 11 aa, synthetic construct
  REGION 1..11: note = Description of Artificial Sequence: Synthetic peptide
QVQNTNIMIQR

SEQ ID NO: 2555 - protein, 10 aa, synthetic construct
  REGION 1..10: note = Description of Artificial Sequence: Synthetic peptide
RVPTGPEEPK

SEQ ID NO: 2556 - protein, 10 aa, synthetic construct
  REGION 1..10: note = Description of Artificial Sequence: Synthetic peptide
TVQPIKLPEK

SEQ ID NO: 2557 - protein, 11 aa, synthetic construct
  REGION 1..11: note = Description of Artificial Sequence: Synthetic peptide
ATQGENNSLLH

SEQ ID NO: 2558 - protein, 9 aa, synthetic construct
  REGION 1..9: note = Description of Artificial Sequence: Synthetic peptide
APAGYAILK

SEQ ID NO: 2559 - protein, 11 aa, synthetic construct
  REGION 1..11: note = Description of Artificial Sequence: Synthetic peptide
ATDIQTKELQK

SEQ ID NO: 2560 - protein, 9 aa, synthetic construct
  REGION 1..9: note = Description of Artificial Sequence: Synthetic peptide
AVLYFVHQK

SEQ ID NO: 2561 - protein, 9 aa, synthetic construct
  REGION 1..9: note = Description of Artificial Sequence: Synthetic peptide
AIFQSSMTK

SEQ ID NO: 2562 - protein, 9 aa, synthetic construct
  REGION 1..9: note = Description of Artificial Sequence: Synthetic peptide
GSLQYLALK

SEQ ID NO: 2563 - protein, 9 aa, synthetic construct
  REGION 1..9: note = Description of Artificial Sequence: Synthetic peptide
AVVASTRTK

SEQ ID NO: 2564 - protein, 10 aa, synthetic construct
  REGION 1..10: note = Description of Artificial Sequence: Synthetic peptide
ATESIVIWGK

SEQ ID NO: 2565 - protein, 9 aa, synthetic construct
  REGION 1..9: note = Description of Artificial Sequence: Synthetic peptide
QSNPYPTPR

SEQ ID NO: 2566 - protein, 9 aa, synthetic construct
  REGION 1..9: note = Description of Artificial Sequence: Synthetic peptide
QIIEKLIEK

SEQ ID NO: 2567 - protein, 9 aa, synthetic construct
  REGION 1..9: note = Description of Artificial Sequence: Synthetic peptide
VQQQSNLLK

SEQ ID NO: 2568 - protein, 10 aa, synthetic construct
  REGION 1..10: note = Description of Artificial Sequence: Synthetic peptide
GAVDLSHFLK

SEQ ID NO: 2569 - protein, 8 aa, synthetic construct
  REGION 1..8: note = Description of Artificial Sequence: Synthetic peptide
PAGYAILK

SEQ ID NO: 2570 - protein, 10 aa, synthetic construct
  REGION 1..10: note = Description of Artificial Sequence: Synthetic peptide
SITEWNATLK

SEQ ID NO: 2571 - protein, 9 aa, synthetic construct
  REGION 1..9: note = Description of Artificial Sequence: Synthetic peptide
KVAEQLREK

SEQ ID NO: 2572 - protein, 11 aa, synthetic construct
  REGION 1..11: note = Description of Artificial Sequence: Synthetic peptide
IVPLTETTNQK

SEQ ID NO: 2573 - protein, 9 aa, synthetic construct
  REGION 1..9: note = Description of Artificial Sequence: Synthetic peptide
LTDIVTLTK

SEQ ID NO: 2574 - protein, 9 aa, synthetic construct
  REGION 1..9: note = Description of Artificial Sequence: Synthetic peptide
SSEVHIPLK

SEQ ID NO: 2575 - protein, 11 aa, synthetic construct
  REGION 1..11: note = Description of Artificial Sequence: Synthetic peptide
GVVESMNKELK

SEQ ID NO: 2576 - protein, 10 aa, synthetic construct
  REGION 1..10: note = Description of Artificial Sequence: Synthetic peptide
AILGELVSPK

SEQ ID NO: 2577 - protein, 10 aa, synthetic construct
  REGION 1..10: note = Description of Artificial Sequence: Synthetic peptide
GAFDLSHFLK

SEQ ID NO: 2578 - protein, 9 aa, synthetic construct
  REGION 1..9: note = Description of Artificial Sequence: Synthetic peptide
ITEWNATLK

SEQ ID NO: 2579 - protein, 10 aa, synthetic construct
  REGION 1..10: note = Description of Artificial Sequence: Synthetic peptide
SILDIKQGPK

SEQ ID NO: 2580 - protein, 9 aa, synthetic construct
  REGION 1..9: note = Description of Artificial Sequence: Synthetic peptide
SNYTETIYK

SEQ ID NO: 2581 - protein, 8 aa, synthetic construct
  REGION 1..8: note = Description of Artificial Sequence: Synthetic peptide
TDIVPLTR

SEQ ID NO: 2582 - protein, 8 aa, synthetic construct
  REGION 1..8: note = Description of Artificial Sequence: Synthetic peptide
TDIVTLTK

SEQ ID NO: 2583 - protein, 9 aa, synthetic construct
  REGION 1..9: note = Description of Artificial Sequence: Synthetic peptide
GQAFYTNNK

SEQ ID NO: 2584 - protein, 9 aa, synthetic construct
  REGION 1..9: note = Description of Artificial Sequence: Synthetic peptide
NYTNIIYRL

SEQ ID NO: 2585 - protein, 9 aa, synthetic construct
  REGION 1..9: note = Description of Artificial Sequence: Synthetic peptide
NYTETIYKL

SEQ ID NO: 2586 - protein, 9 aa, synthetic construct
  REGION 1..9: note = Description of Artificial Sequence: Synthetic peptide
TYTDIIYML

SEQ ID NO: 2587 - protein, 9 aa, synthetic construct
  REGION 1..9: note = Description of Artificial Sequence: Synthetic peptide
RYLQDQQLL

SEQ ID NO: 2588 - protein, 11 aa, synthetic construct
  REGION 1..11: note = Description of Artificial Sequence: Synthetic peptide
RYLQQLLFVHF

SEQ ID NO: 2589 - protein, 9 aa, synthetic construct
  REGION 1..9: note = Description of Artificial Sequence: Synthetic peptide
IYQEPFKNL

SEQ ID NO: 2590 - protein, 9 aa, synthetic construct
  REGION 1..9: note = Description of Artificial Sequence: Synthetic peptide
RYLKDQQLL

SEQ ID NO: 2591 - protein, 8 aa, synthetic construct
  REGION 1..8: note = Description of Artificial Sequence: Synthetic peptide
TELIIYQY

SEQ ID NO: 2592 - protein, 9 aa, synthetic construct
  REGION 1..9: note = Description of Artificial Sequence: Synthetic peptide
GYSPVSFQI

SEQ ID NO: 2593 - protein, 9 aa, synthetic construct
  REGION 1..9: note = Description of Artificial Sequence: Synthetic peptide
FYKLDIVQI

SEQ ID NO: 2594 - protein, 9 aa, synthetic construct
  REGION 1..9: note = Description of Artificial Sequence: Synthetic peptide
NYTETIYKL

SEQ ID NO: 2595 - protein, 9 aa, synthetic construct
  REGION 1..9: note = Description of Artificial Sequence: Synthetic peptide
NYTNIIYRL

SEQ ID NO: 2596 - protein, 9 aa, synthetic construct
  REGION 1..9: note = Description of Artificial Sequence: Synthetic peptide
TYTDIIYML

SEQ ID NO: 2597 - protein, 9 aa, synthetic construct
  REGION 1..9: note = Description of Artificial Sequence: Synthetic peptide
RYLQDQQLL

SEQ ID NO: 2598 - protein, 9 aa, synthetic construct
  REGION 1..9: note = Description of Artificial Sequence: Synthetic peptide
FYKLDIVQI

SEQ ID NO: 2599 - protein, 9 aa, synthetic construct
  REGION 1..9: note = Description of Artificial Sequence: Synthetic peptide
IYQEPFKNL

SEQ ID NO: 2600 - protein, 9 aa, synthetic construct
  REGION 1..9: note = Description of Artificial Sequence: Synthetic peptide
RYLKDQQLL

SEQ ID NO: 2601 - protein, 9 aa, synthetic construct
  REGION 1..9: note = Description of Artificial Sequence: Synthetic peptide
IYNTYGDTW

SEQ ID NO: 2602 - protein, 9 aa, synthetic construct
  REGION 1..9: note = Description of Artificial Sequence: Synthetic peptide
FYELDVVLL

SEQ ID NO: 2603 - protein, 9 aa, synthetic construct
  REGION 1..9: note = Description of Artificial Sequence: Synthetic peptide
GYSPVSFQI

SEQ ID NO: 2604 - protein, 9 aa, synthetic construct
  REGION 1..9: note = Description of Artificial Sequence: Synthetic peptide
QYDQIVIEI

SEQ ID NO: 2605 - protein, 9 aa, synthetic construct
  REGION 1..9: note = Description of Artificial Sequence: Synthetic peptide
YYDPSKDLI

SEQ ID NO: 2606 - protein, 10 aa, synthetic construct
  REGION 1..10: note = Description of Artificial Sequence: Synthetic peptide
DTIAVAVAEW

SEQ ID NO: 2607 - protein, 10 aa, synthetic construct
  REGION 1..10: note = Description of Artificial Sequence: Synthetic peptide
DTINEEAAEW

SEQ ID NO: 2608 - protein, 9 aa, synthetic construct
  REGION 1..9: note = Description of Artificial Sequence: Synthetic peptide
EVIPMFSAL

SEQ ID NO: 2609 - protein, 10 aa, synthetic construct
  REGION 1..10: note = Description of Artificial Sequence: Synthetic peptide
AVSPRTLNAW

SEQ ID NO: 2610 - protein, 9 aa, synthetic construct
  REGION 1..9: note = Description of Artificial Sequence: Synthetic peptide
EVIPMFTAL

SEQ ID NO: 2611 - protein, 10 aa, synthetic construct
  REGION 1..10: note = Description of Artificial Sequence: Synthetic peptide
EIQKQGQGQW

SEQ ID NO: 2612 - protein, 9 aa, synthetic construct
  REGION 1..9: note = Description of Artificial Sequence: Synthetic peptide
TIAVAVAEW

SEQ ID NO: 2613 - protein, 9 aa, synthetic construct
  REGION 1..9: note = Description of Artificial Sequence: Synthetic peptide
WTKEGNSTW

SEQ ID NO: 2614 - protein, 9 aa, synthetic construct
  REGION 1..9: note = Description of Artificial Sequence: Synthetic peptide
DIAGTTSTL

SEQ ID NO: 2615 - protein, 9 aa, synthetic construct
  REGION 1..9: note = Description of Artificial Sequence: Synthetic peptide
TTVPWNTSW

SEQ ID NO: 2616 - protein, 9 aa, synthetic construct
  REGION 1..9: note = Description of Artificial Sequence: Synthetic peptide
TTVPWNSSW

SEQ ID NO: 2617 - protein, 9 aa, synthetic construct
  REGION 1..9: note = Description of Artificial Sequence: Synthetic peptide
NVTENFNMW

SEQ ID NO: 2618 - protein, 10 aa, synthetic construct
  REGION 1..10: note = Description of Artificial Sequence: Synthetic peptide
EVKDNTTKEM

SEQ ID NO: 2619 - protein, 10 aa, synthetic construct
  REGION 1..10: note = Description of Artificial Sequence: Synthetic peptide
NTTGLFNSTW

SEQ ID NO: 2620 - protein, 9 aa, synthetic construct
  REGION 1..9: note = Description of Artificial Sequence: Synthetic peptide
ETTNQRTEL

SEQ ID NO: 2621 - protein, 9 aa, synthetic construct
  REGION 1..9: note = Description of Artificial Sequence: Synthetic peptide
EIIGDIRQA

SEQ ID NO: 2622 - protein, 10 aa, synthetic construct
  REGION 1..10: note = Description of Artificial Sequence: Synthetic peptide
EVNIVTDSQY

SEQ ID NO: 2623 - protein, 10 aa, synthetic construct
  REGION 1..10: note = Description of Artificial Sequence: Synthetic peptide
EVNIVTDSQY

SEQ ID NO: 2624 - protein, 9 aa, synthetic construct
  REGION 1..9: note = Description of Artificial Sequence: Synthetic peptide
EVIPMFSAL

SEQ ID NO: 2625 - protein, 9 aa, synthetic construct
  REGION 1..9: note = Description of Artificial Sequence: Synthetic peptide
EIIGDIRQA

SEQ ID NO: 2626 - protein, 11 aa, synthetic construct
  REGION 1..11: note = Description of Artificial Sequence: Synthetic peptide
ETGTEELRSLY

SEQ ID NO: 2627 - protein, 9 aa, synthetic construct
  REGION 1..9: note = Description of Artificial Sequence: Synthetic peptide
EVIPMFTAL

SEQ ID NO: 2628 - protein, 9 aa, synthetic construct
  REGION 1..9: note = Description of Artificial Sequence: Synthetic peptide
ETKLGKAGY

SEQ ID NO: 2629 - protein, 9 aa, synthetic construct
  REGION 1..9: note = Description of Artificial Sequence: Synthetic peptide
ETPGIRYQY

SEQ ID NO: 2630 - protein, 9 aa, synthetic construct
  REGION 1..9: note = Description of Artificial Sequence: Synthetic peptide
EIVSPRCEY

SEQ ID NO: 2631 - protein, 10 aa, synthetic construct
  REGION 1..10: note = Description of Artificial Sequence: Synthetic peptide
DTIAVAVAEW

SEQ ID NO: 2632 - protein, 9 aa, synthetic construct
  REGION 1..9: note = Description of Artificial Sequence: Synthetic peptide
ETPGVRYQY

SEQ ID NO: 2633 - protein, 9 aa, synthetic construct
  REGION 1..9: note = Description of Artificial Sequence: Synthetic peptide
EVIPTETGQ

SEQ ID NO: 2634 - protein, 10 aa, synthetic construct
  REGION 1..10: note = Description of Artificial Sequence: Synthetic peptide
EVIPAETGQE

SEQ ID NO: 2635 - protein, 10 aa, synthetic construct
  REGION 1..10: note = Description of Artificial Sequence: Synthetic peptide
DVKQEFGIPY

SEQ ID NO: 2636 - protein, 10 aa, synthetic construct
  REGION 1..10: note = Description of Artificial Sequence: Synthetic peptide
ETFRPGGGDM

SEQ ID NO: 2637 - protein, 9 aa, synthetic construct
  REGION 1..9: note = Description of Artificial Sequence: Synthetic peptide
EVIPAETGQ

SEQ ID NO: 2638 - protein, 9 aa, synthetic construct
  REGION 1..9: note = Description of Artificial Sequence: Synthetic peptide
NTSGSNTLY

SEQ ID NO: 2639 - protein, 9 aa, synthetic construct
  REGION 1..9: note = Description of Artificial Sequence: Synthetic peptide
ELVSPKCEY

SEQ ID NO: 2640 - protein, 10 aa, synthetic construct
  REGION 1..10: note = Description of Artificial Sequence: Synthetic peptide
EVKDNTTKEM

SEQ ID NO: 2641 - protein, 9 aa, synthetic construct
  REGION 1..9: note = Description of Artificial Sequence: Synthetic peptide
EVIPMFSAL

SEQ ID NO: 2642 - protein, 9 aa, synthetic construct
  REGION 1..9: note = Description of Artificial Sequence: Synthetic peptide
EVIPMFTAL

SEQ ID NO: 2643 - protein, 10 aa, synthetic construct
  REGION 1..10: note = Description of Artificial Sequence: Synthetic peptide
EVNIVTDSQY

SEQ ID NO: 2644 - protein, 9 aa, synthetic construct
  REGION 1..9: note = Description of Artificial Sequence: Synthetic peptide
DIAGATSNL

SEQ ID NO: 2645 - protein, 9 aa, synthetic construct
  REGION 1..9: note = Description of Artificial Sequence: Synthetic peptide
DIAGTTSTL

SEQ ID NO: 2646 - protein, 10 aa, synthetic construct
  REGION 1..10: note = Description of Artificial Sequence: Synthetic peptide
DTIAVAVAEW

SEQ ID NO: 2647 - protein, 10 aa, synthetic construct
  REGION 1..10: note = Description of Artificial Sequence: Synthetic peptide
EIVNQIIEKL

SEQ ID NO: 2648 - protein, 9 aa, synthetic construct
  REGION 1..9: note = Description of Artificial Sequence: Synthetic peptide
SIVGLIVAF

SEQ ID NO: 2649 - protein, 9 aa, synthetic construct
  REGION 1..9: note = Description of Artificial Sequence: Synthetic peptide
EIIGDIRQA

SEQ ID NO: 2650 - protein, 10 aa, synthetic construct
  REGION 1..10: note = Description of Artificial Sequence: Synthetic peptide
EVKDNTTKEM

SEQ ID NO: 2651 - protein, 9 aa, synthetic construct
  REGION 1..9: note = Description of Artificial Sequence: Synthetic peptide
NAKNIIVQF

SEQ ID NO: 2652 - protein, 9 aa, synthetic construct
  REGION 1..9: note = Description of Artificial Sequence: Synthetic peptide
DLKNVTENF

SEQ ID NO: 2653 - protein, 9 aa, synthetic construct
  REGION 1..9: note = Description of Artificial Sequence: Synthetic peptide
EVIPMFTAL

SEQ ID NO: 2654 - protein, 9 aa, synthetic construct
  REGION 1..9: note = Description of Artificial Sequence: Synthetic peptide
EVIPMFSAL

SEQ ID NO: 2655 - protein, 9 aa, synthetic construct
  REGION 1..9: note = Description of Artificial Sequence: Synthetic peptide
EIIGDIRQA

SEQ ID NO: 2656 - protein, 9 aa, synthetic construct
  REGION 1..9: note = Description of Artificial Sequence: Synthetic peptide
DIAGATSNL

SEQ ID NO: 2657 - protein, 9 aa, synthetic construct
  REGION 1..9: note = Description of Artificial Sequence: Synthetic peptide
MVHQAVSPR

SEQ ID NO: 2658 - protein, 10 aa, synthetic construct
  REGION 1..10: note = Description of Artificial Sequence: Synthetic peptide
DTIAVAVAEW

SEQ ID NO: 2659 - protein, 9 aa, synthetic construct
  REGION 1..9: note = Description of Artificial Sequence: Synthetic peptide
NITGIILTR

SEQ ID NO: 2660 - protein, 10 aa, synthetic construct
  REGION 1..10: note = Description of Artificial Sequence: Synthetic peptide
EVKDNTTKEM

SEQ ID NO: 2661 - protein, 9 aa, synthetic construct
  REGION 1..9: note = Description of Artificial Sequence: Synthetic peptide
MVHQAISPR

SEQ ID NO: 2662 - protein, 9 aa, synthetic construct
  REGION 1..9: note = Description of Artificial Sequence: Synthetic peptide
EIVNQIIEK

SEQ ID NO: 2663 - protein, 10 aa, synthetic construct
  REGION 1..10: note = Description of Artificial Sequence: Synthetic peptide
STNTNIMMQR

SEQ ID NO: 2664 - protein, 9 aa, synthetic construct
  REGION 1..9: note = Description of Artificial Sequence: Synthetic peptide
DIAGTTSTL

SEQ ID NO: 2665 - protein, 10 aa, synthetic construct
  REGION 1..10: note = Description of Artificial Sequence: Synthetic peptide
AIIGEIVSPR

SEQ ID NO: 2666 - protein, 9 aa, synthetic construct
  REGION 1..9: note = Description of Artificial Sequence: Synthetic peptide
ELVGHSSLK

SEQ ID NO: 2667 - protein, 10 aa, synthetic construct
  REGION 1..10: note = Description of Artificial Sequence: Synthetic peptide
DNSDIKVVPR

SEQ ID NO: 2668 - protein, 10 aa, synthetic construct
  REGION 1..10: note = Description of Artificial Sequence: Synthetic peptide
STNQNVMMQR

SEQ ID NO: 2669 - protein, 9 aa, synthetic construct
  REGION 1..9: note = Description of Artificial Sequence: Synthetic peptide
QNTNIMIQR

SEQ ID NO: 2670 - protein, 9 aa, synthetic construct
  REGION 1..9: note = Description of Artificial Sequence: Synthetic peptide
EVIPTETGQ

SEQ ID NO: 2671 - protein, 9 aa, synthetic construct
  REGION 1..9: note = Description of Artificial Sequence: Synthetic peptide
DSISERVLR

SEQ ID NO: 2672 - protein, 9 aa, synthetic construct
  REGION 1..9: note = Description of Artificial Sequence: Synthetic peptide
TVLDVGDAY

SEQ ID NO: 2673 - protein, 9 aa, synthetic construct
  REGION 1..9: note = Description of Artificial Sequence: Synthetic peptide
NTELIIYQY

SEQ ID NO: 2674 - protein, 10 aa, synthetic construct
  REGION 1..10: note = Description of Artificial Sequence: Synthetic peptide
VTFEPIPIHY

SEQ ID NO: 2675 - protein, 9 aa, synthetic construct
  REGION 1..9: note = Description of Artificial Sequence: Synthetic peptide
LYNTIAVLY

SEQ ID NO: 2676 - protein, 9 aa, synthetic construct
  REGION 1..9: note = Description of Artificial Sequence: Synthetic peptide
SFEPIPIHY

SEQ ID NO: 2677 - protein, 9 aa, synthetic construct
  REGION 1..9: note = Description of Artificial Sequence: Synthetic peptide
TFEPIPIHY

SEQ ID NO: 2678 - protein, 9 aa, synthetic construct
  REGION 1..9: note = Description of Artificial Sequence: Synthetic peptide
LYNTVVVLY

SEQ ID NO: 2679 - protein, 10 aa, synthetic construct
  REGION 1..10: note = Description of Artificial Sequence: Synthetic peptide
FLNKGLGISY

SEQ ID NO: 2680 - protein, 9 aa, synthetic construct
  REGION 1..9: note = Description of Artificial Sequence: Synthetic peptide
GYFPDWQNY

SEQ ID NO: 2681 - protein, 9 aa, synthetic construct
  REGION 1..9: note = Description of Artificial Sequence: Synthetic peptide
SFEPIPIHY

SEQ ID NO: 2682 - protein, 10 aa, synthetic construct
  REGION 1..10: note = Description of Artificial Sequence: Synthetic peptide
VTFEPIPIHY

SEQ ID NO: 2683 - protein, 9 aa, synthetic construct
  REGION 1..9: note = Description of Artificial Sequence: Synthetic peptide
LYNTIAVLY

SEQ ID NO: 2684 - protein, 9 aa, synthetic construct
  REGION 1..9: note = Description of Artificial Sequence: Synthetic peptide
TFEPIPIHY

SEQ ID NO: 2685 - protein, 9 aa, synthetic construct
  REGION 1..9: note = Description of Artificial Sequence: Synthetic peptide
VWTIVFIEY

SEQ ID NO: 2686 - protein, 9 aa, synthetic construct
  REGION 1..9: note = Description of Artificial Sequence: Synthetic peptide
VWTIVFIQY

SEQ ID NO: 2687 - protein, 9 aa, synthetic construct
  REGION 1..9: note = Description of Artificial Sequence: Synthetic peptide
LYNTVVVLY

SEQ ID NO: 2688 - protein, 9 aa, synthetic construct
  REGION 1..9: note = Description of Artificial Sequence: Synthetic peptide
INKGLGISY

SEQ ID NO: 2689 - protein, 10 aa, synthetic construct
  REGION 1..10: note = Description of Artificial Sequence: Synthetic peptide
YFSVPLHEDF

SEQ ID NO: 2690 - protein, 9 aa, synthetic construct
  REGION 1..9: note = Description of Artificial Sequence: Synthetic peptide
VWTVVFIEY

SEQ ID NO: 2691 - protein, 9 aa, synthetic construct
  REGION 1..9: note = Description of Artificial Sequence: Synthetic peptide
NTELIIYQY

SEQ ID NO: 2692 - protein, 10 aa, synthetic construct
  REGION 1..10: note = Description of Artificial Sequence: Synthetic peptide
VVWTIVFIQY

SEQ ID NO: 2693 - protein, 10 aa, synthetic construct
  REGION 1..10: note = Description of Artificial Sequence: Synthetic peptide
SLFGNDPLLQ

SEQ ID NO: 2694 - protein, 9 aa, synthetic construct
  REGION 1..9: note = Description of Artificial Sequence: Synthetic peptide
TNLWVTVYY

SEQ ID NO: 2695 - protein, 9 aa, synthetic construct
  REGION 1..9: note = Description of Artificial Sequence: Synthetic peptide
LNKGLGISY

SEQ ID NO: 2696 - protein, 9 aa, synthetic construct
  REGION 1..9: note = Description of Artificial Sequence: Synthetic peptide
TVLDVGDAY

SEQ ID NO: 2697 - protein, 9 aa, synthetic construct
  REGION 1..9: note = Description of Artificial Sequence: Synthetic peptide
RFGPGQAFY

SEQ ID NO: 2698 - protein, 9 aa, synthetic construct
  REGION 1..9: note = Description of Artificial Sequence: Synthetic peptide
YNTIAVLYY

SEQ ID NO: 2699 - protein, 9 aa, synthetic construct
  REGION 1..9: note = Description of Artificial Sequence: Synthetic peptide
RTKPPLPSV

SEQ ID NO: 2700 - protein, 9 aa, synthetic construct
  REGION 1..9: note = Description of Artificial Sequence: Synthetic peptide
TEAVQKITM

SEQ ID NO: 2701 - protein, 9 aa, synthetic construct
  REGION 1..9: note = Description of Artificial Sequence: Synthetic peptide
GVRPTPPAA

SEQ ID NO: 2702 - protein, 9 aa, synthetic construct
  REGION 1..9: note = Description of Artificial Sequence: Synthetic peptide
TESNDTITL

SEQ ID NO: 2703 - protein, 9 aa, synthetic construct
  REGION 1..9: note = Description of Artificial Sequence: Synthetic peptide
VELVGHSSL

SEQ ID NO: 2704 - protein, 9 aa, synthetic construct
  REGION 1..9: note = Description of Artificial Sequence: Synthetic peptide
EQHTPTISL

SEQ ID NO: 2705 - protein, 11 aa, synthetic construct
  REGION 1..11: note = Description of Artificial Sequence: Synthetic peptide
SERESNDNITL

SEQ ID NO: 2706 - protein, 9 aa, synthetic construct
  REGION 1..9: note = Description of Artificial Sequence: Synthetic peptide
TEAVQKIVM

SEQ ID NO: 2707 - protein, 11 aa, synthetic construct
  REGION 1..11: note = Description of Artificial Sequence: Synthetic peptide
EEIASSSKQEL

SEQ ID NO: 2708 - protein, 11 aa, synthetic construct
  REGION 1..11: note = Description of Artificial Sequence: Synthetic peptide
GTEKQGTTHSY

SEQ ID NO: 2709 - protein, 9 aa, synthetic construct
  REGION 1..9: note = Description of Artificial Sequence: Synthetic peptide
RVMGTQRNY

SEQ ID NO: 2710 - protein, 9 aa, synthetic construct
  REGION 1..9: note = Description of Artificial Sequence: Synthetic peptide
GTEELRSLY

SEQ ID NO: 2711 - protein, 9 aa, synthetic construct
  REGION 1..9: note = Description of Artificial Sequence: Synthetic peptide
TVLDVGDAY

SEQ ID NO: 2712 - protein, 10 aa, synthetic construct
  REGION 1..10: note = Description of Artificial Sequence: Synthetic peptide
ILKDPVHGVY

SEQ ID NO: 2713 - protein, 9 aa, synthetic construct
  REGION 1..9: note = Description of Artificial Sequence: Synthetic peptide
GTEELKSLY

SEQ ID NO: 2714 - protein, 11 aa, synthetic construct
  REGION 1..11: note = Description of Artificial Sequence: Synthetic peptide
QTGTEELKSLY

SEQ ID NO: 2715 - protein, 9 aa, synthetic construct
  REGION 1..9: note = Description of Artificial Sequence: Synthetic peptide
ATNLWVTVY

SEQ ID NO: 2716 - protein, 9 aa, synthetic construct
  REGION 1..9: note = Description of Artificial Sequence: Synthetic peptide
KAQEEHERY

SEQ ID NO: 2717 - protein, 8 aa, synthetic construct
  REGION 1..8: note = Description of Artificial Sequence: Synthetic peptide
KQGTTHSY

SEQ ID NO: 2718 - protein, 9 aa, synthetic construct
  REGION 1..9: note = Description of Artificial Sequence: Synthetic peptide
INKGLGISY

SEQ ID NO: 2719 - protein, 10 aa, synthetic construct
  REGION 1..10: note = Description of Artificial Sequence: Synthetic peptide
RSKNSSYSTY

SEQ ID NO: 2720 - protein, 10 aa, synthetic construct
  REGION 1..10: note = Description of Artificial Sequence: Synthetic peptide
ILKNPVHGVY

SEQ ID NO: 2721 - protein, 9 aa, synthetic construct
  REGION 1..9: note = Description of Artificial Sequence: Synthetic peptide
KAQEEHEKY

SEQ ID NO: 2722 - protein, 11 aa, synthetic construct
  REGION 1..11: note = Description of Artificial Sequence: Synthetic peptide
STNNETPGVRY

SEQ ID NO: 2723 - protein, 9 aa, synthetic construct
  REGION 1..9: note = Description of Artificial Sequence: Synthetic peptide
RVMGTQRNY

SEQ ID NO: 2724 - protein, 9 aa, synthetic construct
  REGION 1..9: note = Description of Artificial Sequence: Synthetic peptide
GTEELRSLY

SEQ ID NO: 2725 - protein, 9 aa, synthetic construct
  REGION 1..9: note = Description of Artificial Sequence: Synthetic peptide
ATNLWVTVY

SEQ ID NO: 2726 - protein, 10 aa, synthetic construct
  REGION 1..10: note = Description of Artificial Sequence: Synthetic peptide
FLNKGLGISY

SEQ ID NO: 2727 - protein, 11 aa, synthetic construct
  REGION 1..11: note = Description of Artificial Sequence: Synthetic peptide
GTEKQGTTHSY

SEQ ID NO: 2728 - protein, 9 aa, synthetic construct
  REGION 1..9: note = Description of Artificial Sequence: Synthetic peptide
VVNRVRQGY

SEQ ID NO: 2729 - protein, 11 aa, synthetic construct
  REGION 1..11: note = Description of Artificial Sequence: Synthetic peptide
QVQNTNIMIQR

SEQ ID NO: 2730 - protein, 10 aa, synthetic construct
  REGION 1..10: note = Description of Artificial Sequence: Synthetic peptide
RTKPPLPSVR

SEQ ID NO: 2731 - protein, 9 aa, synthetic construct
  REGION 1..9: note = Description of Artificial Sequence: Synthetic peptide
QSNPYPTPR

SEQ ID NO: 2732 - protein, 10 aa, synthetic construct
  REGION 1..10: note = Description of Artificial Sequence: Synthetic peptide
VQNTNIMIQR

SEQ ID NO: 2733 - protein, 9 aa, synthetic construct
  REGION 1..9: note = Description of Artificial Sequence: Synthetic peptide
SYNTTTILR

SEQ ID NO: 2734 - protein, 9 aa, synthetic construct
  REGION 1..9: note = Description of Artificial Sequence: Synthetic peptide
QSNPYPKPR

SEQ ID NO: 2735 - protein, 10 aa, synthetic construct
  REGION 1..10: note = Description of Artificial Sequence: Synthetic peptide
STNQNVMMQR

SEQ ID NO: 2736 - protein, 10 aa, synthetic construct
  REGION 1..10: note = Description of Artificial Sequence: Synthetic peptide
STNTNIMMQR

SEQ ID NO: 2737 - protein, 11 aa, synthetic construct
  REGION 1..11: note = Description of Artificial Sequence: Synthetic peptide
RSKNSSYSTYR

SEQ ID NO: 2738 - protein, 11 aa, synthetic construct
  REGION 1..11: note = Description of Artificial Sequence: Synthetic peptide
RVIEIGQRAFR

SEQ ID NO: 2739 - protein, 11 aa, synthetic construct
  REGION 1..11: note = Description of Artificial Sequence: Synthetic peptide
RQRQIDSISER

SEQ ID NO: 2740 - protein, 9 aa, synthetic construct
  REGION 1..9: note = Description of Artificial Sequence: Synthetic peptide
KGWPAVRER

SEQ ID NO: 2741 - protein, 9 aa, synthetic construct
  REGION 1..9: note = Description of Artificial Sequence: Synthetic peptide
GTRGAVTIR

SEQ ID NO: 2742 - protein, 9 aa, synthetic construct
  REGION 1..9: note = Description of Artificial Sequence: Synthetic peptide
TNQNVMMQR

SEQ ID NO: 2743 - protein, 9 aa, synthetic construct
  REGION 1..9: note = Description of Artificial Sequence: Synthetic peptide
RQIDSISER

SEQ ID NO: 2744 - protein, 9 aa, synthetic construct
  REGION 1..9: note = Description of Artificial Sequence: Synthetic peptide
VVLYWVHQR

SEQ ID NO: 2745 - protein, 9 aa, synthetic construct
  REGION 1..9: note = Description of Artificial Sequence: Synthetic peptide
KQIINMWQR

SEQ ID NO: 2746 - protein, 11 aa, synthetic construct
  REGION 1..11: note = Description of Artificial Sequence: Synthetic peptide
TVNDIQKLVGK

SEQ ID NO: 2747 - protein, 9 aa, synthetic construct
  REGION 1..9: note = Description of Artificial Sequence: Synthetic peptide
KGLGISYGR

SEQ ID NO: 2748 - protein, 9 aa, synthetic construct
  REGION 1..9: note = Description of Artificial Sequence: Synthetic peptide
SNYTNIIYR

SEQ ID NO: 2749 - protein, 9 aa, synthetic construct
  REGION 1..9: note = Description of Artificial Sequence: Synthetic peptide
TVKIEGQLR

SEQ ID NO: 2750 - protein, 8 aa, synthetic construct
  REGION 1..8: note = Description of Artificial Sequence: Synthetic peptide
NQNVMMQR

SEQ ID NO: 2751 - protein, 9 aa, synthetic construct
  REGION 1..9: note = Description of Artificial Sequence: Synthetic peptide
VYYGVPVWR

SEQ ID NO: 2752 - protein, 9 aa, synthetic construct
  REGION 1..9: note = Description of Artificial Sequence: Synthetic peptide
ILNIPTRIR

SEQ ID NO: 2753 - protein, 11 aa, synthetic construct
  REGION 1..11: note = Description of Artificial Sequence: Synthetic peptide
VGPTPVNIIGR

SEQ ID NO: 2754 - protein, 8 aa, synthetic construct
  REGION 1..8: note = Description of Artificial Sequence: Synthetic peptide
NTNIMMQR

SEQ ID NO: 2755 - protein, 10 aa, synthetic construct
  REGION 1..10: note = Description of Artificial Sequence: Synthetic peptide
ALKAVVASTR

SEQ ID NO: 2756 - protein, 9 aa, synthetic construct
  REGION 1..9: note = Description of Artificial Sequence: Synthetic peptide
QIYAGIKVR

SEQ ID NO: 2757 - protein, 11 aa, synthetic construct
  REGION 1..11: note = Description of Artificial Sequence: Synthetic peptide
RQRHISSISER

SEQ ID NO: 2758 - protein, 9 aa, synthetic construct
  REGION 1..9: note = Description of Artificial Sequence: Synthetic peptide
VVNRVRQGY

SEQ ID NO: 2759 - protein, 9 aa, synthetic construct
  REGION 1..9: note = Description of Artificial Sequence: Synthetic peptide
VINRVRQGY

SEQ ID NO: 2760 - protein, 10 aa, synthetic construct
  REGION 1..10: note = Description of Artificial Sequence: Synthetic peptide
SVINRVRQGY

SEQ ID NO: 2761 - protein, 9 aa, synthetic construct
  REGION 1..9: note = Description of Artificial Sequence: Synthetic peptide
RVMGTQRNY

SEQ ID NO: 2762 - protein, 11 aa, synthetic construct
  REGION 1..11: note = Description of Artificial Sequence: Synthetic peptide
DTREGVEAIVR

SEQ ID NO: 2763 - protein, 9 aa, synthetic construct
  REGION 1..9: note = Description of Artificial Sequence: Synthetic peptide
SYNTTTILR

SEQ ID NO: 2764 - protein, 11 aa, synthetic construct
  REGION 1..11: note = Description of Artificial Sequence: Synthetic peptide
ETFYVDGAANR

SEQ ID NO: 2765 - protein, 10 aa, synthetic construct
  REGION 1..10: note = Description of Artificial Sequence: Synthetic peptide
DNSDIKVVPR

SEQ ID NO: 2766 - protein, 9 aa, synthetic construct
  REGION 1..9: note = Description of Artificial Sequence: Synthetic peptide
TNQNVMMQR

SEQ ID NO: 2767 - protein, 11 aa, synthetic construct
  REGION 1..11: note = Description of Artificial Sequence: Synthetic peptide
DTEELSALVER

SEQ ID NO: 2768 - protein, 11 aa, synthetic construct
  REGION 1..11: note = Description of Artificial Sequence: Synthetic peptide
DTLQKVAEQLR

SEQ ID NO: 2769 - protein, 9 aa, synthetic construct
  REGION 1..9: note = Description of Artificial Sequence: Synthetic peptide
QNTNIMIQR

SEQ ID NO: 2770 - protein, 9 aa, synthetic construct
  REGION 1..9: note = Description of Artificial Sequence: Synthetic peptide
DIQTKELQR

SEQ ID NO: 2771 - protein, 9 aa, synthetic construct
  REGION 1..9: note = Description of Artificial Sequence: Synthetic peptide
TNTNIMMQR

SEQ ID NO: 2772 - protein, 9 aa, synthetic construct
  REGION 1..9: note = Description of Artificial Sequence: Synthetic peptide
SNYTNIIYR

SEQ ID NO: 2773 - protein, 10 aa, synthetic construct
  REGION 1..10: note = Description of Artificial Sequence: Synthetic peptide
DNGDIKVVPR

SEQ ID NO: 2774 - protein, 11 aa, synthetic construct
  REGION 1..11: note = Description of Artificial Sequence: Synthetic peptide
DVKQLTEAVQK

SEQ ID NO: 2775 - protein, 9 aa, synthetic construct
  REGION 1..9: note = Description of Artificial Sequence: Synthetic peptide
QSNPYPTPR

SEQ ID NO: 2776 - protein, 9 aa, synthetic construct
  REGION 1..9: note = Description of Artificial Sequence: Synthetic peptide
DAKAYATEK

SEQ ID NO: 2777 - protein, 11 aa, synthetic construct
  REGION 1..11: note = Description of Artificial Sequence: Synthetic peptide
DTGSSSSQNYR

SEQ ID NO: 2778 - protein, 11 aa, synthetic construct
  REGION 1..11: note = Description of Artificial Sequence: Synthetic peptide
QVQNTNIMIQR

SEQ ID NO: 2779 - protein, 9 aa, synthetic construct
  REGION 1..9: note = Description of Artificial Sequence: Synthetic peptide
DTQPYRLIR

SEQ ID NO: 2780 - protein, 9 aa, synthetic construct
  REGION 1..9: note = Description of Artificial Sequence: Synthetic peptide
DGLIYSQKR

SEQ ID NO: 2781 - protein, 9 aa, synthetic construct
  REGION 1..9: note = Description of Artificial Sequence: Synthetic peptide
DSISERVLR

SEQ ID NO: 2782 - protein, 11 aa, synthetic construct
  REGION 1..11: note = Description of Artificial Sequence: Synthetic peptide
EPLGIAPTKAR

SEQ ID NO: 2783 - protein, 9 aa, synthetic construct
  REGION 1..9: note = Description of Artificial Sequence: Synthetic peptide
NITGIILTR

SEQ ID NO: 2784 - protein, 8 aa, synthetic construct
  REGION 1..8: note = Description of Artificial Sequence: Synthetic peptide
NTNIMIQR

SEQ ID NO: 2785 - protein, 9 aa, synthetic construct
  REGION 1..9: note = Description of Artificial Sequence: Synthetic peptide
DAWEKIRLR

SEQ ID NO: 2786 - protein, 9 aa, synthetic construct
  REGION 1..9: note = Description of Artificial Sequence: Synthetic peptide
QARVLAVER

SEQ ID NO: 2787 - protein, 11 aa, synthetic construct
  REGION 1..11: note = Description of Artificial Sequence: Synthetic peptide
EARKFSSEQNR

SEQ ID NO: 2788 - protein, 11 aa, synthetic construct
  REGION 1..11: note = Description of Artificial Sequence: Synthetic peptide
DLGTRGAVTIR

SEQ ID NO: 2789 - protein, 9 aa, synthetic construct
  REGION 1..9: note = Description of Artificial Sequence: Synthetic peptide
DSHLALRHR

SEQ ID NO: 2790 - protein, 10 aa, synthetic construct
  REGION 1..10: note = Description of Artificial Sequence: Synthetic peptide
STNQNVMMQR

SEQ ID NO: 2791 - protein, 9 aa, synthetic construct
  REGION 1..9: note = Description of Artificial Sequence: Synthetic peptide
QSNPYPKPR

SEQ ID NO: 2792 - protein, 9 aa, synthetic construct
  REGION 1..9: note = Description of Artificial Sequence: Synthetic peptide
NITGMILTR

SEQ ID NO: 2793 - protein, 9 aa, synthetic construct
  REGION 1..9: note = Description of Artificial Sequence: Synthetic peptide
MVHQAISPR

SEQ ID NO: 2794 - protein, 11 aa, synthetic construct
  REGION 1..11: note = Description of Artificial Sequence: Synthetic peptide
ETFYVDGAANR

SEQ ID NO: 2795 - protein, 9 aa, synthetic construct
  REGION 1..9: note = Description of Artificial Sequence: Synthetic peptide
SYNTTTILR

SEQ ID NO: 2796 - protein, 9 aa, synthetic construct
  REGION 1..9: note = Description of Artificial Sequence: Synthetic peptide
TNQNVMMQR

SEQ ID NO: 2797 - protein, 9 aa, synthetic construct
  REGION 1..9: note = Description of Artificial Sequence: Synthetic peptide
QNTNIMIQR

SEQ ID NO: 2798 - protein, 9 aa, synthetic construct
  REGION 1..9: note = Description of Artificial Sequence: Synthetic peptide
TNTNIMMQR

SEQ ID NO: 2799 - protein, 9 aa, synthetic construct
  REGION 1..9: note = Description of Artificial Sequence: Synthetic peptide
QSNPYPTPR

SEQ ID NO: 2800 - protein, 9 aa, synthetic construct
  REGION 1..9: note = Description of Artificial Sequence: Synthetic peptide
EYKKIKKQR

SEQ ID NO: 2801 - protein, 9 aa, synthetic construct
  REGION 1..9: note = Description of Artificial Sequence: Synthetic peptide
MVHQAISPR

SEQ ID NO: 2802 - protein, 11 aa, synthetic construct
  REGION 1..11: note = Description of Artificial Sequence: Synthetic peptide
QVQNTNIMIQR

SEQ ID NO: 2803 - protein, 9 aa, synthetic construct
  REGION 1..9: note = Description of Artificial Sequence: Synthetic peptide
QSNPYPKPR

SEQ ID NO: 2804 - protein, 9 aa, synthetic construct
  REGION 1..9: note = Description of Artificial Sequence: Synthetic peptide
SNYTNIIYR

SEQ ID NO: 2805 - protein, 10 aa, synthetic construct
  REGION 1..10: note = Description of Artificial Sequence: Synthetic peptide
DNSDIKVVPR

SEQ ID NO: 2806 - protein, 9 aa, synthetic construct
  REGION 1..9: note = Description of Artificial Sequence: Synthetic peptide
MVHQAVSPR

SEQ ID NO: 2807 - protein, 9 aa, synthetic construct
  REGION 1..9: note = Description of Artificial Sequence: Synthetic peptide
QARVLAVER

SEQ ID NO: 2808 - protein, 8 aa, synthetic construct
  REGION 1..8: note = Description of Artificial Sequence: Synthetic peptide
NTNIMIQR

SEQ ID NO: 2809 - protein, 8 aa, synthetic construct
  REGION 1..8: note = Description of Artificial Sequence: Synthetic peptide
NTNIMMQR

SEQ ID NO: 2810 - protein, 9 aa, synthetic construct
  REGION 1..9: note = Description of Artificial Sequence: Synthetic peptide
FYVDGAANR

SEQ ID NO: 2811 - protein, 10 aa, synthetic construct
  REGION 1..10: note = Description of Artificial Sequence: Synthetic peptide
STNTNIMMQR

SEQ ID NO: 2812 - protein, 11 aa, synthetic construct
  REGION 1..11: note = Description of Artificial Sequence: Synthetic peptide
DTGSSSSQNYR

SEQ ID NO: 2813 - protein, 11 aa, synthetic construct
  REGION 1..11: note = Description of Artificial Sequence: Synthetic peptide
DTLQKVAEQLR

SEQ ID NO: 2814 - protein, 11 aa, synthetic construct
  REGION 1..11: note = Description of Artificial Sequence: Synthetic peptide
TVNDIQKLVGK

SEQ ID NO: 2815 - protein, 9 aa, synthetic construct
  REGION 1..9: note = Description of Artificial Sequence: Synthetic peptide
EQSLPHAQR

SEQ ID NO: 2816 - protein, 11 aa, synthetic construct
  REGION 1..11: note = Description of Artificial Sequence: Synthetic peptide
EPLGIAPTKAR

SEQ ID NO: 2817 - protein, 11 aa, synthetic construct
  REGION 1..11: note = Description of Artificial Sequence: Synthetic peptide
EARKFSSEQNR

SEQ ID NO: 2818 - protein, 10 aa, synthetic construct
  REGION 1..10: note = Description of Artificial Sequence: Synthetic peptide
STNQNVMMQR

SEQ ID NO: 2819 - protein, 11 aa, synthetic construct
  REGION 1..11: note = Description of Artificial Sequence: Synthetic peptide
EARKLSPEQNR

SEQ ID NO: 2820 - protein, 9 aa, synthetic construct
  REGION 1..9: note = Description of Artificial Sequence: Synthetic peptide
EYRKIKKQR

SEQ ID NO: 2821 - protein, 9 aa, synthetic construct
  REGION 1..9: note = Description of Artificial Sequence: Synthetic peptide
QYKELKKQR

SEQ ID NO: 2822 - protein, 9 aa, synthetic construct
  REGION 1..9: note = Description of Artificial Sequence: Synthetic peptide
QARVLAIER

SEQ ID NO: 2823 - protein, 10 aa, synthetic construct
  REGION 1..10: note = Description of Artificial Sequence: Synthetic peptide
EVHIPLGEAR

SEQ ID NO: 2824 - protein, 9 aa, synthetic construct
  REGION 1..9: note = Description of Artificial Sequence: Synthetic peptide
NNKIIGDIR

SEQ ID NO: 2825 - protein, 11 aa, synthetic construct
  REGION 1..11: note = Description of Artificial Sequence: Synthetic peptide
DTREGVEAIVR

SEQ ID NO: 2826 - protein, 10 aa, synthetic construct
  REGION 1..10: note = Description of Artificial Sequence: Synthetic peptide
DNGDIKVVPR

SEQ ID NO: 2827 - protein, 9 aa, synthetic construct
  REGION 1..9: note = Description of Artificial Sequence: Synthetic peptide
NSDIKVVPR

SEQ ID NO: 2828 - protein, 9 aa, synthetic construct
  REGION 1..9: note = Description of Artificial Sequence: Synthetic peptide
NITGIILTR

SEQ ID NO: 2829 - protein, 8 aa, synthetic construct
  REGION 1..8: note = Description of Artificial Sequence: Synthetic peptide
NQNVMMQR

SEQ ID NO: 2830 - protein, 11 aa, synthetic construct
  REGION 1..11: note = Description of Artificial Sequence: Synthetic peptide
EPLGIAPTEAR

SEQ ID NO: 2831 - protein, 9 aa, synthetic construct
  REGION 1..9: note = Description of Artificial Sequence: Synthetic peptide
QIYAGIKVR

SEQ ID NO: 2832 - protein, 10 aa, synthetic construct
  REGION 1..10: note = Description of Artificial Sequence: Synthetic peptide
SNITGIILTR

SEQ ID NO: 2833 - protein, 9 aa, synthetic construct
  REGION 1..9: note = Description of Artificial Sequence: Synthetic peptide
TVKIEGQLR

SEQ ID NO: 2834 - protein, 10 aa, synthetic construct
  REGION 1..10: note = Description of Artificial Sequence: Synthetic peptide
EQHTPTISLR

SEQ ID NO: 2835 - protein, 8 aa, synthetic construct
  REGION 1..8: note = Description of Artificial Sequence: Synthetic peptide
ENLAFQQR

SEQ ID NO: 2836 - protein, 10 aa, synthetic construct
  REGION 1..10: note = Description of Artificial Sequence: Synthetic peptide
ELKKIIGQVR

SEQ ID NO: 2837 - protein, 9 aa, synthetic construct
  REGION 1..9: note = Description of Artificial Sequence: Synthetic peptide
IIGEIVSPR

SEQ ID NO: 2838 - protein, 11 aa, synthetic construct
  REGION 1..11: note = Description of Artificial Sequence: Synthetic peptide
ETFRPGGGDMR

SEQ ID NO: 2839 - protein, 9 aa, synthetic construct
  REGION 1..9: note = Description of Artificial Sequence: Synthetic peptide
EFDRSLARR

SEQ ID NO: 2840 - protein, 9 aa, synthetic construct
  REGION 1..9: note = Description of Artificial Sequence: Synthetic peptide
ELDVVLLNR

SEQ ID NO: 2841 - protein, 11 aa, synthetic construct
  REGION 1..11: note = Description of Artificial Sequence: Synthetic peptide
ESNDTITLQCR

SEQ ID NO: 2842 - protein, 11 aa, synthetic construct
  REGION 1..11: note = Description of Artificial Sequence: Synthetic peptide
DTEELSALVER

SEQ ID NO: 2843 - protein, 9 aa, synthetic construct
  REGION 1..9: note = Description of Artificial Sequence: Synthetic peptide
FNLPPIVAK

SEQ ID NO: 2844 - protein, 9 aa, synthetic construct
  REGION 1..9: note = Description of Artificial Sequence: Synthetic peptide
GTRGAVTIR

SEQ ID NO: 2845 - protein, 9 aa, synthetic construct
  REGION 1..9: note = Description of Artificial Sequence: Synthetic peptide
NITGMILTR

SEQ ID NO: 2846 - protein, 11 aa, synthetic construct
  REGION 1..11: note = Description of Artificial Sequence: Synthetic peptide
EISNYTNIIYR

SEQ ID NO: 2847 - protein, 10 aa, synthetic construct
  REGION 1..10: note = Description of Artificial Sequence: Synthetic peptide
MRRTPPTAQR

SEQ ID NO: 2848 - protein, 9 aa, synthetic construct
  REGION 1..9: note = Description of Artificial Sequence: Synthetic peptide
DSISERVLR

SEQ ID NO: 2849 - protein, 9 aa, synthetic construct
  REGION 1..9: note = Description of Artificial Sequence: Synthetic peptide
EAMSQIHST

SEQ ID NO: 2850 - protein, 10 aa, synthetic construct
  REGION 1..10: note = Description of Artificial Sequence: Synthetic peptide
EVHIPLKEAR

SEQ ID NO: 2851 - protein, 9 aa, synthetic construct
  REGION 1..9: note = Description of Artificial Sequence: Synthetic peptide
EPVQINCTR

SEQ ID NO: 2852 - protein, 11 aa, synthetic construct
  REGION 1..11: note = Description of Artificial Sequence: Synthetic peptide
ETFYVDGAANR

SEQ ID NO: 2853 - protein, 11 aa, synthetic construct
  REGION 1..11: note = Description of Artificial Sequence: Synthetic peptide
QVQNTNIMIQR

SEQ ID NO: 2854 - protein, 9 aa, synthetic construct
  REGION 1..9: note = Description of Artificial Sequence: Synthetic peptide
NITGIILTR

SEQ ID NO: 2855 - protein, 10 aa, synthetic construct
  REGION 1..10: note = Description of Artificial Sequence: Synthetic peptide
STNTNIMMQR

SEQ ID NO: 2856 - protein, 10 aa, synthetic construct
  REGION 1..10: note = Description of Artificial Sequence: Synthetic peptide
STNQNVMMQR

SEQ ID NO: 2857 - protein, 9 aa, synthetic construct
  REGION 1..9: note = Description of Artificial Sequence: Synthetic peptide
QNTNIMIQR

SEQ ID NO: 2858 - protein, 10 aa, synthetic construct
  REGION 1..10: note = Description of Artificial Sequence: Synthetic peptide
NTSGSNTLYR

SEQ ID NO: 2859 - protein, 11 aa, synthetic construct
  REGION 1..11: note = Description of Artificial Sequence: Synthetic peptide
DTGSSSSQNYR

SEQ ID NO: 2860 - protein, 11 aa, synthetic construct
  REGION 1..11: note = Description of Artificial Sequence: Synthetic peptide
DTEELSALVER

SEQ ID NO: 2861 - protein, 9 aa, synthetic construct
  REGION 1..9: note = Description of Artificial Sequence: Synthetic peptide
EIVNQIIEK

SEQ ID NO: 2862 - protein, 10 aa, synthetic construct
  REGION 1..10: note = Description of Artificial Sequence: Synthetic peptide
DNSDIKVVPR

SEQ ID NO: 2863 - protein, 9 aa, synthetic construct
  REGION 1..9: note = Description of Artificial Sequence: Synthetic peptide
TNTNIMMQR

SEQ ID NO: 2864 - protein, 11 aa, synthetic construct
  REGION 1..11: note = Description of Artificial Sequence: Synthetic peptide
EISNYTNIIYR

SEQ ID NO: 2865 - protein, 11 aa, synthetic construct
  REGION 1..11: note = Description of Artificial Sequence: Synthetic peptide
TVNDIQKLVGK

SEQ ID NO: 2866 - protein, 11 aa, synthetic construct
  REGION 1..11: note = Description of Artificial Sequence: Synthetic peptide
ETFRPGGGDMR

SEQ ID NO: 2867 - protein, 9 aa, synthetic construct
  REGION 1..9: note = Description of Artificial Sequence: Synthetic peptide
EPVQINCTR

SEQ ID NO: 2868 - protein, 9 aa, synthetic construct
  REGION 1..9: note = Description of Artificial Sequence: Synthetic peptide
NITGMILTR

SEQ ID NO: 2869 - protein, 11 aa, synthetic construct
  REGION 1..11: note = Description of Artificial Sequence: Synthetic peptide
QSTNTNIMMQR

SEQ ID NO: 2870 - protein, 10 aa, synthetic construct
  REGION 1..10: note = Description of Artificial Sequence: Synthetic peptide
DCFSESAIRR

SEQ ID NO: 2871 - protein, 11 aa, synthetic construct
  REGION 1..11: note = Description of Artificial Sequence: Synthetic peptide
EIASSSKQELR

SEQ ID NO: 2872 - protein, 11 aa, synthetic construct
  REGION 1..11: note = Description of Artificial Sequence: Synthetic peptide
DTREGVEAIVR

SEQ ID NO: 2873 - protein, 9 aa, synthetic construct
  REGION 1..9: note = Description of Artificial Sequence: Synthetic peptide
QSNPYPTPR

SEQ ID NO: 2874 - protein, 11 aa, synthetic construct
  REGION 1..11: note = Description of Artificial Sequence: Synthetic peptide
DSFLVEAGTEK

SEQ ID NO: 2875 - protein, 9 aa, synthetic construct
  REGION 1..9: note = Description of Artificial Sequence: Synthetic peptide
ELVNQIIEK

SEQ ID NO: 2876 - protein, 9 aa, synthetic construct
  REGION 1..9: note = Description of Artificial Sequence: Synthetic peptide
DSISERVLR

SEQ ID NO: 2877 - protein, 10 aa, synthetic construct
  REGION 1..10: note = Description of Artificial Sequence: Synthetic peptide
EVNIVTDSQY

SEQ ID NO: 2878 - protein, 9 aa, synthetic construct
  REGION 1..9: note = Description of Artificial Sequence: Synthetic peptide
EPLGVAPTR

SEQ ID NO: 2879 - protein, 9 aa, synthetic construct
  REGION 1..9: note = Description of Artificial Sequence: Synthetic peptide
NSDIKVVPR

SEQ ID NO: 2880 - protein, 9 aa, synthetic construct
  REGION 1..9: note = Description of Artificial Sequence: Synthetic peptide
IIGEIVSPR

SEQ ID NO: 2881 - protein, 9 aa, synthetic construct
  REGION 1..9: note = Description of Artificial Sequence: Synthetic peptide
IVIEICEKR

SEQ ID NO: 2882 - protein, 9 aa, synthetic construct
  REGION 1..9: note = Description of Artificial Sequence: Synthetic peptide
TSGSNTLYR

SEQ ID NO: 2883 - protein, 10 aa, synthetic construct
  REGION 1..10: note = Description of Artificial Sequence: Synthetic peptide
SNITGIILTR

SEQ ID NO: 2884 - protein, 10 aa, synthetic construct
  REGION 1..10: note = Description of Artificial Sequence: Synthetic peptide
ASITLTVQAR

SEQ ID NO: 2885 - protein, 11 aa, synthetic construct
  REGION 1..11: note = Description of Artificial Sequence: Synthetic peptide
IVSLTETTNQR

SEQ ID NO: 2886 - protein, 9 aa, synthetic construct
  REGION 1..9: note = Description of Artificial Sequence: Synthetic peptide
TNQNVMMQR

SEQ ID NO: 2887 - protein, 9 aa, synthetic construct
  REGION 1..9: note = Description of Artificial Sequence: Synthetic peptide
FAIITVVNR

SEQ ID NO: 2888 - protein, 11 aa, synthetic construct
  REGION 1..11: note = Description of Artificial Sequence: Synthetic peptide
DVKQLTEAVQK

SEQ ID NO: 2889 - protein, 9 aa, synthetic construct
  REGION 1..9: note = Description of Artificial Sequence: Synthetic peptide
MVHQAVSPR

SEQ ID NO: 2890 - protein, 10 aa, synthetic construct
  REGION 1..10: note = Description of Artificial Sequence: Synthetic peptide
DTIAVAVAEW

SEQ ID NO: 2891 - protein, 10 aa, synthetic construct
  REGION 1..10: note = Description of Artificial Sequence: Synthetic peptide
DNGDIKVVPR

SEQ ID NO: 2892 - protein, 9 aa, synthetic construct
  REGION 1..9: note = Description of Artificial Sequence: Synthetic peptide
SNYTNIIYR

SEQ ID NO: 2893 - protein, 11 aa, synthetic construct
  REGION 1..11: note = Description of Artificial Sequence: Synthetic peptide
TSNITGIILTR

SEQ ID NO: 2894 - protein, 10 aa, synthetic construct
  REGION 1..10: note = Description of Artificial Sequence: Synthetic peptide
TGSSSSQNYR

SEQ ID NO: 2895 - protein, 11 aa, synthetic construct
  REGION 1..11: note = Description of Artificial Sequence: Synthetic peptide
QSQGAETGVGR

SEQ ID NO: 2896 - protein, 8 aa, synthetic construct
  REGION 1..8: note = Description of Artificial Sequence: Synthetic peptide
TDIVPLTR

SEQ ID NO: 2897 - protein, 11 aa, synthetic construct
  REGION 1..11: note = Description of Artificial Sequence: Synthetic peptide
DTLQKVAEQLR

SEQ ID NO: 2898 - protein, 11 aa, synthetic construct
  REGION 1..11: note = Description of Artificial Sequence: Synthetic peptide
TSNITGMILTR

SEQ ID NO: 2899 - protein, 11 aa, synthetic construct
  REGION 1..11: note = Description of Artificial Sequence: Synthetic peptide
HSTNQNVMMQR

SEQ ID NO: 2900 - protein, 9 aa, synthetic construct
  REGION 1..9: note = Description of Artificial Sequence: Synthetic peptide
MVHQAISPR

SEQ ID NO: 2901 - protein, 11 aa, synthetic construct
  REGION 1..11: note = Description of Artificial Sequence: Synthetic peptide
IVIAIISVVKR

SEQ ID NO: 2902 - protein, 11 aa, synthetic construct
  REGION 1..11: note = Description of Artificial Sequence: Synthetic peptide
QSQGTETGVGR

SEQ ID NO: 2903 - protein, 10 aa, synthetic construct
  REGION 1..10: note = Description of Artificial Sequence: Synthetic peptide
DIIATDIQTK

SEQ ID NO: 2904 - protein, 9 aa, synthetic construct
  REGION 1..9: note = Description of Artificial Sequence: Synthetic peptide
SYNTTTILR

SEQ ID NO: 2905 - protein, 11 aa, synthetic construct
  REGION 1..11: note = Description of Artificial Sequence: Synthetic peptide
VGPTPVNIIGR

SEQ ID NO: 2906 - protein, 10 aa, synthetic construct
  REGION 1..10: note = Description of Artificial Sequence: Synthetic peptide
AIIGEIVSPR

SEQ ID NO: 2907 - protein, 9 aa, synthetic construct
  REGION 1..9: note = Description of Artificial Sequence: Synthetic peptide
IAIISVVKR

SEQ ID NO: 2908 - protein, 10 aa, synthetic construct
  REGION 1..10: note = Description of Artificial Sequence: Synthetic peptide
VQNTNIMIQR

SEQ ID NO: 2909 - protein, 9 aa, synthetic construct
  REGION 1..9: note = Description of Artificial Sequence: Synthetic peptide
ETAYFILKL

SEQ ID NO: 2910 - protein, 9 aa, synthetic construct
  REGION 1..9: note = Description of Artificial Sequence: Synthetic peptide
ETAYFLLKL

SEQ ID NO: 2911 - protein, 9 aa, synthetic construct
  REGION 1..9: note = Description of Artificial Sequence: Synthetic peptide
NTIAVLYYV

SEQ ID NO: 2912 - protein, 9 aa, synthetic construct
  REGION 1..9: note = Description of Artificial Sequence: Synthetic peptide
DTAYFILKL

SEQ ID NO: 2913 - protein, 9 aa, synthetic construct
  REGION 1..9: note = Description of Artificial Sequence: Synthetic peptide
EVYSLFYKL

SEQ ID NO: 2914 - protein, 9 aa, synthetic construct
  REGION 1..9: note = Description of Artificial Sequence: Synthetic peptide
NTIAVLYFV

SEQ ID NO: 2915 - protein, 9 aa, synthetic construct
  REGION 1..9: note = Description of Artificial Sequence: Synthetic peptide
IVIAIISVV

SEQ ID NO: 2916 - protein, 9 aa, synthetic construct
  REGION 1..9: note = Description of Artificial Sequence: Synthetic peptide
NTSTITQAC

SEQ ID NO: 2917 - protein, 9 aa, synthetic construct
  REGION 1..9: note = Description of Artificial Sequence: Synthetic peptide
HISSISERI

SEQ ID NO: 2918 - protein, 9 aa, synthetic construct
  REGION 1..9: note = Description of Artificial Sequence: Synthetic peptide
NTSVITQAC

SEQ ID NO: 2919 - protein, 9 aa, synthetic construct
  REGION 1..9: note = Description of Artificial Sequence: Synthetic peptide
EVIPMFTAL

SEQ ID NO: 2920 - protein, 11 aa, synthetic construct
  REGION 1..11: note = Description of Artificial Sequence: Synthetic peptide
DIVQINSTDNV

SEQ ID NO: 2921 - protein, 9 aa, synthetic construct
  REGION 1..9: note = Description of Artificial Sequence: Synthetic peptide
TVNDIQKLV

SEQ ID NO: 2922 - protein, 9 aa, synthetic construct
  REGION 1..9: note = Description of Artificial Sequence: Synthetic peptide
KAADLWVTV

SEQ ID NO: 2923 - protein, 9 aa, synthetic construct
  REGION 1..9: note = Description of Artificial Sequence: Synthetic peptide
IVFAIITVV

SEQ ID NO: 2924 - protein, 9 aa, synthetic construct
  REGION 1..9: note = Description of Artificial Sequence: Synthetic peptide
YTAFTIPSI

SEQ ID NO: 2925 - protein, 9 aa, synthetic construct
  REGION 1..9: note = Description of Artificial Sequence: Synthetic peptide
AVAEWTDRV

SEQ ID NO: 2926 - protein, 9 aa, synthetic construct
  REGION 1..9: note = Description of Artificial Sequence: Synthetic peptide
GAASITLTV

SEQ ID NO: 2927 - protein, 9 aa, synthetic construct
  REGION 1..9: note = Description of Artificial Sequence: Synthetic peptide
TTSTLQEQI

SEQ ID NO: 2928 - protein, 10 aa, synthetic construct
  REGION 1..10: note = Description of Artificial Sequence: Synthetic peptide
ESSGILGSGI

SEQ ID NO: 2929 - protein, 9 aa, synthetic construct
  REGION 1..9: note = Description of Artificial Sequence: Synthetic peptide
IVNQIIEKL

SEQ ID NO: 2930 - protein, 9 aa, synthetic construct
  REGION 1..9: note = Description of Artificial Sequence: Synthetic peptide
EISNYTETI

SEQ ID NO: 2931 - protein, 9 aa, synthetic construct
  REGION 1..9: note = Description of Artificial Sequence: Synthetic peptide
EVIPMFSAL

SEQ ID NO: 2932 - protein, 9 aa, synthetic construct
  REGION 1..9: note = Description of Artificial Sequence: Synthetic peptide
EIIGDIRQA

SEQ ID NO: 2933 - protein, 9 aa, synthetic construct
  REGION 1..9: note = Description of Artificial Sequence: Synthetic peptide
DTITLQCRI

SEQ ID NO: 2934 - protein, 10 aa, synthetic construct
  REGION 1..10: note = Description of Artificial Sequence: Synthetic peptide
EIVNQIIEKL

SEQ ID NO: 2935 - protein, 9 aa, synthetic construct
  REGION 1..9: note = Description of Artificial Sequence: Synthetic peptide
TQSPINEEI

SEQ ID NO: 2936 - protein, 9 aa, synthetic construct
  REGION 1..9: note = Description of Artificial Sequence: Synthetic peptide
ETTNQRTEL

SEQ ID NO: 2937 - protein, 9 aa, synthetic construct
  REGION 1..9: note = Description of Artificial Sequence: Synthetic peptide
SAISLFDTI

SEQ ID NO: 2938 - protein, 11 aa, synthetic construct
  REGION 1..11: note = Description of Artificial Sequence: Synthetic peptide
ETFYVDGAANR

SEQ ID NO: 2939 - protein, 9 aa, synthetic construct
  REGION 1..9: note = Description of Artificial Sequence: Synthetic peptide
DVKQLTEAV

SEQ ID NO: 2940 - protein, 9 aa, synthetic construct
  REGION 1..9: note = Description of Artificial Sequence: Synthetic peptide
MTSNPPIPV

SEQ ID NO: 2941 - protein, 9 aa, synthetic construct
  REGION 1..9: note = Description of Artificial Sequence: Synthetic peptide
LVNQIIEKL

SEQ ID NO: 2942 - protein, 9 aa, synthetic construct
  REGION 1..9: note = Description of Artificial Sequence: Synthetic peptide
IAARIVELV

SEQ ID NO: 2943 - protein, 9 aa, synthetic construct
  REGION 1..9: note = Description of Artificial Sequence: Synthetic peptide
MTSDPPIPV

SEQ ID NO: 2944 - protein, 10 aa, synthetic construct
  REGION 1..10: note = Description of Artificial Sequence: Synthetic peptide
DTIAVAVAEW

SEQ ID NO: 2945 - protein, 9 aa, synthetic construct
  REGION 1..9: note = Description of Artificial Sequence: Synthetic peptide
DIAGATSNL

SEQ ID NO: 2946 - protein, 9 aa, synthetic construct
  REGION 1..9: note = Description of Artificial Sequence: Synthetic peptide
KATDLWVTV

SEQ ID NO: 2947 - protein, 9 aa, synthetic construct
  REGION 1..9: note = Description of Artificial Sequence: Synthetic peptide
SPAIFQSSM

SEQ ID NO: 2948 - protein, 9 aa, synthetic construct
  REGION 1..9: note = Description of Artificial Sequence: Synthetic peptide
VPLTREAEL

SEQ ID NO: 2949 - protein, 9 aa, synthetic construct
  REGION 1..9: note = Description of Artificial Sequence: Synthetic peptide
TPTISLRSL

SEQ ID NO: 2950 - protein, 9 aa, synthetic construct
  REGION 1..9: note = Description of Artificial Sequence: Synthetic peptide
RPQVPLRAM

SEQ ID NO: 2951 - protein, 9 aa, synthetic construct
  REGION 1..9: note = Description of Artificial Sequence: Synthetic peptide
TPAISLKSL

SEQ ID NO: 2952 - protein, 9 aa, synthetic construct
  REGION 1..9: note = Description of Artificial Sequence: Synthetic peptide
GPSHKARVL

SEQ ID NO: 2953 - protein, 9 aa, synthetic construct
  REGION 1..9: note = Description of Artificial Sequence: Synthetic peptide
NPAISLKSL

SEQ ID NO: 2954 - protein, 10 aa, synthetic construct
  REGION 1..10: note = Description of Artificial Sequence: Synthetic peptide
RPNNNTRKSI

SEQ ID NO: 2955 - protein, 9 aa, synthetic construct
  REGION 1..9: note = Description of Artificial Sequence: Synthetic peptide
RPVASTQLL

SEQ ID NO: 2956 - protein, 9 aa, synthetic construct
  REGION 1..9: note = Description of Artificial Sequence: Synthetic peptide
EPYNPAISL

SEQ ID NO: 2957 - protein, 9 aa, synthetic construct
  REGION 1..9: note = Description of Artificial Sequence: Synthetic peptide
RVRDGTSRP

SEQ ID NO: 2958 - protein, 9 aa, synthetic construct
  REGION 1..9: note = Description of Artificial Sequence: Synthetic peptide
IPTPRPEGL

SEQ ID NO: 2959 - protein, 8 aa, synthetic construct
  REGION 1..8: note = Description of Artificial Sequence: Synthetic peptide
RPVVSTQL

SEQ ID NO: 2960 - protein, 9 aa, synthetic construct
  REGION 1..9: note = Description of Artificial Sequence: Synthetic peptide
KPVASTQLL

SEQ ID NO: 2961 - protein, 9 aa, synthetic construct
  REGION 1..9: note = Description of Artificial Sequence: Synthetic peptide
EPSTPAISL

SEQ ID NO: 2962 - protein, 10 aa, synthetic construct
  REGION 1..10: note = Description of Artificial Sequence: Synthetic peptide
SPIETVPVKL

SEQ ID NO: 2963 - protein, 10 aa, synthetic construct
  REGION 1..10: note = Description of Artificial Sequence: Synthetic peptide
SIRFGPGQAF

SEQ ID NO: 2964 - protein, 8 aa, synthetic construct
  REGION 1..8: note = Description of Artificial Sequence: Synthetic peptide
RPVASTQL

SEQ ID NO: 2965 - protein, 9 aa, synthetic construct
  REGION 1..9: note = Description of Artificial Sequence: Synthetic peptide
RVRDGASRP

SEQ ID NO: 2966 - protein, 9 aa, synthetic construct
  REGION 1..9: note = Description of Artificial Sequence: Synthetic peptide
GVRPTPPAA

SEQ ID NO: 2967 - protein, 10 aa, synthetic construct
  REGION 1..10: note = Description of Artificial Sequence: Synthetic peptide
SPAAPGVGAV

SEQ ID NO: 2968 - protein, 9 aa, synthetic construct
  REGION 1..9: note = Description of Artificial Sequence: Synthetic peptide
SIAARTVTL

SEQ ID NO: 2969 - protein, 9 aa, synthetic construct
  REGION 1..9: note = Description of Artificial Sequence: Synthetic peptide
TPQDLNTML

SEQ ID NO: 2970 - protein, 9 aa, synthetic construct
  REGION 1..9: note = Description of Artificial Sequence: Synthetic peptide
VPLTREAEL

SEQ ID NO: 2971 - protein, 8 aa, synthetic construct
  REGION 1..8: note = Description of Artificial Sequence: Synthetic peptide
EAVQKIVM

SEQ ID NO: 2972 - protein, 9 aa, synthetic construct
  REGION 1..9: note = Description of Artificial Sequence: Synthetic peptide
SIAARTVTL

SEQ ID NO: 2973 - protein, 9 aa, synthetic construct
  REGION 1..9: note = Description of Artificial Sequence: Synthetic peptide
QLQARVLAL

SEQ ID NO: 2974 - protein, 8 aa, synthetic construct
  REGION 1..8: note = Description of Artificial Sequence: Synthetic peptide
NPIPKQSL

SEQ ID NO: 2975 - protein, 8 aa, synthetic construct
  REGION 1..8: note = Description of Artificial Sequence: Synthetic peptide
EAVQKITM

SEQ ID NO: 2976 - protein, 9 aa, synthetic construct
  REGION 1..9: note = Description of Artificial Sequence: Synthetic peptide
ELKNSAISL

SEQ ID NO: 2977 - protein, 9 aa, synthetic construct
  REGION 1..9: note = Description of Artificial Sequence: Synthetic peptide
DIKQLTEAV

SEQ ID NO: 2978 - protein, 8 aa, synthetic construct
  REGION 1..8: note = Description of Artificial Sequence: Synthetic peptide
NPVPKQSL

SEQ ID NO: 2979 - protein, 9 aa, synthetic construct
  REGION 1..9: note = Description of Artificial Sequence: Synthetic peptide
DVKDTKEAL

SEQ ID NO: 2980 - protein, 8 aa, synthetic construct
  REGION 1..8: note = Description of Artificial Sequence: Synthetic peptide
ELVGHSSL

SEQ ID NO: 2981 - protein, 9 aa, synthetic construct
  REGION 1..9: note = Description of Artificial Sequence: Synthetic peptide
DVKQLTEAV

SEQ ID NO: 2982 - protein, 8 aa, synthetic construct
  REGION 1..8: note = Description of Artificial Sequence: Synthetic peptide
TTNQKTEL

SEQ ID NO: 2983 - protein, 9 aa, synthetic construct
  REGION 1..9: note = Description of Artificial Sequence: Synthetic peptide
ALKALVAST

SEQ ID NO: 2984 - protein, 8 aa, synthetic construct
  REGION 1..8: note = Description of Artificial Sequence: Synthetic peptide
HLKTAVQM

SEQ ID NO: 2985 - protein, 11 aa, synthetic construct
  REGION 1..11: note = Description of Artificial Sequence: Synthetic peptide
TQIDPDLADHL

SEQ ID NO: 2986 - protein, 10 aa, synthetic construct
  REGION 1..10: note = Description of Artificial Sequence: Synthetic peptide
HQNPVSEQSL

SEQ ID NO: 2987 - protein, 9 aa, synthetic construct
  REGION 1..9: note = Description of Artificial Sequence: Synthetic peptide
TQSPINEEI

SEQ ID NO: 2988 - protein, 9 aa, synthetic construct
  REGION 1..9: note = Description of Artificial Sequence: Synthetic peptide
GQDQWTYQI

SEQ ID NO: 2989 - protein, 9 aa, synthetic construct
  REGION 1..9: note = Description of Artificial Sequence: Synthetic peptide
VQINSTDNV

SEQ ID NO: 2990 - protein, 9 aa, synthetic construct
  REGION 1..9: note = Description of Artificial Sequence: Synthetic peptide
IQKQGQDQW

SEQ ID NO: 2991 - protein, 10 aa, synthetic construct
  REGION 1..10: note = Description of Artificial Sequence: Synthetic peptide
AQEESDEVGF

SEQ ID NO: 2992 - protein, 10 aa, synthetic construct
  REGION 1..10: note = Description of Artificial Sequence: Synthetic peptide
GQVRDQAEHL

SEQ ID NO: 2993 - protein, 10 aa, synthetic construct
  REGION 1..10: note = Description of Artificial Sequence: Synthetic peptide
RQIDSISERI

SEQ ID NO: 2994 - protein, 9 aa, synthetic construct
  REGION 1..9: note = Description of Artificial Sequence: Synthetic peptide
AQEEEEVGF

SEQ ID NO: 2995 - protein, 10 aa, synthetic construct
  REGION 1..10: note = Description of Artificial Sequence: Synthetic peptide
AQEEESEVGF

SEQ ID NO: 2996 - protein, 10 aa, synthetic construct
  REGION 1..10: note = Description of Artificial Sequence: Synthetic peptide
KQLTEAVQKI

SEQ ID NO: 2997 - protein, 9 aa, synthetic construct
  REGION 1..9: note = Description of Artificial Sequence: Synthetic peptide
GQELKTSAI

SEQ ID NO: 2998 - protein, 9 aa, synthetic construct
  REGION 1..9: note = Description of Artificial Sequence: Synthetic peptide
ALETGTEEL

SEQ ID NO: 2999 - protein, 10 aa, synthetic construct
  REGION 1..10: note = Description of Artificial Sequence: Synthetic peptide
HQNPVPKQSL

SEQ ID NO: 3000 - protein, 9 aa, synthetic construct
  REGION 1..9: note = Description of Artificial Sequence: Synthetic peptide
TQSPINEEI

SEQ ID NO: 3001 - protein, 9 aa, synthetic construct
  REGION 1..9: note = Description of Artificial Sequence: Synthetic peptide
VQFTEPVQI

SEQ ID NO: 3002 - protein, 9 aa, synthetic construct
  REGION 1..9: note = Description of Artificial Sequence: Synthetic peptide
GAASITLTV

SEQ ID NO: 3003 - protein, 9 aa, synthetic construct
  REGION 1..9: note = Description of Artificial Sequence: Synthetic peptide
QLTEAVQKI

SEQ ID NO: 3004 - protein, 9 aa, synthetic construct
  REGION 1..9: note = Description of Artificial Sequence: Synthetic peptide
SQIYAGIKV

SEQ ID NO: 3005 - protein, 9 aa, synthetic construct
  REGION 1..9: note = Description of Artificial Sequence: Synthetic peptide
GQAFYTNEI

SEQ ID NO: 3006 - protein, 8 aa, synthetic construct
  REGION 1..8: note = Description of Artificial Sequence: Synthetic peptide
GQMVHQAI

SEQ ID NO: 3007 - protein, 9 aa, synthetic construct
  REGION 1..9: note = Description of Artificial Sequence: Synthetic peptide
SQIYAGIQV

SEQ ID NO: 3008 - protein, 9 aa, synthetic construct
  REGION 1..9: note = Description of Artificial Sequence: Synthetic peptide
VQKIVMESI

SEQ ID NO: 3009 - protein, 9 aa, synthetic construct
  REGION 1..9: note = Description of Artificial Sequence: Synthetic peptide
GQVDCSPGI

SEQ ID NO: 3010 - protein, 9 aa, synthetic construct
  REGION 1..9: note = Description of Artificial Sequence: Synthetic peptide
GAASLTLTV

SEQ ID NO: 3011 - protein, 8 aa, synthetic construct
  REGION 1..8: note = Description of Artificial Sequence: Synthetic peptide
GQMVHQAV

SEQ ID NO: 3012 - protein, 9 aa, synthetic construct
  REGION 1..9: note = Description of Artificial Sequence: Synthetic peptide
HQISVESSV

SEQ ID NO: 3013 - protein, 9 aa, synthetic construct
  REGION 1..9: note = Description of Artificial Sequence: Synthetic peptide
VQKIATESI

SEQ ID NO: 3014 - protein, 9 aa, synthetic construct
  REGION 1..9: note = Description of Artificial Sequence: Synthetic peptide
VQKITMESI

SEQ ID NO: 3015 - protein, 9 aa, synthetic construct
  REGION 1..9: note = Description of Artificial Sequence: Synthetic peptide
GQDQWTYQI

SEQ ID NO: 3016 - protein, 9 aa, synthetic construct
  REGION 1..9: note = Description of Artificial Sequence: Synthetic peptide
AIITVVNRV

SEQ ID NO: 3017 - protein, 10 aa, synthetic construct
  REGION 1..10: note = Description of Artificial Sequence: Synthetic peptide
AQGQMVHQAI

SEQ ID NO: 3018 - protein, 9 aa, synthetic construct
  REGION 1..9: note = Description of Artificial Sequence: Synthetic peptide
GQGQWSYQI

SEQ ID NO: 3019 - protein, 9 aa, synthetic construct
  REGION 1..9: note = Description of Artificial Sequence: Synthetic peptide
VQFTKPVLI

SEQ ID NO: 3020 - protein, 9 aa, synthetic construct
  REGION 1..9: note = Description of Artificial Sequence: Synthetic peptide
VQNAQGQMV

SEQ ID NO: 3021 - protein, 9 aa, synthetic construct
  REGION 1..9: note = Description of Artificial Sequence: Synthetic peptide
VLAEAMSQI

SEQ ID NO: 3022 - protein, 8 aa, synthetic construct
  REGION 1..8: note = Description of Artificial Sequence: Synthetic peptide
GQDTAYFI

SEQ ID NO: 3023 - protein, 9 aa, synthetic construct
  REGION 1..9: note = Description of Artificial Sequence: Synthetic peptide
AILNIPTRI

SEQ ID NO: 3024 - protein, 9 aa, synthetic construct
  REGION 1..9: note = Description of Artificial Sequence: Synthetic peptide
QQHLLKLTV

SEQ ID NO: 3025 - protein, 9 aa, synthetic construct
  REGION 1..9: note = Description of Artificial Sequence: Synthetic peptide
QQSNLLQAI

SEQ ID NO: 3026 - protein, 9 aa, synthetic construct
  REGION 1..9: note = Description of Artificial Sequence: Synthetic peptide
QQQLLKLTV

SEQ ID NO: 3027 - protein, 9 aa, synthetic construct
  REGION 1..9: note = Description of Artificial Sequence: Synthetic peptide
VLAEAMSQV

SEQ ID NO: 3028 - protein, 9 aa, synthetic construct
  REGION 1..9: note = Description of Artificial Sequence: Synthetic peptide
VQINSTDNV

SEQ ID NO: 3029 - protein, 10 aa, synthetic construct
  REGION 1..10: note = Description of Artificial Sequence: Synthetic peptide
KQLTEAVQKI

SEQ ID NO: 3030 - protein, 9 aa, synthetic construct
  REGION 1..9: note = Description of Artificial Sequence: Synthetic peptide
QQQMLRLTV

SEQ ID NO: 3031 - protein, 9 aa, synthetic construct
  REGION 1..9: note = Description of Artificial Sequence: Synthetic peptide
VLAEAMSHV

SEQ ID NO: 3032 - protein, 8 aa, synthetic construct
  REGION 1..8: note = Description of Artificial Sequence: Synthetic peptide
SQVQNTNI

SEQ ID NO: 3033 - protein, 10 aa, synthetic construct
  REGION 1..10: note = Description of Artificial Sequence: Synthetic peptide
RQIDSISERV

SEQ ID NO: 3034 - protein, 9 aa, synthetic construct
  REGION 1..9: note = Description of Artificial Sequence: Synthetic peptide
SLAEGKVMI

SEQ ID NO: 3035 - protein, 10 aa, synthetic construct
  REGION 1..10: note = Description of Artificial Sequence: Synthetic peptide
SQVQNTNIMI

SEQ ID NO: 3036 - protein, 10 aa, synthetic construct
  REGION 1..10: note = Description of Artificial Sequence: Synthetic peptide
RQIDSISERI

SEQ ID NO: 3037 - protein, 10 aa, synthetic construct
  REGION 1..10: note = Description of Artificial Sequence: Synthetic peptide
AQGQMVHQAV

SEQ ID NO: 3038 - protein, 9 aa, synthetic construct
  REGION 1..9: note = Description of Artificial Sequence: Synthetic peptide
YQLEQEPIV

SEQ ID NO: 3039 - protein, 10 aa, synthetic construct
  REGION 1..10: note = Description of Artificial Sequence: Synthetic peptide
RQYDQIAIEI

SEQ ID NO: 3040 - protein, 9 aa, synthetic construct
  REGION 1..9: note = Description of Artificial Sequence: Synthetic peptide
AVSPAAPGV

SEQ ID NO: 3041 - protein, 9 aa, synthetic construct
  REGION 1..9: note = Description of Artificial Sequence: Synthetic peptide
QIHSTNQNV

SEQ ID NO: 3042 - protein, 11 aa, synthetic construct
  REGION 1..11: note = Description of Artificial Sequence: Synthetic peptide
VQQQSNLLQAI

SEQ ID NO: 3043 - protein, 9 aa, synthetic construct
  REGION 1..9: note = Description of Artificial Sequence: Synthetic peptide
VVKIEPLGI

SEQ ID NO: 3044 - protein, 10 aa, synthetic construct
  REGION 1..10: note = Description of Artificial Sequence: Synthetic peptide
SQIHSTNQNV

SEQ ID NO: 3045 - protein, 8 aa, synthetic construct
  REGION 1..8: note = Description of Artificial Sequence: Synthetic peptide
GQETAYFI

SEQ ID NO: 3046 - protein, 8 aa, synthetic construct
  REGION 1..8: note = Description of Artificial Sequence: Synthetic peptide
VQNTNIMI

SEQ ID NO: 3047 - protein, 9 aa, synthetic construct
  REGION 1..9: note = Description of Artificial Sequence: Synthetic peptide
ILSIVGLVV

SEQ ID NO: 3048 - protein, 9 aa, synthetic construct
  REGION 1..9: note = Description of Artificial Sequence: Synthetic peptide
GQLQPALET

SEQ ID NO: 3049 - protein, 10 aa, synthetic construct
  REGION 1..10: note = Description of Artificial Sequence: Synthetic peptide
KVVKLEPLGV

SEQ ID NO: 3050 - protein, 9 aa, synthetic construct
  REGION 1..9: note = Description of Artificial Sequence: Synthetic peptide
RVIELGQRI

SEQ ID NO: 3051 - protein, 9 aa, synthetic construct
  REGION 1..9: note = Description of Artificial Sequence: Synthetic peptide
ALQDSGLEV

SEQ ID NO: 3052 - protein, 9 aa, synthetic construct
  REGION 1..9: note = Description of Artificial Sequence: Synthetic peptide
VQFNKPVPI

SEQ ID NO: 3053 - protein, 9 aa, synthetic construct
  REGION 1..9: note = Description of Artificial Sequence: Synthetic peptide
ERYLQDQQL

SEQ ID NO: 3054 - protein, 9 aa, synthetic construct
  REGION 1..9: note = Description of Artificial Sequence: Synthetic peptide
ERYLKDQQL

SEQ ID NO: 3055 - protein, 8 aa, synthetic construct
  REGION 1..8: note = Description of Artificial Sequence: Synthetic peptide
ERILSTCL

SEQ ID NO: 3056 - protein, 9 aa, synthetic construct
  REGION 1..9: note = Description of Artificial Sequence: Synthetic peptide
NREPSTPAI

SEQ ID NO: 3057 - protein, 8 aa, synthetic construct
  REGION 1..8: note = Description of Artificial Sequence: Synthetic peptide
IRQLHSAL

SEQ ID NO: 3058 - protein, 8 aa, synthetic construct
  REGION 1..8: note = Description of Artificial Sequence: Synthetic peptide
IRQLQPAL

SEQ ID NO: 3059 - protein, 8 aa, synthetic construct
  REGION 1..8: note = Description of Artificial Sequence: Synthetic peptide
IRQLHSAL

SEQ ID NO: 3060 - protein, 9 aa, synthetic construct
  REGION 1..9: note = Description of Artificial Sequence: Synthetic peptide
ERYLKDQQL

SEQ ID NO: 3061 - protein, 9 aa, synthetic construct
  REGION 1..9: note = Description of Artificial Sequence: Synthetic peptide
ERYLQDQQL

SEQ ID NO: 3062 - protein, 8 aa, synthetic construct
  REGION 1..8: note = Description of Artificial Sequence: Synthetic peptide
ELVGHSSL

SEQ ID NO: 3063 - protein, 8 aa, synthetic construct
  REGION 1..8: note = Description of Artificial Sequence: Synthetic peptide
ERVLRTCL

SEQ ID NO: 3064 - protein, 8 aa, synthetic construct
  REGION 1..8: note = Description of Artificial Sequence: Synthetic peptide
GQMVHQAI

SEQ ID NO: 3065 - protein, 8 aa, synthetic construct
  REGION 1..8: note = Description of Artificial Sequence: Synthetic peptide
DLATHGAV

SEQ ID NO: 3066 - protein, 9 aa, synthetic construct
  REGION 1..9: note = Description of Artificial Sequence: Synthetic peptide
VPLTREAEL

SEQ ID NO: 3067 - protein, 9 aa, synthetic construct
  REGION 1..9: note = Description of Artificial Sequence: Synthetic peptide
VELVGHSSL

SEQ ID NO: 3068 - protein, 9 aa, synthetic construct
  REGION 1..9: note = Description of Artificial Sequence: Synthetic peptide
VELLGHCSL

SEQ ID NO: 3069 - protein, 8 aa, synthetic construct
  REGION 1..8: note = Description of Artificial Sequence: Synthetic peptide
IQKLVGKL

SEQ ID NO: 3070 - protein, 8 aa, synthetic construct
  REGION 1..8: note = Description of Artificial Sequence: Synthetic peptide
GQMVHQAV

SEQ ID NO: 3071 - protein, 8 aa, synthetic construct
  REGION 1..8: note = Description of Artificial Sequence: Synthetic peptide
GQYIYNTY

SEQ ID NO: 3072 - protein, 8 aa, synthetic construct
  REGION 1..8: note = Description of Artificial Sequence: Synthetic peptide
GQHIYNTY

SEQ ID NO: 3073 - protein, 9 aa, synthetic construct
  REGION 1..9: note = Description of Artificial Sequence: Synthetic peptide
RVMGTQRNY

SEQ ID NO: 3074 - protein, 9 aa, synthetic construct
  REGION 1..9: note = Description of Artificial Sequence: Synthetic peptide
TQACPKVSF

SEQ ID NO: 3075 - protein, 9 aa, synthetic construct
  REGION 1..9: note = Description of Artificial Sequence: Synthetic peptide
VQKIATESI

SEQ ID NO: 3076 - protein, 9 aa, synthetic construct
  REGION 1..9: note = Description of Artificial Sequence: Synthetic peptide
TQACPKVTF

SEQ ID NO: 3077 - protein, 9 aa, synthetic construct
  REGION 1..9: note = Description of Artificial Sequence: Synthetic peptide
TVLDVGDAY

SEQ ID NO: 3078 - protein, 9 aa, synthetic construct
  REGION 1..9: note = Description of Artificial Sequence: Synthetic peptide
RQITKIQNF

SEQ ID NO: 3079 - protein, 9 aa, synthetic construct
  REGION 1..9: note = Description of Artificial Sequence: Synthetic peptide
KAIEAQQQM

SEQ ID NO: 3080 - protein, 9 aa, synthetic construct
  REGION 1..9: note = Description of Artificial Sequence: Synthetic peptide
VQQEFGIPY

SEQ ID NO: 3081 - protein, 9 aa, synthetic construct
  REGION 1..9: note = Description of Artificial Sequence: Synthetic peptide
ATNLWVTVY

SEQ ID NO: 3082 - protein, 10 aa, synthetic construct
  REGION 1..10: note = Description of Artificial Sequence: Synthetic peptide
HQNPVSEQSL

SEQ ID NO: 3083 - protein, 9 aa, synthetic construct
  REGION 1..9: note = Description of Artificial Sequence: Synthetic peptide
SQVQNTNIM

SEQ ID NO: 3084 - protein, 10 aa, synthetic construct
  REGION 1..10: note = Description of Artificial Sequence: Synthetic peptide
LQWDKEISTY

SEQ ID NO: 3085 - protein, 10 aa, synthetic construct
  REGION 1..10: note = Description of Artificial Sequence: Synthetic peptide
FLNKGLGISY

SEQ ID NO: 3086 - protein, 10 aa, synthetic construct
  REGION 1..10: note = Description of Artificial Sequence: Synthetic peptide
HQNPVPKQSL

SEQ ID NO: 3087 - protein, 9 aa, synthetic construct
  REGION 1..9: note = Description of Artificial Sequence: Synthetic peptide
IQKQGQGQW

SEQ ID NO: 3088 - protein, 9 aa, synthetic construct
  REGION 1..9: note = Description of Artificial Sequence: Synthetic peptide
INKGLGISY

SEQ ID NO: 3089 - protein, 9 aa, synthetic construct
  REGION 1..9: note = Description of Artificial Sequence: Synthetic peptide
KQIIKIQNF

SEQ ID NO: 3090 - protein, 9 aa, synthetic construct
  REGION 1..9: note = Description of Artificial Sequence: Synthetic peptide
IQQEFGIPY

SEQ ID NO: 3091 - protein, 10 aa, synthetic construct
  REGION 1..10: note = Description of Artificial Sequence: Synthetic peptide
ILKDPVHGVY

SEQ ID NO: 3092 - protein, 9 aa, synthetic construct
  REGION 1..9: note = Description of Artificial Sequence: Synthetic peptide
KQGQGQWSY

SEQ ID NO: 3093 - protein, 8 aa, synthetic construct
  REGION 1..8: note = Description of Artificial Sequence: Synthetic peptide
AVHVASGY

SEQ ID NO: 3094 - protein, 10 aa, synthetic construct
  REGION 1..10: note = Description of Artificial Sequence: Synthetic peptide
FINKGLGISY

SEQ ID NO: 3095 - protein, 9 aa, synthetic construct
  REGION 1..9: note = Description of Artificial Sequence: Synthetic peptide
EQHTPTISL

SEQ ID NO: 3096 - protein, 11 aa, synthetic construct
  REGION 1..11: note = Description of Artificial Sequence: Synthetic peptide
IQKQGQDQWTY

SEQ ID NO: 3097 - protein, 9 aa, synthetic construct
  REGION 1..9: note = Description of Artificial Sequence: Synthetic peptide
KAIEAQQQL

SEQ ID NO: 3098 - protein, 9 aa, synthetic construct
  REGION 1..9: note = Description of Artificial Sequence: Synthetic peptide
FLGAAGSTM

SEQ ID NO: 3099 - protein, 8 aa, synthetic construct
  REGION 1..8: note = Description of Artificial Sequence: Synthetic peptide
GQMVHQAI

SEQ ID NO: 3100 - protein, 10 aa, synthetic construct
  REGION 1..10: note = Description of Artificial Sequence: Synthetic peptide
ILKNPVHGVY

SEQ ID NO: 3101 - protein, 9 aa, synthetic construct
  REGION 1..9: note = Description of Artificial Sequence: Synthetic peptide
RQGYSPVSF

SEQ ID NO: 3102 - protein, 9 aa, synthetic construct
  REGION 1..9: note = Description of Artificial Sequence: Synthetic peptide
KQGQDQWTY

SEQ ID NO: 3103 - protein, 9 aa, synthetic construct
  REGION 1..9: note = Description of Artificial Sequence: Synthetic peptide
IQKQGQDQW

SEQ ID NO: 3104 - protein, 8 aa, synthetic construct
  REGION 1..8: note = Description of Artificial Sequence: Synthetic peptide
LQKVAEQL

SEQ ID NO: 3105 - protein, 11 aa, synthetic construct
  REGION 1..11: note = Description of Artificial Sequence: Synthetic peptide
SQIHSTNQNVM

SEQ ID NO: 3106 - protein, 9 aa, synthetic construct
  REGION 1..9: note = Description of Artificial Sequence: Synthetic peptide
RAVGLGAAF

SEQ ID NO: 3107 - protein, 10 aa, synthetic construct
  REGION 1..10: note = Description of Artificial Sequence: Synthetic peptide
TEKQGTTHSY

SEQ ID NO: 3108 - protein, 9 aa, synthetic construct
  REGION 1..9: note = Description of Artificial Sequence: Synthetic peptide
VQSTNTNIM

SEQ ID NO: 3109 - protein, 9 aa, synthetic construct
  REGION 1..9: note = Description of Artificial Sequence: Synthetic peptide
SIVGLIVAF

SEQ ID NO: 3110 - protein, 9 aa, synthetic construct
  REGION 1..9: note = Description of Artificial Sequence: Synthetic peptide
GKNSINETF

SEQ ID NO: 3111 - protein, 10 aa, synthetic construct
  REGION 1..10: note = Description of Artificial Sequence: Synthetic peptide
GGNNGTNETF

SEQ ID NO: 3112 - protein, 9 aa, synthetic construct
  REGION 1..9: note = Description of Artificial Sequence: Synthetic peptide
TVLDVGDAY

SEQ ID NO: 3113 - protein, 9 aa, synthetic construct
  REGION 1..9: note = Description of Artificial Sequence: Synthetic peptide
FLGAAGSTM

SEQ ID NO: 3114 - protein, 9 aa, synthetic construct
  REGION 1..9: note = Description of Artificial Sequence: Synthetic peptide
ELVSPKCEY

SEQ ID NO: 3115 - protein, 10 aa, synthetic construct
  REGION 1..10: note = Description of Artificial Sequence: Synthetic peptide
FLNKGLGISY

SEQ ID NO: 3116 - protein, 9 aa, synthetic construct
  REGION 1..9: note = Description of Artificial Sequence: Synthetic peptide
TQACPKVSF

SEQ ID NO: 3117 - protein, 9 aa, synthetic construct
  REGION 1..9: note = Description of Artificial Sequence: Synthetic peptide
SAISLFDTI

SEQ ID NO: 3118 - protein, 9 aa, synthetic construct
  REGION 1..9: note = Description of Artificial Sequence: Synthetic peptide
TVGGHQAAM

SEQ ID NO: 3119 - protein, 9 aa, synthetic construct
  REGION 1..9: note = Description of Artificial Sequence: Synthetic peptide
EQHTPTISL

SEQ ID NO: 3120 - protein, 10 aa, synthetic construct
  REGION 1..10: note = Description of Artificial Sequence: Synthetic peptide
FINKGLGISY

SEQ ID NO: 3121 - protein, 9 aa, synthetic construct
  REGION 1..9: note = Description of Artificial Sequence: Synthetic peptide
TQACPKVTF

SEQ ID NO: 3122 - protein, 9 aa, synthetic construct
  REGION 1..9: note = Description of Artificial Sequence: Synthetic peptide
FLVEAGTEK

SEQ ID NO: 3123 - protein, 9 aa, synthetic construct
  REGION 1..9: note = Description of Artificial Sequence: Synthetic peptide
SQVQNTNIM

SEQ ID NO: 3124 - protein, 9 aa, synthetic construct
  REGION 1..9: note = Description of Artificial Sequence: Synthetic peptide
DLKNVTENF

SEQ ID NO: 3125 - protein, 9 aa, synthetic construct
  REGION 1..9: note = Description of Artificial Sequence: Synthetic peptide
EIVSPRCEY

SEQ ID NO: 3126 - protein, 8 aa, synthetic construct
  REGION 1..8: note = Description of Artificial Sequence: Synthetic peptide
GQYIYNTY

SEQ ID NO: 3127 - protein, 9 aa, synthetic construct
  REGION 1..9: note = Description of Artificial Sequence: Synthetic peptide
TIAVAVAEW

SEQ ID NO: 3128 - protein, 8 aa, synthetic construct
  REGION 1..8: note = Description of Artificial Sequence: Synthetic peptide
VPLRAMTY

SEQ ID NO: 3129 - protein, 9 aa, synthetic construct
  REGION 1..9: note = Description of Artificial Sequence: Synthetic peptide
NLANVTEDF

SEQ ID NO: 3130 - protein, 9 aa, synthetic construct
  REGION 1..9: note = Description of Artificial Sequence: Synthetic peptide
SAVNLVDAI

SEQ ID NO: 3131 - protein, 9 aa, synthetic construct
  REGION 1..9: note = Description of Artificial Sequence: Synthetic peptide
DAYFSVPLY

SEQ ID NO: 3132 - protein, 9 aa, synthetic construct
  REGION 1..9: note = Description of Artificial Sequence: Synthetic peptide
SAEPVPLQL

SEQ ID NO: 3133 - protein, 9 aa, synthetic construct
  REGION 1..9: note = Description of Artificial Sequence: Synthetic peptide
DIAGTTSTL

SEQ ID NO: 3134 - protein, 10 aa, synthetic construct
  REGION 1..10: note = Description of Artificial Sequence: Synthetic peptide
EVNIVTDSQY

SEQ ID NO: 3135 - protein, 9 aa, synthetic construct
  REGION 1..9: note = Description of Artificial Sequence: Synthetic peptide
EPYNPAISL

SEQ ID NO: 3136 - protein, 9 aa, synthetic construct
  REGION 1..9: note = Description of Artificial Sequence: Synthetic peptide
GKNSINETF

SEQ ID NO: 3137 - protein, 9 aa, synthetic construct
  REGION 1..9: note = Description of Artificial Sequence: Synthetic peptide
SKNSSYSTY

SEQ ID NO: 3138 - protein, 8 aa, synthetic construct
  REGION 1..8: note = Description of Artificial Sequence: Synthetic peptide
GQYIYNTY

SEQ ID NO: 3139 - protein, 8 aa, synthetic construct
  REGION 1..8: note = Description of Artificial Sequence: Synthetic peptide
AKNIIVQF

SEQ ID NO: 3140 - protein, 9 aa, synthetic construct
  REGION 1..9: note = Description of Artificial Sequence: Synthetic peptide
SKIGPENPY

SEQ ID NO: 3141 - protein, 8 aa, synthetic construct
  REGION 1..8: note = Description of Artificial Sequence: Synthetic peptide
GQHIYNTY

SEQ ID NO: 3142 - protein, 9 aa, synthetic construct
  REGION 1..9: note = Description of Artificial Sequence: Synthetic peptide
INKGLGISY

SEQ ID NO: 3143 - protein, 8 aa, synthetic construct
  REGION 1..8: note = Description of Artificial Sequence: Synthetic peptide
NKGLGISY

SEQ ID NO: 3144 - protein, 9 aa, synthetic construct
  REGION 1..9: note = Description of Artificial Sequence: Synthetic peptide
TKNPEIIIY

SEQ ID NO: 3145 - protein, 9 aa, synthetic construct
  REGION 1..9: note = Description of Artificial Sequence: Synthetic peptide
LKTPVHGVY

SEQ ID NO: 3146 - protein, 9 aa, synthetic construct
  REGION 1..9: note = Description of Artificial Sequence: Synthetic peptide
IRFGPGQAF

SEQ ID NO: 3147 - protein, 9 aa, synthetic construct
  REGION 1..9: note = Description of Artificial Sequence: Synthetic peptide
QKTELHAIY

SEQ ID NO: 3148 - protein, 9 aa, synthetic construct
  REGION 1..9: note = Description of Artificial Sequence: Synthetic peptide
LKNPVHGVY

SEQ ID NO: 3149 - protein, 9 aa, synthetic construct
  REGION 1..9: note = Description of Artificial Sequence: Synthetic peptide
VKVVEEKAF

SEQ ID NO: 3150 - protein, 9 aa, synthetic construct
  REGION 1..9: note = Description of Artificial Sequence: Synthetic peptide
GKRAIGTVL

SEQ ID NO: 3151 - protein, 9 aa, synthetic construct
  REGION 1..9: note = Description of Artificial Sequence: Synthetic peptide
RQGYSPVSF

SEQ ID NO: 3152 - protein, 9 aa, synthetic construct
  REGION 1..9: note = Description of Artificial Sequence: Synthetic peptide
TQACPKVSF

SEQ ID NO: 3153 - protein, 9 aa, synthetic construct
  REGION 1..9: note = Description of Artificial Sequence: Synthetic peptide
SHFPNATTI

SEQ ID NO: 3154 - protein, 9 aa, synthetic construct
  REGION 1..9: note = Description of Artificial Sequence: Synthetic peptide
IHSTNQNVM

SEQ ID NO: 3155 - protein, 9 aa, synthetic construct
  REGION 1..9: note = Description of Artificial Sequence: Synthetic peptide
YHTQIDPDL

SEQ ID NO: 3156 - protein, 9 aa, synthetic construct
  REGION 1..9: note = Description of Artificial Sequence: Synthetic peptide
THTNDIKQL

SEQ ID NO: 3157 - protein, 9 aa, synthetic construct
  REGION 1..9: note = Description of Artificial Sequence: Synthetic peptide
THLEGKVIL

SEQ ID NO: 3158 - protein, 9 aa, synthetic construct
  REGION 1..9: note = Description of Artificial Sequence: Synthetic peptide
THTNDVKQL

SEQ ID NO: 3159 - protein, 9 aa, synthetic construct
  REGION 1..9: note = Description of Artificial Sequence: Synthetic peptide
EHFPNKTII

SEQ ID NO: 3160 - protein, 9 aa, synthetic construct
  REGION 1..9: note = Description of Artificial Sequence: Synthetic peptide
HQAISPRTL

SEQ ID NO: 3161 - protein, 9 aa, synthetic construct
  REGION 1..9: note = Description of Artificial Sequence: Synthetic peptide
EQHTPTISL

SEQ ID NO: 3162 - protein, 9 aa, synthetic construct
  REGION 1..9: note = Description of Artificial Sequence: Synthetic peptide
HQAVSPRTL

SEQ ID NO: 3163 - protein, 9 aa, synthetic construct
  REGION 1..9: note = Description of Artificial Sequence: Synthetic peptide
EHLKTAVQM

SEQ ID NO: 3164 - protein, 10 aa, synthetic construct
  REGION 1..10: note = Description of Artificial Sequence: Synthetic peptide
HQNPVPKQSL

SEQ ID NO: 3165 - protein, 8 aa, synthetic construct
  REGION 1..8: note = Description of Artificial Sequence: Synthetic peptide
MHADIISL

SEQ ID NO: 3166 - protein, 8 aa, synthetic construct
  REGION 1..8: note = Description of Artificial Sequence: Synthetic peptide
QHTPTISL

SEQ ID NO: 3167 - protein, 11 aa, synthetic construct
  REGION 1..11: note = Description of Artificial Sequence: Synthetic peptide
SHVQSTNTNIM

SEQ ID NO: 3168 - protein, 9 aa, synthetic construct
  REGION 1..9: note = Description of Artificial Sequence: Synthetic peptide
GHQAAMQML

SEQ ID NO: 3169 - protein, 10 aa, synthetic construct
  REGION 1..10: note = Description of Artificial Sequence: Synthetic peptide
HQNPVSEQSL

SEQ ID NO: 3170 - protein, 9 aa, synthetic construct
  REGION 1..9: note = Description of Artificial Sequence: Synthetic peptide
NREPSTPAI

SEQ ID NO: 3171 - protein, 9 aa, synthetic construct
  REGION 1..9: note = Description of Artificial Sequence: Synthetic peptide
SQVQNTNIM

SEQ ID NO: 3172 - protein, 10 aa, synthetic construct
  REGION 1..10: note = Description of Artificial Sequence: Synthetic peptide
SHFPNATTII

SEQ ID NO: 3173 - protein, 9 aa, synthetic construct
  REGION 1..9: note = Description of Artificial Sequence: Synthetic peptide
IHTDNGPNF

SEQ ID NO: 3174 - protein, 10 aa, synthetic construct
  REGION 1..10: note = Description of Artificial Sequence: Synthetic peptide
HQNPIPKQSL

SEQ ID NO: 3175 - protein, 9 aa, synthetic construct
  REGION 1..9: note = Description of Artificial Sequence: Synthetic peptide
THSYNFPQI

SEQ ID NO: 3176 - protein, 10 aa, synthetic construct
  REGION 1..10: note = Description of Artificial Sequence: Synthetic peptide
SHVQSTNTNI

SEQ ID NO: 3177 - protein, 10 aa, synthetic construct
  REGION 1..10: note = Description of Artificial Sequence: Synthetic peptide
VHQAVSPRTL

SEQ ID NO: 3178 - protein, 8 aa, synthetic construct
  REGION 1..8: note = Description of Artificial Sequence: Synthetic peptide
THLEGKVI

SEQ ID NO: 3179 - protein, 9 aa, synthetic construct
  REGION 1..9: note = Description of Artificial Sequence: Synthetic peptide
TIAVAVAEW

SEQ ID NO: 3180 - protein, 9 aa, synthetic construct
  REGION 1..9: note = Description of Artificial Sequence: Synthetic peptide
TVLDVGDAY

SEQ ID NO: 3181 - protein, 9 aa, synthetic construct
  REGION 1..9: note = Description of Artificial Sequence: Synthetic peptide
TINEEAAEW

SEQ ID NO: 3182 - protein, 9 aa, synthetic construct
  REGION 1..9: note = Description of Artificial Sequence: Synthetic peptide
SAISLFDTI

SEQ ID NO: 3183 - protein, 9 aa, synthetic construct
  REGION 1..9: note = Description of Artificial Sequence: Synthetic peptide
TTVPWNTSW

SEQ ID NO: 3184 - protein, 8 aa, synthetic construct
  REGION 1..8: note = Description of Artificial Sequence: Synthetic peptide
TELIIYQY

SEQ ID NO: 3185 - protein, 8 aa, synthetic construct
  REGION 1..8: note = Description of Artificial Sequence: Synthetic peptide
NETPGVRY

SEQ ID NO: 3186 - protein, 9 aa, synthetic construct
  REGION 1..9: note = Description of Artificial Sequence: Synthetic peptide
TEAVQKITM

SEQ ID NO: 3187 - protein, 9 aa, synthetic construct
  REGION 1..9: note = Description of Artificial Sequence: Synthetic peptide
TEAVQKIVM

SEQ ID NO: 3188 - protein, 11 aa, synthetic construct
  REGION 1..11: note = Description of Artificial Sequence: Synthetic peptide
SEVNIVTDSQY

SEQ ID NO: 3189 - protein, 8 aa, synthetic construct
  REGION 1..8: note = Description of Artificial Sequence: Synthetic peptide
LEITTHSF

SEQ ID NO: 3190 - protein, 8 aa, synthetic construct
  REGION 1..8: note = Description of Artificial Sequence: Synthetic peptide
NETPGIRY

SEQ ID NO: 3191 - protein, 11 aa, synthetic construct
  REGION 1..11: note = Description of Artificial Sequence: Synthetic peptide
LEVNIVTDSQY

SEQ ID NO: 3192 - protein, 9 aa, synthetic construct
  REGION 1..9: note = Description of Artificial Sequence: Synthetic peptide
QELETREPY

SEQ ID NO: 3193 - protein, 9 aa, synthetic construct
  REGION 1..9: note = Description of Artificial Sequence: Synthetic peptide
TEEIKNCSY

SEQ ID NO: 3194 - protein, 8 aa, synthetic construct
  REGION 1..8: note = Description of Artificial Sequence: Synthetic peptide
EEIKNCSY

SEQ ID NO: 3195 - protein, 9 aa, synthetic construct
  REGION 1..9: note = Description of Artificial Sequence: Synthetic peptide
DEVGFPVRP

SEQ ID NO: 3196 - protein, 8 aa, synthetic construct
  REGION 1..8: note = Description of Artificial Sequence: Synthetic peptide
PEIIIYQY

SEQ ID NO: 3197 - protein, 8 aa, synthetic construct
  REGION 1..8: note = Description of Artificial Sequence: Synthetic peptide
LENVTENF

SEQ ID NO: 3198 - protein, 8 aa, synthetic construct
  REGION 1..8: note = Description of Artificial Sequence: Synthetic peptide
PEMVIYQY

SEQ ID NO: 3199 - protein, 8 aa, synthetic construct
  REGION 1..8: note = Description of Artificial Sequence: Synthetic peptide
TEELKSLY

SEQ ID NO: 3200 - protein, 8 aa, synthetic construct
  REGION 1..8: note = Description of Artificial Sequence: Synthetic peptide
DESLLQAI

SEQ ID NO: 3201 - protein, 8 aa, synthetic construct
  REGION 1..8: note = Description of Artificial Sequence: Synthetic peptide
DEDLIRAI

SEQ ID NO: 3202 - protein, 8 aa, synthetic construct
  REGION 1..8: note = Description of Artificial Sequence: Synthetic peptide
LEEEQNKY

SEQ ID NO: 3203 - protein, 8 aa, synthetic construct
  REGION 1..8: note = Description of Artificial Sequence: Synthetic peptide
DEDLLKAV

SEQ ID NO: 3204 - protein, 9 aa, synthetic construct
  REGION 1..9: note = Description of Artificial Sequence: Synthetic peptide
ARVLAVERY

SEQ ID NO: 3205 - protein, 11 aa, synthetic construct
  REGION 1..11: note = Description of Artificial Sequence: Synthetic peptide
SALPVGTEELK

SEQ ID NO: 3206 - protein, 10 aa, synthetic construct
  REGION 1..10: note = Description of Artificial Sequence: Synthetic peptide
VRQGYSPLSF

SEQ ID NO: 3207 - protein, 9 aa, synthetic construct
  REGION 1..9: note = Description of Artificial Sequence: Synthetic peptide
ILGELVSPK

SEQ ID NO: 3208 - protein, 11 aa, synthetic construct
  REGION 1..11: note = Description of Artificial Sequence: Synthetic peptide
KEAELELEENR

SEQ ID NO: 3209 - protein, 11 aa, synthetic construct
  REGION 1..11: note = Description of Artificial Sequence: Synthetic peptide
DVVQLDESENK

SEQ ID NO: 3210 - protein, 10 aa, synthetic construct
  REGION 1..10: note = Description of Artificial Sequence: Synthetic peptide
VRQGYSPVSF

SEQ ID NO: 3211 - protein, 9 aa, synthetic construct
  REGION 1..9: note = Description of Artificial Sequence: Synthetic peptide
ARVLAIERY

SEQ ID NO: 3212 - protein, 10 aa, synthetic construct
  REGION 1..10: note = Description of Artificial Sequence: Synthetic peptide
VQNTNIMIQR

SEQ ID NO: 3213 - protein, 11 aa, synthetic construct
  REGION 1..11: note = Description of Artificial Sequence: Synthetic peptide
GIVQQQSNLLK

SEQ ID NO: 3214 - protein, 9 aa, synthetic construct
  REGION 1..9: note = Description of Artificial Sequence: Synthetic peptide
QRTELHAIY

SEQ ID NO: 3215 - protein, 10 aa, synthetic construct
  REGION 1..10: note = Description of Artificial Sequence: Synthetic peptide
IRFGPGQAFY

SEQ ID NO: 3216 - protein, 10 aa, synthetic construct
  REGION 1..10: note = Description of Artificial Sequence: Synthetic peptide
GAVDLSHFLK

SEQ ID NO: 3217 - protein, 11 aa, synthetic construct
  REGION 1..11: note = Description of Artificial Sequence: Synthetic peptide
GGLDGLIYSQK

SEQ ID NO: 3218 - protein, 11 aa, synthetic construct
  REGION 1..11: note = Description of Artificial Sequence: Synthetic peptide
KALTDIVTLTK

SEQ ID NO: 3219 - protein, 9 aa, synthetic construct
  REGION 1..9: note = Description of Artificial Sequence: Synthetic peptide
IRFGPGQAF

SEQ ID NO: 3220 - protein, 10 aa, synthetic construct
  REGION 1..10: note = Description of Artificial Sequence: Synthetic peptide
YELDVVLLNR

SEQ ID NO: 3221 - protein, 9 aa, synthetic construct
  REGION 1..9: note = Description of Artificial Sequence: Synthetic peptide
YRGSSSQNY

SEQ ID NO: 3222 - protein, 10 aa, synthetic construct
  REGION 1..10: note = Description of Artificial Sequence: Synthetic peptide
GAFDLSHFLK

SEQ ID NO: 3223 - protein, 10 aa, synthetic construct
  REGION 1..10: note = Description of Artificial Sequence: Synthetic peptide
YQSNPYPTPR

SEQ ID NO: 3224 - protein, 11 aa, synthetic construct
  REGION 1..11: note = Description of Artificial Sequence: Synthetic peptide
KALTDIVPLTR

SEQ ID NO: 3225 - protein, 8 aa, synthetic construct
  REGION 1..8: note = Description of Artificial Sequence: Synthetic peptide
ARIIVRTY

SEQ ID NO: 3226 - protein, 9 aa, synthetic construct
  REGION 1..9: note = Description of Artificial Sequence: Synthetic peptide
RRTPPTAQR

SEQ ID NO: 3227 - protein, 9 aa, synthetic construct
  REGION 1..9: note = Description of Artificial Sequence: Synthetic peptide
ARIVELVGH

SEQ ID NO: 3228 - protein, 9 aa, synthetic construct
  REGION 1..9: note = Description of Artificial Sequence: Synthetic peptide
ARVLAVERY

SEQ ID NO: 3229 - protein, 9 aa, synthetic construct
  REGION 1..9: note = Description of Artificial Sequence: Synthetic peptide
ARTVTLLGH

SEQ ID NO: 3230 - protein, 10 aa, synthetic construct
  REGION 1..10: note = Description of Artificial Sequence: Synthetic peptide
IRFGPGQAFY

SEQ ID NO: 3231 - protein, 9 aa, synthetic construct
  REGION 1..9: note = Description of Artificial Sequence: Synthetic peptide
ARVLAIERY

SEQ ID NO: 3232 - protein, 9 aa, synthetic construct
  REGION 1..9: note = Description of Artificial Sequence: Synthetic peptide
QRTELHAIY

SEQ ID NO: 3233 - protein, 10 aa, synthetic construct
  REGION 1..10: note = Description of Artificial Sequence: Synthetic peptide
VRQGYSPVSF

SEQ ID NO: 3234 - protein, 9 aa, synthetic construct
  REGION 1..9: note = Description of Artificial Sequence: Synthetic peptide
IRFGPGQAF

SEQ ID NO: 3235 - protein, 9 aa, synthetic construct
  REGION 1..9: note = Description of Artificial Sequence: Synthetic peptide
EPIAGAETF

SEQ ID NO: 3236 - protein, 11 aa, synthetic construct
  REGION 1..11: note = Description of Artificial Sequence: Synthetic peptide
IPAETGQETAY

SEQ ID NO: 3237 - protein, 9 aa, synthetic construct
  REGION 1..9: note = Description of Artificial Sequence: Synthetic peptide
EPIVGAETF

SEQ ID NO: 3238 - protein, 9 aa, synthetic construct
  REGION 1..9: note = Description of Artificial Sequence: Synthetic peptide
NPEIIIYQY

SEQ ID NO: 3239 - protein, 9 aa, synthetic construct
  REGION 1..9: note = Description of Artificial Sequence: Synthetic peptide
NPEMVIYQY

SEQ ID NO: 3240 - protein, 11 aa, synthetic construct
  REGION 1..11: note = Description of Artificial Sequence: Synthetic peptide
IPTETGQDTAY

SEQ ID NO: 3241 - protein, 9 aa, synthetic construct
  REGION 1..9: note = Description of Artificial Sequence: Synthetic peptide
FPNATTIIF

SEQ ID NO: 3242 - protein, 9 aa, synthetic construct
  REGION 1..9: note = Description of Artificial Sequence: Synthetic peptide
TVLDVGDAY

SEQ ID NO: 3243 - protein, 8 aa, synthetic construct
  REGION 1..8: note = Description of Artificial Sequence: Synthetic peptide
TPGPGIRY

SEQ ID NO: 3244 - protein, 9 aa, synthetic construct
  REGION 1..9: note = Description of Artificial Sequence: Synthetic peptide
NAKNIIVQF

SEQ ID NO: 3245 - protein, 9 aa, synthetic construct
  REGION 1..9: note = Description of Artificial Sequence: Synthetic peptide
PPIPVGEIY

SEQ ID NO: 3246 - protein, 9 aa, synthetic construct
  REGION 1..9: note = Description of Artificial Sequence: Synthetic peptide
EPYNPAISL

SEQ ID NO: 3247 - protein, 8 aa, synthetic construct
  REGION 1..8: note = Description of Artificial Sequence: Synthetic peptide
LPVGTEEL

SEQ ID NO: 3248 - protein, 9 aa, synthetic construct
  REGION 1..9: note = Description of Artificial Sequence: Synthetic peptide
EGVEVIIRY

SEQ ID NO: 3249 - protein, 10 aa, synthetic construct
  REGION 1..10: note = Description of Artificial Sequence: Synthetic peptide
NPPIPVGEIY

SEQ ID NO: 3250 - protein, 10 aa, synthetic construct
  REGION 1..10: note = Description of Artificial Sequence: Synthetic peptide
TAATNPDCAW

SEQ ID NO: 3251 - protein, 9 aa, synthetic construct
  REGION 1..9: note = Description of Artificial Sequence: Synthetic peptide
SPAIFQSSM

SEQ ID NO: 3252 - protein, 9 aa, synthetic construct
  REGION 1..9: note = Description of Artificial Sequence: Synthetic peptide
DAYFSVPLY

SEQ ID NO: 3253 - protein, 10 aa, synthetic construct
  REGION 1..10: note = Description of Artificial Sequence: Synthetic peptide
TAANNPDCAW

SEQ ID NO: 3254 - protein, 8 aa, synthetic construct
  REGION 1..8: note = Description of Artificial Sequence: Synthetic peptide
VPLRAMTY

SEQ ID NO: 3255 - protein, 8 aa, synthetic construct
  REGION 1..8: note = Description of Artificial Sequence: Synthetic peptide
DPVHGVYY

SEQ ID NO: 3256 - protein, 10 aa, synthetic construct
  REGION 1..10: note = Description of Artificial Sequence: Synthetic peptide
EPIAGAETFY

SEQ ID NO: 3257 - protein, 8 aa, synthetic construct
  REGION 1..8: note = Description of Artificial Sequence: Synthetic peptide
TPVHGVYY

SEQ ID NO: 3258 - protein, 8 aa, synthetic construct
  REGION 1..8: note = Description of Artificial Sequence: Synthetic peptide
NPVHGVYY

SEQ ID NO: 3259 - protein, 9 aa, synthetic construct
  REGION 1..9: note = Description of Artificial Sequence: Synthetic peptide
SAEPVPLQL

SEQ ID NO: 3260 - protein, 9 aa, synthetic construct
  REGION 1..9: note = Description of Artificial Sequence: Synthetic peptide
FPISPIETV

SEQ ID NO: 3261 - protein, 9 aa, synthetic construct
  REGION 1..9: note = Description of Artificial Sequence: Synthetic peptide
QPDSSESEL

SEQ ID NO: 3262 - protein, 9 aa, synthetic construct
  REGION 1..9: note = Description of Artificial Sequence: Synthetic peptide
QPDRSESEL

SEQ ID NO: 3263 - protein, 9 aa, synthetic construct
  REGION 1..9: note = Description of Artificial Sequence: Synthetic peptide
DPNPQEVNL

SEQ ID NO: 3264 - protein, 9 aa, synthetic construct
  REGION 1..9: note = Description of Artificial Sequence: Synthetic peptide
SAEPVPLQL

SEQ ID NO: 3265 - protein, 9 aa, synthetic construct
  REGION 1..9: note = Description of Artificial Sequence: Synthetic peptide
YSTQIDPDL

SEQ ID NO: 3266 - protein, 9 aa, synthetic construct
  REGION 1..9: note = Description of Artificial Sequence: Synthetic peptide
DPNPQEVDL

SEQ ID NO: 3267 - protein, 9 aa, synthetic construct
  REGION 1..9: note = Description of Artificial Sequence: Synthetic peptide
DPNPQEINL

SEQ ID NO: 3268 - protein, 9 aa, synthetic construct
  REGION 1..9: note = Description of Artificial Sequence: Synthetic peptide
EPIAGAETF

SEQ ID NO: 3269 - protein, 8 aa, synthetic construct
  REGION 1..8: note = Description of Artificial Sequence: Synthetic peptide
NVTEDFNM

SEQ ID NO: 3270 - protein, 8 aa, synthetic construct
  REGION 1..8: note = Description of Artificial Sequence: Synthetic peptide
LPVGTEEL

SEQ ID NO: 3271 - protein, 9 aa, synthetic construct
  REGION 1..9: note = Description of Artificial Sequence: Synthetic peptide
VPLTREAEL

SEQ ID NO: 3272 - protein, 9 aa, synthetic construct
  REGION 1..9: note = Description of Artificial Sequence: Synthetic peptide
FPISPIETV

SEQ ID NO: 3273 - protein, 9 aa, synthetic construct
  REGION 1..9: note = Description of Artificial Sequence: Synthetic peptide
DPNPQEVNL

SEQ ID NO: 3274 - protein, 9 aa, synthetic construct
  REGION 1..9: note = Description of Artificial Sequence: Synthetic peptide
FPISPIETV

SEQ ID NO: 3275 - protein, 9 aa, synthetic construct
  REGION 1..9: note = Description of Artificial Sequence: Synthetic peptide
EPYNPAISL

SEQ ID NO: 3276 - protein, 9 aa, synthetic construct
  REGION 1..9: note = Description of Artificial Sequence: Synthetic peptide
QAIEAQQHL

SEQ ID NO: 3277 - protein, 9 aa, synthetic construct
  REGION 1..9: note = Description of Artificial Sequence: Synthetic peptide
EPIAGAETF

SEQ ID NO: 3278 - protein, 8 aa, synthetic construct
  REGION 1..8: note = Description of Artificial Sequence: Synthetic peptide
LPVGTEEL

SEQ ID NO: 3279 - protein, 9 aa, synthetic construct
  REGION 1..9: note = Description of Artificial Sequence: Synthetic peptide
SAEPVPLQL

SEQ ID NO: 3280 - protein, 9 aa, synthetic construct
  REGION 1..9: note = Description of Artificial Sequence: Synthetic peptide
FPNATTIIF

SEQ ID NO: 3281 - protein, 9 aa, synthetic construct
  REGION 1..9: note = Description of Artificial Sequence: Synthetic peptide
EPSTPAISL

SEQ ID NO: 3282 - protein, 9 aa, synthetic construct
  REGION 1..9: note = Description of Artificial Sequence: Synthetic peptide
VPLTREAEL

SEQ ID NO: 3283 - protein, 9 aa, synthetic construct
  REGION 1..9: note = Description of Artificial Sequence: Synthetic peptide
YSTQIDPDL

SEQ ID NO: 3284 - protein, 9 aa, synthetic construct
  REGION 1..9: note = Description of Artificial Sequence: Synthetic peptide
DPNPQEVDL

SEQ ID NO: 3285 - protein, 9 aa, synthetic construct
  REGION 1..9: note = Description of Artificial Sequence: Synthetic peptide
DPNPQEINL

SEQ ID NO: 3286 - protein, 9 aa, synthetic construct
  REGION 1..9: note = Description of Artificial Sequence: Synthetic peptide
TPQDLNTML

SEQ ID NO: 3287 - protein, 9 aa, synthetic construct
  REGION 1..9: note = Description of Artificial Sequence: Synthetic peptide
IPTPNPEGL

SEQ ID NO: 3288 - protein, 9 aa, synthetic construct
  REGION 1..9: note = Description of Artificial Sequence: Synthetic peptide
IVTDSQYAL

SEQ ID NO: 3289 - protein, 10 aa, synthetic construct
  REGION 1..10: note = Description of Artificial Sequence: Synthetic peptide
SPIETVPVKL

SEQ ID NO: 3290 - protein, 9 aa, synthetic construct
  REGION 1..9: note = Description of Artificial Sequence: Synthetic peptide
EPIVGAETF

SEQ ID NO: 3291 - protein, 9 aa, synthetic construct
  REGION 1..9: note = Description of Artificial Sequence: Synthetic peptide
QPDSSESEL

SEQ ID NO: 3292 - protein, 10 aa, synthetic construct
  REGION 1..10: note = Description of Artificial Sequence: Synthetic peptide
SALPVGTEEL

SEQ ID NO: 3293 - protein, 10 aa, synthetic construct
  REGION 1..10: note = Description of Artificial Sequence: Synthetic peptide
NANPDCKTIL

SEQ ID NO: 3294 - protein, 9 aa, synthetic construct
  REGION 1..9: note = Description of Artificial Sequence: Synthetic peptide
SLFGNDPLL

SEQ ID NO: 3295 - protein, 9 aa, synthetic construct
  REGION 1..9: note = Description of Artificial Sequence: Synthetic peptide
YHTQIDPDL

SEQ ID NO: 3296 - protein, 11 aa, synthetic construct
  REGION 1..11: note = Description of Artificial Sequence: Synthetic peptide
LPVGTEELKSL

SEQ ID NO: 3297 - protein, 10 aa, synthetic construct
  REGION 1..10: note = Description of Artificial Sequence: Synthetic peptide
QAIEAQQHLL

SEQ ID NO: 3298 - protein, 9 aa, synthetic construct
  REGION 1..9: note = Description of Artificial Sequence: Synthetic peptide
SPSGGDLEI

SEQ ID NO: 3299 - protein, 11 aa, synthetic construct
  REGION 1..11: note = Description of Artificial Sequence: Synthetic peptide
IPAETGQETAY

SEQ ID NO: 3300 - protein, 11 aa, synthetic construct
  REGION 1..11: note = Description of Artificial Sequence: Synthetic peptide
IPTETGQDTAY

SEQ ID NO: 3301 - protein, 9 aa, synthetic construct
  REGION 1..9: note = Description of Artificial Sequence: Synthetic peptide
EPIAGAETF

SEQ ID NO: 3302 - protein, 9 aa, synthetic construct
  REGION 1..9: note = Description of Artificial Sequence: Synthetic peptide
EPIVGAETF

SEQ ID NO: 3303 - protein, 9 aa, synthetic construct
  REGION 1..9: note = Description of Artificial Sequence: Synthetic peptide
NPEIIIYQY

SEQ ID NO: 3304 - protein, 9 aa, synthetic construct
  REGION 1..9: note = Description of Artificial Sequence: Synthetic peptide
NPEMVIYQY

SEQ ID NO: 3305 - protein, 9 aa, synthetic construct
  REGION 1..9: note = Description of Artificial Sequence: Synthetic peptide
QPDSSESEL

SEQ ID NO: 3306 - protein, 9 aa, synthetic construct
  REGION 1..9: note = Description of Artificial Sequence: Synthetic peptide
TVLDVGDAY

SEQ ID NO: 3307 - protein, 10 aa, synthetic construct
  REGION 1..10: note = Description of Artificial Sequence: Synthetic peptide
NPPIPVGEIY

SEQ ID NO: 3308 - protein, 9 aa, synthetic construct
  REGION 1..9: note = Description of Artificial Sequence: Synthetic peptide
FPNATTIIF

SEQ ID NO: 3309 - protein, 8 aa, synthetic construct
  REGION 1..8: note = Description of Artificial Sequence: Synthetic peptide
TPGPGIRY

SEQ ID NO: 3310 - protein, 9 aa, synthetic construct
  REGION 1..9: note = Description of Artificial Sequence: Synthetic peptide
QPDSSESEL

SEQ ID NO: 3311 - protein, 9 aa, synthetic construct
  REGION 1..9: note = Description of Artificial Sequence: Synthetic peptide
DPNPQEVNL

SEQ ID NO: 3312 - protein, 9 aa, synthetic construct
  REGION 1..9: note = Description of Artificial Sequence: Synthetic peptide
QPDRSESEL

SEQ ID NO: 3313 - protein, 9 aa, synthetic construct
  REGION 1..9: note = Description of Artificial Sequence: Synthetic peptide
VPLTREAEL

SEQ ID NO: 3314 - protein, 9 aa, synthetic construct
  REGION 1..9: note = Description of Artificial Sequence: Synthetic peptide
DPNPQEVDL

SEQ ID NO: 3315 - protein, 9 aa, synthetic construct
  REGION 1..9: note = Description of Artificial Sequence: Synthetic peptide
DPNPQEINL

SEQ ID NO: 3316 - protein, 9 aa, synthetic construct
  REGION 1..9: note = Description of Artificial Sequence: Synthetic peptide
SAEPVPLQL

SEQ ID NO: 3317 - protein, 9 aa, synthetic construct
  REGION 1..9: note = Description of Artificial Sequence: Synthetic peptide
EPIAGAETF

SEQ ID NO: 3318 - protein, 8 aa, synthetic construct
  REGION 1..8: note = Description of Artificial Sequence: Synthetic peptide
LPVGTEEL

SEQ ID NO: 3319 - protein, 9 aa, synthetic construct
  REGION 1..9: note = Description of Artificial Sequence: Synthetic peptide
YSTQIDPDL

SEQ ID NO: 3320 - protein, 8 aa, synthetic construct
  REGION 1..8: note = Description of Artificial Sequence: Synthetic peptide
NVTEDFNM

SEQ ID NO: 3321 - protein, 9 aa, synthetic construct
  REGION 1..9: note = Description of Artificial Sequence: Synthetic peptide
FPISPIETV

SEQ ID NO: 3322 - protein, 8 aa, synthetic construct
  REGION 1..8: note = Description of Artificial Sequence: Synthetic peptide
DPDLADHL

SEQ ID NO: 3323 - protein, 9 aa, synthetic construct
  REGION 1..9: note = Description of Artificial Sequence: Synthetic peptide
IPTPNPEGL

SEQ ID NO: 3324 - protein, 9 aa, synthetic construct
  REGION 1..9: note = Description of Artificial Sequence: Synthetic peptide
QAIEAQQHL

SEQ ID NO: 3325 - protein, 9 aa, synthetic construct
  REGION 1..9: note = Description of Artificial Sequence: Synthetic peptide
VDDPEREVL

SEQ ID NO: 3326 - protein, 9 aa, synthetic construct
  REGION 1..9: note = Description of Artificial Sequence: Synthetic peptide
EPIVGAETF

SEQ ID NO: 3327 - protein, 9 aa, synthetic construct
  REGION 1..9: note = Description of Artificial Sequence: Synthetic peptide
AEWDRVHPV

SEQ ID NO: 3328 - protein, 9 aa, synthetic construct
  REGION 1..9: note = Description of Artificial Sequence: Synthetic peptide
QDLARHGAV

SEQ ID NO: 3329 - protein, 8 aa, synthetic construct
  REGION 1..8: note = Description of Artificial Sequence: Synthetic peptide
VDAIAVTV

SEQ ID NO: 3330 - protein, 9 aa, synthetic construct
  REGION 1..9: note = Description of Artificial Sequence: Synthetic peptide
TEAVQKITM

SEQ ID NO: 3331 - protein, 8 aa, synthetic construct
  REGION 1..8: note = Description of Artificial Sequence: Synthetic peptide
IDSISERV

SEQ ID NO: 3332 - protein, 8 aa, synthetic construct
  REGION 1..8: note = Description of Artificial Sequence: Synthetic peptide
RDAETTLF

SEQ ID NO: 3333 - protein, 8 aa, synthetic construct
  REGION 1..8: note = Description of Artificial Sequence: Synthetic peptide
YDTEVHNV

SEQ ID NO: 3334 - protein, 8 aa, synthetic construct
  REGION 1..8: note = Description of Artificial Sequence: Synthetic peptide
NDSSSETF

SEQ ID NO: 3335 - protein, 8 aa, synthetic construct
  REGION 1..8: note = Description of Artificial Sequence: Synthetic peptide
AEHLKTAV

SEQ ID NO: 3336 - protein, 8 aa, synthetic construct
  REGION 1..8: note = Description of Artificial Sequence: Synthetic peptide
LENVTENF

SEQ ID NO: 3337 - protein, 8 aa, synthetic construct
  REGION 1..8: note = Description of Artificial Sequence: Synthetic peptide
FDTIAVAV

SEQ ID NO: 3338 - protein, 9 aa, synthetic construct
  REGION 1..9: note = Description of Artificial Sequence: Synthetic peptide
TEAVQKIVM

SEQ ID NO: 3339 - protein, 9 aa, synthetic construct
  REGION 1..9: note = Description of Artificial Sequence: Synthetic peptide
YHTQIDPDL

SEQ ID NO: 3340 - protein, 9 aa, synthetic construct
  REGION 1..9: note = Description of Artificial Sequence: Synthetic peptide
THTNDIKQL

SEQ ID NO: 3341 - protein, 9 aa, synthetic construct
  REGION 1..9: note = Description of Artificial Sequence: Synthetic peptide
TQSPINEEI

SEQ ID NO: 3342 - protein, 9 aa, synthetic construct
  REGION 1..9: note = Description of Artificial Sequence: Synthetic peptide
SHFPNATTI

SEQ ID NO: 3343 - protein, 9 aa, synthetic construct
  REGION 1..9: note = Description of Artificial Sequence: Synthetic peptide
THTNDVKQL

SEQ ID NO: 3344 - protein, 9 aa, synthetic construct
  REGION 1..9: note = Description of Artificial Sequence: Synthetic peptide
IHTDNGPNF

SEQ ID NO: 3345 - protein, 10 aa, synthetic construct
  REGION 1..10: note = Description of Artificial Sequence: Synthetic peptide
HQNPVSEQSL

SEQ ID NO: 3346 - protein, 10 aa, synthetic construct
  REGION 1..10: note = Description of Artificial Sequence: Synthetic peptide
SHVQSTNTNI

SEQ ID NO: 3347 - protein, 11 aa, synthetic construct
  REGION 1..11: note = Description of Artificial Sequence: Synthetic peptide
DHQNPVSEQSL

SEQ ID NO: 3348 - protein, 9 aa, synthetic construct
  REGION 1..9: note = Description of Artificial Sequence: Synthetic peptide
IHSTNQNVM

SEQ ID NO: 3349 - protein, 9 aa, synthetic construct
  REGION 1..9: note = Description of Artificial Sequence: Synthetic peptide
THLEGKVIL

SEQ ID NO: 3350 - protein, 9 aa, synthetic construct
  REGION 1..9: note = Description of Artificial Sequence: Synthetic peptide
EHFPNKTII

SEQ ID NO: 3351 - protein, 9 aa, synthetic construct
  REGION 1..9: note = Description of Artificial Sequence: Synthetic peptide
NREPSTPAI

SEQ ID NO: 3352 - protein, 9 aa, synthetic construct
  REGION 1..9: note = Description of Artificial Sequence: Synthetic peptide
TREPYNPAI

SEQ ID NO: 3353 - protein, 9 aa, synthetic construct
  REGION 1..9: note = Description of Artificial Sequence: Synthetic peptide
THSYNFPQI

SEQ ID NO: 3354 - protein, 11 aa, synthetic construct
  REGION 1..11: note = Description of Artificial Sequence: Synthetic peptide
EQEPIVGAETF

SEQ ID NO: 3355 - protein, 11 aa, synthetic construct
  REGION 1..11: note = Description of Artificial Sequence: Synthetic peptide
TQIDPDLADHL

SEQ ID NO: 3356 - protein, 9 aa, synthetic construct
  REGION 1..9: note = Description of Artificial Sequence: Synthetic peptide
TQDFWEVQL

SEQ ID NO: 3357 - protein, 10 aa, synthetic construct
  REGION 1..10: note = Description of Artificial Sequence: Synthetic peptide
IHTDNGPNFI

SEQ ID NO: 3358 - protein, 11 aa, synthetic construct
  REGION 1..11: note = Description of Artificial Sequence: Synthetic peptide
SHVQSTNTNIM

SEQ ID NO: 3359 - protein, 10 aa, synthetic construct
  REGION 1..10: note = Description of Artificial Sequence: Synthetic peptide
HQNPVPKQSL

SEQ ID NO: 3360 - protein, 9 aa, synthetic construct
  REGION 1..9: note = Description of Artificial Sequence: Synthetic peptide
GHQAAMQML

SEQ ID NO: 3361 - protein, 9 aa, synthetic construct
  REGION 1..9: note = Description of Artificial Sequence: Synthetic peptide
EHLKTAVQM

SEQ ID NO: 3362 - protein, 9 aa, synthetic construct
  REGION 1..9: note = Description of Artificial Sequence: Synthetic peptide
QDSGLEVNI

SEQ ID NO: 3363 - protein, 9 aa, synthetic construct
  REGION 1..9: note = Description of Artificial Sequence: Synthetic peptide
ERYLQDQQL

SEQ ID NO: 3364 - protein, 10 aa, synthetic construct
  REGION 1..10: note = Description of Artificial Sequence: Synthetic peptide
IHSTNQNVMM

SEQ ID NO: 3365 - protein, 10 aa, synthetic construct
  REGION 1..10: note = Description of Artificial Sequence: Synthetic peptide
QIDSISERVL

SEQ ID NO: 3366 - protein, 9 aa, synthetic construct
  REGION 1..9: note = Description of Artificial Sequence: Synthetic peptide
SLFGNDPLL

SEQ ID NO: 3367 - protein, 10 aa, synthetic construct
  REGION 1..10: note = Description of Artificial Sequence: Synthetic peptide
HQISVESSVI

SEQ ID NO: 3368 - protein, 9 aa, synthetic construct
  REGION 1..9: note = Description of Artificial Sequence: Synthetic peptide
NREPSTPAI

SEQ ID NO: 3369 - protein, 9 aa, synthetic construct
  REGION 1..9: note = Description of Artificial Sequence: Synthetic peptide
SHFPNATTI

SEQ ID NO: 3370 - protein, 9 aa, synthetic construct
  REGION 1..9: note = Description of Artificial Sequence: Synthetic peptide
YHTQIDPDL

SEQ ID NO: 3371 - protein, 9 aa, synthetic construct
  REGION 1..9: note = Description of Artificial Sequence: Synthetic peptide
TREPYNPAI

SEQ ID NO: 3372 - protein, 11 aa, synthetic construct
  REGION 1..11: note = Description of Artificial Sequence: Synthetic peptide
DHQNPVSEQSL

SEQ ID NO: 3373 - protein, 9 aa, synthetic construct
  REGION 1..9: note = Description of Artificial Sequence: Synthetic peptide
THTNDIKQL

SEQ ID NO: 3374 - protein, 9 aa, synthetic construct
  REGION 1..9: note = Description of Artificial Sequence: Synthetic peptide
IHSTNQNVM

SEQ ID NO: 3375 - protein, 9 aa, synthetic construct
  REGION 1..9: note = Description of Artificial Sequence: Synthetic peptide
EQHTPTISL

SEQ ID NO: 3376 - protein, 9 aa, synthetic construct
  REGION 1..9: note = Description of Artificial Sequence: Synthetic peptide
THTNDVKQL

SEQ ID NO: 3377 - protein, 9 aa, synthetic construct
  REGION 1..9: note = Description of Artificial Sequence: Synthetic peptide
ERYLQDQQL

SEQ ID NO: 3378 - protein, 10 aa, synthetic construct
  REGION 1..10: note = Description of Artificial Sequence: Synthetic peptide
HQNPVSEQSL

SEQ ID NO: 3379 - protein, 9 aa, synthetic construct
  REGION 1..9: note = Description of Artificial Sequence: Synthetic peptide
SQVQNTNIM

SEQ ID NO: 3380 - protein, 9 aa, synthetic construct
  REGION 1..9: note = Description of Artificial Sequence: Synthetic peptide
THLEGKVIL

SEQ ID NO: 3381 - protein, 9 aa, synthetic construct
  REGION 1..9: note = Description of Artificial Sequence: Synthetic peptide
EHLKTAVQM

SEQ ID NO: 3382 - protein, 9 aa, synthetic construct
  REGION 1..9: note = Description of Artificial Sequence: Synthetic peptide
EHFPNKTII

SEQ ID NO: 3383 - protein, 9 aa, synthetic construct
  REGION 1..9: note = Description of Artificial Sequence: Synthetic peptide
TQSPINEEI

SEQ ID NO: 3384 - protein, 10 aa, synthetic construct
  REGION 1..10: note = Description of Artificial Sequence: Synthetic peptide
HQNPVPKQSL

SEQ ID NO: 3385 - protein, 11 aa, synthetic construct
  REGION 1..11: note = Description of Artificial Sequence: Synthetic peptide
TQIDPDLADHL

SEQ ID NO: 3386 - protein, 8 aa, synthetic construct
  REGION 1..8: note = Description of Artificial Sequence: Synthetic peptide
MHADIISL

SEQ ID NO: 3387 - protein, 9 aa, synthetic construct
  REGION 1..9: note = Description of Artificial Sequence: Synthetic peptide
IHTDNGPNF

SEQ ID NO: 3388 - protein, 9 aa, synthetic construct
  REGION 1..9: note = Description of Artificial Sequence: Synthetic peptide
HQAVSPRTL

SEQ ID NO: 3389 - protein, 8 aa, synthetic construct
  REGION 1..8: note = Description of Artificial Sequence: Synthetic peptide
QHTPTISL

SEQ ID NO: 3390 - protein, 9 aa, synthetic construct
  REGION 1..9: note = Description of Artificial Sequence: Synthetic peptide
HQAISPRTL

SEQ ID NO: 3391 - protein, 11 aa, synthetic construct
  REGION 1..11: note = Description of Artificial Sequence: Synthetic peptide
NREPSTPAISL

SEQ ID NO: 3392 - protein, 8 aa, synthetic construct
  REGION 1..8: note = Description of Artificial Sequence: Synthetic peptide
THGIKPVA

SEQ ID NO: 3393 - protein, 8 aa, synthetic construct
  REGION 1..8: note = Description of Artificial Sequence: Synthetic peptide
DQIVIEIC

SEQ ID NO: 3394 - protein, 8 aa, synthetic construct
  REGION 1..8: note = Description of Artificial Sequence: Synthetic peptide
VHIPLKEA

SEQ ID NO: 3395 - protein, 10 aa, synthetic construct
  REGION 1..10: note = Description of Artificial Sequence: Synthetic peptide
SQYALGIIQA

SEQ ID NO: 3396 - protein, 8 aa, synthetic construct
  REGION 1..8: note = Description of Artificial Sequence: Synthetic peptide
AHGIRPVA

SEQ ID NO: 3397 - protein, 9 aa, synthetic construct
  REGION 1..9: note = Description of Artificial Sequence: Synthetic peptide
SHFPNATTI

SEQ ID NO: 3398 - protein, 9 aa, synthetic construct
  REGION 1..9: note = Description of Artificial Sequence: Synthetic peptide
VQLGIPHPA

SEQ ID NO: 3399 - protein, 8 aa, synthetic construct
  REGION 1..8: note = Description of Artificial Sequence: Synthetic peptide
GQMVHQAV

SEQ ID NO: 3400 - protein, 8 aa, synthetic construct
  REGION 1..8: note = Description of Artificial Sequence: Synthetic peptide
THGIRPVV

SEQ ID NO: 3401 - protein, 8 aa, synthetic construct
  REGION 1..8: note = Description of Artificial Sequence: Synthetic peptide
GKIIVVAV

SEQ ID NO: 3402 - protein, 9 aa, synthetic construct
  REGION 1..9: note = Description of Artificial Sequence: Synthetic peptide
QQQLLKLTV

SEQ ID NO: 3403 - protein, 9 aa, synthetic construct
  REGION 1..9: note = Description of Artificial Sequence: Synthetic peptide
QNYPIVQNA

SEQ ID NO: 3404 - protein, 8 aa, synthetic construct
  REGION 1..8: note = Description of Artificial Sequence: Synthetic peptide
VHIPLGEA

SEQ ID NO: 3405 - protein, 8 aa, synthetic construct
  REGION 1..8: note = Description of Artificial Sequence: Synthetic peptide
DQIAIEIC

SEQ ID NO: 3406 - protein, 9 aa, synthetic construct
  REGION 1..9: note = Description of Artificial Sequence: Synthetic peptide
EHFPNKTII

SEQ ID NO: 3407 - protein, 9 aa, synthetic construct
  REGION 1..9: note = Description of Artificial Sequence: Synthetic peptide
DNGPNFISA

SEQ ID NO: 3408 - protein, 9 aa, synthetic construct
  REGION 1..9: note = Description of Artificial Sequence: Synthetic peptide
YQLETEPIA

SEQ ID NO: 3409 - protein, 8 aa, synthetic construct
  REGION 1..8: note = Description of Artificial Sequence: Synthetic peptide
WQRPLVTV

SEQ ID NO: 3410 - protein, 8 aa, synthetic construct
  REGION 1..8: note = Description of Artificial Sequence: Synthetic peptide
DQSLMPCV

SEQ ID NO: 3411 - protein, 9 aa, synthetic construct
  REGION 1..9: note = Description of Artificial Sequence: Synthetic peptide
YQLEKEPIA

SEQ ID NO: 3412 - protein, 9 aa, synthetic construct
  REGION 1..9: note = Description of Artificial Sequence: Synthetic peptide
DNGPNFTSA

SEQ ID NO: 3413 - protein, 9 aa, synthetic construct
  REGION 1..9: note = Description of Artificial Sequence: Synthetic peptide
EQVDKLVSC

SEQ ID NO: 3414 - protein, 8 aa, synthetic construct
  REGION 1..8: note = Description of Artificial Sequence: Synthetic peptide
SHFPNATT

SEQ ID NO: 3415 - protein, 9 aa, synthetic construct
  REGION 1..9: note = Description of Artificial Sequence: Synthetic peptide
TREPYNPAI

SEQ ID NO: 3416 - protein, 9 aa, synthetic construct
  REGION 1..9: note = Description of Artificial Sequence: Synthetic peptide
THGIKPVAS

SEQ ID NO: 3417 - protein, 8 aa, synthetic construct
  REGION 1..8: note = Description of Artificial Sequence: Synthetic peptide
GKVILVAV

SEQ ID NO: 3418 - protein, 11 aa, synthetic construct
  REGION 1..11: note = Description of Artificial Sequence: Synthetic peptide
THLEGKIIVVA

SEQ ID NO: 3419 - protein, 9 aa, synthetic construct
  REGION 1..9: note = Description of Artificial Sequence: Synthetic peptide
THLEGKIIV

SEQ ID NO: 3420 - protein, 9 aa, synthetic construct
  REGION 1..9: note = Description of Artificial Sequence: Synthetic peptide
SNLLQAIEA

SEQ ID NO: 3421 - protein, 9 aa, synthetic construct
  REGION 1..9: note = Description of Artificial Sequence: Synthetic peptide
GRDSFLVEA

SEQ ID NO: 3422 - protein, 8 aa, synthetic construct
  REGION 1..8: note = Description of Artificial Sequence: Synthetic peptide
DRLHPVQA

SEQ ID NO: 3423 - protein, 9 aa, synthetic construct
  REGION 1..9: note = Description of Artificial Sequence: Synthetic peptide
GAVTIRNTA

SEQ ID NO: 3424 - protein, 9 aa, synthetic construct
  REGION 1..9: note = Description of Artificial Sequence: Synthetic peptide
TESNDTITL

SEQ ID NO: 3425 - protein, 9 aa, synthetic construct
  REGION 1..9: note = Description of Artificial Sequence: Synthetic peptide
AEDPEREVL

SEQ ID NO: 3426 - protein, 9 aa, synthetic construct
  REGION 1..9: note = Description of Artificial Sequence: Synthetic peptide
RESNDNITL

SEQ ID NO: 3427 - protein, 10 aa, synthetic construct
  REGION 1..10: note = Description of Artificial Sequence: Synthetic peptide
IEVKDTKEAL

SEQ ID NO: 3428 - protein, 10 aa, synthetic construct
  REGION 1..10: note = Description of Artificial Sequence: Synthetic peptide
TETTNQKTEL

SEQ ID NO: 3429 - protein, 9 aa, synthetic construct
  REGION 1..9: note = Description of Artificial Sequence: Synthetic peptide
TEAVQKITM

SEQ ID NO: 3430 - protein, 9 aa, synthetic construct
  REGION 1..9: note = Description of Artificial Sequence: Synthetic peptide
TEAVQKIVM

SEQ ID NO: 3431 - protein, 10 aa, synthetic construct
  REGION 1..10: note = Description of Artificial Sequence: Synthetic peptide
TETTNQRTEL

SEQ ID NO: 3432 - protein, 11 aa, synthetic construct
  REGION 1..11: note = Description of Artificial Sequence: Synthetic peptide
EEIASSSKQEL

SEQ ID NO: 3433 - protein, 10 aa, synthetic construct
  REGION 1..10: note = Description of Artificial Sequence: Synthetic peptide
REPSTPAISL

SEQ ID NO: 3434 - protein, 10 aa, synthetic construct
  REGION 1..10: note = Description of Artificial Sequence: Synthetic peptide
AEGTDRVIEL

SEQ ID NO: 3435 - protein, 9 aa, synthetic construct
  REGION 1..9: note = Description of Artificial Sequence: Synthetic peptide
VELVGHSSL

SEQ ID NO: 3436 - protein, 10 aa, synthetic construct
  REGION 1..10: note = Description of Artificial Sequence: Synthetic peptide
TETGVGGHQI

SEQ ID NO: 3437 - protein, 11 aa, synthetic construct
  REGION 1..11: note = Description of Artificial Sequence: Synthetic peptide
GEQDRDTSVRL

SEQ ID NO: 3438 - protein, 9 aa, synthetic construct
  REGION 1..9: note = Description of Artificial Sequence: Synthetic peptide
IEGQLKEAL

SEQ ID NO: 3439 - protein, 11 aa, synthetic construct
  REGION 1..11: note = Description of Artificial Sequence: Synthetic peptide
SERESNDNITL

SEQ ID NO: 3440 - protein, 9 aa, synthetic construct
  REGION 1..9: note = Description of Artificial Sequence: Synthetic peptide
MEEEITSSL

SEQ ID NO: 3441 - protein, 10 aa, synthetic construct
  REGION 1..10: note = Description of Artificial Sequence: Synthetic peptide
REPYNPAISL

SEQ ID NO: 3442 - protein, 10 aa, synthetic construct
  REGION 1..10: note = Description of Artificial Sequence: Synthetic peptide
SEDCGTSGTL

SEQ ID NO: 3443 - protein, 9 aa, synthetic construct
  REGION 1..9: note = Description of Artificial Sequence: Synthetic peptide
SEGATPQDL

SEQ ID NO: 3444 - protein, 10 aa, synthetic construct
  REGION 1..10: note = Description of Artificial Sequence: Synthetic peptide
REQHTPTISL

SEQ ID NO: 3445 - protein, 8 aa, synthetic construct
  REGION 1..8: note = Description of Artificial Sequence: Synthetic peptide
IETVPVKL

SEQ ID NO: 3446 - protein, 9 aa, synthetic construct
  REGION 1..9: note = Description of Artificial Sequence: Synthetic peptide
QEKNEQDVL

SEQ ID NO: 3447 - protein, 10 aa, synthetic construct
  REGION 1..10: note = Description of Artificial Sequence: Synthetic peptide
KEISNYTETI

SEQ ID NO: 3448 - protein, 9 aa, synthetic construct
  REGION 1..9: note = Description of Artificial Sequence: Synthetic peptide
IEGQLREAL

SEQ ID NO: 3449 - protein, 11 aa, synthetic construct
  REGION 1..11: note = Description of Artificial Sequence: Synthetic peptide
EEITSSLKQEL

SEQ ID NO: 3450 - protein, 9 aa, synthetic construct
  REGION 1..9: note = Description of Artificial Sequence: Synthetic peptide
QEKNEQDLL

SEQ ID NO: 3451 - protein, 8 aa, synthetic construct
  REGION 1..8: note = Description of Artificial Sequence: Synthetic peptide
GEEITSSL

SEQ ID NO: 3452 - protein, 10 aa, synthetic construct
  REGION 1..10: note = Description of Artificial Sequence: Synthetic peptide
QESVESSVIL

SEQ ID NO: 3453 - protein, 9 aa, synthetic construct
  REGION 1..9: note = Description of Artificial Sequence: Synthetic peptide
SESEIVNQI

SEQ ID NO: 3454 - protein, 10 aa, synthetic construct
  REGION 1..10: note = Description of Artificial Sequence: Synthetic peptide
AEHLKTAVQM

SEQ ID NO: 3455 - protein, 9 aa, synthetic construct
  REGION 1..9: note = Description of Artificial Sequence: Synthetic peptide
TEGENNSLL

SEQ ID NO: 3456 - protein, 11 aa, synthetic construct
  REGION 1..11: note = Description of Artificial Sequence: Synthetic peptide
SEIVNQIIEKL

SEQ ID NO: 3457 - protein, 8 aa, synthetic construct
  REGION 1..8: note = Description of Artificial Sequence: Synthetic peptide
IEAQQHLL

SEQ ID NO: 3458 - protein, 9 aa, synthetic construct
  REGION 1..9: note = Description of Artificial Sequence: Synthetic peptide
KEISTYTDI

SEQ ID NO: 3459 - protein, 9 aa, synthetic construct
  REGION 1..9: note = Description of Artificial Sequence: Synthetic peptide
TEAVQKITM

SEQ ID NO: 3460 - protein, 9 aa, synthetic construct
  REGION 1..9: note = Description of Artificial Sequence: Synthetic peptide
TEAVQKIVM

SEQ ID NO: 3461 - protein, 9 aa, synthetic construct
  REGION 1..9: note = Description of Artificial Sequence: Synthetic peptide
TESNDTITL

SEQ ID NO: 3462 - protein, 9 aa, synthetic construct
  REGION 1..9: note = Description of Artificial Sequence: Synthetic peptide
AEDPEREVL

SEQ ID NO: 3463 - protein, 11 aa, synthetic construct
  REGION 1..11: note = Description of Artificial Sequence: Synthetic peptide
EEIASSSKQEL

SEQ ID NO: 3464 - protein, 11 aa, synthetic construct
  REGION 1..11: note = Description of Artificial Sequence: Synthetic peptide
SERESNDNITL

SEQ ID NO: 3465 - protein, 10 aa, synthetic construct
  REGION 1..10: note = Description of Artificial Sequence: Synthetic peptide
TETTNQRTEL

SEQ ID NO: 3466 - protein, 10 aa, synthetic construct
  REGION 1..10: note = Description of Artificial Sequence: Synthetic peptide
TETTNQKTEL

SEQ ID NO: 3467 - protein, 9 aa, synthetic construct
  REGION 1..9: note = Description of Artificial Sequence: Synthetic peptide
VELVGHSSL

SEQ ID NO: 3468 - protein, 10 aa, synthetic construct
  REGION 1..10: note = Description of Artificial Sequence: Synthetic peptide
AEGTDRVIEL

SEQ ID NO: 3469 - protein, 10 aa, synthetic construct
  REGION 1..10: note = Description of Artificial Sequence: Synthetic peptide
TETGVGGHQI

SEQ ID NO: 3470 - protein, 8 aa, synthetic construct
  REGION 1..8: note = Description of Artificial Sequence: Synthetic peptide
TDIQTKEL

SEQ ID NO: 3471 - protein, 10 aa, synthetic construct
  REGION 1..10: note = Description of Artificial Sequence: Synthetic peptide
AEHLKTAVQM

SEQ ID NO: 3472 - protein, 11 aa, synthetic construct
  REGION 1..11: note = Description of Artificial Sequence: Synthetic peptide
EEITSSLKQEL

SEQ ID NO: 3473 - protein, 10 aa, synthetic construct
  REGION 1..10: note = Description of Artificial Sequence: Synthetic peptide
IEVKDTKEAL

SEQ ID NO: 3474 - protein, 11 aa, synthetic construct
  REGION 1..11: note = Description of Artificial Sequence: Synthetic peptide
SEIVNQIIEKL

SEQ ID NO: 3475 - protein, 9 aa, synthetic construct
  REGION 1..9: note = Description of Artificial Sequence: Synthetic peptide
IEGQLKEAL

SEQ ID NO: 3476 - protein, 10 aa, synthetic construct
  REGION 1..10: note = Description of Artificial Sequence: Synthetic peptide
REPSTPAISL

SEQ ID NO: 3477 - protein, 11 aa, synthetic construct
  REGION 1..11: note = Description of Artificial Sequence: Synthetic peptide
GEQDRDTSVRL

SEQ ID NO: 3478 - protein, 8 aa, synthetic construct
  REGION 1..8: note = Description of Artificial Sequence: Synthetic peptide
IETVPVKL

SEQ ID NO: 3479 - protein, 9 aa, synthetic construct
  REGION 1..9: note = Description of Artificial Sequence: Synthetic peptide
SESEIVNQI

SEQ ID NO: 3480 - protein, 9 aa, synthetic construct
  REGION 1..9: note = Description of Artificial Sequence: Synthetic peptide
AEWDRVHPV

SEQ ID NO: 3481 - protein, 8 aa, synthetic construct
  REGION 1..8: note = Description of Artificial Sequence: Synthetic peptide
IEAQQQML

SEQ ID NO: 3482 - protein, 10 aa, synthetic construct
  REGION 1..10: note = Description of Artificial Sequence: Synthetic peptide
REPYNPAISL

SEQ ID NO: 3483 - protein, 9 aa, synthetic construct
  REGION 1..9: note = Description of Artificial Sequence: Synthetic peptide
RESNDNITL

SEQ ID NO: 3484 - protein, 9 aa, synthetic construct
  REGION 1..9: note = Description of Artificial Sequence: Synthetic peptide
IEGQLREAL

SEQ ID NO: 3485 - protein, 10 aa, synthetic construct
  REGION 1..10: note = Description of Artificial Sequence: Synthetic peptide
REQHTPTISL

SEQ ID NO: 3486 - protein, 8 aa, synthetic construct
  REGION 1..8: note = Description of Artificial Sequence: Synthetic peptide
VDAIAVTV

SEQ ID NO: 3487 - protein, 10 aa, synthetic construct
  REGION 1..10: note = Description of Artificial Sequence: Synthetic peptide
KEISNYTETI

SEQ ID NO: 3488 - protein, 8 aa, synthetic construct
  REGION 1..8: note = Description of Artificial Sequence: Synthetic peptide
IEAQQHLL

SEQ ID NO: 3489 - protein, 9 aa, synthetic construct
  REGION 1..9: note = Description of Artificial Sequence: Synthetic peptide
SERILSTCL

SEQ ID NO: 3490 - protein, 8 aa, synthetic construct
  REGION 1..8: note = Description of Artificial Sequence: Synthetic peptide
FDTIAVAV

SEQ ID NO: 3491 - protein, 9 aa, synthetic construct
  REGION 1..9: note = Description of Artificial Sequence: Synthetic peptide
QEKNEQDVL

SEQ ID NO: 3492 - protein, 9 aa, synthetic construct
  REGION 1..9: note = Description of Artificial Sequence: Synthetic peptide
SEGATPQDL

SEQ ID NO: 3493 - protein, 9 aa, synthetic construct
  REGION 1..9: note = Description of Artificial Sequence: Synthetic peptide
AEVIPTETG

SEQ ID NO: 3494 - protein, 11 aa, synthetic construct
  REGION 1..11: note = Description of Artificial Sequence: Synthetic peptide
SEVKDNTTKEM

SEQ ID NO: 3495 - protein, 10 aa, synthetic construct
  REGION 1..10: note = Description of Artificial Sequence: Synthetic peptide
AETGVGRPQT

SEQ ID NO: 3496 - protein, 9 aa, synthetic construct
  REGION 1..9: note = Description of Artificial Sequence: Synthetic peptide
SESELVNQI

SEQ ID NO: 3497 - protein, 9 aa, synthetic construct
  REGION 1..9: note = Description of Artificial Sequence: Synthetic peptide
LDFGDVNNV

SEQ ID NO: 3498 - protein, 9 aa, synthetic construct
  REGION 1..9: note = Description of Artificial Sequence: Synthetic peptide
SEVGFPVRP

SEQ ID NO: 3499 - protein, 9 aa, synthetic construct
  REGION 1..9: note = Description of Artificial Sequence: Synthetic peptide
LETEPIAGA

SEQ ID NO: 3500 - protein, 11 aa, synthetic construct
  REGION 1..11: note = Description of Artificial Sequence: Synthetic peptide
AEWDRLHPVQA

SEQ ID NO: 3501 - protein, 9 aa, synthetic construct
  REGION 1..9: note = Description of Artificial Sequence: Synthetic peptide
GEQGAVHPC

SEQ ID NO: 3502 - protein, 9 aa, synthetic construct
  REGION 1..9: note = Description of Artificial Sequence: Synthetic peptide
LEQEPIVGA

SEQ ID NO: 3503 - protein, 9 aa, synthetic construct
  REGION 1..9: note = Description of Artificial Sequence: Synthetic peptide
LEKEPIAGA

SEQ ID NO: 3504 - protein, 10 aa, synthetic construct
  REGION 1..10: note = Description of Artificial Sequence: Synthetic peptide
NEIIGDIRQA

SEQ ID NO: 3505 - protein, 9 aa, synthetic construct
  REGION 1..9: note = Description of Artificial Sequence: Synthetic peptide
EEVGFPVRP

SEQ ID NO: 3506 - protein, 10 aa, synthetic construct
  REGION 1..10: note = Description of Artificial Sequence: Synthetic peptide
REFSSEQDRA

SEQ ID NO: 3507 - protein, 10 aa, synthetic construct
  REGION 1..10: note = Description of Artificial Sequence: Synthetic peptide
SEVHIPLGEA

SEQ ID NO: 3508 - protein, 9 aa, synthetic construct
  REGION 1..9: note = Description of Artificial Sequence: Synthetic peptide
IEVKDTKEA

SEQ ID NO: 3509 - protein, 8 aa, synthetic construct
  REGION 1..8: note = Description of Artificial Sequence: Synthetic peptide
AEGVRPTP

SEQ ID NO: 3510 - protein, 9 aa, synthetic construct
  REGION 1..9: note = Description of Artificial Sequence: Synthetic peptide
QEFGIPYNP

SEQ ID NO: 3511 - protein, 9 aa, synthetic construct
  REGION 1..9: note = Description of Artificial Sequence: Synthetic peptide
AEWDRVHPV

SEQ ID NO: 3512 - protein, 8 aa, synthetic construct
  REGION 1..8: note = Description of Artificial Sequence: Synthetic peptide
TEAVSPAA

SEQ ID NO: 3513 - protein, 9 aa, synthetic construct
  REGION 1..9: note = Description of Artificial Sequence: Synthetic peptide
GENNSLLHP

SEQ ID NO: 3514 - protein, 8 aa, synthetic construct
  REGION 1..8: note = Description of Artificial Sequence: Synthetic peptide
SESAIRKA

SEQ ID NO: 3515 - protein, 9 aa, synthetic construct
  REGION 1..9: note = Description of Artificial Sequence: Synthetic peptide
AEGVRPTPP

SEQ ID NO: 3516 - protein, 8 aa, synthetic construct
  REGION 1..8: note = Description of Artificial Sequence: Synthetic peptide
AETTLFCA

SEQ ID NO: 3517 - protein, 10 aa, synthetic construct
  REGION 1..10: note = Description of Artificial Sequence: Synthetic peptide
SEVHIPLKEA

SEQ ID NO: 3518 - protein, 9 aa, synthetic construct
  REGION 1..9: note = Description of Artificial Sequence: Synthetic peptide
AEDPEREVL

SEQ ID NO: 3519 - protein, 9 aa, synthetic construct
  REGION 1..9: note = Description of Artificial Sequence: Synthetic peptide
TEAVQKIVM

SEQ ID NO: 3520 - protein, 9 aa, synthetic construct
  REGION 1..9: note = Description of Artificial Sequence: Synthetic peptide
TEAVQKITM

SEQ ID NO: 3521 - protein, 11 aa, synthetic construct
  REGION 1..11: note = Description of Artificial Sequence: Synthetic peptide
SERESNDNITL

SEQ ID NO: 3522 - protein, 9 aa, synthetic construct
  REGION 1..9: note = Description of Artificial Sequence: Synthetic peptide
QEKNEQDVL

SEQ ID NO: 3523 - protein, 10 aa, synthetic construct
  REGION 1..10: note = Description of Artificial Sequence: Synthetic peptide
TETTNQRTEL

SEQ ID NO: 3524 - protein, 8 aa, synthetic construct
  REGION 1..8: note = Description of Artificial Sequence: Synthetic peptide
TDIQTKEL

SEQ ID NO: 3525 - protein, 9 aa, synthetic construct
  REGION 1..9: note = Description of Artificial Sequence: Synthetic peptide
SERILSTCL

SEQ ID NO: 3526 - protein, 9 aa, synthetic construct
  REGION 1..9: note = Description of Artificial Sequence: Synthetic peptide
TESNDTITL

SEQ ID NO: 3527 - protein, 8 aa, synthetic construct
  REGION 1..8: note = Description of Artificial Sequence: Synthetic peptide
AEHLKTAV

SEQ ID NO: 3528 - protein, 9 aa, synthetic construct
  REGION 1..9: note = Description of Artificial Sequence: Synthetic peptide
VELVGHSSL

SEQ ID NO: 3529 - protein, 11 aa, synthetic construct
  REGION 1..11: note = Description of Artificial Sequence: Synthetic peptide
EEIASSSKQEL

SEQ ID NO: 3530 - protein, 9 aa, synthetic construct
  REGION 1..9: note = Description of Artificial Sequence: Synthetic peptide
RESNDNITL

SEQ ID NO: 3531 - protein, 9 aa, synthetic construct
  REGION 1..9: note = Description of Artificial Sequence: Synthetic peptide
SESAIRKAI

SEQ ID NO: 3532 - protein, 9 aa, synthetic construct
  REGION 1..9: note = Description of Artificial Sequence: Synthetic peptide
IEGQLREAL

SEQ ID NO: 3533 - protein, 9 aa, synthetic construct
  REGION 1..9: note = Description of Artificial Sequence: Synthetic peptide
IEGQLKEAL

SEQ ID NO: 3534 - protein, 9 aa, synthetic construct
  REGION 1..9: note = Description of Artificial Sequence: Synthetic peptide
GEQDRDTSV

SEQ ID NO: 3535 - protein, 10 aa, synthetic construct
  REGION 1..10: note = Description of Artificial Sequence: Synthetic peptide
AEGTDRVIEL

SEQ ID NO: 3536 - protein, 8 aa, synthetic construct
  REGION 1..8: note = Description of Artificial Sequence: Synthetic peptide
IEAQQQML

SEQ ID NO: 3537 - protein, 10 aa, synthetic construct
  REGION 1..10: note = Description of Artificial Sequence: Synthetic peptide
TETTNQKTEL

SEQ ID NO: 3538 - protein, 10 aa, synthetic construct
  REGION 1..10: note = Description of Artificial Sequence: Synthetic peptide
REQHTPTISL

SEQ ID NO: 3539 - protein, 8 aa, synthetic construct
  REGION 1..8: note = Description of Artificial Sequence: Synthetic peptide
IEAQQHLL

SEQ ID NO: 3540 - protein, 9 aa, synthetic construct
  REGION 1..9: note = Description of Artificial Sequence: Synthetic peptide
QEKNEQDLL

SEQ ID NO: 3541 - protein, 11 aa, synthetic construct
  REGION 1..11: note = Description of Artificial Sequence: Synthetic peptide
GEQDRDTSVRL

SEQ ID NO: 3542 - protein, 9 aa, synthetic construct
  REGION 1..9: note = Description of Artificial Sequence: Synthetic peptide
SESAIRRAI

SEQ ID NO: 3543 - protein, 11 aa, synthetic construct
  REGION 1..11: note = Description of Artificial Sequence: Synthetic peptide
EEITSSLKQEL

SEQ ID NO: 3544 - protein, 10 aa, synthetic construct
  REGION 1..10: note = Description of Artificial Sequence: Synthetic peptide
AEHLKTAVQM

SEQ ID NO: 3545 - protein, 8 aa, synthetic construct
  REGION 1..8: note = Description of Artificial Sequence: Synthetic peptide
TERQANFL

SEQ ID NO: 3546 - protein, 10 aa, synthetic construct
  REGION 1..10: note = Description of Artificial Sequence: Synthetic peptide
REPSTPAISL

SEQ ID NO: 3547 - protein, 9 aa, synthetic construct
  REGION 1..9: note = Description of Artificial Sequence: Synthetic peptide
KEKGGLDGL

SEQ ID NO: 3548 - protein, 8 aa, synthetic construct
  REGION 1..8: note = Description of Artificial Sequence: Synthetic peptide
GDPEITTL

SEQ ID NO: 3549 - protein, 8 aa, synthetic construct
  REGION 1..8: note = Description of Artificial Sequence: Synthetic peptide
TEAVQKIV

SEQ ID NO: 3550 - protein, 8 aa, synthetic construct
  REGION 1..8: note = Description of Artificial Sequence: Synthetic peptide
IEAQQQLL

SEQ ID NO: 3551 - protein, 8 aa, synthetic construct
  REGION 1..8: note = Description of Artificial Sequence: Synthetic peptide
GEEITSSL

SEQ ID NO: 3552 - protein, 8 aa, synthetic construct
  REGION 1..8: note = Description of Artificial Sequence: Synthetic peptide
VEAIVRIL

SEQ ID NO: 3553 - protein, 9 aa, synthetic construct
  REGION 1..9: note = Description of Artificial Sequence: Synthetic peptide
SERVLRTCL

SEQ ID NO: 3554 - protein, 9 aa, synthetic construct
  REGION 1..9: note = Description of Artificial Sequence: Synthetic peptide
AEWDRVHPV

SEQ ID NO: 3555 - protein, 11 aa, synthetic construct
  REGION 1..11: note = Description of Artificial Sequence: Synthetic peptide
AEQATQDVKNW

SEQ ID NO: 3556 - protein, 11 aa, synthetic construct
  REGION 1..11: note = Description of Artificial Sequence: Synthetic peptide
AEQATQEVKNW

SEQ ID NO: 3557 - protein, 9 aa, synthetic construct
  REGION 1..9: note = Description of Artificial Sequence: Synthetic peptide
EEINLPGKW

SEQ ID NO: 3558 - protein, 11 aa, synthetic construct
  REGION 1..11: note = Description of Artificial Sequence: Synthetic peptide
SEVNIVTDSQY

SEQ ID NO: 3559 - protein, 10 aa, synthetic construct
  REGION 1..10: note = Description of Artificial Sequence: Synthetic peptide
TEKQGTTHSY

SEQ ID NO: 3560 - protein, 11 aa, synthetic construct
  REGION 1..11: note = Description of Artificial Sequence: Synthetic peptide
AEIQKQGQDQW

SEQ ID NO: 3561 - protein, 11 aa, synthetic construct
  REGION 1..11: note = Description of Artificial Sequence: Synthetic peptide
EEIASSSKQEL

SEQ ID NO: 3562 - protein, 11 aa, synthetic construct
  REGION 1..11: note = Description of Artificial Sequence: Synthetic peptide
AEDPEREVLKW

SEQ ID NO: 3563 - protein, 9 aa, synthetic construct
  REGION 1..9: note = Description of Artificial Sequence: Synthetic peptide
SESAIRKAI

SEQ ID NO: 3564 - protein, 11 aa, synthetic construct
  REGION 1..11: note = Description of Artificial Sequence: Synthetic peptide
AEIQKQGQGQW

SEQ ID NO: 3565 - protein, 11 aa, synthetic construct
  REGION 1..11: note = Description of Artificial Sequence: Synthetic peptide
NEQDVLALDKW

SEQ ID NO: 3566 - protein, 11 aa, synthetic construct
  REGION 1..11: note = Description of Artificial Sequence: Synthetic peptide
EEITSSLKQEL

SEQ ID NO: 3567 - protein, 11 aa, synthetic construct
  REGION 1..11: note = Description of Artificial Sequence: Synthetic peptide
NEQDLLALDKW

SEQ ID NO: 3568 - protein, 9 aa, synthetic construct
  REGION 1..9: note = Description of Artificial Sequence: Synthetic peptide
QELETREPY

SEQ ID NO: 3569 - protein, 10 aa, synthetic construct
  REGION 1..10: note = Description of Artificial Sequence: Synthetic peptide
NETPGVRYQY

SEQ ID NO: 3570 - protein, 9 aa, synthetic construct
  REGION 1..9: note = Description of Artificial Sequence: Synthetic peptide
SESEIVNQI

SEQ ID NO: 3571 - protein, 10 aa, synthetic construct
  REGION 1..10: note = Description of Artificial Sequence: Synthetic peptide
GEARIIVRTY

SEQ ID NO: 3572 - protein, 10 aa, synthetic construct
  REGION 1..10: note = Description of Artificial Sequence: Synthetic peptide
NETPGIRYQY

SEQ ID NO: 3573 - protein, 9 aa, synthetic construct
  REGION 1..9: note = Description of Artificial Sequence: Synthetic peptide
AETGQETAY

SEQ ID NO: 3574 - protein, 9 aa, synthetic construct
  REGION 1..9: note = Description of Artificial Sequence: Synthetic peptide
SESAIRRAI

SEQ ID NO: 3575 - protein, 10 aa, synthetic construct
  REGION 1..10: note = Description of Artificial Sequence: Synthetic peptide
GEARLIVRTY

SEQ ID NO: 3576 - protein, 11 aa, synthetic construct
  REGION 1..11: note = Description of Artificial Sequence: Synthetic peptide
SEVNIVTDSQY

SEQ ID NO: 3577 - protein, 11 aa, synthetic construct
  REGION 1..11: note = Description of Artificial Sequence: Synthetic peptide
AEQATQDVKNW

SEQ ID NO: 3578 - protein, 9 aa, synthetic construct
  REGION 1..9: note = Description of Artificial Sequence: Synthetic peptide
EEINLPGKW

SEQ ID NO: 3579 - protein, 11 aa, synthetic construct
  REGION 1..11: note = Description of Artificial Sequence: Synthetic peptide
AEQATQEVKNW

SEQ ID NO: 3580 - protein, 11 aa, synthetic construct
  REGION 1..11: note = Description of Artificial Sequence: Synthetic peptide
AEIQKQGQDQW

SEQ ID NO: 3581 - protein, 9 aa, synthetic construct
  REGION 1..9: note = Description of Artificial Sequence: Synthetic peptide
SESAIRKAI

SEQ ID NO: 3582 - protein, 11 aa, synthetic construct
  REGION 1..11: note = Description of Artificial Sequence: Synthetic peptide
AEIQKQGQGQW

SEQ ID NO: 3583 - protein, 9 aa, synthetic construct
  REGION 1..9: note = Description of Artificial Sequence: Synthetic peptide
SESEIVNQI

SEQ ID NO: 3584 - protein, 11 aa, synthetic construct
  REGION 1..11: note = Description of Artificial Sequence: Synthetic peptide
EEIASSSKQEL

SEQ ID NO: 3585 - protein, 11 aa, synthetic construct
  REGION 1..11: note = Description of Artificial Sequence: Synthetic peptide
AEDPEREVLKW

SEQ ID NO: 3586 - protein, 10 aa, synthetic construct
  REGION 1..10: note = Description of Artificial Sequence: Synthetic peptide
TETGVGGHQI

SEQ ID NO: 3587 - protein, 11 aa, synthetic construct
  REGION 1..11: note = Description of Artificial Sequence: Synthetic peptide
NEQDVLALDKW

SEQ ID NO: 3588 - protein, 10 aa, synthetic construct
  REGION 1..10: note = Description of Artificial Sequence: Synthetic peptide
NETPGIRYQY

SEQ ID NO: 3589 - protein, 10 aa, synthetic construct
  REGION 1..10: note = Description of Artificial Sequence: Synthetic peptide
NETPGVRYQY

SEQ ID NO: 3590 - protein, 11 aa, synthetic construct
  REGION 1..11: note = Description of Artificial Sequence: Synthetic peptide
LEVNIVTDSQY

SEQ ID NO: 3591 - protein, 10 aa, synthetic construct
  REGION 1..10: note = Description of Artificial Sequence: Synthetic peptide
TEKQGTTHSY

SEQ ID NO: 3592 - protein, 11 aa, synthetic construct
  REGION 1..11: note = Description of Artificial Sequence: Synthetic peptide
NEQDLLALDKW

SEQ ID NO: 3593 - protein, 9 aa, synthetic construct
  REGION 1..9: note = Description of Artificial Sequence: Synthetic peptide
SESELVNQI

SEQ ID NO: 3594 - protein, 10 aa, synthetic construct
  REGION 1..10: note = Description of Artificial Sequence: Synthetic peptide
GEARIIVRTY

SEQ ID NO: 3595 - protein, 11 aa, synthetic construct
  REGION 1..11: note = Description of Artificial Sequence: Synthetic peptide
EEITSSLKQEL

SEQ ID NO: 3596 - protein, 9 aa, synthetic construct
  REGION 1..9: note = Description of Artificial Sequence: Synthetic peptide
QELETREPY

SEQ ID NO: 3597 - protein, 9 aa, synthetic construct
  REGION 1..9: note = Description of Artificial Sequence: Synthetic peptide
TEAVQKITM

SEQ ID NO: 3598 - protein, 10 aa, synthetic construct
  REGION 1..10: note = Description of Artificial Sequence: Synthetic peptide
QEPIVGAETF

SEQ ID NO: 3599 - protein, 10 aa, synthetic construct
  REGION 1..10: note = Description of Artificial Sequence: Synthetic peptide
GEARLIVRTY

SEQ ID NO: 3600 - protein, 9 aa, synthetic construct
  REGION 1..9: note = Description of Artificial Sequence: Synthetic peptide
AETGQETAY

SEQ ID NO: 3601 - protein, 10 aa, synthetic construct
  REGION 1..10: note = Description of Artificial Sequence: Synthetic peptide
EEVMIRSKNF

SEQ ID NO: 3602 - protein, 9 aa, synthetic construct
  REGION 1..9: note = Description of Artificial Sequence: Synthetic peptide
AEDPEREVL

SEQ ID NO: 3603 - protein, 9 aa, synthetic construct
  REGION 1..9: note = Description of Artificial Sequence: Synthetic peptide
SESAIRRAI

SEQ ID NO: 3604 - protein, 10 aa, synthetic construct
  REGION 1..10: note = Description of Artificial Sequence: Synthetic peptide
WENGTNKQNY

SEQ ID NO: 3605 - protein, 10 aa, synthetic construct
  REGION 1..10: note = Description of Artificial Sequence: Synthetic peptide
EEHEKYHSNW

SEQ ID NO: 3606 - protein, 8 aa, synthetic construct
  REGION 1..8: note = Description of Artificial Sequence: Synthetic peptide
NETPGVRY

SEQ ID NO: 3607 - protein, 10 aa, synthetic construct
  REGION 1..10: note = Description of Artificial Sequence: Synthetic peptide
AETGQETAYF

SEQ ID NO: 3608 - protein, 9 aa, synthetic construct
  REGION 1..9: note = Description of Artificial Sequence: Synthetic peptide
DEIWDNMTW

SEQ ID NO: 3609 - protein, 9 aa, synthetic construct
  REGION 1..9: note = Description of Artificial Sequence: Synthetic peptide
TEAVQKIVM

SEQ ID NO: 3610 - protein, 8 aa, synthetic construct
  REGION 1..8: note = Description of Artificial Sequence: Synthetic peptide
NETPGIRY

SEQ ID NO: 3611 - protein, 9 aa, synthetic construct
  REGION 1..9: note = Description of Artificial Sequence: Synthetic peptide
YDTEVHNVW

SEQ ID NO: 3612 - protein, 11 aa, synthetic construct
  REGION 1..11: note = Description of Artificial Sequence: Synthetic peptide
EEIASSSKQEL

SEQ ID NO: 3613 - protein, 11 aa, synthetic construct
  REGION 1..11: note = Description of Artificial Sequence: Synthetic peptide
AEIQKQGQDQW

SEQ ID NO: 3614 - protein, 11 aa, synthetic construct
  REGION 1..11: note = Description of Artificial Sequence: Synthetic peptide
EEITSSLKQEL

SEQ ID NO: 3615 - protein, 10 aa, synthetic construct
  REGION 1..10: note = Description of Artificial Sequence: Synthetic peptide
TETGVGGHQI

SEQ ID NO: 3616 - protein, 9 aa, synthetic construct
  REGION 1..9: note = Description of Artificial Sequence: Synthetic peptide
TEAVQKITM

SEQ ID NO: 3617 - protein, 9 aa, synthetic construct
  REGION 1..9: note = Description of Artificial Sequence: Synthetic peptide
AEDPEREVL

SEQ ID NO: 3618 - protein, 11 aa, synthetic construct
  REGION 1..11: note = Description of Artificial Sequence: Synthetic peptide
AEIQKQGQGQW

SEQ ID NO: 3619 - protein, 11 aa, synthetic construct
  REGION 1..11: note = Description of Artificial Sequence: Synthetic peptide
AEQATQEVKNW

SEQ ID NO: 3620 - protein, 11 aa, synthetic construct
  REGION 1..11: note = Description of Artificial Sequence: Synthetic peptide
AEQATQDVKNW

SEQ ID NO: 3621 - protein, 9 aa, synthetic construct
  REGION 1..9: note = Description of Artificial Sequence: Synthetic peptide
QEEESEVGF

SEQ ID NO: 3622 - protein, 11 aa, synthetic construct
  REGION 1..11: note = Description of Artificial Sequence: Synthetic peptide
GEQDRDTSVRL

SEQ ID NO: 3623 - protein, 9 aa, synthetic construct
  REGION 1..9: note = Description of Artificial Sequence: Synthetic peptide
TEAVQKIVM

SEQ ID NO: 3624 - protein, 10 aa, synthetic construct
  REGION 1..10: note = Description of Artificial Sequence: Synthetic peptide
TETTNQRTEL

SEQ ID NO: 3625 - protein, 11 aa, synthetic construct
  REGION 1..11: note = Description of Artificial Sequence: Synthetic peptide
SEVNIVTDSQY

SEQ ID NO: 3626 - protein, 10 aa, synthetic construct
  REGION 1..10: note = Description of Artificial Sequence: Synthetic peptide
AETGQETAYF

SEQ ID NO: 3627 - protein, 11 aa, synthetic construct
  REGION 1..11: note = Description of Artificial Sequence: Synthetic peptide
SEIVNQIIEKL

SEQ ID NO: 3628 - protein, 10 aa, synthetic construct
  REGION 1..10: note = Description of Artificial Sequence: Synthetic peptide
QEPIVGAETF

SEQ ID NO: 3629 - protein, 9 aa, synthetic construct
  REGION 1..9: note = Description of Artificial Sequence: Synthetic peptide
EEINLPGKW

SEQ ID NO: 3630 - protein, 10 aa, synthetic construct
  REGION 1..10: note = Description of Artificial Sequence: Synthetic peptide
TETTNQKTEL

SEQ ID NO: 3631 - protein, 9 aa, synthetic construct
  REGION 1..9: note = Description of Artificial Sequence: Synthetic peptide
SESEIVNQI

SEQ ID NO: 3632 - protein, 10 aa, synthetic construct
  REGION 1..10: note = Description of Artificial Sequence: Synthetic peptide
AEGTDRVIEL

SEQ ID NO: 3633 - protein, 9 aa, synthetic construct
  REGION 1..9: note = Description of Artificial Sequence: Synthetic peptide
TESNDTITL

SEQ ID NO: 3634 - protein, 11 aa, synthetic construct
  REGION 1..11: note = Description of Artificial Sequence: Synthetic peptide
SERESNDNITL

SEQ ID NO: 3635 - protein, 10 aa, synthetic construct
  REGION 1..10: note = Description of Artificial Sequence: Synthetic peptide
REQHTPTISL

SEQ ID NO: 3636 - protein, 10 aa, synthetic construct
  REGION 1..10: note = Description of Artificial Sequence: Synthetic peptide
KEPIAGAETF

SEQ ID NO: 3637 - protein, 11 aa, synthetic construct
  REGION 1..11: note = Description of Artificial Sequence: Synthetic peptide
GEQGAVHPCNF

SEQ ID NO: 3638 - protein, 10 aa, synthetic construct
  REGION 1..10: note = Description of Artificial Sequence: Synthetic peptide
VESKTETHQF

SEQ ID NO: 3639 - protein, 10 aa, synthetic construct
  REGION 1..10: note = Description of Artificial Sequence: Synthetic peptide
AEHLKTAVQM

SEQ ID NO: 3640 - protein, 10 aa, synthetic construct
  REGION 1..10: note = Description of Artificial Sequence: Synthetic peptide
EELKSLYNTI

SEQ ID NO: 3641 - protein, 9 aa, synthetic construct
  REGION 1..9: note = Description of Artificial Sequence: Synthetic peptide
SESELVNQI

SEQ ID NO: 3642 - protein, 11 aa, synthetic construct
  REGION 1..11: note = Description of Artificial Sequence: Synthetic peptide
NEQDVLALDKW

SEQ ID NO: 3643 - protein, 11 aa, synthetic construct
  REGION 1..11: note = Description of Artificial Sequence: Synthetic peptide
AEDPEREVLKW

SEQ ID NO: 3644 - protein, 10 aa, synthetic construct
  REGION 1..10: note = Description of Artificial Sequence: Synthetic peptide
TEPIAGAETF

SEQ ID NO: 3645 - protein, 9 aa, synthetic construct
  REGION 1..9: note = Description of Artificial Sequence: Synthetic peptide
SESAIRKAI

SEQ ID NO: 3646 - protein, 9 aa, synthetic construct
  REGION 1..9: note = Description of Artificial Sequence: Synthetic peptide
RESNDNITL

SEQ ID NO: 3647 - protein, 10 aa, synthetic construct
  REGION 1..10: note = Description of Artificial Sequence: Synthetic peptide
KEISNYTETI

SEQ ID NO: 3648 - protein, 11 aa, synthetic construct
  REGION 1..11: note = Description of Artificial Sequence: Synthetic peptide
AELELEENREI

SEQ ID NO: 3649 - protein, 9 aa, synthetic construct
  REGION 1..9: note = Description of Artificial Sequence: Synthetic peptide
VELVGHSSL

SEQ ID NO: 3650 - protein, 9 aa, synthetic construct
  REGION 1..9: note = Description of Artificial Sequence: Synthetic peptide
SEGATPQDL

SEQ ID NO: 3651 - protein, 10 aa, synthetic construct
  REGION 1..10: note = Description of Artificial Sequence: Synthetic peptide
REPSTPAISL

SEQ ID NO: 3652 - protein, 9 aa, synthetic construct
  REGION 1..9: note = Description of Artificial Sequence: Synthetic peptide
EELSKMVGM

SEQ ID NO: 3653 - protein, 11 aa, synthetic construct
  REGION 1..11: note = Description of Artificial Sequence: Synthetic peptide
SELVNQIIEKL

SEQ ID NO: 3654 - protein, 9 aa, synthetic construct
  REGION 1..9: note = Description of Artificial Sequence: Synthetic peptide
SESAIRRAI

SEQ ID NO: 3655 - protein, 10 aa, synthetic construct
  REGION 1..10: note = Description of Artificial Sequence: Synthetic peptide
SESEIVNQII

SEQ ID NO: 3656 - protein, 9 aa, synthetic construct
  REGION 1..9: note = Description of Artificial Sequence: Synthetic peptide
QEESDEVGF

SEQ ID NO: 3657 - protein, 9 aa, synthetic construct
  REGION 1..9: note = Description of Artificial Sequence: Synthetic peptide
QEKNEQDLL

SEQ ID NO: 3658 - protein, 11 aa, synthetic construct
  REGION 1..11: note = Description of Artificial Sequence: Synthetic peptide
EEATQGENNSL

SEQ ID NO: 3659 - protein, 10 aa, synthetic construct
  REGION 1..10: note = Description of Artificial Sequence: Synthetic peptide
AENVGMGEEI

SEQ ID NO: 3660 - protein, 11 aa, synthetic construct
  REGION 1..11: note = Description of Artificial Sequence: Synthetic peptide
AEGVGAVSQDL

SEQ ID NO: 3661 - protein, 10 aa, synthetic construct
  REGION 1..10: note = Description of Artificial Sequence: Synthetic peptide
QELKTSAIRL

SEQ ID NO: 3662 - protein, 10 aa, synthetic construct
  REGION 1..10: note = Description of Artificial Sequence: Synthetic peptide
TETGQDTAYF

SEQ ID NO: 3663 - protein, 9 aa, synthetic construct
  REGION 1..9: note = Description of Artificial Sequence: Synthetic peptide
QEKNEQDVL

SEQ ID NO: 3664 - protein, 11 aa, synthetic construct
  REGION 1..11: note = Description of Artificial Sequence: Synthetic peptide
QDLGTRGAVTI

SEQ ID NO: 3665 - protein, 10 aa, synthetic construct
  REGION 1..10: note = Description of Artificial Sequence: Synthetic peptide
REPYNPAISL

SEQ ID NO: 3666 - protein, 10 aa, synthetic construct
  REGION 1..10: note = Description of Artificial Sequence: Synthetic peptide
EELRSLYNTI

SEQ ID NO: 3667 - protein, 9 aa, synthetic construct
  REGION 1..9: note = Description of Artificial Sequence: Synthetic peptide
EQHTPTISL

SEQ ID NO: 3668 - protein, 9 aa, synthetic construct
  REGION 1..9: note = Description of Artificial Sequence: Synthetic peptide
TEGENNSLL

SEQ ID NO: 3669 - protein, 10 aa, synthetic construct
  REGION 1..10: note = Description of Artificial Sequence: Synthetic peptide
RELKNSAVNL

SEQ ID NO: 3670 - protein, 8 aa, synthetic construct
  REGION 1..8: note = Description of Artificial Sequence: Synthetic peptide
AEGGKIMI

SEQ ID NO: 3671 - protein, 11 aa, synthetic construct
  REGION 1..11: note = Description of Artificial Sequence: Synthetic peptide
LEVNIVTDSQY

SEQ ID NO: 3672 - protein, 11 aa, synthetic construct
  REGION 1..11: note = Description of Artificial Sequence: Synthetic peptide
SEVKDNTTKEM

SEQ ID NO: 3673 - protein, 10 aa, synthetic construct
  REGION 1..10: note = Description of Artificial Sequence: Synthetic peptide
IEAQQQLLKL

SEQ ID NO: 3674 - protein, 9 aa, synthetic construct
  REGION 1..9: note = Description of Artificial Sequence: Synthetic peptide
EELSTLVEM

SEQ ID NO: 3675 - protein, 9 aa, synthetic construct
  REGION 1..9: note = Description of Artificial Sequence: Synthetic peptide
INKGLGISY

SEQ ID NO: 3676 - protein, 9 aa, synthetic construct
  REGION 1..9: note = Description of Artificial Sequence: Synthetic peptide
FLVEAGTEK

SEQ ID NO: 3677 - protein, 10 aa, synthetic construct
  REGION 1..10: note = Description of Artificial Sequence: Synthetic peptide
SIRFGPGQAF

SEQ ID NO: 3678 - protein, 10 aa, synthetic construct
  REGION 1..10: note = Description of Artificial Sequence: Synthetic peptide
ILKDPVHGVY

SEQ ID NO: 3679 - protein, 10 aa, synthetic construct
  REGION 1..10: note = Description of Artificial Sequence: Synthetic peptide
FINKGLGISY

SEQ ID NO: 3680 - protein, 9 aa, synthetic construct
  REGION 1..9: note = Description of Artificial Sequence: Synthetic peptide
KAIEAQQQL

SEQ ID NO: 3681 - protein, 10 aa, synthetic construct
  REGION 1..10: note = Description of Artificial Sequence: Synthetic peptide
HQNPVSEQSL

SEQ ID NO: 3682 - protein, 9 aa, synthetic construct
  REGION 1..9: note = Description of Artificial Sequence: Synthetic peptide
KALTDIVTL

SEQ ID NO: 3683 - protein, 10 aa, synthetic construct
  REGION 1..10: note = Description of Artificial Sequence: Synthetic peptide
HQNPVPKQSL

SEQ ID NO: 3684 - protein, 10 aa, synthetic construct
  REGION 1..10: note = Description of Artificial Sequence: Synthetic peptide
HLDFGDVNNV

SEQ ID NO: 3685 - protein, 8 aa, synthetic construct
  REGION 1..8: note = Description of Artificial Sequence: Synthetic peptide
HQAAMQML

SEQ ID NO: 3686 - protein, 9 aa, synthetic construct
  REGION 1..9: note = Description of Artificial Sequence: Synthetic peptide
HQAISPRTL

SEQ ID NO: 3687 - protein, 9 aa, synthetic construct
  REGION 1..9: note = Description of Artificial Sequence: Synthetic peptide
EQHTPTISL

SEQ ID NO: 3688 - protein, 9 aa, synthetic construct
  REGION 1..9: note = Description of Artificial Sequence: Synthetic peptide
LDFGDVNNV

SEQ ID NO: 3689 - protein, 9 aa, synthetic construct
  REGION 1..9: note = Description of Artificial Sequence: Synthetic peptide
HQAVSPRTL

SEQ ID NO: 3690 - protein, 9 aa, synthetic construct
  REGION 1..9: note = Description of Artificial Sequence: Synthetic peptide
GKNSINETF

SEQ ID NO: 3691 - protein, 9 aa, synthetic construct
  REGION 1..9: note = Description of Artificial Sequence: Synthetic peptide
RALGPGASL

SEQ ID NO: 3692 - protein, 10 aa, synthetic construct
  REGION 1..10: note = Description of Artificial Sequence: Synthetic peptide
SLFGNDPLSQ

SEQ ID NO: 3693 - protein, 10 aa, synthetic construct
  REGION 1..10: note = Description of Artificial Sequence: Synthetic peptide
HQNPIPKQSL

SEQ ID NO: 3694 - protein, 8 aa, synthetic construct
  REGION 1..8: note = Description of Artificial Sequence: Synthetic peptide
KQLQARVL

SEQ ID NO: 3695 - protein, 9 aa, synthetic construct
  REGION 1..9: note = Description of Artificial Sequence: Synthetic peptide
RALGPGATL

SEQ ID NO: 3696 - protein, 9 aa, synthetic construct
  REGION 1..9: note = Description of Artificial Sequence: Synthetic peptide
SESEIVNQI

SEQ ID NO: 3697 - protein, 9 aa, synthetic construct
  REGION 1..9: note = Description of Artificial Sequence: Synthetic peptide
SESELVNQI

SEQ ID NO: 3698 - protein, 10 aa, synthetic construct
  REGION 1..10: note = Description of Artificial Sequence: Synthetic peptide
TETGVGGHQI

SEQ ID NO: 3699 - protein, 10 aa, synthetic construct
  REGION 1..10: note = Description of Artificial Sequence: Synthetic peptide
KEISNYTETI

SEQ ID NO: 3700 - protein, 9 aa, synthetic construct
  REGION 1..9: note = Description of Artificial Sequence: Synthetic peptide
KEISNYTNI

SEQ ID NO: 3701 - protein, 9 aa, synthetic construct
  REGION 1..9: note = Description of Artificial Sequence: Synthetic peptide
KEISTYTDI

SEQ ID NO: 3702 - protein, 11 aa, synthetic construct
  REGION 1..11: note = Description of Artificial Sequence: Synthetic peptide
VESSGILGSGI

SEQ ID NO: 3703 - protein, 9 aa, synthetic construct
  REGION 1..9: note = Description of Artificial Sequence: Synthetic peptide
QESVESSVI

SEQ ID NO: 3704 - protein, 9 aa, synthetic construct
  REGION 1..9: note = Description of Artificial Sequence: Synthetic peptide
AEWDRVHPV

SEQ ID NO: 3705 - protein, 10 aa, synthetic construct
  REGION 1..10: note = Description of Artificial Sequence: Synthetic peptide
CEYQAGHNKV

SEQ ID NO: 3706 - protein, 9 aa, synthetic construct
  REGION 1..9: note = Description of Artificial Sequence: Synthetic peptide
TESNDTITL

SEQ ID NO: 3707 - protein, 9 aa, synthetic construct
  REGION 1..9: note = Description of Artificial Sequence: Synthetic peptide
TEAVQKITM

SEQ ID NO: 3708 - protein, 8 aa, synthetic construct
  REGION 1..8: note = Description of Artificial Sequence: Synthetic peptide
QELKTSAI

SEQ ID NO: 3709 - protein, 9 aa, synthetic construct
  REGION 1..9: note = Description of Artificial Sequence: Synthetic peptide
AEVIPTETG

SEQ ID NO: 3710 - protein, 8 aa, synthetic construct
  REGION 1..8: note = Description of Artificial Sequence: Synthetic peptide
GEAIHGQV

SEQ ID NO: 3711 - protein, 8 aa, synthetic construct
  REGION 1..8: note = Description of Artificial Sequence: Synthetic peptide
SEIVNQII

SEQ ID NO: 3712 - protein, 10 aa, synthetic construct
  REGION 1..10: note = Description of Artificial Sequence: Synthetic peptide
KEISNYTNII

SEQ ID NO: 3713 - protein, 10 aa, synthetic construct
  REGION 1..10: note = Description of Artificial Sequence: Synthetic peptide
AENVGMGEEI

SEQ ID NO: 3714 - protein, 9 aa, synthetic construct
  REGION 1..9: note = Description of Artificial Sequence: Synthetic peptide
TEAVQKIVM

SEQ ID NO: 3715 - protein, 9 aa, synthetic construct
  REGION 1..9: note = Description of Artificial Sequence: Synthetic peptide
LELEENREI

SEQ ID NO: 3716 - protein, 9 aa, synthetic construct
  REGION 1..9: note = Description of Artificial Sequence: Synthetic peptide
MEEEITSSL

SEQ ID NO: 3717 - protein, 8 aa, synthetic construct
  REGION 1..8: note = Description of Artificial Sequence: Synthetic peptide
AEGGKIMI

SEQ ID NO: 3718 - protein, 9 aa, synthetic construct
  REGION 1..9: note = Description of Artificial Sequence: Synthetic peptide
SESAIRKAI

SEQ ID NO: 3719 - protein, 9 aa, synthetic construct
  REGION 1..9: note = Description of Artificial Sequence: Synthetic peptide
VEQMHADII

SEQ ID NO: 3720 - protein, 9 aa, synthetic construct
  REGION 1..9: note = Description of Artificial Sequence: Synthetic peptide
SEVGFPVRP

SEQ ID NO: 3721 - protein, 9 aa, synthetic construct
  REGION 1..9: note = Description of Artificial Sequence: Synthetic peptide
IEVKDTKEA

SEQ ID NO: 3722 - protein, 9 aa, synthetic construct
  REGION 1..9: note = Description of Artificial Sequence: Synthetic peptide
LETEPIAGA

SEQ ID NO: 3723 - protein, 9 aa, synthetic construct
  REGION 1..9: note = Description of Artificial Sequence: Synthetic peptide
LEKEPIAGA

SEQ ID NO: 3724 - protein, 9 aa, synthetic construct
  REGION 1..9: note = Description of Artificial Sequence: Synthetic peptide
AETFYVDGA

SEQ ID NO: 3725 - protein, 10 aa, synthetic construct
  REGION 1..10: note = Description of Artificial Sequence: Synthetic peptide
SEVHIPLGEA

SEQ ID NO: 3726 - protein, 9 aa, synthetic construct
  REGION 1..9: note = Description of Artificial Sequence: Synthetic peptide
AEGVRPTPP

SEQ ID NO: 3727 - protein, 10 aa, synthetic construct
  REGION 1..10: note = Description of Artificial Sequence: Synthetic peptide
SEVHIPLKEA

SEQ ID NO: 3728 - protein, 9 aa, synthetic construct
  REGION 1..9: note = Description of Artificial Sequence: Synthetic peptide
TVAEGTDRV

SEQ ID NO: 3729 - protein, 9 aa, synthetic construct
  REGION 1..9: note = Description of Artificial Sequence: Synthetic peptide
LEQEPIVGA

SEQ ID NO: 3730 - protein, 9 aa, synthetic construct
  REGION 1..9: note = Description of Artificial Sequence: Synthetic peptide
AVAEWTDRV

SEQ ID NO: 3731 - protein, 9 aa, synthetic construct
  REGION 1..9: note = Description of Artificial Sequence: Synthetic peptide
TEAVSPAAP

SEQ ID NO: 3732 - protein, 9 aa, synthetic construct
  REGION 1..9: note = Description of Artificial Sequence: Synthetic peptide
TQSPINEEI

SEQ ID NO: 3733 - protein, 9 aa, synthetic construct
  REGION 1..9: note = Description of Artificial Sequence: Synthetic peptide
ASITLTVQA

SEQ ID NO: 3734 - protein, 9 aa, synthetic construct
  REGION 1..9: note = Description of Artificial Sequence: Synthetic peptide
AAFLGFLGA

SEQ ID NO: 3735 - protein, 9 aa, synthetic construct
  REGION 1..9: note = Description of Artificial Sequence: Synthetic peptide
KIIGDIRQA

SEQ ID NO: 3736 - protein, 9 aa, synthetic construct
  REGION 1..9: note = Description of Artificial Sequence: Synthetic peptide
AVFLGFLGA

SEQ ID NO: 3737 - protein, 10 aa, synthetic construct
  REGION 1..10: note = Description of Artificial Sequence: Synthetic peptide
AETFYVDGAA

SEQ ID NO: 3738 - protein, 9 aa, synthetic construct
  REGION 1..9: note = Description of Artificial Sequence: Synthetic peptide
AETTLFCAS

SEQ ID NO: 3739 - protein, 9 aa, synthetic construct
  REGION 1..9: note = Description of Artificial Sequence: Synthetic peptide
ATLEEMMTA

SEQ ID NO: 3740 - protein, 9 aa, synthetic construct
  REGION 1..9: note = Description of Artificial Sequence: Synthetic peptide
EIIGDIRQA

SEQ ID NO: 3741 - protein, 9 aa, synthetic construct
  REGION 1..9: note = Description of Artificial Sequence: Synthetic peptide
YEDFRKYTA

SEQ ID NO: 3742 - protein, 9 aa, synthetic construct
  REGION 1..9: note = Description of Artificial Sequence: Synthetic peptide
AIITVVNRV

SEQ ID NO: 3743 - protein, 9 aa, synthetic construct
  REGION 1..9: note = Description of Artificial Sequence: Synthetic peptide
AEVIPTETG

SEQ ID NO: 3744 - protein, 9 aa, synthetic construct
  REGION 1..9: note = Description of Artificial Sequence: Synthetic peptide
KAIEAQQQL

SEQ ID NO: 3745 - protein, 10 aa, synthetic construct
  REGION 1..10: note = Description of Artificial Sequence: Synthetic peptide
RVIEIGQRAC

SEQ ID NO: 3746 - protein, 8 aa, synthetic construct
  REGION 1..8: note = Description of Artificial Sequence: Synthetic peptide
AETTLFCA

SEQ ID NO: 3747 - protein, 10 aa, synthetic construct
  REGION 1..10: note = Description of Artificial Sequence: Synthetic peptide
AVFLGFLGAA

SEQ ID NO: 3748 - protein, 11 aa, synthetic construct
  REGION 1..11: note = Description of Artificial Sequence: Synthetic peptide
RENLASQQREA

SEQ ID NO: 3749 - protein, 9 aa, synthetic construct
  REGION 1..9: note = Description of Artificial Sequence: Synthetic peptide
KEFNGKGSC

SEQ ID NO: 3750 - protein, 9 aa, synthetic construct
  REGION 1..9: note = Description of Artificial Sequence: Synthetic peptide
NIIGDIRQA

SEQ ID NO: 3751 - protein, 9 aa, synthetic construct
  REGION 1..9: note = Description of Artificial Sequence: Synthetic peptide
EEVGFPVRP

SEQ ID NO: 3752 - protein, 10 aa, synthetic construct
  REGION 1..10: note = Description of Artificial Sequence: Synthetic peptide
REFSSEQDRA

SEQ ID NO: 3753 - protein, 9 aa, synthetic construct
  REGION 1..9: note = Description of Artificial Sequence: Synthetic peptide
GEQGAVHPC

SEQ ID NO: 3754 - protein, 8 aa, synthetic construct
  REGION 1..8: note = Description of Artificial Sequence: Synthetic peptide
TEAVSPAA

SEQ ID NO: 3755 - protein, 11 aa, synthetic construct
  REGION 1..11: note = Description of Artificial Sequence: Synthetic peptide
AEWDRLHPVQA

SEQ ID NO: 3756 - protein, 8 aa, synthetic construct
  REGION 1..8: note = Description of Artificial Sequence: Synthetic peptide
TAFTIPSI

SEQ ID NO: 3757 - protein, 9 aa, synthetic construct
  REGION 1..9: note = Description of Artificial Sequence: Synthetic peptide
FPISPIETV

SEQ ID NO: 3758 - protein, 8 aa, synthetic construct
  REGION 1..8: note = Description of Artificial Sequence: Synthetic peptide
LPLAILSI

SEQ ID NO: 3759 - protein, 8 aa, synthetic construct
  REGION 1..8: note = Description of Artificial Sequence: Synthetic peptide
LPLVILAI

SEQ ID NO: 3760 - protein, 9 aa, synthetic construct
  REGION 1..9: note = Description of Artificial Sequence: Synthetic peptide
DAKAYDTEV

SEQ ID NO: 3761 - protein, 8 aa, synthetic construct
  REGION 1..8: note = Description of Artificial Sequence: Synthetic peptide
VPVEPSEV

SEQ ID NO: 3762 - protein, 8 aa, synthetic construct
  REGION 1..8: note = Description of Artificial Sequence: Synthetic peptide
VPVNPSEV

SEQ ID NO: 3763 - protein, 9 aa, synthetic construct
  REGION 1..9: note = Description of Artificial Sequence: Synthetic peptide
DPPIPVGEI

SEQ ID NO: 3764 - protein, 10 aa, synthetic construct
  REGION 1..10: note = Description of Artificial Sequence: Synthetic peptide
IPYNPQSQGV

SEQ ID NO: 3765 - protein, 8 aa, synthetic construct
  REGION 1..8: note = Description of Artificial Sequence: Synthetic peptide
YAPPIAGI

SEQ ID NO: 3766 - protein, 8 aa, synthetic construct
  REGION 1..8: note = Description of Artificial Sequence: Synthetic peptide
APPIAGVI

SEQ ID NO: 3767 - protein, 8 aa, synthetic construct
  REGION 1..8: note = Description of Artificial Sequence: Synthetic peptide
VPVDPSEV

SEQ ID NO: 3768 - protein, 9 aa, synthetic construct
  REGION 1..9: note = Description of Artificial Sequence: Synthetic peptide
LPLAILSIV

SEQ ID NO: 3769 - protein, 8 aa, synthetic construct
  REGION 1..8: note = Description of Artificial Sequence: Synthetic peptide
HSYNFPQI

SEQ ID NO: 3770 - protein, 8 aa, synthetic construct
  REGION 1..8: note = Description of Artificial Sequence: Synthetic peptide
YAPPIAGV

SEQ ID NO: 3771 - protein, 9 aa, synthetic construct
  REGION 1..9: note = Description of Artificial Sequence: Synthetic peptide
YAPPIAGVI

SEQ ID NO: 3772 - protein, 9 aa, synthetic construct
  REGION 1..9: note = Description of Artificial Sequence: Synthetic peptide
LPPVVAKEI

SEQ ID NO: 3773 - protein, 9 aa, synthetic construct
  REGION 1..9: note = Description of Artificial Sequence: Synthetic peptide
LPPIVAKEI

SEQ ID NO: 3774 - protein, 8 aa, synthetic construct
  REGION 1..8: note = Description of Artificial Sequence: Synthetic peptide
DSWTVNDI

SEQ ID NO: 3775 - protein, 9 aa, synthetic construct
  REGION 1..9: note = Description of Artificial Sequence: Synthetic peptide
IPLGEARII

SEQ ID NO: 3776 - protein, 8 aa, synthetic construct
  REGION 1..8: note = Description of Artificial Sequence: Synthetic peptide
SPLAILSI

SEQ ID NO: 3777 - protein, 8 aa, synthetic construct
  REGION 1..8: note = Description of Artificial Sequence: Synthetic peptide
NPYNTPVF

SEQ ID NO: 3778 - protein, 9 aa, synthetic construct
  REGION 1..9: note = Description of Artificial Sequence: Synthetic peptide
DAKAYDREV

SEQ ID NO: 3779 - protein, 9 aa, synthetic construct
  REGION 1..9: note = Description of Artificial Sequence: Synthetic peptide
IPLGEARLI

SEQ ID NO: 3780 - protein, 9 aa, synthetic construct
  REGION 1..9: note = Description of Artificial Sequence: Synthetic peptide
EPYNPAISL

SEQ ID NO: 3781 - protein, 8 aa, synthetic construct
  REGION 1..8: note = Description of Artificial Sequence: Synthetic peptide
TAYFILKL

SEQ ID NO: 3782 - protein, 9 aa, synthetic construct
  REGION 1..9: note = Description of Artificial Sequence: Synthetic peptide
NPPIPVGEI

SEQ ID NO: 3783 - protein, 9 aa, synthetic construct
  REGION 1..9: note = Description of Artificial Sequence: Synthetic peptide
YAPPIAGII

SEQ ID NO: 3784 - protein, 8 aa, synthetic construct
  REGION 1..8: note = Description of Artificial Sequence: Synthetic peptide
VGLVVASI

SEQ ID NO: 3785 - protein, 9 aa, synthetic construct
  REGION 1..9: note = Description of Artificial Sequence: Synthetic peptide
DAYFSVPLY

SEQ ID NO: 3786 - protein, 11 aa, synthetic construct
  REGION 1..11: note = Description of Artificial Sequence: Synthetic peptide
IPYNPQSQGVV

SEQ ID NO: 3787 - protein, 9 aa, synthetic construct
  REGION 1..9: note = Description of Artificial Sequence: Synthetic peptide
DPDLADHLI

SEQ ID NO: 3788 - protein, 8 aa, synthetic construct
  REGION 1..8: note = Description of Artificial Sequence: Synthetic peptide
SPVSILDI

SEQ ID NO: 3789 - protein, 10 aa, synthetic construct
  REGION 1..10: note = Description of Artificial Sequence: Synthetic peptide
IPLGEARLIV

SEQ ID NO: 3790 - protein, 9 aa, synthetic construct
  REGION 1..9: note = Description of Artificial Sequence: Synthetic peptide
FPISPIETV

SEQ ID NO: 3791 - protein, 9 aa, synthetic construct
  REGION 1..9: note = Description of Artificial Sequence: Synthetic peptide
SPAAPGVGA

SEQ ID NO: 3792 - protein, 9 aa, synthetic construct
  REGION 1..9: note = Description of Artificial Sequence: Synthetic peptide
LPHAQRVST

SEQ ID NO: 3793 - protein, 9 aa, synthetic construct
  REGION 1..9: note = Description of Artificial Sequence: Synthetic peptide
EPIPIHYCA

SEQ ID NO: 3794 - protein, 10 aa, synthetic construct
  REGION 1..10: note = Description of Artificial Sequence: Synthetic peptide
EPLGIAPTKA

SEQ ID NO: 3795 - protein, 10 aa, synthetic construct
  REGION 1..10: note = Description of Artificial Sequence: Synthetic peptide
EPLGIAPTEA

SEQ ID NO: 3796 - protein, 9 aa, synthetic construct
  REGION 1..9: note = Description of Artificial Sequence: Synthetic peptide
AAFLGFLGA

SEQ ID NO: 3797 - protein, 9 aa, synthetic construct
  REGION 1..9: note = Description of Artificial Sequence: Synthetic peptide
HVASGYIEA

SEQ ID NO: 3798 - protein, 9 aa, synthetic construct
  REGION 1..9: note = Description of Artificial Sequence: Synthetic peptide
HPGSQPKTA

SEQ ID NO: 3799 - protein, 11 aa, synthetic construct
  REGION 1..11: note = Description of Artificial Sequence: Synthetic peptide
VPVDPSEVEEA

SEQ ID NO: 3800 - protein, 9 aa, synthetic construct
  REGION 1..9: note = Description of Artificial Sequence: Synthetic peptide
NPYNTPVFA

SEQ ID NO: 3801 - protein, 10 aa, synthetic construct
  REGION 1..10: note = Description of Artificial Sequence: Synthetic peptide
LPLAILSIVG

SEQ ID NO: 3802 - protein, 9 aa, synthetic construct
  REGION 1..9: note = Description of Artificial Sequence: Synthetic peptide
LPLAILSIV

SEQ ID NO: 3803 - protein, 8 aa, synthetic construct
  REGION 1..8: note = Description of Artificial Sequence: Synthetic peptide
TAFTIPSI

SEQ ID NO: 3804 - protein, 10 aa, synthetic construct
  REGION 1..10: note = Description of Artificial Sequence: Synthetic peptide
FPQSRTEPTA

SEQ ID NO: 3805 - protein, 10 aa, synthetic construct
  REGION 1..10: note = Description of Artificial Sequence: Synthetic peptide
EPLGVAPTRA

SEQ ID NO: 3806 - protein, 9 aa, synthetic construct
  REGION 1..9: note = Description of Artificial Sequence: Synthetic peptide
HPGSQPRTA

SEQ ID NO: 3807 - protein, 10 aa, synthetic construct
  REGION 1..10: note = Description of Artificial Sequence: Synthetic peptide
SPLAILSIVG

SEQ ID NO: 3808 - protein, 11 aa, synthetic construct
  REGION 1..11: note = Description of Artificial Sequence: Synthetic peptide
VPVEPSEVEEA

SEQ ID NO: 3809 - protein, 9 aa, synthetic construct
  REGION 1..9: note = Description of Artificial Sequence: Synthetic peptide
FPNATTIIF

SEQ ID NO: 3810 - protein, 11 aa, synthetic construct
  REGION 1..11: note = Description of Artificial Sequence: Synthetic peptide
LPPVVAKEIVA

SEQ ID NO: 3811 - protein, 9 aa, synthetic construct
  REGION 1..9: note = Description of Artificial Sequence: Synthetic peptide
IPKQSLPQA

SEQ ID NO: 3812 - protein, 9 aa, synthetic construct
  REGION 1..9: note = Description of Artificial Sequence: Synthetic peptide
YPIVQNAQG

SEQ ID NO: 3813 - protein, 8 aa, synthetic construct
  REGION 1..8: note = Description of Artificial Sequence: Synthetic peptide
TAFTIPST

SEQ ID NO: 3814 - protein, 11 aa, synthetic construct
  REGION 1..11: note = Description of Artificial Sequence: Synthetic peptide
FPISPIETVPV

SEQ ID NO: 3815 - protein, 11 aa, synthetic construct
  REGION 1..11: note = Description of Artificial Sequence: Synthetic peptide
VPVNPSEVEEA

SEQ ID NO: 3816 - protein, 11 aa, synthetic construct
  REGION 1..11: note = Description of Artificial Sequence: Synthetic peptide
NPVSEQSLPHA

SEQ ID NO: 3817 - protein, 9 aa, synthetic construct
  REGION 1..9: note = Description of Artificial Sequence: Synthetic peptide
EPYNPAISL

SEQ ID NO: 3818 - protein, 9 aa, synthetic construct
  REGION 1..9: note = Description of Artificial Sequence: Synthetic peptide
SPLAILSIV

SEQ ID NO: 3819 - protein, 10 aa, synthetic construct
  REGION 1..10: note = Description of Artificial Sequence: Synthetic peptide
LPLVILAIVG

SEQ ID NO: 3820 - protein, 11 aa, synthetic construct
  REGION 1..11: note = Description of Artificial Sequence: Synthetic peptide
MLNTVGGHQAA

SEQ ID NO: 3821 - protein, 9 aa, synthetic construct
  REGION 1..9: note = Description of Artificial Sequence: Synthetic peptide
HPVHAGPIP

SEQ ID NO: 3822 - protein, 9 aa, synthetic construct
  REGION 1..9: note = Description of Artificial Sequence: Synthetic peptide
EVHIPLKEA

SEQ ID NO: 3823 - protein, 10 aa, synthetic construct
  REGION 1..10: note = Description of Artificial Sequence: Synthetic peptide
HPVHAGPIPP

SEQ ID NO: 3824 - protein, 9 aa, synthetic construct
  REGION 1..9: note = Description of Artificial Sequence: Synthetic peptide
SPAAPGVGA

SEQ ID NO: 3825 - protein, 9 aa, synthetic construct
  REGION 1..9: note = Description of Artificial Sequence: Synthetic peptide
IPKQSLPQA

SEQ ID NO: 3826 - protein, 9 aa, synthetic construct
  REGION 1..9: note = Description of Artificial Sequence: Synthetic peptide
FPISPIETV

SEQ ID NO: 3827 - protein, 9 aa, synthetic construct
  REGION 1..9: note = Description of Artificial Sequence: Synthetic peptide
NPYPTPRGS

SEQ ID NO: 3828 - protein, 9 aa, synthetic construct
  REGION 1..9: note = Description of Artificial Sequence: Synthetic peptide
SPAAPGVGA

SEQ ID NO: 3829 - protein, 9 aa, synthetic construct
  REGION 1..9: note = Description of Artificial Sequence: Synthetic peptide
FPISPIETV

SEQ ID NO: 3830 - protein, 11 aa, synthetic construct
  REGION 1..11: note = Description of Artificial Sequence: Synthetic peptide
GPNFTSATVKA

SEQ ID NO: 3831 - protein, 11 aa, synthetic construct
  REGION 1..11: note = Description of Artificial Sequence: Synthetic peptide
GPNFTSAAVKA

SEQ ID NO: 3832 - protein, 11 aa, synthetic construct
  REGION 1..11: note = Description of Artificial Sequence: Synthetic peptide
GPNFISATVKA

SEQ ID NO: 3833 - protein, 9 aa, synthetic construct
  REGION 1..9: note = Description of Artificial Sequence: Synthetic peptide
IPKQSLPQA

SEQ ID NO: 3834 - protein, 10 aa, synthetic construct
  REGION 1..10: note = Description of Artificial Sequence: Synthetic peptide
EPLGIAPTEA

SEQ ID NO: 3835 - protein, 10 aa, synthetic construct
  REGION 1..10: note = Description of Artificial Sequence: Synthetic peptide
IPAETGQETA

SEQ ID NO: 3836 - protein, 9 aa, synthetic construct
  REGION 1..9: note = Description of Artificial Sequence: Synthetic peptide
NPYNTPVFA

SEQ ID NO: 3837 - protein, 11 aa, synthetic construct
  REGION 1..11: note = Description of Artificial Sequence: Synthetic peptide
NPIPKQSLPQA

SEQ ID NO: 3838 - protein, 10 aa, synthetic construct
  REGION 1..10: note = Description of Artificial Sequence: Synthetic peptide
EPLGIAPTKA

SEQ ID NO: 3839 - protein, 9 aa, synthetic construct
  REGION 1..9: note = Description of Artificial Sequence: Synthetic peptide
GPNFISATV

SEQ ID NO: 3840 - protein, 9 aa, synthetic construct
  REGION 1..9: note = Description of Artificial Sequence: Synthetic peptide
GPNFTSATV

SEQ ID NO: 3841 - protein, 9 aa, synthetic construct
  REGION 1..9: note = Description of Artificial Sequence: Synthetic peptide
HPGSQPKTA

SEQ ID NO: 3842 - protein, 11 aa, synthetic construct
  REGION 1..11: note = Description of Artificial Sequence: Synthetic peptide
VPVDPSEVEEA

SEQ ID NO: 3843 - protein, 10 aa, synthetic construct
  REGION 1..10: note = Description of Artificial Sequence: Synthetic peptide
IPYNPQSQGV

SEQ ID NO: 3844 - protein, 9 aa, synthetic construct
  REGION 1..9: note = Description of Artificial Sequence: Synthetic peptide
SPAAPGVGA

SEQ ID NO: 3845 - protein, 9 aa, synthetic construct
  REGION 1..9: note = Description of Artificial Sequence: Synthetic peptide
FPISPIETV

SEQ ID NO: 3846 - protein, 11 aa, synthetic construct
  REGION 1..11: note = Description of Artificial Sequence: Synthetic peptide
GPNFTSATVKA

SEQ ID NO: 3847 - protein, 9 aa, synthetic construct
  REGION 1..9: note = Description of Artificial Sequence: Synthetic peptide
LPHAQRVST

SEQ ID NO: 3848 - protein, 10 aa, synthetic construct
  REGION 1..10: note = Description of Artificial Sequence: Synthetic peptide
IPYNPQSQGV

SEQ ID NO: 3849 - protein, 10 aa, synthetic construct
  REGION 1..10: note = Description of Artificial Sequence: Synthetic peptide
APAGFAILKC

SEQ ID NO: 3850 - protein, 11 aa, synthetic construct
  REGION 1..11: note = Description of Artificial Sequence: Synthetic peptide
GPNFTSAAVKA

SEQ ID NO: 3851 - protein, 11 aa, synthetic construct
  REGION 1..11: note = Description of Artificial Sequence: Synthetic peptide
GPNFISATVKA

SEQ ID NO: 3852 - protein, 9 aa, synthetic construct
  REGION 1..9: note = Description of Artificial Sequence: Synthetic peptide
IPKQSLPQA

SEQ ID NO: 3853 - protein, 9 aa, synthetic construct
  REGION 1..9: note = Description of Artificial Sequence: Synthetic peptide
GPNFISATV

SEQ ID NO: 3854 - protein, 9 aa, synthetic construct
  REGION 1..9: note = Description of Artificial Sequence: Synthetic peptide
AAFLGFLGA

SEQ ID NO: 3855 - protein, 10 aa, synthetic construct
  REGION 1..10: note = Description of Artificial Sequence: Synthetic peptide
RPLVTVKIEG

SEQ ID NO: 3856 - protein, 10 aa, synthetic construct
  REGION 1..10: note = Description of Artificial Sequence: Synthetic peptide
IPAETGQETA

SEQ ID NO: 3857 - protein, 9 aa, synthetic construct
  REGION 1..9: note = Description of Artificial Sequence: Synthetic peptide
GPNFTSATV

SEQ ID NO: 3858 - protein, 10 aa, synthetic construct
  REGION 1..10: note = Description of Artificial Sequence: Synthetic peptide
SPEVIPMFSA

SEQ ID NO: 3859 - protein, 9 aa, synthetic construct
  REGION 1..9: note = Description of Artificial Sequence: Synthetic peptide
HPGSQPKTA

SEQ ID NO: 3860 - protein, 11 aa, synthetic construct
  REGION 1..11: note = Description of Artificial Sequence: Synthetic peptide
VPVDPSEVEEA

SEQ ID NO: 3861 - protein, 11 aa, synthetic construct
  REGION 1..11: note = Description of Artificial Sequence: Synthetic peptide
VPVEPSEVEEA

SEQ ID NO: 3862 - protein, 10 aa, synthetic construct
  REGION 1..10: note = Description of Artificial Sequence: Synthetic peptide
APAGYAILKC

SEQ ID NO: 3863 - protein, 9 aa, synthetic construct
  REGION 1..9: note = Description of Artificial Sequence: Synthetic peptide
GVRPTPPAA

SEQ ID NO: 3864 - protein, 10 aa, synthetic construct
  REGION 1..10: note = Description of Artificial Sequence: Synthetic peptide
EPLGIAPTKA

SEQ ID NO: 3865 - protein, 9 aa, synthetic construct
  REGION 1..9: note = Description of Artificial Sequence: Synthetic peptide
LPQAQRVPT

SEQ ID NO: 3866 - protein, 9 aa, synthetic construct
  REGION 1..9: note = Description of Artificial Sequence: Synthetic peptide
TTVPWNTSW

SEQ ID NO: 3867 - protein, 11 aa, synthetic construct
  REGION 1..11: note = Description of Artificial Sequence: Synthetic peptide
KAYDTEVHNVW

SEQ ID NO: 3868 - protein, 9 aa, synthetic construct
  REGION 1..9: note = Description of Artificial Sequence: Synthetic peptide
TTVPWNSSW

SEQ ID NO: 3869 - protein, 11 aa, synthetic construct
  REGION 1..11: note = Description of Artificial Sequence: Synthetic peptide
KAYDREVHNVW

SEQ ID NO: 3870 - protein, 11 aa, synthetic construct
  REGION 1..11: note = Description of Artificial Sequence: Synthetic peptide
KAYATEKHNVW

SEQ ID NO: 3871 - protein, 9 aa, synthetic construct
  REGION 1..9: note = Description of Artificial Sequence: Synthetic peptide
STLQEQIGW

SEQ ID NO: 3872 - protein, 10 aa, synthetic construct
  REGION 1..10: note = Description of Artificial Sequence: Synthetic peptide
GTQRNYQHLW

SEQ ID NO: 3873 - protein, 9 aa, synthetic construct
  REGION 1..9: note = Description of Artificial Sequence: Synthetic peptide
WTKEGNSTW

SEQ ID NO: 3874 - protein, 9 aa, synthetic construct
  REGION 1..9: note = Description of Artificial Sequence: Synthetic peptide
ASILAIVVW

SEQ ID NO: 3875 - protein, 11 aa, synthetic construct
  REGION 1..11: note = Description of Artificial Sequence: Synthetic peptide
STWTKEGNSTW

SEQ ID NO: 3876 - protein, 9 aa, synthetic construct
  REGION 1..9: note = Description of Artificial Sequence: Synthetic peptide
KIKQIINMW

SEQ ID NO: 3877 - protein, 9 aa, synthetic construct
  REGION 1..9: note = Description of Artificial Sequence: Synthetic peptide
TTGLFNSTW

SEQ ID NO: 3878 - protein, 9 aa, synthetic construct
  REGION 1..9: note = Description of Artificial Sequence: Synthetic peptide
RIKQIINMW

SEQ ID NO: 3879 - protein, 9 aa, synthetic construct
  REGION 1..9: note = Description of Artificial Sequence: Synthetic peptide
RSIRLVNGF

SEQ ID NO: 3880 - protein, 10 aa, synthetic construct
  REGION 1..10: note = Description of Artificial Sequence: Synthetic peptide
ATDVRWNSSW

SEQ ID NO: 3881 - protein, 10 aa, synthetic construct
  REGION 1..10: note = Description of Artificial Sequence: Synthetic peptide
SSLKGLRLGW

SEQ ID NO: 3882 - protein, 9 aa, synthetic construct
  REGION 1..9: note = Description of Artificial Sequence: Synthetic peptide
KALTDIVTL

SEQ ID NO: 3883 - protein, 10 aa, synthetic construct
  REGION 1..10: note = Description of Artificial Sequence: Synthetic peptide
ATTVPWNTSW

SEQ ID NO: 3884 - protein, 9 aa, synthetic construct
  REGION 1..9: note = Description of Artificial Sequence: Synthetic peptide
KTQEVYSLF

SEQ ID NO: 3885 - protein, 11 aa, synthetic construct
  REGION 1..11: note = Description of Artificial Sequence: Synthetic peptide
TTSTLQEQIGW

SEQ ID NO: 3886 - protein, 9 aa, synthetic construct
  REGION 1..9: note = Description of Artificial Sequence: Synthetic peptide
TQRNYQHLW

SEQ ID NO: 3887 - protein, 9 aa, synthetic construct
  REGION 1..9: note = Description of Artificial Sequence: Synthetic peptide
TIAVAVAEW

SEQ ID NO: 3888 - protein, 10 aa, synthetic construct
  REGION 1..10: note = Description of Artificial Sequence: Synthetic peptide
KIATESIVIW

SEQ ID NO: 3889 - protein, 10 aa, synthetic construct
  REGION 1..10: note = Description of Artificial Sequence: Synthetic peptide
AVSPRTLNAW

SEQ ID NO: 3890 - protein, 9 aa, synthetic construct
  REGION 1..9: note = Description of Artificial Sequence: Synthetic peptide
RVMGTQRNY

SEQ ID NO: 3891 - protein, 10 aa, synthetic construct
  REGION 1..10: note = Description of Artificial Sequence: Synthetic peptide
RVIEIGQRAF

SEQ ID NO: 3892 - protein, 11 aa, synthetic construct
  REGION 1..11: note = Description of Artificial Sequence: Synthetic peptide
SVLSGGKLEAW

SEQ ID NO: 3893 - protein, 9 aa, synthetic construct
  REGION 1..9: note = Description of Artificial Sequence: Synthetic peptide
YNFPQITLW

SEQ ID NO: 3894 - protein, 10 aa, synthetic construct
  REGION 1..10: note = Description of Artificial Sequence: Synthetic peptide
VTVYYGVPVW

SEQ ID NO: 3895 - protein, 9 aa, synthetic construct
  REGION 1..9: note = Description of Artificial Sequence: Synthetic peptide
KTQKVYSLF

SEQ ID NO: 3896 - protein, 10 aa, synthetic construct
  REGION 1..10: note = Description of Artificial Sequence: Synthetic peptide
TTTVPWNSSW

SEQ ID NO: 3897 - protein, 9 aa, synthetic construct
  REGION 1..9: note = Description of Artificial Sequence: Synthetic peptide
LGHGVSIEW

SEQ ID NO: 3898 - protein, 9 aa, synthetic construct
  REGION 1..9: note = Description of Artificial Sequence: Synthetic peptide
RTKPPLPSV

SEQ ID NO: 3899 - protein, 9 aa, synthetic construct
  REGION 1..9: note = Description of Artificial Sequence: Synthetic peptide
ITMESIVIW

SEQ ID NO: 3900 - protein, 11 aa, synthetic construct
  REGION 1..11: note = Description of Artificial Sequence: Synthetic peptide
SVLSGGKLDAW

SEQ ID NO: 3901 - protein, 11 aa, synthetic construct
  REGION 1..11: note = Description of Artificial Sequence: Synthetic peptide
KALTDIVPLTR

SEQ ID NO: 3902 - protein, 9 aa, synthetic construct
  REGION 1..9: note = Description of Artificial Sequence: Synthetic peptide
RSIRLVSGF

SEQ ID NO: 3903 - protein, 9 aa, synthetic construct
  REGION 1..9: note = Description of Artificial Sequence: Synthetic peptide
QATQDVKNW

SEQ ID NO: 3904 - protein, 9 aa, synthetic construct
  REGION 1..9: note = Description of Artificial Sequence: Synthetic peptide
KTAVQMAVF

SEQ ID NO: 3905 - protein, 11 aa, synthetic construct
  REGION 1..11: note = Description of Artificial Sequence: Synthetic peptide
KSLYNTIAVLY

SEQ ID NO: 3906 - protein, 9 aa, synthetic construct
  REGION 1..9: note = Description of Artificial Sequence: Synthetic peptide
YATEKHNVW

SEQ ID NO: 3907 - protein, 11 aa, synthetic construct
  REGION 1..11: note = Description of Artificial Sequence: Synthetic peptide
KSIRFGPGQAF

SEQ ID NO: 3908 - protein, 10 aa, synthetic construct
  REGION 1..10: note = Description of Artificial Sequence: Synthetic peptide
TSNLQEQIGW

SEQ ID NO: 3909 - protein, 9 aa, synthetic construct
  REGION 1..9: note = Description of Artificial Sequence: Synthetic peptide
KAIEAQQQL

SEQ ID NO: 3910 - protein, 9 aa, synthetic construct
  REGION 1..9: note = Description of Artificial Sequence: Synthetic peptide
TTVPWNTSW

SEQ ID NO: 3911 - protein, 9 aa, synthetic construct
  REGION 1..9: note = Description of Artificial Sequence: Synthetic peptide
KAIEAQQQM

SEQ ID NO: 3912 - protein, 9 aa, synthetic construct
  REGION 1..9: note = Description of Artificial Sequence: Synthetic peptide
KALTDIVTL

SEQ ID NO: 3913 - protein, 9 aa, synthetic construct
  REGION 1..9: note = Description of Artificial Sequence: Synthetic peptide
STLQEQIGW

SEQ ID NO: 3914 - protein, 9 aa, synthetic construct
  REGION 1..9: note = Description of Artificial Sequence: Synthetic peptide
TIAVAVAEW

SEQ ID NO: 3915 - protein, 10 aa, synthetic construct
  REGION 1..10: note = Description of Artificial Sequence: Synthetic peptide
TAATNPDCAW

SEQ ID NO: 3916 - protein, 8 aa, synthetic construct
  REGION 1..8: note = Description of Artificial Sequence: Synthetic peptide
IAVAVAEW

SEQ ID NO: 3917 - protein, 11 aa, synthetic construct
  REGION 1..11: note = Description of Artificial Sequence: Synthetic peptide
GTEKQGTTHSY

SEQ ID NO: 3918 - protein, 9 aa, synthetic construct
  REGION 1..9: note = Description of Artificial Sequence: Synthetic peptide
TTVPWNSSW

SEQ ID NO: 3919 - protein, 11 aa, synthetic construct
  REGION 1..11: note = Description of Artificial Sequence: Synthetic peptide
KAYDTEVHNVW

SEQ ID NO: 3920 - protein, 9 aa, synthetic construct
  REGION 1..9: note = Description of Artificial Sequence: Synthetic peptide
GTEELRSLY

SEQ ID NO: 3921 - protein, 10 aa, synthetic construct
  REGION 1..10: note = Description of Artificial Sequence: Synthetic peptide
KAIEAQQQLL

SEQ ID NO: 3922 - protein, 9 aa, synthetic construct
  REGION 1..9: note = Description of Artificial Sequence: Synthetic peptide
NTELIIYQY

SEQ ID NO: 3923 - protein, 9 aa, synthetic construct
  REGION 1..9: note = Description of Artificial Sequence: Synthetic peptide
GTEELKSLY

SEQ ID NO: 3924 - protein, 10 aa, synthetic construct
  REGION 1..10: note = Description of Artificial Sequence: Synthetic peptide
KAIEAQQQML

SEQ ID NO: 3925 - protein, 9 aa, synthetic construct
  REGION 1..9: note = Description of Artificial Sequence: Synthetic peptide
TTGLFNSTW

SEQ ID NO: 3926 - protein, 9 aa, synthetic construct
  REGION 1..9: note = Description of Artificial Sequence: Synthetic peptide
KLEEEQNKY

SEQ ID NO: 3927 - protein, 8 aa, synthetic construct
  REGION 1..8: note = Description of Artificial Sequence: Synthetic peptide
ATEKHNVW

SEQ ID NO: 3928 - protein, 9 aa, synthetic construct
  REGION 1..9: note = Description of Artificial Sequence: Synthetic peptide
WTKEGNSTW

SEQ ID NO: 3929 - protein, 10 aa, synthetic construct
  REGION 1..10: note = Description of Artificial Sequence: Synthetic peptide
AVSPRTLNAW

SEQ ID NO: 3930 - protein, 9 aa, synthetic construct
  REGION 1..9: note = Description of Artificial Sequence: Synthetic peptide
KTQEVYSLF

SEQ ID NO: 3931 - protein, 9 aa, synthetic construct
  REGION 1..9: note = Description of Artificial Sequence: Synthetic peptide
AATNPDCAW

SEQ ID NO: 3932 - protein, 9 aa, synthetic construct
  REGION 1..9: note = Description of Artificial Sequence: Synthetic peptide
QAIEAQQHL

SEQ ID NO: 3933 - protein, 9 aa, synthetic construct
  REGION 1..9: note = Description of Artificial Sequence: Synthetic peptide
RAVGLGAAF

SEQ ID NO: 3934 - protein, 9 aa, synthetic construct
  REGION 1..9: note = Description of Artificial Sequence: Synthetic peptide
KTAVQMAVF

SEQ ID NO: 3935 - protein, 10 aa, synthetic construct
  REGION 1..10: note = Description of Artificial Sequence: Synthetic peptide
TAANNPDCAW

SEQ ID NO: 3936 - protein, 9 aa, synthetic construct
  REGION 1..9: note = Description of Artificial Sequence: Synthetic peptide
RTKPPLPSV

SEQ ID NO: 3937 - protein, 9 aa, synthetic construct
  REGION 1..9: note = Description of Artificial Sequence: Synthetic peptide
RAVGLGAVF

SEQ ID NO: 3938 - protein, 9 aa, synthetic construct
  REGION 1..9: note = Description of Artificial Sequence: Synthetic peptide
QATQDVKNW

SEQ ID NO: 3939 - protein, 11 aa, synthetic construct
  REGION 1..11: note = Description of Artificial Sequence: Synthetic peptide
STWTKEGNSTW

SEQ ID NO: 3940 - protein, 9 aa, synthetic construct
  REGION 1..9: note = Description of Artificial Sequence: Synthetic peptide
TINEEAAEW

SEQ ID NO: 3941 - protein, 9 aa, synthetic construct
  REGION 1..9: note = Description of Artificial Sequence: Synthetic peptide
AANNPDCAW

SEQ ID NO: 3942 - protein, 10 aa, synthetic construct
  REGION 1..10: note = Description of Artificial Sequence: Synthetic peptide
QAIEAQQHLL

SEQ ID NO: 3943 - protein, 8 aa, synthetic construct
  REGION 1..8: note = Description of Artificial Sequence: Synthetic peptide
NSPTSREL

SEQ ID NO: 3944 - protein, 9 aa, synthetic construct
  REGION 1..9: note = Description of Artificial Sequence: Synthetic peptide
ALPVGTEEL

SEQ ID NO: 3945 - protein, 9 aa, synthetic construct
  REGION 1..9: note = Description of Artificial Sequence: Synthetic peptide
YSPVSILDI

SEQ ID NO: 3946 - protein, 9 aa, synthetic construct
  REGION 1..9: note = Description of Artificial Sequence: Synthetic peptide
NAKNIIVQF

SEQ ID NO: 3947 - protein, 9 aa, synthetic construct
  REGION 1..9: note = Description of Artificial Sequence: Synthetic peptide
FSVPLHEDF

SEQ ID NO: 3948 - protein, 9 aa, synthetic construct
  REGION 1..9: note = Description of Artificial Sequence: Synthetic peptide
NTELIIYQY

SEQ ID NO: 3949 - protein, 9 aa, synthetic construct
  REGION 1..9: note = Description of Artificial Sequence: Synthetic peptide
ATDLWVTVY

SEQ ID NO: 3950 - protein, 9 aa, synthetic construct
  REGION 1..9: note = Description of Artificial Sequence: Synthetic peptide
GTEELKSLY

SEQ ID NO: 3951 - protein, 9 aa, synthetic construct
  REGION 1..9: note = Description of Artificial Sequence: Synthetic peptide
TEAVQKITM

SEQ ID NO: 3952 - protein, 9 aa, synthetic construct
  REGION 1..9: note = Description of Artificial Sequence: Synthetic peptide
TEAVQKIVM

SEQ ID NO: 3953 - protein, 10 aa, synthetic construct
  REGION 1..10: note = Description of Artificial Sequence: Synthetic peptide
STEEIKNCSY

SEQ ID NO: 3954 - protein, 9 aa, synthetic construct
  REGION 1..9: note = Description of Artificial Sequence: Synthetic peptide
GTEELRSLY

SEQ ID NO: 3955 - protein, 9 aa, synthetic construct
  REGION 1..9: note = Description of Artificial Sequence: Synthetic peptide
TEEIKNCSY

SEQ ID NO: 3956 - protein, 8 aa, synthetic construct
  REGION 1..8: note = Description of Artificial Sequence: Synthetic peptide
VLDVGDAY

SEQ ID NO: 3957 - protein, 9 aa, synthetic construct
  REGION 1..9: note = Description of Artificial Sequence: Synthetic peptide
KAIEAQQQL

SEQ ID NO: 3958 - protein, 9 aa, synthetic construct
  REGION 1..9: note = Description of Artificial Sequence: Synthetic peptide
RALGPGASL

SEQ ID NO: 3959 - protein, 9 aa, synthetic construct
  REGION 1..9: note = Description of Artificial Sequence: Synthetic peptide
QAIEAQQHL

SEQ ID NO: 3960 - protein, 9 aa, synthetic construct
  REGION 1..9: note = Description of Artificial Sequence: Synthetic peptide
RALGPGATL

SEQ ID NO: 3961 - protein, 9 aa, synthetic construct
  REGION 1..9: note = Description of Artificial Sequence: Synthetic peptide
LAWDDLRSL

SEQ ID NO: 3962 - protein, 9 aa, synthetic construct
  REGION 1..9: note = Description of Artificial Sequence: Synthetic peptide
IASSSKQEL

SEQ ID NO: 3963 - protein, 9 aa, synthetic construct
  REGION 1..9: note = Description of Artificial Sequence: Synthetic peptide
KAIEAQQQL

SEQ ID NO: 3964 - protein, 9 aa, synthetic construct
  REGION 1..9: note = Description of Artificial Sequence: Synthetic peptide
IASSSKQEL

SEQ ID NO: 3965 - protein, 9 aa, synthetic construct
  REGION 1..9: note = Description of Artificial Sequence: Synthetic peptide
RALGPGASL

SEQ ID NO: 3966 - protein, 9 aa, synthetic construct
  REGION 1..9: note = Description of Artificial Sequence: Synthetic peptide
QAIEAQQHL

SEQ ID NO: 3967 - protein, 9 aa, synthetic construct
  REGION 1..9: note = Description of Artificial Sequence: Synthetic peptide
GAVDLSHFL

SEQ ID NO: 3968 - protein, 9 aa, synthetic construct
  REGION 1..9: note = Description of Artificial Sequence: Synthetic peptide
YSTQIDPDL

SEQ ID NO: 3969 - protein, 9 aa, synthetic construct
  REGION 1..9: note = Description of Artificial Sequence: Synthetic peptide
RALGPGATL

SEQ ID NO: 3970 - protein, 9 aa, synthetic construct
  REGION 1..9: note = Description of Artificial Sequence: Synthetic peptide
ATDIQTKEL

SEQ ID NO: 3971 - protein, 9 aa, synthetic construct
  REGION 1..9: note = Description of Artificial Sequence: Synthetic peptide
YVDRFFKTL

SEQ ID NO: 3972 - protein, 9 aa, synthetic construct
  REGION 1..9: note = Description of Artificial Sequence: Synthetic peptide
LAWDDLRSL

SEQ ID NO: 3973 - protein, 9 aa, synthetic construct
  REGION 1..9: note = Description of Artificial Sequence: Synthetic peptide
SAEPVPLQL

SEQ ID NO: 3974 - protein, 9 aa, synthetic construct
  REGION 1..9: note = Description of Artificial Sequence: Synthetic peptide
KAIEAQQQM

SEQ ID NO: 3975 - protein, 9 aa, synthetic construct
  REGION 1..9: note = Description of Artificial Sequence: Synthetic peptide
LFDTIAVAV

SEQ ID NO: 3976 - protein, 8 aa, synthetic construct
  REGION 1..8: note = Description of Artificial Sequence: Synthetic peptide
AFDLSHFL

SEQ ID NO: 3977 - protein, 9 aa, synthetic construct
  REGION 1..9: note = Description of Artificial Sequence: Synthetic peptide
QYDQIVIEI

SEQ ID NO: 3978 - protein, 9 aa, synthetic construct
  REGION 1..9: note = Description of Artificial Sequence: Synthetic peptide
QYDQIAIEI

SEQ ID NO: 3979 - protein, 9 aa, synthetic construct
  REGION 1..9: note = Description of Artificial Sequence: Synthetic peptide
FYELDVVLL

SEQ ID NO: 3980 - protein, 8 aa, synthetic construct
  REGION 1..8: note = Description of Artificial Sequence: Synthetic peptide
KADWNVTL

SEQ ID NO: 3981 - protein, 9 aa, synthetic construct
  REGION 1..9: note = Description of Artificial Sequence: Synthetic peptide
RSDDPDESL

SEQ ID NO: 3982 - protein, 9 aa, synthetic construct
  REGION 1..9: note = Description of Artificial Sequence: Synthetic peptide
HTDNGPNFI

SEQ ID NO: 3983 - protein, 9 aa, synthetic construct
  REGION 1..9: note = Description of Artificial Sequence: Synthetic peptide
SAEPVPLQL

SEQ ID NO: 3984 - protein, 8 aa, synthetic construct
  REGION 1..8: note = Description of Artificial Sequence: Synthetic peptide
AVDLSHFL

SEQ ID NO: 3985 - protein, 9 aa, synthetic construct
  REGION 1..9: note = Description of Artificial Sequence: Synthetic peptide
IQDNGDIKV

SEQ ID NO: 3986 - protein, 10 aa, synthetic construct
  REGION 1..10: note = Description of Artificial Sequence: Synthetic peptide
RSDDPDESLL

SEQ ID NO: 3987 - protein, 9 aa, synthetic construct
  REGION 1..9: note = Description of Artificial Sequence: Synthetic peptide
LVDAIAVTV

SEQ ID NO: 3988 - protein, 9 aa, synthetic construct
  REGION 1..9: note = Description of Artificial Sequence: Synthetic peptide
GGDPEITTL

SEQ ID NO: 3989 - protein, 9 aa, synthetic construct
  REGION 1..9: note = Description of Artificial Sequence: Synthetic peptide
GVDDPEREV

SEQ ID NO: 3990 - protein, 9 aa, synthetic construct
  REGION 1..9: note = Description of Artificial Sequence: Synthetic peptide
VLDVGDAYF

SEQ ID NO: 3991 - protein, 9 aa, synthetic construct
  REGION 1..9: note = Description of Artificial Sequence: Synthetic peptide
GIDDPEREV

SEQ ID NO: 3992 - protein, 9 aa, synthetic construct
  REGION 1..9: note = Description of Artificial Sequence: Synthetic peptide
IQDNSDIKV

SEQ ID NO: 3993 - protein, 9 aa, synthetic construct
  REGION 1..9: note = Description of Artificial Sequence: Synthetic peptide
QRPLVTVKI

SEQ ID NO: 3994 - protein, 10 aa, synthetic construct
  REGION 1..10: note = Description of Artificial Sequence: Synthetic peptide
IRFGPGQAFY

SEQ ID NO: 3995 - protein, 9 aa, synthetic construct
  REGION 1..9: note = Description of Artificial Sequence: Synthetic peptide
IRYLQQLLF

SEQ ID NO: 3996 - protein, 9 aa, synthetic construct
  REGION 1..9: note = Description of Artificial Sequence: Synthetic peptide
ARNPEMVIY

SEQ ID NO: 3997 - protein, 9 aa, synthetic construct
  REGION 1..9: note = Description of Artificial Sequence: Synthetic peptide
LKTPVHGVY

SEQ ID NO: 3998 - protein, 8 aa, synthetic construct
  REGION 1..8: note = Description of Artificial Sequence: Synthetic peptide
IVGLIVAL

SEQ ID NO: 3999 - protein, 9 aa, synthetic construct
  REGION 1..9: note = Description of Artificial Sequence: Synthetic peptide
SAISLFDTI

SEQ ID NO: 4000 - protein, 9 aa, synthetic construct
  REGION 1..9: note = Description of Artificial Sequence: Synthetic peptide
KAIEAQQQL

SEQ ID NO: 4001 - protein, 9 aa, synthetic construct
  REGION 1..9: note = Description of Artificial Sequence: Synthetic peptide
SAVNLVDAI

SEQ ID NO: 4002 - protein, 9 aa, synthetic construct
  REGION 1..9: note = Description of Artificial Sequence: Synthetic peptide
KALTDIVTL

SEQ ID NO: 4003 - protein, 9 aa, synthetic construct
  REGION 1..9: note = Description of Artificial Sequence: Synthetic peptide
SAEPVPLQL

SEQ ID NO: 4004 - protein, 9 aa, synthetic construct
  REGION 1..9: note = Description of Artificial Sequence: Synthetic peptide
ELVSPKCEY

SEQ ID NO: 4005 - protein, 9 aa, synthetic construct
  REGION 1..9: note = Description of Artificial Sequence: Synthetic peptide
TIAVAVAEW

SEQ ID NO: 4006 - protein, 9 aa, synthetic construct
  REGION 1..9: note = Description of Artificial Sequence: Synthetic peptide
FLGAAGSTM

SEQ ID NO: 4007 - protein, 9 aa, synthetic construct
  REGION 1..9: note = Description of Artificial Sequence: Synthetic peptide
QAIEAQQHL

SEQ ID NO: 4008 - protein, 9 aa, synthetic construct
  REGION 1..9: note = Description of Artificial Sequence: Synthetic peptide
TVLDVGDAY

SEQ ID NO: 4009 - protein, 9 aa, synthetic construct
  REGION 1..9: note = Description of Artificial Sequence: Synthetic peptide
GAVDLSHFL

SEQ ID NO: 4010 - protein, 9 aa, synthetic construct
  REGION 1..9: note = Description of Artificial Sequence: Synthetic peptide
IVTDSQYAL

SEQ ID NO: 4011 - protein, 10 aa, synthetic construct
  REGION 1..10: note = Description of Artificial Sequence: Synthetic peptide
SALPVGTEEL

SEQ ID NO: 4012 - protein, 9 aa, synthetic construct
  REGION 1..9: note = Description of Artificial Sequence: Synthetic peptide
EQHTPTISL

SEQ ID NO: 4013 - protein, 9 aa, synthetic construct
  REGION 1..9: note = Description of Artificial Sequence: Synthetic peptide
KAIEAQQQM

SEQ ID NO: 4014 - protein, 9 aa, synthetic construct
  REGION 1..9: note = Description of Artificial Sequence: Synthetic peptide
RSDDPDESL

SEQ ID NO: 4015 - protein, 8 aa, synthetic construct
  REGION 1..8: note = Description of Artificial Sequence: Synthetic peptide
AVDLSHFL

SEQ ID NO: 4016 - protein, 9 aa, synthetic construct
  REGION 1..9: note = Description of Artificial Sequence: Synthetic peptide
ATDIQTKEL

SEQ ID NO: 4017 - protein, 8 aa, synthetic construct
  REGION 1..8: note = Description of Artificial Sequence: Synthetic peptide
KADWNVTL

SEQ ID NO: 4018 - protein, 9 aa, synthetic construct
  REGION 1..9: note = Description of Artificial Sequence: Synthetic peptide
GVDDPEREV

SEQ ID NO: 4019 - protein, 10 aa, synthetic construct
  REGION 1..10: note = Description of Artificial Sequence: Synthetic peptide
IVELVGHSSL

SEQ ID NO: 4020 - protein, 9 aa, synthetic construct
  REGION 1..9: note = Description of Artificial Sequence: Synthetic peptide
GGDPEITTL

SEQ ID NO: 4021 - protein, 9 aa, synthetic construct
  REGION 1..9: note = Description of Artificial Sequence: Synthetic peptide
GIDDPEREV

SEQ ID NO: 4022 - protein, 10 aa, synthetic construct
  REGION 1..10: note = Description of Artificial Sequence: Synthetic peptide
GIDDPEREVL

SEQ ID NO: 4023 - protein, 10 aa, synthetic construct
  REGION 1..10: note = Description of Artificial Sequence: Synthetic peptide
RSDDPDESLL

SEQ ID NO: 4024 - protein, 9 aa, synthetic construct
  REGION 1..9: note = Description of Artificial Sequence: Synthetic peptide
TQDFWEVQL

SEQ ID NO: 4025 - protein, 10 aa, synthetic construct
  REGION 1..10: note = Description of Artificial Sequence: Synthetic peptide
GVDDPEREVL

SEQ ID NO: 4026 - protein, 9 aa, synthetic construct
  REGION 1..9: note = Description of Artificial Sequence: Synthetic peptide
HTDNGPNFI

SEQ ID NO: 4027 - protein, 9 aa, synthetic construct
  REGION 1..9: note = Description of Artificial Sequence: Synthetic peptide
MGEEITSSL

SEQ ID NO: 4028 - protein, 10 aa, synthetic construct
  REGION 1..10: note = Description of Artificial Sequence: Synthetic peptide
HLDFGDVNNV

SEQ ID NO: 4029 - protein, 9 aa, synthetic construct
  REGION 1..9: note = Description of Artificial Sequence: Synthetic peptide
SAEPVPLQL

SEQ ID NO: 4030 - protein, 9 aa, synthetic construct
  REGION 1..9: note = Description of Artificial Sequence: Synthetic peptide
RNDSSSETF

SEQ ID NO: 4031 - protein, 9 aa, synthetic construct
  REGION 1..9: note = Description of Artificial Sequence: Synthetic peptide
LVDAIAVTV

SEQ ID NO: 4032 - protein, 9 aa, synthetic construct
  REGION 1..9: note = Description of Artificial Sequence: Synthetic peptide
RALGPGATL

SEQ ID NO: 4033 - protein, 9 aa, synthetic construct
  REGION 1..9: note = Description of Artificial Sequence: Synthetic peptide
RALGPGASL

SEQ ID NO: 4034 - protein, 10 aa, synthetic construct
  REGION 1..10: note = Description of Artificial Sequence: Synthetic peptide
SLFGNDPLLQ

SEQ ID NO: 4035 - protein, 9 aa, synthetic construct
  REGION 1..9: note = Description of Artificial Sequence: Synthetic peptide
KALTDIVTL

SEQ ID NO: 4036 - protein, 9 aa, synthetic construct
  REGION 1..9: note = Description of Artificial Sequence: Synthetic peptide
NAKNIIVQF

SEQ ID NO: 4037 - protein, 9 aa, synthetic construct
  REGION 1..9: note = Description of Artificial Sequence: Synthetic peptide
KAADLWVTV

SEQ ID NO: 4038 - protein, 9 aa, synthetic construct
  REGION 1..9: note = Description of Artificial Sequence: Synthetic peptide
ATNLWVTVY

SEQ ID NO: 4039 - protein, 10 aa, synthetic construct
  REGION 1..10: note = Description of Artificial Sequence: Synthetic peptide
VTFEPIPIHY

SEQ ID NO: 4040 - protein, 9 aa, synthetic construct
  REGION 1..9: note = Description of Artificial Sequence: Synthetic peptide
YATEKHNVW

SEQ ID NO: 4041 - protein, 10 aa, synthetic construct
  REGION 1..10: note = Description of Artificial Sequence: Synthetic peptide
VSFEPIPIHY

SEQ ID NO: 4042 - protein, 9 aa, synthetic construct
  REGION 1..9: note = Description of Artificial Sequence: Synthetic peptide
GAASITLTV

SEQ ID NO: 4043 - protein, 9 aa, synthetic construct
  REGION 1..9: note = Description of Artificial Sequence: Synthetic peptide
KATDLWVTV

SEQ ID NO: 4044 - protein, 9 aa, synthetic construct
  REGION 1..9: note = Description of Artificial Sequence: Synthetic peptide
HFPNKTIIF

SEQ ID NO: 4045 - protein, 9 aa, synthetic construct
  REGION 1..9: note = Description of Artificial Sequence: Synthetic peptide
IYQEPFKNL

SEQ ID NO: 4046 - protein, 10 aa, synthetic construct
  REGION 1..10: note = Description of Artificial Sequence: Synthetic peptide
AFQQREAREF

SEQ ID NO: 4047 - protein, 8 aa, synthetic construct
  REGION 1..8: note = Description of Artificial Sequence: Synthetic peptide
SYNTTTIL

SEQ ID NO: 4048 - protein, 8 aa, synthetic construct
  REGION 1..8: note = Description of Artificial Sequence: Synthetic peptide
SYNMPTEL

SEQ ID NO: 4049 - protein, 9 aa, synthetic construct
  REGION 1..9: note = Description of Artificial Sequence: Synthetic peptide
TYQIYQEPF

SEQ ID NO: 4050 - protein, 8 aa, synthetic construct
  REGION 1..8: note = Description of Artificial Sequence: Synthetic peptide
VYNTQGYF

SEQ ID NO: 4051 - protein, 8 aa, synthetic construct
  REGION 1..8: note = Description of Artificial Sequence: Synthetic peptide
SYLMPTEL

SEQ ID NO: 4052 - protein, 10 aa, synthetic construct
  REGION 1..10: note = Description of Artificial Sequence: Synthetic peptide
GFLGAAGSTM

SEQ ID NO: 4053 - protein, 9 aa, synthetic construct
  REGION 1..9: note = Description of Artificial Sequence: Synthetic peptide
KFPKKTIIF

SEQ ID NO: 4054 - protein, 8 aa, synthetic construct
  REGION 1..8: note = Description of Artificial Sequence: Synthetic peptide
RFGPGQAF

SEQ ID NO: 4055 - protein, 8 aa, synthetic construct
  REGION 1..8: note = Description of Artificial Sequence: Synthetic peptide
VYHTQGYF

SEQ ID NO: 4056 - protein, 9 aa, synthetic construct
  REGION 1..9: note = Description of Artificial Sequence: Synthetic peptide
SYQIYQEPF

SEQ ID NO: 4057 - protein, 9 aa, synthetic construct
  REGION 1..9: note = Description of Artificial Sequence: Synthetic peptide
KYHSNWRAM

SEQ ID NO: 4058 - protein, 9 aa, synthetic construct
  REGION 1..9: note = Description of Artificial Sequence: Synthetic peptide
LYNTIAVLY

SEQ ID NO: 4059 - protein, 8 aa, synthetic construct
  REGION 1..8: note = Description of Artificial Sequence: Synthetic peptide
SYNTTTIL

SEQ ID NO: 4060 - protein, 9 aa, synthetic construct
  REGION 1..9: note = Description of Artificial Sequence: Synthetic peptide
IYQEPFKNL

SEQ ID NO: 4061 - protein, 8 aa, synthetic construct
  REGION 1..8: note = Description of Artificial Sequence: Synthetic peptide
SYLMPTEL

SEQ ID NO: 4062 - protein, 10 aa, synthetic construct
  REGION 1..10: note = Description of Artificial Sequence: Synthetic peptide
GFLGAAGSTM

SEQ ID NO: 4063 - protein, 8 aa, synthetic construct
  REGION 1..8: note = Description of Artificial Sequence: Synthetic peptide
SYNMPTEL

SEQ ID NO: 4064 - protein, 8 aa, synthetic construct
  REGION 1..8: note = Description of Artificial Sequence: Synthetic peptide
LYNTIAVL

SEQ ID NO: 4065 - protein, 9 aa, synthetic construct
  REGION 1..9: note = Description of Artificial Sequence: Synthetic peptide
TYQIYQEPF

SEQ ID NO: 4066 - protein, 8 aa, synthetic construct
  REGION 1..8: note = Description of Artificial Sequence: Synthetic peptide
RFGPGQAF

SEQ ID NO: 4067 - protein, 9 aa, synthetic construct
  REGION 1..9: note = Description of Artificial Sequence: Synthetic peptide
SYQIYQEPF

SEQ ID NO: 4068 - protein, 8 aa, synthetic construct
  REGION 1..8: note = Description of Artificial Sequence: Synthetic peptide
PYNPAISL

SEQ ID NO: 4069 - protein, 8 aa, synthetic construct
  REGION 1..8: note = Description of Artificial Sequence: Synthetic peptide
VYNTQGYF

SEQ ID NO: 4070 - protein, 9 aa, synthetic construct
  REGION 1..9: note = Description of Artificial Sequence: Synthetic peptide
AIITVVNRV

SEQ ID NO: 4071 - protein, 9 aa, synthetic construct
  REGION 1..9: note = Description of Artificial Sequence: Synthetic peptide
KTELHAIYL

SEQ ID NO: 4072 - protein, 9 aa, synthetic construct
  REGION 1..9: note = Description of Artificial Sequence: Synthetic peptide
RTKPPLPSV

SEQ ID NO: 4073 - protein, 9 aa, synthetic construct
  REGION 1..9: note = Description of Artificial Sequence: Synthetic peptide
ANSPTSREL

SEQ ID NO: 4074 - protein, 9 aa, synthetic construct
  REGION 1..9: note = Description of Artificial Sequence: Synthetic peptide
GAASITLTV

SEQ ID NO: 4075 - protein, 9 aa, synthetic construct
  REGION 1..9: note = Description of Artificial Sequence: Synthetic peptide
YATEKHNVW

SEQ ID NO: 4076 - protein, 9 aa, synthetic construct
  REGION 1..9: note = Description of Artificial Sequence: Synthetic peptide
YSTYRLISC

SEQ ID NO: 4077 - protein, 9 aa, synthetic construct
  REGION 1..9: note = Description of Artificial Sequence: Synthetic peptide
LAREQHPEF

SEQ ID NO: 4078 - protein, 9 aa, synthetic construct
  REGION 1..9: note = Description of Artificial Sequence: Synthetic peptide
IASSSKQEL

SEQ ID NO: 4079 - protein, 9 aa, synthetic construct
  REGION 1..9: note = Description of Artificial Sequence: Synthetic peptide
VSSGIRKVL

SEQ ID NO: 4080 - protein, 9 aa, synthetic construct
  REGION 1..9: note = Description of Artificial Sequence: Synthetic peptide
KAIEAQQQL

SEQ ID NO: 4081 - protein, 9 aa, synthetic construct
  REGION 1..9: note = Description of Artificial Sequence: Synthetic peptide
IASSSKQEL

SEQ ID NO: 4082 - protein, 9 aa, synthetic construct
  REGION 1..9: note = Description of Artificial Sequence: Synthetic peptide
KAIEAQQQM

SEQ ID NO: 4083 - protein, 9 aa, synthetic construct
  REGION 1..9: note = Description of Artificial Sequence: Synthetic peptide
KATDLWVTV

SEQ ID NO: 4084 - protein, 9 aa, synthetic construct
  REGION 1..9: note = Description of Artificial Sequence: Synthetic peptide
ANSPTSREL

SEQ ID NO: 4085 - protein, 10 aa, synthetic construct
  REGION 1..10: note = Description of Artificial Sequence: Synthetic peptide
IATDIQTKEL

SEQ ID NO: 4086 - protein, 9 aa, synthetic construct
  REGION 1..9: note = Description of Artificial Sequence: Synthetic peptide
KAADLWVTV

SEQ ID NO: 4087 - protein, 9 aa, synthetic construct
  REGION 1..9: note = Description of Artificial Sequence: Synthetic peptide
KATNLWVTV

SEQ ID NO: 4088 - protein, 9 aa, synthetic construct
  REGION 1..9: note = Description of Artificial Sequence: Synthetic peptide
YAGIQVKQL

SEQ ID NO: 4089 - protein, 9 aa, synthetic construct
  REGION 1..9: note = Description of Artificial Sequence: Synthetic peptide
QAIEAQQHL

SEQ ID NO: 4090 - protein, 9 aa, synthetic construct
  REGION 1..9: note = Description of Artificial Sequence: Synthetic peptide
GAASITLTV

SEQ ID NO: 4091 - protein, 9 aa, synthetic construct
  REGION 1..9: note = Description of Artificial Sequence: Synthetic peptide
KAADLWVTV

SEQ ID NO: 4092 - protein, 11 aa, synthetic construct
  REGION 1..11: note = Description of Artificial Sequence: Synthetic peptide
AEIQKQGQDQW

SEQ ID NO: 4093 - protein, 11 aa, synthetic construct
  REGION 1..11: note = Description of Artificial Sequence: Synthetic peptide
SEVNIVTDSQY

SEQ ID NO: 4094 - protein, 10 aa, synthetic construct
  REGION 1..10: note = Description of Artificial Sequence: Synthetic peptide
TETGVGGHQI

SEQ ID NO: 4095 - protein, 9 aa, synthetic construct
  REGION 1..9: note = Description of Artificial Sequence: Synthetic peptide
EEINLPGKW

SEQ ID NO: 4096 - protein, 11 aa, synthetic construct
  REGION 1..11: note = Description of Artificial Sequence: Synthetic peptide
AEIQKQGQGQW

SEQ ID NO: 4097 - protein, 11 aa, synthetic construct
  REGION 1..11: note = Description of Artificial Sequence: Synthetic peptide
AEQATQDVKNW

SEQ ID NO: 4098 - protein, 9 aa, synthetic construct
  REGION 1..9: note = Description of Artificial Sequence: Synthetic peptide
KATDLWVTV

SEQ ID NO: 4099 - protein, 9 aa, synthetic construct
  REGION 1..9: note = Description of Artificial Sequence: Synthetic peptide
IAARTVTLL

SEQ ID NO: 4100 - protein, 8 aa, synthetic construct
  REGION 1..8: note = Description of Artificial Sequence: Synthetic peptide
IAARIVEL

SEQ ID NO: 4101 - protein, 9 aa, synthetic construct
  REGION 1..9: note = Description of Artificial Sequence: Synthetic peptide
KALTDIVTL

SEQ ID NO: 4102 - protein, 9 aa, synthetic construct
  REGION 1..9: note = Description of Artificial Sequence: Synthetic peptide
SAEPVPLQL

SEQ ID NO: 4103 - protein, 9 aa, synthetic construct
  REGION 1..9: note = Description of Artificial Sequence: Synthetic peptide
GAVDLSHFL

SEQ ID NO: 4104 - protein, 9 aa, synthetic construct
  REGION 1..9: note = Description of Artificial Sequence: Synthetic peptide
LIAARIVEL

SEQ ID NO: 4105 - protein, 10 aa, synthetic construct
  REGION 1..10: note = Description of Artificial Sequence: Synthetic peptide
RAVGLGAVFL

SEQ ID NO: 4106 - protein, 8 aa, synthetic construct
  REGION 1..8: note = Description of Artificial Sequence: Synthetic peptide
IAARTVEL

SEQ ID NO: 4107 - protein, 9 aa, synthetic construct
  REGION 1..9: note = Description of Artificial Sequence: Synthetic peptide
ISERILGTY

SEQ ID NO: 4108 - protein, 8 aa, synthetic construct
  REGION 1..8: note = Description of Artificial Sequence: Synthetic peptide
VLDVGDAY

SEQ ID NO: 4109 - protein, 10 aa, synthetic construct
  REGION 1..10: note = Description of Artificial Sequence: Synthetic peptide
ITMGPGKVYY

SEQ ID NO: 4110 - protein, 10 aa, synthetic construct
  REGION 1..10: note = Description of Artificial Sequence: Synthetic peptide
LSALVEMGHY

SEQ ID NO: 4111 - protein, 10 aa, synthetic construct
  REGION 1..10: note = Description of Artificial Sequence: Synthetic peptide
VTVLDVGDAY

SEQ ID NO: 4112 - protein, 9 aa, synthetic construct
  REGION 1..9: note = Description of Artificial Sequence: Synthetic peptide
PTDPNPQEV

SEQ ID NO: 4113 - protein, 9 aa, synthetic construct
  REGION 1..9: note = Description of Artificial Sequence: Synthetic peptide
GSEELRSLY

SEQ ID NO: 4114 - protein, 9 aa, synthetic construct
  REGION 1..9: note = Description of Artificial Sequence: Synthetic peptide
VLAEAMSQV

SEQ ID NO: 4115 - protein, 9 aa, synthetic construct
  REGION 1..9: note = Description of Artificial Sequence: Synthetic peptide
SLYNTVATL

SEQ ID NO: 4116 - protein, 9 aa, synthetic construct
  REGION 1..9: note = Description of Artificial Sequence: Synthetic peptide
GLADQLIHL

SEQ ID NO: 4117 - protein, 9 aa, synthetic construct
  REGION 1..9: note = Description of Artificial Sequence: Synthetic peptide
ALVEICTEL

SEQ ID NO: 4118 - protein, 9 aa, synthetic construct
  REGION 1..9: note = Description of Artificial Sequence: Synthetic peptide
ILKEPVHGV

SEQ ID NO: 4119 - protein, 9 aa, synthetic construct
  REGION 1..9: note = Description of Artificial Sequence: Synthetic peptide
SLFNTVATL

SEQ ID NO: 4120 - protein, 9 aa, synthetic construct
  REGION 1..9: note = Description of Artificial Sequence: Synthetic peptide
SLFNTIATL

SEQ ID NO: 4121 - protein, 9 aa, synthetic construct
  REGION 1..9: note = Description of Artificial Sequence: Synthetic peptide
ILGQLQPSL

SEQ ID NO: 4122 - protein, 9 aa, synthetic construct
  REGION 1..9: note = Description of Artificial Sequence: Synthetic peptide
QLTEAVQKI

SEQ ID NO: 4123 - protein, 9 aa, synthetic construct
  REGION 1..9: note = Description of Artificial Sequence: Synthetic peptide
ILGQLQPAL

SEQ ID NO: 4124 - protein, 10 aa, synthetic construct
  REGION 1..10: note = Description of Artificial Sequence: Synthetic peptide
ALNPGLLETA

SEQ ID NO: 4125 - protein, 9 aa, synthetic construct
  REGION 1..9: note = Description of Artificial Sequence: Synthetic peptide
ALTEIVPLT

SEQ ID NO: 4126 - protein, 9 aa, synthetic construct
  REGION 1..9: note = Description of Artificial Sequence: Synthetic peptide
ILKETVHGV

SEQ ID NO: 4127 - protein, 9 aa, synthetic construct
  REGION 1..9: note = Description of Artificial Sequence: Synthetic peptide
AVLSIVNRV

SEQ ID NO: 4128 - protein, 9 aa, synthetic construct
  REGION 1..9: note = Description of Artificial Sequence: Synthetic peptide
ALAEICAEM

SEQ ID NO: 4129 - protein, 9 aa, synthetic construct
  REGION 1..9: note = Description of Artificial Sequence: Synthetic peptide
ALTEVVPLT

SEQ ID NO: 4130 - protein, 10 aa, synthetic construct
  REGION 1..10: note = Description of Artificial Sequence: Synthetic peptide
KLVPVDPDQV

SEQ ID NO: 4131 - protein, 9 aa, synthetic construct
  REGION 1..9: note = Description of Artificial Sequence: Synthetic peptide
ALVEMGVEM

SEQ ID NO: 4132 - protein, 9 aa, synthetic construct
  REGION 1..9: note = Description of Artificial Sequence: Synthetic peptide
PQDSQTHQV

SEQ ID NO: 4133 - protein, 9 aa, synthetic construct
  REGION 1..9: note = Description of Artificial Sequence: Synthetic peptide
YTAFTIPSV

SEQ ID NO: 4134 - protein, 9 aa, synthetic construct
  REGION 1..9: note = Description of Artificial Sequence: Synthetic peptide
IVTDSQYAL

SEQ ID NO: 4135 - protein, 9 aa, synthetic construct
  REGION 1..9: note = Description of Artificial Sequence: Synthetic peptide
VLAEAMSQV

SEQ ID NO: 4136 - protein, 9 aa, synthetic construct
  REGION 1..9: note = Description of Artificial Sequence: Synthetic peptide
ILKETVHGV

SEQ ID NO: 4137 - protein, 9 aa, synthetic construct
  REGION 1..9: note = Description of Artificial Sequence: Synthetic peptide
ILKEPVHGV

SEQ ID NO: 4138 - protein, 9 aa, synthetic construct
  REGION 1..9: note = Description of Artificial Sequence: Synthetic peptide
SLYNTVATL

SEQ ID NO: 4139 - protein, 9 aa, synthetic construct
  REGION 1..9: note = Description of Artificial Sequence: Synthetic peptide
VVKIEPLGV

SEQ ID NO: 4140 - protein, 9 aa, synthetic construct
  REGION 1..9: note = Description of Artificial Sequence: Synthetic peptide
SLFNTVATL

SEQ ID NO: 4141 - protein, 9 aa, synthetic construct
  REGION 1..9: note = Description of Artificial Sequence: Synthetic peptide
SLFNTIATL

SEQ ID NO: 4142 - protein, 9 aa, synthetic construct
  REGION 1..9: note = Description of Artificial Sequence: Synthetic peptide
TLNAWVKVV

SEQ ID NO: 4143 - protein, 10 aa, synthetic construct
  REGION 1..10: note = Description of Artificial Sequence: Synthetic peptide
ALNPGLLETA

SEQ ID NO: 4144 - protein, 9 aa, synthetic construct
  REGION 1..9: note = Description of Artificial Sequence: Synthetic peptide
QLQARILAV

SEQ ID NO: 4145 - protein, 10 aa, synthetic construct
  REGION 1..10: note = Description of Artificial Sequence: Synthetic peptide
YLKDQQLLGI

SEQ ID NO: 4146 - protein, 9 aa, synthetic construct
  REGION 1..9: note = Description of Artificial Sequence: Synthetic peptide
KIKPPLPSV

SEQ ID NO: 4147 - protein, 9 aa, synthetic construct
  REGION 1..9: note = Description of Artificial Sequence: Synthetic peptide
RVIEVLQRV

SEQ ID NO: 4148 - protein, 9 aa, synthetic construct
  REGION 1..9: note = Description of Artificial Sequence: Synthetic peptide
ALFYKLDVV

SEQ ID NO: 4149 - protein, 9 aa, synthetic construct
  REGION 1..9: note = Description of Artificial Sequence: Synthetic peptide
ALIRILQQL

SEQ ID NO: 4150 - protein, 9 aa, synthetic construct
  REGION 1..9: note = Description of Artificial Sequence: Synthetic peptide
ELKSLFNTV

SEQ ID NO: 4151 - protein, 9 aa, synthetic construct
  REGION 1..9: note = Description of Artificial Sequence: Synthetic peptide
QLQARVLAV

SEQ ID NO: 4152 - protein, 11 aa, synthetic construct
  REGION 1..11: note = Description of Artificial Sequence: Synthetic peptide
FLKEKGGLEGL

SEQ ID NO: 4153 - protein, 9 aa, synthetic construct
  REGION 1..9: note = Description of Artificial Sequence: Synthetic peptide
ALNPGLLET

SEQ ID NO: 4154 - protein, 9 aa, synthetic construct
  REGION 1..9: note = Description of Artificial Sequence: Synthetic peptide
AVLSIVNRV

SEQ ID NO: 4155 - protein, 9 aa, synthetic construct
  REGION 1..9: note = Description of Artificial Sequence: Synthetic peptide
QLTEAVQKI

SEQ ID NO: 4156 - protein, 9 aa, synthetic construct
  REGION 1..9: note = Description of Artificial Sequence: Synthetic peptide
GLADQLIHL

SEQ ID NO: 4157 - protein, 9 aa, synthetic construct
  REGION 1..9: note = Description of Artificial Sequence: Synthetic peptide
TLKQIASKL

SEQ ID NO: 4158 - protein, 10 aa, synthetic construct
  REGION 1..10: note = Description of Artificial Sequence: Synthetic peptide
ALIWDDLRSL

SEQ ID NO: 4159 - protein, 9 aa, synthetic construct
  REGION 1..9: note = Description of Artificial Sequence: Synthetic peptide
GAASVTLTV

SEQ ID NO: 4160 - protein, 9 aa, synthetic construct
  REGION 1..9: note = Description of Artificial Sequence: Synthetic peptide
ALVEICTEL

SEQ ID NO: 4161 - protein, 9 aa, synthetic construct
  REGION 1..9: note = Description of Artificial Sequence: Synthetic peptide
TLNQIVGKL

SEQ ID NO: 4162 - protein, 9 aa, synthetic construct
  REGION 1..9: note = Description of Artificial Sequence: Synthetic peptide
ELKKIIGQV

SEQ ID NO: 4163 - protein, 8 aa, synthetic construct
  REGION 1..8: note = Description of Artificial Sequence: Synthetic peptide
VLSIVNRV

SEQ ID NO: 4164 - protein, 9 aa, synthetic construct
  REGION 1..9: note = Description of Artificial Sequence: Synthetic peptide
TVLSIVNRV

SEQ ID NO: 4165 - protein, 10 aa, synthetic construct
  REGION 1..10: note = Description of Artificial Sequence: Synthetic peptide
ALTEIVPLTA

SEQ ID NO: 4166 - protein, 10 aa, synthetic construct
  REGION 1..10: note = Description of Artificial Sequence: Synthetic peptide
KVVKIEPLGV

SEQ ID NO: 4167 - protein, 9 aa, synthetic construct
  REGION 1..9: note = Description of Artificial Sequence: Synthetic peptide
QIIGDIRQA

SEQ ID NO: 4168 - protein, 9 aa, synthetic construct
  REGION 1..9: note = Description of Artificial Sequence: Synthetic peptide
ALFLGFLGA

SEQ ID NO: 4169 - protein, 10 aa, synthetic construct
  REGION 1..10: note = Description of Artificial Sequence: Synthetic peptide
ALFLGFLGAA

SEQ ID NO: 4170 - protein, 9 aa, synthetic construct
  REGION 1..9: note = Description of Artificial Sequence: Synthetic peptide
VVAGIIAIV

SEQ ID NO: 4171 - protein, 9 aa, synthetic construct
  REGION 1..9: note = Description of Artificial Sequence: Synthetic peptide
IVLSIVNRV

SEQ ID NO: 4172 - protein, 9 aa, synthetic construct
  REGION 1..9: note = Description of Artificial Sequence: Synthetic peptide
LLNATAIAV

SEQ ID NO: 4173 - protein, 9 aa, synthetic construct
  REGION 1..9: note = Description of Artificial Sequence: Synthetic peptide
RVIEVVQGA

SEQ ID NO: 4174 - protein, 9 aa, synthetic construct
  REGION 1..9: note = Description of Artificial Sequence: Synthetic peptide
SLYNTIAVL

SEQ ID NO: 4175 - protein, 10 aa, synthetic construct
  REGION 1..10: note = Description of Artificial Sequence: Synthetic peptide
VLIGPTPVNI

SEQ ID NO: 4176 - protein, 9 aa, synthetic construct
  REGION 1..9: note = Description of Artificial Sequence: Synthetic peptide
TIVAIVALV

SEQ ID NO: 4177 - protein, 10 aa, synthetic construct
  REGION 1..10: note = Description of Artificial Sequence: Synthetic peptide
KLVSTGIRKV

SEQ ID NO: 4178 - protein, 9 aa, synthetic construct
  REGION 1..9: note = Description of Artificial Sequence: Synthetic peptide
LLQYWIQEL

SEQ ID NO: 4179 - protein, 9 aa, synthetic construct
  REGION 1..9: note = Description of Artificial Sequence: Synthetic peptide
GLADQLIHL

SEQ ID NO: 4180 - protein, 9 aa, synthetic construct
  REGION 1..9: note = Description of Artificial Sequence: Synthetic peptide
SLFNTIATL

SEQ ID NO: 4181 - protein, 9 aa, synthetic construct
  REGION 1..9: note = Description of Artificial Sequence: Synthetic peptide
SITNWLWYI

SEQ ID NO: 4182 - protein, 9 aa, synthetic construct
  REGION 1..9: note = Description of Artificial Sequence: Synthetic peptide
SLFNTVATL

SEQ ID NO: 4183 - protein, 9 aa, synthetic construct
  REGION 1..9: note = Description of Artificial Sequence: Synthetic peptide
SLYNTVATL

SEQ ID NO: 4184 - protein, 10 aa, synthetic construct
  REGION 1..10: note = Description of Artificial Sequence: Synthetic peptide
NLLQYWIQEL

SEQ ID NO: 4185 - protein, 9 aa, synthetic construct
  REGION 1..9: note = Description of Artificial Sequence: Synthetic peptide
ALIRILQQL

SEQ ID NO: 4186 - protein, 9 aa, synthetic construct
  REGION 1..9: note = Description of Artificial Sequence: Synthetic peptide
TLNAWVKVV

SEQ ID NO: 4187 - protein, 9 aa, synthetic construct
  REGION 1..9: note = Description of Artificial Sequence: Synthetic peptide
AVLSIVNRV

SEQ ID NO: 4188 - protein, 9 aa, synthetic construct
  REGION 1..9: note = Description of Artificial Sequence: Synthetic peptide
ILKETVHGV

SEQ ID NO: 4189 - protein, 9 aa, synthetic construct
  REGION 1..9: note = Description of Artificial Sequence: Synthetic peptide
TVLSIVNRV

SEQ ID NO: 4190 - protein, 9 aa, synthetic construct
  REGION 1..9: note = Description of Artificial Sequence: Synthetic peptide
IVLSIVNRV

SEQ ID NO: 4191 - protein, 9 aa, synthetic construct
  REGION 1..9: note = Description of Artificial Sequence: Synthetic peptide
ILKEPVHGV

SEQ ID NO: 4192 - protein, 9 aa, synthetic construct
  REGION 1..9: note = Description of Artificial Sequence: Synthetic peptide
RVIEVLQRV

SEQ ID NO: 4193 - protein, 9 aa, synthetic construct
  REGION 1..9: note = Description of Artificial Sequence: Synthetic peptide
ILAIVVWSI

SEQ ID NO: 4194 - protein, 9 aa, synthetic construct
  REGION 1..9: note = Description of Artificial Sequence: Synthetic peptide
SLYNTIAVL

SEQ ID NO: 4195 - protein, 9 aa, synthetic construct
  REGION 1..9: note = Description of Artificial Sequence: Synthetic peptide
IVSQIIEQL

SEQ ID NO: 4196 - protein, 9 aa, synthetic construct
  REGION 1..9: note = Description of Artificial Sequence: Synthetic peptide
NITNWLWYI

SEQ ID NO: 4197 - protein, 9 aa, synthetic construct
  REGION 1..9: note = Description of Artificial Sequence: Synthetic peptide
ILGQLQPSL

SEQ ID NO: 4198 - protein, 10 aa, synthetic construct
  REGION 1..10: note = Description of Artificial Sequence: Synthetic peptide
ALIWDDLRSL

SEQ ID NO: 4199 - protein, 9 aa, synthetic construct
  REGION 1..9: note = Description of Artificial Sequence: Synthetic peptide
ALVEICTEL

SEQ ID NO: 4200 - protein, 9 aa, synthetic construct
  REGION 1..9: note = Description of Artificial Sequence: Synthetic peptide
LLQYWSQEL

SEQ ID NO: 4201 - protein, 9 aa, synthetic construct
  REGION 1..9: note = Description of Artificial Sequence: Synthetic peptide
ILGQLQPAL

SEQ ID NO: 4202 - protein, 9 aa, synthetic construct
  REGION 1..9: note = Description of Artificial Sequence: Synthetic peptide
TLNAWVKVI

SEQ ID NO: 4203 - protein, 9 aa, synthetic construct
  REGION 1..9: note = Description of Artificial Sequence: Synthetic peptide
LLWRWGIML

SEQ ID NO: 4204 - protein, 9 aa, synthetic construct
  REGION 1..9: note = Description of Artificial Sequence: Synthetic peptide
LIWDDLRSL

SEQ ID NO: 4205 - protein, 10 aa, synthetic construct
  REGION 1..10: note = Description of Artificial Sequence: Synthetic peptide
TLWQRPLVTI

SEQ ID NO: 4206 - protein, 9 aa, synthetic construct
  REGION 1..9: note = Description of Artificial Sequence: Synthetic peptide
AILHIPVRI

SEQ ID NO: 4207 - protein, 9 aa, synthetic construct
  REGION 1..9: note = Description of Artificial Sequence: Synthetic peptide
LVNQIIEQL

SEQ ID NO: 4208 - protein, 9 aa, synthetic construct
  REGION 1..9: note = Description of Artificial Sequence: Synthetic peptide
LVSQIIEQL

SEQ ID NO: 4209 - protein, 9 aa, synthetic construct
  REGION 1..9: note = Description of Artificial Sequence: Synthetic peptide
RLIDRLIER

SEQ ID NO: 4210 - protein, 9 aa, synthetic construct
  REGION 1..9: note = Description of Artificial Sequence: Synthetic peptide
LLGQLQPSL

SEQ ID NO: 4211 - protein, 9 aa, synthetic construct
  REGION 1..9: note = Description of Artificial Sequence: Synthetic peptide
LIVTRIVEL

SEQ ID NO: 4212 - protein, 9 aa, synthetic construct
  REGION 1..9: note = Description of Artificial Sequence: Synthetic peptide
TLNQIVGKL

SEQ ID NO: 4213 - protein, 9 aa, synthetic construct
  REGION 1..9: note = Description of Artificial Sequence: Synthetic peptide
KIKPPLPSV

SEQ ID NO: 4214 - protein, 9 aa, synthetic construct
  REGION 1..9: note = Description of Artificial Sequence: Synthetic peptide
ALFYKLDVV

SEQ ID NO: 4215 - protein, 9 aa, synthetic construct
  REGION 1..9: note = Description of Artificial Sequence: Synthetic peptide
HLWRWGILL

SEQ ID NO: 4216 - protein, 9 aa, synthetic construct
  REGION 1..9: note = Description of Artificial Sequence: Synthetic peptide
RLIDRIIER

SEQ ID NO: 4217 - protein, 9 aa, synthetic construct
  REGION 1..9: note = Description of Artificial Sequence: Synthetic peptide
HLEGKIILV

SEQ ID NO: 4218 - protein, 9 aa, synthetic construct
  REGION 1..9: note = Description of Artificial Sequence: Synthetic peptide
ALTEVIPLT

SEQ ID NO: 4219 - protein, 9 aa, synthetic construct
  REGION 1..9: note = Description of Artificial Sequence: Synthetic peptide
AILNIPTRI

SEQ ID NO: 4220 - protein, 9 aa, synthetic construct
  REGION 1..9: note = Description of Artificial Sequence: Synthetic peptide
QLQARILAV

SEQ ID NO: 4221 - protein, 9 aa, synthetic construct
  REGION 1..9: note = Description of Artificial Sequence: Synthetic peptide
ALTEIVPLT

SEQ ID NO: 4222 - protein, 9 aa, synthetic construct
  REGION 1..9: note = Description of Artificial Sequence: Synthetic peptide
LLNATAIAV

SEQ ID NO: 4223 - protein, 9 aa, synthetic construct
  REGION 1..9: note = Description of Artificial Sequence: Synthetic peptide
ILVESPTVL

SEQ ID NO: 4224 - protein, 9 aa, synthetic construct
  REGION 1..9: note = Description of Artificial Sequence: Synthetic peptide
TVLSIMNRV

SEQ ID NO: 4225 - protein, 9 aa, synthetic construct
  REGION 1..9: note = Description of Artificial Sequence: Synthetic peptide
VLAEAMSQV

SEQ ID NO: 4226 - protein, 9 aa, synthetic construct
  REGION 1..9: note = Description of Artificial Sequence: Synthetic peptide
FLAIIWVDL

SEQ ID NO: 4227 - protein, 9 aa, synthetic construct
  REGION 1..9: note = Description of Artificial Sequence: Synthetic peptide
FLAIFWVDL

SEQ ID NO: 4228 - protein, 9 aa, synthetic construct
  REGION 1..9: note = Description of Artificial Sequence: Synthetic peptide
ALTEVVPLT

SEQ ID NO: 4229 - protein, 9 aa, synthetic construct
  REGION 1..9: note = Description of Artificial Sequence: Synthetic peptide
IIAIVVWTI

SEQ ID NO: 4230 - protein, 10 aa, synthetic construct
  REGION 1..10: note = Description of Artificial Sequence: Synthetic peptide
TLWQRPIVTI

SEQ ID NO: 4231 - protein, 10 aa, synthetic construct
  REGION 1..10: note = Description of Artificial Sequence: Synthetic peptide
NLLQYWSQEL

SEQ ID NO: 4232 - protein, 9 aa, synthetic construct
  REGION 1..9: note = Description of Artificial Sequence: Synthetic peptide
LVSQIIEEL

SEQ ID NO: 4233 - protein, 9 aa, synthetic construct
  REGION 1..9: note = Description of Artificial Sequence: Synthetic peptide
LIVVRIVEL

SEQ ID NO: 4234 - protein, 9 aa, synthetic construct
  REGION 1..9: note = Description of Artificial Sequence: Synthetic peptide
IVTDSQYAL

SEQ ID NO: 4235 - protein, 10 aa, synthetic construct
  REGION 1..10: note = Description of Artificial Sequence: Synthetic peptide
ALNPGLLETA

SEQ ID NO: 4236 - protein, 10 aa, synthetic construct
  REGION 1..10: note = Description of Artificial Sequence: Synthetic peptide
GLVGLRIVFI

SEQ ID NO: 4237 - protein, 9 aa, synthetic construct
  REGION 1..9: note = Description of Artificial Sequence: Synthetic peptide
HLEGKVILV

SEQ ID NO: 4238 - protein, 11 aa, synthetic construct
  REGION 1..11: note = Description of Artificial Sequence: Synthetic peptide
FLKEKGGLEGL

SEQ ID NO: 4239 - protein, 9 aa, synthetic construct
  REGION 1..9: note = Description of Artificial Sequence: Synthetic peptide
LLLIVTRTL

SEQ ID NO: 4240 - protein, 10 aa, synthetic construct
  REGION 1..10: note = Description of Artificial Sequence: Synthetic peptide
VLIGPTPVNI

SEQ ID NO: 4241 - protein, 9 aa, synthetic construct
  REGION 1..9: note = Description of Artificial Sequence: Synthetic peptide
TLGQIVKKL

SEQ ID NO: 4242 - protein, 9 aa, synthetic construct
  REGION 1..9: note = Description of Artificial Sequence: Synthetic peptide
YQLEKEPIV

SEQ ID NO: 4243 - protein, 9 aa, synthetic construct
  REGION 1..9: note = Description of Artificial Sequence: Synthetic peptide
ALNPGLLET

SEQ ID NO: 4244 - protein, 10 aa, synthetic construct
  REGION 1..10: note = Description of Artificial Sequence: Synthetic peptide
LLIVTRIVEL

SEQ ID NO: 4245 - protein, 9 aa, synthetic construct
  REGION 1..9: note = Description of Artificial Sequence: Synthetic peptide
YILGIVALV

SEQ ID NO: 4246 - protein, 9 aa, synthetic construct
  REGION 1..9: note = Description of Artificial Sequence: Synthetic peptide
LLQLTVWGI

SEQ ID NO: 4247 - protein, 9 aa, synthetic construct
  REGION 1..9: note = Description of Artificial Sequence: Synthetic peptide
AIIRILQQL

SEQ ID NO: 4248 - protein, 10 aa, synthetic construct
  REGION 1..10: note = Description of Artificial Sequence: Synthetic peptide
LLIVVRIVEL

SEQ ID NO: 4249 - protein, 9 aa, synthetic construct
  REGION 1..9: note = Description of Artificial Sequence: Synthetic peptide
GALDLSHFL

SEQ ID NO: 4250 - protein, 11 aa, synthetic construct
  REGION 1..11: note = Description of Artificial Sequence: Synthetic peptide
VQLGIPHPAGL

SEQ ID NO: 4251 - protein, 9 aa, synthetic construct
  REGION 1..9: note = Description of Artificial Sequence: Synthetic peptide
NYTSLIHSL

SEQ ID NO: 4252 - protein, 9 aa, synthetic construct
  REGION 1..9: note = Description of Artificial Sequence: Synthetic peptide
YSTQVDPEL

SEQ ID NO: 4253 - protein, 10 aa, synthetic construct
  REGION 1..10: note = Description of Artificial Sequence: Synthetic peptide
RTQDFWEVQL

SEQ ID NO: 4254 - protein, 9 aa, synthetic construct
  REGION 1..9: note = Description of Artificial Sequence: Synthetic peptide
TVSFNFPQV

SEQ ID NO: 4255 - protein, 10 aa, synthetic construct
  REGION 1..10: note = Description of Artificial Sequence: Synthetic peptide
YLQDQQLLGI

SEQ ID NO: 4256 - protein, 11 aa, synthetic construct
  REGION 1..11: note = Description of Artificial Sequence: Synthetic peptide
SLLHPVSLHGM

SEQ ID NO: 4257 - protein, 9 aa, synthetic construct
  REGION 1..9: note = Description of Artificial Sequence: Synthetic peptide
TLQEQITWM

SEQ ID NO: 4258 - protein, 10 aa, synthetic construct
  REGION 1..10: note = Description of Artificial Sequence: Synthetic peptide
IMIVGGLVGL

SEQ ID NO: 4259 - protein, 9 aa, synthetic construct
  REGION 1..9: note = Description of Artificial Sequence: Synthetic peptide
ALLSKLDIV

SEQ ID NO: 4260 - protein, 9 aa, synthetic construct
  REGION 1..9: note = Description of Artificial Sequence: Synthetic peptide
KLTPLCVTL

SEQ ID NO: 4261 - protein, 9 aa, synthetic construct
  REGION 1..9: note = Description of Artificial Sequence: Synthetic peptide
NTKTIIVQL

SEQ ID NO: 4262 - protein, 9 aa, synthetic construct
  REGION 1..9: note = Description of Artificial Sequence: Synthetic peptide
RVIEVVQGA

SEQ ID NO: 4263 - protein, 9 aa, synthetic construct
  REGION 1..9: note = Description of Artificial Sequence: Synthetic peptide
RVIETIQRA

SEQ ID NO: 4264 - protein, 9 aa, synthetic construct
  REGION 1..9: note = Description of Artificial Sequence: Synthetic peptide
IVSQIIEQL

SEQ ID NO: 4265 - protein, 9 aa, synthetic construct
  REGION 1..9: note = Description of Artificial Sequence: Synthetic peptide
QIIGDIRQA

SEQ ID NO: 4266 - protein, 9 aa, synthetic construct
  REGION 1..9: note = Description of Artificial Sequence: Synthetic peptide
RVIEVLQRV

SEQ ID NO: 4267 - protein, 9 aa, synthetic construct
  REGION 1..9: note = Description of Artificial Sequence: Synthetic peptide
LVSQIIEQL

SEQ ID NO: 4268 - protein, 9 aa, synthetic construct
  REGION 1..9: note = Description of Artificial Sequence: Synthetic peptide
AAVDLSHFL

SEQ ID NO: 4269 - protein, 11 aa, synthetic construct
  REGION 1..11: note = Description of Artificial Sequence: Synthetic peptide
TQVDPELADQL

SEQ ID NO: 4270 - protein, 9 aa, synthetic construct
  REGION 1..9: note = Description of Artificial Sequence: Synthetic peptide
VLAEAMSQV

SEQ ID NO: 4271 - protein, 9 aa, synthetic construct
  REGION 1..9: note = Description of Artificial Sequence: Synthetic peptide
LVSQIIEEL

SEQ ID NO: 4272 - protein, 9 aa, synthetic construct
  REGION 1..9: note = Description of Artificial Sequence: Synthetic peptide
TVLSIVNRV

SEQ ID NO: 4273 - protein, 11 aa, synthetic construct
  REGION 1..11: note = Description of Artificial Sequence: Synthetic peptide
TQVDPDLADQL

SEQ ID NO: 4274 - protein, 9 aa, synthetic construct
  REGION 1..9: note = Description of Artificial Sequence: Synthetic peptide
AVAEGTDRV

SEQ ID NO: 4275 - protein, 11 aa, synthetic construct
  REGION 1..11: note = Description of Artificial Sequence: Synthetic peptide
TQVDPGLADQL

SEQ ID NO: 4276 - protein, 9 aa, synthetic construct
  REGION 1..9: note = Description of Artificial Sequence: Synthetic peptide
AEWDRIHPA

SEQ ID NO: 4277 - protein, 9 aa, synthetic construct
  REGION 1..9: note = Description of Artificial Sequence: Synthetic peptide
AVLSIVNRV

SEQ ID NO: 4278 - protein, 11 aa, synthetic construct
  REGION 1..11: note = Description of Artificial Sequence: Synthetic peptide
VVIQDNSDIKV

SEQ ID NO: 4279 - protein, 9 aa, synthetic construct
  REGION 1..9: note = Description of Artificial Sequence: Synthetic peptide
IEIKDTKEA

SEQ ID NO: 4280 - protein, 9 aa, synthetic construct
  REGION 1..9: note = Description of Artificial Sequence: Synthetic peptide
VTIGKIGNM

SEQ ID NO: 4281 - protein, 9 aa, synthetic construct
  REGION 1..9: note = Description of Artificial Sequence: Synthetic peptide
ALVEICTEL

SEQ ID NO: 4282 - protein, 10 aa, synthetic construct
  REGION 1..10: note = Description of Artificial Sequence: Synthetic peptide
QVWGGDNNSL

SEQ ID NO: 4283 - protein, 10 aa, synthetic construct
  REGION 1..10: note = Description of Artificial Sequence: Synthetic peptide
GEIIGDIRQA

SEQ ID NO: 4284 - protein, 9 aa, synthetic construct
  REGION 1..9: note = Description of Artificial Sequence: Synthetic peptide
WTVNDIQKL

SEQ ID NO: 4285 - protein, 9 aa, synthetic construct
  REGION 1..9: note = Description of Artificial Sequence: Synthetic peptide
ATLEEMMTA

SEQ ID NO: 4286 - protein, 9 aa, synthetic construct
  REGION 1..9: note = Description of Artificial Sequence: Synthetic peptide
IVTDSQYAL

SEQ ID NO: 4287 - protein, 9 aa, synthetic construct
  REGION 1..9: note = Description of Artificial Sequence: Synthetic peptide
EIIGDIRQA

SEQ ID NO: 4288 - protein, 9 aa, synthetic construct
  REGION 1..9: note = Description of Artificial Sequence: Synthetic peptide
SAVSLFNAI

SEQ ID NO: 4289 - protein, 10 aa, synthetic construct
  REGION 1..10: note = Description of Artificial Sequence: Synthetic peptide
AEAMSQVTSA

SEQ ID NO: 4290 - protein, 9 aa, synthetic construct
  REGION 1..9: note = Description of Artificial Sequence: Synthetic peptide
VVAGIIAIV

SEQ ID NO: 4291 - protein, 9 aa, synthetic construct
  REGION 1..9: note = Description of Artificial Sequence: Synthetic peptide
RETETHPDA

SEQ ID NO: 4292 - protein, 9 aa, synthetic construct
  REGION 1..9: note = Description of Artificial Sequence: Synthetic peptide
SQVTNSATI

SEQ ID NO: 4293 - protein, 9 aa, synthetic construct
  REGION 1..9: note = Description of Artificial Sequence: Synthetic peptide
SLFNTVATL

SEQ ID NO: 4294 - protein, 10 aa, synthetic construct
  REGION 1..10: note = Description of Artificial Sequence: Synthetic peptide
GQIIGDIRQA

SEQ ID NO: 4295 - protein, 9 aa, synthetic construct
  REGION 1..9: note = Description of Artificial Sequence: Synthetic peptide
NTKTIIVQL

SEQ ID NO: 4296 - protein, 9 aa, synthetic construct
  REGION 1..9: note = Description of Artificial Sequence: Synthetic peptide
LVNQIIEQL

SEQ ID NO: 4297 - protein, 9 aa, synthetic construct
  REGION 1..9: note = Description of Artificial Sequence: Synthetic peptide
ALAEICAEM

SEQ ID NO: 4298 - protein, 10 aa, synthetic construct
  REGION 1..10: note = Description of Artificial Sequence: Synthetic peptide
SQYALGIIQA

SEQ ID NO: 4299 - protein, 9 aa, synthetic construct
  REGION 1..9: note = Description of Artificial Sequence: Synthetic peptide
LEKEPIVGA

SEQ ID NO: 4300 - protein, 9 aa, synthetic construct
  REGION 1..9: note = Description of Artificial Sequence: Synthetic peptide
SLFNTIATL

SEQ ID NO: 4301 - protein, 10 aa, synthetic construct
  REGION 1..10: note = Description of Artificial Sequence: Synthetic peptide
REFSSEQTRA

SEQ ID NO: 4302 - protein, 9 aa, synthetic construct
  REGION 1..9: note = Description of Artificial Sequence: Synthetic peptide
SQIYAGIKV

SEQ ID NO: 4303 - protein, 9 aa, synthetic construct
  REGION 1..9: note = Description of Artificial Sequence: Synthetic peptide
RAIEAQQHL

SEQ ID NO: 4304 - protein, 9 aa, synthetic construct
  REGION 1..9: note = Description of Artificial Sequence: Synthetic peptide
RVIEIVQRT

SEQ ID NO: 4305 - protein, 9 aa, synthetic construct
  REGION 1..9: note = Description of Artificial Sequence: Synthetic peptide
QLTEAVQKI

SEQ ID NO: 4306 - protein, 9 aa, synthetic construct
  REGION 1..9: note = Description of Artificial Sequence: Synthetic peptide
GEVGFPVKP

SEQ ID NO: 4307 - protein, 9 aa, synthetic construct
  REGION 1..9: note = Description of Artificial Sequence: Synthetic peptide
SQIYPGIKV

SEQ ID NO: 4308 - protein, 9 aa, synthetic construct
  REGION 1..9: note = Description of Artificial Sequence: Synthetic peptide
SLYNTVATL

SEQ ID NO: 4309 - protein, 9 aa, synthetic construct
  REGION 1..9: note = Description of Artificial Sequence: Synthetic peptide
TETLLVQNA

SEQ ID NO: 4310 - protein, 9 aa, synthetic construct
  REGION 1..9: note = Description of Artificial Sequence: Synthetic peptide
ASVTLTVQA

SEQ ID NO: 4311 - protein, 9 aa, synthetic construct
  REGION 1..9: note = Description of Artificial Sequence: Synthetic peptide
IEVKDTKEA

SEQ ID NO: 4312 - protein, 9 aa, synthetic construct
  REGION 1..9: note = Description of Artificial Sequence: Synthetic peptide
GAASVTLTV

SEQ ID NO: 4313 - protein, 9 aa, synthetic construct
  REGION 1..9: note = Description of Artificial Sequence: Synthetic peptide
MIVGGLVGL

SEQ ID NO: 4314 - protein, 9 aa, synthetic construct
  REGION 1..9: note = Description of Artificial Sequence: Synthetic peptide
YSTQVDPEL

SEQ ID NO: 4315 - protein, 9 aa, synthetic construct
  REGION 1..9: note = Description of Artificial Sequence: Synthetic peptide
NAKTIIVQL

SEQ ID NO: 4316 - protein, 9 aa, synthetic construct
  REGION 1..9: note = Description of Artificial Sequence: Synthetic peptide
EVIPLTEEA

SEQ ID NO: 4317 - protein, 10 aa, synthetic construct
  REGION 1..10: note = Description of Artificial Sequence: Synthetic peptide
KAYDTEVHNV

SEQ ID NO: 4318 - protein, 9 aa, synthetic construct
  REGION 1..9: note = Description of Artificial Sequence: Synthetic peptide
ILKEPVHGV

SEQ ID NO: 4319 - protein, 9 aa, synthetic construct
  REGION 1..9: note = Description of Artificial Sequence: Synthetic peptide
RVIEVVQGA

SEQ ID NO: 4320 - protein, 9 aa, synthetic construct
  REGION 1..9: note = Description of Artificial Sequence: Synthetic peptide
RVIEVLQRV

SEQ ID NO: 4321 - protein, 9 aa, synthetic construct
  REGION 1..9: note = Description of Artificial Sequence: Synthetic peptide
YSTQVDPEL

SEQ ID NO: 4322 - protein, 9 aa, synthetic construct
  REGION 1..9: note = Description of Artificial Sequence: Synthetic peptide
IVTDSQYAL

SEQ ID NO: 4323 - protein, 9 aa, synthetic construct
  REGION 1..9: note = Description of Artificial Sequence: Synthetic peptide
IQDNSDIKV

SEQ ID NO: 4324 - protein, 11 aa, synthetic construct
  REGION 1..11: note = Description of Artificial Sequence: Synthetic peptide
VVIQDNSDIKV

SEQ ID NO: 4325 - protein, 9 aa, synthetic construct
  REGION 1..9: note = Description of Artificial Sequence: Synthetic peptide
YTTQVDPDL

SEQ ID NO: 4326 - protein, 9 aa, synthetic construct
  REGION 1..9: note = Description of Artificial Sequence: Synthetic peptide
AVLSIVNRV

SEQ ID NO: 4327 - protein, 9 aa, synthetic construct
  REGION 1..9: note = Description of Artificial Sequence: Synthetic peptide
RVIETIQRA

SEQ ID NO: 4328 - protein, 9 aa, synthetic construct
  REGION 1..9: note = Description of Artificial Sequence: Synthetic peptide
AAVDLSHFL

SEQ ID NO: 4329 - protein, 9 aa, synthetic construct
  REGION 1..9: note = Description of Artificial Sequence: Synthetic peptide
VLAEAMSQV

SEQ ID NO: 4330 - protein, 9 aa, synthetic construct
  REGION 1..9: note = Description of Artificial Sequence: Synthetic peptide
SQIYAGIKV

SEQ ID NO: 4331 - protein, 9 aa, synthetic construct
  REGION 1..9: note = Description of Artificial Sequence: Synthetic peptide
IQDKSDIKV

SEQ ID NO: 4332 - protein, 9 aa, synthetic construct
  REGION 1..9: note = Description of Artificial Sequence: Synthetic peptide
SAVSLFNAI

SEQ ID NO: 4333 - protein, 11 aa, synthetic construct
  REGION 1..11: note = Description of Artificial Sequence: Synthetic peptide
TQVDPELADQL

SEQ ID NO: 4334 - protein, 9 aa, synthetic construct
  REGION 1..9: note = Description of Artificial Sequence: Synthetic peptide
ALVEICTEL

SEQ ID NO: 4335 - protein, 11 aa, synthetic construct
  REGION 1..11: note = Description of Artificial Sequence: Synthetic peptide
TQVDPGLADQL

SEQ ID NO: 4336 - protein, 9 aa, synthetic construct
  REGION 1..9: note = Description of Artificial Sequence: Synthetic peptide
GGIGGFIKV

SEQ ID NO: 4337 - protein, 9 aa, synthetic construct
  REGION 1..9: note = Description of Artificial Sequence: Synthetic peptide
SQIYPGIKV

SEQ ID NO: 4338 - protein, 9 aa, synthetic construct
  REGION 1..9: note = Description of Artificial Sequence: Synthetic peptide
YSTQVDPDL

SEQ ID NO: 4339 - protein, 9 aa, synthetic construct
  REGION 1..9: note = Description of Artificial Sequence: Synthetic peptide
TVLSIVNRV

SEQ ID NO: 4340 - protein, 9 aa, synthetic construct
  REGION 1..9: note = Description of Artificial Sequence: Synthetic peptide
QIIGDIRQA

SEQ ID NO: 4341 - protein, 9 aa, synthetic construct
  REGION 1..9: note = Description of Artificial Sequence: Synthetic peptide
SQVTSAPAI

SEQ ID NO: 4342 - protein, 10 aa, synthetic construct
  REGION 1..10: note = Description of Artificial Sequence: Synthetic peptide
TVLDVGDAYF

SEQ ID NO: 4343 - protein, 9 aa, synthetic construct
  REGION 1..9: note = Description of Artificial Sequence: Synthetic peptide
TVSFNFPQV

SEQ ID NO: 4344 - protein, 9 aa, synthetic construct
  REGION 1..9: note = Description of Artificial Sequence: Synthetic peptide
IVSQIIEQL

SEQ ID NO: 4345 - protein, 9 aa, synthetic construct
  REGION 1..9: note = Description of Artificial Sequence: Synthetic peptide
GAASVTLTV

SEQ ID NO: 4346 - protein, 11 aa, synthetic construct
  REGION 1..11: note = Description of Artificial Sequence: Synthetic peptide
TQVDPDLADQL

SEQ ID NO: 4347 - protein, 9 aa, synthetic construct
  REGION 1..9: note = Description of Artificial Sequence: Synthetic peptide
ALVEMGVEM

SEQ ID NO: 4348 - protein, 9 aa, synthetic construct
  REGION 1..9: note = Description of Artificial Sequence: Synthetic peptide
MIVGGLVGL

SEQ ID NO: 4349 - protein, 10 aa, synthetic construct
  REGION 1..10: note = Description of Artificial Sequence: Synthetic peptide
GVVESINKEL

SEQ ID NO: 4350 - protein, 10 aa, synthetic construct
  REGION 1..10: note = Description of Artificial Sequence: Synthetic peptide
KVVKIEPLGV

SEQ ID NO: 4351 - protein, 9 aa, synthetic construct
  REGION 1..9: note = Description of Artificial Sequence: Synthetic peptide
AVAEGTDRV

SEQ ID NO: 4352 - protein, 9 aa, synthetic construct
  REGION 1..9: note = Description of Artificial Sequence: Synthetic peptide
QLTEAVQKI

SEQ ID NO: 4353 - protein, 9 aa, synthetic construct
  REGION 1..9: note = Description of Artificial Sequence: Synthetic peptide
IVLSIVNRV

SEQ ID NO: 4354 - protein, 9 aa, synthetic construct
  REGION 1..9: note = Description of Artificial Sequence: Synthetic peptide
VQLNTSVEI

SEQ ID NO: 4355 - protein, 9 aa, synthetic construct
  REGION 1..9: note = Description of Artificial Sequence: Synthetic peptide
YQLEKEPIV

SEQ ID NO: 4356 - protein, 9 aa, synthetic construct
  REGION 1..9: note = Description of Artificial Sequence: Synthetic peptide
ALTEVIPLT

SEQ ID NO: 4357 - protein, 9 aa, synthetic construct
  REGION 1..9: note = Description of Artificial Sequence: Synthetic peptide
YNTQVDPGL

SEQ ID NO: 4358 - protein, 9 aa, synthetic construct
  REGION 1..9: note = Description of Artificial Sequence: Synthetic peptide
EVIPMFAAL

SEQ ID NO: 4359 - protein, 9 aa, synthetic construct
  REGION 1..9: note = Description of Artificial Sequence: Synthetic peptide
NTIATLYCV

SEQ ID NO: 4360 - protein, 9 aa, synthetic construct
  REGION 1..9: note = Description of Artificial Sequence: Synthetic peptide
ALTEVVPLT

SEQ ID NO: 4361 - protein, 9 aa, synthetic construct
  REGION 1..9: note = Description of Artificial Sequence: Synthetic peptide
SLDEIWNNM

SEQ ID NO: 4362 - protein, 9 aa, synthetic construct
  REGION 1..9: note = Description of Artificial Sequence: Synthetic peptide
YVDRFYKTL

SEQ ID NO: 4363 - protein, 9 aa, synthetic construct
  REGION 1..9: note = Description of Artificial Sequence: Synthetic peptide
GTDRVIEVL

SEQ ID NO: 4364 - protein, 9 aa, synthetic construct
  REGION 1..9: note = Description of Artificial Sequence: Synthetic peptide
RVIEVLQRV

SEQ ID NO: 4365 - protein, 9 aa, synthetic construct
  REGION 1..9: note = Description of Artificial Sequence: Synthetic peptide
AVLSIVNRV

SEQ ID NO: 4366 - protein, 9 aa, synthetic construct
  REGION 1..9: note = Description of Artificial Sequence: Synthetic peptide
IVLSIVNRV

SEQ ID NO: 4367 - protein, 9 aa, synthetic construct
  REGION 1..9: note = Description of Artificial Sequence: Synthetic peptide
ILKEPVHGV

SEQ ID NO: 4368 - protein, 9 aa, synthetic construct
  REGION 1..9: note = Description of Artificial Sequence: Synthetic peptide
SLDQIWENM

SEQ ID NO: 4369 - protein, 11 aa, synthetic construct
  REGION 1..11: note = Description of Artificial Sequence: Synthetic peptide
YVDDLYVGSDL

SEQ ID NO: 4370 - protein, 9 aa, synthetic construct
  REGION 1..9: note = Description of Artificial Sequence: Synthetic peptide
GTDRVIEVV

SEQ ID NO: 4371 - protein, 9 aa, synthetic construct
  REGION 1..9: note = Description of Artificial Sequence: Synthetic peptide
GTDRVIETI

SEQ ID NO: 4372 - protein, 9 aa, synthetic construct
  REGION 1..9: note = Description of Artificial Sequence: Synthetic peptide
FSPEVIPMF

SEQ ID NO: 4373 - protein, 9 aa, synthetic construct
  REGION 1..9: note = Description of Artificial Sequence: Synthetic peptide
VLAEAMSQV

SEQ ID NO: 4374 - protein, 9 aa, synthetic construct
  REGION 1..9: note = Description of Artificial Sequence: Synthetic peptide
TVLSIVNRV

SEQ ID NO: 4375 - protein, 9 aa, synthetic construct
  REGION 1..9: note = Description of Artificial Sequence: Synthetic peptide
HLEGKIILV

SEQ ID NO: 4376 - protein, 9 aa, synthetic construct
  REGION 1..9: note = Description of Artificial Sequence: Synthetic peptide
KIDKIIDRI

SEQ ID NO: 4377 - protein, 9 aa, synthetic construct
  REGION 1..9: note = Description of Artificial Sequence: Synthetic peptide
ALVEICTEL

SEQ ID NO: 4378 - protein, 9 aa, synthetic construct
  REGION 1..9: note = Description of Artificial Sequence: Synthetic peptide
HLEGKVILV

SEQ ID NO: 4379 - protein, 9 aa, synthetic construct
  REGION 1..9: note = Description of Artificial Sequence: Synthetic peptide
RVIEVVQGA

SEQ ID NO: 4380 - protein, 9 aa, synthetic construct
  REGION 1..9: note = Description of Artificial Sequence: Synthetic peptide
IVSQIIEQL

SEQ ID NO: 4381 - protein, 9 aa, synthetic construct
  REGION 1..9: note = Description of Artificial Sequence: Synthetic peptide
QIIGDIRQA

SEQ ID NO: 4382 - protein, 9 aa, synthetic construct
  REGION 1..9: note = Description of Artificial Sequence: Synthetic peptide
RVIETIQRA

SEQ ID NO: 4383 - protein, 9 aa, synthetic construct
  REGION 1..9: note = Description of Artificial Sequence: Synthetic peptide
RVIEVLQRV

SEQ ID NO: 4384 - protein, 9 aa, synthetic construct
  REGION 1..9: note = Description of Artificial Sequence: Synthetic peptide
IVTRIVELL

SEQ ID NO: 4385 - protein, 10 aa, synthetic construct
  REGION 1..10: note = Description of Artificial Sequence: Synthetic peptide
KVVKIEPLGV

SEQ ID NO: 4386 - protein, 11 aa, synthetic construct
  REGION 1..11: note = Description of Artificial Sequence: Synthetic peptide
RTPQDSQTHQV

SEQ ID NO: 4387 - protein, 9 aa, synthetic construct
  REGION 1..9: note = Description of Artificial Sequence: Synthetic peptide
LVSQIIEQL

SEQ ID NO: 4388 - protein, 9 aa, synthetic construct
  REGION 1..9: note = Description of Artificial Sequence: Synthetic peptide
WTVNDIQKL

SEQ ID NO: 4389 - protein, 9 aa, synthetic construct
  REGION 1..9: note = Description of Artificial Sequence: Synthetic peptide
IEIKDTKEA

SEQ ID NO: 4390 - protein, 9 aa, synthetic construct
  REGION 1..9: note = Description of Artificial Sequence: Synthetic peptide
LEKEPIVGA

SEQ ID NO: 4391 - protein, 9 aa, synthetic construct
  REGION 1..9: note = Description of Artificial Sequence: Synthetic peptide
AIIRILQQL

SEQ ID NO: 4392 - protein, 9 aa, synthetic construct
  REGION 1..9: note = Description of Artificial Sequence: Synthetic peptide
RVIEIVQRT

SEQ ID NO: 4393 - protein, 10 aa, synthetic construct
  REGION 1..10: note = Description of Artificial Sequence: Synthetic peptide
KAYDTEVHNV

SEQ ID NO: 4394 - protein, 9 aa, synthetic construct
  REGION 1..9: note = Description of Artificial Sequence: Synthetic peptide
AVLSIVNRV

SEQ ID NO: 4395 - protein, 9 aa, synthetic construct
  REGION 1..9: note = Description of Artificial Sequence: Synthetic peptide
VTIGKIGNM

SEQ ID NO: 4396 - protein, 9 aa, synthetic construct
  REGION 1..9: note = Description of Artificial Sequence: Synthetic peptide
EIIGDIRQA

SEQ ID NO: 4397 - protein, 9 aa, synthetic construct
  REGION 1..9: note = Description of Artificial Sequence: Synthetic peptide
KIKPPLPSV

SEQ ID NO: 4398 - protein, 9 aa, synthetic construct
  REGION 1..9: note = Description of Artificial Sequence: Synthetic peptide
VLAEAMSQV

SEQ ID NO: 4399 - protein, 10 aa, synthetic construct
  REGION 1..10: note = Description of Artificial Sequence: Synthetic peptide
QVWGGDNNSL

SEQ ID NO: 4400 - protein, 10 aa, synthetic construct
  REGION 1..10: note = Description of Artificial Sequence: Synthetic peptide
GVVESINKEL

SEQ ID NO: 4401 - protein, 10 aa, synthetic construct
  REGION 1..10: note = Description of Artificial Sequence: Synthetic peptide
KAYETEVHNV

SEQ ID NO: 4402 - protein, 10 aa, synthetic construct
  REGION 1..10: note = Description of Artificial Sequence: Synthetic peptide
GQIIGDIRQA

SEQ ID NO: 4403 - protein, 10 aa, synthetic construct
  REGION 1..10: note = Description of Artificial Sequence: Synthetic peptide
GEIIGDIRQA

SEQ ID NO: 4404 - protein, 10 aa, synthetic construct
  REGION 1..10: note = Description of Artificial Sequence: Synthetic peptide
RVLAEAMSQV

SEQ ID NO: 4405 - protein, 9 aa, synthetic construct
  REGION 1..9: note = Description of Artificial Sequence: Synthetic peptide
AEWDRIHPA

SEQ ID NO: 4406 - protein, 11 aa, synthetic construct
  REGION 1..11: note = Description of Artificial Sequence: Synthetic peptide
VVIQDNSDIKV

SEQ ID NO: 4407 - protein, 9 aa, synthetic construct
  REGION 1..9: note = Description of Artificial Sequence: Synthetic peptide
LVSQIIEEL

SEQ ID NO: 4408 - protein, 9 aa, synthetic construct
  REGION 1..9: note = Description of Artificial Sequence: Synthetic peptide
KVVSLTDTT

SEQ ID NO: 4409 - protein, 9 aa, synthetic construct
  REGION 1..9: note = Description of Artificial Sequence: Synthetic peptide
KVVTLTDTT

SEQ ID NO: 4410 - protein, 9 aa, synthetic construct
  REGION 1..9: note = Description of Artificial Sequence: Synthetic peptide
NTKTIIVQL

SEQ ID NO: 4411 - protein, 9 aa, synthetic construct
  REGION 1..9: note = Description of Artificial Sequence: Synthetic peptide
IEVKDTKEA

SEQ ID NO: 4412 - protein, 9 aa, synthetic construct
  REGION 1..9: note = Description of Artificial Sequence: Synthetic peptide
IVQQQNNLL

SEQ ID NO: 4413 - protein, 9 aa, synthetic construct
  REGION 1..9: note = Description of Artificial Sequence: Synthetic peptide
GEVGFPVKP

SEQ ID NO: 4414 - protein, 9 aa, synthetic construct
  REGION 1..9: note = Description of Artificial Sequence: Synthetic peptide
VVAGIIAIV

SEQ ID NO: 4415 - protein, 9 aa, synthetic construct
  REGION 1..9: note = Description of Artificial Sequence: Synthetic peptide
IVVRIVELL

SEQ ID NO: 4416 - protein, 9 aa, synthetic construct
  REGION 1..9: note = Description of Artificial Sequence: Synthetic peptide
ILKEPVHGV

SEQ ID NO: 4417 - protein, 10 aa, synthetic construct
  REGION 1..10: note = Description of Artificial Sequence: Synthetic peptide
KTIIVQLNET

SEQ ID NO: 4418 - protein, 9 aa, synthetic construct
  REGION 1..9: note = Description of Artificial Sequence: Synthetic peptide
TVLSIVNRV

SEQ ID NO: 4419 - protein, 10 aa, synthetic construct
  REGION 1..10: note = Description of Artificial Sequence: Synthetic peptide
AEAMSQVTSA

SEQ ID NO: 4420 - protein, 10 aa, synthetic construct
  REGION 1..10: note = Description of Artificial Sequence: Synthetic peptide
RVIEVVQGAC

SEQ ID NO: 4421 - protein, 9 aa, synthetic construct
  REGION 1..9: note = Description of Artificial Sequence: Synthetic peptide
MIVGGLVGL

SEQ ID NO: 4422 - protein, 9 aa, synthetic construct
  REGION 1..9: note = Description of Artificial Sequence: Synthetic peptide
ALIRILQQL

SEQ ID NO: 4423 - protein, 9 aa, synthetic construct
  REGION 1..9: note = Description of Artificial Sequence: Synthetic peptide
VVKIEPLGV

SEQ ID NO: 4424 - protein, 9 aa, synthetic construct
  REGION 1..9: note = Description of Artificial Sequence: Synthetic peptide
QIYPGIKVK

SEQ ID NO: 4425 - protein, 9 aa, synthetic construct
  REGION 1..9: note = Description of Artificial Sequence: Synthetic peptide
ALAALITPK

SEQ ID NO: 4426 - protein, 9 aa, synthetic construct
  REGION 1..9: note = Description of Artificial Sequence: Synthetic peptide
ALAVLITPK

SEQ ID NO: 4427 - protein, 11 aa, synthetic construct
  REGION 1..11: note = Description of Artificial Sequence: Synthetic peptide
VTNSGAIMMQK

SEQ ID NO: 4428 - protein, 11 aa, synthetic construct
  REGION 1..11: note = Description of Artificial Sequence: Synthetic peptide
VTNSATIMMQK

SEQ ID NO: 4429 - protein, 9 aa, synthetic construct
  REGION 1..9: note = Description of Artificial Sequence: Synthetic peptide
AIFQSSMTK

SEQ ID NO: 4430 - protein, 9 aa, synthetic construct
  REGION 1..9: note = Description of Artificial Sequence: Synthetic peptide
QIYPGIKVR

SEQ ID NO: 4431 - protein, 9 aa, synthetic construct
  REGION 1..9: note = Description of Artificial Sequence: Synthetic peptide
AIRNAILGH

SEQ ID NO: 4432 - protein, 9 aa, synthetic construct
  REGION 1..9: note = Description of Artificial Sequence: Synthetic peptide
KLVSTGIRK

SEQ ID NO: 4433 - protein, 10 aa, synthetic construct
  REGION 1..10: note = Description of Artificial Sequence: Synthetic peptide
ALTEVVPLTK

SEQ ID NO: 4434 - protein, 9 aa, synthetic construct
  REGION 1..9: note = Description of Artificial Sequence: Synthetic peptide
QIIEQLIQK

SEQ ID NO: 4435 - protein, 10 aa, synthetic construct
  REGION 1..10: note = Description of Artificial Sequence: Synthetic peptide
TVYYGVPVWK

SEQ ID NO: 4436 - protein, 10 aa, synthetic construct
  REGION 1..10: note = Description of Artificial Sequence: Synthetic peptide
KLREQFGNNK

SEQ ID NO: 4437 - protein, 11 aa, synthetic construct
  REGION 1..11: note = Description of Artificial Sequence: Synthetic peptide
TVNDIQKLVGK

SEQ ID NO: 4438 - protein, 9 aa, synthetic construct
  REGION 1..9: note = Description of Artificial Sequence: Synthetic peptide
QTHQVSLSK

SEQ ID NO: 4439 - protein, 9 aa, synthetic construct
  REGION 1..9: note = Description of Artificial Sequence: Synthetic peptide
NSATIMMQK

SEQ ID NO: 4440 - protein, 9 aa, synthetic construct
  REGION 1..9: note = Description of Artificial Sequence: Synthetic peptide
RLIDRIIER

SEQ ID NO: 4441 - protein, 9 aa, synthetic construct
  REGION 1..9: note = Description of Artificial Sequence: Synthetic peptide
AIRNALLGH

SEQ ID NO: 4442 - protein, 9 aa, synthetic construct
  REGION 1..9: note = Description of Artificial Sequence: Synthetic peptide
SNFTSTTVK

SEQ ID NO: 4443 - protein, 9 aa, synthetic construct
  REGION 1..9: note = Description of Artificial Sequence: Synthetic peptide
GVAPTTAKR

SEQ ID NO: 4444 - protein, 9 aa, synthetic construct
  REGION 1..9: note = Description of Artificial Sequence: Synthetic peptide
ALTALRTPK

SEQ ID NO: 4445 - protein, 8 aa, synthetic construct
  REGION 1..8: note = Description of Artificial Sequence: Synthetic peptide
SATIMMQK

SEQ ID NO: 4446 - protein, 11 aa, synthetic construct
  REGION 1..11: note = Description of Artificial Sequence: Synthetic peptide
KIKPPLPSVTK

SEQ ID NO: 4447 - protein, 9 aa, synthetic construct
  REGION 1..9: note = Description of Artificial Sequence: Synthetic peptide
SVITQACPK

SEQ ID NO: 4448 - protein, 10 aa, synthetic construct
  REGION 1..10: note = Description of Artificial Sequence: Synthetic peptide
ALLGHIVSPR

SEQ ID NO: 4449 - protein, 11 aa, synthetic construct
  REGION 1..11: note = Description of Artificial Sequence: Synthetic peptide
VTNSATIMMQK

SEQ ID NO: 4450 - protein, 11 aa, synthetic construct
  REGION 1..11: note = Description of Artificial Sequence: Synthetic peptide
TVNDIQKLVGK

SEQ ID NO: 4451 - protein, 11 aa, synthetic construct
  REGION 1..11: note = Description of Artificial Sequence: Synthetic peptide
VTNSGAIMMQK

SEQ ID NO: 4452 - protein, 9 aa, synthetic construct
  REGION 1..9: note = Description of Artificial Sequence: Synthetic peptide
ALAALITPK

SEQ ID NO: 4453 - protein, 10 aa, synthetic construct
  REGION 1..10: note = Description of Artificial Sequence: Synthetic peptide
TVQPIVLPEK

SEQ ID NO: 4454 - protein, 9 aa, synthetic construct
  REGION 1..9: note = Description of Artificial Sequence: Synthetic peptide
QIYPGIKVK

SEQ ID NO: 4455 - protein, 9 aa, synthetic construct
  REGION 1..9: note = Description of Artificial Sequence: Synthetic peptide
ALAVLITPK

SEQ ID NO: 4456 - protein, 9 aa, synthetic construct
  REGION 1..9: note = Description of Artificial Sequence: Synthetic peptide
AIFQSSMTK

SEQ ID NO: 4457 - protein, 10 aa, synthetic construct
  REGION 1..10: note = Description of Artificial Sequence: Synthetic peptide
VVESINKELK

SEQ ID NO: 4458 - protein, 11 aa, synthetic construct
  REGION 1..11: note = Description of Artificial Sequence: Synthetic peptide
RVIEVVQGACR

SEQ ID NO: 4459 - protein, 11 aa, synthetic construct
  REGION 1..11: note = Description of Artificial Sequence: Synthetic peptide
KIEPLGVAPTK

SEQ ID NO: 4460 - protein, 9 aa, synthetic construct
  REGION 1..9: note = Description of Artificial Sequence: Synthetic peptide
AVDLSHFLK

SEQ ID NO: 4461 - protein, 11 aa, synthetic construct
  REGION 1..11: note = Description of Artificial Sequence: Synthetic peptide
VVSLTDTTNQK

SEQ ID NO: 4462 - protein, 9 aa, synthetic construct
  REGION 1..9: note = Description of Artificial Sequence: Synthetic peptide
QIIEQLIQK

SEQ ID NO: 4463 - protein, 9 aa, synthetic construct
  REGION 1..9: note = Description of Artificial Sequence: Synthetic peptide
SVNFTDNAK

SEQ ID NO: 4464 - protein, 10 aa, synthetic construct
  REGION 1..10: note = Description of Artificial Sequence: Synthetic peptide
ALQTGSEELK

SEQ ID NO: 4465 - protein, 9 aa, synthetic construct
  REGION 1..9: note = Description of Artificial Sequence: Synthetic peptide
SVITQACPK

SEQ ID NO: 4466 - protein, 10 aa, synthetic construct
  REGION 1..10: note = Description of Artificial Sequence: Synthetic peptide
SLQTGSEELK

SEQ ID NO: 4467 - protein, 9 aa, synthetic construct
  REGION 1..9: note = Description of Artificial Sequence: Synthetic peptide
APAGFAILK

SEQ ID NO: 4468 - protein, 10 aa, synthetic construct
  REGION 1..10: note = Description of Artificial Sequence: Synthetic peptide
GVETTTPPQK

SEQ ID NO: 4469 - protein, 11 aa, synthetic construct
  REGION 1..11: note = Description of Artificial Sequence: Synthetic peptide
SFNITTDISNK

SEQ ID NO: 4470 - protein, 10 aa, synthetic construct
  REGION 1..10: note = Description of Artificial Sequence: Synthetic peptide
GSNFTSSAVK

SEQ ID NO: 4471 - protein, 10 aa, synthetic construct
  REGION 1..10: note = Description of Artificial Sequence: Synthetic peptide
ALTEVVPLTK

SEQ ID NO: 4472 - protein, 8 aa, synthetic construct
  REGION 1..8: note = Description of Artificial Sequence: Synthetic peptide
TLNQIVGK

SEQ ID NO: 4473 - protein, 11 aa, synthetic construct
  REGION 1..11: note = Description of Artificial Sequence: Synthetic peptide
QSQGVVESMNK

SEQ ID NO: 4474 - protein, 8 aa, synthetic construct
  REGION 1..8: note = Description of Artificial Sequence: Synthetic peptide
TLGQIVKK

SEQ ID NO: 4475 - protein, 9 aa, synthetic construct
  REGION 1..9: note = Description of Artificial Sequence: Synthetic peptide
NTLGQIVKK

SEQ ID NO: 4476 - protein, 10 aa, synthetic construct
  REGION 1..10: note = Description of Artificial Sequence: Synthetic peptide
GSNFTSTTVK

SEQ ID NO: 4477 - protein, 11 aa, synthetic construct
  REGION 1..11: note = Description of Artificial Sequence: Synthetic peptide
SIWDNNKDSTK

SEQ ID NO: 4478 - protein, 11 aa, synthetic construct
  REGION 1..11: note = Description of Artificial Sequence: Synthetic peptide
KALTEVVPLTK

SEQ ID NO: 4479 - protein, 9 aa, synthetic construct
  REGION 1..9: note = Description of Artificial Sequence: Synthetic peptide
SLTDTTNQK

SEQ ID NO: 4480 - protein, 9 aa, synthetic construct
  REGION 1..9: note = Description of Artificial Sequence: Synthetic peptide
ITTDISNKK

SEQ ID NO: 4481 - protein, 9 aa, synthetic construct
  REGION 1..9: note = Description of Artificial Sequence: Synthetic peptide
IIATDIQTK

SEQ ID NO: 4482 - protein, 11 aa, synthetic construct
  REGION 1..11: note = Description of Artificial Sequence: Synthetic peptide
KIKPPLPSVTK

SEQ ID NO: 4483 - protein, 10 aa, synthetic construct
  REGION 1..10: note = Description of Artificial Sequence: Synthetic peptide
ATESIVIWGK

SEQ ID NO: 4484 - protein, 9 aa, synthetic construct
  REGION 1..9: note = Description of Artificial Sequence: Synthetic peptide
GNNKTIIFK

SEQ ID NO: 4485 - protein, 11 aa, synthetic construct
  REGION 1..11: note = Description of Artificial Sequence: Synthetic peptide
QSQGVVESINK

SEQ ID NO: 4486 - protein, 11 aa, synthetic construct
  REGION 1..11: note = Description of Artificial Sequence: Synthetic peptide
VTNSATIMMQR

SEQ ID NO: 4487 - protein, 9 aa, synthetic construct
  REGION 1..9: note = Description of Artificial Sequence: Synthetic peptide
KQLTEAVQK

SEQ ID NO: 4488 - protein, 11 aa, synthetic construct
  REGION 1..11: note = Description of Artificial Sequence: Synthetic peptide
ATDIQTKELQK

SEQ ID NO: 4489 - protein, 10 aa, synthetic construct
  REGION 1..10: note = Description of Artificial Sequence: Synthetic peptide
SILDIKQGPK

SEQ ID NO: 4490 - protein, 10 aa, synthetic construct
  REGION 1..10: note = Description of Artificial Sequence: Synthetic peptide
ITMGPGKVYY

SEQ ID NO: 4491 - protein, 9 aa, synthetic construct
  REGION 1..9: note = Description of Artificial Sequence: Synthetic peptide
NSGAIMMQK

SEQ ID NO: 4492 - protein, 10 aa, synthetic construct
  REGION 1..10: note = Description of Artificial Sequence: Synthetic peptide
VVESMNKELK

SEQ ID NO: 4493 - protein, 9 aa, synthetic construct
  REGION 1..9: note = Description of Artificial Sequence: Synthetic peptide
KLVSTGIRK

SEQ ID NO: 4494 - protein, 11 aa, synthetic construct
  REGION 1..11: note = Description of Artificial Sequence: Synthetic peptide
VTNSATIMMQK

SEQ ID NO: 4495 - protein, 9 aa, synthetic construct
  REGION 1..9: note = Description of Artificial Sequence: Synthetic peptide
NSGAIMMQK

SEQ ID NO: 4496 - protein, 9 aa, synthetic construct
  REGION 1..9: note = Description of Artificial Sequence: Synthetic peptide
NTLGQIVKK

SEQ ID NO: 4497 - protein, 9 aa, synthetic construct
  REGION 1..9: note = Description of Artificial Sequence: Synthetic peptide
QIYPGIKVK

SEQ ID NO: 4498 - protein, 9 aa, synthetic construct
  REGION 1..9: note = Description of Artificial Sequence: Synthetic peptide
SVITQACPK

SEQ ID NO: 4499 - protein, 9 aa, synthetic construct
  REGION 1..9: note = Description of Artificial Sequence: Synthetic peptide
QIIEQLIQK

SEQ ID NO: 4500 - protein, 10 aa, synthetic construct
  REGION 1..10: note = Description of Artificial Sequence: Synthetic peptide
TVQPIVLPEK

SEQ ID NO: 4501 - protein, 11 aa, synthetic construct
  REGION 1..11: note = Description of Artificial Sequence: Synthetic peptide
TVNDIQKLVGK

SEQ ID NO: 4502 - protein, 9 aa, synthetic construct
  REGION 1..9: note = Description of Artificial Sequence: Synthetic peptide
ALAALITPK

SEQ ID NO: 4503 - protein, 9 aa, synthetic construct
  REGION 1..9: note = Description of Artificial Sequence: Synthetic peptide
APAGFAILK

SEQ ID NO: 4504 - protein, 9 aa, synthetic construct
  REGION 1..9: note = Description of Artificial Sequence: Synthetic peptide
AVDLSHFLK

SEQ ID NO: 4505 - protein, 9 aa, synthetic construct
  REGION 1..9: note = Description of Artificial Sequence: Synthetic peptide
ITTDISNKK

SEQ ID NO: 4506 - protein, 10 aa, synthetic construct
  REGION 1..10: note = Description of Artificial Sequence: Synthetic peptide
GSNFTSTTVK

SEQ ID NO: 4507 - protein, 9 aa, synthetic construct
  REGION 1..9: note = Description of Artificial Sequence: Synthetic peptide
ALAVLITPK

SEQ ID NO: 4508 - protein, 9 aa, synthetic construct
  REGION 1..9: note = Description of Artificial Sequence: Synthetic peptide
NSATIMMQK

SEQ ID NO: 4509 - protein, 10 aa, synthetic construct
  REGION 1..10: note = Description of Artificial Sequence: Synthetic peptide
AAVDLSHFLK

SEQ ID NO: 4510 - protein, 9 aa, synthetic construct
  REGION 1..9: note = Description of Artificial Sequence: Synthetic peptide
NSGAIMMQK

SEQ ID NO: 4511 - protein, 9 aa, synthetic construct
  REGION 1..9: note = Description of Artificial Sequence: Synthetic peptide
SVNFTDNAK

SEQ ID NO: 4512 - protein, 11 aa, synthetic construct
  REGION 1..11: note = Description of Artificial Sequence: Synthetic peptide
VTNSATIMMQR

SEQ ID NO: 4513 - protein, 9 aa, synthetic construct
  REGION 1..9: note = Description of Artificial Sequence: Synthetic peptide
QTHQVSLSK

SEQ ID NO: 4514 - protein, 11 aa, synthetic construct
  REGION 1..11: note = Description of Artificial Sequence: Synthetic peptide
ATDIQTKELQK

SEQ ID NO: 4515 - protein, 10 aa, synthetic construct
  REGION 1..10: note = Description of Artificial Sequence: Synthetic peptide
ITMGPGKVYY

SEQ ID NO: 4516 - protein, 9 aa, synthetic construct
  REGION 1..9: note = Description of Artificial Sequence: Synthetic peptide
AIFQSSMTK

SEQ ID NO: 4517 - protein, 9 aa, synthetic construct
  REGION 1..9: note = Description of Artificial Sequence: Synthetic peptide
SVIGWPTVR

SEQ ID NO: 4518 - protein, 10 aa, synthetic construct
  REGION 1..10: note = Description of Artificial Sequence: Synthetic peptide
GSNFTSSAVK

SEQ ID NO: 4519 - protein, 10 aa, synthetic construct
  REGION 1..10: note = Description of Artificial Sequence: Synthetic peptide
ATESIVIWGK

SEQ ID NO: 4520 - protein, 11 aa, synthetic construct
  REGION 1..11: note = Description of Artificial Sequence: Synthetic peptide
VVSLTDTTNQK

SEQ ID NO: 4521 - protein, 10 aa, synthetic construct
  REGION 1..10: note = Description of Artificial Sequence: Synthetic peptide
ASMTLTVQAR

SEQ ID NO: 4522 - protein, 10 aa, synthetic construct
  REGION 1..10: note = Description of Artificial Sequence: Synthetic peptide
CTPAGFAILK

SEQ ID NO: 4523 - protein, 9 aa, synthetic construct
  REGION 1..9: note = Description of Artificial Sequence: Synthetic peptide
SNFTSTTVK

SEQ ID NO: 4524 - protein, 10 aa, synthetic construct
  REGION 1..10: note = Description of Artificial Sequence: Synthetic peptide
VTLTDTTNQK

SEQ ID NO: 4525 - protein, 11 aa, synthetic construct
  REGION 1..11: note = Description of Artificial Sequence: Synthetic peptide
VTSAPAIMMQR

SEQ ID NO: 4526 - protein, 9 aa, synthetic construct
  REGION 1..9: note = Description of Artificial Sequence: Synthetic peptide
QIIEQLIKK

SEQ ID NO: 4527 - protein, 8 aa, synthetic construct
  REGION 1..8: note = Description of Artificial Sequence: Synthetic peptide
SATIMMQK

SEQ ID NO: 4528 - protein, 10 aa, synthetic construct
  REGION 1..10: note = Description of Artificial Sequence: Synthetic peptide
GALDLSHFLK

SEQ ID NO: 4529 - protein, 10 aa, synthetic construct
  REGION 1..10: note = Description of Artificial Sequence: Synthetic peptide
SQIYPGIKVK

SEQ ID NO: 4530 - protein, 11 aa, synthetic construct
  REGION 1..11: note = Description of Artificial Sequence: Synthetic peptide
RVIEVVQGACR

SEQ ID NO: 4531 - protein, 10 aa, synthetic construct
  REGION 1..10: note = Description of Artificial Sequence: Synthetic peptide
ITMGPGRVYY

SEQ ID NO: 4532 - protein, 9 aa, synthetic construct
  REGION 1..9: note = Description of Artificial Sequence: Synthetic peptide
GTNETEIFR

SEQ ID NO: 4533 - protein, 10 aa, synthetic construct
  REGION 1..10: note = Description of Artificial Sequence: Synthetic peptide
SQIDQASLPK

SEQ ID NO: 4534 - protein, 11 aa, synthetic construct
  REGION 1..11: note = Description of Artificial Sequence: Synthetic peptide
GVVESMNKELK

SEQ ID NO: 4535 - protein, 9 aa, synthetic construct
  REGION 1..9: note = Description of Artificial Sequence: Synthetic peptide
DTLNQIVGK

SEQ ID NO: 4536 - protein, 9 aa, synthetic construct
  REGION 1..9: note = Description of Artificial Sequence: Synthetic peptide
GNNKTIIFK

SEQ ID NO: 4537 - protein, 9 aa, synthetic construct
  REGION 1..9: note = Description of Artificial Sequence: Synthetic peptide
GTEGLTMDK

SEQ ID NO: 4538 - protein, 9 aa, synthetic construct
  REGION 1..9: note = Description of Artificial Sequence: Synthetic peptide
GVAPTTAKR

SEQ ID NO: 4539 - protein, 9 aa, synthetic construct
  REGION 1..9: note = Description of Artificial Sequence: Synthetic peptide
QIYPGIKVR

SEQ ID NO: 4540 - protein, 10 aa, synthetic construct
  REGION 1..10: note = Description of Artificial Sequence: Synthetic peptide
ASMALTVQAR

SEQ ID NO: 4541 - protein, 9 aa, synthetic construct
  REGION 1..9: note = Description of Artificial Sequence: Synthetic peptide
SVTLTVQAR

SEQ ID NO: 4542 - protein, 10 aa, synthetic construct
  REGION 1..10: note = Description of Artificial Sequence: Synthetic peptide
GVETTTPPQK

SEQ ID NO: 4543 - protein, 10 aa, synthetic construct
  REGION 1..10: note = Description of Artificial Sequence: Synthetic peptide
SILDIKQGPK

SEQ ID NO: 4544 - protein, 10 aa, synthetic construct
  REGION 1..10: note = Description of Artificial Sequence: Synthetic peptide
TSAPAIMMQR

SEQ ID NO: 4545 - protein, 9 aa, synthetic construct
  REGION 1..9: note = Description of Artificial Sequence: Synthetic peptide
NYTNLIYTL

SEQ ID NO: 4546 - protein, 9 aa, synthetic construct
  REGION 1..9: note = Description of Artificial Sequence: Synthetic peptide
NYTSLIYTL

SEQ ID NO: 4547 - protein, 9 aa, synthetic construct
  REGION 1..9: note = Description of Artificial Sequence: Synthetic peptide
NYTGLIYTL

SEQ ID NO: 4548 - protein, 9 aa, synthetic construct
  REGION 1..9: note = Description of Artificial Sequence: Synthetic peptide
NYTSLIHSL

SEQ ID NO: 4549 - protein, 9 aa, synthetic construct
  REGION 1..9: note = Description of Artificial Sequence: Synthetic peptide
RYLEDQQLL

SEQ ID NO: 4550 - protein, 9 aa, synthetic construct
  REGION 1..9: note = Description of Artificial Sequence: Synthetic peptide
VLVNVTENF

SEQ ID NO: 4551 - protein, 9 aa, synthetic construct
  REGION 1..9: note = Description of Artificial Sequence: Synthetic peptide
RYLQDQQLL

SEQ ID NO: 4552 - protein, 9 aa, synthetic construct
  REGION 1..9: note = Description of Artificial Sequence: Synthetic peptide
IYQEPFKNL

SEQ ID NO: 4553 - protein, 9 aa, synthetic construct
  REGION 1..9: note = Description of Artificial Sequence: Synthetic peptide
YETEVHNVW

SEQ ID NO: 4554 - protein, 9 aa, synthetic construct
  REGION 1..9: note = Description of Artificial Sequence: Synthetic peptide
TENLWVTVY

SEQ ID NO: 4555 - protein, 9 aa, synthetic construct
  REGION 1..9: note = Description of Artificial Sequence: Synthetic peptide
VLENVTENF

SEQ ID NO: 4556 - protein, 9 aa, synthetic construct
  REGION 1..9: note = Description of Artificial Sequence: Synthetic peptide
RYLKDQQLL

SEQ ID NO: 4557 - protein, 10 aa, synthetic construct
  REGION 1..10: note = Description of Artificial Sequence: Synthetic peptide
AFLQGKAREF

SEQ ID NO: 4558 - protein, 9 aa, synthetic construct
  REGION 1..9: note = Description of Artificial Sequence: Synthetic peptide
HYQSIHPRI

SEQ ID NO: 4559 - protein, 9 aa, synthetic construct
  REGION 1..9: note = Description of Artificial Sequence: Synthetic peptide
AENLWVTVY

SEQ ID NO: 4560 - protein, 9 aa, synthetic construct
  REGION 1..9: note = Description of Artificial Sequence: Synthetic peptide
NYTNLIYTL

SEQ ID NO: 4561 - protein, 9 aa, synthetic construct
  REGION 1..9: note = Description of Artificial Sequence: Synthetic peptide
NYTSLIYTL

SEQ ID NO: 4562 - protein, 9 aa, synthetic construct
  REGION 1..9: note = Description of Artificial Sequence: Synthetic peptide
NYTSLIHSL

SEQ ID NO: 4563 - protein, 9 aa, synthetic construct
  REGION 1..9: note = Description of Artificial Sequence: Synthetic peptide
RYLEDQQLL

SEQ ID NO: 4564 - protein, 9 aa, synthetic construct
  REGION 1..9: note = Description of Artificial Sequence: Synthetic peptide
NYTGLIYTL

SEQ ID NO: 4565 - protein, 9 aa, synthetic construct
  REGION 1..9: note = Description of Artificial Sequence: Synthetic peptide
RYLQDQQLL

SEQ ID NO: 4566 - protein, 9 aa, synthetic construct
  REGION 1..9: note = Description of Artificial Sequence: Synthetic peptide
IYQEPFKNL

SEQ ID NO: 4567 - protein, 9 aa, synthetic construct
  REGION 1..9: note = Description of Artificial Sequence: Synthetic peptide
RYLKDQQLL

SEQ ID NO: 4568 - protein, 9 aa, synthetic construct
  REGION 1..9: note = Description of Artificial Sequence: Synthetic peptide
YYDPTKDLI

SEQ ID NO: 4569 - protein, 9 aa, synthetic construct
  REGION 1..9: note = Description of Artificial Sequence: Synthetic peptide
YYDPSKDLI

SEQ ID NO: 4570 - protein, 10 aa, synthetic construct
  REGION 1..10: note = Description of Artificial Sequence: Synthetic peptide
ETINEEAAEW

SEQ ID NO: 4571 - protein, 9 aa, synthetic construct
  REGION 1..9: note = Description of Artificial Sequence: Synthetic peptide
EVIPMFSAL

SEQ ID NO: 4572 - protein, 9 aa, synthetic construct
  REGION 1..9: note = Description of Artificial Sequence: Synthetic peptide
NVTENFNAW

SEQ ID NO: 4573 - protein, 9 aa, synthetic construct
  REGION 1..9: note = Description of Artificial Sequence: Synthetic peptide
EVIPMFAAL

SEQ ID NO: 4574 - protein, 10 aa, synthetic construct
  REGION 1..10: note = Description of Artificial Sequence: Synthetic peptide
EIQKQGQGQW

SEQ ID NO: 4575 - protein, 9 aa, synthetic construct
  REGION 1..9: note = Description of Artificial Sequence: Synthetic peptide
EVVIRSENF

SEQ ID NO: 4576 - protein, 9 aa, synthetic construct
  REGION 1..9: note = Description of Artificial Sequence: Synthetic peptide
EVVIRSVNF

SEQ ID NO: 4577 - protein, 9 aa, synthetic construct
  REGION 1..9: note = Description of Artificial Sequence: Synthetic peptide
DVIIRSDNF

SEQ ID NO: 4578 - protein, 9 aa, synthetic construct
  REGION 1..9: note = Description of Artificial Sequence: Synthetic peptide
EAGATRISF

SEQ ID NO: 4579 - protein, 9 aa, synthetic construct
  REGION 1..9: note = Description of Artificial Sequence: Synthetic peptide
DIAGTTSTL

SEQ ID NO: 4580 - protein, 9 aa, synthetic construct
  REGION 1..9: note = Description of Artificial Sequence: Synthetic peptide
NVTENFNMW

SEQ ID NO: 4581 - protein, 10 aa, synthetic construct
  REGION 1..10: note = Description of Artificial Sequence: Synthetic peptide
DIVPIDNDSY

SEQ ID NO: 4582 - protein, 10 aa, synthetic construct
  REGION 1..10: note = Description of Artificial Sequence: Synthetic peptide
DLADQLIHVY

SEQ ID NO: 4583 - protein, 9 aa, synthetic construct
  REGION 1..9: note = Description of Artificial Sequence: Synthetic peptide
EAKLVITTY

SEQ ID NO: 4584 - protein, 9 aa, synthetic construct
  REGION 1..9: note = Description of Artificial Sequence: Synthetic peptide
EIIGDIRQA

SEQ ID NO: 4585 - protein, 9 aa, synthetic construct
  REGION 1..9: note = Description of Artificial Sequence: Synthetic peptide
EQIWNHTTW

SEQ ID NO: 4586 - protein, 10 aa, synthetic construct
  REGION 1..10: note = Description of Artificial Sequence: Synthetic peptide
EVNIVTDSQY

SEQ ID NO: 4587 - protein, 10 aa, synthetic construct
  REGION 1..10: note = Description of Artificial Sequence: Synthetic peptide
EVNIVTDSQY

SEQ ID NO: 4588 - protein, 9 aa, synthetic construct
  REGION 1..9: note = Description of Artificial Sequence: Synthetic peptide
EVIPMFSAL

SEQ ID NO: 4589 - protein, 9 aa, synthetic construct
  REGION 1..9: note = Description of Artificial Sequence: Synthetic peptide
EIIGDIRQA

SEQ ID NO: 4590 - protein, 10 aa, synthetic construct
  REGION 1..10: note = Description of Artificial Sequence: Synthetic peptide
EVFRPGGGNM

SEQ ID NO: 4591 - protein, 9 aa, synthetic construct
  REGION 1..9: note = Description of Artificial Sequence: Synthetic peptide
ETKLGKAGY

SEQ ID NO: 4592 - protein, 9 aa, synthetic construct
  REGION 1..9: note = Description of Artificial Sequence: Synthetic peptide
EVVIRSVNF

SEQ ID NO: 4593 - protein, 9 aa, synthetic construct
  REGION 1..9: note = Description of Artificial Sequence: Synthetic peptide
ETPGIRYQY

SEQ ID NO: 4594 - protein, 10 aa, synthetic construct
  REGION 1..10: note = Description of Artificial Sequence: Synthetic peptide
DIVPIDNDSY

SEQ ID NO: 4595 - protein, 9 aa, synthetic construct
  REGION 1..9: note = Description of Artificial Sequence: Synthetic peptide
EVIPMFAAL

SEQ ID NO: 4596 - protein, 9 aa, synthetic construct
  REGION 1..9: note = Description of Artificial Sequence: Synthetic peptide
DVIIRSDNF

SEQ ID NO: 4597 - protein, 10 aa, synthetic construct
  REGION 1..10: note = Description of Artificial Sequence: Synthetic peptide
EVIPAETGQE

SEQ ID NO: 4598 - protein, 9 aa, synthetic construct
  REGION 1..9: note = Description of Artificial Sequence: Synthetic peptide
EAKLVITTY

SEQ ID NO: 4599 - protein, 9 aa, synthetic construct
  REGION 1..9: note = Description of Artificial Sequence: Synthetic peptide
VTIGKIGNM

SEQ ID NO: 4600 - protein, 10 aa, synthetic construct
  REGION 1..10: note = Description of Artificial Sequence: Synthetic peptide
EIFRPGGGNM

SEQ ID NO: 4601 - protein, 9 aa, synthetic construct
  REGION 1..9: note = Description of Artificial Sequence: Synthetic peptide
YTPGPGTRY

SEQ ID NO: 4602 - protein, 9 aa, synthetic construct
  REGION 1..9: note = Description of Artificial Sequence: Synthetic peptide
EVVIRSENF

SEQ ID NO: 4603 - protein, 10 aa, synthetic construct
  REGION 1..10: note = Description of Artificial Sequence: Synthetic peptide
EIFRPGGGDM

SEQ ID NO: 4604 - protein, 9 aa, synthetic construct
  REGION 1..9: note = Description of Artificial Sequence: Synthetic peptide
EVIPAETGQ

SEQ ID NO: 4605 - protein, 11 aa, synthetic construct
  REGION 1..11: note = Description of Artificial Sequence: Synthetic peptide
QTGSEELRSLY

SEQ ID NO: 4606 - protein, 10 aa, synthetic construct
  REGION 1..10: note = Description of Artificial Sequence: Synthetic peptide
ELADQLIHLY

SEQ ID NO: 4607 - protein, 9 aa, synthetic construct
  REGION 1..9: note = Description of Artificial Sequence: Synthetic peptide
EAGATRISF

SEQ ID NO: 4608 - protein, 10 aa, synthetic construct
  REGION 1..10: note = Description of Artificial Sequence: Synthetic peptide
EVFRPGGGNM

SEQ ID NO: 4609 - protein, 9 aa, synthetic construct
  REGION 1..9: note = Description of Artificial Sequence: Synthetic peptide
EVIPMFSAL

SEQ ID NO: 4610 - protein, 9 aa, synthetic construct
  REGION 1..9: note = Description of Artificial Sequence: Synthetic peptide
EVVIRSVNF

SEQ ID NO: 4611 - protein, 9 aa, synthetic construct
  REGION 1..9: note = Description of Artificial Sequence: Synthetic peptide
EVVIRSENF

SEQ ID NO: 4612 - protein, 9 aa, synthetic construct
  REGION 1..9: note = Description of Artificial Sequence: Synthetic peptide
DVIIRSDNF

SEQ ID NO: 4613 - protein, 9 aa, synthetic construct
  REGION 1..9: note = Description of Artificial Sequence: Synthetic peptide
EVIPMFAAL

SEQ ID NO: 4614 - protein, 10 aa, synthetic construct
  REGION 1..10: note = Description of Artificial Sequence: Synthetic peptide
EVNIVTDSQY

SEQ ID NO: 4615 - protein, 10 aa, synthetic construct
  REGION 1..10: note = Description of Artificial Sequence: Synthetic peptide
EIFRPGGGNM

SEQ ID NO: 4616 - protein, 9 aa, synthetic construct
  REGION 1..9: note = Description of Artificial Sequence: Synthetic peptide
VTIGKIGNM

SEQ ID NO: 4617 - protein, 9 aa, synthetic construct
  REGION 1..9: note = Description of Artificial Sequence: Synthetic peptide
DIAGTTSTL

SEQ ID NO: 4618 - protein, 10 aa, synthetic construct
  REGION 1..10: note = Description of Artificial Sequence: Synthetic peptide
EIFRPGGGDM

SEQ ID NO: 4619 - protein, 9 aa, synthetic construct
  REGION 1..9: note = Description of Artificial Sequence: Synthetic peptide
EAKLVITTY

SEQ ID NO: 4620 - protein, 9 aa, synthetic construct
  REGION 1..9: note = Description of Artificial Sequence: Synthetic peptide
EIIGDIRQA

SEQ ID NO: 4621 - protein, 9 aa, synthetic construct
  REGION 1..9: note = Description of Artificial Sequence: Synthetic peptide
EAGATRISF

SEQ ID NO: 4622 - protein, 10 aa, synthetic construct
  REGION 1..10: note = Description of Artificial Sequence: Synthetic peptide
DIVPIDNDSY

SEQ ID NO: 4623 - protein, 10 aa, synthetic construct
  REGION 1..10: note = Description of Artificial Sequence: Synthetic peptide
DTSGRLVDGF

SEQ ID NO: 4624 - protein, 9 aa, synthetic construct
  REGION 1..9: note = Description of Artificial Sequence: Synthetic peptide
EVIPMFSAL

SEQ ID NO: 4625 - protein, 9 aa, synthetic construct
  REGION 1..9: note = Description of Artificial Sequence: Synthetic peptide
EIIGDIRQA

SEQ ID NO: 4626 - protein, 9 aa, synthetic construct
  REGION 1..9: note = Description of Artificial Sequence: Synthetic peptide
EVIPMFAAL

SEQ ID NO: 4627 - protein, 9 aa, synthetic construct
  REGION 1..9: note = Description of Artificial Sequence: Synthetic peptide
VTIGKIGNM

SEQ ID NO: 4628 - protein, 10 aa, synthetic construct
  REGION 1..10: note = Description of Artificial Sequence: Synthetic peptide
EVFRPGGGNM

SEQ ID NO: 4629 - protein, 9 aa, synthetic construct
  REGION 1..9: note = Description of Artificial Sequence: Synthetic peptide
EIIGDIRRA

SEQ ID NO: 4630 - protein, 9 aa, synthetic construct
  REGION 1..9: note = Description of Artificial Sequence: Synthetic peptide
GVAPTTAKR

SEQ ID NO: 4631 - protein, 10 aa, synthetic construct
  REGION 1..10: note = Description of Artificial Sequence: Synthetic peptide
EIFRPGGGNM

SEQ ID NO: 4632 - protein, 9 aa, synthetic construct
  REGION 1..9: note = Description of Artificial Sequence: Synthetic peptide
MVHQAISPR

SEQ ID NO: 4633 - protein, 9 aa, synthetic construct
  REGION 1..9: note = Description of Artificial Sequence: Synthetic peptide
ELYPLTSLR

SEQ ID NO: 4634 - protein, 10 aa, synthetic construct
  REGION 1..10: note = Description of Artificial Sequence: Synthetic peptide
TSAPAIMMQR

SEQ ID NO: 4635 - protein, 9 aa, synthetic construct
  REGION 1..9: note = Description of Artificial Sequence: Synthetic peptide
ETVDIHCIR

SEQ ID NO: 4636 - protein, 9 aa, synthetic construct
  REGION 1..9: note = Description of Artificial Sequence: Synthetic peptide
DIAGTTSTL

SEQ ID NO: 4637 - protein, 9 aa, synthetic construct
  REGION 1..9: note = Description of Artificial Sequence: Synthetic peptide
ESVEINCTR

SEQ ID NO: 4638 - protein, 10 aa, synthetic construct
  REGION 1..10: note = Description of Artificial Sequence: Synthetic peptide
DTNTNSSSGR

SEQ ID NO: 4639 - protein, 10 aa, synthetic construct
  REGION 1..10: note = Description of Artificial Sequence: Synthetic peptide
DNSDIKVVPR

SEQ ID NO: 4640 - protein, 9 aa, synthetic construct
  REGION 1..9: note = Description of Artificial Sequence: Synthetic peptide
SVIGWPTVR

SEQ ID NO: 4641 - protein, 9 aa, synthetic construct
  REGION 1..9: note = Description of Artificial Sequence: Synthetic peptide
SVTLTVQAR

SEQ ID NO: 4642 - protein, 9 aa, synthetic construct
  REGION 1..9: note = Description of Artificial Sequence: Synthetic peptide
LFNTVATLY

SEQ ID NO: 4643 - protein, 9 aa, synthetic construct
  REGION 1..9: note = Description of Artificial Sequence: Synthetic peptide
TVLDVGDAY

SEQ ID NO: 4644 - protein, 9 aa, synthetic construct
  REGION 1..9: note = Description of Artificial Sequence: Synthetic peptide
LYNTVATLY

SEQ ID NO: 4645 - protein, 9 aa, synthetic construct
  REGION 1..9: note = Description of Artificial Sequence: Synthetic peptide
LFNTIATLY

SEQ ID NO: 4646 - protein, 10 aa, synthetic construct
  REGION 1..10: note = Description of Artificial Sequence: Synthetic peptide
GNSSQVSQNY

SEQ ID NO: 4647 - protein, 9 aa, synthetic construct
  REGION 1..9: note = Description of Artificial Sequence: Synthetic peptide
ITKGLGISY

SEQ ID NO: 4648 - protein, 9 aa, synthetic construct
  REGION 1..9: note = Description of Artificial Sequence: Synthetic peptide
NSSQVSQNY

SEQ ID NO: 4649 - protein, 9 aa, synthetic construct
  REGION 1..9: note = Description of Artificial Sequence: Synthetic peptide
LYNTIAVLY

SEQ ID NO: 4650 - protein, 9 aa, synthetic construct
  REGION 1..9: note = Description of Artificial Sequence: Synthetic peptide
SFEPIPIHY

SEQ ID NO: 4651 - protein, 9 aa, synthetic construct
  REGION 1..9: note = Description of Artificial Sequence: Synthetic peptide
VWSIVIIEY

SEQ ID NO: 4652 - protein, 10 aa, synthetic construct
  REGION 1..10: note = Description of Artificial Sequence: Synthetic peptide
ITMGPGKVYY

SEQ ID NO: 4653 - protein, 9 aa, synthetic construct
  REGION 1..9: note = Description of Artificial Sequence: Synthetic peptide
SFQPIPIHY

SEQ ID NO: 4654 - protein, 9 aa, synthetic construct
  REGION 1..9: note = Description of Artificial Sequence: Synthetic peptide
SFEPIPIYY

SEQ ID NO: 4655 - protein, 9 aa, synthetic construct
  REGION 1..9: note = Description of Artificial Sequence: Synthetic peptide
ITKALGISY

SEQ ID NO: 4656 - protein, 9 aa, synthetic construct
  REGION 1..9: note = Description of Artificial Sequence: Synthetic peptide
KNNPVSQNY

SEQ ID NO: 4657 - protein, 10 aa, synthetic construct
  REGION 1..10: note = Description of Artificial Sequence: Synthetic peptide
SLYNTVATLY

SEQ ID NO: 4658 - protein, 9 aa, synthetic construct
  REGION 1..9: note = Description of Artificial Sequence: Synthetic peptide
LFNTVATLY

SEQ ID NO: 4659 - protein, 9 aa, synthetic construct
  REGION 1..9: note = Description of Artificial Sequence: Synthetic peptide
LFNTIATLY

SEQ ID NO: 4660 - protein, 9 aa, synthetic construct
  REGION 1..9: note = Description of Artificial Sequence: Synthetic peptide
LYNTVATLY

SEQ ID NO: 4661 - protein, 10 aa, synthetic construct
  REGION 1..10: note = Description of Artificial Sequence: Synthetic peptide
GNSSQVSQNY

SEQ ID NO: 4662 - protein, 9 aa, synthetic construct
  REGION 1..9: note = Description of Artificial Sequence: Synthetic peptide
GYFPDWQNY

SEQ ID NO: 4663 - protein, 9 aa, synthetic construct
  REGION 1..9: note = Description of Artificial Sequence: Synthetic peptide
SFEPIPIHY

SEQ ID NO: 4664 - protein, 9 aa, synthetic construct
  REGION 1..9: note = Description of Artificial Sequence: Synthetic peptide
SFQPIPIHY

SEQ ID NO: 4665 - protein, 9 aa, synthetic construct
  REGION 1..9: note = Description of Artificial Sequence: Synthetic peptide
SFEPIPIYY

SEQ ID NO: 4666 - protein, 9 aa, synthetic construct
  REGION 1..9: note = Description of Artificial Sequence: Synthetic peptide
LYNTIAVLY

SEQ ID NO: 4667 - protein, 10 aa, synthetic construct
  REGION 1..10: note = Description of Artificial Sequence: Synthetic peptide
ITMGPGRVYY

SEQ ID NO: 4668 - protein, 9 aa, synthetic construct
  REGION 1..9: note = Description of Artificial Sequence: Synthetic peptide
VWTIVFIEY

SEQ ID NO: 4669 - protein, 9 aa, synthetic construct
  REGION 1..9: note = Description of Artificial Sequence: Synthetic peptide
ITKGLGISY

SEQ ID NO: 4670 - protein, 10 aa, synthetic construct
  REGION 1..10: note = Description of Artificial Sequence: Synthetic peptide
ITMGPGKVYY

SEQ ID NO: 4671 - protein, 9 aa, synthetic construct
  REGION 1..9: note = Description of Artificial Sequence: Synthetic peptide
NSSQVSQNY

SEQ ID NO: 4672 - protein, 10 aa, synthetic construct
  REGION 1..10: note = Description of Artificial Sequence: Synthetic peptide
VSFEPIPIYY

SEQ ID NO: 4673 - protein, 9 aa, synthetic construct
  REGION 1..9: note = Description of Artificial Sequence: Synthetic peptide
TMGPGRVYY

SEQ ID NO: 4674 - protein, 9 aa, synthetic construct
  REGION 1..9: note = Description of Artificial Sequence: Synthetic peptide
GYFPDWDNY

SEQ ID NO: 4675 - protein, 9 aa, synthetic construct
  REGION 1..9: note = Description of Artificial Sequence: Synthetic peptide
ITKALGISY

SEQ ID NO: 4676 - protein, 9 aa, synthetic construct
  REGION 1..9: note = Description of Artificial Sequence: Synthetic peptide
TVLDVGDAY

SEQ ID NO: 4677 - protein, 9 aa, synthetic construct
  REGION 1..9: note = Description of Artificial Sequence: Synthetic peptide
TMGPGKVYY

SEQ ID NO: 4678 - protein, 10 aa, synthetic construct
  REGION 1..10: note = Description of Artificial Sequence: Synthetic peptide
SEAGATRISF

SEQ ID NO: 4679 - protein, 9 aa, synthetic construct
  REGION 1..9: note = Description of Artificial Sequence: Synthetic peptide
KIKPPLPSV

SEQ ID NO: 4680 - protein, 9 aa, synthetic construct
  REGION 1..9: note = Description of Artificial Sequence: Synthetic peptide
SESAIRNAI

SEQ ID NO: 4681 - protein, 9 aa, synthetic construct
  REGION 1..9: note = Description of Artificial Sequence: Synthetic peptide
YETEVHNVW

SEQ ID NO: 4682 - protein, 9 aa, synthetic construct
  REGION 1..9: note = Description of Artificial Sequence: Synthetic peptide
KELYPLTSL

SEQ ID NO: 4683 - protein, 9 aa, synthetic construct
  REGION 1..9: note = Description of Artificial Sequence: Synthetic peptide
SEAKWNNTL

SEQ ID NO: 4684 - protein, 9 aa, synthetic construct
  REGION 1..9: note = Description of Artificial Sequence: Synthetic peptide
ITKGLGISY

SEQ ID NO: 4685 - protein, 9 aa, synthetic construct
  REGION 1..9: note = Description of Artificial Sequence: Synthetic peptide
KNNPVSQNY

SEQ ID NO: 4686 - protein, 11 aa, synthetic construct
  REGION 1..11: note = Description of Artificial Sequence: Synthetic peptide
KQNPDIVIYQY

SEQ ID NO: 4687 - protein, 9 aa, synthetic construct
  REGION 1..9: note = Description of Artificial Sequence: Synthetic peptide
ITKALGISY

SEQ ID NO: 4688 - protein, 11 aa, synthetic construct
  REGION 1..11: note = Description of Artificial Sequence: Synthetic peptide
KQNPEIVIYQY

SEQ ID NO: 4689 - protein, 9 aa, synthetic construct
  REGION 1..9: note = Description of Artificial Sequence: Synthetic peptide
HSNQVSQNY

SEQ ID NO: 4690 - protein, 10 aa, synthetic construct
  REGION 1..10: note = Description of Artificial Sequence: Synthetic peptide
ITMGPGKVYY

SEQ ID NO: 4691 - protein, 10 aa, synthetic construct
  REGION 1..10: note = Description of Artificial Sequence: Synthetic peptide
VQMNNNNNSY

SEQ ID NO: 4692 - protein, 9 aa, synthetic construct
  REGION 1..9: note = Description of Artificial Sequence: Synthetic peptide
NSSQVSQNY

SEQ ID NO: 4693 - protein, 10 aa, synthetic construct
  REGION 1..10: note = Description of Artificial Sequence: Synthetic peptide
SISERILGTY

SEQ ID NO: 4694 - protein, 11 aa, synthetic construct
  REGION 1..11: note = Description of Artificial Sequence: Synthetic peptide
QTGSEELRSLY

SEQ ID NO: 4695 - protein, 9 aa, synthetic construct
  REGION 1..9: note = Description of Artificial Sequence: Synthetic peptide
KQNPEIVIY

SEQ ID NO: 4696 - protein, 11 aa, synthetic construct
  REGION 1..11: note = Description of Artificial Sequence: Synthetic peptide
SVNNETPGIRY

SEQ ID NO: 4697 - protein, 9 aa, synthetic construct
  REGION 1..9: note = Description of Artificial Sequence: Synthetic peptide
TVLDVGDAY

SEQ ID NO: 4698 - protein, 11 aa, synthetic construct
  REGION 1..11: note = Description of Artificial Sequence: Synthetic peptide
TGNSSQVSQNY

SEQ ID NO: 4699 - protein, 9 aa, synthetic construct
  REGION 1..9: note = Description of Artificial Sequence: Synthetic peptide
LGQHIYETY

SEQ ID NO: 4700 - protein, 9 aa, synthetic construct
  REGION 1..9: note = Description of Artificial Sequence: Synthetic peptide
ITMGPGKVY

SEQ ID NO: 4701 - protein, 9 aa, synthetic construct
  REGION 1..9: note = Description of Artificial Sequence: Synthetic peptide
KQNPDIVIY

SEQ ID NO: 4702 - protein, 10 aa, synthetic construct
  REGION 1..10: note = Description of Artificial Sequence: Synthetic peptide
ILKEPVHGVY

SEQ ID NO: 4703 - protein, 9 aa, synthetic construct
  REGION 1..9: note = Description of Artificial Sequence: Synthetic peptide
ITMGPGRVY

SEQ ID NO: 4704 - protein, 10 aa, synthetic construct
  REGION 1..10: note = Description of Artificial Sequence: Synthetic peptide
ITMGPGRVYY

SEQ ID NO: 4705 - protein, 9 aa, synthetic construct
  REGION 1..9: note = Description of Artificial Sequence: Synthetic peptide
ISERILGTY

SEQ ID NO: 4706 - protein, 9 aa, synthetic construct
  REGION 1..9: note = Description of Artificial Sequence: Synthetic peptide
KAQEEHEKY

SEQ ID NO: 4707 - protein, 9 aa, synthetic construct
  REGION 1..9: note = Description of Artificial Sequence: Synthetic peptide
KAQDEHEKY

SEQ ID NO: 4708 - protein, 9 aa, synthetic construct
  REGION 1..9: note = Description of Artificial Sequence: Synthetic peptide
ITKGLGISY

SEQ ID NO: 4709 - protein, 11 aa, synthetic construct
  REGION 1..11: note = Description of Artificial Sequence: Synthetic peptide
KQNPDIVIYQY

SEQ ID NO: 4710 - protein, 11 aa, synthetic construct
  REGION 1..11: note = Description of Artificial Sequence: Synthetic peptide
KQNPEIVIYQY

SEQ ID NO: 4711 - protein, 10 aa, synthetic construct
  REGION 1..10: note = Description of Artificial Sequence: Synthetic peptide
ITMGPGKVYY

SEQ ID NO: 4712 - protein, 9 aa, synthetic construct
  REGION 1..9: note = Description of Artificial Sequence: Synthetic peptide
KNNPVSQNY

SEQ ID NO: 4713 - protein, 9 aa, synthetic construct
  REGION 1..9: note = Description of Artificial Sequence: Synthetic peptide
ITKALGISY

SEQ ID NO: 4714 - protein, 10 aa, synthetic construct
  REGION 1..10: note = Description of Artificial Sequence: Synthetic peptide
RVIEVLQRVY

SEQ ID NO: 4715 - protein, 9 aa, synthetic construct
  REGION 1..9: note = Description of Artificial Sequence: Synthetic peptide
KQNPEIVIY

SEQ ID NO: 4716 - protein, 9 aa, synthetic construct
  REGION 1..9: note = Description of Artificial Sequence: Synthetic peptide
KQNPDIVIY

SEQ ID NO: 4717 - protein, 10 aa, synthetic construct
  REGION 1..10: note = Description of Artificial Sequence: Synthetic peptide
ITMGPGRVYY

SEQ ID NO: 4718 - protein, 9 aa, synthetic construct
  REGION 1..9: note = Description of Artificial Sequence: Synthetic peptide
KQGQGQWTY

SEQ ID NO: 4719 - protein, 9 aa, synthetic construct
  REGION 1..9: note = Description of Artificial Sequence: Synthetic peptide
ITMGPGKVY

SEQ ID NO: 4720 - protein, 9 aa, synthetic construct
  REGION 1..9: note = Description of Artificial Sequence: Synthetic peptide
ITMGPGRVY

SEQ ID NO: 4721 - protein, 10 aa, synthetic construct
  REGION 1..10: note = Description of Artificial Sequence: Synthetic peptide
SISERILGTY

SEQ ID NO: 4722 - protein, 9 aa, synthetic construct
  REGION 1..9: note = Description of Artificial Sequence: Synthetic peptide
HSNQVSQNY

SEQ ID NO: 4723 - protein, 11 aa, synthetic construct
  REGION 1..11: note = Description of Artificial Sequence: Synthetic peptide
VTNSATIMMQR

SEQ ID NO: 4724 - protein, 9 aa, synthetic construct
  REGION 1..9: note = Description of Artificial Sequence: Synthetic peptide
SVIGWPTVR

SEQ ID NO: 4725 - protein, 9 aa, synthetic construct
  REGION 1..9: note = Description of Artificial Sequence: Synthetic peptide
CTRPNNYTR

SEQ ID NO: 4726 - protein, 9 aa, synthetic construct
  REGION 1..9: note = Description of Artificial Sequence: Synthetic peptide
RLIDRIIER

SEQ ID NO: 4727 - protein, 11 aa, synthetic construct
  REGION 1..11: note = Description of Artificial Sequence: Synthetic peptide
RVIEVLQRVYR

SEQ ID NO: 4728 - protein, 11 aa, synthetic construct
  REGION 1..11: note = Description of Artificial Sequence: Synthetic peptide
RVIEVVQGACR

SEQ ID NO: 4729 - protein, 9 aa, synthetic construct
  REGION 1..9: note = Description of Artificial Sequence: Synthetic peptide
RLIDRLIER

SEQ ID NO: 4730 - protein, 9 aa, synthetic construct
  REGION 1..9: note = Description of Artificial Sequence: Synthetic peptide
KALGISYGR

SEQ ID NO: 4731 - protein, 9 aa, synthetic construct
  REGION 1..9: note = Description of Artificial Sequence: Synthetic peptide
QIYPGIKVR

SEQ ID NO: 4732 - protein, 9 aa, synthetic construct
  REGION 1..9: note = Description of Artificial Sequence: Synthetic peptide
ATLYCVHQR

SEQ ID NO: 4733 - protein, 11 aa, synthetic construct
  REGION 1..11: note = Description of Artificial Sequence: Synthetic peptide
RVIETIQRAFR

SEQ ID NO: 4734 - protein, 10 aa, synthetic construct
  REGION 1..10: note = Description of Artificial Sequence: Synthetic peptide
KIKPPLPSVR

SEQ ID NO: 4735 - protein, 11 aa, synthetic construct
  REGION 1..11: note = Description of Artificial Sequence: Synthetic peptide
ITKGLGISYGR

SEQ ID NO: 4736 - protein, 11 aa, synthetic construct
  REGION 1..11: note = Description of Artificial Sequence: Synthetic peptide
RVIEIVQRTFR

SEQ ID NO: 4737 - protein, 11 aa, synthetic construct
  REGION 1..11: note = Description of Artificial Sequence: Synthetic peptide
TVNDIQKLVGK

SEQ ID NO: 4738 - protein, 9 aa, synthetic construct
  REGION 1..9: note = Description of Artificial Sequence: Synthetic peptide
KGLGISYGR

SEQ ID NO: 4739 - protein, 11 aa, synthetic construct
  REGION 1..11: note = Description of Artificial Sequence: Synthetic peptide
KGRPGNFLQSR

SEQ ID NO: 4740 - protein, 10 aa, synthetic construct
  REGION 1..10: note = Description of Artificial Sequence: Synthetic peptide
LGKAGYVTNR

SEQ ID NO: 4741 - protein, 9 aa, synthetic construct
  REGION 1..9: note = Description of Artificial Sequence: Synthetic peptide
AIRNAILGR

SEQ ID NO: 4742 - protein, 9 aa, synthetic construct
  REGION 1..9: note = Description of Artificial Sequence: Synthetic peptide
GTNGTEVFR

SEQ ID NO: 4743 - protein, 9 aa, synthetic construct
  REGION 1..9: note = Description of Artificial Sequence: Synthetic peptide
RQIHSISER

SEQ ID NO: 4744 - protein, 9 aa, synthetic construct
  REGION 1..9: note = Description of Artificial Sequence: Synthetic peptide
RLIDRIRER

SEQ ID NO: 4745 - protein, 9 aa, synthetic construct
  REGION 1..9: note = Description of Artificial Sequence: Synthetic peptide
VYYGVPVWR

SEQ ID NO: 4746 - protein, 9 aa, synthetic construct
  REGION 1..9: note = Description of Artificial Sequence: Synthetic peptide
SVTLTVQAR

SEQ ID NO: 4747 - protein, 9 aa, synthetic construct
  REGION 1..9: note = Description of Artificial Sequence: Synthetic peptide
ILNIPTRIR

SEQ ID NO: 4748 - protein, 8 aa, synthetic construct
  REGION 1..8: note = Description of Artificial Sequence: Synthetic peptide
AVLSIVNR

SEQ ID NO: 4749 - protein, 11 aa, synthetic construct
  REGION 1..11: note = Description of Artificial Sequence: Synthetic peptide
VGPTPVNIIGR

SEQ ID NO: 4750 - protein, 10 aa, synthetic construct
  REGION 1..10: note = Description of Artificial Sequence: Synthetic peptide
LSKQPTSQLR

SEQ ID NO: 4751 - protein, 11 aa, synthetic construct
  REGION 1..11: note = Description of Artificial Sequence: Synthetic peptide
VTSAPAIMMQR

SEQ ID NO: 4752 - protein, 11 aa, synthetic construct
  REGION 1..11: note = Description of Artificial Sequence: Synthetic peptide
ITKALGISYGR

SEQ ID NO: 4753 - protein, 11 aa, synthetic construct
  REGION 1..11: note = Description of Artificial Sequence: Synthetic peptide
SSNITGLLLTR

SEQ ID NO: 4754 - protein, 8 aa, synthetic construct
  REGION 1..8: note = Description of Artificial Sequence: Synthetic peptide
RVIEIVQR

SEQ ID NO: 4755 - protein, 10 aa, synthetic construct
  REGION 1..10: note = Description of Artificial Sequence: Synthetic peptide
LSKQPTSQPR

SEQ ID NO: 4756 - protein, 10 aa, synthetic construct
  REGION 1..10: note = Description of Artificial Sequence: Synthetic peptide
VTIGKIGNMR

SEQ ID NO: 4757 - protein, 9 aa, synthetic construct
  REGION 1..9: note = Description of Artificial Sequence: Synthetic peptide
QIYAGIKVR

SEQ ID NO: 4758 - protein, 9 aa, synthetic construct
  REGION 1..9: note = Description of Artificial Sequence: Synthetic peptide
IVNRVRQGY

SEQ ID NO: 4759 - protein, 9 aa, synthetic construct
  REGION 1..9: note = Description of Artificial Sequence: Synthetic peptide
ITKGLGISY

SEQ ID NO: 4760 - protein, 9 aa, synthetic construct
  REGION 1..9: note = Description of Artificial Sequence: Synthetic peptide
KNNPVSQNY

SEQ ID NO: 4761 - protein, 10 aa, synthetic construct
  REGION 1..10: note = Description of Artificial Sequence: Synthetic peptide
ITMGPGKVYY

SEQ ID NO: 4762 - protein, 10 aa, synthetic construct
  REGION 1..10: note = Description of Artificial Sequence: Synthetic peptide
ITMGPGRVYY

SEQ ID NO: 4763 - protein, 11 aa, synthetic construct
  REGION 1..11: note = Description of Artificial Sequence: Synthetic peptide
ETFYVDGAANR

SEQ ID NO: 4764 - protein, 10 aa, synthetic construct
  REGION 1..10: note = Description of Artificial Sequence: Synthetic peptide
DNSDIKVVPR

SEQ ID NO: 4765 - protein, 9 aa, synthetic construct
  REGION 1..9: note = Description of Artificial Sequence: Synthetic peptide
DTLNQIVGK

SEQ ID NO: 4766 - protein, 11 aa, synthetic construct
  REGION 1..11: note = Description of Artificial Sequence: Synthetic peptide
DTLNQIVGKLR

SEQ ID NO: 4767 - protein, 11 aa, synthetic construct
  REGION 1..11: note = Description of Artificial Sequence: Synthetic peptide
VTNSATIMMQR

SEQ ID NO: 4768 - protein, 11 aa, synthetic construct
  REGION 1..11: note = Description of Artificial Sequence: Synthetic peptide
DVKQLTEAVQK

SEQ ID NO: 4769 - protein, 9 aa, synthetic construct
  REGION 1..9: note = Description of Artificial Sequence: Synthetic peptide
NSATIMMQR

SEQ ID NO: 4770 - protein, 11 aa, synthetic construct
  REGION 1..11: note = Description of Artificial Sequence: Synthetic peptide
ENLAFPQGKAR

SEQ ID NO: 4771 - protein, 9 aa, synthetic construct
  REGION 1..9: note = Description of Artificial Sequence: Synthetic peptide
QARVLAVER

SEQ ID NO: 4772 - protein, 9 aa, synthetic construct
  REGION 1..9: note = Description of Artificial Sequence: Synthetic peptide
NTLGQIVKK

SEQ ID NO: 4773 - protein, 9 aa, synthetic construct
  REGION 1..9: note = Description of Artificial Sequence: Synthetic peptide
QARILAVER

SEQ ID NO: 4774 - protein, 9 aa, synthetic construct
  REGION 1..9: note = Description of Artificial Sequence: Synthetic peptide
EGLIYSQQR

SEQ ID NO: 4775 - protein, 9 aa, synthetic construct
  REGION 1..9: note = Description of Artificial Sequence: Synthetic peptide
MVHQAISPR

SEQ ID NO: 4776 - protein, 9 aa, synthetic construct
  REGION 1..9: note = Description of Artificial Sequence: Synthetic peptide
DTWEKIRLR

SEQ ID NO: 4777 - protein, 11 aa, synthetic construct
  REGION 1..11: note = Description of Artificial Sequence: Synthetic peptide
ETFYVDGAANR

SEQ ID NO: 4778 - protein, 9 aa, synthetic construct
  REGION 1..9: note = Description of Artificial Sequence: Synthetic peptide
ETVDIHCIR

SEQ ID NO: 4779 - protein, 9 aa, synthetic construct
  REGION 1..9: note = Description of Artificial Sequence: Synthetic peptide
ESVEINCTR

SEQ ID NO: 4780 - protein, 9 aa, synthetic construct
  REGION 1..9: note = Description of Artificial Sequence: Synthetic peptide
EAKWNNTLR

SEQ ID NO: 4781 - protein, 9 aa, synthetic construct
  REGION 1..9: note = Description of Artificial Sequence: Synthetic peptide
MVHQAISPR

SEQ ID NO: 4782 - protein, 9 aa, synthetic construct
  REGION 1..9: note = Description of Artificial Sequence: Synthetic peptide
NSATIMMQR

SEQ ID NO: 4783 - protein, 10 aa, synthetic construct
  REGION 1..10: note = Description of Artificial Sequence: Synthetic peptide
DNSDIKVVPR

SEQ ID NO: 4784 - protein, 11 aa, synthetic construct
  REGION 1..11: note = Description of Artificial Sequence: Synthetic peptide
MYAPPISGQIR

SEQ ID NO: 4785 - protein, 11 aa, synthetic construct
  REGION 1..11: note = Description of Artificial Sequence: Synthetic peptide
EIFRPGGGNMR

SEQ ID NO: 4786 - protein, 9 aa, synthetic construct
  REGION 1..9: note = Description of Artificial Sequence: Synthetic peptide
QARVLAVER

SEQ ID NO: 4787 - protein, 9 aa, synthetic construct
  REGION 1..9: note = Description of Artificial Sequence: Synthetic peptide
QARILAVER

SEQ ID NO: 4788 - protein, 9 aa, synthetic construct
  REGION 1..9: note = Description of Artificial Sequence: Synthetic peptide
FYVDGAANR

SEQ ID NO: 4789 - protein, 11 aa, synthetic construct
  REGION 1..11: note = Description of Artificial Sequence: Synthetic peptide
VTNSATIMMQR

SEQ ID NO: 4790 - protein, 10 aa, synthetic construct
  REGION 1..10: note = Description of Artificial Sequence: Synthetic peptide
TSAPAIMMQR

SEQ ID NO: 4791 - protein, 11 aa, synthetic construct
  REGION 1..11: note = Description of Artificial Sequence: Synthetic peptide
MYAPPIGGQIR

SEQ ID NO: 4792 - protein, 9 aa, synthetic construct
  REGION 1..9: note = Description of Artificial Sequence: Synthetic peptide
EYRKILRQR

SEQ ID NO: 4793 - protein, 11 aa, synthetic construct
  REGION 1..11: note = Description of Artificial Sequence: Synthetic peptide
TVNDIQKLVGK

SEQ ID NO: 4794 - protein, 9 aa, synthetic construct
  REGION 1..9: note = Description of Artificial Sequence: Synthetic peptide
SNFTGATVR

SEQ ID NO: 4795 - protein, 11 aa, synthetic construct
  REGION 1..11: note = Description of Artificial Sequence: Synthetic peptide
EVKDTKEALEK

SEQ ID NO: 4796 - protein, 9 aa, synthetic construct
  REGION 1..9: note = Description of Artificial Sequence: Synthetic peptide
TSVEINCTR

SEQ ID NO: 4797 - protein, 9 aa, synthetic construct
  REGION 1..9: note = Description of Artificial Sequence: Synthetic peptide
QARVLAIER

SEQ ID NO: 4798 - protein, 9 aa, synthetic construct
  REGION 1..9: note = Description of Artificial Sequence: Synthetic peptide
ELYPLTSLR

SEQ ID NO: 4799 - protein, 8 aa, synthetic construct
  REGION 1..8: note = Description of Artificial Sequence: Synthetic peptide
HSRIGVTR

SEQ ID NO: 4800 - protein, 9 aa, synthetic construct
  REGION 1..9: note = Description of Artificial Sequence: Synthetic peptide
NSDIKVVPR

SEQ ID NO: 4801 - protein, 9 aa, synthetic construct
  REGION 1..9: note = Description of Artificial Sequence: Synthetic peptide
FTVLSIVNR

SEQ ID NO: 4802 - protein, 9 aa, synthetic construct
  REGION 1..9: note = Description of Artificial Sequence: Synthetic peptide
EGLIYSQQR

SEQ ID NO: 4803 - protein, 10 aa, synthetic construct
  REGION 1..10: note = Description of Artificial Sequence: Synthetic peptide
LSKQPTSQPR

SEQ ID NO: 4804 - protein, 8 aa, synthetic construct
  REGION 1..8: note = Description of Artificial Sequence: Synthetic peptide
MTLTVQAR

SEQ ID NO: 4805 - protein, 9 aa, synthetic construct
  REGION 1..9: note = Description of Artificial Sequence: Synthetic peptide
SVIGWPTVR

SEQ ID NO: 4806 - protein, 9 aa, synthetic construct
  REGION 1..9: note = Description of Artificial Sequence: Synthetic peptide
QIYPGIKVR

SEQ ID NO: 4807 - protein, 11 aa, synthetic construct
  REGION 1..11: note = Description of Artificial Sequence: Synthetic peptide
DTLNQIVGKLR

SEQ ID NO: 4808 - protein, 10 aa, synthetic construct
  REGION 1..10: note = Description of Artificial Sequence: Synthetic peptide
SFQTRLPTQR

SEQ ID NO: 4809 - protein, 10 aa, synthetic construct
  REGION 1..10: note = Description of Artificial Sequence: Synthetic peptide
EVFRPGGGNM

SEQ ID NO: 4810 - protein, 9 aa, synthetic construct
  REGION 1..9: note = Description of Artificial Sequence: Synthetic peptide
QIYAGIKVR

SEQ ID NO: 4811 - protein, 9 aa, synthetic construct
  REGION 1..9: note = Description of Artificial Sequence: Synthetic peptide
SFNITTSIR

SEQ ID NO: 4812 - protein, 9 aa, synthetic construct
  REGION 1..9: note = Description of Artificial Sequence: Synthetic peptide
ITTTIKNKR

SEQ ID NO: 4813 - protein, 9 aa, synthetic construct
  REGION 1..9: note = Description of Artificial Sequence: Synthetic peptide
EYRKILKQK

SEQ ID NO: 4814 - protein, 10 aa, synthetic construct
  REGION 1..10: note = Description of Artificial Sequence: Synthetic peptide
SFQTHLPTPR

SEQ ID NO: 4815 - protein, 10 aa, synthetic construct
  REGION 1..10: note = Description of Artificial Sequence: Synthetic peptide
ELKKIIGQVR

SEQ ID NO: 4816 - protein, 10 aa, synthetic construct
  REGION 1..10: note = Description of Artificial Sequence: Synthetic peptide
LPKQPASQPR

SEQ ID NO: 4817 - protein, 8 aa, synthetic construct
  REGION 1..8: note = Description of Artificial Sequence: Synthetic peptide
MALTVQAR

SEQ ID NO: 4818 - protein, 9 aa, synthetic construct
  REGION 1..9: note = Description of Artificial Sequence: Synthetic peptide
MNNNNNSYR

SEQ ID NO: 4819 - protein, 9 aa, synthetic construct
  REGION 1..9: note = Description of Artificial Sequence: Synthetic peptide
ENNSTEIFR

SEQ ID NO: 4820 - protein, 8 aa, synthetic construct
  REGION 1..8: note = Description of Artificial Sequence: Synthetic peptide
TVLSIVNR

SEQ ID NO: 4821 - protein, 9 aa, synthetic construct
  REGION 1..9: note = Description of Artificial Sequence: Synthetic peptide
SFNISTSIR

SEQ ID NO: 4822 - protein, 10 aa, synthetic construct
  REGION 1..10: note = Description of Artificial Sequence: Synthetic peptide
EVHIPLGDAR

SEQ ID NO: 4823 - protein, 11 aa, synthetic construct
  REGION 1..11: note = Description of Artificial Sequence: Synthetic peptide
VTSAPAIMMQR

SEQ ID NO: 4824 - protein, 9 aa, synthetic construct
  REGION 1..9: note = Description of Artificial Sequence: Synthetic peptide
FNLPPIVAK

SEQ ID NO: 4825 - protein, 11 aa, synthetic construct
  REGION 1..11: note = Description of Artificial Sequence: Synthetic peptide
ENLAFPQGKAR

SEQ ID NO: 4826 - protein, 10 aa, synthetic construct
  REGION 1..10: note = Description of Artificial Sequence: Synthetic peptide
EIFRPGGGNM

SEQ ID NO: 4827 - protein, 9 aa, synthetic construct
  REGION 1..9: note = Description of Artificial Sequence: Synthetic peptide
NTLGQIVKK

SEQ ID NO: 4828 - protein, 10 aa, synthetic construct
  REGION 1..10: note = Description of Artificial Sequence: Synthetic peptide
LSKQPTSQLR

SEQ ID NO: 4829 - protein, 8 aa, synthetic construct
  REGION 1..8: note = Description of Artificial Sequence: Synthetic peptide
HYESPHPR

SEQ ID NO: 4830 - protein, 9 aa, synthetic construct
  REGION 1..9: note = Description of Artificial Sequence: Synthetic peptide
SVTLTVQAR

SEQ ID NO: 4831 - protein, 11 aa, synthetic construct
  REGION 1..11: note = Description of Artificial Sequence: Synthetic peptide
EPQEYPLASLR

SEQ ID NO: 4832 - protein, 9 aa, synthetic construct
  REGION 1..9: note = Description of Artificial Sequence: Synthetic peptide
DTLNQIVGK

SEQ ID NO: 4833 - protein, 11 aa, synthetic construct
  REGION 1..11: note = Description of Artificial Sequence: Synthetic peptide
ETFYVDGAANR

SEQ ID NO: 4834 - protein, 9 aa, synthetic construct
  REGION 1..9: note = Description of Artificial Sequence: Synthetic peptide
NSATIMMQR

SEQ ID NO: 4835 - protein, 9 aa, synthetic construct
  REGION 1..9: note = Description of Artificial Sequence: Synthetic peptide
ESVEINCTR

SEQ ID NO: 4836 - protein, 10 aa, synthetic construct
  REGION 1..10: note = Description of Artificial Sequence: Synthetic peptide
TSAPAIMMQR

SEQ ID NO: 4837 - protein, 9 aa, synthetic construct
  REGION 1..9: note = Description of Artificial Sequence: Synthetic peptide
TSVEINCTR

SEQ ID NO: 4838 - protein, 10 aa, synthetic construct
  REGION 1..10: note = Description of Artificial Sequence: Synthetic peptide
DNSDIKVVPR

SEQ ID NO: 4839 - protein, 9 aa, synthetic construct
  REGION 1..9: note = Description of Artificial Sequence: Synthetic peptide
DTLNQIVGK

SEQ ID NO: 4840 - protein, 9 aa, synthetic construct
  REGION 1..9: note = Description of Artificial Sequence: Synthetic peptide
ETVDIHCIR

SEQ ID NO: 4841 - protein, 11 aa, synthetic construct
  REGION 1..11: note = Description of Artificial Sequence: Synthetic peptide
TTGEIIGDIRR

SEQ ID NO: 4842 - protein, 10 aa, synthetic construct
  REGION 1..10: note = Description of Artificial Sequence: Synthetic peptide
TTGEIIGDIR

SEQ ID NO: 4843 - protein, 11 aa, synthetic construct
  REGION 1..11: note = Description of Artificial Sequence: Synthetic peptide
TVNDIQKLVGK

SEQ ID NO: 4844 - protein, 9 aa, synthetic construct
  REGION 1..9: note = Description of Artificial Sequence: Synthetic peptide
NTLGQIVKK

SEQ ID NO: 4845 - protein, 11 aa, synthetic construct
  REGION 1..11: note = Description of Artificial Sequence: Synthetic peptide
EIFRPGGGNMR

SEQ ID NO: 4846 - protein, 11 aa, synthetic construct
  REGION 1..11: note = Description of Artificial Sequence: Synthetic peptide
VTSAPAIMMQR

SEQ ID NO: 4847 - protein, 11 aa, synthetic construct
  REGION 1..11: note = Description of Artificial Sequence: Synthetic peptide
EVFRPGGGNMK

SEQ ID NO: 4848 - protein, 9 aa, synthetic construct
  REGION 1..9: note = Description of Artificial Sequence: Synthetic peptide
NSATIMMQK

SEQ ID NO: 4849 - protein, 9 aa, synthetic construct
  REGION 1..9: note = Description of Artificial Sequence: Synthetic peptide
SVTLTVQAR

SEQ ID NO: 4850 - protein, 10 aa, synthetic construct
  REGION 1..10: note = Description of Artificial Sequence: Synthetic peptide
TTGQIIGDIR

SEQ ID NO: 4851 - protein, 9 aa, synthetic construct
  REGION 1..9: note = Description of Artificial Sequence: Synthetic peptide
SNFTGATVR

SEQ ID NO: 4852 - protein, 10 aa, synthetic construct
  REGION 1..10: note = Description of Artificial Sequence: Synthetic peptide
NTSVEINCTR

SEQ ID NO: 4853 - protein, 9 aa, synthetic construct
  REGION 1..9: note = Description of Artificial Sequence: Synthetic peptide
GVAPTTAKR

SEQ ID NO: 4854 - protein, 11 aa, synthetic construct
  REGION 1..11: note = Description of Artificial Sequence: Synthetic peptide
VTNSATIMMQR

SEQ ID NO: 4855 - protein, 9 aa, synthetic construct
  REGION 1..9: note = Description of Artificial Sequence: Synthetic peptide
SVIGWPTVR

SEQ ID NO: 4856 - protein, 9 aa, synthetic construct
  REGION 1..9: note = Description of Artificial Sequence: Synthetic peptide
SAPAIMMQR

SEQ ID NO: 4857 - protein, 9 aa, synthetic construct
  REGION 1..9: note = Description of Artificial Sequence: Synthetic peptide
FTVLSIVNR

SEQ ID NO: 4858 - protein, 10 aa, synthetic construct
  REGION 1..10: note = Description of Artificial Sequence: Synthetic peptide
EVNIVTDSQY

SEQ ID NO: 4859 - protein, 9 aa, synthetic construct
  REGION 1..9: note = Description of Artificial Sequence: Synthetic peptide
EPVEINCTR

SEQ ID NO: 4860 - protein, 9 aa, synthetic construct
  REGION 1..9: note = Description of Artificial Sequence: Synthetic peptide
NSGAIMMQK

SEQ ID NO: 4861 - protein, 9 aa, synthetic construct
  REGION 1..9: note = Description of Artificial Sequence: Synthetic peptide
NSDIKVVPR

SEQ ID NO: 4862 - protein, 10 aa, synthetic construct
  REGION 1..10: note = Description of Artificial Sequence: Synthetic peptide
TNSGAIMMQK

SEQ ID NO: 4863 - protein, 10 aa, synthetic construct
  REGION 1..10: note = Description of Artificial Sequence: Synthetic peptide
TNSATIMMQR

SEQ ID NO: 4864 - protein, 11 aa, synthetic construct
  REGION 1..11: note = Description of Artificial Sequence: Synthetic peptide
DVKQLTEAVQK

SEQ ID NO: 4865 - protein, 10 aa, synthetic construct
  REGION 1..10: note = Description of Artificial Sequence: Synthetic peptide
DCFSDSAIRK

SEQ ID NO: 4866 - protein, 9 aa, synthetic construct
  REGION 1..9: note = Description of Artificial Sequence: Synthetic peptide
EASLVIKTY

SEQ ID NO: 4867 - protein, 9 aa, synthetic construct
  REGION 1..9: note = Description of Artificial Sequence: Synthetic peptide
FAVLSIVNR

SEQ ID NO: 4868 - protein, 11 aa, synthetic construct
  REGION 1..11: note = Description of Artificial Sequence: Synthetic peptide
PAADGVGPVSR

SEQ ID NO: 4869 - protein, 10 aa, synthetic construct
  REGION 1..10: note = Description of Artificial Sequence: Synthetic peptide
ASVTLTVQAR

SEQ ID NO: 4870 - protein, 10 aa, synthetic construct
  REGION 1..10: note = Description of Artificial Sequence: Synthetic peptide
ATGEIIGDIR

SEQ ID NO: 4871 - protein, 11 aa, synthetic construct
  REGION 1..11: note = Description of Artificial Sequence: Synthetic peptide
NGSNFTGATVR

SEQ ID NO: 4872 - protein, 9 aa, synthetic construct
  REGION 1..9: note = Description of Artificial Sequence: Synthetic peptide
NITGLLLTR

SEQ ID NO: 4873 - protein, 10 aa, synthetic construct
  REGION 1..10: note = Description of Artificial Sequence: Synthetic peptide
DTWTVNDIQK

SEQ ID NO: 4874 - protein, 10 aa, synthetic construct
  REGION 1..10: note = Description of Artificial Sequence: Synthetic peptide
EVFRPGGGNM

SEQ ID NO: 4875 - protein, 9 aa, synthetic construct
  REGION 1..9: note = Description of Artificial Sequence: Synthetic peptide
MVHQAISPR

SEQ ID NO: 4876 - protein, 10 aa, synthetic construct
  REGION 1..10: note = Description of Artificial Sequence: Synthetic peptide
DIIATDIQTK

SEQ ID NO: 4877 - protein, 11 aa, synthetic construct
  REGION 1..11: note = Description of Artificial Sequence: Synthetic peptide
TAIAVAEGTDR

SEQ ID NO: 4878 - protein, 11 aa, synthetic construct
  REGION 1..11: note = Description of Artificial Sequence: Synthetic peptide
VVTLTDTTNQK

SEQ ID NO: 4879 - protein, 10 aa, synthetic construct
  REGION 1..10: note = Description of Artificial Sequence: Synthetic peptide
ASMTLTVQAR

SEQ ID NO: 4880 - protein, 11 aa, synthetic construct
  REGION 1..11: note = Description of Artificial Sequence: Synthetic peptide
RVIEVVQGACR

SEQ ID NO: 4881 - protein, 11 aa, synthetic construct
  REGION 1..11: note = Description of Artificial Sequence: Synthetic peptide
VGPTPVNIIGR

SEQ ID NO: 4882 - protein, 9 aa, synthetic construct
  REGION 1..9: note = Description of Artificial Sequence: Synthetic peptide
TPAGFAILK

SEQ ID NO: 4883 - protein, 10 aa, synthetic construct
  REGION 1..10: note = Description of Artificial Sequence: Synthetic peptide
VTIGKIGNMR

SEQ ID NO: 4884 - protein, 9 aa, synthetic construct
  REGION 1..9: note = Description of Artificial Sequence: Synthetic peptide
GTNGTEVFR

SEQ ID NO: 4885 - protein, 9 aa, synthetic construct
  REGION 1..9: note = Description of Artificial Sequence: Synthetic peptide
ITTDISNKK

SEQ ID NO: 4886 - protein, 11 aa, synthetic construct
  REGION 1..11: note = Description of Artificial Sequence: Synthetic peptide
IGPTPVNIIGR

SEQ ID NO: 4887 - protein, 11 aa, synthetic construct
  REGION 1..11: note = Description of Artificial Sequence: Synthetic peptide
PAADGVGAASR

SEQ ID NO: 4888 - protein, 9 aa, synthetic construct
  REGION 1..9: note = Description of Artificial Sequence: Synthetic peptide
ITTTIKNKR

SEQ ID NO: 4889 - protein, 10 aa, synthetic construct
  REGION 1..10: note = Description of Artificial Sequence: Synthetic peptide
EIFRPGGGNM

SEQ ID NO: 4890 - protein, 9 aa, synthetic construct
  REGION 1..9: note = Description of Artificial Sequence: Synthetic peptide
ETAYFLLKL

SEQ ID NO: 4891 - protein, 10 aa, synthetic construct
  REGION 1..10: note = Description of Artificial Sequence: Synthetic peptide
ETYGDTWVGV

SEQ ID NO: 4892 - protein, 9 aa, synthetic construct
  REGION 1..9: note = Description of Artificial Sequence: Synthetic peptide
TVLSIVNRV

SEQ ID NO: 4893 - protein, 9 aa, synthetic construct
  REGION 1..9: note = Description of Artificial Sequence: Synthetic peptide
IVSQIIEQL

SEQ ID NO: 4894 - protein, 9 aa, synthetic construct
  REGION 1..9: note = Description of Artificial Sequence: Synthetic peptide
LVSQIIEQL

SEQ ID NO: 4895 - protein, 9 aa, synthetic construct
  REGION 1..9: note = Description of Artificial Sequence: Synthetic peptide
NTIAVLYCV

SEQ ID NO: 4896 - protein, 9 aa, synthetic construct
  REGION 1..9: note = Description of Artificial Sequence: Synthetic peptide
VVAGIIAIV

SEQ ID NO: 4897 - protein, 9 aa, synthetic construct
  REGION 1..9: note = Description of Artificial Sequence: Synthetic peptide
NTKTIIVQL

SEQ ID NO: 4898 - protein, 9 aa, synthetic construct
  REGION 1..9: note = Description of Artificial Sequence: Synthetic peptide
NTSVITQAC

SEQ ID NO: 4899 - protein, 9 aa, synthetic construct
  REGION 1..9: note = Description of Artificial Sequence: Synthetic peptide
YTAFTIPSV

SEQ ID NO: 4900 - protein, 9 aa, synthetic construct
  REGION 1..9: note = Description of Artificial Sequence: Synthetic peptide
VVAAIIAIV

SEQ ID NO: 4901 - protein, 9 aa, synthetic construct
  REGION 1..9: note = Description of Artificial Sequence: Synthetic peptide
TVNDIQKLV

SEQ ID NO: 4902 - protein, 9 aa, synthetic construct
  REGION 1..9: note = Description of Artificial Sequence: Synthetic peptide
LVSQIIEEL

SEQ ID NO: 4903 - protein, 9 aa, synthetic construct
  REGION 1..9: note = Description of Artificial Sequence: Synthetic peptide
EVIPMFAAL

SEQ ID NO: 4904 - protein, 10 aa, synthetic construct
  REGION 1..10: note = Description of Artificial Sequence: Synthetic peptide
EISALVEMGV

SEQ ID NO: 4905 - protein, 9 aa, synthetic construct
  REGION 1..9: note = Description of Artificial Sequence: Synthetic peptide
NTIATLYCV

SEQ ID NO: 4906 - protein, 9 aa, synthetic construct
  REGION 1..9: note = Description of Artificial Sequence: Synthetic peptide
TIVAIVALV

SEQ ID NO: 4907 - protein, 9 aa, synthetic construct
  REGION 1..9: note = Description of Artificial Sequence: Synthetic peptide
LVVAIIIAI

SEQ ID NO: 4908 - protein, 10 aa, synthetic construct
  REGION 1..10: note = Description of Artificial Sequence: Synthetic peptide
ETYGDTWAGV

SEQ ID NO: 4909 - protein, 9 aa, synthetic construct
  REGION 1..9: note = Description of Artificial Sequence: Synthetic peptide
IVLSIVNRV

SEQ ID NO: 4910 - protein, 9 aa, synthetic construct
  REGION 1..9: note = Description of Artificial Sequence: Synthetic peptide
YTSLIHSLI

SEQ ID NO: 4911 - protein, 9 aa, synthetic construct
  REGION 1..9: note = Description of Artificial Sequence: Synthetic peptide
ITTSIRNKL

SEQ ID NO: 4912 - protein, 9 aa, synthetic construct
  REGION 1..9: note = Description of Artificial Sequence: Synthetic peptide
YTAFTIPSI

SEQ ID NO: 4913 - protein, 9 aa, synthetic construct
  REGION 1..9: note = Description of Artificial Sequence: Synthetic peptide
NTVATLYCV

SEQ ID NO: 4914 - protein, 9 aa, synthetic construct
  REGION 1..9: note = Description of Artificial Sequence: Synthetic peptide
DTITLPCRI

SEQ ID NO: 4915 - protein, 11 aa, synthetic construct
  REGION 1..11: note = Description of Artificial Sequence: Synthetic peptide
EVIPLTEEAEL

SEQ ID NO: 4916 - protein, 9 aa, synthetic construct
  REGION 1..9: note = Description of Artificial Sequence: Synthetic peptide
TVLSIMNRV

SEQ ID NO: 4917 - protein, 9 aa, synthetic construct
  REGION 1..9: note = Description of Artificial Sequence: Synthetic peptide
RVIEVLQRV

SEQ ID NO: 4918 - protein, 9 aa, synthetic construct
  REGION 1..9: note = Description of Artificial Sequence: Synthetic peptide
TTSTLQEQI

SEQ ID NO: 4919 - protein, 9 aa, synthetic construct
  REGION 1..9: note = Description of Artificial Sequence: Synthetic peptide
SAVSLFNAI

SEQ ID NO: 4920 - protein, 11 aa, synthetic construct
  REGION 1..11: note = Description of Artificial Sequence: Synthetic peptide
EVVPLTKEAEL

SEQ ID NO: 4921 - protein, 9 aa, synthetic construct
  REGION 1..9: note = Description of Artificial Sequence: Synthetic peptide
ENTSLLHPV

SEQ ID NO: 4922 - protein, 9 aa, synthetic construct
  REGION 1..9: note = Description of Artificial Sequence: Synthetic peptide
EVIPMFSAL

SEQ ID NO: 4923 - protein, 9 aa, synthetic construct
  REGION 1..9: note = Description of Artificial Sequence: Synthetic peptide
EIIGDIRQA

SEQ ID NO: 4924 - protein, 9 aa, synthetic construct
  REGION 1..9: note = Description of Artificial Sequence: Synthetic peptide
TVSFNFPQV

SEQ ID NO: 4925 - protein, 9 aa, synthetic construct
  REGION 1..9: note = Description of Artificial Sequence: Synthetic peptide
EVIPLTEEA

SEQ ID NO: 4926 - protein, 9 aa, synthetic construct
  REGION 1..9: note = Description of Artificial Sequence: Synthetic peptide
QNYPIVQNI

SEQ ID NO: 4927 - protein, 9 aa, synthetic construct
  REGION 1..9: note = Description of Artificial Sequence: Synthetic peptide
AVLSIVNRV

SEQ ID NO: 4928 - protein, 9 aa, synthetic construct
  REGION 1..9: note = Description of Artificial Sequence: Synthetic peptide
GAASVTLTV

SEQ ID NO: 4929 - protein, 11 aa, synthetic construct
  REGION 1..11: note = Description of Artificial Sequence: Synthetic peptide
ETFYVDGAANR

SEQ ID NO: 4930 - protein, 10 aa, synthetic construct
  REGION 1..10: note = Description of Artificial Sequence: Synthetic peptide
EVFRPGGGNM

SEQ ID NO: 4931 - protein, 9 aa, synthetic construct
  REGION 1..9: note = Description of Artificial Sequence: Synthetic peptide
DVKQLTEAV

SEQ ID NO: 4932 - protein, 9 aa, synthetic construct
  REGION 1..9: note = Description of Artificial Sequence: Synthetic peptide
AAVDLSHFL

SEQ ID NO: 4933 - protein, 9 aa, synthetic construct
  REGION 1..9: note = Description of Artificial Sequence: Synthetic peptide
LVNQIIEQL

SEQ ID NO: 4934 - protein, 9 aa, synthetic construct
  REGION 1..9: note = Description of Artificial Sequence: Synthetic peptide
IVTRIVELL

SEQ ID NO: 4935 - protein, 9 aa, synthetic construct
  REGION 1..9: note = Description of Artificial Sequence: Synthetic peptide
IVALVVAAI

SEQ ID NO: 4936 - protein, 9 aa, synthetic construct
  REGION 1..9: note = Description of Artificial Sequence: Synthetic peptide
NAKTIIVQL

SEQ ID NO: 4937 - protein, 10 aa, synthetic construct
  REGION 1..10: note = Description of Artificial Sequence: Synthetic peptide
IVSQIIEQLI

SEQ ID NO: 4938 - protein, 9 aa, synthetic construct
  REGION 1..9: note = Description of Artificial Sequence: Synthetic peptide
YTSLIYTLI

SEQ ID NO: 4939 - protein, 10 aa, synthetic construct
  REGION 1..10: note = Description of Artificial Sequence: Synthetic peptide
LVSQIIEQLI

SEQ ID NO: 4940 - protein, 9 aa, synthetic construct
  REGION 1..9: note = Description of Artificial Sequence: Synthetic peptide
MTHNPPIPV

SEQ ID NO: 4941 - protein, 10 aa, synthetic construct
  REGION 1..10: note = Description of Artificial Sequence: Synthetic peptide
EVGFPVKPQV

SEQ ID NO: 4942 - protein, 10 aa, synthetic construct
  REGION 1..10: note = Description of Artificial Sequence: Synthetic peptide
ETAEGCRQLL

SEQ ID NO: 4943 - protein, 9 aa, synthetic construct
  REGION 1..9: note = Description of Artificial Sequence: Synthetic peptide
TTGEIIGDI

SEQ ID NO: 4944 - protein, 10 aa, synthetic construct
  REGION 1..10: note = Description of Artificial Sequence: Synthetic peptide
EIVSQIIEQL

SEQ ID NO: 4945 - protein, 9 aa, synthetic construct
  REGION 1..9: note = Description of Artificial Sequence: Synthetic peptide
QNYPIVQNL

SEQ ID NO: 4946 - protein, 9 aa, synthetic construct
  REGION 1..9: note = Description of Artificial Sequence: Synthetic peptide
YTTQVDPDL

SEQ ID NO: 4947 - protein, 9 aa, synthetic construct
  REGION 1..9: note = Description of Artificial Sequence: Synthetic peptide
VVAAILAIV

SEQ ID NO: 4948 - protein, 9 aa, synthetic construct
  REGION 1..9: note = Description of Artificial Sequence: Synthetic peptide
SPTSRELQV

SEQ ID NO: 4949 - protein, 9 aa, synthetic construct
  REGION 1..9: note = Description of Artificial Sequence: Synthetic peptide
SPAIFQSSM

SEQ ID NO: 4950 - protein, 9 aa, synthetic construct
  REGION 1..9: note = Description of Artificial Sequence: Synthetic peptide
SIRLVNGSL

SEQ ID NO: 4951 - protein, 9 aa, synthetic construct
  REGION 1..9: note = Description of Artificial Sequence: Synthetic peptide
SPLSFQTRL

SEQ ID NO: 4952 - protein, 9 aa, synthetic construct
  REGION 1..9: note = Description of Artificial Sequence: Synthetic peptide
SPLSFQTHL

SEQ ID NO: 4953 - protein, 10 aa, synthetic construct
  REGION 1..10: note = Description of Artificial Sequence: Synthetic peptide
RPAEPVPLQL

SEQ ID NO: 4954 - protein, 10 aa, synthetic construct
  REGION 1..10: note = Description of Artificial Sequence: Synthetic peptide
RPNNNTRKSI

SEQ ID NO: 4955 - protein, 9 aa, synthetic construct
  REGION 1..9: note = Description of Artificial Sequence: Synthetic peptide
SDSAIRNAL

SEQ ID NO: 4956 - protein, 9 aa, synthetic construct
  REGION 1..9: note = Description of Artificial Sequence: Synthetic peptide
YPLTSLRSL

SEQ ID NO: 4957 - protein, 8 aa, synthetic construct
  REGION 1..8: note = Description of Artificial Sequence: Synthetic peptide
KPVVSTQL

SEQ ID NO: 4958 - protein, 8 aa, synthetic construct
  REGION 1..8: note = Description of Artificial Sequence: Synthetic peptide
RPVVSTQL

SEQ ID NO: 4959 - protein, 9 aa, synthetic construct
  REGION 1..9: note = Description of Artificial Sequence: Synthetic peptide
ADRQGTVSF

SEQ ID NO: 4960 - protein, 10 aa, synthetic construct
  REGION 1..10: note = Description of Artificial Sequence: Synthetic peptide
SPIETVPVKL

SEQ ID NO: 4961 - protein, 9 aa, synthetic construct
  REGION 1..9: note = Description of Artificial Sequence: Synthetic peptide
RPMTYKGAL

SEQ ID NO: 4962 - protein, 10 aa, synthetic construct
  REGION 1..10: note = Description of Artificial Sequence: Synthetic peptide
SEAGATRISF

SEQ ID NO: 4963 - protein, 10 aa, synthetic construct
  REGION 1..10: note = Description of Artificial Sequence: Synthetic peptide
VPTDPNPQEL

SEQ ID NO: 4964 - protein, 9 aa, synthetic construct
  REGION 1..9: note = Description of Artificial Sequence: Synthetic peptide
SPAIFQCSM

SEQ ID NO: 4965 - protein, 9 aa, synthetic construct
  REGION 1..9: note = Description of Artificial Sequence: Synthetic peptide
LSKQPTSQL

SEQ ID NO: 4966 - protein, 10 aa, synthetic construct
  REGION 1..10: note = Description of Artificial Sequence: Synthetic peptide
EPNDGKNITL

SEQ ID NO: 4967 - protein, 9 aa, synthetic construct
  REGION 1..9: note = Description of Artificial Sequence: Synthetic peptide
VPLTKEAEL

SEQ ID NO: 4968 - protein, 9 aa, synthetic construct
  REGION 1..9: note = Description of Artificial Sequence: Synthetic peptide
TPQDLNTML

SEQ ID NO: 4969 - protein, 8 aa, synthetic construct
  REGION 1..8: note = Description of Artificial Sequence: Synthetic peptide
DSAIRNAL

SEQ ID NO: 4970 - protein, 9 aa, synthetic construct
  REGION 1..9: note = Description of Artificial Sequence: Synthetic peptide
ELKNSAVSL

SEQ ID NO: 4971 - protein, 9 aa, synthetic construct
  REGION 1..9: note = Description of Artificial Sequence: Synthetic peptide
TSLLHPVSL

SEQ ID NO: 4972 - protein, 8 aa, synthetic construct
  REGION 1..8: note = Description of Artificial Sequence: Synthetic peptide
DSAIRKAL

SEQ ID NO: 4973 - protein, 9 aa, synthetic construct
  REGION 1..9: note = Description of Artificial Sequence: Synthetic peptide
YPGIKVKQL

SEQ ID NO: 4974 - protein, 9 aa, synthetic construct
  REGION 1..9: note = Description of Artificial Sequence: Synthetic peptide
YPLTSLRSL

SEQ ID NO: 4975 - protein, 9 aa, synthetic construct
  REGION 1..9: note = Description of Artificial Sequence: Synthetic peptide
YPLTALKSL

SEQ ID NO: 4976 - protein, 9 aa, synthetic construct
  REGION 1..9: note = Description of Artificial Sequence: Synthetic peptide
VPLTKEAEL

SEQ ID NO: 4977 - protein, 9 aa, synthetic construct
  REGION 1..9: note = Description of Artificial Sequence: Synthetic peptide
DVKQLTEAV

SEQ ID NO: 4978 - protein, 8 aa, synthetic construct
  REGION 1..8: note = Description of Artificial Sequence: Synthetic peptide
IQKEKVYL

SEQ ID NO: 4979 - protein, 8 aa, synthetic construct
  REGION 1..8: note = Description of Artificial Sequence: Synthetic peptide
TTNQKTEL

SEQ ID NO: 4980 - protein, 9 aa, synthetic construct
  REGION 1..9: note = Description of Artificial Sequence: Synthetic peptide
QLQARILAV

SEQ ID NO: 4981 - protein, 8 aa, synthetic construct
  REGION 1..8: note = Description of Artificial Sequence: Synthetic peptide
HLKTAVQM

SEQ ID NO: 4982 - protein, 9 aa, synthetic construct
  REGION 1..9: note = Description of Artificial Sequence: Synthetic peptide
ELKSLFNTV

SEQ ID NO: 4983 - protein, 11 aa, synthetic construct
  REGION 1..11: note = Description of Artificial Sequence: Synthetic peptide
TQVDPELADQL

SEQ ID NO: 4984 - protein, 11 aa, synthetic construct
  REGION 1..11: note = Description of Artificial Sequence: Synthetic peptide
TQVDPGLADQL

SEQ ID NO: 4985 - protein, 11 aa, synthetic construct
  REGION 1..11: note = Description of Artificial Sequence: Synthetic peptide
TQVDPDLADQL

SEQ ID NO: 4986 - protein, 9 aa, synthetic construct
  REGION 1..9: note = Description of Artificial Sequence: Synthetic peptide
KQMAGDDCM

SEQ ID NO: 4987 - protein, 9 aa, synthetic construct
  REGION 1..9: note = Description of Artificial Sequence: Synthetic peptide
SQVTSAPAI

SEQ ID NO: 4988 - protein, 10 aa, synthetic construct
  REGION 1..10: note = Description of Artificial Sequence: Synthetic peptide
GQVRDQAEHL

SEQ ID NO: 4989 - protein, 10 aa, synthetic construct
  REGION 1..10: note = Description of Artificial Sequence: Synthetic peptide
GTQGVGDPQI

SEQ ID NO: 4990 - protein, 10 aa, synthetic construct
  REGION 1..10: note = Description of Artificial Sequence: Synthetic peptide
AQEEEGEVGF

SEQ ID NO: 4991 - protein, 9 aa, synthetic construct
  REGION 1..9: note = Description of Artificial Sequence: Synthetic peptide
AQEEEEVGF

SEQ ID NO: 4992 - protein, 9 aa, synthetic construct
  REGION 1..9: note = Description of Artificial Sequence: Synthetic peptide
GTDRVIETI

SEQ ID NO: 4993 - protein, 9 aa, synthetic construct
  REGION 1..9: note = Description of Artificial Sequence: Synthetic peptide
TQGVGDPQI

SEQ ID NO: 4994 - protein, 10 aa, synthetic construct
  REGION 1..10: note = Description of Artificial Sequence: Synthetic peptide
KQLTEAVQKI

SEQ ID NO: 4995 - protein, 9 aa, synthetic construct
  REGION 1..9: note = Description of Artificial Sequence: Synthetic peptide
AQEDEEVGF

SEQ ID NO: 4996 - protein, 9 aa, synthetic construct
  REGION 1..9: note = Description of Artificial Sequence: Synthetic peptide
SQVTSAPAI

SEQ ID NO: 4997 - protein, 9 aa, synthetic construct
  REGION 1..9: note = Description of Artificial Sequence: Synthetic peptide
GAASVTLTV

SEQ ID NO: 4998 - protein, 9 aa, synthetic construct
  REGION 1..9: note = Description of Artificial Sequence: Synthetic peptide
QLTEAVQKI

SEQ ID NO: 4999 - protein, 9 aa, synthetic construct
  REGION 1..9: note = Description of Artificial Sequence: Synthetic peptide
SQIYAGIKV

SEQ ID NO: 5000 - protein, 8 aa, synthetic construct
  REGION 1..8: note = Description of Artificial Sequence: Synthetic peptide
GQMVHQAI

SEQ ID NO: 5001 - protein, 9 aa, synthetic construct
  REGION 1..9: note = Description of Artificial Sequence: Synthetic peptide
SQIYPGIKV

SEQ ID NO: 5002 - protein, 9 aa, synthetic construct
  REGION 1..9: note = Description of Artificial Sequence: Synthetic peptide
GAASMALTV

SEQ ID NO: 5003 - protein, 9 aa, synthetic construct
  REGION 1..9: note = Description of Artificial Sequence: Synthetic peptide
QQHLLQLTV

SEQ ID NO: 5004 - protein, 9 aa, synthetic construct
  REGION 1..9: note = Description of Artificial Sequence: Synthetic peptide
VQKITTESI

SEQ ID NO: 5005 - protein, 9 aa, synthetic construct
  REGION 1..9: note = Description of Artificial Sequence: Synthetic peptide
GQVDCSPGI

SEQ ID NO: 5006 - protein, 9 aa, synthetic construct
  REGION 1..9: note = Description of Artificial Sequence: Synthetic peptide
SQVTNSATI

SEQ ID NO: 5007 - protein, 9 aa, synthetic construct
  REGION 1..9: note = Description of Artificial Sequence: Synthetic peptide
GAASMTLTV

SEQ ID NO: 5008 - protein, 9 aa, synthetic construct
  REGION 1..9: note = Description of Artificial Sequence: Synthetic peptide
VQKIATESI

SEQ ID NO: 5009 - protein, 9 aa, synthetic construct
  REGION 1..9: note = Description of Artificial Sequence: Synthetic peptide
VQLKEPVEI

SEQ ID NO: 5010 - protein, 9 aa, synthetic construct
  REGION 1..9: note = Description of Artificial Sequence: Synthetic peptide
GQGQWTYQI

SEQ ID NO: 5011 - protein, 9 aa, synthetic construct
  REGION 1..9: note = Description of Artificial Sequence: Synthetic peptide
AVLSIVNRV

SEQ ID NO: 5012 - protein, 11 aa, synthetic construct
  REGION 1..11: note = Description of Artificial Sequence: Synthetic peptide
AQAGPIAPGQI

SEQ ID NO: 5013 - protein, 9 aa, synthetic construct
  REGION 1..9: note = Description of Artificial Sequence: Synthetic peptide
VQLNTSVEI

SEQ ID NO: 5014 - protein, 9 aa, synthetic construct
  REGION 1..9: note = Description of Artificial Sequence: Synthetic peptide
GQLQPALQT

SEQ ID NO: 5015 - protein, 8 aa, synthetic construct
  REGION 1..8: note = Description of Artificial Sequence: Synthetic peptide
SQIIEQLI

SEQ ID NO: 5016 - protein, 9 aa, synthetic construct
  REGION 1..9: note = Description of Artificial Sequence: Synthetic peptide
GQISCSSNI

SEQ ID NO: 5017 - protein, 9 aa, synthetic construct
  REGION 1..9: note = Description of Artificial Sequence: Synthetic peptide
AILNIPTRI

SEQ ID NO: 5018 - protein, 10 aa, synthetic construct
  REGION 1..10: note = Description of Artificial Sequence: Synthetic peptide
RQYDQIPIEI

SEQ ID NO: 5019 - protein, 9 aa, synthetic construct
  REGION 1..9: note = Description of Artificial Sequence: Synthetic peptide
RVIEVLQRV

SEQ ID NO: 5020 - protein, 9 aa, synthetic construct
  REGION 1..9: note = Description of Artificial Sequence: Synthetic peptide
VLAEAMSQV

SEQ ID NO: 5021 - protein, 9 aa, synthetic construct
  REGION 1..9: note = Description of Artificial Sequence: Synthetic peptide
VQNIQGQMV

SEQ ID NO: 5022 - protein, 10 aa, synthetic construct
  REGION 1..10: note = Description of Artificial Sequence: Synthetic peptide
KQLTEAVQKI

SEQ ID NO: 5023 - protein, 8 aa, synthetic construct
  REGION 1..8: note = Description of Artificial Sequence: Synthetic peptide
NQIIEQLI

SEQ ID NO: 5024 - protein, 9 aa, synthetic construct
  REGION 1..9: note = Description of Artificial Sequence: Synthetic peptide
TQPIPIVAI

SEQ ID NO: 5025 - protein, 9 aa, synthetic construct
  REGION 1..9: note = Description of Artificial Sequence: Synthetic peptide
SQVTNSGAI

SEQ ID NO: 5026 - protein, 9 aa, synthetic construct
  REGION 1..9: note = Description of Artificial Sequence: Synthetic peptide
VVKIEPLGV

SEQ ID NO: 5027 - protein, 10 aa, synthetic construct
  REGION 1..10: note = Description of Artificial Sequence: Synthetic peptide
IQGQMVHQAI

SEQ ID NO: 5028 - protein, 9 aa, synthetic construct
  REGION 1..9: note = Description of Artificial Sequence: Synthetic peptide
GSNFTSTTV

SEQ ID NO: 5029 - protein, 9 aa, synthetic construct
  REGION 1..9: note = Description of Artificial Sequence: Synthetic peptide
VQLKESVEI

SEQ ID NO: 5030 - protein, 9 aa, synthetic construct
  REGION 1..9: note = Description of Artificial Sequence: Synthetic peptide
QNYPIVQNI

SEQ ID NO: 5031 - protein, 9 aa, synthetic construct
  REGION 1..9: note = Description of Artificial Sequence: Synthetic peptide
GQLQPSLQT

SEQ ID NO: 5032 - protein, 9 aa, synthetic construct
  REGION 1..9: note = Description of Artificial Sequence: Synthetic peptide
SQVSQNYPI

SEQ ID NO: 5033 - protein, 9 aa, synthetic construct
  REGION 1..9: note = Description of Artificial Sequence: Synthetic peptide
TVLSIVNRV

SEQ ID NO: 5034 - protein, 9 aa, synthetic construct
  REGION 1..9: note = Description of Artificial Sequence: Synthetic peptide
VQNMQGQMV

SEQ ID NO: 5035 - protein, 9 aa, synthetic construct
  REGION 1..9: note = Description of Artificial Sequence: Synthetic peptide
TQGVGSPQI

SEQ ID NO: 5036 - protein, 8 aa, synthetic construct
  REGION 1..8: note = Description of Artificial Sequence: Synthetic peptide
SQGVVESI

SEQ ID NO: 5037 - protein, 9 aa, synthetic construct
  REGION 1..9: note = Description of Artificial Sequence: Synthetic peptide
NQKTELQAI

SEQ ID NO: 5038 - protein, 9 aa, synthetic construct
  REGION 1..9: note = Description of Artificial Sequence: Synthetic peptide
YQLEKEPIV

SEQ ID NO: 5039 - protein, 9 aa, synthetic construct
  REGION 1..9: note = Description of Artificial Sequence: Synthetic peptide
GSNFTGATV

SEQ ID NO: 5040 - protein, 9 aa, synthetic construct
  REGION 1..9: note = Description of Artificial Sequence: Synthetic peptide
ALQDSGLEV

SEQ ID NO: 5041 - protein, 9 aa, synthetic construct
  REGION 1..9: note = Description of Artificial Sequence: Synthetic peptide
DRQTHQASL

SEQ ID NO: 5042 - protein, 9 aa, synthetic construct
  REGION 1..9: note = Description of Artificial Sequence: Synthetic peptide
ERYLQDQQL

SEQ ID NO: 5043 - protein, 8 aa, synthetic construct
  REGION 1..8: note = Description of Artificial Sequence: Synthetic peptide
DSAIRNAL

SEQ ID NO: 5044 - protein, 9 aa, synthetic construct
  REGION 1..9: note = Description of Artificial Sequence: Synthetic peptide
ERYLKDQQL

SEQ ID NO: 5045 - protein, 9 aa, synthetic construct
  REGION 1..9: note = Description of Artificial Sequence: Synthetic peptide
ERFALNPGL

SEQ ID NO: 5046 - protein, 8 aa, synthetic construct
  REGION 1..8: note = Description of Artificial Sequence: Synthetic peptide
IRLVNGSL

SEQ ID NO: 5047 - protein, 8 aa, synthetic construct
  REGION 1..8: note = Description of Artificial Sequence: Synthetic peptide
DSAIRNAL

SEQ ID NO: 5048 - protein, 9 aa, synthetic construct
  REGION 1..9: note = Description of Artificial Sequence: Synthetic peptide
ERYLKDQQL

SEQ ID NO: 5049 - protein, 9 aa, synthetic construct
  REGION 1..9: note = Description of Artificial Sequence: Synthetic peptide
ERYLQDQQL

SEQ ID NO: 5050 - protein, 8 aa, synthetic construct
  REGION 1..8: note = Description of Artificial Sequence: Synthetic peptide
LQAIHLAL

SEQ ID NO: 5051 - protein, 9 aa, synthetic construct
  REGION 1..9: note = Description of Artificial Sequence: Synthetic peptide
DRQTHQASL

SEQ ID NO: 5052 - protein, 8 aa, synthetic construct
  REGION 1..8: note = Description of Artificial Sequence: Synthetic peptide
GQMVHQAI

SEQ ID NO: 5053 - protein, 8 aa, synthetic construct
  REGION 1..8: note = Description of Artificial Sequence: Synthetic peptide
DSAIRKAL

SEQ ID NO: 5054 - protein, 9 aa, synthetic construct
  REGION 1..9: note = Description of Artificial Sequence: Synthetic peptide
IQELRGSAV

SEQ ID NO: 5055 - protein, 9 aa, synthetic construct
  REGION 1..9: note = Description of Artificial Sequence: Synthetic peptide
YPLTSLRSL

SEQ ID NO: 5056 - protein, 9 aa, synthetic construct
  REGION 1..9: note = Description of Artificial Sequence: Synthetic peptide
RDLERHGAL

SEQ ID NO: 5057 - protein, 8 aa, synthetic construct
  REGION 1..8: note = Description of Artificial Sequence: Synthetic peptide
IQKLVGKL

SEQ ID NO: 5058 - protein, 8 aa, synthetic construct
  REGION 1..8: note = Description of Artificial Sequence: Synthetic peptide
DLERHGAL

SEQ ID NO: 5059 - protein, 9 aa, synthetic construct
  REGION 1..9: note = Description of Artificial Sequence: Synthetic peptide
DGEERNITL

SEQ ID NO: 5060 - protein, 10 aa, synthetic construct
  REGION 1..10: note = Description of Artificial Sequence: Synthetic peptide
VQMNNNNNSY

SEQ ID NO: 5061 - protein, 9 aa, synthetic construct
  REGION 1..9: note = Description of Artificial Sequence: Synthetic peptide
ITKGLGISY

SEQ ID NO: 5062 - protein, 9 aa, synthetic construct
  REGION 1..9: note = Description of Artificial Sequence: Synthetic peptide
ITKALGISY

SEQ ID NO: 5063 - protein, 9 aa, synthetic construct
  REGION 1..9: note = Description of Artificial Sequence: Synthetic peptide
KQNPEIVIY

SEQ ID NO: 5064 - protein, 9 aa, synthetic construct
  REGION 1..9: note = Description of Artificial Sequence: Synthetic peptide
KQNPDIVIY

SEQ ID NO: 5065 - protein, 9 aa, synthetic construct
  REGION 1..9: note = Description of Artificial Sequence: Synthetic peptide
TMGPGKVYY

SEQ ID NO: 5066 - protein, 9 aa, synthetic construct
  REGION 1..9: note = Description of Artificial Sequence: Synthetic peptide
SQKQEPQEY

SEQ ID NO: 5067 - protein, 9 aa, synthetic construct
  REGION 1..9: note = Description of Artificial Sequence: Synthetic peptide
QMNNNNNSY

SEQ ID NO: 5068 - protein, 9 aa, synthetic construct
  REGION 1..9: note = Description of Artificial Sequence: Synthetic peptide
HIVSPSCEY

SEQ ID NO: 5069 - protein, 9 aa, synthetic construct
  REGION 1..9: note = Description of Artificial Sequence: Synthetic peptide
ITMGPGKVY

SEQ ID NO: 5070 - protein, 9 aa, synthetic construct
  REGION 1..9: note = Description of Artificial Sequence: Synthetic peptide
TQACPKVSF

SEQ ID NO: 5071 - protein, 9 aa, synthetic construct
  REGION 1..9: note = Description of Artificial Sequence: Synthetic peptide
KQITKIQNF

SEQ ID NO: 5072 - protein, 9 aa, synthetic construct
  REGION 1..9: note = Description of Artificial Sequence: Synthetic peptide
VQKIATESI

SEQ ID NO: 5073 - protein, 8 aa, synthetic construct
  REGION 1..8: note = Description of Artificial Sequence: Synthetic peptide
GQHIYETY

SEQ ID NO: 5074 - protein, 9 aa, synthetic construct
  REGION 1..9: note = Description of Artificial Sequence: Synthetic peptide
KQGQGQWTY

SEQ ID NO: 5075 - protein, 9 aa, synthetic construct
  REGION 1..9: note = Description of Artificial Sequence: Synthetic peptide
TQIGCTLNF

SEQ ID NO: 5076 - protein, 9 aa, synthetic construct
  REGION 1..9: note = Description of Artificial Sequence: Synthetic peptide
VLVNVTENF

SEQ ID NO: 5077 - protein, 10 aa, synthetic construct
  REGION 1..10: note = Description of Artificial Sequence: Synthetic peptide
GANRQGTVSF

SEQ ID NO: 5078 - protein, 9 aa, synthetic construct
  REGION 1..9: note = Description of Artificial Sequence: Synthetic peptide
TVLDVGDAY

SEQ ID NO: 5079 - protein, 9 aa, synthetic construct
  REGION 1..9: note = Description of Artificial Sequence: Synthetic peptide
TMGPGRVYY

SEQ ID NO: 5080 - protein, 11 aa, synthetic construct
  REGION 1..11: note = Description of Artificial Sequence: Synthetic peptide
IVPINNDNTSY

SEQ ID NO: 5081 - protein, 10 aa, synthetic construct
  REGION 1..10: note = Description of Artificial Sequence: Synthetic peptide
ILKEPVHGVY

SEQ ID NO: 5082 - protein, 9 aa, synthetic construct
  REGION 1..9: note = Description of Artificial Sequence: Synthetic peptide
VQKITTESI

SEQ ID NO: 5083 - protein, 9 aa, synthetic construct
  REGION 1..9: note = Description of Artificial Sequence: Synthetic peptide
ALVEMGVEM

SEQ ID NO: 5084 - protein, 9 aa, synthetic construct
  REGION 1..9: note = Description of Artificial Sequence: Synthetic peptide
ITMGPGRVY

SEQ ID NO: 5085 - protein, 9 aa, synthetic construct
  REGION 1..9: note = Description of Artificial Sequence: Synthetic peptide
PINNDNTSY

SEQ ID NO: 5086 - protein, 9 aa, synthetic construct
  REGION 1..9: note = Description of Artificial Sequence: Synthetic peptide
IQKQGQGQW

SEQ ID NO: 5087 - protein, 10 aa, synthetic construct
  REGION 1..10: note = Description of Artificial Sequence: Synthetic peptide
ITMGPGKVYY

SEQ ID NO: 5088 - protein, 9 aa, synthetic construct
  REGION 1..9: note = Description of Artificial Sequence: Synthetic peptide
ALVEICTEM

SEQ ID NO: 5089 - protein, 8 aa, synthetic construct
  REGION 1..8: note = Description of Artificial Sequence: Synthetic peptide
AVHVASGY

SEQ ID NO: 5090 - protein, 8 aa, synthetic construct
  REGION 1..8: note = Description of Artificial Sequence: Synthetic peptide
AELVVTTY

SEQ ID NO: 5091 - protein, 9 aa, synthetic construct
  REGION 1..9: note = Description of Artificial Sequence: Synthetic peptide
IQRGPGRAF

SEQ ID NO: 5092 - protein, 10 aa, synthetic construct
  REGION 1..10: note = Description of Artificial Sequence: Synthetic peptide
EQFNNNTIVF

SEQ ID NO: 5093 - protein, 9 aa, synthetic construct
  REGION 1..9: note = Description of Artificial Sequence: Synthetic peptide
LSKQPTSQL

SEQ ID NO: 5094 - protein, 9 aa, synthetic construct
  REGION 1..9: note = Description of Artificial Sequence: Synthetic peptide
HSNQVSQNY

SEQ ID NO: 5095 - protein, 9 aa, synthetic construct
  REGION 1..9: note = Description of Artificial Sequence: Synthetic peptide
ALAEICAEM

SEQ ID NO: 5096 - protein, 9 aa, synthetic construct
  REGION 1..9: note = Description of Artificial Sequence: Synthetic peptide
FLGAAGSTM

SEQ ID NO: 5097 - protein, 8 aa, synthetic construct
  REGION 1..8: note = Description of Artificial Sequence: Synthetic peptide
GQMVHQAI

SEQ ID NO: 5098 - protein, 9 aa, synthetic construct
  REGION 1..9: note = Description of Artificial Sequence: Synthetic peptide
KNNPVSQNY

SEQ ID NO: 5099 - protein, 10 aa, synthetic construct
  REGION 1..10: note = Description of Artificial Sequence: Synthetic peptide
ILKETVHGVY

SEQ ID NO: 5100 - protein, 11 aa, synthetic construct
  REGION 1..11: note = Description of Artificial Sequence: Synthetic peptide
IQKQGQGQWTY

SEQ ID NO: 5101 - protein, 10 aa, synthetic construct
  REGION 1..10: note = Description of Artificial Sequence: Synthetic peptide
IPIDNDTTSY

SEQ ID NO: 5102 - protein, 11 aa, synthetic construct
  REGION 1..11: note = Description of Artificial Sequence: Synthetic peptide
KQNPDIVIYQY

SEQ ID NO: 5103 - protein, 9 aa, synthetic construct
  REGION 1..9: note = Description of Artificial Sequence: Synthetic peptide
LQILGIVAL

SEQ ID NO: 5104 - protein, 8 aa, synthetic construct
  REGION 1..8: note = Description of Artificial Sequence: Synthetic peptide
TMGPGKVY

SEQ ID NO: 5105 - protein, 11 aa, synthetic construct
  REGION 1..11: note = Description of Artificial Sequence: Synthetic peptide
KQNPEIVIYQY

SEQ ID NO: 5106 - protein, 8 aa, synthetic construct
  REGION 1..8: note = Description of Artificial Sequence: Synthetic peptide
TMGPGRVY

SEQ ID NO: 5107 - protein, 9 aa, synthetic construct
  REGION 1..9: note = Description of Artificial Sequence: Synthetic peptide
DARLVITTY

SEQ ID NO: 5108 - protein, 9 aa, synthetic construct
  REGION 1..9: note = Description of Artificial Sequence: Synthetic peptide
HIVSPSCEY

SEQ ID NO: 5109 - protein, 9 aa, synthetic construct
  REGION 1..9: note = Description of Artificial Sequence: Synthetic peptide
TVLDVGDAY

SEQ ID NO: 5110 - protein, 10 aa, synthetic construct
  REGION 1..10: note = Description of Artificial Sequence: Synthetic peptide
IPIDNDTTSY

SEQ ID NO: 5111 - protein, 9 aa, synthetic construct
  REGION 1..9: note = Description of Artificial Sequence: Synthetic peptide
FLGAAGSTM

SEQ ID NO: 5112 - protein, 8 aa, synthetic construct
  REGION 1..8: note = Description of Artificial Sequence: Synthetic peptide
DQLIHVYY

SEQ ID NO: 5113 - protein, 9 aa, synthetic construct
  REGION 1..9: note = Description of Artificial Sequence: Synthetic peptide
TQACPKVSF

SEQ ID NO: 5114 - protein, 9 aa, synthetic construct
  REGION 1..9: note = Description of Artificial Sequence: Synthetic peptide
TMGPGKVYY

SEQ ID NO: 5115 - protein, 9 aa, synthetic construct
  REGION 1..9: note = Description of Artificial Sequence: Synthetic peptide
TVGGHQAAM

SEQ ID NO: 5116 - protein, 9 aa, synthetic construct
  REGION 1..9: note = Description of Artificial Sequence: Synthetic peptide
EAKLVITTY

SEQ ID NO: 5117 - protein, 8 aa, synthetic construct
  REGION 1..8: note = Description of Artificial Sequence: Synthetic peptide
EQLWVTVY

SEQ ID NO: 5118 - protein, 9 aa, synthetic construct
  REGION 1..9: note = Description of Artificial Sequence: Synthetic peptide
YSTQVDPEL

SEQ ID NO: 5119 - protein, 8 aa, synthetic construct
  REGION 1..8: note = Description of Artificial Sequence: Synthetic peptide
TMGPGRVY

SEQ ID NO: 5120 - protein, 10 aa, synthetic construct
  REGION 1..10: note = Description of Artificial Sequence: Synthetic peptide
EQFNNNTIVF

SEQ ID NO: 5121 - protein, 9 aa, synthetic construct
  REGION 1..9: note = Description of Artificial Sequence: Synthetic peptide
QMNNNNNSY

SEQ ID NO: 5122 - protein, 9 aa, synthetic construct
  REGION 1..9: note = Description of Artificial Sequence: Synthetic peptide
AAVDLSHFL

SEQ ID NO: 5123 - protein, 9 aa, synthetic construct
  REGION 1..9: note = Description of Artificial Sequence: Synthetic peptide
DAELVVTTY

SEQ ID NO: 5124 - protein, 9 aa, synthetic construct
  REGION 1..9: note = Description of Artificial Sequence: Synthetic peptide
TMGPGRVYY

SEQ ID NO: 5125 - protein, 10 aa, synthetic construct
  REGION 1..10: note = Description of Artificial Sequence: Synthetic peptide
VPINNDNTSY

SEQ ID NO: 5126 - protein, 8 aa, synthetic construct
  REGION 1..8: note = Description of Artificial Sequence: Synthetic peptide
DNYTSLIY

SEQ ID NO: 5127 - protein, 10 aa, synthetic construct
  REGION 1..10: note = Description of Artificial Sequence: Synthetic peptide
VQMNNNNNSY

SEQ ID NO: 5128 - protein, 8 aa, synthetic construct
  REGION 1..8: note = Description of Artificial Sequence: Synthetic peptide
TMGPGKVY

SEQ ID NO: 5129 - protein, 9 aa, synthetic construct
  REGION 1..9: note = Description of Artificial Sequence: Synthetic peptide
ALVEMGVEM

SEQ ID NO: 5130 - protein, 9 aa, synthetic construct
  REGION 1..9: note = Description of Artificial Sequence: Synthetic peptide
DNRQGTISF

SEQ ID NO: 5131 - protein, 9 aa, synthetic construct
  REGION 1..9: note = Description of Artificial Sequence: Synthetic peptide
FPQGEAREF

SEQ ID NO: 5132 - protein, 8 aa, synthetic construct
  REGION 1..8: note = Description of Artificial Sequence: Synthetic peptide
DQLIHLYY

SEQ ID NO: 5133 - protein, 9 aa, synthetic construct
  REGION 1..9: note = Description of Artificial Sequence: Synthetic peptide
IQRGPGRAF

SEQ ID NO: 5134 - protein, 9 aa, synthetic construct
  REGION 1..9: note = Description of Artificial Sequence: Synthetic peptide
SAEPVPLQL

SEQ ID NO: 5135 - protein, 9 aa, synthetic construct
  REGION 1..9: note = Description of Artificial Sequence: Synthetic peptide
DIAGTTSTL

SEQ ID NO: 5136 - protein, 9 aa, synthetic construct
  REGION 1..9: note = Description of Artificial Sequence: Synthetic peptide
ITKGLGISY

SEQ ID NO: 5137 - protein, 10 aa, synthetic construct
  REGION 1..10: note = Description of Artificial Sequence: Synthetic peptide
EVNIVTDSQY

SEQ ID NO: 5138 - protein, 8 aa, synthetic construct
  REGION 1..8: note = Description of Artificial Sequence: Synthetic peptide
AKLVITTY

SEQ ID NO: 5139 - protein, 9 aa, synthetic construct
  REGION 1..9: note = Description of Artificial Sequence: Synthetic peptide
TKKALGISY

SEQ ID NO: 5140 - protein, 8 aa, synthetic construct
  REGION 1..8: note = Description of Artificial Sequence: Synthetic peptide
TKALGISY

SEQ ID NO: 5141 - protein, 10 aa, synthetic construct
  REGION 1..10: note = Description of Artificial Sequence: Synthetic peptide
GKNNPVSQNY

SEQ ID NO: 5142 - protein, 8 aa, synthetic construct
  REGION 1..8: note = Description of Artificial Sequence: Synthetic peptide
TKGLGISY

SEQ ID NO: 5143 - protein, 10 aa, synthetic construct
  REGION 1..10: note = Description of Artificial Sequence: Synthetic peptide
VQMNNNNNSY

SEQ ID NO: 5144 - protein, 9 aa, synthetic construct
  REGION 1..9: note = Description of Artificial Sequence: Synthetic peptide
QKTELQAIY

SEQ ID NO: 5145 - protein, 9 aa, synthetic construct
  REGION 1..9: note = Description of Artificial Sequence: Synthetic peptide
ITKGLGISY

SEQ ID NO: 5146 - protein, 9 aa, synthetic construct
  REGION 1..9: note = Description of Artificial Sequence: Synthetic peptide
SKIGPENPY

SEQ ID NO: 5147 - protein, 8 aa, synthetic construct
  REGION 1..8: note = Description of Artificial Sequence: Synthetic peptide
KKALGISY

SEQ ID NO: 5148 - protein, 9 aa, synthetic construct
  REGION 1..9: note = Description of Artificial Sequence: Synthetic peptide
ITKALGISY

SEQ ID NO: 5149 - protein, 9 aa, synthetic construct
  REGION 1..9: note = Description of Artificial Sequence: Synthetic peptide
KQNPEIVIY

SEQ ID NO: 5150 - protein, 9 aa, synthetic construct
  REGION 1..9: note = Description of Artificial Sequence: Synthetic peptide
KQNPDIVIY

SEQ ID NO: 5151 - protein, 9 aa, synthetic construct
  REGION 1..9: note = Description of Artificial Sequence: Synthetic peptide
ADRQGTVSF

SEQ ID NO: 5152 - protein, 9 aa, synthetic construct
  REGION 1..9: note = Description of Artificial Sequence: Synthetic peptide
GKVQKEYAF

SEQ ID NO: 5153 - protein, 8 aa, synthetic construct
  REGION 1..8: note = Description of Artificial Sequence: Synthetic peptide
HKTIGTVL

SEQ ID NO: 5154 - protein, 8 aa, synthetic construct
  REGION 1..8: note = Description of Artificial Sequence: Synthetic peptide
HKAIGTVL

SEQ ID NO: 5155 - protein, 9 aa, synthetic construct
  REGION 1..9: note = Description of Artificial Sequence: Synthetic peptide
IQRGPGRAF

SEQ ID NO: 5156 - protein, 9 aa, synthetic construct
  REGION 1..9: note = Description of Artificial Sequence: Synthetic peptide
SQKQEPQEY

SEQ ID NO: 5157 - protein, 9 aa, synthetic construct
  REGION 1..9: note = Description of Artificial Sequence: Synthetic peptide
TMGPGKVYY

SEQ ID NO: 5158 - protein, 9 aa, synthetic construct
  REGION 1..9: note = Description of Artificial Sequence: Synthetic peptide
KQGQGQWTY

SEQ ID NO: 5159 - protein, 9 aa, synthetic construct
  REGION 1..9: note = Description of Artificial Sequence: Synthetic peptide
KNNPVSQNY

SEQ ID NO: 5160 - protein, 9 aa, synthetic construct
  REGION 1..9: note = Description of Artificial Sequence: Synthetic peptide
VKVIEEKAF

SEQ ID NO: 5161 - protein, 9 aa, synthetic construct
  REGION 1..9: note = Description of Artificial Sequence: Synthetic peptide
VKVVEEKAF

SEQ ID NO: 5162 - protein, 9 aa, synthetic construct
  REGION 1..9: note = Description of Artificial Sequence: Synthetic peptide
KQITKIQNF

SEQ ID NO: 5163 - protein, 9 aa, synthetic construct
  REGION 1..9: note = Description of Artificial Sequence: Synthetic peptide
TQACPKVSF

SEQ ID NO: 5164 - protein, 9 aa, synthetic construct
  REGION 1..9: note = Description of Artificial Sequence: Synthetic peptide
GHKAIGTVL

SEQ ID NO: 5165 - protein, 9 aa, synthetic construct
  REGION 1..9: note = Description of Artificial Sequence: Synthetic peptide
THLEGKVIL

SEQ ID NO: 5166 - protein, 9 aa, synthetic construct
  REGION 1..9: note = Description of Artificial Sequence: Synthetic peptide
HQAISPRTL

SEQ ID NO: 5167 - protein, 9 aa, synthetic construct
  REGION 1..9: note = Description of Artificial Sequence: Synthetic peptide
GHKTIGTVL

SEQ ID NO: 5168 - protein, 9 aa, synthetic construct
  REGION 1..9: note = Description of Artificial Sequence: Synthetic peptide
EHLKTAVQM

SEQ ID NO: 5169 - protein, 9 aa, synthetic construct
  REGION 1..9: note = Description of Artificial Sequence: Synthetic peptide
THLEGRVIL

SEQ ID NO: 5170 - protein, 8 aa, synthetic construct
  REGION 1..8: note = Description of Artificial Sequence: Synthetic peptide
FHHVAREL

SEQ ID NO: 5171 - protein, 9 aa, synthetic construct
  REGION 1..9: note = Description of Artificial Sequence: Synthetic peptide
IHIGPGRAF

SEQ ID NO: 5172 - protein, 9 aa, synthetic construct
  REGION 1..9: note = Description of Artificial Sequence: Synthetic peptide
THLEGKIIL

SEQ ID NO: 5173 - protein, 9 aa, synthetic construct
  REGION 1..9: note = Description of Artificial Sequence: Synthetic peptide
GHQAAMQML

SEQ ID NO: 5174 - protein, 9 aa, synthetic construct
  REGION 1..9: note = Description of Artificial Sequence: Synthetic peptide
IHSISERIL

SEQ ID NO: 5175 - protein, 9 aa, synthetic construct
  REGION 1..9: note = Description of Artificial Sequence: Synthetic peptide
SQVTSAPAI

SEQ ID NO: 5176 - protein, 9 aa, synthetic construct
  REGION 1..9: note = Description of Artificial Sequence: Synthetic peptide
AHTNDVKQL

SEQ ID NO: 5177 - protein, 10 aa, synthetic construct
  REGION 1..10: note = Description of Artificial Sequence: Synthetic peptide
VHIPLGEASL

SEQ ID NO: 5178 - protein, 9 aa, synthetic construct
  REGION 1..9: note = Description of Artificial Sequence: Synthetic peptide
IHTDNGPNF

SEQ ID NO: 5179 - protein, 8 aa, synthetic construct
  REGION 1..8: note = Description of Artificial Sequence: Synthetic peptide
THLEGRVI

SEQ ID NO: 5180 - protein, 10 aa, synthetic construct
  REGION 1..10: note = Description of Artificial Sequence: Synthetic peptide
HHAPWNIDDL

SEQ ID NO: 5181 - protein, 9 aa, synthetic construct
  REGION 1..9: note = Description of Artificial Sequence: Synthetic peptide
SQIYPGIKV

SEQ ID NO: 5182 - protein, 8 aa, synthetic construct
  REGION 1..8: note = Description of Artificial Sequence: Synthetic peptide
THLEGKVI

SEQ ID NO: 5183 - protein, 9 aa, synthetic construct
  REGION 1..9: note = Description of Artificial Sequence: Synthetic peptide
TVLDVGDAY

SEQ ID NO: 5184 - protein, 9 aa, synthetic construct
  REGION 1..9: note = Description of Artificial Sequence: Synthetic peptide
TINEEAAEW

SEQ ID NO: 5185 - protein, 9 aa, synthetic construct
  REGION 1..9: note = Description of Artificial Sequence: Synthetic peptide
YSTQVDPEL

SEQ ID NO: 5186 - protein, 8 aa, synthetic construct
  REGION 1..8: note = Description of Artificial Sequence: Synthetic peptide
AELVVTTY

SEQ ID NO: 5187 - protein, 9 aa, synthetic construct
  REGION 1..9: note = Description of Artificial Sequence: Synthetic peptide
TENLWVTVY

SEQ ID NO: 5188 - protein, 8 aa, synthetic construct
  REGION 1..8: note = Description of Artificial Sequence: Synthetic peptide
NETPGIRY

SEQ ID NO: 5189 - protein, 8 aa, synthetic construct
  REGION 1..8: note = Description of Artificial Sequence: Synthetic peptide
DEELIRTV

SEQ ID NO: 5190 - protein, 8 aa, synthetic construct
  REGION 1..8: note = Description of Artificial Sequence: Synthetic peptide
EEVVIRSV

SEQ ID NO: 5191 - protein, 10 aa, synthetic construct
  REGION 1..10: note = Description of Artificial Sequence: Synthetic peptide
SEAGATRISF

SEQ ID NO: 5192 - protein, 11 aa, synthetic construct
  REGION 1..11: note = Description of Artificial Sequence: Synthetic peptide
LEVNIVTDSQY

SEQ ID NO: 5193 - protein, 8 aa, synthetic construct
  REGION 1..8: note = Description of Artificial Sequence: Synthetic peptide
PEIVIYQY

SEQ ID NO: 5194 - protein, 8 aa, synthetic construct
  REGION 1..8: note = Description of Artificial Sequence: Synthetic peptide
IEIVQRTF

SEQ ID NO: 5195 - protein, 8 aa, synthetic construct
  REGION 1..8: note = Description of Artificial Sequence: Synthetic peptide
SERILGTY

SEQ ID NO: 5196 - protein, 8 aa, synthetic construct
  REGION 1..8: note = Description of Artificial Sequence: Synthetic peptide
IETIQRAF

SEQ ID NO: 5197 - protein, 8 aa, synthetic construct
  REGION 1..8: note = Description of Artificial Sequence: Synthetic peptide
DEELLRTV

SEQ ID NO: 5198 - protein, 8 aa, synthetic construct
  REGION 1..8: note = Description of Artificial Sequence: Synthetic peptide
LENVTENF

SEQ ID NO: 5199 - protein, 9 aa, synthetic construct
  REGION 1..9: note = Description of Artificial Sequence: Synthetic peptide
YETEVHNVW

SEQ ID NO: 5200 - protein, 8 aa, synthetic construct
  REGION 1..8: note = Description of Artificial Sequence: Synthetic peptide
TELQAIHL

SEQ ID NO: 5201 - protein, 8 aa, synthetic construct
  REGION 1..8: note = Description of Artificial Sequence: Synthetic peptide
NETEIFRP

SEQ ID NO: 5202 - protein, 8 aa, synthetic construct
  REGION 1..8: note = Description of Artificial Sequence: Synthetic peptide
TEIVPLTA

SEQ ID NO: 5203 - protein, 8 aa, synthetic construct
  REGION 1..8: note = Description of Artificial Sequence: Synthetic peptide
IEVLQRVY

SEQ ID NO: 5204 - protein, 9 aa, synthetic construct
  REGION 1..9: note = Description of Artificial Sequence: Synthetic peptide
ARVLAVERY

SEQ ID NO: 5205 - protein, 10 aa, synthetic construct
  REGION 1..10: note = Description of Artificial Sequence: Synthetic peptide
GNSSQVSQNY

SEQ ID NO: 5206 - protein, 10 aa, synthetic construct
  REGION 1..10: note = Description of Artificial Sequence: Synthetic peptide
VRQGYSPLSF

SEQ ID NO: 5207 - protein, 9 aa, synthetic construct
  REGION 1..9: note = Description of Artificial Sequence: Synthetic peptide
ARILAVERY

SEQ ID NO: 5208 - protein, 9 aa, synthetic construct
  REGION 1..9: note = Description of Artificial Sequence: Synthetic peptide
ARVLAIERY

SEQ ID NO: 5209 - protein, 11 aa, synthetic construct
  REGION 1..11: note = Description of Artificial Sequence: Synthetic peptide
LIYTLIEDSQK

SEQ ID NO: 5210 - protein, 9 aa, synthetic construct
  REGION 1..9: note = Description of Artificial Sequence: Synthetic peptide
YETEVHNVW

SEQ ID NO: 5211 - protein, 10 aa, synthetic construct
  REGION 1..10: note = Description of Artificial Sequence: Synthetic peptide
DRSGPLVDGF

SEQ ID NO: 5212 - protein, 11 aa, synthetic construct
  REGION 1..11: note = Description of Artificial Sequence: Synthetic peptide
YLALAALITPK

SEQ ID NO: 5213 - protein, 11 aa, synthetic construct
  REGION 1..11: note = Description of Artificial Sequence: Synthetic peptide
KEAELELAENR

SEQ ID NO: 5214 - protein, 9 aa, synthetic construct
  REGION 1..9: note = Description of Artificial Sequence: Synthetic peptide
ALAALITPK

SEQ ID NO: 5215 - protein, 9 aa, synthetic construct
  REGION 1..9: note = Description of Artificial Sequence: Synthetic peptide
SRIGITLQR

SEQ ID NO: 5216 - protein, 11 aa, synthetic construct
  REGION 1..11: note = Description of Artificial Sequence: Synthetic peptide
LIGESQIQQEK

SEQ ID NO: 5217 - protein, 11 aa, synthetic construct
  REGION 1..11: note = Description of Artificial Sequence: Synthetic peptide
TAIAVAEGTDR

SEQ ID NO: 5218 - protein, 11 aa, synthetic construct
  REGION 1..11: note = Description of Artificial Sequence: Synthetic peptide
YLALAVLITPK

SEQ ID NO: 5219 - protein, 10 aa, synthetic construct
  REGION 1..10: note = Description of Artificial Sequence: Synthetic peptide
GALDLSHFLK

SEQ ID NO: 5220 - protein, 9 aa, synthetic construct
  REGION 1..9: note = Description of Artificial Sequence: Synthetic peptide
ALAVLITPK

SEQ ID NO: 5221 - protein, 11 aa, synthetic construct
  REGION 1..11: note = Description of Artificial Sequence: Synthetic peptide
YATGEIIGDIR

SEQ ID NO: 5222 - protein, 9 aa, synthetic construct
  REGION 1..9: note = Description of Artificial Sequence: Synthetic peptide
TRIVELLGR

SEQ ID NO: 5223 - protein, 9 aa, synthetic construct
  REGION 1..9: note = Description of Artificial Sequence: Synthetic peptide
SRIGITLQR

SEQ ID NO: 5224 - protein, 9 aa, synthetic construct
  REGION 1..9: note = Description of Artificial Sequence: Synthetic peptide
SRIGIIRQR

SEQ ID NO: 5225 - protein, 9 aa, synthetic construct
  REGION 1..9: note = Description of Artificial Sequence: Synthetic peptide
SRIGVTRQR

SEQ ID NO: 5226 - protein, 9 aa, synthetic construct
  REGION 1..9: note = Description of Artificial Sequence: Synthetic peptide
GRAFVTIGK

SEQ ID NO: 5227 - protein, 9 aa, synthetic construct
  REGION 1..9: note = Description of Artificial Sequence: Synthetic peptide
GRVILVAVH

SEQ ID NO: 5228 - protein, 9 aa, synthetic construct
  REGION 1..9: note = Description of Artificial Sequence: Synthetic peptide
ARVLAVERY

SEQ ID NO: 5229 - protein, 9 aa, synthetic construct
  REGION 1..9: note = Description of Artificial Sequence: Synthetic peptide
ARIEVKDTK

SEQ ID NO: 5230 - protein, 9 aa, synthetic construct
  REGION 1..9: note = Description of Artificial Sequence: Synthetic peptide
ARILAVERY

SEQ ID NO: 5231 - protein, 9 aa, synthetic construct
  REGION 1..9: note = Description of Artificial Sequence: Synthetic peptide
QRIEIKDTK

SEQ ID NO: 5232 - protein, 9 aa, synthetic construct
  REGION 1..9: note = Description of Artificial Sequence: Synthetic peptide
ARVLAIERY

SEQ ID NO: 5233 - protein, 9 aa, synthetic construct
  REGION 1..9: note = Description of Artificial Sequence: Synthetic peptide
CRIKQIVNM

SEQ ID NO: 5234 - protein, 9 aa, synthetic construct
  REGION 1..9: note = Description of Artificial Sequence: Synthetic peptide
QRIEVRDTK

SEQ ID NO: 5235 - protein, 9 aa, synthetic construct
  REGION 1..9: note = Description of Artificial Sequence: Synthetic peptide
CRIKQIINR

SEQ ID NO: 5236 - protein, 9 aa, synthetic construct
  REGION 1..9: note = Description of Artificial Sequence: Synthetic peptide
GRQKVIPIK

SEQ ID NO: 5237 - protein, 9 aa, synthetic construct
  REGION 1..9: note = Description of Artificial Sequence: Synthetic peptide
TRKGLGISY

SEQ ID NO: 5238 - protein, 9 aa, synthetic construct
  REGION 1..9: note = Description of Artificial Sequence: Synthetic peptide
TRIEELRQH

SEQ ID NO: 5239 - protein, 10 aa, synthetic construct
  REGION 1..10: note = Description of Artificial Sequence: Synthetic peptide
IPIDNDTTSY

SEQ ID NO: 5240 - protein, 10 aa, synthetic construct
  REGION 1..10: note = Description of Artificial Sequence: Synthetic peptide
VPINNDNTSY

SEQ ID NO: 5241 - protein, 11 aa, synthetic construct
  REGION 1..11: note = Description of Artificial Sequence: Synthetic peptide
IPAETGQETAY

SEQ ID NO: 5242 - protein, 10 aa, synthetic construct
  REGION 1..10: note = Description of Artificial Sequence: Synthetic peptide
VPIDNDSYSY

SEQ ID NO: 5243 - protein, 9 aa, synthetic construct
  REGION 1..9: note = Description of Artificial Sequence: Synthetic peptide
NPDIVIYQY

SEQ ID NO: 5244 - protein, 9 aa, synthetic construct
  REGION 1..9: note = Description of Artificial Sequence: Synthetic peptide
EPIVGAETF

SEQ ID NO: 5245 - protein, 9 aa, synthetic construct
  REGION 1..9: note = Description of Artificial Sequence: Synthetic peptide
FPQGEAREF

SEQ ID NO: 5246 - protein, 9 aa, synthetic construct
  REGION 1..9: note = Description of Artificial Sequence: Synthetic peptide
EASLVIKTY

SEQ ID NO: 5247 - protein, 9 aa, synthetic construct
  REGION 1..9: note = Description of Artificial Sequence: Synthetic peptide
NPEIVIYQY

SEQ ID NO: 5248 - protein, 9 aa, synthetic construct
  REGION 1..9: note = Description of Artificial Sequence: Synthetic peptide
DAELVVTTY

SEQ ID NO: 5249 - protein, 9 aa, synthetic construct
  REGION 1..9: note = Description of Artificial Sequence: Synthetic peptide
TVLDVGDAY

SEQ ID NO: 5250 - protein, 8 aa, synthetic construct
  REGION 1..8: note = Description of Artificial Sequence: Synthetic peptide
TPGPGIRY

SEQ ID NO: 5251 - protein, 9 aa, synthetic construct
  REGION 1..9: note = Description of Artificial Sequence: Synthetic peptide
DPEIVTHSF

SEQ ID NO: 5252 - protein, 8 aa, synthetic construct
  REGION 1..8: note = Description of Artificial Sequence: Synthetic peptide
TPGPGVRY

SEQ ID NO: 5253 - protein, 10 aa, synthetic construct
  REGION 1..10: note = Description of Artificial Sequence: Synthetic peptide
VPLDEDFRKY

SEQ ID NO: 5254 - protein, 9 aa, synthetic construct
  REGION 1..9: note = Description of Artificial Sequence: Synthetic peptide
DARLVITTY

SEQ ID NO: 5255 - protein, 9 aa, synthetic construct
  REGION 1..9: note = Description of Artificial Sequence: Synthetic peptide
DPEIVMHTF

SEQ ID NO: 5256 - protein, 9 aa, synthetic construct
  REGION 1..9: note = Description of Artificial Sequence: Synthetic peptide
HIVSPSCEY

SEQ ID NO: 5257 - protein, 9 aa, synthetic construct
  REGION 1..9: note = Description of Artificial Sequence: Synthetic peptide
EAGATRISF

SEQ ID NO: 5258 - protein, 9 aa, synthetic construct
  REGION 1..9: note = Description of Artificial Sequence: Synthetic peptide
EAKLVITTY

SEQ ID NO: 5259 - protein, 9 aa, synthetic construct
  REGION 1..9: note = Description of Artificial Sequence: Synthetic peptide
PPIPVGEIY

SEQ ID NO: 5260 - protein, 8 aa, synthetic construct
  REGION 1..8: note = Description of Artificial Sequence: Synthetic peptide
TPGPGTRY

SEQ ID NO: 5261 - protein, 10 aa, synthetic construct
  REGION 1..10: note = Description of Artificial Sequence: Synthetic peptide
NPPIPVGEIY

SEQ ID NO: 5262 - protein, 8 aa, synthetic construct
  REGION 1..8: note = Description of Artificial Sequence: Synthetic peptide
VPIDNDSY

SEQ ID NO: 5263 - protein, 9 aa, synthetic construct
  REGION 1..9: note = Description of Artificial Sequence: Synthetic peptide
IPIVAIVAL

SEQ ID NO: 5264 - protein, 9 aa, synthetic construct
  REGION 1..9: note = Description of Artificial Sequence: Synthetic peptide
SPAIFQSSM

SEQ ID NO: 5265 - protein, 9 aa, synthetic construct
  REGION 1..9: note = Description of Artificial Sequence: Synthetic peptide
DPEIVMHSF

SEQ ID NO: 5266 - protein, 9 aa, synthetic construct
  REGION 1..9: note = Description of Artificial Sequence: Synthetic peptide
IPLTEEAEL

SEQ ID NO: 5267 - protein, 9 aa, synthetic construct
  REGION 1..9: note = Description of Artificial Sequence: Synthetic peptide
LADQLIHVY

SEQ ID NO: 5268 - protein, 9 aa, synthetic construct
  REGION 1..9: note = Description of Artificial Sequence: Synthetic peptide
DPNPQEVVL

SEQ ID NO: 5269 - protein, 9 aa, synthetic construct
  REGION 1..9: note = Description of Artificial Sequence: Synthetic peptide
SAEPVPLQL

SEQ ID NO: 5270 - protein, 10 aa, synthetic construct
  REGION 1..10: note = Description of Artificial Sequence: Synthetic peptide
DIVPIDNDSY

SEQ ID NO: 5271 - protein, 9 aa, synthetic construct
  REGION 1..9: note = Description of Artificial Sequence: Synthetic peptide
FPISPIETV

SEQ ID NO: 5272 - protein, 9 aa, synthetic construct
  REGION 1..9: note = Description of Artificial Sequence: Synthetic peptide
IPLTEEAEL

SEQ ID NO: 5273 - protein, 9 aa, synthetic construct
  REGION 1..9: note = Description of Artificial Sequence: Synthetic peptide
YSTQVDPEL

SEQ ID NO: 5274 - protein, 9 aa, synthetic construct
  REGION 1..9: note = Description of Artificial Sequence: Synthetic peptide
DPNPQEVVL

SEQ ID NO: 5275 - protein, 9 aa, synthetic construct
  REGION 1..9: note = Description of Artificial Sequence: Synthetic peptide
QPDQSESEL

SEQ ID NO: 5276 - protein, 9 aa, synthetic construct
  REGION 1..9: note = Description of Artificial Sequence: Synthetic peptide
QPDKSESEL

SEQ ID NO: 5277 - protein, 9 aa, synthetic construct
  REGION 1..9: note = Description of Artificial Sequence: Synthetic peptide
YTTQVDPDL

SEQ ID NO: 5278 - protein, 9 aa, synthetic construct
  REGION 1..9: note = Description of Artificial Sequence: Synthetic peptide
DPNPQELVL

SEQ ID NO: 5279 - protein, 9 aa, synthetic construct
  REGION 1..9: note = Description of Artificial Sequence: Synthetic peptide
VPLTKEAEL

SEQ ID NO: 5280 - protein, 9 aa, synthetic construct
  REGION 1..9: note = Description of Artificial Sequence: Synthetic peptide
YSTQVDPDL

SEQ ID NO: 5281 - protein, 9 aa, synthetic construct
  REGION 1..9: note = Description of Artificial Sequence: Synthetic peptide
SAEPVPLQL

SEQ ID NO: 5282 - protein, 9 aa, synthetic construct
  REGION 1..9: note = Description of Artificial Sequence: Synthetic peptide
FPQGEAREF

SEQ ID NO: 5283 - protein, 8 aa, synthetic construct
  REGION 1..8: note = Description of Artificial Sequence: Synthetic peptide
YVGSDLEM

SEQ ID NO: 5284 - protein, 9 aa, synthetic construct
  REGION 1..9: note = Description of Artificial Sequence: Synthetic peptide
VPLTAEAEL

SEQ ID NO: 5285 - protein, 8 aa, synthetic construct
  REGION 1..8: note = Description of Artificial Sequence: Synthetic peptide
IPLEDAEL

SEQ ID NO: 5286 - protein, 9 aa, synthetic construct
  REGION 1..9: note = Description of Artificial Sequence: Synthetic peptide
IDDPEKEVL

SEQ ID NO: 5287 - protein, 11 aa, synthetic construct
  REGION 1..11: note = Description of Artificial Sequence: Synthetic peptide
IPLTEEAELEL

SEQ ID NO: 5288 - protein, 8 aa, synthetic construct
  REGION 1..8: note = Description of Artificial Sequence: Synthetic peptide
LAEEDVVI

SEQ ID NO: 5289 - protein, 9 aa, synthetic construct
  REGION 1..9: note = Description of Artificial Sequence: Synthetic peptide
HPAQAGPIA

SEQ ID NO: 5290 - protein, 8 aa, synthetic construct
  REGION 1..8: note = Description of Artificial Sequence: Synthetic peptide
DPEKEVLM

SEQ ID NO: 5291 - protein, 9 aa, synthetic construct
  REGION 1..9: note = Description of Artificial Sequence: Synthetic peptide
FPISPIETV

SEQ ID NO: 5292 - protein, 9 aa, synthetic construct
  REGION 1..9: note = Description of Artificial Sequence: Synthetic peptide
IPLTEEAEL

SEQ ID NO: 5293 - protein, 9 aa, synthetic construct
  REGION 1..9: note = Description of Artificial Sequence: Synthetic peptide
YSTQVDPEL

SEQ ID NO: 5294 - protein, 9 aa, synthetic construct
  REGION 1..9: note = Description of Artificial Sequence: Synthetic peptide
DPNPQEVVL

SEQ ID NO: 5295 - protein, 9 aa, synthetic construct
  REGION 1..9: note = Description of Artificial Sequence: Synthetic peptide
IPIVAIVAL

SEQ ID NO: 5296 - protein, 9 aa, synthetic construct
  REGION 1..9: note = Description of Artificial Sequence: Synthetic peptide
DPNPQELVL

SEQ ID NO: 5297 - protein, 9 aa, synthetic construct
  REGION 1..9: note = Description of Artificial Sequence: Synthetic peptide
VPLTKEAEL

SEQ ID NO: 5298 - protein, 11 aa, synthetic construct
  REGION 1..11: note = Description of Artificial Sequence: Synthetic peptide
IPLTEEAELEL

SEQ ID NO: 5299 - protein, 9 aa, synthetic construct
  REGION 1..9: note = Description of Artificial Sequence: Synthetic peptide
YTTQVDPDL

SEQ ID NO: 5300 - protein, 9 aa, synthetic construct
  REGION 1..9: note = Description of Artificial Sequence: Synthetic peptide
VPLTAEAEL

SEQ ID NO: 5301 - protein, 9 aa, synthetic construct
  REGION 1..9: note = Description of Artificial Sequence: Synthetic peptide
FPISPIETV

SEQ ID NO: 5302 - protein, 9 aa, synthetic construct
  REGION 1..9: note = Description of Artificial Sequence: Synthetic peptide
FPQGEAREF

SEQ ID NO: 5303 - protein, 9 aa, synthetic construct
  REGION 1..9: note = Description of Artificial Sequence: Synthetic peptide
SAEPVPLQL

SEQ ID NO: 5304 - protein, 9 aa, synthetic construct
  REGION 1..9: note = Description of Artificial Sequence: Synthetic peptide
HPAQAGPIA

SEQ ID NO: 5305 - protein, 9 aa, synthetic construct
  REGION 1..9: note = Description of Artificial Sequence: Synthetic peptide
YSTQVDPDL

SEQ ID NO: 5306 - protein, 10 aa, synthetic construct
  REGION 1..10: note = Description of Artificial Sequence: Synthetic peptide
EPNDGKNITL

SEQ ID NO: 5307 - protein, 9 aa, synthetic construct
  REGION 1..9: note = Description of Artificial Sequence: Synthetic peptide
FPVTPQVPL

SEQ ID NO: 5308 - protein, 9 aa, synthetic construct
  REGION 1..9: note = Description of Artificial Sequence: Synthetic peptide
TPQDLNTML

SEQ ID NO: 5309 - protein, 9 aa, synthetic construct
  REGION 1..9: note = Description of Artificial Sequence: Synthetic peptide
LPLPPIERL

SEQ ID NO: 5310 - protein, 8 aa, synthetic construct
  REGION 1..8: note = Description of Artificial Sequence: Synthetic peptide
YVGSDLEM

SEQ ID NO: 5311 - protein, 9 aa, synthetic construct
  REGION 1..9: note = Description of Artificial Sequence: Synthetic peptide
IVTDSQYAL

SEQ ID NO: 5312 - protein, 10 aa, synthetic construct
  REGION 1..10: note = Description of Artificial Sequence: Synthetic peptide
SPIETVPVKL

SEQ ID NO: 5313 - protein, 10 aa, synthetic construct
  REGION 1..10: note = Description of Artificial Sequence: Synthetic peptide
IPIDNDTTSY

SEQ ID NO: 5314 - protein, 9 aa, synthetic construct
  REGION 1..9: note = Description of Artificial Sequence: Synthetic peptide
EPIVGAETF

SEQ ID NO: 5315 - protein, 9 aa, synthetic construct
  REGION 1..9: note = Description of Artificial Sequence: Synthetic peptide
FPVKPQVPL

SEQ ID NO: 5316 - protein, 9 aa, synthetic construct
  REGION 1..9: note = Description of Artificial Sequence: Synthetic peptide
YPLTALKSL

SEQ ID NO: 5317 - protein, 8 aa, synthetic construct
  REGION 1..8: note = Description of Artificial Sequence: Synthetic peptide
IPLEDAEL

SEQ ID NO: 5318 - protein, 9 aa, synthetic construct
  REGION 1..9: note = Description of Artificial Sequence: Synthetic peptide
QPDQSESEL

SEQ ID NO: 5319 - protein, 10 aa, synthetic construct
  REGION 1..10: note = Description of Artificial Sequence: Synthetic peptide
VPTDPNPQEL

SEQ ID NO: 5320 - protein, 10 aa, synthetic construct
  REGION 1..10: note = Description of Artificial Sequence: Synthetic peptide
NANPDCKTIL

SEQ ID NO: 5321 - protein, 9 aa, synthetic construct
  REGION 1..9: note = Description of Artificial Sequence: Synthetic peptide
HPVHAGPIA

SEQ ID NO: 5322 - protein, 9 aa, synthetic construct
  REGION 1..9: note = Description of Artificial Sequence: Synthetic peptide
SPLSFQTRL

SEQ ID NO: 5323 - protein, 9 aa, synthetic construct
  REGION 1..9: note = Description of Artificial Sequence: Synthetic peptide
SPLSFQTHL

SEQ ID NO: 5324 - protein, 11 aa, synthetic construct
  REGION 1..11: note = Description of Artificial Sequence: Synthetic peptide
VPLTAEAELEL

SEQ ID NO: 5325 - protein, 9 aa, synthetic construct
  REGION 1..9: note = Description of Artificial Sequence: Synthetic peptide
YPLASLKSL

SEQ ID NO: 5326 - protein, 9 aa, synthetic construct
  REGION 1..9: note = Description of Artificial Sequence: Synthetic peptide
YPLTSLRSL

SEQ ID NO: 5327 - protein, 9 aa, synthetic construct
  REGION 1..9: note = Description of Artificial Sequence: Synthetic peptide
YNTQVDPGL

SEQ ID NO: 5328 - protein, 9 aa, synthetic construct
  REGION 1..9: note = Description of Artificial Sequence: Synthetic peptide
QPDKSESEL

SEQ ID NO: 5329 - protein, 9 aa, synthetic construct
  REGION 1..9: note = Description of Artificial Sequence: Synthetic peptide
SAVSLFNAI

SEQ ID NO: 5330 - protein, 10 aa, synthetic construct
  REGION 1..10: note = Description of Artificial Sequence: Synthetic peptide
IPIDNDTTSY

SEQ ID NO: 5331 - protein, 11 aa, synthetic construct
  REGION 1..11: note = Description of Artificial Sequence: Synthetic peptide
IPAETGQETAY

SEQ ID NO: 5332 - protein, 10 aa, synthetic construct
  REGION 1..10: note = Description of Artificial Sequence: Synthetic peptide
VPINNDNTSY

SEQ ID NO: 5333 - protein, 9 aa, synthetic construct
  REGION 1..9: note = Description of Artificial Sequence: Synthetic peptide
NPDIVIYQY

SEQ ID NO: 5334 - protein, 9 aa, synthetic construct
  REGION 1..9: note = Description of Artificial Sequence: Synthetic peptide
FPQGEAREF

SEQ ID NO: 5335 - protein, 10 aa, synthetic construct
  REGION 1..10: note = Description of Artificial Sequence: Synthetic peptide
VPIDNDSYSY

SEQ ID NO: 5336 - protein, 9 aa, synthetic construct
  REGION 1..9: note = Description of Artificial Sequence: Synthetic peptide
EPIVGAETF

SEQ ID NO: 5337 - protein, 9 aa, synthetic construct
  REGION 1..9: note = Description of Artificial Sequence: Synthetic peptide
IPLTEEAEL

SEQ ID NO: 5338 - protein, 9 aa, synthetic construct
  REGION 1..9: note = Description of Artificial Sequence: Synthetic peptide
DAELVVTTY

SEQ ID NO: 5339 - protein, 9 aa, synthetic construct
  REGION 1..9: note = Description of Artificial Sequence: Synthetic peptide
DPEIVTHSF

SEQ ID NO: 5340 - protein, 9 aa, synthetic construct
  REGION 1..9: note = Description of Artificial Sequence: Synthetic peptide
NPEIVIYQY

SEQ ID NO: 5341 - protein, 9 aa, synthetic construct
  REGION 1..9: note = Description of Artificial Sequence: Synthetic peptide
LADQLIHVY

SEQ ID NO: 5342 - protein, 10 aa, synthetic construct
  REGION 1..10: note = Description of Artificial Sequence: Synthetic peptide
VPLDEDFRKY

SEQ ID NO: 5343 - protein, 9 aa, synthetic construct
  REGION 1..9: note = Description of Artificial Sequence: Synthetic peptide
IVPIDNDSY

SEQ ID NO: 5344 - protein, 8 aa, synthetic construct
  REGION 1..8: note = Description of Artificial Sequence: Synthetic peptide
YVGSDLEM

SEQ ID NO: 5345 - protein, 8 aa, synthetic construct
  REGION 1..8: note = Description of Artificial Sequence: Synthetic peptide
TPGPGVRY

SEQ ID NO: 5346 - protein, 9 aa, synthetic construct
  REGION 1..9: note = Description of Artificial Sequence: Synthetic peptide
TVLDVGDAY

SEQ ID NO: 5347 - protein, 9 aa, synthetic construct
  REGION 1..9: note = Description of Artificial Sequence: Synthetic peptide
DPNPQEVVL

SEQ ID NO: 5348 - protein, 11 aa, synthetic construct
  REGION 1..11: note = Description of Artificial Sequence: Synthetic peptide
IPLTEEAELEL

SEQ ID NO: 5349 - protein, 10 aa, synthetic construct
  REGION 1..10: note = Description of Artificial Sequence: Synthetic peptide
NPPIPVGEIY

SEQ ID NO: 5350 - protein, 9 aa, synthetic construct
  REGION 1..9: note = Description of Artificial Sequence: Synthetic peptide
QPDQSESEL

SEQ ID NO: 5351 - protein, 8 aa, synthetic construct
  REGION 1..8: note = Description of Artificial Sequence: Synthetic peptide
TPGPGIRY

SEQ ID NO: 5352 - protein, 9 aa, synthetic construct
  REGION 1..9: note = Description of Artificial Sequence: Synthetic peptide
IPLTEEAEL

SEQ ID NO: 5353 - protein, 9 aa, synthetic construct
  REGION 1..9: note = Description of Artificial Sequence: Synthetic peptide
DPNPQEVVL

SEQ ID NO: 5354 - protein, 9 aa, synthetic construct
  REGION 1..9: note = Description of Artificial Sequence: Synthetic peptide
YSTQVDPEL

SEQ ID NO: 5355 - protein, 9 aa, synthetic construct
  REGION 1..9: note = Description of Artificial Sequence: Synthetic peptide
VPLTKEAEL

SEQ ID NO: 5356 - protein, 9 aa, synthetic construct
  REGION 1..9: note = Description of Artificial Sequence: Synthetic peptide
QPDQSESEL

SEQ ID NO: 5357 - protein, 9 aa, synthetic construct
  REGION 1..9: note = Description of Artificial Sequence: Synthetic peptide
DPNPQELVL

SEQ ID NO: 5358 - protein, 9 aa, synthetic construct
  REGION 1..9: note = Description of Artificial Sequence: Synthetic peptide
QPDKSESEL

SEQ ID NO: 5359 - protein, 9 aa, synthetic construct
  REGION 1..9: note = Description of Artificial Sequence: Synthetic peptide
FPQGEAREF

SEQ ID NO: 5360 - protein, 9 aa, synthetic construct
  REGION 1..9: note = Description of Artificial Sequence: Synthetic peptide
YTTQVDPDL

SEQ ID NO: 5361 - protein, 9 aa, synthetic construct
  REGION 1..9: note = Description of Artificial Sequence: Synthetic peptide
VPLTAEAEL

SEQ ID NO: 5362 - protein, 11 aa, synthetic construct
  REGION 1..11: note = Description of Artificial Sequence: Synthetic peptide
IPLTEEAELEL

SEQ ID NO: 5363 - protein, 8 aa, synthetic construct
  REGION 1..8: note = Description of Artificial Sequence: Synthetic peptide
DPEKEVLM

SEQ ID NO: 5364 - protein, 9 aa, synthetic construct
  REGION 1..9: note = Description of Artificial Sequence: Synthetic peptide
SAEPVPLQL

SEQ ID NO: 5365 - protein, 8 aa, synthetic construct
  REGION 1..8: note = Description of Artificial Sequence: Synthetic peptide
YVGSDLEM

SEQ ID NO: 5366 - protein, 8 aa, synthetic construct
  REGION 1..8: note = Description of Artificial Sequence: Synthetic peptide
IPLEDAEL

SEQ ID NO: 5367 - protein, 9 aa, synthetic construct
  REGION 1..9: note = Description of Artificial Sequence: Synthetic peptide
DPEIVTHSF

SEQ ID NO: 5368 - protein, 9 aa, synthetic construct
  REGION 1..9: note = Description of Artificial Sequence: Synthetic peptide
YSTQVDPDL

SEQ ID NO: 5369 - protein, 9 aa, synthetic construct
  REGION 1..9: note = Description of Artificial Sequence: Synthetic peptide
IDDPEKEVL

SEQ ID NO: 5370 - protein, 9 aa, synthetic construct
  REGION 1..9: note = Description of Artificial Sequence: Synthetic peptide
LPLPPIERL

SEQ ID NO: 5371 - protein, 8 aa, synthetic construct
  REGION 1..8: note = Description of Artificial Sequence: Synthetic peptide
DPDLADQL

SEQ ID NO: 5372 - protein, 9 aa, synthetic construct
  REGION 1..9: note = Description of Artificial Sequence: Synthetic peptide
FPISPIETV

SEQ ID NO: 5373 - protein, 9 aa, synthetic construct
  REGION 1..9: note = Description of Artificial Sequence: Synthetic peptide
HPAQAGPIA

SEQ ID NO: 5374 - protein, 9 aa, synthetic construct
  REGION 1..9: note = Description of Artificial Sequence: Synthetic peptide
HIPLEDAEL

SEQ ID NO: 5375 - protein, 9 aa, synthetic construct
  REGION 1..9: note = Description of Artificial Sequence: Synthetic peptide
MDDPEREVL

SEQ ID NO: 5376 - protein, 9 aa, synthetic construct
  REGION 1..9: note = Description of Artificial Sequence: Synthetic peptide
MEDPEKEVL

SEQ ID NO: 5377 - protein, 9 aa, synthetic construct
  REGION 1..9: note = Description of Artificial Sequence: Synthetic peptide
IPIVAIVAL

SEQ ID NO: 5378 - protein, 9 aa, synthetic construct
  REGION 1..9: note = Description of Artificial Sequence: Synthetic peptide
EPIVGAETF

SEQ ID NO: 5379 - protein, 9 aa, synthetic construct
  REGION 1..9: note = Description of Artificial Sequence: Synthetic peptide
RDLERHGAL

SEQ ID NO: 5380 - protein, 9 aa, synthetic construct
  REGION 1..9: note = Description of Artificial Sequence: Synthetic peptide
ADRQGTVSF

SEQ ID NO: 5381 - protein, 9 aa, synthetic construct
  REGION 1..9: note = Description of Artificial Sequence: Synthetic peptide
AEWDRVHPV

SEQ ID NO: 5382 - protein, 9 aa, synthetic construct
  REGION 1..9: note = Description of Artificial Sequence: Synthetic peptide
ADSPTSREL

SEQ ID NO: 5383 - protein, 9 aa, synthetic construct
  REGION 1..9: note = Description of Artificial Sequence: Synthetic peptide
ADTGHSNQV

SEQ ID NO: 5384 - protein, 9 aa, synthetic construct
  REGION 1..9: note = Description of Artificial Sequence: Synthetic peptide
SDSAIRNAL

SEQ ID NO: 5385 - protein, 10 aa, synthetic construct
  REGION 1..10: note = Description of Artificial Sequence: Synthetic peptide
SEAGATRISF

SEQ ID NO: 5386 - protein, 8 aa, synthetic construct
  REGION 1..8: note = Description of Artificial Sequence: Synthetic peptide
SEELKSLF

SEQ ID NO: 5387 - protein, 8 aa, synthetic construct
  REGION 1..8: note = Description of Artificial Sequence: Synthetic peptide
YDTEVHNV

SEQ ID NO: 5388 - protein, 8 aa, synthetic construct
  REGION 1..8: note = Description of Artificial Sequence: Synthetic peptide
QDSQTHQV

SEQ ID NO: 5389 - protein, 8 aa, synthetic construct
  REGION 1..8: note = Description of Artificial Sequence: Synthetic peptide
AEHLKTAV

SEQ ID NO: 5390 - protein, 10 aa, synthetic construct
  REGION 1..10: note = Description of Artificial Sequence: Synthetic peptide
SDSAIRNALL

SEQ ID NO: 5391 - protein, 8 aa, synthetic construct
  REGION 1..8: note = Description of Artificial Sequence: Synthetic peptide
NDTTSYKL

SEQ ID NO: 5392 - protein, 8 aa, synthetic construct
  REGION 1..8: note = Description of Artificial Sequence: Synthetic peptide
KEATTTLF

SEQ ID NO: 5393 - protein, 8 aa, synthetic construct
  REGION 1..8: note = Description of Artificial Sequence: Synthetic peptide
YETEVHNV

SEQ ID NO: 5394 - protein, 8 aa, synthetic construct
  REGION 1..8: note = Description of Artificial Sequence: Synthetic peptide
LENVTENF

SEQ ID NO: 5395 - protein, 8 aa, synthetic construct
  REGION 1..8: note = Description of Artificial Sequence: Synthetic peptide
IETIQRAF

SEQ ID NO: 5396 - protein, 9 aa, synthetic construct
  REGION 1..9: note = Description of Artificial Sequence: Synthetic peptide
IHTDNGPNF

SEQ ID NO: 5397 - protein, 9 aa, synthetic construct
  REGION 1..9: note = Description of Artificial Sequence: Synthetic peptide
IHTDNGSNF

SEQ ID NO: 5398 - protein, 9 aa, synthetic construct
  REGION 1..9: note = Description of Artificial Sequence: Synthetic peptide
TQGVGDPQI

SEQ ID NO: 5399 - protein, 11 aa, synthetic construct
  REGION 1..11: note = Description of Artificial Sequence: Synthetic peptide
TQVDPGLADQL

SEQ ID NO: 5400 - protein, 10 aa, synthetic construct
  REGION 1..10: note = Description of Artificial Sequence: Synthetic peptide
HHAPWDVDDL

SEQ ID NO: 5401 - protein, 9 aa, synthetic construct
  REGION 1..9: note = Description of Artificial Sequence: Synthetic peptide
THLEGKVIL

SEQ ID NO: 5402 - protein, 11 aa, synthetic construct
  REGION 1..11: note = Description of Artificial Sequence: Synthetic peptide
TQVDPELADQL

SEQ ID NO: 5403 - protein, 10 aa, synthetic construct
  REGION 1..10: note = Description of Artificial Sequence: Synthetic peptide
HHAPWNIDDL

SEQ ID NO: 5404 - protein, 11 aa, synthetic construct
  REGION 1..11: note = Description of Artificial Sequence: Synthetic peptide
TQVDPDLADQL

SEQ ID NO: 5405 - protein, 9 aa, synthetic construct
  REGION 1..9: note = Description of Artificial Sequence: Synthetic peptide
TQDFWEVQL

SEQ ID NO: 5406 - protein, 10 aa, synthetic construct
  REGION 1..10: note = Description of Artificial Sequence: Synthetic peptide
IHTDNGPNFI

SEQ ID NO: 5407 - protein, 10 aa, synthetic construct
  REGION 1..10: note = Description of Artificial Sequence: Synthetic peptide
VHIPLGEASL

SEQ ID NO: 5408 - protein, 9 aa, synthetic construct
  REGION 1..9: note = Description of Artificial Sequence: Synthetic peptide
RRAPPDSQI

SEQ ID NO: 5409 - protein, 9 aa, synthetic construct
  REGION 1..9: note = Description of Artificial Sequence: Synthetic peptide
GHQAAMQML

SEQ ID NO: 5410 - protein, 9 aa, synthetic construct
  REGION 1..9: note = Description of Artificial Sequence: Synthetic peptide
THLEGKIIL

SEQ ID NO: 5411 - protein, 9 aa, synthetic construct
  REGION 1..9: note = Description of Artificial Sequence: Synthetic peptide
AHTNDVKQL

SEQ ID NO: 5412 - protein, 9 aa, synthetic construct
  REGION 1..9: note = Description of Artificial Sequence: Synthetic peptide
EHLKTAVQM

SEQ ID NO: 5413 - protein, 9 aa, synthetic construct
  REGION 1..9: note = Description of Artificial Sequence: Synthetic peptide
TQGVGSPQI

SEQ ID NO: 5414 - protein, 9 aa, synthetic construct
  REGION 1..9: note = Description of Artificial Sequence: Synthetic peptide
QDSGLEVNI

SEQ ID NO: 5415 - protein, 9 aa, synthetic construct
  REGION 1..9: note = Description of Artificial Sequence: Synthetic peptide
ERYLQDQQL

SEQ ID NO: 5416 - protein, 10 aa, synthetic construct
  REGION 1..10: note = Description of Artificial Sequence: Synthetic peptide
VHIPLEDAEL

SEQ ID NO: 5417 - protein, 10 aa, synthetic construct
  REGION 1..10: note = Description of Artificial Sequence: Synthetic peptide
VHIPLGEAKL

SEQ ID NO: 5418 - protein, 9 aa, synthetic construct
  REGION 1..9: note = Description of Artificial Sequence: Synthetic peptide
THLEGRVIL

SEQ ID NO: 5419 - protein, 9 aa, synthetic construct
  REGION 1..9: note = Description of Artificial Sequence: Synthetic peptide
ERYLQDQQL

SEQ ID NO: 5420 - protein, 9 aa, synthetic construct
  REGION 1..9: note = Description of Artificial Sequence: Synthetic peptide
GRSTEPVSL

SEQ ID NO: 5421 - protein, 11 aa, synthetic construct
  REGION 1..11: note = Description of Artificial Sequence: Synthetic peptide
TQVDPGLADQL

SEQ ID NO: 5422 - protein, 9 aa, synthetic construct
  REGION 1..9: note = Description of Artificial Sequence: Synthetic peptide
THLEGKVIL

SEQ ID NO: 5423 - protein, 9 aa, synthetic construct
  REGION 1..9: note = Description of Artificial Sequence: Synthetic peptide
EHLKTAVQM

SEQ ID NO: 5424 - protein, 9 aa, synthetic construct
  REGION 1..9: note = Description of Artificial Sequence: Synthetic peptide
DRQTHQASL

SEQ ID NO: 5425 - protein, 9 aa, synthetic construct
  REGION 1..9: note = Description of Artificial Sequence: Synthetic peptide
ERYLEDQQL

SEQ ID NO: 5426 - protein, 11 aa, synthetic construct
  REGION 1..11: note = Description of Artificial Sequence: Synthetic peptide
TQVDPDLADQL

SEQ ID NO: 5427 - protein, 11 aa, synthetic construct
  REGION 1..11: note = Description of Artificial Sequence: Synthetic peptide
TQVDPELADQL

SEQ ID NO: 5428 - protein, 9 aa, synthetic construct
  REGION 1..9: note = Description of Artificial Sequence: Synthetic peptide
SQVTSAPAI

SEQ ID NO: 5429 - protein, 9 aa, synthetic construct
  REGION 1..9: note = Description of Artificial Sequence: Synthetic peptide
IHTDNGPNF

SEQ ID NO: 5430 - protein, 9 aa, synthetic construct
  REGION 1..9: note = Description of Artificial Sequence: Synthetic peptide
IHTDNGSNF

SEQ ID NO: 5431 - protein, 9 aa, synthetic construct
  REGION 1..9: note = Description of Artificial Sequence: Synthetic peptide
HQAISPRTL

SEQ ID NO: 5432 - protein, 9 aa, synthetic construct
  REGION 1..9: note = Description of Artificial Sequence: Synthetic peptide
EQVDKLVSA

SEQ ID NO: 5433 - protein, 10 aa, synthetic construct
  REGION 1..10: note = Description of Artificial Sequence: Synthetic peptide
SQYALGIIQA

SEQ ID NO: 5434 - protein, 8 aa, synthetic construct
  REGION 1..8: note = Description of Artificial Sequence: Synthetic peptide
GHIVSPSC

SEQ ID NO: 5435 - protein, 9 aa, synthetic construct
  REGION 1..9: note = Description of Artificial Sequence: Synthetic peptide
VQLGIPHPA

SEQ ID NO: 5436 - protein, 8 aa, synthetic construct
  REGION 1..8: note = Description of Artificial Sequence: Synthetic peptide
TEIVPLTA

SEQ ID NO: 5437 - protein, 8 aa, synthetic construct
  REGION 1..8: note = Description of Artificial Sequence: Synthetic peptide
DQIPIEIC

SEQ ID NO: 5438 - protein, 8 aa, synthetic construct
  REGION 1..8: note = Description of Artificial Sequence: Synthetic peptide
THGIKPVV

SEQ ID NO: 5439 - protein, 8 aa, synthetic construct
  REGION 1..8: note = Description of Artificial Sequence: Synthetic peptide
THGIRPVV

SEQ ID NO: 5440 - protein, 8 aa, synthetic construct
  REGION 1..8: note = Description of Artificial Sequence: Synthetic peptide
VHIPLGEA

SEQ ID NO: 5441 - protein, 9 aa, synthetic construct
  REGION 1..9: note = Description of Artificial Sequence: Synthetic peptide
HQNSQTHQA

SEQ ID NO: 5442 - protein, 8 aa, synthetic construct
  REGION 1..8: note = Description of Artificial Sequence: Synthetic peptide
MQRAEPAA

SEQ ID NO: 5443 - protein, 8 aa, synthetic construct
  REGION 1..8: note = Description of Artificial Sequence: Synthetic peptide
DQILVEIC

SEQ ID NO: 5444 - protein, 8 aa, synthetic construct
  REGION 1..8: note = Description of Artificial Sequence: Synthetic peptide
DQILIEIC

SEQ ID NO: 5445 - protein, 8 aa, synthetic construct
  REGION 1..8: note = Description of Artificial Sequence: Synthetic peptide
GRVILVAV

SEQ ID NO: 5446 - protein, 8 aa, synthetic construct
  REGION 1..8: note = Description of Artificial Sequence: Synthetic peptide
SMALTVQA

SEQ ID NO: 5447 - protein, 8 aa, synthetic construct
  REGION 1..8: note = Description of Artificial Sequence: Synthetic peptide
SMTLTVQA

SEQ ID NO: 5448 - protein, 9 aa, synthetic construct
  REGION 1..9: note = Description of Artificial Sequence: Synthetic peptide
SRLAFHHVA

SEQ ID NO: 5449 - protein, 8 aa, synthetic construct
  REGION 1..8: note = Description of Artificial Sequence: Synthetic peptide
GKVILVAV

SEQ ID NO: 5450 - protein, 9 aa, synthetic construct
  REGION 1..9: note = Description of Artificial Sequence: Synthetic peptide
MQGQMVHQA

SEQ ID NO: 5451 - protein, 9 aa, synthetic construct
  REGION 1..9: note = Description of Artificial Sequence: Synthetic peptide
EQVDKLVST

SEQ ID NO: 5452 - protein, 9 aa, synthetic construct
  REGION 1..9: note = Description of Artificial Sequence: Synthetic peptide
QQHLLQLTV

SEQ ID NO: 5453 - protein, 8 aa, synthetic construct
  REGION 1..8: note = Description of Artificial Sequence: Synthetic peptide
FQTHLPAP

SEQ ID NO: 5454 - protein, 8 aa, synthetic construct
  REGION 1..8: note = Description of Artificial Sequence: Synthetic peptide
TAFTIPSV

SEQ ID NO: 5455 - protein, 9 aa, synthetic construct
  REGION 1..9: note = Description of Artificial Sequence: Synthetic peptide
EKVDKLVSA

SEQ ID NO: 5456 - protein, 8 aa, synthetic construct
  REGION 1..8: note = Description of Artificial Sequence: Synthetic peptide
NAIAIAVA

SEQ ID NO: 5457 - protein, 8 aa, synthetic construct
  REGION 1..8: note = Description of Artificial Sequence: Synthetic peptide
HHYESTHP

SEQ ID NO: 5458 - protein, 9 aa, synthetic construct
  REGION 1..9: note = Description of Artificial Sequence: Synthetic peptide
MEDPEKEVL

SEQ ID NO: 5459 - protein, 10 aa, synthetic construct
  REGION 1..10: note = Description of Artificial Sequence: Synthetic peptide
IEIKDTKEAL

SEQ ID NO: 5460 - protein, 10 aa, synthetic construct
  REGION 1..10: note = Description of Artificial Sequence: Synthetic peptide
IEVKDTKEAL

SEQ ID NO: 5461 - protein, 9 aa, synthetic construct
  REGION 1..9: note = Description of Artificial Sequence: Synthetic peptide
REIDNYTSL

SEQ ID NO: 5462 - protein, 9 aa, synthetic construct
  REGION 1..9: note = Description of Artificial Sequence: Synthetic peptide
TEGSDTITL

SEQ ID NO: 5463 - protein, 9 aa, synthetic construct
  REGION 1..9: note = Description of Artificial Sequence: Synthetic peptide
REINNYTSL

SEQ ID NO: 5464 - protein, 10 aa, synthetic construct
  REGION 1..10: note = Description of Artificial Sequence: Synthetic peptide
SEAGATRISF

SEQ ID NO: 5465 - protein, 9 aa, synthetic construct
  REGION 1..9: note = Description of Artificial Sequence: Synthetic peptide
SEAKWNNTL

SEQ ID NO: 5466 - protein, 10 aa, synthetic construct
  REGION 1..10: note = Description of Artificial Sequence: Synthetic peptide
IEVRDTKEAL

SEQ ID NO: 5467 - protein, 9 aa, synthetic construct
  REGION 1..9: note = Description of Artificial Sequence: Synthetic peptide
GEISALVEM

SEQ ID NO: 5468 - protein, 10 aa, synthetic construct
  REGION 1..10: note = Description of Artificial Sequence: Synthetic peptide
QELKNSAVSL

SEQ ID NO: 5469 - protein, 9 aa, synthetic construct
  REGION 1..9: note = Description of Artificial Sequence: Synthetic peptide
TEPNSTITL

SEQ ID NO: 5470 - protein, 9 aa, synthetic construct
  REGION 1..9: note = Description of Artificial Sequence: Synthetic peptide
REINNYTGL

SEQ ID NO: 5471 - protein, 11 aa, synthetic construct
  REGION 1..11: note = Description of Artificial Sequence: Synthetic peptide
NEPNDGKNITL

SEQ ID NO: 5472 - protein, 9 aa, synthetic construct
  REGION 1..9: note = Description of Artificial Sequence: Synthetic peptide
SEGATPQDL

SEQ ID NO: 5473 - protein, 9 aa, synthetic construct
  REGION 1..9: note = Description of Artificial Sequence: Synthetic peptide
SESAIRNAI

SEQ ID NO: 5474 - protein, 8 aa, synthetic construct
  REGION 1..8: note = Description of Artificial Sequence: Synthetic peptide
IETVPVKL

SEQ ID NO: 5475 - protein, 11 aa, synthetic construct
  REGION 1..11: note = Description of Artificial Sequence: Synthetic peptide
SEIVSQIIEQL

SEQ ID NO: 5476 - protein, 10 aa, synthetic construct
  REGION 1..10: note = Description of Artificial Sequence: Synthetic peptide
SESAIRNAIL

SEQ ID NO: 5477 - protein, 10 aa, synthetic construct
  REGION 1..10: note = Description of Artificial Sequence: Synthetic peptide
QELRGSAVSL

SEQ ID NO: 5478 - protein, 9 aa, synthetic construct
  REGION 1..9: note = Description of Artificial Sequence: Synthetic peptide
KELYPLTSL

SEQ ID NO: 5479 - protein, 11 aa, synthetic construct
  REGION 1..11: note = Description of Artificial Sequence: Synthetic peptide
AEGTDRVIEVL

SEQ ID NO: 5480 - protein, 9 aa, synthetic construct
  REGION 1..9: note = Description of Artificial Sequence: Synthetic peptide
QEKNEQELL

SEQ ID NO: 5481 - protein, 10 aa, synthetic construct
  REGION 1..10: note = Description of Artificial Sequence: Synthetic peptide
MEDPEKEVLM

SEQ ID NO: 5482 - protein, 10 aa, synthetic construct
  REGION 1..10: note = Description of Artificial Sequence: Synthetic peptide
IEAQQHLLQL

SEQ ID NO: 5483 - protein, 9 aa, synthetic construct
  REGION 1..9: note = Description of Artificial Sequence: Synthetic peptide
SESEIVSQI

SEQ ID NO: 5484 - protein, 9 aa, synthetic construct
  REGION 1..9: note = Description of Artificial Sequence: Synthetic peptide
KELYPLTAL

SEQ ID NO: 5485 - protein, 10 aa, synthetic construct
  REGION 1..10: note = Description of Artificial Sequence: Synthetic peptide
AEHLKTAVQM

SEQ ID NO: 5486 - protein, 9 aa, synthetic construct
  REGION 1..9: note = Description of Artificial Sequence: Synthetic peptide
GEYSAGERI

SEQ ID NO: 5487 - protein, 8 aa, synthetic construct
  REGION 1..8: note = Description of Artificial Sequence: Synthetic peptide
IEAQQHLL

SEQ ID NO: 5488 - protein, 10 aa, synthetic construct
  REGION 1..10: note = Description of Artificial Sequence: Synthetic peptide
NESEGEISAL

SEQ ID NO: 5489 - protein, 8 aa, synthetic construct
  REGION 1..8: note = Description of Artificial Sequence: Synthetic peptide
GEERNITL

SEQ ID NO: 5490 - protein, 10 aa, synthetic construct
  REGION 1..10: note = Description of Artificial Sequence: Synthetic peptide
GEIIGDIRQA

SEQ ID NO: 5491 - protein, 9 aa, synthetic construct
  REGION 1..9: note = Description of Artificial Sequence: Synthetic peptide
SEAKWNNTL

SEQ ID NO: 5492 - protein, 10 aa, synthetic construct
  REGION 1..10: note = Description of Artificial Sequence: Synthetic peptide
SEAGATRISF

SEQ ID NO: 5493 - protein, 9 aa, synthetic construct
  REGION 1..9: note = Description of Artificial Sequence: Synthetic peptide
GEISALVEM

SEQ ID NO: 5494 - protein, 10 aa, synthetic construct
  REGION 1..10: note = Description of Artificial Sequence: Synthetic peptide
IEIKDTKEAL

SEQ ID NO: 5495 - protein, 8 aa, synthetic construct
  REGION 1..8: note = Description of Artificial Sequence: Synthetic peptide
TDIQTKEL

SEQ ID NO: 5496 - protein, 10 aa, synthetic construct
  REGION 1..10: note = Description of Artificial Sequence: Synthetic peptide
AEHLKTAVQM

SEQ ID NO: 5497 - protein, 9 aa, synthetic construct
  REGION 1..9: note = Description of Artificial Sequence: Synthetic peptide
GEVGFPVKP

SEQ ID NO: 5498 - protein, 9 aa, synthetic construct
  REGION 1..9: note = Description of Artificial Sequence: Synthetic peptide
SESAIRNAI

SEQ ID NO: 5499 - protein, 9 aa, synthetic construct
  REGION 1..9: note = Description of Artificial Sequence: Synthetic peptide
REIDNYTSL

SEQ ID NO: 5500 - protein, 10 aa, synthetic construct
  REGION 1..10: note = Description of Artificial Sequence: Synthetic peptide
IEVKDTKEAL

SEQ ID NO: 5501 - protein, 11 aa, synthetic construct
  REGION 1..11: note = Description of Artificial Sequence: Synthetic peptide
AEGTDRVIEVL

SEQ ID NO: 5502 - protein, 9 aa, synthetic construct
  REGION 1..9: note = Description of Artificial Sequence: Synthetic peptide
REINNYTSL

SEQ ID NO: 5503 - protein, 11 aa, synthetic construct
  REGION 1..11: note = Description of Artificial Sequence: Synthetic peptide
SEIVSQIIEQL

SEQ ID NO: 5504 - protein, 10 aa, synthetic construct
  REGION 1..10: note = Description of Artificial Sequence: Synthetic peptide
AEEEVVIRSV

SEQ ID NO: 5505 - protein, 10 aa, synthetic construct
  REGION 1..10: note = Description of Artificial Sequence: Synthetic peptide
QELKNSAVSL

SEQ ID NO: 5506 - protein, 9 aa, synthetic construct
  REGION 1..9: note = Description of Artificial Sequence: Synthetic peptide
SEWILSNHL

SEQ ID NO: 5507 - protein, 10 aa, synthetic construct
  REGION 1..10: note = Description of Artificial Sequence: Synthetic peptide
IEAQQHLLQL

SEQ ID NO: 5508 - protein, 10 aa, synthetic construct
  REGION 1..10: note = Description of Artificial Sequence: Synthetic peptide
SESAIRNAIL

SEQ ID NO: 5509 - protein, 8 aa, synthetic construct
  REGION 1..8: note = Description of Artificial Sequence: Synthetic peptide
IETVPVKL

SEQ ID NO: 5510 - protein, 9 aa, synthetic construct
  REGION 1..9: note = Description of Artificial Sequence: Synthetic peptide
YETEVHNVW

SEQ ID NO: 5511 - protein, 9 aa, synthetic construct
  REGION 1..9: note = Description of Artificial Sequence: Synthetic peptide
NETVDIHCI

SEQ ID NO: 5512 - protein, 9 aa, synthetic construct
  REGION 1..9: note = Description of Artificial Sequence: Synthetic peptide
KELYPLTSL

SEQ ID NO: 5513 - protein, 9 aa, synthetic construct
  REGION 1..9: note = Description of Artificial Sequence: Synthetic peptide
TEGSDTITL

SEQ ID NO: 5514 - protein, 9 aa, synthetic construct
  REGION 1..9: note = Description of Artificial Sequence: Synthetic peptide
ADSPTSREL

SEQ ID NO: 5515 - protein, 9 aa, synthetic construct
  REGION 1..9: note = Description of Artificial Sequence: Synthetic peptide
AEWDRVHPV

SEQ ID NO: 5516 - protein, 8 aa, synthetic construct
  REGION 1..8: note = Description of Artificial Sequence: Synthetic peptide
TELQAIHL

SEQ ID NO: 5517 - protein, 9 aa, synthetic construct
  REGION 1..9: note = Description of Artificial Sequence: Synthetic peptide
SDSAIRNAL

SEQ ID NO: 5518 - protein, 9 aa, synthetic construct
  REGION 1..9: note = Description of Artificial Sequence: Synthetic peptide
MEDPEKEVL

SEQ ID NO: 5519 - protein, 8 aa, synthetic construct
  REGION 1..8: note = Description of Artificial Sequence: Synthetic peptide
IEAQQHLL

SEQ ID NO: 5520 - protein, 8 aa, synthetic construct
  REGION 1..8: note = Description of Artificial Sequence: Synthetic peptide
YESTHPKI

SEQ ID NO: 5521 - protein, 9 aa, synthetic construct
  REGION 1..9: note = Description of Artificial Sequence: Synthetic peptide
SDFNLPPVV

SEQ ID NO: 5522 - protein, 10 aa, synthetic construct
  REGION 1..10: note = Description of Artificial Sequence: Synthetic peptide
IEVRDTKEAL

SEQ ID NO: 5523 - protein, 9 aa, synthetic construct
  REGION 1..9: note = Description of Artificial Sequence: Synthetic peptide
SESEIVSQI

SEQ ID NO: 5524 - protein, 10 aa, synthetic construct
  REGION 1..10: note = Description of Artificial Sequence: Synthetic peptide
QDSQTHQVSL

SEQ ID NO: 5525 - protein, 10 aa, synthetic construct
  REGION 1..10: note = Description of Artificial Sequence: Synthetic peptide
AEAMSQVTSA

SEQ ID NO: 5526 - protein, 9 aa, synthetic construct
  REGION 1..9: note = Description of Artificial Sequence: Synthetic peptide
KELYPLTAL

SEQ ID NO: 5527 - protein, 11 aa, synthetic construct
  REGION 1..11: note = Description of Artificial Sequence: Synthetic peptide
SELVNQIIEQL

SEQ ID NO: 5528 - protein, 8 aa, synthetic construct
  REGION 1..8: note = Description of Artificial Sequence: Synthetic peptide
TDRVIEVL

SEQ ID NO: 5529 - protein, 9 aa, synthetic construct
  REGION 1..9: note = Description of Artificial Sequence: Synthetic peptide
SEGATPQDL

SEQ ID NO: 5530 - protein, 8 aa, synthetic construct
  REGION 1..8: note = Description of Artificial Sequence: Synthetic peptide
EEVVIRSV

SEQ ID NO: 5531 - protein, 11 aa, synthetic construct
  REGION 1..11: note = Description of Artificial Sequence: Synthetic peptide
SELVSQIIEQL

SEQ ID NO: 5532 - protein, 9 aa, synthetic construct
  REGION 1..9: note = Description of Artificial Sequence: Synthetic peptide
EEEVVIRSV

SEQ ID NO: 5533 - protein, 9 aa, synthetic construct
  REGION 1..9: note = Description of Artificial Sequence: Synthetic peptide
REINNYTGL

SEQ ID NO: 5534 - protein, 8 aa, synthetic construct
  REGION 1..8: note = Description of Artificial Sequence: Synthetic peptide
NDTTSYKL

SEQ ID NO: 5535 - protein, 9 aa, synthetic construct
  REGION 1..9: note = Description of Artificial Sequence: Synthetic peptide
LEKEPIVGA

SEQ ID NO: 5536 - protein, 8 aa, synthetic construct
  REGION 1..8: note = Description of Artificial Sequence: Synthetic peptide
YETEVHNV

SEQ ID NO: 5537 - protein, 10 aa, synthetic construct
  REGION 1..10: note = Description of Artificial Sequence: Synthetic peptide
QELRGSAVSL

SEQ ID NO: 5538 - protein, 9 aa, synthetic construct
  REGION 1..9: note = Description of Artificial Sequence: Synthetic peptide
SESELVNQI

SEQ ID NO: 5539 - protein, 8 aa, synthetic construct
  REGION 1..8: note = Description of Artificial Sequence: Synthetic peptide
AELVVTTY

SEQ ID NO: 5540 - protein, 9 aa, synthetic construct
  REGION 1..9: note = Description of Artificial Sequence: Synthetic peptide
GEVGFPVKP

SEQ ID NO: 5541 - protein, 10 aa, synthetic construct
  REGION 1..10: note = Description of Artificial Sequence: Synthetic peptide
GEIIGDIRQA

SEQ ID NO: 5542 - protein, 9 aa, synthetic construct
  REGION 1..9: note = Description of Artificial Sequence: Synthetic peptide
AEWDRIHPA

SEQ ID NO: 5543 - protein, 9 aa, synthetic construct
  REGION 1..9: note = Description of Artificial Sequence: Synthetic peptide
LEKEPIVGA

SEQ ID NO: 5544 - protein, 10 aa, synthetic construct
  REGION 1..10: note = Description of Artificial Sequence: Synthetic peptide
REFSSEQTRA

SEQ ID NO: 5545 - protein, 9 aa, synthetic construct
  REGION 1..9: note = Description of Artificial Sequence: Synthetic peptide
EEVGFPVTP

SEQ ID NO: 5546 - protein, 9 aa, synthetic construct
  REGION 1..9: note = Description of Artificial Sequence: Synthetic peptide
RETETHPDA

SEQ ID NO: 5547 - protein, 9 aa, synthetic construct
  REGION 1..9: note = Description of Artificial Sequence: Synthetic peptide
IEIKDTKEA

SEQ ID NO: 5548 - protein, 10 aa, synthetic construct
  REGION 1..10: note = Description of Artificial Sequence: Synthetic peptide
GEIIGDIRRA

SEQ ID NO: 5549 - protein, 9 aa, synthetic construct
  REGION 1..9: note = Description of Artificial Sequence: Synthetic peptide
TELQAIHLA

SEQ ID NO: 5550 - protein, 9 aa, synthetic construct
  REGION 1..9: note = Description of Artificial Sequence: Synthetic peptide
TETLLVQNA

SEQ ID NO: 5551 - protein, 9 aa, synthetic construct
  REGION 1..9: note = Description of Artificial Sequence: Synthetic peptide
EEVGFPVRP

SEQ ID NO: 5552 - protein, 10 aa, synthetic construct
  REGION 1..10: note = Description of Artificial Sequence: Synthetic peptide
AEAMSQVTSA

SEQ ID NO: 5553 - protein, 11 aa, synthetic construct
  REGION 1..11: note = Description of Artificial Sequence: Synthetic peptide
AEWDRIHPAQA

SEQ ID NO: 5554 - protein, 8 aa, synthetic construct
  REGION 1..8: note = Description of Artificial Sequence: Synthetic peptide
TEIVPLTA

SEQ ID NO: 5555 - protein, 10 aa, synthetic construct
  REGION 1..10: note = Description of Artificial Sequence: Synthetic peptide
TEIVPLTAEA

SEQ ID NO: 5556 - protein, 11 aa, synthetic construct
  REGION 1..11: note = Description of Artificial Sequence: Synthetic peptide
AEAMSQVTNSA

SEQ ID NO: 5557 - protein, 10 aa, synthetic construct
  REGION 1..10: note = Description of Artificial Sequence: Synthetic peptide
SEVHIPLGEA

SEQ ID NO: 5558 - protein, 9 aa, synthetic construct
  REGION 1..9: note = Description of Artificial Sequence: Synthetic peptide
IEVKDTKEA

SEQ ID NO: 5559 - protein, 9 aa, synthetic construct
  REGION 1..9: note = Description of Artificial Sequence: Synthetic peptide
QEFGIPYNP

SEQ ID NO: 5560 - protein, 9 aa, synthetic construct
  REGION 1..9: note = Description of Artificial Sequence: Synthetic peptide
AEWDRVHPV

SEQ ID NO: 5561 - protein, 9 aa, synthetic construct
  REGION 1..9: note = Description of Artificial Sequence: Synthetic peptide
QEVGKAMYA

SEQ ID NO: 5562 - protein, 9 aa, synthetic construct
  REGION 1..9: note = Description of Artificial Sequence: Synthetic peptide
GENTSLLHP

SEQ ID NO: 5563 - protein, 10 aa, synthetic construct
  REGION 1..10: note = Description of Artificial Sequence: Synthetic peptide
AEEEVVIRSV

SEQ ID NO: 5564 - protein, 10 aa, synthetic construct
  REGION 1..10: note = Description of Artificial Sequence: Synthetic peptide
SDFNLPPVVA

SEQ ID NO: 5565 - protein, 10 aa, synthetic construct
  REGION 1..10: note = Description of Artificial Sequence: Synthetic peptide
TEVVPLTKEA

SEQ ID NO: 5566 - protein, 8 aa, synthetic construct
  REGION 1..8: note = Description of Artificial Sequence: Synthetic peptide
NETEIFRP

SEQ ID NO: 5567 - protein, 9 aa, synthetic construct
  REGION 1..9: note = Description of Artificial Sequence: Synthetic peptide
GEASLVIKT

SEQ ID NO: 5568 - protein, 9 aa, synthetic construct
  REGION 1..9: note = Description of Artificial Sequence: Synthetic peptide
GEISALVEM

SEQ ID NO: 5569 - protein, 9 aa, synthetic construct
  REGION 1..9: note = Description of Artificial Sequence: Synthetic peptide
SESAIRNAI

SEQ ID NO: 5570 - protein, 10 aa, synthetic construct
  REGION 1..10: note = Description of Artificial Sequence: Synthetic peptide
SEAGATRISF

SEQ ID NO: 5571 - protein, 8 aa, synthetic construct
  REGION 1..8: note = Description of Artificial Sequence: Synthetic peptide
TDIQTKEL

SEQ ID NO: 5572 - protein, 9 aa, synthetic construct
  REGION 1..9: note = Description of Artificial Sequence: Synthetic peptide
SDSAIRNAL

SEQ ID NO: 5573 - protein, 8 aa, synthetic construct
  REGION 1..8: note = Description of Artificial Sequence: Synthetic peptide
AEHLKTAV

SEQ ID NO: 5574 - protein, 9 aa, synthetic construct
  REGION 1..9: note = Description of Artificial Sequence: Synthetic peptide
SEAKWNNTL

SEQ ID NO: 5575 - protein, 8 aa, synthetic construct
  REGION 1..8: note = Description of Artificial Sequence: Synthetic peptide
TDRVIEVL

SEQ ID NO: 5576 - protein, 9 aa, synthetic construct
  REGION 1..9: note = Description of Artificial Sequence: Synthetic peptide
ADSPTSREL

SEQ ID NO: 5577 - protein, 9 aa, synthetic construct
  REGION 1..9: note = Description of Artificial Sequence: Synthetic peptide
MEDPEKEVL

SEQ ID NO: 5578 - protein, 9 aa, synthetic construct
  REGION 1..9: note = Description of Artificial Sequence: Synthetic peptide
QEKNEQELL

SEQ ID NO: 5579 - protein, 9 aa, synthetic construct
  REGION 1..9: note = Description of Artificial Sequence: Synthetic peptide
REIDNYTSL

SEQ ID NO: 5580 - protein, 9 aa, synthetic construct
  REGION 1..9: note = Description of Artificial Sequence: Synthetic peptide
SDSAIRKAL

SEQ ID NO: 5581 - protein, 10 aa, synthetic construct
  REGION 1..10: note = Description of Artificial Sequence: Synthetic peptide
SESAIRNAIL

SEQ ID NO: 5582 - protein, 9 aa, synthetic construct
  REGION 1..9: note = Description of Artificial Sequence: Synthetic peptide
REINNYTSL

SEQ ID NO: 5583 - protein, 9 aa, synthetic construct
  REGION 1..9: note = Description of Artificial Sequence: Synthetic peptide
GEISALVEM

SEQ ID NO: 5584 - protein, 8 aa, synthetic construct
  REGION 1..8: note = Description of Artificial Sequence: Synthetic peptide
IEAQQHLL

SEQ ID NO: 5585 - protein, 9 aa, synthetic construct
  REGION 1..9: note = Description of Artificial Sequence: Synthetic peptide
AEMEKEGKI

SEQ ID NO: 5586 - protein, 9 aa, synthetic construct
  REGION 1..9: note = Description of Artificial Sequence: Synthetic peptide
KEKGGLEGL

SEQ ID NO: 5587 - protein, 9 aa, synthetic construct
  REGION 1..9: note = Description of Artificial Sequence: Synthetic peptide
YETEVHNVW

SEQ ID NO: 5588 - protein, 8 aa, synthetic construct
  REGION 1..8: note = Description of Artificial Sequence: Synthetic peptide
TELQAIHL

SEQ ID NO: 5589 - protein, 9 aa, synthetic construct
  REGION 1..9: note = Description of Artificial Sequence: Synthetic peptide
SERILGTYL

SEQ ID NO: 5590 - protein, 9 aa, synthetic construct
  REGION 1..9: note = Description of Artificial Sequence: Synthetic peptide
LEKEPIVGA

SEQ ID NO: 5591 - protein, 10 aa, synthetic construct
  REGION 1..10: note = Description of Artificial Sequence: Synthetic peptide
AEHLKTAVQM

SEQ ID NO: 5592 - protein, 8 aa, synthetic construct
  REGION 1..8: note = Description of Artificial Sequence: Synthetic peptide
SEIVSQII

SEQ ID NO: 5593 - protein, 9 aa, synthetic construct
  REGION 1..9: note = Description of Artificial Sequence: Synthetic peptide
ADRQGTVSF

SEQ ID NO: 5594 - protein, 8 aa, synthetic construct
  REGION 1..8: note = Description of Artificial Sequence: Synthetic peptide
IETIQRAF

SEQ ID NO: 5595 - protein, 8 aa, synthetic construct
  REGION 1..8: note = Description of Artificial Sequence: Synthetic peptide
TERQANFL

SEQ ID NO: 5596 - protein, 9 aa, synthetic construct
  REGION 1..9: note = Description of Artificial Sequence: Synthetic peptide
KELYPLTSL

SEQ ID NO: 5597 - protein, 10 aa, synthetic construct
  REGION 1..10: note = Description of Artificial Sequence: Synthetic peptide
IEIKDTKEAL

SEQ ID NO: 5598 - protein, 8 aa, synthetic construct
  REGION 1..8: note = Description of Artificial Sequence: Synthetic peptide
GERIVDII

SEQ ID NO: 5599 - protein, 9 aa, synthetic construct
  REGION 1..9: note = Description of Artificial Sequence: Synthetic peptide
REINNYTGL

SEQ ID NO: 5600 - protein, 9 aa, synthetic construct
  REGION 1..9: note = Description of Artificial Sequence: Synthetic peptide
KELYPLTAL

SEQ ID NO: 5601 - protein, 10 aa, synthetic construct
  REGION 1..10: note = Description of Artificial Sequence: Synthetic peptide
QELKNSAVSL

SEQ ID NO: 5602 - protein, 9 aa, synthetic construct
  REGION 1..9: note = Description of Artificial Sequence: Synthetic peptide
TEMEKEGKI

SEQ ID NO: 5603 - protein, 8 aa, synthetic construct
  REGION 1..8: note = Description of Artificial Sequence: Synthetic peptide
ADQLIHVY

SEQ ID NO: 5604 - protein, 8 aa, synthetic construct
  REGION 1..8: note = Description of Artificial Sequence: Synthetic peptide
AELVVTTY

SEQ ID NO: 5605 - protein, 8 aa, synthetic construct
  REGION 1..8: note = Description of Artificial Sequence: Synthetic peptide
YESTHPKI

SEQ ID NO: 5606 - protein, 9 aa, synthetic construct
  REGION 1..9: note = Description of Artificial Sequence: Synthetic peptide
ANSPTRREL

SEQ ID NO: 5607 - protein, 9 aa, synthetic construct
  REGION 1..9: note = Description of Artificial Sequence: Synthetic peptide
IEISGHKTI

SEQ ID NO: 5608 - protein, 9 aa, synthetic construct
  REGION 1..9: note = Description of Artificial Sequence: Synthetic peptide
AEWDRVHPV

SEQ ID NO: 5609 - protein, 9 aa, synthetic construct
  REGION 1..9: note = Description of Artificial Sequence: Synthetic peptide
TEGSDTITL

SEQ ID NO: 5610 - protein, 11 aa, synthetic construct
  REGION 1..11: note = Description of Artificial Sequence: Synthetic peptide
AEQASQEVKNW

SEQ ID NO: 5611 - protein, 10 aa, synthetic construct
  REGION 1..10: note = Description of Artificial Sequence: Synthetic peptide
SEAGATRISF

SEQ ID NO: 5612 - protein, 10 aa, synthetic construct
  REGION 1..10: note = Description of Artificial Sequence: Synthetic peptide
GEASLVIKTY

SEQ ID NO: 5613 - protein, 9 aa, synthetic construct
  REGION 1..9: note = Description of Artificial Sequence: Synthetic peptide
YETEVHNVW

SEQ ID NO: 5614 - protein, 9 aa, synthetic construct
  REGION 1..9: note = Description of Artificial Sequence: Synthetic peptide
AELVVTTYW

SEQ ID NO: 5615 - protein, 11 aa, synthetic construct
  REGION 1..11: note = Description of Artificial Sequence: Synthetic peptide
TENSSQVSQNY

SEQ ID NO: 5616 - protein, 9 aa, synthetic construct
  REGION 1..9: note = Description of Artificial Sequence: Synthetic peptide
AENLWVTVY

SEQ ID NO: 5617 - protein, 9 aa, synthetic construct
  REGION 1..9: note = Description of Artificial Sequence: Synthetic peptide
EEMNLPGRW

SEQ ID NO: 5618 - protein, 9 aa, synthetic construct
  REGION 1..9: note = Description of Artificial Sequence: Synthetic peptide
EEMDLPGRW

SEQ ID NO: 5619 - protein, 9 aa, synthetic construct
  REGION 1..9: note = Description of Artificial Sequence: Synthetic peptide
SESAIRNAI

SEQ ID NO: 5620 - protein, 11 aa, synthetic construct
  REGION 1..11: note = Description of Artificial Sequence: Synthetic peptide
AEIQKQGQGQW

SEQ ID NO: 5621 - protein, 9 aa, synthetic construct
  REGION 1..9: note = Description of Artificial Sequence: Synthetic peptide
AEQLWVTVY

SEQ ID NO: 5622 - protein, 10 aa, synthetic construct
  REGION 1..10: note = Description of Artificial Sequence: Synthetic peptide
EEVVIRSVNF

SEQ ID NO: 5623 - protein, 9 aa, synthetic construct
  REGION 1..9: note = Description of Artificial Sequence: Synthetic peptide
SEIWNNMTW

SEQ ID NO: 5624 - protein, 10 aa, synthetic construct
  REGION 1..10: note = Description of Artificial Sequence: Synthetic peptide
GEAKLVITTY

SEQ ID NO: 5625 - protein, 9 aa, synthetic construct
  REGION 1..9: note = Description of Artificial Sequence: Synthetic peptide
AEMEKEGKI

SEQ ID NO: 5626 - protein, 10 aa, synthetic construct
  REGION 1..10: note = Description of Artificial Sequence: Synthetic peptide
EEVVIRSENF

SEQ ID NO: 5627 - protein, 9 aa, synthetic construct
  REGION 1..9: note = Description of Artificial Sequence: Synthetic peptide
QELLGLDKW

SEQ ID NO: 5628 - protein, 9 aa, synthetic construct
  REGION 1..9: note = Description of Artificial Sequence: Synthetic peptide
EEMSLPGRW

SEQ ID NO: 5629 - protein, 11 aa, synthetic construct
  REGION 1..11: note = Description of Artificial Sequence: Synthetic peptide
NEQELLGLDKW

SEQ ID NO: 5630 - protein, 10 aa, synthetic construct
  REGION 1..10: note = Description of Artificial Sequence: Synthetic peptide
NETPGIRYQY

SEQ ID NO: 5631 - protein, 11 aa, synthetic construct
  REGION 1..11: note = Description of Artificial Sequence: Synthetic peptide
GEASLVIKTYW

SEQ ID NO: 5632 - protein, 9 aa, synthetic construct
  REGION 1..9: note = Description of Artificial Sequence: Synthetic peptide
AETGQETAY

SEQ ID NO: 5633 - protein, 9 aa, synthetic construct
  REGION 1..9: note = Description of Artificial Sequence: Synthetic peptide
QELLALDTW

SEQ ID NO: 5634 - protein, 9 aa, synthetic construct
  REGION 1..9: note = Description of Artificial Sequence: Synthetic peptide
DEIWNNMTW

SEQ ID NO: 5635 - protein, 9 aa, synthetic construct
  REGION 1..9: note = Description of Artificial Sequence: Synthetic peptide
EEMEAKGEM

SEQ ID NO: 5636 - protein, 9 aa, synthetic construct
  REGION 1..9: note = Description of Artificial Sequence: Synthetic peptide
SESEIVSQI

SEQ ID NO: 5637 - protein, 10 aa, synthetic construct
  REGION 1..10: note = Description of Artificial Sequence: Synthetic peptide
AEQLWVTVYY

SEQ ID NO: 5638 - protein, 10 aa, synthetic construct
  REGION 1..10: note = Description of Artificial Sequence: Synthetic peptide
GEASLVIKTY

SEQ ID NO: 5639 - protein, 10 aa, synthetic construct
  REGION 1..10: note = Description of Artificial Sequence: Synthetic peptide
SEAGATRISF

SEQ ID NO: 5640 - protein, 9 aa, synthetic construct
  REGION 1..9: note = Description of Artificial Sequence: Synthetic peptide
YETEVHNVW

SEQ ID NO: 5641 - protein, 11 aa, synthetic construct
  REGION 1..11: note = Description of Artificial Sequence: Synthetic peptide
AEQASQEVKNW

SEQ ID NO: 5642 - protein, 11 aa, synthetic construct
  REGION 1..11: note = Description of Artificial Sequence: Synthetic peptide
GEASLVIKTYW

SEQ ID NO: 5643 - protein, 11 aa, synthetic construct
  REGION 1..11: note = Description of Artificial Sequence: Synthetic peptide
TENSSQVSQNY

SEQ ID NO: 5644 - protein, 11 aa, synthetic construct
  REGION 1..11: note = Description of Artificial Sequence: Synthetic peptide
AEIQKQGQGQW

SEQ ID NO: 5645 - protein, 10 aa, synthetic construct
  REGION 1..10: note = Description of Artificial Sequence: Synthetic peptide
GEAKLVITTY

SEQ ID NO: 5646 - protein, 9 aa, synthetic construct
  REGION 1..9: note = Description of Artificial Sequence: Synthetic peptide
EEMNLPGRW

SEQ ID NO: 5647 - protein, 10 aa, synthetic construct
  REGION 1..10: note = Description of Artificial Sequence: Synthetic peptide
EEVVIRSENF

SEQ ID NO: 5648 - protein, 9 aa, synthetic construct
  REGION 1..9: note = Description of Artificial Sequence: Synthetic peptide
EEMDLPGRW

SEQ ID NO: 5649 - protein, 10 aa, synthetic construct
  REGION 1..10: note = Description of Artificial Sequence: Synthetic peptide
EEVVIRSVNF

SEQ ID NO: 5650 - protein, 9 aa, synthetic construct
  REGION 1..9: note = Description of Artificial Sequence: Synthetic peptide
SESAIRNAI

SEQ ID NO: 5651 - protein, 9 aa, synthetic construct
  REGION 1..9: note = Description of Artificial Sequence: Synthetic peptide
AELVVTTYW

SEQ ID NO: 5652 - protein, 9 aa, synthetic construct
  REGION 1..9: note = Description of Artificial Sequence: Synthetic peptide
AENLWVTVY

SEQ ID NO: 5653 - protein, 9 aa, synthetic construct
  REGION 1..9: note = Description of Artificial Sequence: Synthetic peptide
QELLGLDKW

SEQ ID NO: 5654 - protein, 9 aa, synthetic construct
  REGION 1..9: note = Description of Artificial Sequence: Synthetic peptide
SEIWNNMTW

SEQ ID NO: 5655 - protein, 9 aa, synthetic construct
  REGION 1..9: note = Description of Artificial Sequence: Synthetic peptide
AEMEKEGKI

SEQ ID NO: 5656 - protein, 10 aa, synthetic construct
  REGION 1..10: note = Description of Artificial Sequence: Synthetic peptide
NETPGIRYQY

SEQ ID NO: 5657 - protein, 11 aa, synthetic construct
  REGION 1..11: note = Description of Artificial Sequence: Synthetic peptide
NEQELLGLDKW

SEQ ID NO: 5658 - protein, 9 aa, synthetic construct
  REGION 1..9: note = Description of Artificial Sequence: Synthetic peptide
SESEIVSQI

SEQ ID NO: 5659 - protein, 11 aa, synthetic construct
  REGION 1..11: note = Description of Artificial Sequence: Synthetic peptide
LEVNIVTDSQY

SEQ ID NO: 5660 - protein, 9 aa, synthetic construct
  REGION 1..9: note = Description of Artificial Sequence: Synthetic peptide
EEMSLPGRW

SEQ ID NO: 5661 - protein, 9 aa, synthetic construct
  REGION 1..9: note = Description of Artificial Sequence: Synthetic peptide
QETIDKELY

SEQ ID NO: 5662 - protein, 9 aa, synthetic construct
  REGION 1..9: note = Description of Artificial Sequence: Synthetic peptide
SESELVNQI

SEQ ID NO: 5663 - protein, 11 aa, synthetic construct
  REGION 1..11: note = Description of Artificial Sequence: Synthetic peptide
NELDLLQLDKW

SEQ ID NO: 5664 - protein, 9 aa, synthetic construct
  REGION 1..9: note = Description of Artificial Sequence: Synthetic peptide
QELLELDKW

SEQ ID NO: 5665 - protein, 9 aa, synthetic construct
  REGION 1..9: note = Description of Artificial Sequence: Synthetic peptide
AEQLWVTVY

SEQ ID NO: 5666 - protein, 11 aa, synthetic construct
  REGION 1..11: note = Description of Artificial Sequence: Synthetic peptide
GEAKLVITTYW

SEQ ID NO: 5667 - protein, 10 aa, synthetic construct
  REGION 1..10: note = Description of Artificial Sequence: Synthetic peptide
MEWDREINNY

SEQ ID NO: 5668 - protein, 9 aa, synthetic construct
  REGION 1..9: note = Description of Artificial Sequence: Synthetic peptide
DEIWNNMTW

SEQ ID NO: 5669 - protein, 9 aa, synthetic construct
  REGION 1..9: note = Description of Artificial Sequence: Synthetic peptide
QELLALDTW

SEQ ID NO: 5670 - protein, 9 aa, synthetic construct
  REGION 1..9: note = Description of Artificial Sequence: Synthetic peptide
AETGQETAY

SEQ ID NO: 5671 - protein, 9 aa, synthetic construct
  REGION 1..9: note = Description of Artificial Sequence: Synthetic peptide
EEMEAKGEM

SEQ ID NO: 5672 - protein, 9 aa, synthetic construct
  REGION 1..9: note = Description of Artificial Sequence: Synthetic peptide
TEMEKEGKI

SEQ ID NO: 5673 - protein, 9 aa, synthetic construct
  REGION 1..9: note = Description of Artificial Sequence: Synthetic peptide
TENLWVTVY

SEQ ID NO: 5674 - protein, 9 aa, synthetic construct
  REGION 1..9: note = Description of Artificial Sequence: Synthetic peptide
SESELVSQI

SEQ ID NO: 5675 - protein, 10 aa, synthetic construct
  REGION 1..10: note = Description of Artificial Sequence: Synthetic peptide
EEHEKYHSNW

SEQ ID NO: 5676 - protein, 8 aa, synthetic construct
  REGION 1..8: note = Description of Artificial Sequence: Synthetic peptide
AELVVTTY

SEQ ID NO: 5677 - protein, 10 aa, synthetic construct
  REGION 1..10: note = Description of Artificial Sequence: Synthetic peptide
EEHEKYHNNW

SEQ ID NO: 5678 - protein, 11 aa, synthetic construct
  REGION 1..11: note = Description of Artificial Sequence: Synthetic peptide
NEQELLALDTW

SEQ ID NO: 5679 - protein, 10 aa, synthetic construct
  REGION 1..10: note = Description of Artificial Sequence: Synthetic peptide
AETGQETAYF

SEQ ID NO: 5680 - protein, 10 aa, synthetic construct
  REGION 1..10: note = Description of Artificial Sequence: Synthetic peptide
AEQLWVTVYY

SEQ ID NO: 5681 - protein, 9 aa, synthetic construct
  REGION 1..9: note = Description of Artificial Sequence: Synthetic peptide
QEEEGEVGF

SEQ ID NO: 5682 - protein, 9 aa, synthetic construct
  REGION 1..9: note = Description of Artificial Sequence: Synthetic peptide
EASLVIKTY

SEQ ID NO: 5683 - protein, 8 aa, synthetic construct
  REGION 1..8: note = Description of Artificial Sequence: Synthetic peptide
NETPGIRY

SEQ ID NO: 5684 - protein, 9 aa, synthetic construct
  REGION 1..9: note = Description of Artificial Sequence: Synthetic peptide
YDTEVHNVW

SEQ ID NO: 5685 - protein, 9 aa, synthetic construct
  REGION 1..9: note = Description of Artificial Sequence: Synthetic peptide
SEWILSNHL

SEQ ID NO: 5686 - protein, 11 aa, synthetic construct
  REGION 1..11: note = Description of Artificial Sequence: Synthetic peptide
EEDVVIRSKNF

SEQ ID NO: 5687 - protein, 9 aa, synthetic construct
  REGION 1..9: note = Description of Artificial Sequence: Synthetic peptide
NETVDIHCI

SEQ ID NO: 5688 - protein, 10 aa, synthetic construct
  REGION 1..10: note = Description of Artificial Sequence: Synthetic peptide
SEAGATRISF

SEQ ID NO: 5689 - protein, 10 aa, synthetic construct
  REGION 1..10: note = Description of Artificial Sequence: Synthetic peptide
EEVVIRSVNF

SEQ ID NO: 5690 - protein, 10 aa, synthetic construct
  REGION 1..10: note = Description of Artificial Sequence: Synthetic peptide
EEVVIRSENF

SEQ ID NO: 5691 - protein, 9 aa, synthetic construct
  REGION 1..9: note = Description of Artificial Sequence: Synthetic peptide
SESAIRNAI

SEQ ID NO: 5692 - protein, 11 aa, synthetic construct
  REGION 1..11: note = Description of Artificial Sequence: Synthetic peptide
AEIQKQGQGQW

SEQ ID NO: 5693 - protein, 9 aa, synthetic construct
  REGION 1..9: note = Description of Artificial Sequence: Synthetic peptide
QEEEGEVGF

SEQ ID NO: 5694 - protein, 9 aa, synthetic construct
  REGION 1..9: note = Description of Artificial Sequence: Synthetic peptide
SEAKWNNTL

SEQ ID NO: 5695 - protein, 11 aa, synthetic construct
  REGION 1..11: note = Description of Artificial Sequence: Synthetic peptide
AEQASQEVKNW

SEQ ID NO: 5696 - protein, 9 aa, synthetic construct
  REGION 1..9: note = Description of Artificial Sequence: Synthetic peptide
AEMEKEGKI

SEQ ID NO: 5697 - protein, 10 aa, synthetic construct
  REGION 1..10: note = Description of Artificial Sequence: Synthetic peptide
AETGQETAYF

SEQ ID NO: 5698 - protein, 9 aa, synthetic construct
  REGION 1..9: note = Description of Artificial Sequence: Synthetic peptide
EELLQTVRL

SEQ ID NO: 5699 - protein, 11 aa, synthetic construct
  REGION 1..11: note = Description of Artificial Sequence: Synthetic peptide
EEEVVIRSVNF

SEQ ID NO: 5700 - protein, 9 aa, synthetic construct
  REGION 1..9: note = Description of Artificial Sequence: Synthetic peptide
YETEVHNVW

SEQ ID NO: 5701 - protein, 10 aa, synthetic construct
  REGION 1..10: note = Description of Artificial Sequence: Synthetic peptide
QELKNSAVSL

SEQ ID NO: 5702 - protein, 9 aa, synthetic construct
  REGION 1..9: note = Description of Artificial Sequence: Synthetic peptide
REIDNYTSL

SEQ ID NO: 5703 - protein, 11 aa, synthetic construct
  REGION 1..11: note = Description of Artificial Sequence: Synthetic peptide
AELELAENREI

SEQ ID NO: 5704 - protein, 11 aa, synthetic construct
  REGION 1..11: note = Description of Artificial Sequence: Synthetic peptide
SEIVSQIIEQL

SEQ ID NO: 5705 - protein, 9 aa, synthetic construct
  REGION 1..9: note = Description of Artificial Sequence: Synthetic peptide
SESEIVSQI

SEQ ID NO: 5706 - protein, 10 aa, synthetic construct
  REGION 1..10: note = Description of Artificial Sequence: Synthetic peptide
KEPIVGAETF

SEQ ID NO: 5707 - protein, 9 aa, synthetic construct
  REGION 1..9: note = Description of Artificial Sequence: Synthetic peptide
REINNYTSL

SEQ ID NO: 5708 - protein, 9 aa, synthetic construct
  REGION 1..9: note = Description of Artificial Sequence: Synthetic peptide
NETVDIHCI

SEQ ID NO: 5709 - protein, 9 aa, synthetic construct
  REGION 1..9: note = Description of Artificial Sequence: Synthetic peptide
EEMEAKGEM

SEQ ID NO: 5710 - protein, 10 aa, synthetic construct
  REGION 1..10: note = Description of Artificial Sequence: Synthetic peptide
AEHLKTAVQM

SEQ ID NO: 5711 - protein, 9 aa, synthetic construct
  REGION 1..9: note = Description of Artificial Sequence: Synthetic peptide
TEMEKEGKI

SEQ ID NO: 5712 - protein, 9 aa, synthetic construct
  REGION 1..9: note = Description of Artificial Sequence: Synthetic peptide
SESELVNQI

SEQ ID NO: 5713 - protein, 10 aa, synthetic construct
  REGION 1..10: note = Description of Artificial Sequence: Synthetic peptide
SESAIRNAIL

SEQ ID NO: 5714 - protein, 11 aa, synthetic construct
  REGION 1..11: note = Description of Artificial Sequence: Synthetic peptide
AEQMHEDIISL

SEQ ID NO: 5715 - protein, 9 aa, synthetic construct
  REGION 1..9: note = Description of Artificial Sequence: Synthetic peptide
KEQFNNNTI

SEQ ID NO: 5716 - protein, 9 aa, synthetic construct
  REGION 1..9: note = Description of Artificial Sequence: Synthetic peptide
EEEVVIRSV

SEQ ID NO: 5717 - protein, 9 aa, synthetic construct
  REGION 1..9: note = Description of Artificial Sequence: Synthetic peptide
AEQMHEDII

SEQ ID NO: 5718 - protein, 10 aa, synthetic construct
  REGION 1..10: note = Description of Artificial Sequence: Synthetic peptide
AEEEVVIRSV

SEQ ID NO: 5719 - protein, 9 aa, synthetic construct
  REGION 1..9: note = Description of Artificial Sequence: Synthetic peptide
GEISALVEM

SEQ ID NO: 5720 - protein, 9 aa, synthetic construct
  REGION 1..9: note = Description of Artificial Sequence: Synthetic peptide
SEGATPQDL

SEQ ID NO: 5721 - protein, 11 aa, synthetic construct
  REGION 1..11: note = Description of Artificial Sequence: Synthetic peptide
AEGTDRVIEVL

SEQ ID NO: 5722 - protein, 11 aa, synthetic construct
  REGION 1..11: note = Description of Artificial Sequence: Synthetic peptide
QELKNSAVSLL

SEQ ID NO: 5723 - protein, 11 aa, synthetic construct
  REGION 1..11: note = Description of Artificial Sequence: Synthetic peptide
SELVNQIIEQL

SEQ ID NO: 5724 - protein, 9 aa, synthetic construct
  REGION 1..9: note = Description of Artificial Sequence: Synthetic peptide
EEMNLPGRW

SEQ ID NO: 5725 - protein, 9 aa, synthetic construct
  REGION 1..9: note = Description of Artificial Sequence: Synthetic peptide
REINNYTGL

SEQ ID NO: 5726 - protein, 9 aa, synthetic construct
  REGION 1..9: note = Description of Artificial Sequence: Synthetic peptide
SESELVSQI

SEQ ID NO: 5727 - protein, 10 aa, synthetic construct
  REGION 1..10: note = Description of Artificial Sequence: Synthetic peptide
EELKSLFNTI

SEQ ID NO: 5728 - protein, 11 aa, synthetic construct
  REGION 1..11: note = Description of Artificial Sequence: Synthetic peptide
AEGTDRVIETI

SEQ ID NO: 5729 - protein, 10 aa, synthetic construct
  REGION 1..10: note = Description of Artificial Sequence: Synthetic peptide
AEGTDRVIEI

SEQ ID NO: 5730 - protein, 9 aa, synthetic construct
  REGION 1..9: note = Description of Artificial Sequence: Synthetic peptide
TEGSDTITL

SEQ ID NO: 5731 - protein, 9 aa, synthetic construct
  REGION 1..9: note = Description of Artificial Sequence: Synthetic peptide
MEDPEKEVL

SEQ ID NO: 5732 - protein, 11 aa, synthetic construct
  REGION 1..11: note = Description of Artificial Sequence: Synthetic peptide
EEDVIIRSDNF

SEQ ID NO: 5733 - protein, 11 aa, synthetic construct
  REGION 1..11: note = Description of Artificial Sequence: Synthetic peptide
KEQFNNNTIVF

SEQ ID NO: 5734 - protein, 11 aa, synthetic construct
  REGION 1..11: note = Description of Artificial Sequence: Synthetic peptide
EEEVVIRSENF

SEQ ID NO: 5735 - protein, 9 aa, synthetic construct
  REGION 1..9: note = Description of Artificial Sequence: Synthetic peptide
QEKNEQELL

SEQ ID NO: 5736 - protein, 10 aa, synthetic construct
  REGION 1..10: note = Description of Artificial Sequence: Synthetic peptide
IEIKDTKEAL

SEQ ID NO: 5737 - protein, 9 aa, synthetic construct
  REGION 1..9: note = Description of Artificial Sequence: Synthetic peptide
ADSPTSREL

SEQ ID NO: 5738 - protein, 11 aa, synthetic construct
  REGION 1..11: note = Description of Artificial Sequence: Synthetic peptide
NEQELLGLDKW

SEQ ID NO: 5739 - protein, 11 aa, synthetic construct
  REGION 1..11: note = Description of Artificial Sequence: Synthetic peptide
SELVSQIIEQL

SEQ ID NO: 5740 - protein, 9 aa, synthetic construct
  REGION 1..9: note = Description of Artificial Sequence: Synthetic peptide
EEMDLPGRW

SEQ ID NO: 5741 - protein, 8 aa, synthetic construct
  REGION 1..8: note = Description of Artificial Sequence: Synthetic peptide
SEAGATRI

SEQ ID NO: 5742 - protein, 10 aa, synthetic construct
  REGION 1..10: note = Description of Artificial Sequence: Synthetic peptide
GDPEIVTHSF

SEQ ID NO: 5743 - protein, 10 aa, synthetic construct
  REGION 1..10: note = Description of Artificial Sequence: Synthetic peptide
EELRSLYNTI

SEQ ID NO: 5744 - protein, 11 aa, synthetic construct
  REGION 1..11: note = Description of Artificial Sequence: Synthetic peptide
TENSSQVSQNY

SEQ ID NO: 5745 - protein, 10 aa, synthetic construct
  REGION 1..10: note = Description of Artificial Sequence: Synthetic peptide
QELRGSAVSL

SEQ ID NO: 5746 - protein, 11 aa, synthetic construct
  REGION 1..11: note = Description of Artificial Sequence: Synthetic peptide
KETINEEAAEW

SEQ ID NO: 5747 - protein, 9 aa, synthetic construct
  REGION 1..9: note = Description of Artificial Sequence: Synthetic peptide
AELVVTTYW

SEQ ID NO: 5748 - protein, 11 aa, synthetic construct
  REGION 1..11: note = Description of Artificial Sequence: Synthetic peptide
NEQELLALDTW

SEQ ID NO: 5749 - protein, 10 aa, synthetic construct
  REGION 1..10: note = Description of Artificial Sequence: Synthetic peptide
GEAKLVITTY

SEQ ID NO: 5750 - protein, 11 aa, synthetic construct
  REGION 1..11: note = Description of Artificial Sequence: Synthetic peptide
SEAGDNRQGTI

SEQ ID NO: 5751 - protein, 11 aa, synthetic construct
  REGION 1..11: note = Description of Artificial Sequence: Synthetic peptide
LEVNIVTDSQY

SEQ ID NO: 5752 - protein, 10 aa, synthetic construct
  REGION 1..10: note = Description of Artificial Sequence: Synthetic peptide
SESEIVSQII

SEQ ID NO: 5753 - protein, 9 aa, synthetic construct
  REGION 1..9: note = Description of Artificial Sequence: Synthetic peptide
SEWILSNHL

SEQ ID NO: 5754 - protein, 9 aa, synthetic construct
  REGION 1..9: note = Description of Artificial Sequence: Synthetic peptide
AEQLWVTVY

SEQ ID NO: 5755 - protein, 9 aa, synthetic construct
  REGION 1..9: note = Description of Artificial Sequence: Synthetic peptide
SDSAIRNAL

SEQ ID NO: 5756 - protein, 10 aa, synthetic construct
  REGION 1..10: note = Description of Artificial Sequence: Synthetic peptide
EDVIIRSDNF

SEQ ID NO: 5757 - protein, 10 aa, synthetic construct
  REGION 1..10: note = Description of Artificial Sequence: Synthetic peptide
GDPEIVMHTF

SEQ ID NO: 5758 - protein, 9 aa, synthetic construct
  REGION 1..9: note = Description of Artificial Sequence: Synthetic peptide
ITKGLGISY

SEQ ID NO: 5759 - protein, 9 aa, synthetic construct
  REGION 1..9: note = Description of Artificial Sequence: Synthetic peptide
ITKALGISY

SEQ ID NO: 5760 - protein, 9 aa, synthetic construct
  REGION 1..9: note = Description of Artificial Sequence: Synthetic peptide
HIVSPSCEY

SEQ ID NO: 5761 - protein, 9 aa, synthetic construct
  REGION 1..9: note = Description of Artificial Sequence: Synthetic peptide
LSKQPTSQL

SEQ ID NO: 5762 - protein, 9 aa, synthetic construct
  REGION 1..9: note = Description of Artificial Sequence: Synthetic peptide
ITMGPGKVY

SEQ ID NO: 5763 - protein, 10 aa, synthetic construct
  REGION 1..10: note = Description of Artificial Sequence: Synthetic peptide
ILKEPVHGVY

SEQ ID NO: 5764 - protein, 9 aa, synthetic construct
  REGION 1..9: note = Description of Artificial Sequence: Synthetic peptide
ITMGPGRVY

SEQ ID NO: 5765 - protein, 9 aa, synthetic construct
  REGION 1..9: note = Description of Artificial Sequence: Synthetic peptide
RAVGIGAVF

SEQ ID NO: 5766 - protein, 9 aa, synthetic construct
  REGION 1..9: note = Description of Artificial Sequence: Synthetic peptide
LQILGIVAL

SEQ ID NO: 5767 - protein, 8 aa, synthetic construct
  REGION 1..8: note = Description of Artificial Sequence: Synthetic peptide
HKAIGTVL

SEQ ID NO: 5768 - protein, 8 aa, synthetic construct
  REGION 1..8: note = Description of Artificial Sequence: Synthetic peptide
HQAAMQML

SEQ ID NO: 5769 - protein, 9 aa, synthetic construct
  REGION 1..9: note = Description of Artificial Sequence: Synthetic peptide
HQAISPRTL

SEQ ID NO: 5770 - protein, 8 aa, synthetic construct
  REGION 1..8: note = Description of Artificial Sequence: Synthetic peptide
AKTIIVQL

SEQ ID NO: 5771 - protein, 9 aa, synthetic construct
  REGION 1..9: note = Description of Artificial Sequence: Synthetic peptide
IKPVVSTQL

SEQ ID NO: 5772 - protein, 8 aa, synthetic construct
  REGION 1..8: note = Description of Artificial Sequence: Synthetic peptide
HKTIGTVL

SEQ ID NO: 5773 - protein, 9 aa, synthetic construct
  REGION 1..9: note = Description of Artificial Sequence: Synthetic peptide
RAIEAQQHL

SEQ ID NO: 5774 - protein, 9 aa, synthetic construct
  REGION 1..9: note = Description of Artificial Sequence: Synthetic peptide
SQVTSAPAI

SEQ ID NO: 5775 - protein, 8 aa, synthetic construct
  REGION 1..8: note = Description of Artificial Sequence: Synthetic peptide
SQTHQVSL

SEQ ID NO: 5776 - protein, 8 aa, synthetic construct
  REGION 1..8: note = Description of Artificial Sequence: Synthetic peptide
KQLQARVL

SEQ ID NO: 5777 - protein, 8 aa, synthetic construct
  REGION 1..8: note = Description of Artificial Sequence: Synthetic peptide
YETEVHNV

SEQ ID NO: 5778 - protein, 9 aa, synthetic construct
  REGION 1..9: note = Description of Artificial Sequence: Synthetic peptide
SESEIVSQI

SEQ ID NO: 5779 - protein, 8 aa, synthetic construct
  REGION 1..8: note = Description of Artificial Sequence: Synthetic peptide
YESTHPKI

SEQ ID NO: 5780 - protein, 9 aa, synthetic construct
  REGION 1..9: note = Description of Artificial Sequence: Synthetic peptide
SESELVNQI

SEQ ID NO: 5781 - protein, 9 aa, synthetic construct
  REGION 1..9: note = Description of Artificial Sequence: Synthetic peptide
SESAIRNAI

SEQ ID NO: 5782 - protein, 9 aa, synthetic construct
  REGION 1..9: note = Description of Artificial Sequence: Synthetic peptide
SESELVSQI

SEQ ID NO: 5783 - protein, 9 aa, synthetic construct
  REGION 1..9: note = Description of Artificial Sequence: Synthetic peptide
IEISGHKTI

SEQ ID NO: 5784 - protein, 9 aa, synthetic construct
  REGION 1..9: note = Description of Artificial Sequence: Synthetic peptide
GEYSAGERI

SEQ ID NO: 5785 - protein, 9 aa, synthetic construct
  REGION 1..9: note = Description of Artificial Sequence: Synthetic peptide
AEMEKEGKI

SEQ ID NO: 5786 - protein, 8 aa, synthetic construct
  REGION 1..8: note = Description of Artificial Sequence: Synthetic peptide
SEIVSQII

SEQ ID NO: 5787 - protein, 9 aa, synthetic construct
  REGION 1..9: note = Description of Artificial Sequence: Synthetic peptide
TEMEKEGKI

SEQ ID NO: 5788 - protein, 9 aa, synthetic construct
  REGION 1..9: note = Description of Artificial Sequence: Synthetic peptide
NETVDIHCI

SEQ ID NO: 5789 - protein, 9 aa, synthetic construct
  REGION 1..9: note = Description of Artificial Sequence: Synthetic peptide
GEVGFPVKP

SEQ ID NO: 5790 - protein, 9 aa, synthetic construct
  REGION 1..9: note = Description of Artificial Sequence: Synthetic peptide
GECKNVSTV

SEQ ID NO: 5791 - protein, 9 aa, synthetic construct
  REGION 1..9: note = Description of Artificial Sequence: Synthetic peptide
AEWDRVHPV

SEQ ID NO: 5792 - protein, 10 aa, synthetic construct
  REGION 1..10: note = Description of Artificial Sequence: Synthetic peptide
AEEEVVIRSV

SEQ ID NO: 5793 - protein, 10 aa, synthetic construct
  REGION 1..10: note = Description of Artificial Sequence: Synthetic peptide
CEYQAGHNKV

SEQ ID NO: 5794 - protein, 8 aa, synthetic construct
  REGION 1..8: note = Description of Artificial Sequence: Synthetic peptide
AENLWVTV

SEQ ID NO: 5795 - protein, 8 aa, synthetic construct
  REGION 1..8: note = Description of Artificial Sequence: Synthetic peptide
TENLWVTV

SEQ ID NO: 5796 - protein, 9 aa, synthetic construct
  REGION 1..9: note = Description of Artificial Sequence: Synthetic peptide
KEQFNNNTI

SEQ ID NO: 5797 - protein, 10 aa, synthetic construct
  REGION 1..10: note = Description of Artificial Sequence: Synthetic peptide
EELKSLFNTV

SEQ ID NO: 5798 - protein, 8 aa, synthetic construct
  REGION 1..8: note = Description of Artificial Sequence: Synthetic peptide
YESTHPRI

SEQ ID NO: 5799 - protein, 8 aa, synthetic construct
  REGION 1..8: note = Description of Artificial Sequence: Synthetic peptide
AEQLWVTV

SEQ ID NO: 5800 - protein, 9 aa, synthetic construct
  REGION 1..9: note = Description of Artificial Sequence: Synthetic peptide
GEISALVEM

SEQ ID NO: 5801 - protein, 10 aa, synthetic construct
  REGION 1..10: note = Description of Artificial Sequence: Synthetic peptide
GEYSAGERII

SEQ ID NO: 5802 - protein, 10 aa, synthetic construct
  REGION 1..10: note = Description of Artificial Sequence: Synthetic peptide
EELKSLFNTI

SEQ ID NO: 5803 - protein, 9 aa, synthetic construct
  REGION 1..9: note = Description of Artificial Sequence: Synthetic peptide
LEDQQLLGI

SEQ ID NO: 5804 - protein, 10 aa, synthetic construct
  REGION 1..10: note = Description of Artificial Sequence: Synthetic peptide
GEIIGDIRQA

SEQ ID NO: 5805 - protein, 10 aa, synthetic construct
  REGION 1..10: note = Description of Artificial Sequence: Synthetic peptide
REIDNYTSLI

SEQ ID NO: 5806 - protein, 8 aa, synthetic construct
  REGION 1..8: note = Description of Artificial Sequence: Synthetic peptide
YESPHPRI

SEQ ID NO: 5807 - protein, 9 aa, synthetic construct
  REGION 1..9: note = Description of Artificial Sequence: Synthetic peptide
REINNYTSL

SEQ ID NO: 5808 - protein, 8 aa, synthetic construct
  REGION 1..8: note = Description of Artificial Sequence: Synthetic peptide
EEVVIRSV

SEQ ID NO: 5809 - protein, 9 aa, synthetic construct
  REGION 1..9: note = Description of Artificial Sequence: Synthetic peptide
REIDNYTSL

SEQ ID NO: 5810 - protein, 9 aa, synthetic construct
  REGION 1..9: note = Description of Artificial Sequence: Synthetic peptide
SEGEISALV

SEQ ID NO: 5811 - protein, 8 aa, synthetic construct
  REGION 1..8: note = Description of Artificial Sequence: Synthetic peptide
SEAGATRI

SEQ ID NO: 5812 - protein, 11 aa, synthetic construct
  REGION 1..11: note = Description of Artificial Sequence: Synthetic peptide
AELELAENREI

SEQ ID NO: 5813 - protein, 8 aa, synthetic construct
  REGION 1..8: note = Description of Artificial Sequence: Synthetic peptide
SELVSQII

SEQ ID NO: 5814 - protein, 9 aa, synthetic construct
  REGION 1..9: note = Description of Artificial Sequence: Synthetic peptide
TELEKEGKI

SEQ ID NO: 5815 - protein, 8 aa, synthetic construct
  REGION 1..8: note = Description of Artificial Sequence: Synthetic peptide
QEVVLVNV

SEQ ID NO: 5816 - protein, 9 aa, synthetic construct
  REGION 1..9: note = Description of Artificial Sequence: Synthetic peptide
YETEVHNVW

SEQ ID NO: 5817 - protein, 9 aa, synthetic construct
  REGION 1..9: note = Description of Artificial Sequence: Synthetic peptide
GELDRWEKI

SEQ ID NO: 5818 - protein, 9 aa, synthetic construct
  REGION 1..9: note = Description of Artificial Sequence: Synthetic peptide
EEEVVIRSV

SEQ ID NO: 5819 - protein, 9 aa, synthetic construct
  REGION 1..9: note = Description of Artificial Sequence: Synthetic peptide
QEVGKAMYA

SEQ ID NO: 5820 - protein, 9 aa, synthetic construct
  REGION 1..9: note = Description of Artificial Sequence: Synthetic peptide
IEIKDTKEA

SEQ ID NO: 5821 - protein, 9 aa, synthetic construct
  REGION 1..9: note = Description of Artificial Sequence: Synthetic peptide
GEVGFPVKP

SEQ ID NO: 5822 - protein, 10 aa, synthetic construct
  REGION 1..10: note = Description of Artificial Sequence: Synthetic peptide
GEIIGDIRQA

SEQ ID NO: 5823 - protein, 9 aa, synthetic construct
  REGION 1..9: note = Description of Artificial Sequence: Synthetic peptide
IEVKDTKEA

SEQ ID NO: 5824 - protein, 9 aa, synthetic construct
  REGION 1..9: note = Description of Artificial Sequence: Synthetic peptide
AEWDRIHPA

SEQ ID NO: 5825 - protein, 9 aa, synthetic construct
  REGION 1..9: note = Description of Artificial Sequence: Synthetic peptide
LEKEPIVGA

SEQ ID NO: 5826 - protein, 9 aa, synthetic construct
  REGION 1..9: note = Description of Artificial Sequence: Synthetic peptide
IEVRDTKEA

SEQ ID NO: 5827 - protein, 11 aa, synthetic construct
  REGION 1..11: note = Description of Artificial Sequence: Synthetic peptide
AEAMSQVTNSA

SEQ ID NO: 5828 - protein, 9 aa, synthetic construct
  REGION 1..9: note = Description of Artificial Sequence: Synthetic peptide
AETFYVDGA

SEQ ID NO: 5829 - protein, 9 aa, synthetic construct
  REGION 1..9: note = Description of Artificial Sequence: Synthetic peptide
RVIEVVQGA

SEQ ID NO: 5830 - protein, 10 aa, synthetic construct
  REGION 1..10: note = Description of Artificial Sequence: Synthetic peptide
REFSSEQTRA

SEQ ID NO: 5831 - protein, 9 aa, synthetic construct
  REGION 1..9: note = Description of Artificial Sequence: Synthetic peptide
EEVGFPVTP

SEQ ID NO: 5832 - protein, 10 aa, synthetic construct
  REGION 1..10: note = Description of Artificial Sequence: Synthetic peptide
AEAMSQVTSA

SEQ ID NO: 5833 - protein, 10 aa, synthetic construct
  REGION 1..10: note = Description of Artificial Sequence: Synthetic peptide
SEVHIPLGEA

SEQ ID NO: 5834 - protein, 11 aa, synthetic construct
  REGION 1..11: note = Description of Artificial Sequence: Synthetic peptide
AEPAADRVGAA

SEQ ID NO: 5835 - protein, 10 aa, synthetic construct
  REGION 1..10: note = Description of Artificial Sequence: Synthetic peptide
TEIVPLTAEA

SEQ ID NO: 5836 - protein, 9 aa, synthetic construct
  REGION 1..9: note = Description of Artificial Sequence: Synthetic peptide
RETETHPDA

SEQ ID NO: 5837 - protein, 10 aa, synthetic construct
  REGION 1..10: note = Description of Artificial Sequence: Synthetic peptide
GEIIGDIRRA

SEQ ID NO: 5838 - protein, 9 aa, synthetic construct
  REGION 1..9: note = Description of Artificial Sequence: Synthetic peptide
QIIGDIRQA

SEQ ID NO: 5839 - protein, 9 aa, synthetic construct
  REGION 1..9: note = Description of Artificial Sequence: Synthetic peptide
QEVGKAMYA

SEQ ID NO: 5840 - protein, 8 aa, synthetic construct
  REGION 1..8: note = Description of Artificial Sequence: Synthetic peptide
TEIVPLTA

SEQ ID NO: 5841 - protein, 10 aa, synthetic construct
  REGION 1..10: note = Description of Artificial Sequence: Synthetic peptide
TEVVPLTKEA

SEQ ID NO: 5842 - protein, 9 aa, synthetic construct
  REGION 1..9: note = Description of Artificial Sequence: Synthetic peptide
TETLLVQNA

SEQ ID NO: 5843 - protein, 9 aa, synthetic construct
  REGION 1..9: note = Description of Artificial Sequence: Synthetic peptide
IVSQIIEQL

SEQ ID NO: 5844 - protein, 9 aa, synthetic construct
  REGION 1..9: note = Description of Artificial Sequence: Synthetic peptide
AVFLGFLGA

SEQ ID NO: 5845 - protein, 9 aa, synthetic construct
  REGION 1..9: note = Description of Artificial Sequence: Synthetic peptide
RVIEVLQRV

SEQ ID NO: 5846 - protein, 9 aa, synthetic construct
  REGION 1..9: note = Description of Artificial Sequence: Synthetic peptide
LVSQIIEQL

SEQ ID NO: 5847 - protein, 11 aa, synthetic construct
  REGION 1..11: note = Description of Artificial Sequence: Synthetic peptide
TQVDPDLADQL

SEQ ID NO: 5848 - protein, 9 aa, synthetic construct
  REGION 1..9: note = Description of Artificial Sequence: Synthetic peptide
RVIETIQRA

SEQ ID NO: 5849 - protein, 9 aa, synthetic construct
  REGION 1..9: note = Description of Artificial Sequence: Synthetic peptide
GEISALVEM

SEQ ID NO: 5850 - protein, 10 aa, synthetic construct
  REGION 1..10: note = Description of Artificial Sequence: Synthetic peptide
AETFYVDGAA

SEQ ID NO: 5851 - protein, 9 aa, synthetic construct
  REGION 1..9: note = Description of Artificial Sequence: Synthetic peptide
ATLEEMMTA

SEQ ID NO: 5852 - protein, 9 aa, synthetic construct
  REGION 1..9: note = Description of Artificial Sequence: Synthetic peptide
EIIGDIRQA

SEQ ID NO: 5853 - protein, 9 aa, synthetic construct
  REGION 1..9: note = Description of Artificial Sequence: Synthetic peptide
AMFLGFLGA

SEQ ID NO: 5854 - protein, 10 aa, synthetic construct
  REGION 1..10: note = Description of Artificial Sequence: Synthetic peptide
AVFLGFLGAA

SEQ ID NO: 5855 - protein, 9 aa, synthetic construct
  REGION 1..9: note = Description of Artificial Sequence: Synthetic peptide
ASVTLTVQA

SEQ ID NO: 5856 - protein, 9 aa, synthetic construct
  REGION 1..9: note = Description of Artificial Sequence: Synthetic peptide
GENTSLLHP

SEQ ID NO: 5857 - protein, 10 aa, synthetic construct
  REGION 1..10: note = Description of Artificial Sequence: Synthetic peptide
AEPAADRVGA

SEQ ID NO: 5858 - protein, 10 aa, synthetic construct
  REGION 1..10: note = Description of Artificial Sequence: Synthetic peptide
REQAEHLKTA

SEQ ID NO: 5859 - protein, 9 aa, synthetic construct
  REGION 1..9: note = Description of Artificial Sequence: Synthetic peptide
ASMTLTVQA

SEQ ID NO: 5860 - protein, 11 aa, synthetic construct
  REGION 1..11: note = Description of Artificial Sequence: Synthetic peptide
TQVDPELADQL

SEQ ID NO: 5861 - protein, 10 aa, synthetic construct
  REGION 1..10: note = Description of Artificial Sequence: Synthetic peptide
GQIIGDIRQA

SEQ ID NO: 5862 - protein, 9 aa, synthetic construct
  REGION 1..9: note = Description of Artificial Sequence: Synthetic peptide
EEVGFPVRP

SEQ ID NO: 5863 - protein, 9 aa, synthetic construct
  REGION 1..9: note = Description of Artificial Sequence: Synthetic peptide
AVAEGTDRV

SEQ ID NO: 5864 - protein, 9 aa, synthetic construct
  REGION 1..9: note = Description of Artificial Sequence: Synthetic peptide
ALFLGFLGA

SEQ ID NO: 5865 - protein, 11 aa, synthetic construct
  REGION 1..11: note = Description of Artificial Sequence: Synthetic peptide
RAPPDSQIDQA

SEQ ID NO: 5866 - protein, 8 aa, synthetic construct
  REGION 1..8: note = Description of Artificial Sequence: Synthetic peptide
TAFTIPSI

SEQ ID NO: 5867 - protein, 8 aa, synthetic construct
  REGION 1..8: note = Description of Artificial Sequence: Synthetic peptide
TAFTIPSV

SEQ ID NO: 5868 - protein, 9 aa, synthetic construct
  REGION 1..9: note = Description of Artificial Sequence: Synthetic peptide
FPISPIETV

SEQ ID NO: 5869 - protein, 9 aa, synthetic construct
  REGION 1..9: note = Description of Artificial Sequence: Synthetic peptide
DAKAYETEV

SEQ ID NO: 5870 - protein, 9 aa, synthetic construct
  REGION 1..9: note = Description of Artificial Sequence: Synthetic peptide
DAKAYDTEV

SEQ ID NO: 5871 - protein, 9 aa, synthetic construct
  REGION 1..9: note = Description of Artificial Sequence: Synthetic peptide
YPLTSLRSL

SEQ ID NO: 5872 - protein, 10 aa, synthetic construct
  REGION 1..10: note = Description of Artificial Sequence: Synthetic peptide
IPYNPQSQGV

SEQ ID NO: 5873 - protein, 9 aa, synthetic construct
  REGION 1..9: note = Description of Artificial Sequence: Synthetic peptide
YAPPIAGQI

SEQ ID NO: 5874 - protein, 9 aa, synthetic construct
  REGION 1..9: note = Description of Artificial Sequence: Synthetic peptide
LPPVVAKEI

SEQ ID NO: 5875 - protein, 8 aa, synthetic construct
  REGION 1..8: note = Description of Artificial Sequence: Synthetic peptide
APPIAGQI

SEQ ID NO: 5876 - protein, 9 aa, synthetic construct
  REGION 1..9: note = Description of Artificial Sequence: Synthetic peptide
LPPIVAKEI

SEQ ID NO: 5877 - protein, 8 aa, synthetic construct
  REGION 1..8: note = Description of Artificial Sequence: Synthetic peptide
DSWTVNDI

SEQ ID NO: 5878 - protein, 8 aa, synthetic construct
  REGION 1..8: note = Description of Artificial Sequence: Synthetic peptide
NPYNTPVF

SEQ ID NO: 5879 - protein, 9 aa, synthetic construct
  REGION 1..9: note = Description of Artificial Sequence: Synthetic peptide
YAPPIGGQI

SEQ ID NO: 5880 - protein, 10 aa, synthetic construct
  REGION 1..10: note = Description of Artificial Sequence: Synthetic peptide
IPLGEAKLVI

SEQ ID NO: 5881 - protein, 8 aa, synthetic construct
  REGION 1..8: note = Description of Artificial Sequence: Synthetic peptide
VPVEPEKI

SEQ ID NO: 5882 - protein, 9 aa, synthetic construct
  REGION 1..9: note = Description of Artificial Sequence: Synthetic peptide
IPLGDARLV

SEQ ID NO: 5883 - protein, 8 aa, synthetic construct
  REGION 1..8: note = Description of Artificial Sequence: Synthetic peptide
VAIVALVV

SEQ ID NO: 5884 - protein, 9 aa, synthetic construct
  REGION 1..9: note = Description of Artificial Sequence: Synthetic peptide
YAPPISGQI

SEQ ID NO: 5885 - protein, 8 aa, synthetic construct
  REGION 1..8: note = Description of Artificial Sequence: Synthetic peptide
VPVEPDKI

SEQ ID NO: 5886 - protein, 8 aa, synthetic construct
  REGION 1..8: note = Description of Artificial Sequence: Synthetic peptide
ISFSFPQI

SEQ ID NO: 5887 - protein, 8 aa, synthetic construct
  REGION 1..8: note = Description of Artificial Sequence: Synthetic peptide
VALVVAAI

SEQ ID NO: 5888 - protein, 9 aa, synthetic construct
  REGION 1..9: note = Description of Artificial Sequence: Synthetic peptide
YPLTALKSL

SEQ ID NO: 5889 - protein, 9 aa, synthetic construct
  REGION 1..9: note = Description of Artificial Sequence: Synthetic peptide
VGFPVTPQV

SEQ ID NO: 5890 - protein, 10 aa, synthetic construct
  REGION 1..10: note = Description of Artificial Sequence: Synthetic peptide
IPLGEASLVI

SEQ ID NO: 5891 - protein, 9 aa, synthetic construct
  REGION 1..9: note = Description of Artificial Sequence: Synthetic peptide
NPPIPVGEI

SEQ ID NO: 5892 - protein, 9 aa, synthetic construct
  REGION 1..9: note = Description of Artificial Sequence: Synthetic peptide
IPLGEAKLV

SEQ ID NO: 5893 - protein, 9 aa, synthetic construct
  REGION 1..9: note = Description of Artificial Sequence: Synthetic peptide
LPLPPIERL

SEQ ID NO: 5894 - protein, 11 aa, synthetic construct
  REGION 1..11: note = Description of Artificial Sequence: Synthetic peptide
IPYNPQSQGVV

SEQ ID NO: 5895 - protein, 8 aa, synthetic construct
  REGION 1..8: note = Description of Artificial Sequence: Synthetic peptide
VPVEPDKV

SEQ ID NO: 5896 - protein, 9 aa, synthetic construct
  REGION 1..9: note = Description of Artificial Sequence: Synthetic peptide
IPLGEASLV

SEQ ID NO: 5897 - protein, 9 aa, synthetic construct
  REGION 1..9: note = Description of Artificial Sequence: Synthetic peptide
FPISPIETV

SEQ ID NO: 5898 - protein, 9 aa, synthetic construct
  REGION 1..9: note = Description of Artificial Sequence: Synthetic peptide
HPVHAGPIA

SEQ ID NO: 5899 - protein, 9 aa, synthetic construct
  REGION 1..9: note = Description of Artificial Sequence: Synthetic peptide
HPAQAGPIA

SEQ ID NO: 5900 - protein, 9 aa, synthetic construct
  REGION 1..9: note = Description of Artificial Sequence: Synthetic peptide
EAMSQVTSA

SEQ ID NO: 5901 - protein, 11 aa, synthetic construct
  REGION 1..11: note = Description of Artificial Sequence: Synthetic peptide
VPVEPDKIEEA

SEQ ID NO: 5902 - protein, 11 aa, synthetic construct
  REGION 1..11: note = Description of Artificial Sequence: Synthetic peptide
MPSLYILGIVA

SEQ ID NO: 5903 - protein, 11 aa, synthetic construct
  REGION 1..11: note = Description of Artificial Sequence: Synthetic peptide
VPVDPDQVEKA

SEQ ID NO: 5904 - protein, 10 aa, synthetic construct
  REGION 1..10: note = Description of Artificial Sequence: Synthetic peptide
EPLGVAPTTA

SEQ ID NO: 5905 - protein, 8 aa, synthetic construct
  REGION 1..8: note = Description of Artificial Sequence: Synthetic peptide
TAFTIPSV

SEQ ID NO: 5906 - protein, 11 aa, synthetic construct
  REGION 1..11: note = Description of Artificial Sequence: Synthetic peptide
VPVEPEKIEEA

SEQ ID NO: 5907 - protein, 9 aa, synthetic construct
  REGION 1..9: note = Description of Artificial Sequence: Synthetic peptide
EPIPIHYCA

SEQ ID NO: 5908 - protein, 9 aa, synthetic construct
  REGION 1..9: note = Description of Artificial Sequence: Synthetic peptide
YPLTALKSL

SEQ ID NO: 5909 - protein, 9 aa, synthetic construct
  REGION 1..9: note = Description of Artificial Sequence: Synthetic peptide
HVASGYIEA

SEQ ID NO: 5910 - protein, 9 aa, synthetic construct
  REGION 1..9: note = Description of Artificial Sequence: Synthetic peptide
YPLTSLRSL

SEQ ID NO: 5911 - protein, 9 aa, synthetic construct
  REGION 1..9: note = Description of Artificial Sequence: Synthetic peptide
NPYNTPIFA

SEQ ID NO: 5912 - protein, 9 aa, synthetic construct
  REGION 1..9: note = Description of Artificial Sequence: Synthetic peptide
EPIPIYYCA

SEQ ID NO: 5913 - protein, 9 aa, synthetic construct
  REGION 1..9: note = Description of Artificial Sequence: Synthetic peptide
HPGSQPKTA

SEQ ID NO: 5914 - protein, 10 aa, synthetic construct
  REGION 1..10: note = Description of Artificial Sequence: Synthetic peptide
EPLGVAPTKA

SEQ ID NO: 5915 - protein, 11 aa, synthetic construct
  REGION 1..11: note = Description of Artificial Sequence: Synthetic peptide
VPVEPDKVEEA

SEQ ID NO: 5916 - protein, 11 aa, synthetic construct
  REGION 1..11: note = Description of Artificial Sequence: Synthetic peptide
FALNPGLLETA

SEQ ID NO: 5917 - protein, 9 aa, synthetic construct
  REGION 1..9: note = Description of Artificial Sequence: Synthetic peptide
NPYNTPVFA

SEQ ID NO: 5918 - protein, 9 aa, synthetic construct
  REGION 1..9: note = Description of Artificial Sequence: Synthetic peptide
YPLASLKSL

SEQ ID NO: 5919 - protein, 8 aa, synthetic construct
  REGION 1..8: note = Description of Artificial Sequence: Synthetic peptide
TAFTIPSI

SEQ ID NO: 5920 - protein, 9 aa, synthetic construct
  REGION 1..9: note = Description of Artificial Sequence: Synthetic peptide
YPIVQNIQG

SEQ ID NO: 5921 - protein, 9 aa, synthetic construct
  REGION 1..9: note = Description of Artificial Sequence: Synthetic peptide
HPGSQPRTA

SEQ ID NO: 5922 - protein, 11 aa, synthetic construct
  REGION 1..11: note = Description of Artificial Sequence: Synthetic peptide
LPPVVAKEIVA

SEQ ID NO: 5923 - protein, 9 aa, synthetic construct
  REGION 1..9: note = Description of Artificial Sequence: Synthetic peptide
QPIPIVAIV

SEQ ID NO: 5924 - protein, 8 aa, synthetic construct
  REGION 1..8: note = Description of Artificial Sequence: Synthetic peptide
TAFTIPST

SEQ ID NO: 5925 - protein, 11 aa, synthetic construct
  REGION 1..11: note = Description of Artificial Sequence: Synthetic peptide
FPISPIETVPV

SEQ ID NO: 5926 - protein, 10 aa, synthetic construct
  REGION 1..10: note = Description of Artificial Sequence: Synthetic peptide
QPIPIVAIVA

SEQ ID NO: 5927 - protein, 9 aa, synthetic construct
  REGION 1..9: note = Description of Artificial Sequence: Synthetic peptide
YPLASLRSL

SEQ ID NO: 5928 - protein, 10 aa, synthetic construct
  REGION 1..10: note = Description of Artificial Sequence: Synthetic peptide
IPIEICGNKA

SEQ ID NO: 5929 - protein, 11 aa, synthetic construct
  REGION 1..11: note = Description of Artificial Sequence: Synthetic peptide
MLNTVGGHQAA

SEQ ID NO: 5930 - protein, 10 aa, synthetic construct
  REGION 1..10: note = Description of Artificial Sequence: Synthetic peptide
EAMSQVTNSA

SEQ ID NO: 5931 - protein, 10 aa, synthetic construct
  REGION 1..10: note = Description of Artificial Sequence: Synthetic peptide
HPVHAGPIAP

SEQ ID NO: 5932 - protein, 9 aa, synthetic construct
  REGION 1..9: note = Description of Artificial Sequence: Synthetic peptide
EATTTLFCA

SEQ ID NO: 5933 - protein, 9 aa, synthetic construct
  REGION 1..9: note = Description of Artificial Sequence: Synthetic peptide
FPVTPQVPL

SEQ ID NO: 5934 - protein, 9 aa, synthetic construct
  REGION 1..9: note = Description of Artificial Sequence: Synthetic peptide
EPLGVAPTT

SEQ ID NO: 5935 - protein, 9 aa, synthetic construct
  REGION 1..9: note = Description of Artificial Sequence: Synthetic peptide
EVVPLTKEA

SEQ ID NO: 5936 - protein, 9 aa, synthetic construct
  REGION 1..9: note = Description of Artificial Sequence: Synthetic peptide
YPIVQNMQG

SEQ ID NO: 5937 - protein, 8 aa, synthetic construct
  REGION 1..8: note = Description of Artificial Sequence: Synthetic peptide
IPIVAIVA

SEQ ID NO: 5938 - protein, 8 aa, synthetic construct
  REGION 1..8: note = Description of Artificial Sequence: Synthetic peptide
NAIAIAVA

SEQ ID NO: 5939 - protein, 9 aa, synthetic construct
  REGION 1..9: note = Description of Artificial Sequence: Synthetic peptide
SPEVIPMFA

SEQ ID NO: 5940 - protein, 9 aa, synthetic construct
  REGION 1..9: note = Description of Artificial Sequence: Synthetic peptide
QASLPKQPA

SEQ ID NO: 5941 - protein, 9 aa, synthetic construct
  REGION 1..9: note = Description of Artificial Sequence: Synthetic peptide
HPAQAGPIA

SEQ ID NO: 5942 - protein, 9 aa, synthetic construct
  REGION 1..9: note = Description of Artificial Sequence: Synthetic peptide
HPVHAGPIA

SEQ ID NO: 5943 - protein, 9 aa, synthetic construct
  REGION 1..9: note = Description of Artificial Sequence: Synthetic peptide
FPISPIETV

SEQ ID NO: 5944 - protein, 9 aa, synthetic construct
  REGION 1..9: note = Description of Artificial Sequence: Synthetic peptide
RPEPTAPPA

SEQ ID NO: 5945 - protein, 9 aa, synthetic construct
  REGION 1..9: note = Description of Artificial Sequence: Synthetic peptide
LPKQPASQP

SEQ ID NO: 5946 - protein, 9 aa, synthetic construct
  REGION 1..9: note = Description of Artificial Sequence: Synthetic peptide
HPAQAGPIA

SEQ ID NO: 5947 - protein, 9 aa, synthetic construct
  REGION 1..9: note = Description of Artificial Sequence: Synthetic peptide
FPISPIETV

SEQ ID NO: 5948 - protein, 9 aa, synthetic construct
  REGION 1..9: note = Description of Artificial Sequence: Synthetic peptide
HPVHAGPIA

SEQ ID NO: 5949 - protein, 10 aa, synthetic construct
  REGION 1..10: note = Description of Artificial Sequence: Synthetic peptide
EPLGVAPTTA

SEQ ID NO: 5950 - protein, 9 aa, synthetic construct
  REGION 1..9: note = Description of Artificial Sequence: Synthetic peptide
GPNFISTAV

SEQ ID NO: 5951 - protein, 11 aa, synthetic construct
  REGION 1..11: note = Description of Artificial Sequence: Synthetic peptide
VPVEPEKIEEA

SEQ ID NO: 5952 - protein, 11 aa, synthetic construct
  REGION 1..11: note = Description of Artificial Sequence: Synthetic peptide
VPVEPDKIEEA

SEQ ID NO: 5953 - protein, 10 aa, synthetic construct
  REGION 1..10: note = Description of Artificial Sequence: Synthetic peptide
IPAETGQETA

SEQ ID NO: 5954 - protein, 9 aa, synthetic construct
  REGION 1..9: note = Description of Artificial Sequence: Synthetic peptide
NPYNTPVFA

SEQ ID NO: 5955 - protein, 11 aa, synthetic construct
  REGION 1..11: note = Description of Artificial Sequence: Synthetic peptide
VPVDPDQVEKA

SEQ ID NO: 5956 - protein, 9 aa, synthetic construct
  REGION 1..9: note = Description of Artificial Sequence: Synthetic peptide
NPYNTPIFA

SEQ ID NO: 5957 - protein, 9 aa, synthetic construct
  REGION 1..9: note = Description of Artificial Sequence: Synthetic peptide
RPEPTAPPA

SEQ ID NO: 5958 - protein, 10 aa, synthetic construct
  REGION 1..10: note = Description of Artificial Sequence: Synthetic peptide
QPIPIVAIVA

SEQ ID NO: 5959 - protein, 11 aa, synthetic construct
  REGION 1..11: note = Description of Artificial Sequence: Synthetic peptide
GPNFISTAVKA

SEQ ID NO: 5960 - protein, 8 aa, synthetic construct
  REGION 1..8: note = Description of Artificial Sequence: Synthetic peptide
IPIVAIVA

SEQ ID NO: 5961 - protein, 10 aa, synthetic construct
  REGION 1..10: note = Description of Artificial Sequence: Synthetic peptide
EPLGVAPTKA

SEQ ID NO: 5962 - protein, 9 aa, synthetic construct
  REGION 1..9: note = Description of Artificial Sequence: Synthetic peptide
HPGSQPKTA

SEQ ID NO: 5963 - protein, 9 aa, synthetic construct
  REGION 1..9: note = Description of Artificial Sequence: Synthetic peptide
ASMALTVQA

SEQ ID NO: 5964 - protein, 10 aa, synthetic construct
  REGION 1..10: note = Description of Artificial Sequence: Synthetic peptide
IPYNPQSQGV

SEQ ID NO: 5965 - protein, 9 aa, synthetic construct
  REGION 1..9: note = Description of Artificial Sequence: Synthetic peptide
FPISPIETV

SEQ ID NO: 5966 - protein, 9 aa, synthetic construct
  REGION 1..9: note = Description of Artificial Sequence: Synthetic peptide
HPAQAGPIA

SEQ ID NO: 5967 - protein, 11 aa, synthetic construct
  REGION 1..11: note = Description of Artificial Sequence: Synthetic peptide
VPVDPDQVEKA

SEQ ID NO: 5968 - protein, 9 aa, synthetic construct
  REGION 1..9: note = Description of Artificial Sequence: Synthetic peptide
HPVHAGPIA

SEQ ID NO: 5969 - protein, 11 aa, synthetic construct
  REGION 1..11: note = Description of Artificial Sequence: Synthetic peptide
VPVEPDKIEEA

SEQ ID NO: 5970 - protein, 10 aa, synthetic construct
  REGION 1..10: note = Description of Artificial Sequence: Synthetic peptide
IPYNPQSQGV

SEQ ID NO: 5971 - protein, 10 aa, synthetic construct
  REGION 1..10: note = Description of Artificial Sequence: Synthetic peptide
APQDRQTHQA

SEQ ID NO: 5972 - protein, 9 aa, synthetic construct
  REGION 1..9: note = Description of Artificial Sequence: Synthetic peptide
GPNFISTAV

SEQ ID NO: 5973 - protein, 10 aa, synthetic construct
  REGION 1..10: note = Description of Artificial Sequence: Synthetic peptide
APAGFAILKC

SEQ ID NO: 5974 - protein, 11 aa, synthetic construct
  REGION 1..11: note = Description of Artificial Sequence: Synthetic peptide
VPVEPEKIEEA

SEQ ID NO: 5975 - protein, 11 aa, synthetic construct
  REGION 1..11: note = Description of Artificial Sequence: Synthetic peptide
VPVEPDKVEEA

SEQ ID NO: 5976 - protein, 9 aa, synthetic construct
  REGION 1..9: note = Description of Artificial Sequence: Synthetic peptide
SPTSRELQV

SEQ ID NO: 5977 - protein, 10 aa, synthetic construct
  REGION 1..10: note = Description of Artificial Sequence: Synthetic peptide
IPAETGQETA

SEQ ID NO: 5978 - protein, 11 aa, synthetic construct
  REGION 1..11: note = Description of Artificial Sequence: Synthetic peptide
GPNFISTAVKA

SEQ ID NO: 5979 - protein, 9 aa, synthetic construct
  REGION 1..9: note = Description of Artificial Sequence: Synthetic peptide
RPEPTAPPA

SEQ ID NO: 5980 - protein, 10 aa, synthetic construct
  REGION 1..10: note = Description of Artificial Sequence: Synthetic peptide
APPIAGQISC

SEQ ID NO: 5981 - protein, 10 aa, synthetic construct
  REGION 1..10: note = Description of Artificial Sequence: Synthetic peptide
SPEVIPMFSA

SEQ ID NO: 5982 - protein, 9 aa, synthetic construct
  REGION 1..9: note = Description of Artificial Sequence: Synthetic peptide
HPGSQPKTA

SEQ ID NO: 5983 - protein, 10 aa, synthetic construct
  REGION 1..10: note = Description of Artificial Sequence: Synthetic peptide
EPLGVAPTTA

SEQ ID NO: 5984 - protein, 10 aa, synthetic construct
  REGION 1..10: note = Description of Artificial Sequence: Synthetic peptide
IPIEICGNKA

SEQ ID NO: 5985 - protein, 10 aa, synthetic construct
  REGION 1..10: note = Description of Artificial Sequence: Synthetic peptide
QPIPIVAIVA

SEQ ID NO: 5986 - protein, 10 aa, synthetic construct
  REGION 1..10: note = Description of Artificial Sequence: Synthetic peptide
TPQDSQTHQV

SEQ ID NO: 5987 - protein, 9 aa, synthetic construct
  REGION 1..9: note = Description of Artificial Sequence: Synthetic peptide
PPIAGQISC

SEQ ID NO: 5988 - protein, 9 aa, synthetic construct
  REGION 1..9: note = Description of Artificial Sequence: Synthetic peptide
NPYNTPIFA

SEQ ID NO: 5989 - protein, 11 aa, synthetic construct
  REGION 1..11: note = Description of Artificial Sequence: Synthetic peptide
KAYDTEVHNVW

SEQ ID NO: 5990 - protein, 11 aa, synthetic construct
  REGION 1..11: note = Description of Artificial Sequence: Synthetic peptide
KAYETEVHNVW

SEQ ID NO: 5991 - protein, 9 aa, synthetic construct
  REGION 1..9: note = Description of Artificial Sequence: Synthetic peptide
ASLVIKTYW

SEQ ID NO: 5992 - protein, 9 aa, synthetic construct
  REGION 1..9: note = Description of Artificial Sequence: Synthetic peptide
STKLFNSTW

SEQ ID NO: 5993 - protein, 9 aa, synthetic construct
  REGION 1..9: note = Description of Artificial Sequence: Synthetic peptide
TTVPWNASW

SEQ ID NO: 5994 - protein, 9 aa, synthetic construct
  REGION 1..9: note = Description of Artificial Sequence: Synthetic peptide
STLQEQITW

SEQ ID NO: 5995 - protein, 10 aa, synthetic construct
  REGION 1..10: note = Description of Artificial Sequence: Synthetic peptide
RVIEIVQRTF

SEQ ID NO: 5996 - protein, 9 aa, synthetic construct
  REGION 1..9: note = Description of Artificial Sequence: Synthetic peptide
FSFPQITLW

SEQ ID NO: 5997 - protein, 9 aa, synthetic construct
  REGION 1..9: note = Description of Artificial Sequence: Synthetic peptide
TAVPWNASW

SEQ ID NO: 5998 - protein, 9 aa, synthetic construct
  REGION 1..9: note = Description of Artificial Sequence: Synthetic peptide
STLQEQIGW

SEQ ID NO: 5999 - protein, 9 aa, synthetic construct
  REGION 1..9: note = Description of Artificial Sequence: Synthetic peptide
VTKLTEDRW

SEQ ID NO: 6000 - protein, 10 aa, synthetic construct
  REGION 1..10: note = Description of Artificial Sequence: Synthetic peptide
ITMGPGRVYY

SEQ ID NO: 6001 - protein, 10 aa, synthetic construct
  REGION 1..10: note = Description of Artificial Sequence: Synthetic peptide
ITMGPGKVYY

SEQ ID NO: 6002 - protein, 11 aa, synthetic construct
  REGION 1..11: note = Description of Artificial Sequence: Synthetic peptide
ISFSFPQITLW

SEQ ID NO: 6003 - protein, 10 aa, synthetic construct
  REGION 1..10: note = Description of Artificial Sequence: Synthetic peptide
RVIEVLQRVY

SEQ ID NO: 6004 - protein, 11 aa, synthetic construct
  REGION 1..11: note = Description of Artificial Sequence: Synthetic peptide
SVLSGGQLDRW

SEQ ID NO: 6005 - protein, 9 aa, synthetic construct
  REGION 1..9: note = Description of Artificial Sequence: Synthetic peptide
RIKQIVNMW

SEQ ID NO: 6006 - protein, 11 aa, synthetic construct
  REGION 1..11: note = Description of Artificial Sequence: Synthetic peptide
SVLSGGELDRW

SEQ ID NO: 6007 - protein, 9 aa, synthetic construct
  REGION 1..9: note = Description of Artificial Sequence: Synthetic peptide
RIKQIINRW

SEQ ID NO: 6008 - protein, 9 aa, synthetic construct
  REGION 1..9: note = Description of Artificial Sequence: Synthetic peptide
ITKGLGISY

SEQ ID NO: 6009 - protein, 9 aa, synthetic construct
  REGION 1..9: note = Description of Artificial Sequence: Synthetic peptide
IVLPEKDTW

SEQ ID NO: 6010 - protein, 9 aa, synthetic construct
  REGION 1..9: note = Description of Artificial Sequence: Synthetic peptide
RIKQIINMW

SEQ ID NO: 6011 - protein, 11 aa, synthetic construct
  REGION 1..11: note = Description of Artificial Sequence: Synthetic peptide
TTSTLQEQITW

SEQ ID NO: 6012 - protein, 9 aa, synthetic construct
  REGION 1..9: note = Description of Artificial Sequence: Synthetic peptide
STKLFNSIW

SEQ ID NO: 6013 - protein, 9 aa, synthetic construct
  REGION 1..9: note = Description of Artificial Sequence: Synthetic peptide
FSVPLDREF

SEQ ID NO: 6014 - protein, 9 aa, synthetic construct
  REGION 1..9: note = Description of Artificial Sequence: Synthetic peptide
ITKALGISY

SEQ ID NO: 6015 - protein, 9 aa, synthetic construct
  REGION 1..9: note = Description of Artificial Sequence: Synthetic peptide
ITTESIVIW

SEQ ID NO: 6016 - protein, 9 aa, synthetic construct
  REGION 1..9: note = Description of Artificial Sequence: Synthetic peptide
STQLFNSTW

SEQ ID NO: 6017 - protein, 11 aa, synthetic construct
  REGION 1..11: note = Description of Artificial Sequence: Synthetic peptide
TTSTLQEQIGW

SEQ ID NO: 6018 - protein, 11 aa, synthetic construct
  REGION 1..11: note = Description of Artificial Sequence: Synthetic peptide
VSFSFPQITLW

SEQ ID NO: 6019 - protein, 9 aa, synthetic construct
  REGION 1..9: note = Description of Artificial Sequence: Synthetic peptide
NSTWFNSTW

SEQ ID NO: 6020 - protein, 11 aa, synthetic construct
  REGION 1..11: note = Description of Artificial Sequence: Synthetic peptide
VSFNFPQVTLW

SEQ ID NO: 6021 - protein, 11 aa, synthetic construct
  REGION 1..11: note = Description of Artificial Sequence: Synthetic peptide
SVLSGGKLDTW

SEQ ID NO: 6022 - protein, 9 aa, synthetic construct
  REGION 1..9: note = Description of Artificial Sequence: Synthetic peptide
VAKLTEDRW

SEQ ID NO: 6023 - protein, 10 aa, synthetic construct
  REGION 1..10: note = Description of Artificial Sequence: Synthetic peptide
KIATESIVIW

SEQ ID NO: 6024 - protein, 11 aa, synthetic construct
  REGION 1..11: note = Description of Artificial Sequence: Synthetic peptide
LAFPQGEAREF

SEQ ID NO: 6025 - protein, 11 aa, synthetic construct
  REGION 1..11: note = Description of Artificial Sequence: Synthetic peptide
VVAGIIAIVVW

SEQ ID NO: 6026 - protein, 9 aa, synthetic construct
  REGION 1..9: note = Description of Artificial Sequence: Synthetic peptide
ITMGPGRVY

SEQ ID NO: 6027 - protein, 10 aa, synthetic construct
  REGION 1..10: note = Description of Artificial Sequence: Synthetic peptide
VTVYYGVPVW

SEQ ID NO: 6028 - protein, 9 aa, synthetic construct
  REGION 1..9: note = Description of Artificial Sequence: Synthetic peptide
AAILAIVVW

SEQ ID NO: 6029 - protein, 9 aa, synthetic construct
  REGION 1..9: note = Description of Artificial Sequence: Synthetic peptide
IVLPEKDSW

SEQ ID NO: 6030 - protein, 9 aa, synthetic construct
  REGION 1..9: note = Description of Artificial Sequence: Synthetic peptide
AAIIAIVVW

SEQ ID NO: 6031 - protein, 9 aa, synthetic construct
  REGION 1..9: note = Description of Artificial Sequence: Synthetic peptide
TTQLFNSTW

SEQ ID NO: 6032 - protein, 11 aa, synthetic construct
  REGION 1..11: note = Description of Artificial Sequence: Synthetic peptide
VVAAIIAIVVW

SEQ ID NO: 6033 - protein, 11 aa, synthetic construct
  REGION 1..11: note = Description of Artificial Sequence: Synthetic peptide
KSLFNTVATLY

SEQ ID NO: 6034 - protein, 10 aa, synthetic construct
  REGION 1..10: note = Description of Artificial Sequence: Synthetic peptide
RVIETIQRAF

SEQ ID NO: 6035 - protein, 10 aa, synthetic construct
  REGION 1..10: note = Description of Artificial Sequence: Synthetic peptide
QQRQDILDLW

SEQ ID NO: 6036 - protein, 9 aa, synthetic construct
  REGION 1..9: note = Description of Artificial Sequence: Synthetic peptide
KTAVQMAVF

SEQ ID NO: 6037 - protein, 11 aa, synthetic construct
  REGION 1..11: note = Description of Artificial Sequence: Synthetic peptide
KSIHIGPGRAF

SEQ ID NO: 6038 - protein, 10 aa, synthetic construct
  REGION 1..10: note = Description of Artificial Sequence: Synthetic peptide
TTAVPWNASW

SEQ ID NO: 6039 - protein, 9 aa, synthetic construct
  REGION 1..9: note = Description of Artificial Sequence: Synthetic peptide
RAVGIGALF

SEQ ID NO: 6040 - protein, 9 aa, synthetic construct
  REGION 1..9: note = Description of Artificial Sequence: Synthetic peptide
STLQEQITW

SEQ ID NO: 6041 - protein, 9 aa, synthetic construct
  REGION 1..9: note = Description of Artificial Sequence: Synthetic peptide
ISSAAENLW

SEQ ID NO: 6042 - protein, 9 aa, synthetic construct
  REGION 1..9: note = Description of Artificial Sequence: Synthetic peptide
STLQEQIGW

SEQ ID NO: 6043 - protein, 9 aa, synthetic construct
  REGION 1..9: note = Description of Artificial Sequence: Synthetic peptide
YSTQVDPEL

SEQ ID NO: 6044 - protein, 9 aa, synthetic construct
  REGION 1..9: note = Description of Artificial Sequence: Synthetic peptide
RSGPLVDGF

SEQ ID NO: 6045 - protein, 9 aa, synthetic construct
  REGION 1..9: note = Description of Artificial Sequence: Synthetic peptide
KNNPVSQNY

SEQ ID NO: 6046 - protein, 9 aa, synthetic construct
  REGION 1..9: note = Description of Artificial Sequence: Synthetic peptide
RAVGIGAVF

SEQ ID NO: 6047 - protein, 11 aa, synthetic construct
  REGION 1..11: note = Description of Artificial Sequence: Synthetic peptide
KAYDTEVHNVW

SEQ ID NO: 6048 - protein, 10 aa, synthetic construct
  REGION 1..10: note = Description of Artificial Sequence: Synthetic peptide
TAATNADCAW

SEQ ID NO: 6049 - protein, 9 aa, synthetic construct
  REGION 1..9: note = Description of Artificial Sequence: Synthetic peptide
RAIEAQQHL

SEQ ID NO: 6050 - protein, 9 aa, synthetic construct
  REGION 1..9: note = Description of Artificial Sequence: Synthetic peptide
ISERILGTY

SEQ ID NO: 6051 - protein, 11 aa, synthetic construct
  REGION 1..11: note = Description of Artificial Sequence: Synthetic peptide
KTIHTDNGSNF

SEQ ID NO: 6052 - protein, 9 aa, synthetic construct
  REGION 1..9: note = Description of Artificial Sequence: Synthetic peptide
AATNAACAW

SEQ ID NO: 6053 - protein, 9 aa, synthetic construct
  REGION 1..9: note = Description of Artificial Sequence: Synthetic peptide
NSSQVSQNY

SEQ ID NO: 6054 - protein, 9 aa, synthetic construct
  REGION 1..9: note = Description of Artificial Sequence: Synthetic peptide
TTVPWNASW

SEQ ID NO: 6055 - protein, 9 aa, synthetic construct
  REGION 1..9: note = Description of Artificial Sequence: Synthetic peptide
TAVPWNASW

SEQ ID NO: 6056 - protein, 9 aa, synthetic construct
  REGION 1..9: note = Description of Artificial Sequence: Synthetic peptide
AAVDLSHFL

SEQ ID NO: 6057 - protein, 9 aa, synthetic construct
  REGION 1..9: note = Description of Artificial Sequence: Synthetic peptide
HSNQVSQNY

SEQ ID NO: 6058 - protein, 9 aa, synthetic construct
  REGION 1..9: note = Description of Artificial Sequence: Synthetic peptide
KAAVDLSHF

SEQ ID NO: 6059 - protein, 10 aa, synthetic construct
  REGION 1..10: note = Description of Artificial Sequence: Synthetic peptide
TAATNAACAW

SEQ ID NO: 6060 - protein, 9 aa, synthetic construct
  REGION 1..9: note = Description of Artificial Sequence: Synthetic peptide
RAVGIGALF

SEQ ID NO: 6061 - protein, 9 aa, synthetic construct
  REGION 1..9: note = Description of Artificial Sequence: Synthetic peptide
STQLFNSTW

SEQ ID NO: 6062 - protein, 9 aa, synthetic construct
  REGION 1..9: note = Description of Artificial Sequence: Synthetic peptide
KTAVQMAVF

SEQ ID NO: 6063 - protein, 9 aa, synthetic construct
  REGION 1..9: note = Description of Artificial Sequence: Synthetic peptide
AANNAACAW

SEQ ID NO: 6064 - protein, 10 aa, synthetic construct
  REGION 1..10: note = Description of Artificial Sequence: Synthetic peptide
RAIEAQQHLL

SEQ ID NO: 6065 - protein, 11 aa, synthetic construct
  REGION 1..11: note = Description of Artificial Sequence: Synthetic peptide
KAYETEVHNVW

SEQ ID NO: 6066 - protein, 9 aa, synthetic construct
  REGION 1..9: note = Description of Artificial Sequence: Synthetic peptide
GSGPLVNGF

SEQ ID NO: 6067 - protein, 10 aa, synthetic construct
  REGION 1..10: note = Description of Artificial Sequence: Synthetic peptide
ITMGPGKVYY

SEQ ID NO: 6068 - protein, 9 aa, synthetic construct
  REGION 1..9: note = Description of Artificial Sequence: Synthetic peptide
ITKGLGISY

SEQ ID NO: 6069 - protein, 8 aa, synthetic construct
  REGION 1..8: note = Description of Artificial Sequence: Synthetic peptide
GQGVSIEW

SEQ ID NO: 6070 - protein, 9 aa, synthetic construct
  REGION 1..9: note = Description of Artificial Sequence: Synthetic peptide
TTQLFNSTW

SEQ ID NO: 6071 - protein, 9 aa, synthetic construct
  REGION 1..9: note = Description of Artificial Sequence: Synthetic peptide
TINEEAAEW

SEQ ID NO: 6072 - protein, 9 aa, synthetic construct
  REGION 1..9: note = Description of Artificial Sequence: Synthetic peptide
LSKQPTSQL

SEQ ID NO: 6073 - protein, 9 aa, synthetic construct
  REGION 1..9: note = Description of Artificial Sequence: Synthetic peptide
YTTQVDPDL

SEQ ID NO: 6074 - protein, 9 aa, synthetic construct
  REGION 1..9: note = Description of Artificial Sequence: Synthetic peptide
KALGPAATL

SEQ ID NO: 6075 - protein, 8 aa, synthetic construct
  REGION 1..8: note = Description of Artificial Sequence: Synthetic peptide
NSPTSREL

SEQ ID NO: 6076 - protein, 9 aa, synthetic construct
  REGION 1..9: note = Description of Artificial Sequence: Synthetic peptide
HIPLGEASL

SEQ ID NO: 6077 - protein, 8 aa, synthetic construct
  REGION 1..8: note = Description of Artificial Sequence: Synthetic peptide
NSPTRREL

SEQ ID NO: 6078 - protein, 8 aa, synthetic construct
  REGION 1..8: note = Description of Artificial Sequence: Synthetic peptide
VGPVSRDL

SEQ ID NO: 6079 - protein, 8 aa, synthetic construct
  REGION 1..8: note = Description of Artificial Sequence: Synthetic peptide
DSPTSREL

SEQ ID NO: 6080 - protein, 9 aa, synthetic construct
  REGION 1..9: note = Description of Artificial Sequence: Synthetic peptide
YSPTSILDI

SEQ ID NO: 6081 - protein, 10 aa, synthetic construct
  REGION 1..10: note = Description of Artificial Sequence: Synthetic peptide
ITMGPGKVYY

SEQ ID NO: 6082 - protein, 9 aa, synthetic construct
  REGION 1..9: note = Description of Artificial Sequence: Synthetic peptide
ITKGLGISY

SEQ ID NO: 6083 - protein, 9 aa, synthetic construct
  REGION 1..9: note = Description of Artificial Sequence: Synthetic peptide
RAVGIGAVF

SEQ ID NO: 6084 - protein, 9 aa, synthetic construct
  REGION 1..9: note = Description of Artificial Sequence: Synthetic peptide
AAVDLSHFL

SEQ ID NO: 6085 - protein, 9 aa, synthetic construct
  REGION 1..9: note = Description of Artificial Sequence: Synthetic peptide
DARLVITTY

SEQ ID NO: 6086 - protein, 9 aa, synthetic construct
  REGION 1..9: note = Description of Artificial Sequence: Synthetic peptide
ITKGLGISY

SEQ ID NO: 6087 - protein, 8 aa, synthetic construct
  REGION 1..8: note = Description of Artificial Sequence: Synthetic peptide
AELVVTTY

SEQ ID NO: 6088 - protein, 9 aa, synthetic construct
  REGION 1..9: note = Description of Artificial Sequence: Synthetic peptide
ITKALGISY

SEQ ID NO: 6089 - protein, 9 aa, synthetic construct
  REGION 1..9: note = Description of Artificial Sequence: Synthetic peptide
DAELVVTTY

SEQ ID NO: 6090 - protein, 9 aa, synthetic construct
  REGION 1..9: note = Description of Artificial Sequence: Synthetic peptide
EAKLVITTY

SEQ ID NO: 6091 - protein, 9 aa, synthetic construct
  REGION 1..9: note = Description of Artificial Sequence: Synthetic peptide
LADQLIHVY

SEQ ID NO: 6092 - protein, 8 aa, synthetic construct
  REGION 1..8: note = Description of Artificial Sequence: Synthetic peptide
VLDVGDAY

SEQ ID NO: 6093 - protein, 9 aa, synthetic construct
  REGION 1..9: note = Description of Artificial Sequence: Synthetic peptide
ISERILGTY

SEQ ID NO: 6094 - protein, 9 aa, synthetic construct
  REGION 1..9: note = Description of Artificial Sequence: Synthetic peptide
YSTQVDPEL

SEQ ID NO: 6095 - protein, 9 aa, synthetic construct
  REGION 1..9: note = Description of Artificial Sequence: Synthetic peptide
AAVDLSHFL

SEQ ID NO: 6096 - protein, 9 aa, synthetic construct
  REGION 1..9: note = Description of Artificial Sequence: Synthetic peptide
LIVTRTLEL

SEQ ID NO: 6097 - protein, 9 aa, synthetic construct
  REGION 1..9: note = Description of Artificial Sequence: Synthetic peptide
YTTQVDPDL

SEQ ID NO: 6098 - protein, 9 aa, synthetic construct
  REGION 1..9: note = Description of Artificial Sequence: Synthetic peptide
RAIEAQQHL

SEQ ID NO: 6099 - protein, 9 aa, synthetic construct
  REGION 1..9: note = Description of Artificial Sequence: Synthetic peptide
LSKQPTSQL

SEQ ID NO: 6100 - protein, 9 aa, synthetic construct
  REGION 1..9: note = Description of Artificial Sequence: Synthetic peptide
YSTQVDPDL

SEQ ID NO: 6101 - protein, 9 aa, synthetic construct
  REGION 1..9: note = Description of Artificial Sequence: Synthetic peptide
YSTQVDPEL

SEQ ID NO: 6102 - protein, 9 aa, synthetic construct
  REGION 1..9: note = Description of Artificial Sequence: Synthetic peptide
AAVDLSHFL

SEQ ID NO: 6103 - protein, 9 aa, synthetic construct
  REGION 1..9: note = Description of Artificial Sequence: Synthetic peptide
YTTQVDPDL

SEQ ID NO: 6104 - protein, 9 aa, synthetic construct
  REGION 1..9: note = Description of Artificial Sequence: Synthetic peptide
LSKQPTSQL

SEQ ID NO: 6105 - protein, 9 aa, synthetic construct
  REGION 1..9: note = Description of Artificial Sequence: Synthetic peptide
LIVTRTLEL

SEQ ID NO: 6106 - protein, 9 aa, synthetic construct
  REGION 1..9: note = Description of Artificial Sequence: Synthetic peptide
RAIEAQQHL

SEQ ID NO: 6107 - protein, 9 aa, synthetic construct
  REGION 1..9: note = Description of Artificial Sequence: Synthetic peptide
YSTQVDPDL

SEQ ID NO: 6108 - protein, 8 aa, synthetic construct
  REGION 1..8: note = Description of Artificial Sequence: Synthetic peptide
HSRIGITL

SEQ ID NO: 6109 - protein, 9 aa, synthetic construct
  REGION 1..9: note = Description of Artificial Sequence: Synthetic peptide
ATDIQTKEL

SEQ ID NO: 6110 - protein, 9 aa, synthetic construct
  REGION 1..9: note = Description of Artificial Sequence: Synthetic peptide
SAEPVPLQL

SEQ ID NO: 6111 - protein, 9 aa, synthetic construct
  REGION 1..9: note = Description of Artificial Sequence: Synthetic peptide
LIVTRIVEL

SEQ ID NO: 6112 - protein, 9 aa, synthetic construct
  REGION 1..9: note = Description of Artificial Sequence: Synthetic peptide
QYDQILVEI

SEQ ID NO: 6113 - protein, 9 aa, synthetic construct
  REGION 1..9: note = Description of Artificial Sequence: Synthetic peptide
YYDPTKDLI

SEQ ID NO: 6114 - protein, 9 aa, synthetic construct
  REGION 1..9: note = Description of Artificial Sequence: Synthetic peptide
QYDQIPIEI

SEQ ID NO: 6115 - protein, 9 aa, synthetic construct
  REGION 1..9: note = Description of Artificial Sequence: Synthetic peptide
QYDQILIEI

SEQ ID NO: 6116 - protein, 9 aa, synthetic construct
  REGION 1..9: note = Description of Artificial Sequence: Synthetic peptide
HTDNGPNFI

SEQ ID NO: 6117 - protein, 8 aa, synthetic construct
  REGION 1..8: note = Description of Artificial Sequence: Synthetic peptide
HTDNGSNF

SEQ ID NO: 6118 - protein, 9 aa, synthetic construct
  REGION 1..9: note = Description of Artificial Sequence: Synthetic peptide
SAEPVPLQL

SEQ ID NO: 6119 - protein, 8 aa, synthetic construct
  REGION 1..8: note = Description of Artificial Sequence: Synthetic peptide
AVDLSHFL

SEQ ID NO: 6120 - protein, 9 aa, synthetic construct
  REGION 1..9: note = Description of Artificial Sequence: Synthetic peptide
VLDVGDAYF

SEQ ID NO: 6121 - protein, 9 aa, synthetic construct
  REGION 1..9: note = Description of Artificial Sequence: Synthetic peptide
IQDNSDIKV

SEQ ID NO: 6122 - protein, 9 aa, synthetic construct
  REGION 1..9: note = Description of Artificial Sequence: Synthetic peptide
QRPLVTIKI

SEQ ID NO: 6123 - protein, 9 aa, synthetic construct
  REGION 1..9: note = Description of Artificial Sequence: Synthetic peptide
SRAKWNNTL

SEQ ID NO: 6124 - protein, 9 aa, synthetic construct
  REGION 1..9: note = Description of Artificial Sequence: Synthetic peptide
QRPIVTIKI

SEQ ID NO: 6125 - protein, 9 aa, synthetic construct
  REGION 1..9: note = Description of Artificial Sequence: Synthetic peptide
FRNQVVRCF

SEQ ID NO: 6126 - protein, 9 aa, synthetic construct
  REGION 1..9: note = Description of Artificial Sequence: Synthetic peptide
VTNSGAIMM

SEQ ID NO: 6127 - protein, 9 aa, synthetic construct
  REGION 1..9: note = Description of Artificial Sequence: Synthetic peptide
YSTQVDPEL

SEQ ID NO: 6128 - protein, 9 aa, synthetic construct
  REGION 1..9: note = Description of Artificial Sequence: Synthetic peptide
SAVSLFNAI

SEQ ID NO: 6129 - protein, 9 aa, synthetic construct
  REGION 1..9: note = Description of Artificial Sequence: Synthetic peptide
AAVDLSHFL

SEQ ID NO: 6130 - protein, 9 aa, synthetic construct
  REGION 1..9: note = Description of Artificial Sequence: Synthetic peptide
DARLVITTY

SEQ ID NO: 6131 - protein, 9 aa, synthetic construct
  REGION 1..9: note = Description of Artificial Sequence: Synthetic peptide
HIVSPSCEY

SEQ ID NO: 6132 - protein, 9 aa, synthetic construct
  REGION 1..9: note = Description of Artificial Sequence: Synthetic peptide
EAKLVITTY

SEQ ID NO: 6133 - protein, 9 aa, synthetic construct
  REGION 1..9: note = Description of Artificial Sequence: Synthetic peptide
SAEPVPLQL

SEQ ID NO: 6134 - protein, 9 aa, synthetic construct
  REGION 1..9: note = Description of Artificial Sequence: Synthetic peptide
FLGAAGSTM

SEQ ID NO: 6135 - protein, 9 aa, synthetic construct
  REGION 1..9: note = Description of Artificial Sequence: Synthetic peptide
YTTQVDPDL

SEQ ID NO: 6136 - protein, 9 aa, synthetic construct
  REGION 1..9: note = Description of Artificial Sequence: Synthetic peptide
QVTNSGAIM

SEQ ID NO: 6137 - protein, 9 aa, synthetic construct
  REGION 1..9: note = Description of Artificial Sequence: Synthetic peptide
ALVEMGVEM

SEQ ID NO: 6138 - protein, 9 aa, synthetic construct
  REGION 1..9: note = Description of Artificial Sequence: Synthetic peptide
TVLDVGDAY

SEQ ID NO: 6139 - protein, 9 aa, synthetic construct
  REGION 1..9: note = Description of Artificial Sequence: Synthetic peptide
IVTDSQYAL

SEQ ID NO: 6140 - protein, 9 aa, synthetic construct
  REGION 1..9: note = Description of Artificial Sequence: Synthetic peptide
ALVEICTEM

SEQ ID NO: 6141 - protein, 10 aa, synthetic construct
  REGION 1..10: note = Description of Artificial Sequence: Synthetic peptide
IPIDNDTTSY

SEQ ID NO: 6142 - protein, 8 aa, synthetic construct
  REGION 1..8: note = Description of Artificial Sequence: Synthetic peptide
DQLIHVYY

SEQ ID NO: 6143 - protein, 8 aa, synthetic construct
  REGION 1..8: note = Description of Artificial Sequence: Synthetic peptide
AVDLSHFL

SEQ ID NO: 6144 - protein, 9 aa, synthetic construct
  REGION 1..9: note = Description of Artificial Sequence: Synthetic peptide
ATDIQTKEL

SEQ ID NO: 6145 - protein, 10 aa, synthetic construct
  REGION 1..10: note = Description of Artificial Sequence: Synthetic peptide
RADSPTSREL

SEQ ID NO: 6146 - protein, 8 aa, synthetic construct
  REGION 1..8: note = Description of Artificial Sequence: Synthetic peptide
ALDLSHFL

SEQ ID NO: 6147 - protein, 10 aa, synthetic construct
  REGION 1..10: note = Description of Artificial Sequence: Synthetic peptide
FSDSAIRNAL

SEQ ID NO: 6148 - protein, 10 aa, synthetic construct
  REGION 1..10: note = Description of Artificial Sequence: Synthetic peptide
AADTGHSNQV

SEQ ID NO: 6149 - protein, 9 aa, synthetic construct
  REGION 1..9: note = Description of Artificial Sequence: Synthetic peptide
TQDFWEVQL

SEQ ID NO: 6150 - protein, 10 aa, synthetic construct
  REGION 1..10: note = Description of Artificial Sequence: Synthetic peptide
GIDDPEKEVL

SEQ ID NO: 6151 - protein, 9 aa, synthetic construct
  REGION 1..9: note = Description of Artificial Sequence: Synthetic peptide
HTDNGPNFI

SEQ ID NO: 6152 - protein, 9 aa, synthetic construct
  REGION 1..9: note = Description of Artificial Sequence: Synthetic peptide
SAEPVPLQL

SEQ ID NO: 6153 - protein, 9 aa, synthetic construct
  REGION 1..9: note = Description of Artificial Sequence: Synthetic peptide
FTDNTKTII

SEQ ID NO: 6154 - protein, 9 aa, synthetic construct
  REGION 1..9: note = Description of Artificial Sequence: Synthetic peptide
GTDRVIEVL

SEQ ID NO: 6155 - protein, 8 aa, synthetic construct
  REGION 1..8: note = Description of Artificial Sequence: Synthetic peptide
SQTHQVSL

SEQ ID NO: 6156 - protein, 9 aa, synthetic construct
  REGION 1..9: note = Description of Artificial Sequence: Synthetic peptide
ALVEICTEL

SEQ ID NO: 6157 - protein, 10 aa, synthetic construct
  REGION 1..10: note = Description of Artificial Sequence: Synthetic peptide
VSFEPIPIYY

SEQ ID NO: 6158 - protein, 9 aa, synthetic construct
  REGION 1..9: note = Description of Artificial Sequence: Synthetic peptide
NAKTIIVQL

SEQ ID NO: 6159 - protein, 9 aa, synthetic construct
  REGION 1..9: note = Description of Artificial Sequence: Synthetic peptide
EASLVIKTY

SEQ ID NO: 6160 - protein, 10 aa, synthetic construct
  REGION 1..10: note = Description of Artificial Sequence: Synthetic peptide
VSFEPIPIHY

SEQ ID NO: 6161 - protein, 9 aa, synthetic construct
  REGION 1..9: note = Description of Artificial Sequence: Synthetic peptide
AAVDLSHFL

SEQ ID NO: 6162 - protein, 9 aa, synthetic construct
  REGION 1..9: note = Description of Artificial Sequence: Synthetic peptide
NTKTIIVQL

SEQ ID NO: 6163 - protein, 9 aa, synthetic construct
  REGION 1..9: note = Description of Artificial Sequence: Synthetic peptide
LSKQPTSQL

SEQ ID NO: 6164 - protein, 9 aa, synthetic construct
  REGION 1..9: note = Description of Artificial Sequence: Synthetic peptide
ITKGLGISY

SEQ ID NO: 6165 - protein, 9 aa, synthetic construct
  REGION 1..9: note = Description of Artificial Sequence: Synthetic peptide
FSVPLDREF

SEQ ID NO: 6166 - protein, 10 aa, synthetic construct
  REGION 1..10: note = Description of Artificial Sequence: Synthetic peptide
AFPQGKAREF

SEQ ID NO: 6167 - protein, 10 aa, synthetic construct
  REGION 1..10: note = Description of Artificial Sequence: Synthetic peptide
AFPQGEAREF

SEQ ID NO: 6168 - protein, 9 aa, synthetic construct
  REGION 1..9: note = Description of Artificial Sequence: Synthetic peptide
IYQEPFKNL

SEQ ID NO: 6169 - protein, 9 aa, synthetic construct
  REGION 1..9: note = Description of Artificial Sequence: Synthetic peptide
AFHHVAREL

SEQ ID NO: 6170 - protein, 9 aa, synthetic construct
  REGION 1..9: note = Description of Artificial Sequence: Synthetic peptide
FYKLDVVQM

SEQ ID NO: 6171 - protein, 9 aa, synthetic construct
  REGION 1..9: note = Description of Artificial Sequence: Synthetic peptide
LYNTVATLY

SEQ ID NO: 6172 - protein, 8 aa, synthetic construct
  REGION 1..8: note = Description of Artificial Sequence: Synthetic peptide
LYNTVATL

SEQ ID NO: 6173 - protein, 10 aa, synthetic construct
  REGION 1..10: note = Description of Artificial Sequence: Synthetic peptide
AFLQGKAREF

SEQ ID NO: 6174 - protein, 9 aa, synthetic construct
  REGION 1..9: note = Description of Artificial Sequence: Synthetic peptide
YYRDSRNPL

SEQ ID NO: 6175 - protein, 9 aa, synthetic construct
  REGION 1..9: note = Description of Artificial Sequence: Synthetic peptide
IFRPGGGDM

SEQ ID NO: 6176 - protein, 9 aa, synthetic construct
  REGION 1..9: note = Description of Artificial Sequence: Synthetic peptide
QFNNNTIVF

SEQ ID NO: 6177 - protein, 9 aa, synthetic construct
  REGION 1..9: note = Description of Artificial Sequence: Synthetic peptide
VFRPGGGNM

SEQ ID NO: 6178 - protein, 10 aa, synthetic construct
  REGION 1..10: note = Description of Artificial Sequence: Synthetic peptide
AFPQRKAREF

SEQ ID NO: 6179 - protein, 9 aa, synthetic construct
  REGION 1..9: note = Description of Artificial Sequence: Synthetic peptide
TYQIYQEPF

SEQ ID NO: 6180 - protein, 9 aa, synthetic construct
  REGION 1..9: note = Description of Artificial Sequence: Synthetic peptide
LYKNKTIVF

SEQ ID NO: 6181 - protein, 10 aa, synthetic construct
  REGION 1..10: note = Description of Artificial Sequence: Synthetic peptide
GFLGAAGSTM

SEQ ID NO: 6182 - protein, 9 aa, synthetic construct
  REGION 1..9: note = Description of Artificial Sequence: Synthetic peptide
VFIEYRKIL

SEQ ID NO: 6183 - protein, 8 aa, synthetic construct
  REGION 1..8: note = Description of Artificial Sequence: Synthetic peptide
VYHTQGYF

SEQ ID NO: 6184 - protein, 8 aa, synthetic construct
  REGION 1..8: note = Description of Artificial Sequence: Synthetic peptide
IYHTQGYF

SEQ ID NO: 6185 - protein, 9 aa, synthetic construct
  REGION 1..9: note = Description of Artificial Sequence: Synthetic peptide
FLQGKAREF

SEQ ID NO: 6186 - protein, 9 aa, synthetic construct
  REGION 1..9: note = Description of Artificial Sequence: Synthetic peptide
LFNTVATLY

SEQ ID NO: 6187 - protein, 9 aa, synthetic construct
  REGION 1..9: note = Description of Artificial Sequence: Synthetic peptide
IFRPGGGNM

SEQ ID NO: 6188 - protein, 9 aa, synthetic construct
  REGION 1..9: note = Description of Artificial Sequence: Synthetic peptide
LFNTIATLY

SEQ ID NO: 6189 - protein, 9 aa, synthetic construct
  REGION 1..9: note = Description of Artificial Sequence: Synthetic peptide
KYHSNWRAM

SEQ ID NO: 6190 - protein, 9 aa, synthetic construct
  REGION 1..9: note = Description of Artificial Sequence: Synthetic peptide
LYNTIAVLY

SEQ ID NO: 6191 - protein, 8 aa, synthetic construct
  REGION 1..8: note = Description of Artificial Sequence: Synthetic peptide
NYPIVQNL

SEQ ID NO: 6192 - protein, 9 aa, synthetic construct
  REGION 1..9: note = Description of Artificial Sequence: Synthetic peptide
VYYDPTKDL

SEQ ID NO: 6193 - protein, 8 aa, synthetic construct
  REGION 1..8: note = Description of Artificial Sequence: Synthetic peptide
LYNTVATL

SEQ ID NO: 6194 - protein, 9 aa, synthetic construct
  REGION 1..9: note = Description of Artificial Sequence: Synthetic peptide
IYQEPFKNL

SEQ ID NO: 6195 - protein, 10 aa, synthetic construct
  REGION 1..10: note = Description of Artificial Sequence: Synthetic peptide
GFLGAAGSTM

SEQ ID NO: 6196 - protein, 10 aa, synthetic construct
  REGION 1..10: note = Description of Artificial Sequence: Synthetic peptide
AFPQGEAREF

SEQ ID NO: 6197 - protein, 9 aa, synthetic construct
  REGION 1..9: note = Description of Artificial Sequence: Synthetic peptide
VFRPGGGNM

SEQ ID NO: 6198 - protein, 8 aa, synthetic construct
  REGION 1..8: note = Description of Artificial Sequence: Synthetic peptide
LYNTIAVL

SEQ ID NO: 6199 - protein, 9 aa, synthetic construct
  REGION 1..9: note = Description of Artificial Sequence: Synthetic peptide
TYQIYQEPF

SEQ ID NO: 6200 - protein, 9 aa, synthetic construct
  REGION 1..9: note = Description of Artificial Sequence: Synthetic peptide
FYKLDVVQM

SEQ ID NO: 6201 - protein, 9 aa, synthetic construct
  REGION 1..9: note = Description of Artificial Sequence: Synthetic peptide
LYNTVATLY

SEQ ID NO: 6202 - protein, 9 aa, synthetic construct
  REGION 1..9: note = Description of Artificial Sequence: Synthetic peptide
LYVGSDLEM

SEQ ID NO: 6203 - protein, 9 aa, synthetic construct
  REGION 1..9: note = Description of Artificial Sequence: Synthetic peptide
TSNITGLLL

SEQ ID NO: 6204 - protein, 9 aa, synthetic construct
  REGION 1..9: note = Description of Artificial Sequence: Synthetic peptide
TSLLHPVSL

SEQ ID NO: 6205 - protein, 9 aa, synthetic construct
  REGION 1..9: note = Description of Artificial Sequence: Synthetic peptide
SSNITGLLL

SEQ ID NO: 6206 - protein, 9 aa, synthetic construct
  REGION 1..9: note = Description of Artificial Sequence: Synthetic peptide
RVIEVLQRV

SEQ ID NO: 6207 - protein, 9 aa, synthetic construct
  REGION 1..9: note = Description of Artificial Sequence: Synthetic peptide
GAASVTLTV

SEQ ID NO: 6208 - protein, 9 aa, synthetic construct
  REGION 1..9: note = Description of Artificial Sequence: Synthetic peptide
ANSPTSREL

SEQ ID NO: 6209 - protein, 8 aa, synthetic construct
  REGION 1..8: note = Description of Artificial Sequence: Synthetic peptide
AGATRISF

SEQ ID NO: 6210 - protein, 9 aa, synthetic construct
  REGION 1..9: note = Description of Artificial Sequence: Synthetic peptide
FSVPLDREF

SEQ ID NO: 6211 - protein, 9 aa, synthetic construct
  REGION 1..9: note = Description of Artificial Sequence: Synthetic peptide
VSTGIRKVL

SEQ ID NO: 6212 - protein, 9 aa, synthetic construct
  REGION 1..9: note = Description of Artificial Sequence: Synthetic peptide
ITMGPGRVY

SEQ ID NO: 6213 - protein, 9 aa, synthetic construct
  REGION 1..9: note = Description of Artificial Sequence: Synthetic peptide
ITMGPGKVY

SEQ ID NO: 6214 - protein, 9 aa, synthetic construct
  REGION 1..9: note = Description of Artificial Sequence: Synthetic peptide
AAVDLSHFL

SEQ ID NO: 6215 - protein, 9 aa, synthetic construct
  REGION 1..9: note = Description of Artificial Sequence: Synthetic peptide
VARELHPEY

SEQ ID NO: 6216 - protein, 9 aa, synthetic construct
  REGION 1..9: note = Description of Artificial Sequence: Synthetic peptide
YSTQVDPEL

SEQ ID NO: 6217 - protein, 9 aa, synthetic construct
  REGION 1..9: note = Description of Artificial Sequence: Synthetic peptide
TSLLHPVSL

SEQ ID NO: 6218 - protein, 9 aa, synthetic construct
  REGION 1..9: note = Description of Artificial Sequence: Synthetic peptide
AAVDLSHFL

SEQ ID NO: 6219 - protein, 9 aa, synthetic construct
  REGION 1..9: note = Description of Artificial Sequence: Synthetic peptide
ANSPTSREL

SEQ ID NO: 6220 - protein, 10 aa, synthetic construct
  REGION 1..10: note = Description of Artificial Sequence: Synthetic peptide
IATDIQTKEL

SEQ ID NO: 6221 - protein, 9 aa, synthetic construct
  REGION 1..9: note = Description of Artificial Sequence: Synthetic peptide
EASLVIKTY

SEQ ID NO: 6222 - protein, 9 aa, synthetic construct
  REGION 1..9: note = Description of Artificial Sequence: Synthetic peptide
NAKTIIVQL

SEQ ID NO: 6223 - protein, 9 aa, synthetic construct
  REGION 1..9: note = Description of Artificial Sequence: Synthetic peptide
RAIEAQQHL

SEQ ID NO: 6224 - protein, 9 aa, synthetic construct
  REGION 1..9: note = Description of Artificial Sequence: Synthetic peptide
VARELHPEY

SEQ ID NO: 6225 - protein, 9 aa, synthetic construct
  REGION 1..9: note = Description of Artificial Sequence: Synthetic peptide
GAASVTLTV

SEQ ID NO: 6226 - protein, 9 aa, synthetic construct
  REGION 1..9: note = Description of Artificial Sequence: Synthetic peptide
VSTGIRKVL

SEQ ID NO: 6227 - protein, 9 aa, synthetic construct
  REGION 1..9: note = Description of Artificial Sequence: Synthetic peptide
YETEVHNVW

SEQ ID NO: 6228 - protein, 9 aa, synthetic construct
  REGION 1..9: note = Description of Artificial Sequence: Synthetic peptide
GAASVTLTV

SEQ ID NO: 6229 - protein, 10 aa, synthetic construct
  REGION 1..10: note = Description of Artificial Sequence: Synthetic peptide
SEAGATRISF

SEQ ID NO: 6230 - protein, 9 aa, synthetic construct
  REGION 1..9: note = Description of Artificial Sequence: Synthetic peptide
SAVSLFNAI

SEQ ID NO: 6231 - protein, 11 aa, synthetic construct
  REGION 1..11: note = Description of Artificial Sequence: Synthetic peptide
AEQASQEVKNW

SEQ ID NO: 6232 - protein, 9 aa, synthetic construct
  REGION 1..9: note = Description of Artificial Sequence: Synthetic peptide
AAVDLSHFL

SEQ ID NO: 6233 - protein, 10 aa, synthetic construct
  REGION 1..10: note = Description of Artificial Sequence: Synthetic peptide
VQMNNNNNSY

SEQ ID NO: 6234 - protein, 11 aa, synthetic construct
  REGION 1..11: note = Description of Artificial Sequence: Synthetic peptide
AEIQKQGQGQW

SEQ ID NO: 6235 - protein, 9 aa, synthetic construct
  REGION 1..9: note = Description of Artificial Sequence: Synthetic peptide
SESAIRNAI

SEQ ID NO: 6236 - protein, 9 aa, synthetic construct
  REGION 1..9: note = Description of Artificial Sequence: Synthetic peptide
AAVDLSHFL

SEQ ID NO: 6237 - protein, 9 aa, synthetic construct
  REGION 1..9: note = Description of Artificial Sequence: Synthetic peptide
LIVTRIVEL

SEQ ID NO: 6238 - protein, 9 aa, synthetic construct
  REGION 1..9: note = Description of Artificial Sequence: Synthetic peptide
LIVVRIVEL

SEQ ID NO: 6239 - protein, 9 aa, synthetic construct
  REGION 1..9: note = Description of Artificial Sequence: Synthetic peptide
SAEPVPLQL

SEQ ID NO: 6240 - protein, 10 aa, synthetic construct
  REGION 1..10: note = Description of Artificial Sequence: Synthetic peptide
RAVGIGAVFL

SEQ ID NO: 6241 - protein, 9 aa, synthetic construct
  REGION 1..9: note = Description of Artificial Sequence: Synthetic peptide
YSTQVDPEL

SEQ ID NO: 6242 - protein, 9 aa, synthetic construct
  REGION 1..9: note = Description of Artificial Sequence: Synthetic peptide
SLDPIPIHY

SEQ ID NO: 6243 - protein, 8 aa, synthetic construct
  REGION 1..8: note = Description of Artificial Sequence: Synthetic peptide
VLDVGDAY

SEQ ID NO: 6244 - protein, 9 aa, synthetic construct
  REGION 1..9: note = Description of Artificial Sequence: Synthetic peptide
SFDPIPIHY

SEQ ID NO: 6245 - protein, 10 aa, synthetic construct
  REGION 1..10: note = Description of Artificial Sequence: Synthetic peptide
VTVLDVGDAY

SEQ ID NO: 6246 - protein, 9 aa, synthetic construct
  REGION 1..9: note = Description of Artificial Sequence: Synthetic peptide
TFDPIPIHY

SEQ ID NO: 6247 - protein, 9 aa, synthetic construct
  REGION 1..9: note = Description of Artificial Sequence: Synthetic peptide
TSSLFNSTY

SEQ ID NO: 6248 - protein, 9 aa, synthetic construct
  REGION 1..9: note = Description of Artificial Sequence: Synthetic peptide
QTGWQALKY

SEQ ID NO: 6249 - protein, 9 aa, synthetic construct
  REGION 1..9: note = Description of Artificial Sequence: Synthetic peptide
VLAEAMSQV

SEQ ID NO: 6250 - protein, 9 aa, synthetic construct
  REGION 1..9: note = Description of Artificial Sequence: Synthetic peptide
VLAEAMSKV

SEQ ID NO: 6251 - protein, 9 aa, synthetic construct
  REGION 1..9: note = Description of Artificial Sequence: Synthetic peptide
ILAQIQPAI

SEQ ID NO: 6252 - protein, 9 aa, synthetic construct
  REGION 1..9: note = Description of Artificial Sequence: Synthetic peptide
ILKEPVHGV

SEQ ID NO: 6253 - protein, 9 aa, synthetic construct
  REGION 1..9: note = Description of Artificial Sequence: Synthetic peptide
SLFNTVATL

SEQ ID NO: 6254 - protein, 9 aa, synthetic construct
  REGION 1..9: note = Description of Artificial Sequence: Synthetic peptide
VLAEAMSQI

SEQ ID NO: 6255 - protein, 9 aa, synthetic construct
  REGION 1..9: note = Description of Artificial Sequence: Synthetic peptide
RLIEGLQGI

SEQ ID NO: 6256 - protein, 9 aa, synthetic construct
  REGION 1..9: note = Description of Artificial Sequence: Synthetic peptide
QMVHQPISA

SEQ ID NO: 6257 - protein, 10 aa, synthetic construct
  REGION 1..10: note = Description of Artificial Sequence: Synthetic peptide
KVVEVKPLGV

SEQ ID NO: 6258 - protein, 10 aa, synthetic construct
  REGION 1..10: note = Description of Artificial Sequence: Synthetic peptide
KVVEIKPLGV

SEQ ID NO: 6259 - protein, 9 aa, synthetic construct
  REGION 1..9: note = Description of Artificial Sequence: Synthetic peptide
QLTEAVQKI

SEQ ID NO: 6260 - protein, 9 aa, synthetic construct
  REGION 1..9: note = Description of Artificial Sequence: Synthetic peptide
GLADQLIHM

SEQ ID NO: 6261 - protein, 9 aa, synthetic construct
  REGION 1..9: note = Description of Artificial Sequence: Synthetic peptide
AVISIVNRV

SEQ ID NO: 6262 - protein, 9 aa, synthetic construct
  REGION 1..9: note = Description of Artificial Sequence: Synthetic peptide
AVLSIVNRV

SEQ ID NO: 6263 - protein, 9 aa, synthetic construct
  REGION 1..9: note = Description of Artificial Sequence: Synthetic peptide
QLTAVVQKI

SEQ ID NO: 6264 - protein, 9 aa, synthetic construct
  REGION 1..9: note = Description of Artificial Sequence: Synthetic peptide
ALTDIVPLT

SEQ ID NO: 6265 - protein, 9 aa, synthetic construct
  REGION 1..9: note = Description of Artificial Sequence: Synthetic peptide
SLFGNDHLL

SEQ ID NO: 6266 - protein, 9 aa, synthetic construct
  REGION 1..9: note = Description of Artificial Sequence: Synthetic peptide
LLDRIAIAV

SEQ ID NO: 6267 - protein, 10 aa, synthetic construct
  REGION 1..10: note = Description of Artificial Sequence: Synthetic peptide
KLVPVDPSEV

SEQ ID NO: 6268 - protein, 9 aa, synthetic construct
  REGION 1..9: note = Description of Artificial Sequence: Synthetic peptide
GLADHLIHM

SEQ ID NO: 6269 - protein, 10 aa, synthetic construct
  REGION 1..10: note = Description of Artificial Sequence: Synthetic peptide
KLVPVDPREV

SEQ ID NO: 6270 - protein, 9 aa, synthetic construct
  REGION 1..9: note = Description of Artificial Sequence: Synthetic peptide
IVTDSQYAL

SEQ ID NO: 6271 - protein, 9 aa, synthetic construct
  REGION 1..9: note = Description of Artificial Sequence: Synthetic peptide
VLAEAMSQV

SEQ ID NO: 6272 - protein, 9 aa, synthetic construct
  REGION 1..9: note = Description of Artificial Sequence: Synthetic peptide
VLAEAMSKV

SEQ ID NO: 6273 - protein, 9 aa, synthetic construct
  REGION 1..9: note = Description of Artificial Sequence: Synthetic peptide
ILKEPVHGV

SEQ ID NO: 6274 - protein, 9 aa, synthetic construct
  REGION 1..9: note = Description of Artificial Sequence: Synthetic peptide
VLAEAMSQI

SEQ ID NO: 6275 - protein, 9 aa, synthetic construct
  REGION 1..9: note = Description of Artificial Sequence: Synthetic peptide
AVISIVNRV

SEQ ID NO: 6276 - protein, 10 aa, synthetic construct
  REGION 1..10: note = Description of Artificial Sequence: Synthetic peptide
KVVEVKPLGV

SEQ ID NO: 6277 - protein, 9 aa, synthetic construct
  REGION 1..9: note = Description of Artificial Sequence: Synthetic peptide
RLIEGLQGI

SEQ ID NO: 6278 - protein, 10 aa, synthetic construct
  REGION 1..10: note = Description of Artificial Sequence: Synthetic peptide
KVVEIKPLGV

SEQ ID NO: 6279 - protein, 9 aa, synthetic construct
  REGION 1..9: note = Description of Artificial Sequence: Synthetic peptide
SLFNTVATL

SEQ ID NO: 6280 - protein, 9 aa, synthetic construct
  REGION 1..9: note = Description of Artificial Sequence: Synthetic peptide
TLNAWVKVV

SEQ ID NO: 6281 - protein, 10 aa, synthetic construct
  REGION 1..10: note = Description of Artificial Sequence: Synthetic peptide
YLKDQQLLGL

SEQ ID NO: 6282 - protein, 10 aa, synthetic construct
  REGION 1..10: note = Description of Artificial Sequence: Synthetic peptide
YLKDQQLLGI

SEQ ID NO: 6283 - protein, 10 aa, synthetic construct
  REGION 1..10: note = Description of Artificial Sequence: Synthetic peptide
YLRDQQLLGI

SEQ ID NO: 6284 - protein, 9 aa, synthetic construct
  REGION 1..9: note = Description of Artificial Sequence: Synthetic peptide
KIKPPLPSV

SEQ ID NO: 6285 - protein, 10 aa, synthetic construct
  REGION 1..10: note = Description of Artificial Sequence: Synthetic peptide
KLVPVDPREV

SEQ ID NO: 6286 - protein, 10 aa, synthetic construct
  REGION 1..10: note = Description of Artificial Sequence: Synthetic peptide
ALFWDDLRNL

SEQ ID NO: 6287 - protein, 10 aa, synthetic construct
  REGION 1..10: note = Description of Artificial Sequence: Synthetic peptide
SLFGSDPLST

SEQ ID NO: 6288 - protein, 9 aa, synthetic construct
  REGION 1..9: note = Description of Artificial Sequence: Synthetic peptide
QLTAVVQKI

SEQ ID NO: 6289 - protein, 9 aa, synthetic construct
  REGION 1..9: note = Description of Artificial Sequence: Synthetic peptide
ASITLTVQV

SEQ ID NO: 6290 - protein, 9 aa, synthetic construct
  REGION 1..9: note = Description of Artificial Sequence: Synthetic peptide
SLHNTVATL

SEQ ID NO: 6291 - protein, 9 aa, synthetic construct
  REGION 1..9: note = Description of Artificial Sequence: Synthetic peptide
ELKSLFNTV

SEQ ID NO: 6292 - protein, 11 aa, synthetic construct
  REGION 1..11: note = Description of Artificial Sequence: Synthetic peptide
FLKEKGGLEGL

SEQ ID NO: 6293 - protein, 9 aa, synthetic construct
  REGION 1..9: note = Description of Artificial Sequence: Synthetic peptide
GAASITLTV

SEQ ID NO: 6294 - protein, 9 aa, synthetic construct
  REGION 1..9: note = Description of Artificial Sequence: Synthetic peptide
ALNPGLLET

SEQ ID NO: 6295 - protein, 9 aa, synthetic construct
  REGION 1..9: note = Description of Artificial Sequence: Synthetic peptide
AVLSIVNRV

SEQ ID NO: 6296 - protein, 9 aa, synthetic construct
  REGION 1..9: note = Description of Artificial Sequence: Synthetic peptide
QLTEAVQKI

SEQ ID NO: 6297 - protein, 10 aa, synthetic construct
  REGION 1..10: note = Description of Artificial Sequence: Synthetic peptide
VLFLDGINKA

SEQ ID NO: 6298 - protein, 9 aa, synthetic construct
  REGION 1..9: note = Description of Artificial Sequence: Synthetic peptide
ILAQIQPAI

SEQ ID NO: 6299 - protein, 10 aa, synthetic construct
  REGION 1..10: note = Description of Artificial Sequence: Synthetic peptide
SLFDTIAIAV

SEQ ID NO: 6300 - protein, 9 aa, synthetic construct
  REGION 1..9: note = Description of Artificial Sequence: Synthetic peptide
NLTDNVKTI

SEQ ID NO: 6301 - protein, 10 aa, synthetic construct
  REGION 1..10: note = Description of Artificial Sequence: Synthetic peptide
KLVPVDPSEV

SEQ ID NO: 6302 - protein, 9 aa, synthetic construct
  REGION 1..9: note = Description of Artificial Sequence: Synthetic peptide
ALIRTLQQL

SEQ ID NO: 6303 - protein, 9 aa, synthetic construct
  REGION 1..9: note = Description of Artificial Sequence: Synthetic peptide
ELKKIIGQV

SEQ ID NO: 6304 - protein, 8 aa, synthetic construct
  REGION 1..8: note = Description of Artificial Sequence: Synthetic peptide
VLSIVNRV

SEQ ID NO: 6305 - protein, 9 aa, synthetic construct
  REGION 1..9: note = Description of Artificial Sequence: Synthetic peptide
EIIGNIRQA

SEQ ID NO: 6306 - protein, 9 aa, synthetic construct
  REGION 1..9: note = Description of Artificial Sequence: Synthetic peptide
VLAEAMSQT

SEQ ID NO: 6307 - protein, 10 aa, synthetic construct
  REGION 1..10: note = Description of Artificial Sequence: Synthetic peptide
TLSERILSNF

SEQ ID NO: 6308 - protein, 9 aa, synthetic construct
  REGION 1..9: note = Description of Artificial Sequence: Synthetic peptide
SLFNTIAVL

SEQ ID NO: 6309 - protein, 9 aa, synthetic construct
  REGION 1..9: note = Description of Artificial Sequence: Synthetic peptide
GLADHLIHM

SEQ ID NO: 6310 - protein, 9 aa, synthetic construct
  REGION 1..9: note = Description of Artificial Sequence: Synthetic peptide
KIKPPLPSI

SEQ ID NO: 6311 - protein, 10 aa, synthetic construct
  REGION 1..10: note = Description of Artificial Sequence: Synthetic peptide
HLRDQQLLGI

SEQ ID NO: 6312 - protein, 9 aa, synthetic construct
  REGION 1..9: note = Description of Artificial Sequence: Synthetic peptide
ALFLGFLGA

SEQ ID NO: 6313 - protein, 10 aa, synthetic construct
  REGION 1..10: note = Description of Artificial Sequence: Synthetic peptide
ALFLGFLGAA

SEQ ID NO: 6314 - protein, 9 aa, synthetic construct
  REGION 1..9: note = Description of Artificial Sequence: Synthetic peptide
ELRSLFNTV

SEQ ID NO: 6315 - protein, 10 aa, synthetic construct
  REGION 1..10: note = Description of Artificial Sequence: Synthetic peptide
KVVEIKPLGI

SEQ ID NO: 6316 - protein, 9 aa, synthetic construct
  REGION 1..9: note = Description of Artificial Sequence: Synthetic peptide
SITKWLWYI

SEQ ID NO: 6317 - protein, 9 aa, synthetic construct
  REGION 1..9: note = Description of Artificial Sequence: Synthetic peptide
SLFNTVATL

SEQ ID NO: 6318 - protein, 10 aa, synthetic construct
  REGION 1..10: note = Description of Artificial Sequence: Synthetic peptide
ALFWDDLRNL

SEQ ID NO: 6319 - protein, 9 aa, synthetic construct
  REGION 1..9: note = Description of Artificial Sequence: Synthetic peptide
TLNAWVKVV

SEQ ID NO: 6320 - protein, 9 aa, synthetic construct
  REGION 1..9: note = Description of Artificial Sequence: Synthetic peptide
AVISIVNRV

SEQ ID NO: 6321 - protein, 9 aa, synthetic construct
  REGION 1..9: note = Description of Artificial Sequence: Synthetic peptide
ALLRILQQL

SEQ ID NO: 6322 - protein, 9 aa, synthetic construct
  REGION 1..9: note = Description of Artificial Sequence: Synthetic peptide
AVLSIVNRV

SEQ ID NO: 6323 - protein, 9 aa, synthetic construct
  REGION 1..9: note = Description of Artificial Sequence: Synthetic peptide
SLFNTIAVL

SEQ ID NO: 6324 - protein, 9 aa, synthetic construct
  REGION 1..9: note = Description of Artificial Sequence: Synthetic peptide
ILKEPVHGV

SEQ ID NO: 6325 - protein, 9 aa, synthetic construct
  REGION 1..9: note = Description of Artificial Sequence: Synthetic peptide
ILAQIQPAI

SEQ ID NO: 6326 - protein, 9 aa, synthetic construct
  REGION 1..9: note = Description of Artificial Sequence: Synthetic peptide
ALIRTLQQL

SEQ ID NO: 6327 - protein, 9 aa, synthetic construct
  REGION 1..9: note = Description of Artificial Sequence: Synthetic peptide
RLIEGLQGI

SEQ ID NO: 6328 - protein, 9 aa, synthetic construct
  REGION 1..9: note = Description of Artificial Sequence: Synthetic peptide
IVNQIIEQL

SEQ ID NO: 6329 - protein, 9 aa, synthetic construct
  REGION 1..9: note = Description of Artificial Sequence: Synthetic peptide
NITNWLWYI

SEQ ID NO: 6330 - protein, 9 aa, synthetic construct
  REGION 1..9: note = Description of Artificial Sequence: Synthetic peptide
SLHNTVATL

SEQ ID NO: 6331 - protein, 9 aa, synthetic construct
  REGION 1..9: note = Description of Artificial Sequence: Synthetic peptide
GLADHLIHM

SEQ ID NO: 6332 - protein, 9 aa, synthetic construct
  REGION 1..9: note = Description of Artificial Sequence: Synthetic peptide
GITNWLWYI

SEQ ID NO: 6333 - protein, 9 aa, synthetic construct
  REGION 1..9: note = Description of Artificial Sequence: Synthetic peptide
GLADQLIHM

SEQ ID NO: 6334 - protein, 9 aa, synthetic construct
  REGION 1..9: note = Description of Artificial Sequence: Synthetic peptide
TLNAWVKVI

SEQ ID NO: 6335 - protein, 9 aa, synthetic construct
  REGION 1..9: note = Description of Artificial Sequence: Synthetic peptide
SLFGNDHLL

SEQ ID NO: 6336 - protein, 10 aa, synthetic construct
  REGION 1..10: note = Description of Artificial Sequence: Synthetic peptide
TLWQRPLVTI

SEQ ID NO: 6337 - protein, 9 aa, synthetic construct
  REGION 1..9: note = Description of Artificial Sequence: Synthetic peptide
RILELVQRI

SEQ ID NO: 6338 - protein, 9 aa, synthetic construct
  REGION 1..9: note = Description of Artificial Sequence: Synthetic peptide
GVLSIVKRV

SEQ ID NO: 6339 - protein, 9 aa, synthetic construct
  REGION 1..9: note = Description of Artificial Sequence: Synthetic peptide
LVNQIIEQL

SEQ ID NO: 6340 - protein, 10 aa, synthetic construct
  REGION 1..10: note = Description of Artificial Sequence: Synthetic peptide
SLFDTIAIAV

SEQ ID NO: 6341 - protein, 10 aa, synthetic construct
  REGION 1..10: note = Description of Artificial Sequence: Synthetic peptide
YLKDQQLLGL

SEQ ID NO: 6342 - protein, 9 aa, synthetic construct
  REGION 1..9: note = Description of Artificial Sequence: Synthetic peptide
KIKPPLPSV

SEQ ID NO: 6343 - protein, 9 aa, synthetic construct
  REGION 1..9: note = Description of Artificial Sequence: Synthetic peptide
YQQWWIWGV

SEQ ID NO: 6344 - protein, 10 aa, synthetic construct
  REGION 1..10: note = Description of Artificial Sequence: Synthetic peptide
SLVQYWGLEL

SEQ ID NO: 6345 - protein, 9 aa, synthetic construct
  REGION 1..9: note = Description of Artificial Sequence: Synthetic peptide
TLTVQVRQL

SEQ ID NO: 6346 - protein, 9 aa, synthetic construct
  REGION 1..9: note = Description of Artificial Sequence: Synthetic peptide
FQLPPIERL

SEQ ID NO: 6347 - protein, 9 aa, synthetic construct
  REGION 1..9: note = Description of Artificial Sequence: Synthetic peptide
HLEGKIILV

SEQ ID NO: 6348 - protein, 10 aa, synthetic construct
  REGION 1..10: note = Description of Artificial Sequence: Synthetic peptide
NLLDRIAIAV

SEQ ID NO: 6349 - protein, 10 aa, synthetic construct
  REGION 1..10: note = Description of Artificial Sequence: Synthetic peptide
TLWQRPLVSI

SEQ ID NO: 6350 - protein, 9 aa, synthetic construct
  REGION 1..9: note = Description of Artificial Sequence: Synthetic peptide
ALTDIVPLT

SEQ ID NO: 6351 - protein, 9 aa, synthetic construct
  REGION 1..9: note = Description of Artificial Sequence: Synthetic peptide
RIIEVIQGI

SEQ ID NO: 6352 - protein, 9 aa, synthetic construct
  REGION 1..9: note = Description of Artificial Sequence: Synthetic peptide
GQNQWTYQI

SEQ ID NO: 6353 - protein, 9 aa, synthetic construct
  REGION 1..9: note = Description of Artificial Sequence: Synthetic peptide
AVVDLSFFL

SEQ ID NO: 6354 - protein, 9 aa, synthetic construct
  REGION 1..9: note = Description of Artificial Sequence: Synthetic peptide
LVWEDLRSL

SEQ ID NO: 6355 - protein, 9 aa, synthetic construct
  REGION 1..9: note = Description of Artificial Sequence: Synthetic peptide
NYTDIIYNL

SEQ ID NO: 6356 - protein, 9 aa, synthetic construct
  REGION 1..9: note = Description of Artificial Sequence: Synthetic peptide
NYTDIIYTL

SEQ ID NO: 6357 - protein, 9 aa, synthetic construct
  REGION 1..9: note = Description of Artificial Sequence: Synthetic peptide
VLAEAMSQV

SEQ ID NO: 6358 - protein, 10 aa, synthetic construct
  REGION 1..10: note = Description of Artificial Sequence: Synthetic peptide
KVVEIKPLGV

SEQ ID NO: 6359 - protein, 10 aa, synthetic construct
  REGION 1..10: note = Description of Artificial Sequence: Synthetic peptide
TLWQRPLVNI

SEQ ID NO: 6360 - protein, 9 aa, synthetic construct
  REGION 1..9: note = Description of Artificial Sequence: Synthetic peptide
IIAIVVWTI

SEQ ID NO: 6361 - protein, 10 aa, synthetic construct
  REGION 1..10: note = Description of Artificial Sequence: Synthetic peptide
FLYASVDYRL

SEQ ID NO: 6362 - protein, 9 aa, synthetic construct
  REGION 1..9: note = Description of Artificial Sequence: Synthetic peptide
QLTAVVQKI

SEQ ID NO: 6363 - protein, 9 aa, synthetic construct
  REGION 1..9: note = Description of Artificial Sequence: Synthetic peptide
KIKPPLPSI

SEQ ID NO: 6364 - protein, 9 aa, synthetic construct
  REGION 1..9: note = Description of Artificial Sequence: Synthetic peptide
NVKTIIVHL

SEQ ID NO: 6365 - protein, 9 aa, synthetic construct
  REGION 1..9: note = Description of Artificial Sequence: Synthetic peptide
LLDRIAIAV

SEQ ID NO: 6366 - protein, 9 aa, synthetic construct
  REGION 1..9: note = Description of Artificial Sequence: Synthetic peptide
LLNTTAIVV

SEQ ID NO: 6367 - protein, 9 aa, synthetic construct
  REGION 1..9: note = Description of Artificial Sequence: Synthetic peptide
RILQRLLFV

SEQ ID NO: 6368 - protein, 9 aa, synthetic construct
  REGION 1..9: note = Description of Artificial Sequence: Synthetic peptide
VLAEAMSKV

SEQ ID NO: 6369 - protein, 10 aa, synthetic construct
  REGION 1..10: note = Description of Artificial Sequence: Synthetic peptide
KVVEVKPLGV

SEQ ID NO: 6370 - protein, 9 aa, synthetic construct
  REGION 1..9: note = Description of Artificial Sequence: Synthetic peptide
ILAIVVWII

SEQ ID NO: 6371 - protein, 10 aa, synthetic construct
  REGION 1..10: note = Description of Artificial Sequence: Synthetic peptide
AIFWDDLRSL

SEQ ID NO: 6372 - protein, 9 aa, synthetic construct
  REGION 1..9: note = Description of Artificial Sequence: Synthetic peptide
IVTDSQYAL

SEQ ID NO: 6373 - protein, 11 aa, synthetic construct
  REGION 1..11: note = Description of Artificial Sequence: Synthetic peptide
FLKEKGGLEGL

SEQ ID NO: 6374 - protein, 9 aa, synthetic construct
  REGION 1..9: note = Description of Artificial Sequence: Synthetic peptide
IIVGGLIGL

SEQ ID NO: 6375 - protein, 8 aa, synthetic construct
  REGION 1..8: note = Description of Artificial Sequence: Synthetic peptide
YTNTIYRL

SEQ ID NO: 6376 - protein, 9 aa, synthetic construct
  REGION 1..9: note = Description of Artificial Sequence: Synthetic peptide
ALNPGLLET

SEQ ID NO: 6377 - protein, 9 aa, synthetic construct
  REGION 1..9: note = Description of Artificial Sequence: Synthetic peptide
VIVAFIVAL

SEQ ID NO: 6378 - protein, 9 aa, synthetic construct
  REGION 1..9: note = Description of Artificial Sequence: Synthetic peptide
ELQKQITKV

SEQ ID NO: 6379 - protein, 9 aa, synthetic construct
  REGION 1..9: note = Description of Artificial Sequence: Synthetic peptide
KALTDIVTL

SEQ ID NO: 6380 - protein, 9 aa, synthetic construct
  REGION 1..9: note = Description of Artificial Sequence: Synthetic peptide
LLQLTVWGI

SEQ ID NO: 6381 - protein, 9 aa, synthetic construct
  REGION 1..9: note = Description of Artificial Sequence: Synthetic peptide
NLFDTTAIV

SEQ ID NO: 6382 - protein, 9 aa, synthetic construct
  REGION 1..9: note = Description of Artificial Sequence: Synthetic peptide
IIVIIVWTI

SEQ ID NO: 6383 - protein, 9 aa, synthetic construct
  REGION 1..9: note = Description of Artificial Sequence: Synthetic peptide
TLQEQIAWM

SEQ ID NO: 6384 - protein, 9 aa, synthetic construct
  REGION 1..9: note = Description of Artificial Sequence: Synthetic peptide
KAYALFYKL

SEQ ID NO: 6385 - protein, 9 aa, synthetic construct
  REGION 1..9: note = Description of Artificial Sequence: Synthetic peptide
KIVGGLIGL

SEQ ID NO: 6386 - protein, 11 aa, synthetic construct
  REGION 1..11: note = Description of Artificial Sequence: Synthetic peptide
NLFNSTKLELF

SEQ ID NO: 6387 - protein, 11 aa, synthetic construct
  REGION 1..11: note = Description of Artificial Sequence: Synthetic peptide
VQLGIPHPAGL

SEQ ID NO: 6388 - protein, 11 aa, synthetic construct
  REGION 1..11: note = Description of Artificial Sequence: Synthetic peptide
VLQDNSDIKVV

SEQ ID NO: 6389 - protein, 10 aa, synthetic construct
  REGION 1..10: note = Description of Artificial Sequence: Synthetic peptide
RTQDFWEVQL

SEQ ID NO: 6390 - protein, 10 aa, synthetic construct
  REGION 1..10: note = Description of Artificial Sequence: Synthetic peptide
NLFDTTAIVV

SEQ ID NO: 6391 - protein, 10 aa, synthetic construct
  REGION 1..10: note = Description of Artificial Sequence: Synthetic peptide
YLRDQQLLGI

SEQ ID NO: 6392 - protein, 9 aa, synthetic construct
  REGION 1..9: note = Description of Artificial Sequence: Synthetic peptide
TLQEVGKKL

SEQ ID NO: 6393 - protein, 10 aa, synthetic construct
  REGION 1..10: note = Description of Artificial Sequence: Synthetic peptide
KLVPVDPREV

SEQ ID NO: 6394 - protein, 9 aa, synthetic construct
  REGION 1..9: note = Description of Artificial Sequence: Synthetic peptide
TLQEQITWM

SEQ ID NO: 6395 - protein, 9 aa, synthetic construct
  REGION 1..9: note = Description of Artificial Sequence: Synthetic peptide
ALFYRLDIV

SEQ ID NO: 6396 - protein, 8 aa, synthetic construct
  REGION 1..8: note = Description of Artificial Sequence: Synthetic peptide
ALTDIVTL

SEQ ID NO: 6397 - protein, 9 aa, synthetic construct
  REGION 1..9: note = Description of Artificial Sequence: Synthetic peptide
KLTPLCVTL

SEQ ID NO: 6398 - protein, 10 aa, synthetic construct
  REGION 1..10: note = Description of Artificial Sequence: Synthetic peptide
ILIAARTVEL

SEQ ID NO: 6399 - protein, 9 aa, synthetic construct
  REGION 1..9: note = Description of Artificial Sequence: Synthetic peptide
VLAEAMSQI

SEQ ID NO: 6400 - protein, 9 aa, synthetic construct
  REGION 1..9: note = Description of Artificial Sequence: Synthetic peptide
NLLDRIAIA

SEQ ID NO: 6401 - protein, 9 aa, synthetic construct
  REGION 1..9: note = Description of Artificial Sequence: Synthetic peptide
AVISIVNRV

SEQ ID NO: 6402 - protein, 9 aa, synthetic construct
  REGION 1..9: note = Description of Artificial Sequence: Synthetic peptide
VVAEGTDRL

SEQ ID NO: 6403 - protein, 9 aa, synthetic construct
  REGION 1..9: note = Description of Artificial Sequence: Synthetic peptide
VLAEAMSQV

SEQ ID NO: 6404 - protein, 11 aa, synthetic construct
  REGION 1..11: note = Description of Artificial Sequence: Synthetic peptide
TQVDPGLADHL

SEQ ID NO: 6405 - protein, 9 aa, synthetic construct
  REGION 1..9: note = Description of Artificial Sequence: Synthetic peptide
AVAEGTDRI

SEQ ID NO: 6406 - protein, 9 aa, synthetic construct
  REGION 1..9: note = Description of Artificial Sequence: Synthetic peptide
VLAEAMSKV

SEQ ID NO: 6407 - protein, 9 aa, synthetic construct
  REGION 1..9: note = Description of Artificial Sequence: Synthetic peptide
IVNQIIEQL

SEQ ID NO: 6408 - protein, 11 aa, synthetic construct
  REGION 1..11: note = Description of Artificial Sequence: Synthetic peptide
TQVDPGLADQL

SEQ ID NO: 6409 - protein, 9 aa, synthetic construct
  REGION 1..9: note = Description of Artificial Sequence: Synthetic peptide
RIIEVIQGI

SEQ ID NO: 6410 - protein, 9 aa, synthetic construct
  REGION 1..9: note = Description of Artificial Sequence: Synthetic peptide
AVLSIVNRV

SEQ ID NO: 6411 - protein, 11 aa, synthetic construct
  REGION 1..11: note = Description of Artificial Sequence: Synthetic peptide
VVIQDNSDIKV

SEQ ID NO: 6412 - protein, 9 aa, synthetic construct
  REGION 1..9: note = Description of Artificial Sequence: Synthetic peptide
IEIKDTKEA

SEQ ID NO: 6413 - protein, 9 aa, synthetic construct
  REGION 1..9: note = Description of Artificial Sequence: Synthetic peptide
VLAEAMSQI

SEQ ID NO: 6414 - protein, 10 aa, synthetic construct
  REGION 1..10: note = Description of Artificial Sequence: Synthetic peptide
REFPSEQTRA

SEQ ID NO: 6415 - protein, 10 aa, synthetic construct
  REGION 1..10: note = Description of Artificial Sequence: Synthetic peptide
AVNPGLLETA

SEQ ID NO: 6416 - protein, 10 aa, synthetic construct
  REGION 1..10: note = Description of Artificial Sequence: Synthetic peptide
SEFNLPPIVA

SEQ ID NO: 6417 - protein, 9 aa, synthetic construct
  REGION 1..9: note = Description of Artificial Sequence: Synthetic peptide
SAISLFDTI

SEQ ID NO: 6418 - protein, 10 aa, synthetic construct
  REGION 1..10: note = Description of Artificial Sequence: Synthetic peptide
GEIIGDIRQA

SEQ ID NO: 6419 - protein, 9 aa, synthetic construct
  REGION 1..9: note = Description of Artificial Sequence: Synthetic peptide
WTVNDIQKL

SEQ ID NO: 6420 - protein, 9 aa, synthetic construct
  REGION 1..9: note = Description of Artificial Sequence: Synthetic peptide
LEKEPIAEA

SEQ ID NO: 6421 - protein, 9 aa, synthetic construct
  REGION 1..9: note = Description of Artificial Sequence: Synthetic peptide
GAASITLTV

SEQ ID NO: 6422 - protein, 9 aa, synthetic construct
  REGION 1..9: note = Description of Artificial Sequence: Synthetic peptide
IVTDSQYAL

SEQ ID NO: 6423 - protein, 9 aa, synthetic construct
  REGION 1..9: note = Description of Artificial Sequence: Synthetic peptide
EIIGDIRQA

SEQ ID NO: 6424 - protein, 11 aa, synthetic construct
  REGION 1..11: note = Description of Artificial Sequence: Synthetic peptide
TQVEPGLADQL

SEQ ID NO: 6425 - protein, 9 aa, synthetic construct
  REGION 1..9: note = Description of Artificial Sequence: Synthetic peptide
EIIGNIRQA

SEQ ID NO: 6426 - protein, 9 aa, synthetic construct
  REGION 1..9: note = Description of Artificial Sequence: Synthetic peptide
RLIEGLQGI

SEQ ID NO: 6427 - protein, 9 aa, synthetic construct
  REGION 1..9: note = Description of Artificial Sequence: Synthetic peptide
SLFNTVATL

SEQ ID NO: 6428 - protein, 9 aa, synthetic construct
  REGION 1..9: note = Description of Artificial Sequence: Synthetic peptide
LVNQIIEQL

SEQ ID NO: 6429 - protein, 9 aa, synthetic construct
  REGION 1..9: note = Description of Artificial Sequence: Synthetic peptide
ASITLTVQA

SEQ ID NO: 6430 - protein, 10 aa, synthetic construct
  REGION 1..10: note = Description of Artificial Sequence: Synthetic peptide
KVVEIKPLGV

SEQ ID NO: 6431 - protein, 10 aa, synthetic construct
  REGION 1..10: note = Description of Artificial Sequence: Synthetic peptide
SQYALGIIQA

SEQ ID NO: 6432 - protein, 10 aa, synthetic construct
  REGION 1..10: note = Description of Artificial Sequence: Synthetic peptide
KVVEVKPLGV

SEQ ID NO: 6433 - protein, 9 aa, synthetic construct
  REGION 1..9: note = Description of Artificial Sequence: Synthetic peptide
RAIEAQQHL

SEQ ID NO: 6434 - protein, 9 aa, synthetic construct
  REGION 1..9: note = Description of Artificial Sequence: Synthetic peptide
QLTAVVQKI

SEQ ID NO: 6435 - protein, 9 aa, synthetic construct
  REGION 1..9: note = Description of Artificial Sequence: Synthetic peptide
LEKEPIAGA

SEQ ID NO: 6436 - protein, 10 aa, synthetic construct
  REGION 1..10: note = Description of Artificial Sequence: Synthetic peptide
VLFLDGINKA

SEQ ID NO: 6437 - protein, 9 aa, synthetic construct
  REGION 1..9: note = Description of Artificial Sequence: Synthetic peptide
LEIGQHRAP

SEQ ID NO: 6438 - protein, 9 aa, synthetic construct
  REGION 1..9: note = Description of Artificial Sequence: Synthetic peptide
QLTEAVQKI

SEQ ID NO: 6439 - protein, 9 aa, synthetic construct
  REGION 1..9: note = Description of Artificial Sequence: Synthetic peptide
SQIYPGIQV

SEQ ID NO: 6440 - protein, 9 aa, synthetic construct
  REGION 1..9: note = Description of Artificial Sequence: Synthetic peptide
ASITLTVQV

SEQ ID NO: 6441 - protein, 9 aa, synthetic construct
  REGION 1..9: note = Description of Artificial Sequence: Synthetic peptide
REFPPETRA

SEQ ID NO: 6442 - protein, 9 aa, synthetic construct
  REGION 1..9: note = Description of Artificial Sequence: Synthetic peptide
SAINLLDRI

SEQ ID NO: 6443 - protein, 9 aa, synthetic construct
  REGION 1..9: note = Description of Artificial Sequence: Synthetic peptide
SQIYPGIKV

SEQ ID NO: 6444 - protein, 9 aa, synthetic construct
  REGION 1..9: note = Description of Artificial Sequence: Synthetic peptide
TETLLVQNA

SEQ ID NO: 6445 - protein, 9 aa, synthetic construct
  REGION 1..9: note = Description of Artificial Sequence: Synthetic peptide
FTSAAVKAA

SEQ ID NO: 6446 - protein, 10 aa, synthetic construct
  REGION 1..10: note = Description of Artificial Sequence: Synthetic peptide
KAYDTEVHNV

SEQ ID NO: 6447 - protein, 10 aa, synthetic construct
  REGION 1..10: note = Description of Artificial Sequence: Synthetic peptide
REFSPEQTRA

SEQ ID NO: 6448 - protein, 9 aa, synthetic construct
  REGION 1..9: note = Description of Artificial Sequence: Synthetic peptide
ILKEPVHGV

SEQ ID NO: 6449 - protein, 9 aa, synthetic construct
  REGION 1..9: note = Description of Artificial Sequence: Synthetic peptide
DIIGDIRQA

SEQ ID NO: 6450 - protein, 9 aa, synthetic construct
  REGION 1..9: note = Description of Artificial Sequence: Synthetic peptide
QNFPIVQNL

SEQ ID NO: 6451 - protein, 9 aa, synthetic construct
  REGION 1..9: note = Description of Artificial Sequence: Synthetic peptide
AVISIVNRV

SEQ ID NO: 6452 - protein, 9 aa, synthetic construct
  REGION 1..9: note = Description of Artificial Sequence: Synthetic peptide
IVTDSQYAL

SEQ ID NO: 6453 - protein, 9 aa, synthetic construct
  REGION 1..9: note = Description of Artificial Sequence: Synthetic peptide
RLIEGLQGI

SEQ ID NO: 6454 - protein, 9 aa, synthetic construct
  REGION 1..9: note = Description of Artificial Sequence: Synthetic peptide
IQDNSDIKV

SEQ ID NO: 6455 - protein, 9 aa, synthetic construct
  REGION 1..9: note = Description of Artificial Sequence: Synthetic peptide
YSTQVDPGL

SEQ ID NO: 6456 - protein, 11 aa, synthetic construct
  REGION 1..11: note = Description of Artificial Sequence: Synthetic peptide
VVIQDNSDIKV

SEQ ID NO: 6457 - protein, 10 aa, synthetic construct
  REGION 1..10: note = Description of Artificial Sequence: Synthetic peptide
KVVEVKPLGV

SEQ ID NO: 6458 - protein, 9 aa, synthetic construct
  REGION 1..9: note = Description of Artificial Sequence: Synthetic peptide
SAISLFDTI

SEQ ID NO: 6459 - protein, 9 aa, synthetic construct
  REGION 1..9: note = Description of Artificial Sequence: Synthetic peptide
AVLSIVNRV

SEQ ID NO: 6460 - protein, 11 aa, synthetic construct
  REGION 1..11: note = Description of Artificial Sequence: Synthetic peptide
VVLQDNSDIKV

SEQ ID NO: 6461 - protein, 10 aa, synthetic construct
  REGION 1..10: note = Description of Artificial Sequence: Synthetic peptide
KVVEIKPLGV

SEQ ID NO: 6462 - protein, 9 aa, synthetic construct
  REGION 1..9: note = Description of Artificial Sequence: Synthetic peptide
RIIEVIQGI

SEQ ID NO: 6463 - protein, 9 aa, synthetic construct
  REGION 1..9: note = Description of Artificial Sequence: Synthetic peptide
VLAEAMSQV

SEQ ID NO: 6464 - protein, 11 aa, synthetic construct
  REGION 1..11: note = Description of Artificial Sequence: Synthetic peptide
TQVDPGLADQL

SEQ ID NO: 6465 - protein, 9 aa, synthetic construct
  REGION 1..9: note = Description of Artificial Sequence: Synthetic peptide
YSTRVDPGL

SEQ ID NO: 6466 - protein, 11 aa, synthetic construct
  REGION 1..11: note = Description of Artificial Sequence: Synthetic peptide
TQVDPGLADHL

SEQ ID NO: 6467 - protein, 9 aa, synthetic construct
  REGION 1..9: note = Description of Artificial Sequence: Synthetic peptide
GGIGGFIKV

SEQ ID NO: 6468 - protein, 9 aa, synthetic construct
  REGION 1..9: note = Description of Artificial Sequence: Synthetic peptide
SQIYPGIKV

SEQ ID NO: 6469 - protein, 9 aa, synthetic construct
  REGION 1..9: note = Description of Artificial Sequence: Synthetic peptide
SQIYPGIQV

SEQ ID NO: 6470 - protein, 11 aa, synthetic construct
  REGION 1..11: note = Description of Artificial Sequence: Synthetic peptide
TQVEPGLADQL

SEQ ID NO: 6471 - protein, 9 aa, synthetic construct
  REGION 1..9: note = Description of Artificial Sequence: Synthetic peptide
VVAEGTDRL

SEQ ID NO: 6472 - protein, 9 aa, synthetic construct
  REGION 1..9: note = Description of Artificial Sequence: Synthetic peptide
KALTDIVTL

SEQ ID NO: 6473 - protein, 9 aa, synthetic construct
  REGION 1..9: note = Description of Artificial Sequence: Synthetic peptide
QLTAVVQKI

SEQ ID NO: 6474 - protein, 9 aa, synthetic construct
  REGION 1..9: note = Description of Artificial Sequence: Synthetic peptide
SAINLLDRI

SEQ ID NO: 6475 - protein, 10 aa, synthetic construct
  REGION 1..10: note = Description of Artificial Sequence: Synthetic peptide
TVLDVGDAYF

SEQ ID NO: 6476 - protein, 9 aa, synthetic construct
  REGION 1..9: note = Description of Artificial Sequence: Synthetic peptide
VLAEAMSKV

SEQ ID NO: 6477 - protein, 9 aa, synthetic construct
  REGION 1..9: note = Description of Artificial Sequence: Synthetic peptide
VQLNESVEI

SEQ ID NO: 6478 - protein, 9 aa, synthetic construct
  REGION 1..9: note = Description of Artificial Sequence: Synthetic peptide
YSTQVEPGL

SEQ ID NO: 6479 - protein, 9 aa, synthetic construct
  REGION 1..9: note = Description of Artificial Sequence: Synthetic peptide
ASITLTVQV

SEQ ID NO: 6480 - protein, 9 aa, synthetic construct
  REGION 1..9: note = Description of Artificial Sequence: Synthetic peptide
VLAEAMSQI

SEQ ID NO: 6481 - protein, 9 aa, synthetic construct
  REGION 1..9: note = Description of Artificial Sequence: Synthetic peptide
GAASITLTV

SEQ ID NO: 6482 - protein, 9 aa, synthetic construct
  REGION 1..9: note = Description of Artificial Sequence: Synthetic peptide
QLTEAVQKI

SEQ ID NO: 6483 - protein, 9 aa, synthetic construct
  REGION 1..9: note = Description of Artificial Sequence: Synthetic peptide
GVLSIVKRV

SEQ ID NO: 6484 - protein, 9 aa, synthetic construct
  REGION 1..9: note = Description of Artificial Sequence: Synthetic peptide
IVNQIIEQL

SEQ ID NO: 6485 - protein, 9 aa, synthetic construct
  REGION 1..9: note = Description of Artificial Sequence: Synthetic peptide
VVPKEIVAC

SEQ ID NO: 6486 - protein, 9 aa, synthetic construct
  REGION 1..9: note = Description of Artificial Sequence: Synthetic peptide
LQDNSDIKV

SEQ ID NO: 6487 - protein, 9 aa, synthetic construct
  REGION 1..9: note = Description of Artificial Sequence: Synthetic peptide
GQVFYTNEI

SEQ ID NO: 6488 - protein, 9 aa, synthetic construct
  REGION 1..9: note = Description of Artificial Sequence: Synthetic peptide
AVAEGTDRI

SEQ ID NO: 6489 - protein, 11 aa, synthetic construct
  REGION 1..11: note = Description of Artificial Sequence: Synthetic peptide
FQPPAGGDLEV

SEQ ID NO: 6490 - protein, 10 aa, synthetic construct
  REGION 1..10: note = Description of Artificial Sequence: Synthetic peptide
YVDGAANREI

SEQ ID NO: 6491 - protein, 9 aa, synthetic construct
  REGION 1..9: note = Description of Artificial Sequence: Synthetic peptide
YNTQVDPGL

SEQ ID NO: 6492 - protein, 9 aa, synthetic construct
  REGION 1..9: note = Description of Artificial Sequence: Synthetic peptide
KVSQNFPIV

SEQ ID NO: 6493 - protein, 9 aa, synthetic construct
  REGION 1..9: note = Description of Artificial Sequence: Synthetic peptide
YVDRFFKTL

SEQ ID NO: 6494 - protein, 9 aa, synthetic construct
  REGION 1..9: note = Description of Artificial Sequence: Synthetic peptide
LLDRIAIAV

SEQ ID NO: 6495 - protein, 9 aa, synthetic construct
  REGION 1..9: note = Description of Artificial Sequence: Synthetic peptide
YTDIIYTLL

SEQ ID NO: 6496 - protein, 9 aa, synthetic construct
  REGION 1..9: note = Description of Artificial Sequence: Synthetic peptide
AVLSIVNRV

SEQ ID NO: 6497 - protein, 9 aa, synthetic construct
  REGION 1..9: note = Description of Artificial Sequence: Synthetic peptide
IIDIIATDL

SEQ ID NO: 6498 - protein, 9 aa, synthetic construct
  REGION 1..9: note = Description of Artificial Sequence: Synthetic peptide
YTDIIYNLL

SEQ ID NO: 6499 - protein, 9 aa, synthetic construct
  REGION 1..9: note = Description of Artificial Sequence: Synthetic peptide
GTDRLIEGL

SEQ ID NO: 6500 - protein, 9 aa, synthetic construct
  REGION 1..9: note = Description of Artificial Sequence: Synthetic peptide
ILKEPVHGV

SEQ ID NO: 6501 - protein, 10 aa, synthetic construct
  REGION 1..10: note = Description of Artificial Sequence: Synthetic peptide
KVVEVKPLGV

SEQ ID NO: 6502 - protein, 10 aa, synthetic construct
  REGION 1..10: note = Description of Artificial Sequence: Synthetic peptide
YVDGAANREI

SEQ ID NO: 6503 - protein, 9 aa, synthetic construct
  REGION 1..9: note = Description of Artificial Sequence: Synthetic peptide
VLAEAMSKV

SEQ ID NO: 6504 - protein, 9 aa, synthetic construct
  REGION 1..9: note = Description of Artificial Sequence: Synthetic peptide
FSPEVIPMF

SEQ ID NO: 6505 - protein, 9 aa, synthetic construct
  REGION 1..9: note = Description of Artificial Sequence: Synthetic peptide
VLAEAMSQV

SEQ ID NO: 6506 - protein, 9 aa, synthetic construct
  REGION 1..9: note = Description of Artificial Sequence: Synthetic peptide
AVISIVNRV

SEQ ID NO: 6507 - protein, 9 aa, synthetic construct
  REGION 1..9: note = Description of Artificial Sequence: Synthetic peptide
HLEGKIILV

SEQ ID NO: 6508 - protein, 9 aa, synthetic construct
  REGION 1..9: note = Description of Artificial Sequence: Synthetic peptide
AYDAEVHNV

SEQ ID NO: 6509 - protein, 10 aa, synthetic construct
  REGION 1..10: note = Description of Artificial Sequence: Synthetic peptide
KVVEIKPLGV

SEQ ID NO: 6510 - protein, 9 aa, synthetic construct
  REGION 1..9: note = Description of Artificial Sequence: Synthetic peptide
AVISIVNRV

SEQ ID NO: 6511 - protein, 10 aa, synthetic construct
  REGION 1..10: note = Description of Artificial Sequence: Synthetic peptide
KVVEVKPLGV

SEQ ID NO: 6512 - protein, 10 aa, synthetic construct
  REGION 1..10: note = Description of Artificial Sequence: Synthetic peptide
KVVEIKPLGV

SEQ ID NO: 6513 - protein, 10 aa, synthetic construct
  REGION 1..10: note = Description of Artificial Sequence: Synthetic peptide
KVTNNSINSA

SEQ ID NO: 6514 - protein, 9 aa, synthetic construct
  REGION 1..9: note = Description of Artificial Sequence: Synthetic peptide
RIIEVIQGI

SEQ ID NO: 6515 - protein, 9 aa, synthetic construct
  REGION 1..9: note = Description of Artificial Sequence: Synthetic peptide
RLIEGLQGI

SEQ ID NO: 6516 - protein, 9 aa, synthetic construct
  REGION 1..9: note = Description of Artificial Sequence: Synthetic peptide
IVNQIIEQL

SEQ ID NO: 6517 - protein, 10 aa, synthetic construct
  REGION 1..10: note = Description of Artificial Sequence: Synthetic peptide
REFPSEQTRA

SEQ ID NO: 6518 - protein, 9 aa, synthetic construct
  REGION 1..9: note = Description of Artificial Sequence: Synthetic peptide
KIVGGLIGL

SEQ ID NO: 6519 - protein, 9 aa, synthetic construct
  REGION 1..9: note = Description of Artificial Sequence: Synthetic peptide
WTVNDIQKL

SEQ ID NO: 6520 - protein, 9 aa, synthetic construct
  REGION 1..9: note = Description of Artificial Sequence: Synthetic peptide
IEIKDTKEA

SEQ ID NO: 6521 - protein, 10 aa, synthetic construct
  REGION 1..10: note = Description of Artificial Sequence: Synthetic peptide
RVLAEAMSKV

SEQ ID NO: 6522 - protein, 10 aa, synthetic construct
  REGION 1..10: note = Description of Artificial Sequence: Synthetic peptide
KAYDTEVHNV

SEQ ID NO: 6523 - protein, 9 aa, synthetic construct
  REGION 1..9: note = Description of Artificial Sequence: Synthetic peptide
AVLSIVNRV

SEQ ID NO: 6524 - protein, 9 aa, synthetic construct
  REGION 1..9: note = Description of Artificial Sequence: Synthetic peptide
VLAEAMSKV

SEQ ID NO: 6525 - protein, 9 aa, synthetic construct
  REGION 1..9: note = Description of Artificial Sequence: Synthetic peptide
EIIGDIRQA

SEQ ID NO: 6526 - protein, 10 aa, synthetic construct
  REGION 1..10: note = Description of Artificial Sequence: Synthetic peptide
AVNPGLLETA

SEQ ID NO: 6527 - protein, 10 aa, synthetic construct
  REGION 1..10: note = Description of Artificial Sequence: Synthetic peptide
KAYDAEVHNV

SEQ ID NO: 6528 - protein, 9 aa, synthetic construct
  REGION 1..9: note = Description of Artificial Sequence: Synthetic peptide
KIKPPLPSV

SEQ ID NO: 6529 - protein, 9 aa, synthetic construct
  REGION 1..9: note = Description of Artificial Sequence: Synthetic peptide
VVAEGTDRL

SEQ ID NO: 6530 - protein, 9 aa, synthetic construct
  REGION 1..9: note = Description of Artificial Sequence: Synthetic peptide
VLAEAMSQV

SEQ ID NO: 6531 - protein, 9 aa, synthetic construct
  REGION 1..9: note = Description of Artificial Sequence: Synthetic peptide
EIIGNIRQA

SEQ ID NO: 6532 - protein, 10 aa, synthetic construct
  REGION 1..10: note = Description of Artificial Sequence: Synthetic peptide
GEIIGDIRQA

SEQ ID NO: 6533 - protein, 10 aa, synthetic construct
  REGION 1..10: note = Description of Artificial Sequence: Synthetic peptide
RVLAEAMSQV

SEQ ID NO: 6534 - protein, 10 aa, synthetic construct
  REGION 1..10: note = Description of Artificial Sequence: Synthetic peptide
KTYNESMKEI

SEQ ID NO: 6535 - protein, 11 aa, synthetic construct
  REGION 1..11: note = Description of Artificial Sequence: Synthetic peptide
VVIQDNSDIKV

SEQ ID NO: 6536 - protein, 9 aa, synthetic construct
  REGION 1..9: note = Description of Artificial Sequence: Synthetic peptide
QLTAVVQKI

SEQ ID NO: 6537 - protein, 9 aa, synthetic construct
  REGION 1..9: note = Description of Artificial Sequence: Synthetic peptide
ALIRTLQQL

SEQ ID NO: 6538 - protein, 10 aa, synthetic construct
  REGION 1..10: note = Description of Artificial Sequence: Synthetic peptide
REFSPEQTRA

SEQ ID NO: 6539 - protein, 9 aa, synthetic construct
  REGION 1..9: note = Description of Artificial Sequence: Synthetic peptide
GTAGSTMGA

SEQ ID NO: 6540 - protein, 9 aa, synthetic construct
  REGION 1..9: note = Description of Artificial Sequence: Synthetic peptide
RAAPAAEGV

SEQ ID NO: 6541 - protein, 9 aa, synthetic construct
  REGION 1..9: note = Description of Artificial Sequence: Synthetic peptide
KIVSITETT

SEQ ID NO: 6542 - protein, 9 aa, synthetic construct
  REGION 1..9: note = Description of Artificial Sequence: Synthetic peptide
VVPKEIVAC

SEQ ID NO: 6543 - protein, 9 aa, synthetic construct
  REGION 1..9: note = Description of Artificial Sequence: Synthetic peptide
ILKEPVHGV

SEQ ID NO: 6544 - protein, 11 aa, synthetic construct
  REGION 1..11: note = Description of Artificial Sequence: Synthetic peptide
RAAPAAEGVGA

SEQ ID NO: 6545 - protein, 9 aa, synthetic construct
  REGION 1..9: note = Description of Artificial Sequence: Synthetic peptide
KIKPPLPSI

SEQ ID NO: 6546 - protein, 10 aa, synthetic construct
  REGION 1..10: note = Description of Artificial Sequence: Synthetic peptide
KVVEIKPLGI

SEQ ID NO: 6547 - protein, 9 aa, synthetic construct
  REGION 1..9: note = Description of Artificial Sequence: Synthetic peptide
KQMAGADCV

SEQ ID NO: 6548 - protein, 9 aa, synthetic construct
  REGION 1..9: note = Description of Artificial Sequence: Synthetic peptide
LEIGQHRAP

SEQ ID NO: 6549 - protein, 9 aa, synthetic construct
  REGION 1..9: note = Description of Artificial Sequence: Synthetic peptide
RVASPVSGK

SEQ ID NO: 6550 - protein, 9 aa, synthetic construct
  REGION 1..9: note = Description of Artificial Sequence: Synthetic peptide
QIYPGIQVK

SEQ ID NO: 6551 - protein, 10 aa, synthetic construct
  REGION 1..10: note = Description of Artificial Sequence: Synthetic peptide
IVQQQSNLLK

SEQ ID NO: 6552 - protein, 11 aa, synthetic construct
  REGION 1..11: note = Description of Artificial Sequence: Synthetic peptide
QVNNTTIMMQK

SEQ ID NO: 6553 - protein, 9 aa, synthetic construct
  REGION 1..9: note = Description of Artificial Sequence: Synthetic peptide
SIFQSSTTK

SEQ ID NO: 6554 - protein, 9 aa, synthetic construct
  REGION 1..9: note = Description of Artificial Sequence: Synthetic peptide
GVGSPISGK

SEQ ID NO: 6555 - protein, 9 aa, synthetic construct
  REGION 1..9: note = Description of Artificial Sequence: Synthetic peptide
AIFQSSMTK

SEQ ID NO: 6556 - protein, 10 aa, synthetic construct
  REGION 1..10: note = Description of Artificial Sequence: Synthetic peptide
AMYAPPIEGK

SEQ ID NO: 6557 - protein, 9 aa, synthetic construct
  REGION 1..9: note = Description of Artificial Sequence: Synthetic peptide
KLAEHFPNK

SEQ ID NO: 6558 - protein, 9 aa, synthetic construct
  REGION 1..9: note = Description of Artificial Sequence: Synthetic peptide
RTYMPNDTK

SEQ ID NO: 6559 - protein, 10 aa, synthetic construct
  REGION 1..10: note = Description of Artificial Sequence: Synthetic peptide
QTNSAILMQR

SEQ ID NO: 6560 - protein, 9 aa, synthetic construct
  REGION 1..9: note = Description of Artificial Sequence: Synthetic peptide
MVHQPISAR

SEQ ID NO: 6561 - protein, 9 aa, synthetic construct
  REGION 1..9: note = Description of Artificial Sequence: Synthetic peptide
QIYPGIKVR

SEQ ID NO: 6562 - protein, 10 aa, synthetic construct
  REGION 1..10: note = Description of Artificial Sequence: Synthetic peptide
ILYQSNPPPK

SEQ ID NO: 6563 - protein, 9 aa, synthetic construct
  REGION 1..9: note = Description of Artificial Sequence: Synthetic peptide
KILEPFRAK

SEQ ID NO: 6564 - protein, 9 aa, synthetic construct
  REGION 1..9: note = Description of Artificial Sequence: Synthetic peptide
RVLAEAMSK

SEQ ID NO: 6565 - protein, 10 aa, synthetic construct
  REGION 1..10: note = Description of Artificial Sequence: Synthetic peptide
TVYYGVPVWK

SEQ ID NO: 6566 - protein, 11 aa, synthetic construct
  REGION 1..11: note = Description of Artificial Sequence: Synthetic peptide
TVNDIQKLVGK

SEQ ID NO: 6567 - protein, 10 aa, synthetic construct
  REGION 1..10: note = Description of Artificial Sequence: Synthetic peptide
RVASPVSGKP

SEQ ID NO: 6568 - protein, 9 aa, synthetic construct
  REGION 1..9: note = Description of Artificial Sequence: Synthetic peptide
AIRKAILGY

SEQ ID NO: 6569 - protein, 9 aa, synthetic construct
  REGION 1..9: note = Description of Artificial Sequence: Synthetic peptide
GVGNPISGK

SEQ ID NO: 6570 - protein, 9 aa, synthetic construct
  REGION 1..9: note = Description of Artificial Sequence: Synthetic peptide
QIIEQLISK

SEQ ID NO: 6571 - protein, 10 aa, synthetic construct
  REGION 1..10: note = Description of Artificial Sequence: Synthetic peptide
KTQKVNALFY

SEQ ID NO: 6572 - protein, 9 aa, synthetic construct
  REGION 1..9: note = Description of Artificial Sequence: Synthetic peptide
TLSETTNQK

SEQ ID NO: 6573 - protein, 9 aa, synthetic construct
  REGION 1..9: note = Description of Artificial Sequence: Synthetic peptide
GVAPTTAKR

SEQ ID NO: 6574 - protein, 11 aa, synthetic construct
  REGION 1..11: note = Description of Artificial Sequence: Synthetic peptide
QVNNTTIMMQK

SEQ ID NO: 6575 - protein, 10 aa, synthetic construct
  REGION 1..10: note = Description of Artificial Sequence: Synthetic peptide
IVQQQSNLLK

SEQ ID NO: 6576 - protein, 11 aa, synthetic construct
  REGION 1..11: note = Description of Artificial Sequence: Synthetic peptide
TVNDIQKLVGK

SEQ ID NO: 6577 - protein, 9 aa, synthetic construct
  REGION 1..9: note = Description of Artificial Sequence: Synthetic peptide
RVASPVSGK

SEQ ID NO: 6578 - protein, 9 aa, synthetic construct
  REGION 1..9: note = Description of Artificial Sequence: Synthetic peptide
QIYPGIQVK

SEQ ID NO: 6579 - protein, 10 aa, synthetic construct
  REGION 1..10: note = Description of Artificial Sequence: Synthetic peptide
TVQPIQLPEK

SEQ ID NO: 6580 - protein, 9 aa, synthetic construct
  REGION 1..9: note = Description of Artificial Sequence: Synthetic peptide
GVGSPISGK

SEQ ID NO: 6581 - protein, 10 aa, synthetic construct
  REGION 1..10: note = Description of Artificial Sequence: Synthetic peptide
AIQTGTEELK

SEQ ID NO: 6582 - protein, 9 aa, synthetic construct
  REGION 1..9: note = Description of Artificial Sequence: Synthetic peptide
IIASDIQTK

SEQ ID NO: 6583 - protein, 9 aa, synthetic construct
  REGION 1..9: note = Description of Artificial Sequence: Synthetic peptide
AIFQSSMTK

SEQ ID NO: 6584 - protein, 9 aa, synthetic construct
  REGION 1..9: note = Description of Artificial Sequence: Synthetic peptide
SIFQSSTTK

SEQ ID NO: 6585 - protein, 11 aa, synthetic construct
  REGION 1..11: note = Description of Artificial Sequence: Synthetic peptide
IVSITETTNQK

SEQ ID NO: 6586 - protein, 10 aa, synthetic construct
  REGION 1..10: note = Description of Artificial Sequence: Synthetic peptide
GSNFTSAAVK

SEQ ID NO: 6587 - protein, 10 aa, synthetic construct
  REGION 1..10: note = Description of Artificial Sequence: Synthetic peptide
ALQTGTEELK

SEQ ID NO: 6588 - protein, 9 aa, synthetic construct
  REGION 1..9: note = Description of Artificial Sequence: Synthetic peptide
TLSETTNQK

SEQ ID NO: 6589 - protein, 10 aa, synthetic construct
  REGION 1..10: note = Description of Artificial Sequence: Synthetic peptide
AMYAPPIEGK

SEQ ID NO: 6590 - protein, 10 aa, synthetic construct
  REGION 1..10: note = Description of Artificial Sequence: Synthetic peptide
GSNFISNTVK

SEQ ID NO: 6591 - protein, 9 aa, synthetic construct
  REGION 1..9: note = Description of Artificial Sequence: Synthetic peptide
RTYMPNDTK

SEQ ID NO: 6592 - protein, 10 aa, synthetic construct
  REGION 1..10: note = Description of Artificial Sequence: Synthetic peptide
GSNFTSNAVK

SEQ ID NO: 6593 - protein, 9 aa, synthetic construct
  REGION 1..9: note = Description of Artificial Sequence: Synthetic peptide
RVLAEAMSK

SEQ ID NO: 6594 - protein, 10 aa, synthetic construct
  REGION 1..10: note = Description of Artificial Sequence: Synthetic peptide
QTNSAILMQR

SEQ ID NO: 6595 - protein, 11 aa, synthetic construct
  REGION 1..11: note = Description of Artificial Sequence: Synthetic peptide
IVSLTETTNQK

SEQ ID NO: 6596 - protein, 9 aa, synthetic construct
  REGION 1..9: note = Description of Artificial Sequence: Synthetic peptide
RVGNPVFGR

SEQ ID NO: 6597 - protein, 9 aa, synthetic construct
  REGION 1..9: note = Description of Artificial Sequence: Synthetic peptide
KLAEHFPNK

SEQ ID NO: 6598 - protein, 9 aa, synthetic construct
  REGION 1..9: note = Description of Artificial Sequence: Synthetic peptide
GVGNPISGK

SEQ ID NO: 6599 - protein, 11 aa, synthetic construct
  REGION 1..11: note = Description of Artificial Sequence: Synthetic peptide
ASQIYPGIQVK

SEQ ID NO: 6600 - protein, 10 aa, synthetic construct
  REGION 1..10: note = Description of Artificial Sequence: Synthetic peptide
GLQTGWQALK

SEQ ID NO: 6601 - protein, 11 aa, synthetic construct
  REGION 1..11: note = Description of Artificial Sequence: Synthetic peptide
QSQGVVESMNK

SEQ ID NO: 6602 - protein, 9 aa, synthetic construct
  REGION 1..9: note = Description of Artificial Sequence: Synthetic peptide
QIIEQLISK

SEQ ID NO: 6603 - protein, 10 aa, synthetic construct
  REGION 1..10: note = Description of Artificial Sequence: Synthetic peptide
ILYQSNPPPK

SEQ ID NO: 6604 - protein, 11 aa, synthetic construct
  REGION 1..11: note = Description of Artificial Sequence: Synthetic peptide
YVDGASNRETK

SEQ ID NO: 6605 - protein, 9 aa, synthetic construct
  REGION 1..9: note = Description of Artificial Sequence: Synthetic peptide
GIIQAQPNK

SEQ ID NO: 6606 - protein, 9 aa, synthetic construct
  REGION 1..9: note = Description of Artificial Sequence: Synthetic peptide
ASDAKAYEK

SEQ ID NO: 6607 - protein, 9 aa, synthetic construct
  REGION 1..9: note = Description of Artificial Sequence: Synthetic peptide
SITETTNQK

SEQ ID NO: 6608 - protein, 9 aa, synthetic construct
  REGION 1..9: note = Description of Artificial Sequence: Synthetic peptide
IIATDIQTK

SEQ ID NO: 6609 - protein, 9 aa, synthetic construct
  REGION 1..9: note = Description of Artificial Sequence: Synthetic peptide
STITQACPK

SEQ ID NO: 6610 - protein, 8 aa, synthetic construct
  REGION 1..8: note = Description of Artificial Sequence: Synthetic peptide
VLAEAMSK

SEQ ID NO: 6611 - protein, 10 aa, synthetic construct
  REGION 1..10: note = Description of Artificial Sequence: Synthetic peptide
ITLSETTNQK

SEQ ID NO: 6612 - protein, 10 aa, synthetic construct
  REGION 1..10: note = Description of Artificial Sequence: Synthetic peptide
ATESIVIWGK

SEQ ID NO: 6613 - protein, 9 aa, synthetic construct
  REGION 1..9: note = Description of Artificial Sequence: Synthetic peptide
KQLTEAVQK

SEQ ID NO: 6614 - protein, 11 aa, synthetic construct
  REGION 1..11: note = Description of Artificial Sequence: Synthetic peptide
ATDIQTKELQK

SEQ ID NO: 6615 - protein, 9 aa, synthetic construct
  REGION 1..9: note = Description of Artificial Sequence: Synthetic peptide
IIATDLQTK

SEQ ID NO: 6616 - protein, 10 aa, synthetic construct
  REGION 1..10: note = Description of Artificial Sequence: Synthetic peptide
SILDIKQGPK

SEQ ID NO: 6617 - protein, 9 aa, synthetic construct
  REGION 1..9: note = Description of Artificial Sequence: Synthetic peptide
VQQQSNLLK

SEQ ID NO: 6618 - protein, 10 aa, synthetic construct
  REGION 1..10: note = Description of Artificial Sequence: Synthetic peptide
VVESMNKELK

SEQ ID NO: 6619 - protein, 9 aa, synthetic construct
  REGION 1..9: note = Description of Artificial Sequence: Synthetic peptide
QIYPGIQVK

SEQ ID NO: 6620 - protein, 10 aa, synthetic construct
  REGION 1..10: note = Description of Artificial Sequence: Synthetic peptide
IVQQQSNLLK

SEQ ID NO: 6621 - protein, 9 aa, synthetic construct
  REGION 1..9: note = Description of Artificial Sequence: Synthetic peptide
STITQACPK

SEQ ID NO: 6622 - protein, 10 aa, synthetic construct
  REGION 1..10: note = Description of Artificial Sequence: Synthetic peptide
QTNSAILMQR

SEQ ID NO: 6623 - protein, 10 aa, synthetic construct
  REGION 1..10: note = Description of Artificial Sequence: Synthetic peptide
GSNFISNTVK

SEQ ID NO: 6624 - protein, 11 aa, synthetic construct
  REGION 1..11: note = Description of Artificial Sequence: Synthetic peptide
QVNNTTIMMQK

SEQ ID NO: 6625 - protein, 9 aa, synthetic construct
  REGION 1..9: note = Description of Artificial Sequence: Synthetic peptide
GVGSPISGK

SEQ ID NO: 6626 - protein, 11 aa, synthetic construct
  REGION 1..11: note = Description of Artificial Sequence: Synthetic peptide
TVNDIQKLVGK

SEQ ID NO: 6627 - protein, 9 aa, synthetic construct
  REGION 1..9: note = Description of Artificial Sequence: Synthetic peptide
QIIEQLISK

SEQ ID NO: 6628 - protein, 9 aa, synthetic construct
  REGION 1..9: note = Description of Artificial Sequence: Synthetic peptide
RTYMPNDTK

SEQ ID NO: 6629 - protein, 10 aa, synthetic construct
  REGION 1..10: note = Description of Artificial Sequence: Synthetic peptide
TVQPIQLPEK

SEQ ID NO: 6630 - protein, 10 aa, synthetic construct
  REGION 1..10: note = Description of Artificial Sequence: Synthetic peptide
GSNFTSNAVK

SEQ ID NO: 6631 - protein, 9 aa, synthetic construct
  REGION 1..9: note = Description of Artificial Sequence: Synthetic peptide
SIFQSSTTK

SEQ ID NO: 6632 - protein, 9 aa, synthetic construct
  REGION 1..9: note = Description of Artificial Sequence: Synthetic peptide
ASDAKAYEK

SEQ ID NO: 6633 - protein, 9 aa, synthetic construct
  REGION 1..9: note = Description of Artificial Sequence: Synthetic peptide
ATLYCVHEK

SEQ ID NO: 6634 - protein, 9 aa, synthetic construct
  REGION 1..9: note = Description of Artificial Sequence: Synthetic peptide
RVASPVSGK

SEQ ID NO: 6635 - protein, 9 aa, synthetic construct
  REGION 1..9: note = Description of Artificial Sequence: Synthetic peptide
ATLYCVHQK

SEQ ID NO: 6636 - protein, 8 aa, synthetic construct
  REGION 1..8: note = Description of Artificial Sequence: Synthetic peptide
SDIVPLEK

SEQ ID NO: 6637 - protein, 9 aa, synthetic construct
  REGION 1..9: note = Description of Artificial Sequence: Synthetic peptide
GIIQAQPNK

SEQ ID NO: 6638 - protein, 10 aa, synthetic construct
  REGION 1..10: note = Description of Artificial Sequence: Synthetic peptide
GSNFTSAAVK

SEQ ID NO: 6639 - protein, 9 aa, synthetic construct
  REGION 1..9: note = Description of Artificial Sequence: Synthetic peptide
APAGYAILK

SEQ ID NO: 6640 - protein, 11 aa, synthetic construct
  REGION 1..11: note = Description of Artificial Sequence: Synthetic peptide
ATDIQTKELQK

SEQ ID NO: 6641 - protein, 9 aa, synthetic construct
  REGION 1..9: note = Description of Artificial Sequence: Synthetic peptide
AIFQSSMTK

SEQ ID NO: 6642 - protein, 10 aa, synthetic construct
  REGION 1..10: note = Description of Artificial Sequence: Synthetic peptide
SQIYPGIQVK

SEQ ID NO: 6643 - protein, 9 aa, synthetic construct
  REGION 1..9: note = Description of Artificial Sequence: Synthetic peptide
SITETTNQK

SEQ ID NO: 6644 - protein, 10 aa, synthetic construct
  REGION 1..10: note = Description of Artificial Sequence: Synthetic peptide
ATESIVIWGK

SEQ ID NO: 6645 - protein, 10 aa, synthetic construct
  REGION 1..10: note = Description of Artificial Sequence: Synthetic peptide
VSITETTNQK

SEQ ID NO: 6646 - protein, 9 aa, synthetic construct
  REGION 1..9: note = Description of Artificial Sequence: Synthetic peptide
GVGNPISGK

SEQ ID NO: 6647 - protein, 9 aa, synthetic construct
  REGION 1..9: note = Description of Artificial Sequence: Synthetic peptide
RVLAEAMSK

SEQ ID NO: 6648 - protein, 9 aa, synthetic construct
  REGION 1..9: note = Description of Artificial Sequence: Synthetic peptide
QIIEQLIKK

SEQ ID NO: 6649 - protein, 9 aa, synthetic construct
  REGION 1..9: note = Description of Artificial Sequence: Synthetic peptide
SAITQACPK

SEQ ID NO: 6650 - protein, 9 aa, synthetic construct
  REGION 1..9: note = Description of Artificial Sequence: Synthetic peptide
VQQQSNLLK

SEQ ID NO: 6651 - protein, 10 aa, synthetic construct
  REGION 1..10: note = Description of Artificial Sequence: Synthetic peptide
AMYAPPIEGK

SEQ ID NO: 6652 - protein, 8 aa, synthetic construct
  REGION 1..8: note = Description of Artificial Sequence: Synthetic peptide
PAGYAILK

SEQ ID NO: 6653 - protein, 10 aa, synthetic construct
  REGION 1..10: note = Description of Artificial Sequence: Synthetic peptide
AIQTGTEELK

SEQ ID NO: 6654 - protein, 11 aa, synthetic construct
  REGION 1..11: note = Description of Artificial Sequence: Synthetic peptide
YVDGASNRETK

SEQ ID NO: 6655 - protein, 9 aa, synthetic construct
  REGION 1..9: note = Description of Artificial Sequence: Synthetic peptide
IIASDIQTK

SEQ ID NO: 6656 - protein, 10 aa, synthetic construct
  REGION 1..10: note = Description of Artificial Sequence: Synthetic peptide
ITLSETTNQK

SEQ ID NO: 6657 - protein, 9 aa, synthetic construct
  REGION 1..9: note = Description of Artificial Sequence: Synthetic peptide
KQLTAVVQK

SEQ ID NO: 6658 - protein, 11 aa, synthetic construct
  REGION 1..11: note = Description of Artificial Sequence: Synthetic peptide
GVVESMNKELK

SEQ ID NO: 6659 - protein, 9 aa, synthetic construct
  REGION 1..9: note = Description of Artificial Sequence: Synthetic peptide
RVGNPVFGR

SEQ ID NO: 6660 - protein, 11 aa, synthetic construct
  REGION 1..11: note = Description of Artificial Sequence: Synthetic peptide
ATDLQTKELQK

SEQ ID NO: 6661 - protein, 9 aa, synthetic construct
  REGION 1..9: note = Description of Artificial Sequence: Synthetic peptide
GVAPTTAKR

SEQ ID NO: 6662 - protein, 9 aa, synthetic construct
  REGION 1..9: note = Description of Artificial Sequence: Synthetic peptide
QIIEQLIRK

SEQ ID NO: 6663 - protein, 9 aa, synthetic construct
  REGION 1..9: note = Description of Artificial Sequence: Synthetic peptide
QIYPGIKVR

SEQ ID NO: 6664 - protein, 9 aa, synthetic construct
  REGION 1..9: note = Description of Artificial Sequence: Synthetic peptide
SALTQACPK

SEQ ID NO: 6665 - protein, 10 aa, synthetic construct
  REGION 1..10: note = Description of Artificial Sequence: Synthetic peptide
SILDIKQGPK

SEQ ID NO: 6666 - protein, 10 aa, synthetic construct
  REGION 1..10: note = Description of Artificial Sequence: Synthetic peptide
AAFDLSLFLK

SEQ ID NO: 6667 - protein, 8 aa, synthetic construct
  REGION 1..8: note = Description of Artificial Sequence: Synthetic peptide
NTTIMMQK

SEQ ID NO: 6668 - protein, 9 aa, synthetic construct
  REGION 1..9: note = Description of Artificial Sequence: Synthetic peptide
TSNLFNSTK

SEQ ID NO: 6669 - protein, 9 aa, synthetic construct
  REGION 1..9: note = Description of Artificial Sequence: Synthetic peptide
NYTDIIYTL

SEQ ID NO: 6670 - protein, 9 aa, synthetic construct
  REGION 1..9: note = Description of Artificial Sequence: Synthetic peptide
NYTDIIYNL

SEQ ID NO: 6671 - protein, 9 aa, synthetic construct
  REGION 1..9: note = Description of Artificial Sequence: Synthetic peptide
NYTNTIYRL

SEQ ID NO: 6672 - protein, 9 aa, synthetic construct
  REGION 1..9: note = Description of Artificial Sequence: Synthetic peptide
KYLGSLVQY

SEQ ID NO: 6673 - protein, 9 aa, synthetic construct
  REGION 1..9: note = Description of Artificial Sequence: Synthetic peptide
VLENVTESF

SEQ ID NO: 6674 - protein, 9 aa, synthetic construct
  REGION 1..9: note = Description of Artificial Sequence: Synthetic peptide
IYQEPFKNL

SEQ ID NO: 6675 - protein, 9 aa, synthetic construct
  REGION 1..9: note = Description of Artificial Sequence: Synthetic peptide
TETNKTETF

SEQ ID NO: 6676 - protein, 9 aa, synthetic construct
  REGION 1..9: note = Description of Artificial Sequence: Synthetic peptide
VLENVTENF

SEQ ID NO: 6677 - protein, 10 aa, synthetic construct
  REGION 1..10: note = Description of Artificial Sequence: Synthetic peptide
KYLGGLVQYW

SEQ ID NO: 6678 - protein, 9 aa, synthetic construct
  REGION 1..9: note = Description of Artificial Sequence: Synthetic peptide
RYLKDQQLL

SEQ ID NO: 6679 - protein, 9 aa, synthetic construct
  REGION 1..9: note = Description of Artificial Sequence: Synthetic peptide
LYASVDYRL

SEQ ID NO: 6680 - protein, 9 aa, synthetic construct
  REGION 1..9: note = Description of Artificial Sequence: Synthetic peptide
VYIEYRKLL

SEQ ID NO: 6681 - protein, 9 aa, synthetic construct
  REGION 1..9: note = Description of Artificial Sequence: Synthetic peptide
KYLGGLVQY

SEQ ID NO: 6682 - protein, 9 aa, synthetic construct
  REGION 1..9: note = Description of Artificial Sequence: Synthetic peptide
RYLRDQQLL

SEQ ID NO: 6683 - protein, 9 aa, synthetic construct
  REGION 1..9: note = Description of Artificial Sequence: Synthetic peptide
AYIEYRKLL

SEQ ID NO: 6684 - protein, 9 aa, synthetic construct
  REGION 1..9: note = Description of Artificial Sequence: Synthetic peptide
TQLGRTLNF

SEQ ID NO: 6685 - protein, 9 aa, synthetic construct
  REGION 1..9: note = Description of Artificial Sequence: Synthetic peptide
FYQEPFKNL

SEQ ID NO: 6686 - protein, 9 aa, synthetic construct
  REGION 1..9: note = Description of Artificial Sequence: Synthetic peptide
NYTDIIYTL

SEQ ID NO: 6687 - protein, 9 aa, synthetic construct
  REGION 1..9: note = Description of Artificial Sequence: Synthetic peptide
NYTDIIYNL

SEQ ID NO: 6688 - protein, 9 aa, synthetic construct
  REGION 1..9: note = Description of Artificial Sequence: Synthetic peptide
NYTNTIYRL

SEQ ID NO: 6689 - protein, 9 aa, synthetic construct
  REGION 1..9: note = Description of Artificial Sequence: Synthetic peptide
IYATYGDTW

SEQ ID NO: 6690 - protein, 9 aa, synthetic construct
  REGION 1..9: note = Description of Artificial Sequence: Synthetic peptide
IYQEPFKNL

SEQ ID NO: 6691 - protein, 9 aa, synthetic construct
  REGION 1..9: note = Description of Artificial Sequence: Synthetic peptide
TYNESMKEI

SEQ ID NO: 6692 - protein, 9 aa, synthetic construct
  REGION 1..9: note = Description of Artificial Sequence: Synthetic peptide
RYLKDQQLL

SEQ ID NO: 6693 - protein, 9 aa, synthetic construct
  REGION 1..9: note = Description of Artificial Sequence: Synthetic peptide
QYDQIIIEI

SEQ ID NO: 6694 - protein, 9 aa, synthetic construct
  REGION 1..9: note = Description of Artificial Sequence: Synthetic peptide
FYQEPFKNL

SEQ ID NO: 6695 - protein, 9 aa, synthetic construct
  REGION 1..9: note = Description of Artificial Sequence: Synthetic peptide
RYLRDQQLL

SEQ ID NO: 6696 - protein, 10 aa, synthetic construct
  REGION 1..10: note = Description of Artificial Sequence: Synthetic peptide
IYPGIQVKQL

SEQ ID NO: 6697 - protein, 9 aa, synthetic construct
  REGION 1..9: note = Description of Artificial Sequence: Synthetic peptide
YYDPSKDLI

SEQ ID NO: 6698 - protein, 9 aa, synthetic construct
  REGION 1..9: note = Description of Artificial Sequence: Synthetic peptide
IYNVRGNLW

SEQ ID NO: 6699 - protein, 10 aa, synthetic construct
  REGION 1..10: note = Description of Artificial Sequence: Synthetic peptide
DTINEEAAEW

SEQ ID NO: 6700 - protein, 9 aa, synthetic construct
  REGION 1..9: note = Description of Artificial Sequence: Synthetic peptide
EVIPMFTAL

SEQ ID NO: 6701 - protein, 9 aa, synthetic construct
  REGION 1..9: note = Description of Artificial Sequence: Synthetic peptide
ETMVDMGHL

SEQ ID NO: 6702 - protein, 9 aa, synthetic construct
  REGION 1..9: note = Description of Artificial Sequence: Synthetic peptide
DIAGTTSTL

SEQ ID NO: 6703 - protein, 10 aa, synthetic construct
  REGION 1..10: note = Description of Artificial Sequence: Synthetic peptide
SISERILSTF

SEQ ID NO: 6704 - protein, 10 aa, synthetic construct
  REGION 1..10: note = Description of Artificial Sequence: Synthetic peptide
EIQKQGQNQW

SEQ ID NO: 6705 - protein, 9 aa, synthetic construct
  REGION 1..9: note = Description of Artificial Sequence: Synthetic peptide
ETIIRFENL

SEQ ID NO: 6706 - protein, 9 aa, synthetic construct
  REGION 1..9: note = Description of Artificial Sequence: Synthetic peptide
NVTENFNMW

SEQ ID NO: 6707 - protein, 10 aa, synthetic construct
  REGION 1..10: note = Description of Artificial Sequence: Synthetic peptide
TTAVPWNSSW

SEQ ID NO: 6708 - protein, 11 aa, synthetic construct
  REGION 1..11: note = Description of Artificial Sequence: Synthetic peptide
ESIRIGPGQTF

SEQ ID NO: 6709 - protein, 9 aa, synthetic construct
  REGION 1..9: note = Description of Artificial Sequence: Synthetic peptide
EIIGDIRQA

SEQ ID NO: 6710 - protein, 10 aa, synthetic construct
  REGION 1..10: note = Description of Artificial Sequence: Synthetic peptide
TTAVHWNSSW

SEQ ID NO: 6711 - protein, 10 aa, synthetic construct
  REGION 1..10: note = Description of Artificial Sequence: Synthetic peptide
EVNIVTDSQY

SEQ ID NO: 6712 - protein, 10 aa, synthetic construct
  REGION 1..10: note = Description of Artificial Sequence: Synthetic peptide
EVNIVTDSQY

SEQ ID NO: 6713 - protein, 9 aa, synthetic construct
  REGION 1..9: note = Description of Artificial Sequence: Synthetic peptide
ETKIGKAGY

SEQ ID NO: 6714 - protein, 9 aa, synthetic construct
  REGION 1..9: note = Description of Artificial Sequence: Synthetic peptide
EIIGNIRQA

SEQ ID NO: 6715 - protein, 9 aa, synthetic construct
  REGION 1..9: note = Description of Artificial Sequence: Synthetic peptide
EIIGDIRQA

SEQ ID NO: 6716 - protein, 9 aa, synthetic construct
  REGION 1..9: note = Description of Artificial Sequence: Synthetic peptide
EVIPMFTAL

SEQ ID NO: 6717 - protein, 9 aa, synthetic construct
  REGION 1..9: note = Description of Artificial Sequence: Synthetic peptide
ETPGIRYQY

SEQ ID NO: 6718 - protein, 10 aa, synthetic construct
  REGION 1..10: note = Description of Artificial Sequence: Synthetic peptide
EISNYTNTIY

SEQ ID NO: 6719 - protein, 10 aa, synthetic construct
  REGION 1..10: note = Description of Artificial Sequence: Synthetic peptide
ETIDKELPLT

SEQ ID NO: 6720 - protein, 10 aa, synthetic construct
  REGION 1..10: note = Description of Artificial Sequence: Synthetic peptide
EVIPAETGQE

SEQ ID NO: 6721 - protein, 10 aa, synthetic construct
  REGION 1..10: note = Description of Artificial Sequence: Synthetic peptide
EINNYTNTIY

SEQ ID NO: 6722 - protein, 9 aa, synthetic construct
  REGION 1..9: note = Description of Artificial Sequence: Synthetic peptide
ETKKGKAGY

SEQ ID NO: 6723 - protein, 10 aa, synthetic construct
  REGION 1..10: note = Description of Artificial Sequence: Synthetic peptide
EIFRPGGGNM

SEQ ID NO: 6724 - protein, 9 aa, synthetic construct
  REGION 1..9: note = Description of Artificial Sequence: Synthetic peptide
ETGQETAYY

SEQ ID NO: 6725 - protein, 9 aa, synthetic construct
  REGION 1..9: note = Description of Artificial Sequence: Synthetic peptide
DIIGDIRQA

SEQ ID NO: 6726 - protein, 10 aa, synthetic construct
  REGION 1..10: note = Description of Artificial Sequence: Synthetic peptide
ETFRPGGGDM

SEQ ID NO: 6727 - protein, 9 aa, synthetic construct
  REGION 1..9: note = Description of Artificial Sequence: Synthetic peptide
QTKGLGISY

SEQ ID NO: 6728 - protein, 9 aa, synthetic construct
  REGION 1..9: note = Description of Artificial Sequence: Synthetic peptide
EVIPAETGQ

SEQ ID NO: 6729 - protein, 9 aa, synthetic construct
  REGION 1..9: note = Description of Artificial Sequence: Synthetic peptide
EVIPMFTAL

SEQ ID NO: 6730 - protein, 9 aa, synthetic construct
  REGION 1..9: note = Description of Artificial Sequence: Synthetic peptide
DIAGTTSNL

SEQ ID NO: 6731 - protein, 10 aa, synthetic construct
  REGION 1..10: note = Description of Artificial Sequence: Synthetic peptide
EVNIVTDSQY

SEQ ID NO: 6732 - protein, 10 aa, synthetic construct
  REGION 1..10: note = Description of Artificial Sequence: Synthetic peptide
SISERILSTF

SEQ ID NO: 6733 - protein, 10 aa, synthetic construct
  REGION 1..10: note = Description of Artificial Sequence: Synthetic peptide
EIFRPGGGNM

SEQ ID NO: 6734 - protein, 9 aa, synthetic construct
  REGION 1..9: note = Description of Artificial Sequence: Synthetic peptide
DIAGTTSTL

SEQ ID NO: 6735 - protein, 9 aa, synthetic construct
  REGION 1..9: note = Description of Artificial Sequence: Synthetic peptide
EIIGNIRQA

SEQ ID NO: 6736 - protein, 9 aa, synthetic construct
  REGION 1..9: note = Description of Artificial Sequence: Synthetic peptide
EIIGDIRQA

SEQ ID NO: 6737 - protein, 9 aa, synthetic construct
  REGION 1..9: note = Description of Artificial Sequence: Synthetic peptide
EPIAGVETF

SEQ ID NO: 6738 - protein, 11 aa, synthetic construct
  REGION 1..11: note = Description of Artificial Sequence: Synthetic peptide
SIAEGETIIRF

SEQ ID NO: 6739 - protein, 10 aa, synthetic construct
  REGION 1..10: note = Description of Artificial Sequence: Synthetic peptide
ETGAERQGTF

SEQ ID NO: 6740 - protein, 9 aa, synthetic construct
  REGION 1..9: note = Description of Artificial Sequence: Synthetic peptide
EIIGNIRQA

SEQ ID NO: 6741 - protein, 9 aa, synthetic construct
  REGION 1..9: note = Description of Artificial Sequence: Synthetic peptide
EVIPMFTAL

SEQ ID NO: 6742 - protein, 9 aa, synthetic construct
  REGION 1..9: note = Description of Artificial Sequence: Synthetic peptide
EIIGDIRQA

SEQ ID NO: 6743 - protein, 9 aa, synthetic construct
  REGION 1..9: note = Description of Artificial Sequence: Synthetic peptide
MVHQPISAR

SEQ ID NO: 6744 - protein, 9 aa, synthetic construct
  REGION 1..9: note = Description of Artificial Sequence: Synthetic peptide
DIIGDIRQA

SEQ ID NO: 6745 - protein, 9 aa, synthetic construct
  REGION 1..9: note = Description of Artificial Sequence: Synthetic peptide
ESVEITCTR

SEQ ID NO: 6746 - protein, 9 aa, synthetic construct
  REGION 1..9: note = Description of Artificial Sequence: Synthetic peptide
DIAGTTSNL

SEQ ID NO: 6747 - protein, 9 aa, synthetic construct
  REGION 1..9: note = Description of Artificial Sequence: Synthetic peptide
GVAPTTAKR

SEQ ID NO: 6748 - protein, 10 aa, synthetic construct
  REGION 1..10: note = Description of Artificial Sequence: Synthetic peptide
EIFRPGGGNM

SEQ ID NO: 6749 - protein, 9 aa, synthetic construct
  REGION 1..9: note = Description of Artificial Sequence: Synthetic peptide
ETLQNVSKK

SEQ ID NO: 6750 - protein, 10 aa, synthetic construct
  REGION 1..10: note = Description of Artificial Sequence: Synthetic peptide
EVTTHSFNCR

SEQ ID NO: 6751 - protein, 9 aa, synthetic construct
  REGION 1..9: note = Description of Artificial Sequence: Synthetic peptide
MVHQAISPR

SEQ ID NO: 6752 - protein, 9 aa, synthetic construct
  REGION 1..9: note = Description of Artificial Sequence: Synthetic peptide
MVHQPLSPR

SEQ ID NO: 6753 - protein, 9 aa, synthetic construct
  REGION 1..9: note = Description of Artificial Sequence: Synthetic peptide
ETIIRFENL

SEQ ID NO: 6754 - protein, 9 aa, synthetic construct
  REGION 1..9: note = Description of Artificial Sequence: Synthetic peptide
DIAGTTSTL

SEQ ID NO: 6755 - protein, 9 aa, synthetic construct
  REGION 1..9: note = Description of Artificial Sequence: Synthetic peptide
ESVEINCTR

SEQ ID NO: 6756 - protein, 11 aa, synthetic construct
  REGION 1..11: note = Description of Artificial Sequence: Synthetic peptide
ETFYVDGASNR

SEQ ID NO: 6757 - protein, 10 aa, synthetic construct
  REGION 1..10: note = Description of Artificial Sequence: Synthetic peptide
DNSDIKVVPR

SEQ ID NO: 6758 - protein, 10 aa, synthetic construct
  REGION 1..10: note = Description of Artificial Sequence: Synthetic peptide
QMVHQPISAR

SEQ ID NO: 6759 - protein, 9 aa, synthetic construct
  REGION 1..9: note = Description of Artificial Sequence: Synthetic peptide
ETIDKELPL

SEQ ID NO: 6760 - protein, 9 aa, synthetic construct
  REGION 1..9: note = Description of Artificial Sequence: Synthetic peptide
LFNTVATLY

SEQ ID NO: 6761 - protein, 9 aa, synthetic construct
  REGION 1..9: note = Description of Artificial Sequence: Synthetic peptide
TVLDVGDAY

SEQ ID NO: 6762 - protein, 10 aa, synthetic construct
  REGION 1..10: note = Description of Artificial Sequence: Synthetic peptide
VTFDPIPIHY

SEQ ID NO: 6763 - protein, 9 aa, synthetic construct
  REGION 1..9: note = Description of Artificial Sequence: Synthetic peptide
SLDPIPIHY

SEQ ID NO: 6764 - protein, 9 aa, synthetic construct
  REGION 1..9: note = Description of Artificial Sequence: Synthetic peptide
LFNTIAVLY

SEQ ID NO: 6765 - protein, 9 aa, synthetic construct
  REGION 1..9: note = Description of Artificial Sequence: Synthetic peptide
SFDPIPIHY

SEQ ID NO: 6766 - protein, 9 aa, synthetic construct
  REGION 1..9: note = Description of Artificial Sequence: Synthetic peptide
TFDPIPIHY

SEQ ID NO: 6767 - protein, 10 aa, synthetic construct
  REGION 1..10: note = Description of Artificial Sequence: Synthetic peptide
VSFDPIPIHY

SEQ ID NO: 6768 - protein, 9 aa, synthetic construct
  REGION 1..9: note = Description of Artificial Sequence: Synthetic peptide
QTGWQALKY

SEQ ID NO: 6769 - protein, 9 aa, synthetic construct
  REGION 1..9: note = Description of Artificial Sequence: Synthetic peptide
LFNTVATLY

SEQ ID NO: 6770 - protein, 9 aa, synthetic construct
  REGION 1..9: note = Description of Artificial Sequence: Synthetic peptide
GFFPDWQNY

SEQ ID NO: 6771 - protein, 9 aa, synthetic construct
  REGION 1..9: note = Description of Artificial Sequence: Synthetic peptide
LFNTIAVLY

SEQ ID NO: 6772 - protein, 10 aa, synthetic construct
  REGION 1..10: note = Description of Artificial Sequence: Synthetic peptide
VTFDPIPIHY

SEQ ID NO: 6773 - protein, 9 aa, synthetic construct
  REGION 1..9: note = Description of Artificial Sequence: Synthetic peptide
SFDPIPIHY

SEQ ID NO: 6774 - protein, 9 aa, synthetic construct
  REGION 1..9: note = Description of Artificial Sequence: Synthetic peptide
QTGWQALKY

SEQ ID NO: 6775 - protein, 9 aa, synthetic construct
  REGION 1..9: note = Description of Artificial Sequence: Synthetic peptide
TFDPIPIHY

SEQ ID NO: 6776 - protein, 9 aa, synthetic construct
  REGION 1..9: note = Description of Artificial Sequence: Synthetic peptide
GYFPDWQNY

SEQ ID NO: 6777 - protein, 10 aa, synthetic construct
  REGION 1..10: note = Description of Artificial Sequence: Synthetic peptide
VSFDPIPIHY

SEQ ID NO: 6778 - protein, 9 aa, synthetic construct
  REGION 1..9: note = Description of Artificial Sequence: Synthetic peptide
SLDPIPIHY

SEQ ID NO: 6779 - protein, 10 aa, synthetic construct
  REGION 1..10: note = Description of Artificial Sequence: Synthetic peptide
VSLDPIPIHY

SEQ ID NO: 6780 - protein, 9 aa, synthetic construct
  REGION 1..9: note = Description of Artificial Sequence: Synthetic peptide
VWTIVYIEY

SEQ ID NO: 6781 - protein, 9 aa, synthetic construct
  REGION 1..9: note = Description of Artificial Sequence: Synthetic peptide
GNLWVTVYY

SEQ ID NO: 6782 - protein, 9 aa, synthetic construct
  REGION 1..9: note = Description of Artificial Sequence: Synthetic peptide
VWIIVYIEY

SEQ ID NO: 6783 - protein, 9 aa, synthetic construct
  REGION 1..9: note = Description of Artificial Sequence: Synthetic peptide
TVLDVGDAY

SEQ ID NO: 6784 - protein, 9 aa, synthetic construct
  REGION 1..9: note = Description of Artificial Sequence: Synthetic peptide
SFLYASVDY

SEQ ID NO: 6785 - protein, 9 aa, synthetic construct
  REGION 1..9: note = Description of Artificial Sequence: Synthetic peptide
TEAVQKIAL

SEQ ID NO: 6786 - protein, 9 aa, synthetic construct
  REGION 1..9: note = Description of Artificial Sequence: Synthetic peptide
TERVGNPVF

SEQ ID NO: 6787 - protein, 9 aa, synthetic construct
  REGION 1..9: note = Description of Artificial Sequence: Synthetic peptide
SEFNLPPIV

SEQ ID NO: 6788 - protein, 9 aa, synthetic construct
  REGION 1..9: note = Description of Artificial Sequence: Synthetic peptide
KAKPPLPSV

SEQ ID NO: 6789 - protein, 9 aa, synthetic construct
  REGION 1..9: note = Description of Artificial Sequence: Synthetic peptide
NEFNIPPVV

SEQ ID NO: 6790 - protein, 9 aa, synthetic construct
  REGION 1..9: note = Description of Artificial Sequence: Synthetic peptide
KIKPPLPSV

SEQ ID NO: 6791 - protein, 9 aa, synthetic construct
  REGION 1..9: note = Description of Artificial Sequence: Synthetic peptide
KIKPPLPSI

SEQ ID NO: 6792 - protein, 9 aa, synthetic construct
  REGION 1..9: note = Description of Artificial Sequence: Synthetic peptide
QIYPGIQVK

SEQ ID NO: 6793 - protein, 9 aa, synthetic construct
  REGION 1..9: note = Description of Artificial Sequence: Synthetic peptide
LEKEPIAGV

SEQ ID NO: 6794 - protein, 9 aa, synthetic construct
  REGION 1..9: note = Description of Artificial Sequence: Synthetic peptide
QTKGLGISY

SEQ ID NO: 6795 - protein, 11 aa, synthetic construct
  REGION 1..11: note = Description of Artificial Sequence: Synthetic peptide
AQNPEIVIYQY

SEQ ID NO: 6796 - protein, 11 aa, synthetic construct
  REGION 1..11: note = Description of Artificial Sequence: Synthetic peptide
AQNPEIIIYQY

SEQ ID NO: 6797 - protein, 9 aa, synthetic construct
  REGION 1..9: note = Description of Artificial Sequence: Synthetic peptide
QAKGLGISY

SEQ ID NO: 6798 - protein, 9 aa, synthetic construct
  REGION 1..9: note = Description of Artificial Sequence: Synthetic peptide
TVLDVGDAY

SEQ ID NO: 6799 - protein, 9 aa, synthetic construct
  REGION 1..9: note = Description of Artificial Sequence: Synthetic peptide
AQNPEIVIY

SEQ ID NO: 6800 - protein, 9 aa, synthetic construct
  REGION 1..9: note = Description of Artificial Sequence: Synthetic peptide
KAQEEHERY

SEQ ID NO: 6801 - protein, 9 aa, synthetic construct
  REGION 1..9: note = Description of Artificial Sequence: Synthetic peptide
LGQHIYETY

SEQ ID NO: 6802 - protein, 10 aa, synthetic construct
  REGION 1..10: note = Description of Artificial Sequence: Synthetic peptide
ILKEPVHGVY

SEQ ID NO: 6803 - protein, 9 aa, synthetic construct
  REGION 1..9: note = Description of Artificial Sequence: Synthetic peptide
TSSLFNSTY

SEQ ID NO: 6804 - protein, 9 aa, synthetic construct
  REGION 1..9: note = Description of Artificial Sequence: Synthetic peptide
AQNPEIIIY

SEQ ID NO: 6805 - protein, 9 aa, synthetic construct
  REGION 1..9: note = Description of Artificial Sequence: Synthetic peptide
ISNYTNTIY

SEQ ID NO: 6806 - protein, 9 aa, synthetic construct
  REGION 1..9: note = Description of Artificial Sequence: Synthetic peptide
KAQEEHEKY

SEQ ID NO: 6807 - protein, 9 aa, synthetic construct
  REGION 1..9: note = Description of Artificial Sequence: Synthetic peptide
RIGPGQAFY

SEQ ID NO: 6808 - protein, 9 aa, synthetic construct
  REGION 1..9: note = Description of Artificial Sequence: Synthetic peptide
QTKGLGISY

SEQ ID NO: 6809 - protein, 11 aa, synthetic construct
  REGION 1..11: note = Description of Artificial Sequence: Synthetic peptide
AQNPEIVIYQY

SEQ ID NO: 6810 - protein, 11 aa, synthetic construct
  REGION 1..11: note = Description of Artificial Sequence: Synthetic peptide
AQNPEIIIYQY

SEQ ID NO: 6811 - protein, 10 aa, synthetic construct
  REGION 1..10: note = Description of Artificial Sequence: Synthetic peptide
FQAKGLGISY

SEQ ID NO: 6812 - protein, 10 aa, synthetic construct
  REGION 1..10: note = Description of Artificial Sequence: Synthetic peptide
FQKKGLGISY

SEQ ID NO: 6813 - protein, 9 aa, synthetic construct
  REGION 1..9: note = Description of Artificial Sequence: Synthetic peptide
KQGQNQWTY

SEQ ID NO: 6814 - protein, 9 aa, synthetic construct
  REGION 1..9: note = Description of Artificial Sequence: Synthetic peptide
RIGPGQAFY

SEQ ID NO: 6815 - protein, 9 aa, synthetic construct
  REGION 1..9: note = Description of Artificial Sequence: Synthetic peptide
AQNPEIVIY

SEQ ID NO: 6816 - protein, 9 aa, synthetic construct
  REGION 1..9: note = Description of Artificial Sequence: Synthetic peptide
RIGPGQTFY

SEQ ID NO: 6817 - protein, 9 aa, synthetic construct
  REGION 1..9: note = Description of Artificial Sequence: Synthetic peptide
TSSLFNSTY

SEQ ID NO: 6818 - protein, 11 aa, synthetic construct
  REGION 1..11: note = Description of Artificial Sequence: Synthetic peptide
RGRPGNLLQNR

SEQ ID NO: 6819 - protein, 10 aa, synthetic construct
  REGION 1..10: note = Description of Artificial Sequence: Synthetic peptide
QTNSAILMQR

SEQ ID NO: 6820 - protein, 11 aa, synthetic construct
  REGION 1..11: note = Description of Artificial Sequence: Synthetic peptide
KVNNTNIMMQR

SEQ ID NO: 6821 - protein, 9 aa, synthetic construct
  REGION 1..9: note = Description of Artificial Sequence: Synthetic peptide
QTRVLAIER

SEQ ID NO: 6822 - protein, 11 aa, synthetic construct
  REGION 1..11: note = Description of Artificial Sequence: Synthetic peptide
KGRPGNFLQNR

SEQ ID NO: 6823 - protein, 9 aa, synthetic construct
  REGION 1..9: note = Description of Artificial Sequence: Synthetic peptide
KSVAIVCTR

SEQ ID NO: 6824 - protein, 11 aa, synthetic construct
  REGION 1..11: note = Description of Artificial Sequence: Synthetic peptide
QINNGNIMMQR

SEQ ID NO: 6825 - protein, 9 aa, synthetic construct
  REGION 1..9: note = Description of Artificial Sequence: Synthetic peptide
QSNPYPEPR

SEQ ID NO: 6826 - protein, 9 aa, synthetic construct
  REGION 1..9: note = Description of Artificial Sequence: Synthetic peptide
MVHQPISAR

SEQ ID NO: 6827 - protein, 11 aa, synthetic construct
  REGION 1..11: note = Description of Artificial Sequence: Synthetic peptide
QTKGLGISYGR

SEQ ID NO: 6828 - protein, 9 aa, synthetic construct
  REGION 1..9: note = Description of Artificial Sequence: Synthetic peptide
QIYPGIKVR

SEQ ID NO: 6829 - protein, 9 aa, synthetic construct
  REGION 1..9: note = Description of Artificial Sequence: Synthetic peptide
RVGNPVFGR

SEQ ID NO: 6830 - protein, 11 aa, synthetic construct
  REGION 1..11: note = Description of Artificial Sequence: Synthetic peptide
RSNITGLLLTR

SEQ ID NO: 6831 - protein, 11 aa, synthetic construct
  REGION 1..11: note = Description of Artificial Sequence: Synthetic peptide
TVNDIQKLVGK

SEQ ID NO: 6832 - protein, 9 aa, synthetic construct
  REGION 1..9: note = Description of Artificial Sequence: Synthetic peptide
KGLGISYGR

SEQ ID NO: 6833 - protein, 11 aa, synthetic construct
  REGION 1..11: note = Description of Artificial Sequence: Synthetic peptide
KGRPGNFLQSR

SEQ ID NO: 6834 - protein, 11 aa, synthetic construct
  REGION 1..11: note = Description of Artificial Sequence: Synthetic peptide
SQTNSAILMQR

SEQ ID NO: 6835 - protein, 9 aa, synthetic construct
  REGION 1..9: note = Description of Artificial Sequence: Synthetic peptide
VGRPAIRER

SEQ ID NO: 6836 - protein, 9 aa, synthetic construct
  REGION 1..9: note = Description of Artificial Sequence: Synthetic peptide
RILSTCVGR

SEQ ID NO: 6837 - protein, 11 aa, synthetic construct
  REGION 1..11: note = Description of Artificial Sequence: Synthetic peptide
KTQKVNALFYR

SEQ ID NO: 6838 - protein, 9 aa, synthetic construct
  REGION 1..9: note = Description of Artificial Sequence: Synthetic peptide
RQIHSISER

SEQ ID NO: 6839 - protein, 10 aa, synthetic construct
  REGION 1..10: note = Description of Artificial Sequence: Synthetic peptide
ISKQPLSHTR

SEQ ID NO: 6840 - protein, 9 aa, synthetic construct
  REGION 1..9: note = Description of Artificial Sequence: Synthetic peptide
MVHQPLSPR

SEQ ID NO: 6841 - protein, 9 aa, synthetic construct
  REGION 1..9: note = Description of Artificial Sequence: Synthetic peptide
VGWPAIRER

SEQ ID NO: 6842 - protein, 8 aa, synthetic construct
  REGION 1..8: note = Description of Artificial Sequence: Synthetic peptide
AVLSIVNR

SEQ ID NO: 6843 - protein, 11 aa, synthetic construct
  REGION 1..11: note = Description of Artificial Sequence: Synthetic peptide
VGPTPVNIIGR

SEQ ID NO: 6844 - protein, 8 aa, synthetic construct
  REGION 1..8: note = Description of Artificial Sequence: Synthetic peptide
AVISIVNR

SEQ ID NO: 6845 - protein, 8 aa, synthetic construct
  REGION 1..8: note = Description of Artificial Sequence: Synthetic peptide
NTNIMMQR

SEQ ID NO: 6846 - protein, 9 aa, synthetic construct
  REGION 1..9: note = Description of Artificial Sequence: Synthetic peptide
VQNFRVYYR

SEQ ID NO: 6847 - protein, 9 aa, synthetic construct
  REGION 1..9: note = Description of Artificial Sequence: Synthetic peptide
IVNRVRQGY

SEQ ID NO: 6848 - protein, 9 aa, synthetic construct
  REGION 1..9: note = Description of Artificial Sequence: Synthetic peptide
KQITKVQNF

SEQ ID NO: 6849 - protein, 9 aa, synthetic construct
  REGION 1..9: note = Description of Artificial Sequence: Synthetic peptide
QTKGLGISY

SEQ ID NO: 6850 - protein, 9 aa, synthetic construct
  REGION 1..9: note = Description of Artificial Sequence: Synthetic peptide
IQKQGQNQW

SEQ ID NO: 6851 - protein, 9 aa, synthetic construct
  REGION 1..9: note = Description of Artificial Sequence: Synthetic peptide
DSNSSGYYR

SEQ ID NO: 6852 - protein, 9 aa, synthetic construct
  REGION 1..9: note = Description of Artificial Sequence: Synthetic peptide
MVHQPISAR

SEQ ID NO: 6853 - protein, 9 aa, synthetic construct
  REGION 1..9: note = Description of Artificial Sequence: Synthetic peptide
NNTNIMMQR

SEQ ID NO: 6854 - protein, 9 aa, synthetic construct
  REGION 1..9: note = Description of Artificial Sequence: Synthetic peptide
NNYTNTIYR

SEQ ID NO: 6855 - protein, 11 aa, synthetic construct
  REGION 1..11: note = Description of Artificial Sequence: Synthetic peptide
ETFYVDGASNR

SEQ ID NO: 6856 - protein, 9 aa, synthetic construct
  REGION 1..9: note = Description of Artificial Sequence: Synthetic peptide
EYRKLVQQR

SEQ ID NO: 6857 - protein, 11 aa, synthetic construct
  REGION 1..11: note = Description of Artificial Sequence: Synthetic peptide
ETFYVDGAANR

SEQ ID NO: 6858 - protein, 10 aa, synthetic construct
  REGION 1..10: note = Description of Artificial Sequence: Synthetic peptide
DNSDIKVVPR

SEQ ID NO: 6859 - protein, 9 aa, synthetic construct
  REGION 1..9: note = Description of Artificial Sequence: Synthetic peptide
DAWEKIKLR

SEQ ID NO: 6860 - protein, 9 aa, synthetic construct
  REGION 1..9: note = Description of Artificial Sequence: Synthetic peptide
NNGNIMMQR

SEQ ID NO: 6861 - protein, 10 aa, synthetic construct
  REGION 1..10: note = Description of Artificial Sequence: Synthetic peptide
INNGNIMMQR

SEQ ID NO: 6862 - protein, 11 aa, synthetic construct
  REGION 1..11: note = Description of Artificial Sequence: Synthetic peptide
EAREFSPEQTR

SEQ ID NO: 6863 - protein, 9 aa, synthetic construct
  REGION 1..9: note = Description of Artificial Sequence: Synthetic peptide
MVHQPLSPR

SEQ ID NO: 6864 - protein, 10 aa, synthetic construct
  REGION 1..10: note = Description of Artificial Sequence: Synthetic peptide
VNNTNIMMQR

SEQ ID NO: 6865 - protein, 10 aa, synthetic construct
  REGION 1..10: note = Description of Artificial Sequence: Synthetic peptide
QTNSAILMQR

SEQ ID NO: 6866 - protein, 9 aa, synthetic construct
  REGION 1..9: note = Description of Artificial Sequence: Synthetic peptide
DSQLAHKHR

SEQ ID NO: 6867 - protein, 11 aa, synthetic construct
  REGION 1..11: note = Description of Artificial Sequence: Synthetic peptide
EINNYTNTIYR

SEQ ID NO: 6868 - protein, 9 aa, synthetic construct
  REGION 1..9: note = Description of Artificial Sequence: Synthetic peptide
QTRVLAIER

SEQ ID NO: 6869 - protein, 11 aa, synthetic construct
  REGION 1..11: note = Description of Artificial Sequence: Synthetic peptide
ETLAFQQGKAR

SEQ ID NO: 6870 - protein, 9 aa, synthetic construct
  REGION 1..9: note = Description of Artificial Sequence: Synthetic peptide
SNYTNTIYR

SEQ ID NO: 6871 - protein, 9 aa, synthetic construct
  REGION 1..9: note = Description of Artificial Sequence: Synthetic peptide
TNSAILMQR

SEQ ID NO: 6872 - protein, 11 aa, synthetic construct
  REGION 1..11: note = Description of Artificial Sequence: Synthetic peptide
DVKQLTEAVQK

SEQ ID NO: 6873 - protein, 10 aa, synthetic construct
  REGION 1..10: note = Description of Artificial Sequence: Synthetic peptide
EAREFPPETR

SEQ ID NO: 6874 - protein, 9 aa, synthetic construct
  REGION 1..9: note = Description of Artificial Sequence: Synthetic peptide
ESVEITCTR

SEQ ID NO: 6875 - protein, 11 aa, synthetic construct
  REGION 1..11: note = Description of Artificial Sequence: Synthetic peptide
DVKQLTAVVQK

SEQ ID NO: 6876 - protein, 11 aa, synthetic construct
  REGION 1..11: note = Description of Artificial Sequence: Synthetic peptide
DVRQLTEAVQK

SEQ ID NO: 6877 - protein, 11 aa, synthetic construct
  REGION 1..11: note = Description of Artificial Sequence: Synthetic peptide
KVNNTNIMMQR

SEQ ID NO: 6878 - protein, 9 aa, synthetic construct
  REGION 1..9: note = Description of Artificial Sequence: Synthetic peptide
CNTSGLFNR

SEQ ID NO: 6879 - protein, 9 aa, synthetic construct
  REGION 1..9: note = Description of Artificial Sequence: Synthetic peptide
MVHQAISPR

SEQ ID NO: 6880 - protein, 9 aa, synthetic construct
  REGION 1..9: note = Description of Artificial Sequence: Synthetic peptide
DTWEKIRLR

SEQ ID NO: 6881 - protein, 9 aa, synthetic construct
  REGION 1..9: note = Description of Artificial Sequence: Synthetic peptide
MVHQPISAR

SEQ ID NO: 6882 - protein, 9 aa, synthetic construct
  REGION 1..9: note = Description of Artificial Sequence: Synthetic peptide
EYRKLVQQR

SEQ ID NO: 6883 - protein, 11 aa, synthetic construct
  REGION 1..11: note = Description of Artificial Sequence: Synthetic peptide
ETFYVDGASNR

SEQ ID NO: 6884 - protein, 11 aa, synthetic construct
  REGION 1..11: note = Description of Artificial Sequence: Synthetic peptide
ETFYVDGAANR

SEQ ID NO: 6885 - protein, 9 aa, synthetic construct
  REGION 1..9: note = Description of Artificial Sequence: Synthetic peptide
DSNSSGYYR

SEQ ID NO: 6886 - protein, 10 aa, synthetic construct
  REGION 1..10: note = Description of Artificial Sequence: Synthetic peptide
QTNSAILMQR

SEQ ID NO: 6887 - protein, 9 aa, synthetic construct
  REGION 1..9: note = Description of Artificial Sequence: Synthetic peptide
ESVEITCTR

SEQ ID NO: 6888 - protein, 9 aa, synthetic construct
  REGION 1..9: note = Description of Artificial Sequence: Synthetic peptide
MVHQPLSPR

SEQ ID NO: 6889 - protein, 9 aa, synthetic construct
  REGION 1..9: note = Description of Artificial Sequence: Synthetic peptide
ESVEINCTR

SEQ ID NO: 6890 - protein, 11 aa, synthetic construct
  REGION 1..11: note = Description of Artificial Sequence: Synthetic peptide
ETLAFQQGKAR

SEQ ID NO: 6891 - protein, 9 aa, synthetic construct
  REGION 1..9: note = Description of Artificial Sequence: Synthetic peptide
NNTNIMMQR

SEQ ID NO: 6892 - protein, 9 aa, synthetic construct
  REGION 1..9: note = Description of Artificial Sequence: Synthetic peptide
TNSAILMQR

SEQ ID NO: 6893 - protein, 9 aa, synthetic construct
  REGION 1..9: note = Description of Artificial Sequence: Synthetic peptide
QTRVLAIER

SEQ ID NO: 6894 - protein, 11 aa, synthetic construct
  REGION 1..11: note = Description of Artificial Sequence: Synthetic peptide
EAREFSPEQTR

SEQ ID NO: 6895 - protein, 9 aa, synthetic construct
  REGION 1..9: note = Description of Artificial Sequence: Synthetic peptide
MVHQAISPR

SEQ ID NO: 6896 - protein, 10 aa, synthetic construct
  REGION 1..10: note = Description of Artificial Sequence: Synthetic peptide
YTNEIIGNIR

SEQ ID NO: 6897 - protein, 9 aa, synthetic construct
  REGION 1..9: note = Description of Artificial Sequence: Synthetic peptide
NNYTNTIYR

SEQ ID NO: 6898 - protein, 9 aa, synthetic construct
  REGION 1..9: note = Description of Artificial Sequence: Synthetic peptide
NNGNIMMQR

SEQ ID NO: 6899 - protein, 10 aa, synthetic construct
  REGION 1..10: note = Description of Artificial Sequence: Synthetic peptide
DNSDIKVVPR

SEQ ID NO: 6900 - protein, 11 aa, synthetic construct
  REGION 1..11: note = Description of Artificial Sequence: Synthetic peptide
EINNYTNTIYR

SEQ ID NO: 6901 - protein, 9 aa, synthetic construct
  REGION 1..9: note = Description of Artificial Sequence: Synthetic peptide
ETNKTETFR

SEQ ID NO: 6902 - protein, 9 aa, synthetic construct
  REGION 1..9: note = Description of Artificial Sequence: Synthetic peptide
SNYTNTIYR

SEQ ID NO: 6903 - protein, 9 aa, synthetic construct
  REGION 1..9: note = Description of Artificial Sequence: Synthetic peptide
FYVDGASNR

SEQ ID NO: 6904 - protein, 10 aa, synthetic construct
  REGION 1..10: note = Description of Artificial Sequence: Synthetic peptide
EAREFPPETR

SEQ ID NO: 6905 - protein, 8 aa, synthetic construct
  REGION 1..8: note = Description of Artificial Sequence: Synthetic peptide
NTNIMMQR

SEQ ID NO: 6906 - protein, 9 aa, synthetic construct
  REGION 1..9: note = Description of Artificial Sequence: Synthetic peptide
FYVDGAANR

SEQ ID NO: 6907 - protein, 10 aa, synthetic construct
  REGION 1..10: note = Description of Artificial Sequence: Synthetic peptide
ETMVDMGHLR

SEQ ID NO: 6908 - protein, 11 aa, synthetic construct
  REGION 1..11: note = Description of Artificial Sequence: Synthetic peptide
TVNDIQKLVGK

SEQ ID NO: 6909 - protein, 9 aa, synthetic construct
  REGION 1..9: note = Description of Artificial Sequence: Synthetic peptide
ETLQNVSKK

SEQ ID NO: 6910 - protein, 10 aa, synthetic construct
  REGION 1..10: note = Description of Artificial Sequence: Synthetic peptide
INNGNIMMQR

SEQ ID NO: 6911 - protein, 9 aa, synthetic construct
  REGION 1..9: note = Description of Artificial Sequence: Synthetic peptide
EYRKLVRQR

SEQ ID NO: 6912 - protein, 9 aa, synthetic construct
  REGION 1..9: note = Description of Artificial Sequence: Synthetic peptide
QARVLAIER

SEQ ID NO: 6913 - protein, 10 aa, synthetic construct
  REGION 1..10: note = Description of Artificial Sequence: Synthetic peptide
EVHIPLGEAR

SEQ ID NO: 6914 - protein, 9 aa, synthetic construct
  REGION 1..9: note = Description of Artificial Sequence: Synthetic peptide
QSNPYPEPR

SEQ ID NO: 6915 - protein, 9 aa, synthetic construct
  REGION 1..9: note = Description of Artificial Sequence: Synthetic peptide
NSDIKVVPR

SEQ ID NO: 6916 - protein, 9 aa, synthetic construct
  REGION 1..9: note = Description of Artificial Sequence: Synthetic peptide
QIYPGIKVR

SEQ ID NO: 6917 - protein, 9 aa, synthetic construct
  REGION 1..9: note = Description of Artificial Sequence: Synthetic peptide
EAIIRILQR

SEQ ID NO: 6918 - protein, 9 aa, synthetic construct
  REGION 1..9: note = Description of Artificial Sequence: Synthetic peptide
ETLAFQQGK

SEQ ID NO: 6919 - protein, 8 aa, synthetic construct
  REGION 1..8: note = Description of Artificial Sequence: Synthetic peptide
NTSGLFNR

SEQ ID NO: 6920 - protein, 10 aa, synthetic construct
  REGION 1..10: note = Description of Artificial Sequence: Synthetic peptide
EVTTHSFNCR

SEQ ID NO: 6921 - protein, 10 aa, synthetic construct
  REGION 1..10: note = Description of Artificial Sequence: Synthetic peptide
ELKKIIGQVR

SEQ ID NO: 6922 - protein, 10 aa, synthetic construct
  REGION 1..10: note = Description of Artificial Sequence: Synthetic peptide
EFNLPPIVAK

SEQ ID NO: 6923 - protein, 10 aa, synthetic construct
  REGION 1..10: note = Description of Artificial Sequence: Synthetic peptide
ISKQPLSHTR

SEQ ID NO: 6924 - protein, 11 aa, synthetic construct
  REGION 1..11: note = Description of Artificial Sequence: Synthetic peptide
ETFRPGGGDMR

SEQ ID NO: 6925 - protein, 9 aa, synthetic construct
  REGION 1..9: note = Description of Artificial Sequence: Synthetic peptide
MYAPPIEGK

SEQ ID NO: 6926 - protein, 9 aa, synthetic construct
  REGION 1..9: note = Description of Artificial Sequence: Synthetic peptide
DAWEKIKLR

SEQ ID NO: 6927 - protein, 11 aa, synthetic construct
  REGION 1..11: note = Description of Artificial Sequence: Synthetic peptide
EISNYTNTIYR

SEQ ID NO: 6928 - protein, 10 aa, synthetic construct
  REGION 1..10: note = Description of Artificial Sequence: Synthetic peptide
VNNTNIMMQR

SEQ ID NO: 6929 - protein, 9 aa, synthetic construct
  REGION 1..9: note = Description of Artificial Sequence: Synthetic peptide
FNLPPIVAK

SEQ ID NO: 6930 - protein, 10 aa, synthetic construct
  REGION 1..10: note = Description of Artificial Sequence: Synthetic peptide
EIFRPGGGNM

SEQ ID NO: 6931 - protein, 10 aa, synthetic construct
  REGION 1..10: note = Description of Artificial Sequence: Synthetic peptide
NTFSEAGAER

SEQ ID NO: 6932 - protein, 8 aa, synthetic construct
  REGION 1..8: note = Description of Artificial Sequence: Synthetic peptide
DFILIAGR

SEQ ID NO: 6933 - protein, 9 aa, synthetic construct
  REGION 1..9: note = Description of Artificial Sequence: Synthetic peptide
TNEIIGNIR

SEQ ID NO: 6934 - protein, 9 aa, synthetic construct
  REGION 1..9: note = Description of Artificial Sequence: Synthetic peptide
CNTSGLFNR

SEQ ID NO: 6935 - protein, 8 aa, synthetic construct
  REGION 1..8: note = Description of Artificial Sequence: Synthetic peptide
QTLIPHPR

SEQ ID NO: 6936 - protein, 11 aa, synthetic construct
  REGION 1..11: note = Description of Artificial Sequence: Synthetic peptide
ETFYVDGASNR

SEQ ID NO: 6937 - protein, 11 aa, synthetic construct
  REGION 1..11: note = Description of Artificial Sequence: Synthetic peptide
ETFYVDGAANR

SEQ ID NO: 6938 - protein, 9 aa, synthetic construct
  REGION 1..9: note = Description of Artificial Sequence: Synthetic peptide
ESVEITCTR

SEQ ID NO: 6939 - protein, 9 aa, synthetic construct
  REGION 1..9: note = Description of Artificial Sequence: Synthetic peptide
ESVEINCTR

SEQ ID NO: 6940 - protein, 10 aa, synthetic construct
  REGION 1..10: note = Description of Artificial Sequence: Synthetic peptide
QTNSAILMQR

SEQ ID NO: 6941 - protein, 10 aa, synthetic construct
  REGION 1..10: note = Description of Artificial Sequence: Synthetic peptide
NTFSEAGAER

SEQ ID NO: 6942 - protein, 10 aa, synthetic construct
  REGION 1..10: note = Description of Artificial Sequence: Synthetic peptide
DNSDIKVVPR

SEQ ID NO: 6943 - protein, 9 aa, synthetic construct
  REGION 1..9: note = Description of Artificial Sequence: Synthetic peptide
DSNSSGYYR

SEQ ID NO: 6944 - protein, 9 aa, synthetic construct
  REGION 1..9: note = Description of Artificial Sequence: Synthetic peptide
MVHQPISAR

SEQ ID NO: 6945 - protein, 9 aa, synthetic construct
  REGION 1..9: note = Description of Artificial Sequence: Synthetic peptide
TNSAILMQR

SEQ ID NO: 6946 - protein, 11 aa, synthetic construct
  REGION 1..11: note = Description of Artificial Sequence: Synthetic peptide
EISNYTNTIYR

SEQ ID NO: 6947 - protein, 11 aa, synthetic construct
  REGION 1..11: note = Description of Artificial Sequence: Synthetic peptide
TVNDIQKLVGK

SEQ ID NO: 6948 - protein, 11 aa, synthetic construct
  REGION 1..11: note = Description of Artificial Sequence: Synthetic peptide
ETFRPGGGDMR

SEQ ID NO: 6949 - protein, 9 aa, synthetic construct
  REGION 1..9: note = Description of Artificial Sequence: Synthetic peptide
NNTNIMMQR

SEQ ID NO: 6950 - protein, 10 aa, synthetic construct
  REGION 1..10: note = Description of Artificial Sequence: Synthetic peptide
YTNEIIGNIR

SEQ ID NO: 6951 - protein, 9 aa, synthetic construct
  REGION 1..9: note = Description of Artificial Sequence: Synthetic peptide
GVAPTTAKR

SEQ ID NO: 6952 - protein, 9 aa, synthetic construct
  REGION 1..9: note = Description of Artificial Sequence: Synthetic peptide
NNGNIMMQR

SEQ ID NO: 6953 - protein, 11 aa, synthetic construct
  REGION 1..11: note = Description of Artificial Sequence: Synthetic peptide
EINNYTNTIYR

SEQ ID NO: 6954 - protein, 10 aa, synthetic construct
  REGION 1..10: note = Description of Artificial Sequence: Synthetic peptide
EVNIVTDSQY

SEQ ID NO: 6955 - protein, 9 aa, synthetic construct
  REGION 1..9: note = Description of Artificial Sequence: Synthetic peptide
NSDIKVVPR

SEQ ID NO: 6956 - protein, 10 aa, synthetic construct
  REGION 1..10: note = Description of Artificial Sequence: Synthetic peptide
ETMVDMGHLR

SEQ ID NO: 6957 - protein, 10 aa, synthetic construct
  REGION 1..10: note = Description of Artificial Sequence: Synthetic peptide
ASITLTVQVR

SEQ ID NO: 6958 - protein, 11 aa, synthetic construct
  REGION 1..11: note = Description of Artificial Sequence: Synthetic peptide
EIFRPGGGNMK

SEQ ID NO: 6959 - protein, 9 aa, synthetic construct
  REGION 1..9: note = Description of Artificial Sequence: Synthetic peptide
ETLAFQQGK

SEQ ID NO: 6960 - protein, 10 aa, synthetic construct
  REGION 1..10: note = Description of Artificial Sequence: Synthetic peptide
ASITLTVQAR

SEQ ID NO: 6961 - protein, 10 aa, synthetic construct
  REGION 1..10: note = Description of Artificial Sequence: Synthetic peptide
EGVGSPISGK

SEQ ID NO: 6962 - protein, 9 aa, synthetic construct
  REGION 1..9: note = Description of Artificial Sequence: Synthetic peptide
ETLQNVSKK

SEQ ID NO: 6963 - protein, 11 aa, synthetic construct
  REGION 1..11: note = Description of Artificial Sequence: Synthetic peptide
DVKQLTEAVQK

SEQ ID NO: 6964 - protein, 9 aa, synthetic construct
  REGION 1..9: note = Description of Artificial Sequence: Synthetic peptide
SNYTNTIYR

SEQ ID NO: 6965 - protein, 9 aa, synthetic construct
  REGION 1..9: note = Description of Artificial Sequence: Synthetic peptide
NNYTNTIYR

SEQ ID NO: 6966 - protein, 9 aa, synthetic construct
  REGION 1..9: note = Description of Artificial Sequence: Synthetic peptide
FAVLSIVNR

SEQ ID NO: 6967 - protein, 10 aa, synthetic construct
  REGION 1..10: note = Description of Artificial Sequence: Synthetic peptide
ATGDIIGDIR

SEQ ID NO: 6968 - protein, 10 aa, synthetic construct
  REGION 1..10: note = Description of Artificial Sequence: Synthetic peptide
ATGEIIGDIR

SEQ ID NO: 6969 - protein, 9 aa, synthetic construct
  REGION 1..9: note = Description of Artificial Sequence: Synthetic peptide
FAVISIVNR

SEQ ID NO: 6970 - protein, 9 aa, synthetic construct
  REGION 1..9: note = Description of Artificial Sequence: Synthetic peptide
NITGLLLTR

SEQ ID NO: 6971 - protein, 10 aa, synthetic construct
  REGION 1..10: note = Description of Artificial Sequence: Synthetic peptide
SLAEGGIIIR

SEQ ID NO: 6972 - protein, 10 aa, synthetic construct
  REGION 1..10: note = Description of Artificial Sequence: Synthetic peptide
STMVDMGNLR

SEQ ID NO: 6973 - protein, 9 aa, synthetic construct
  REGION 1..9: note = Description of Artificial Sequence: Synthetic peptide
MVHQAISPR

SEQ ID NO: 6974 - protein, 9 aa, synthetic construct
  REGION 1..9: note = Description of Artificial Sequence: Synthetic peptide
SITLTVQVR

SEQ ID NO: 6975 - protein, 10 aa, synthetic construct
  REGION 1..10: note = Description of Artificial Sequence: Synthetic peptide
DIIATDIQTK

SEQ ID NO: 6976 - protein, 10 aa, synthetic construct
  REGION 1..10: note = Description of Artificial Sequence: Synthetic peptide
DCFADSAIRK

SEQ ID NO: 6977 - protein, 9 aa, synthetic construct
  REGION 1..9: note = Description of Artificial Sequence: Synthetic peptide
MVHQPLSPR

SEQ ID NO: 6978 - protein, 10 aa, synthetic construct
  REGION 1..10: note = Description of Artificial Sequence: Synthetic peptide
ELSTMVDMGR

SEQ ID NO: 6979 - protein, 9 aa, synthetic construct
  REGION 1..9: note = Description of Artificial Sequence: Synthetic peptide
SITGLLLTR

SEQ ID NO: 6980 - protein, 11 aa, synthetic construct
  REGION 1..11: note = Description of Artificial Sequence: Synthetic peptide
VGPTPVNIIGR

SEQ ID NO: 6981 - protein, 11 aa, synthetic construct
  REGION 1..11: note = Description of Artificial Sequence: Synthetic peptide
DVKQLTAVVQK

SEQ ID NO: 6982 - protein, 10 aa, synthetic construct
  REGION 1..10: note = Description of Artificial Sequence: Synthetic peptide
SIAEGETIIR

SEQ ID NO: 6983 - protein, 9 aa, synthetic construct
  REGION 1..9: note = Description of Artificial Sequence: Synthetic peptide
ETNKTETFR

SEQ ID NO: 6984 - protein, 10 aa, synthetic construct
  REGION 1..10: note = Description of Artificial Sequence: Synthetic peptide
SSITGLLLTR

SEQ ID NO: 6985 - protein, 10 aa, synthetic construct
  REGION 1..10: note = Description of Artificial Sequence: Synthetic peptide
EIFRPGGGNM

SEQ ID NO: 6986 - protein, 11 aa, synthetic construct
  REGION 1..11: note = Description of Artificial Sequence: Synthetic peptide
QVNNTTIMMQK

SEQ ID NO: 6987 - protein, 9 aa, synthetic construct
  REGION 1..9: note = Description of Artificial Sequence: Synthetic peptide
ETAYFILKL

SEQ ID NO: 6988 - protein, 9 aa, synthetic construct
  REGION 1..9: note = Description of Artificial Sequence: Synthetic peptide
ETAYFLLKL

SEQ ID NO: 6989 - protein, 9 aa, synthetic construct
  REGION 1..9: note = Description of Artificial Sequence: Synthetic peptide
ETAYYILKL

SEQ ID NO: 6990 - protein, 9 aa, synthetic construct
  REGION 1..9: note = Description of Artificial Sequence: Synthetic peptide
AVISIVNRV

SEQ ID NO: 6991 - protein, 9 aa, synthetic construct
  REGION 1..9: note = Description of Artificial Sequence: Synthetic peptide
ETIIRFENL

SEQ ID NO: 6992 - protein, 9 aa, synthetic construct
  REGION 1..9: note = Description of Artificial Sequence: Synthetic peptide
NTSAITQAC

SEQ ID NO: 6993 - protein, 9 aa, synthetic construct
  REGION 1..9: note = Description of Artificial Sequence: Synthetic peptide
TTSNLQEQV

SEQ ID NO: 6994 - protein, 9 aa, synthetic construct
  REGION 1..9: note = Description of Artificial Sequence: Synthetic peptide
NTIAVLYCV

SEQ ID NO: 6995 - protein, 9 aa, synthetic construct
  REGION 1..9: note = Description of Artificial Sequence: Synthetic peptide
ELISLHNTV

SEQ ID NO: 6996 - protein, 9 aa, synthetic construct
  REGION 1..9: note = Description of Artificial Sequence: Synthetic peptide
NTSTITQAC

SEQ ID NO: 6997 - protein, 9 aa, synthetic construct
  REGION 1..9: note = Description of Artificial Sequence: Synthetic peptide
YTNEIIGNI

SEQ ID NO: 6998 - protein, 10 aa, synthetic construct
  REGION 1..10: note = Description of Artificial Sequence: Synthetic peptide
ETYGDTWTGV

SEQ ID NO: 6999 - protein, 9 aa, synthetic construct
  REGION 1..9: note = Description of Artificial Sequence: Synthetic peptide
EVIPMFTAL

SEQ ID NO: 7000 - protein, 9 aa, synthetic construct
  REGION 1..9: note = Description of Artificial Sequence: Synthetic peptide
TVNDIQKLV

SEQ ID NO: 7001 - protein, 9 aa, synthetic construct
  REGION 1..9: note = Description of Artificial Sequence: Synthetic peptide
EVTTHSFNC

SEQ ID NO: 7002 - protein, 9 aa, synthetic construct
  REGION 1..9: note = Description of Artificial Sequence: Synthetic peptide
STTKILEPF

SEQ ID NO: 7003 - protein, 9 aa, synthetic construct
  REGION 1..9: note = Description of Artificial Sequence: Synthetic peptide
EISNYTNTI

SEQ ID NO: 7004 - protein, 11 aa, synthetic construct
  REGION 1..11: note = Description of Artificial Sequence: Synthetic peptide
ESSNTSGDYRL

SEQ ID NO: 7005 - protein, 9 aa, synthetic construct
  REGION 1..9: note = Description of Artificial Sequence: Synthetic peptide
EAIHGQVNC

SEQ ID NO: 7006 - protein, 10 aa, synthetic construct
  REGION 1..10: note = Description of Artificial Sequence: Synthetic peptide
NTSNLFNITA

SEQ ID NO: 7007 - protein, 11 aa, synthetic construct
  REGION 1..11: note = Description of Artificial Sequence: Synthetic peptide
ETFYVDGASNR

SEQ ID NO: 7008 - protein, 9 aa, synthetic construct
  REGION 1..9: note = Description of Artificial Sequence: Synthetic peptide
NVKTIIVHL

SEQ ID NO: 7009 - protein, 10 aa, synthetic construct
  REGION 1..10: note = Description of Artificial Sequence: Synthetic peptide
EIVNQIIEQL

SEQ ID NO: 7010 - protein, 9 aa, synthetic construct
  REGION 1..9: note = Description of Artificial Sequence: Synthetic peptide
IVNQIIEQL

SEQ ID NO: 7011 - protein, 9 aa, synthetic construct
  REGION 1..9: note = Description of Artificial Sequence: Synthetic peptide
YTAFTIPSI

SEQ ID NO: 7012 - protein, 9 aa, synthetic construct
  REGION 1..9: note = Description of Artificial Sequence: Synthetic peptide
NTVATLYCV

SEQ ID NO: 7013 - protein, 9 aa, synthetic construct
  REGION 1..9: note = Description of Artificial Sequence: Synthetic peptide
ETTNQKAEL

SEQ ID NO: 7014 - protein, 10 aa, synthetic construct
  REGION 1..10: note = Description of Artificial Sequence: Synthetic peptide
ETTPAPKQEL

SEQ ID NO: 7015 - protein, 10 aa, synthetic construct
  REGION 1..10: note = Description of Artificial Sequence: Synthetic peptide
KVVEIKPLGV

SEQ ID NO: 7016 - protein, 9 aa, synthetic construct
  REGION 1..9: note = Description of Artificial Sequence: Synthetic peptide
GAASITLTV

SEQ ID NO: 7017 - protein, 9 aa, synthetic construct
  REGION 1..9: note = Description of Artificial Sequence: Synthetic peptide
EIIGNIRQA

SEQ ID NO: 7018 - protein, 9 aa, synthetic construct
  REGION 1..9: note = Description of Artificial Sequence: Synthetic peptide
TTSTLQEQI

SEQ ID NO: 7019 - protein, 9 aa, synthetic construct
  REGION 1..9: note = Description of Artificial Sequence: Synthetic peptide
DIAGTTSNL

SEQ ID NO: 7020 - protein, 10 aa, synthetic construct
  REGION 1..10: note = Description of Artificial Sequence: Synthetic peptide
KVVEVKPLGV

SEQ ID NO: 7021 - protein, 10 aa, synthetic construct
  REGION 1..10: note = Description of Artificial Sequence: Synthetic peptide
HTNDVKQLTA

SEQ ID NO: 7022 - protein, 9 aa, synthetic construct
  REGION 1..9: note = Description of Artificial Sequence: Synthetic peptide
EIIGDIRQA

SEQ ID NO: 7023 - protein, 9 aa, synthetic construct
  REGION 1..9: note = Description of Artificial Sequence: Synthetic peptide
AVLSIVNRV

SEQ ID NO: 7024 - protein, 10 aa, synthetic construct
  REGION 1..10: note = Description of Artificial Sequence: Synthetic peptide
DTTAIVVAEG

SEQ ID NO: 7025 - protein, 9 aa, synthetic construct
  REGION 1..9: note = Description of Artificial Sequence: Synthetic peptide
SAISLFDTI

SEQ ID NO: 7026 - protein, 9 aa, synthetic construct
  REGION 1..9: note = Description of Artificial Sequence: Synthetic peptide
QNFPIVQNL

SEQ ID NO: 7027 - protein, 11 aa, synthetic construct
  REGION 1..11: note = Description of Artificial Sequence: Synthetic peptide
ETFYVDGAANR

SEQ ID NO: 7028 - protein, 9 aa, synthetic construct
  REGION 1..9: note = Description of Artificial Sequence: Synthetic peptide
DIIYNLLEV

SEQ ID NO: 7029 - protein, 9 aa, synthetic construct
  REGION 1..9: note = Description of Artificial Sequence: Synthetic peptide
MTGNPPVPV

SEQ ID NO: 7030 - protein, 9 aa, synthetic construct
  REGION 1..9: note = Description of Artificial Sequence: Synthetic peptide
DVKQLTEAV

SEQ ID NO: 7031 - protein, 9 aa, synthetic construct
  REGION 1..9: note = Description of Artificial Sequence: Synthetic peptide
QLTAVVQKI

SEQ ID NO: 7032 - protein, 9 aa, synthetic construct
  REGION 1..9: note = Description of Artificial Sequence: Synthetic peptide
LVNQIIEQL

SEQ ID NO: 7033 - protein, 9 aa, synthetic construct
  REGION 1..9: note = Description of Artificial Sequence: Synthetic peptide
MTSNPPIPV

SEQ ID NO: 7034 - protein, 9 aa, synthetic construct
  REGION 1..9: note = Description of Artificial Sequence: Synthetic peptide
EVIQGIWRA

SEQ ID NO: 7035 - protein, 9 aa, synthetic construct
  REGION 1..9: note = Description of Artificial Sequence: Synthetic peptide
ESVEITCTR

SEQ ID NO: 7036 - protein, 9 aa, synthetic construct
  REGION 1..9: note = Description of Artificial Sequence: Synthetic peptide
QNYPIVQNL

SEQ ID NO: 7037 - protein, 9 aa, synthetic construct
  REGION 1..9: note = Description of Artificial Sequence: Synthetic peptide
MTNNPPVPV

SEQ ID NO: 7038 - protein, 9 aa, synthetic construct
  REGION 1..9: note = Description of Artificial Sequence: Synthetic peptide
SPTSRELQV

SEQ ID NO: 7039 - protein, 10 aa, synthetic construct
  REGION 1..10: note = Description of Artificial Sequence: Synthetic peptide
RPSNNTRESI

SEQ ID NO: 7040 - protein, 9 aa, synthetic construct
  REGION 1..9: note = Description of Artificial Sequence: Synthetic peptide
SPAIFQNSM

SEQ ID NO: 7041 - protein, 9 aa, synthetic construct
  REGION 1..9: note = Description of Artificial Sequence: Synthetic peptide
SPAIFQSSM

SEQ ID NO: 7042 - protein, 8 aa, synthetic construct
  REGION 1..8: note = Description of Artificial Sequence: Synthetic peptide
TPSPKQEL

SEQ ID NO: 7043 - protein, 8 aa, synthetic construct
  REGION 1..8: note = Description of Artificial Sequence: Synthetic peptide
TPAPKQEL

SEQ ID NO: 7044 - protein, 10 aa, synthetic construct
  REGION 1..10: note = Description of Artificial Sequence: Synthetic peptide
SPSPMTNCSF

SEQ ID NO: 7045 - protein, 10 aa, synthetic construct
  REGION 1..10: note = Description of Artificial Sequence: Synthetic peptide
RPDNNTRKSI

SEQ ID NO: 7046 - protein, 9 aa, synthetic construct
  REGION 1..9: note = Description of Artificial Sequence: Synthetic peptide
GPAHKARVL

SEQ ID NO: 7047 - protein, 11 aa, synthetic construct
  REGION 1..11: note = Description of Artificial Sequence: Synthetic peptide
SPISGKSCTVL

SEQ ID NO: 7048 - protein, 10 aa, synthetic construct
  REGION 1..10: note = Description of Artificial Sequence: Synthetic peptide
SIRIGPGQAF

SEQ ID NO: 7049 - protein, 9 aa, synthetic construct
  REGION 1..9: note = Description of Artificial Sequence: Synthetic peptide
AELLGRSSL

SEQ ID NO: 7050 - protein, 9 aa, synthetic construct
  REGION 1..9: note = Description of Artificial Sequence: Synthetic peptide
QPNKSESEL

SEQ ID NO: 7051 - protein, 9 aa, synthetic construct
  REGION 1..9: note = Description of Artificial Sequence: Synthetic peptide
GPSHKARVL

SEQ ID NO: 7052 - protein, 10 aa, synthetic construct
  REGION 1..10: note = Description of Artificial Sequence: Synthetic peptide
RPAEPVPLQL

SEQ ID NO: 7053 - protein, 10 aa, synthetic construct
  REGION 1..10: note = Description of Artificial Sequence: Synthetic peptide
RPNNNTRKSI

SEQ ID NO: 7054 - protein, 10 aa, synthetic construct
  REGION 1..10: note = Description of Artificial Sequence: Synthetic peptide
SIRIGPGQTF

SEQ ID NO: 7055 - protein, 8 aa, synthetic construct
  REGION 1..8: note = Description of Artificial Sequence: Synthetic peptide
KPVVSTQL

SEQ ID NO: 7056 - protein, 10 aa, synthetic construct
  REGION 1..10: note = Description of Artificial Sequence: Synthetic peptide
SPIETVPVKL

SEQ ID NO: 7057 - protein, 10 aa, synthetic construct
  REGION 1..10: note = Description of Artificial Sequence: Synthetic peptide
VPTDPSPQEL

SEQ ID NO: 7058 - protein, 11 aa, synthetic construct
  REGION 1..11: note = Description of Artificial Sequence: Synthetic peptide
VPAGPIAPGQL

SEQ ID NO: 7059 - protein, 11 aa, synthetic construct
  REGION 1..11: note = Description of Artificial Sequence: Synthetic peptide
SPVSGKPCAVL

SEQ ID NO: 7060 - protein, 9 aa, synthetic construct
  REGION 1..9: note = Description of Artificial Sequence: Synthetic peptide
LTRDGGTGM

SEQ ID NO: 7061 - protein, 11 aa, synthetic construct
  REGION 1..11: note = Description of Artificial Sequence: Synthetic peptide
RAAELLGRSSL

SEQ ID NO: 7062 - protein, 10 aa, synthetic construct
  REGION 1..10: note = Description of Artificial Sequence: Synthetic peptide
AVELLGRSSL

SEQ ID NO: 7063 - protein, 9 aa, synthetic construct
  REGION 1..9: note = Description of Artificial Sequence: Synthetic peptide
KDREPLTSL

SEQ ID NO: 7064 - protein, 9 aa, synthetic construct
  REGION 1..9: note = Description of Artificial Sequence: Synthetic peptide
TEAVQKIAL

SEQ ID NO: 7065 - protein, 9 aa, synthetic construct
  REGION 1..9: note = Description of Artificial Sequence: Synthetic peptide
TPQDLNTML

SEQ ID NO: 7066 - protein, 9 aa, synthetic construct
  REGION 1..9: note = Description of Artificial Sequence: Synthetic peptide
ELKKSAISL

SEQ ID NO: 7067 - protein, 8 aa, synthetic construct
  REGION 1..8: note = Description of Artificial Sequence: Synthetic peptide
EAVQKIAL

SEQ ID NO: 7068 - protein, 8 aa, synthetic construct
  REGION 1..8: note = Description of Artificial Sequence: Synthetic peptide
TPAPKQEL

SEQ ID NO: 7069 - protein, 8 aa, synthetic construct
  REGION 1..8: note = Description of Artificial Sequence: Synthetic peptide
DAWEKIKL

SEQ ID NO: 7070 - protein, 8 aa, synthetic construct
  REGION 1..8: note = Description of Artificial Sequence: Synthetic peptide
NPISKQPL

SEQ ID NO: 7071 - protein, 8 aa, synthetic construct
  REGION 1..8: note = Description of Artificial Sequence: Synthetic peptide
TPSPKQEL

SEQ ID NO: 7072 - protein, 9 aa, synthetic construct
  REGION 1..9: note = Description of Artificial Sequence: Synthetic peptide
TAVVQKIAL

SEQ ID NO: 7073 - protein, 8 aa, synthetic construct
  REGION 1..8: note = Description of Artificial Sequence: Synthetic peptide
ELLGRSSL

SEQ ID NO: 7074 - protein, 9 aa, synthetic construct
  REGION 1..9: note = Description of Artificial Sequence: Synthetic peptide
DVKQLTEAV

SEQ ID NO: 7075 - protein, 9 aa, synthetic construct
  REGION 1..9: note = Description of Artificial Sequence: Synthetic peptide
DSAIRKAIL

SEQ ID NO: 7076 - protein, 8 aa, synthetic construct
  REGION 1..8: note = Description of Artificial Sequence: Synthetic peptide
TTNQKTEL

SEQ ID NO: 7077 - protein, 8 aa, synthetic construct
  REGION 1..8: note = Description of Artificial Sequence: Synthetic peptide
HLKTAVQM

SEQ ID NO: 7078 - protein, 9 aa, synthetic construct
  REGION 1..9: note = Description of Artificial Sequence: Synthetic peptide
ELKSLFNTV

SEQ ID NO: 7079 - protein, 11 aa, synthetic construct
  REGION 1..11: note = Description of Artificial Sequence: Synthetic peptide
TQVDPGLADQL

SEQ ID NO: 7080 - protein, 11 aa, synthetic construct
  REGION 1..11: note = Description of Artificial Sequence: Synthetic peptide
TQVEPGLADQL

SEQ ID NO: 7081 - protein, 11 aa, synthetic construct
  REGION 1..11: note = Description of Artificial Sequence: Synthetic peptide
TQVDPGLADHL

SEQ ID NO: 7082 - protein, 10 aa, synthetic construct
  REGION 1..10: note = Description of Artificial Sequence: Synthetic peptide
QQDKNEKDLL

SEQ ID NO: 7083 - protein, 10 aa, synthetic construct
  REGION 1..10: note = Description of Artificial Sequence: Synthetic peptide
RQLTEAVQKI

SEQ ID NO: 7084 - protein, 9 aa, synthetic construct
  REGION 1..9: note = Description of Artificial Sequence: Synthetic peptide
GQDQWTYQI

SEQ ID NO: 7085 - protein, 10 aa, synthetic construct
  REGION 1..10: note = Description of Artificial Sequence: Synthetic peptide
RVDPGLADQL

SEQ ID NO: 7086 - protein, 9 aa, synthetic construct
  REGION 1..9: note = Description of Artificial Sequence: Synthetic peptide
GLENVTENF

SEQ ID NO: 7087 - protein, 9 aa, synthetic construct
  REGION 1..9: note = Description of Artificial Sequence: Synthetic peptide
IQKQGQDQW

SEQ ID NO: 7088 - protein, 10 aa, synthetic construct
  REGION 1..10: note = Description of Artificial Sequence: Synthetic peptide
GQVRDQAEHL

SEQ ID NO: 7089 - protein, 9 aa, synthetic construct
  REGION 1..9: note = Description of Artificial Sequence: Synthetic peptide
IQKQGNDQW

SEQ ID NO: 7090 - protein, 9 aa, synthetic construct
  REGION 1..9: note = Description of Artificial Sequence: Synthetic peptide
KQMAGADCM

SEQ ID NO: 7091 - protein, 9 aa, synthetic construct
  REGION 1..9: note = Description of Artificial Sequence: Synthetic peptide
RLIEGLQGI

SEQ ID NO: 7092 - protein, 9 aa, synthetic construct
  REGION 1..9: note = Description of Artificial Sequence: Synthetic peptide
GQVFYTNEI

SEQ ID NO: 7093 - protein, 10 aa, synthetic construct
  REGION 1..10: note = Description of Artificial Sequence: Synthetic peptide
KQLTEAVQKI

SEQ ID NO: 7094 - protein, 10 aa, synthetic construct
  REGION 1..10: note = Description of Artificial Sequence: Synthetic peptide
IVVGEGTDRF

SEQ ID NO: 7095 - protein, 9 aa, synthetic construct
  REGION 1..9: note = Description of Artificial Sequence: Synthetic peptide
QQEEEEVGF

SEQ ID NO: 7096 - protein, 9 aa, synthetic construct
  REGION 1..9: note = Description of Artificial Sequence: Synthetic peptide
QLTAVVQKI

SEQ ID NO: 7097 - protein, 9 aa, synthetic construct
  REGION 1..9: note = Description of Artificial Sequence: Synthetic peptide
GQNQWTYQI

SEQ ID NO: 7098 - protein, 9 aa, synthetic construct
  REGION 1..9: note = Description of Artificial Sequence: Synthetic peptide
QQHMLQLTV

SEQ ID NO: 7099 - protein, 9 aa, synthetic construct
  REGION 1..9: note = Description of Artificial Sequence: Synthetic peptide
GAASITLTV

SEQ ID NO: 7100 - protein, 9 aa, synthetic construct
  REGION 1..9: note = Description of Artificial Sequence: Synthetic peptide
QLTEAVQKI

SEQ ID NO: 7101 - protein, 9 aa, synthetic construct
  REGION 1..9: note = Description of Artificial Sequence: Synthetic peptide
GQVFYTNEI

SEQ ID NO: 7102 - protein, 9 aa, synthetic construct
  REGION 1..9: note = Description of Artificial Sequence: Synthetic peptide
SQIYPGIQV

SEQ ID NO: 7103 - protein, 9 aa, synthetic construct
  REGION 1..9: note = Description of Artificial Sequence: Synthetic peptide
ILAQIQPAI

SEQ ID NO: 7104 - protein, 8 aa, synthetic construct
  REGION 1..8: note = Description of Artificial Sequence: Synthetic peptide
GQMVHQAI

SEQ ID NO: 7105 - protein, 9 aa, synthetic construct
  REGION 1..9: note = Description of Artificial Sequence: Synthetic peptide
SQIYPGIKV

SEQ ID NO: 7106 - protein, 9 aa, synthetic construct
  REGION 1..9: note = Description of Artificial Sequence: Synthetic peptide
QQHLLQLTV

SEQ ID NO: 7107 - protein, 9 aa, synthetic construct
  REGION 1..9: note = Description of Artificial Sequence: Synthetic peptide
GQVDCSPGI

SEQ ID NO: 7108 - protein, 9 aa, synthetic construct
  REGION 1..9: note = Description of Artificial Sequence: Synthetic peptide
VQKIATESI

SEQ ID NO: 7109 - protein, 9 aa, synthetic construct
  REGION 1..9: note = Description of Artificial Sequence: Synthetic peptide
GQDQWTYQI

SEQ ID NO: 7110 - protein, 8 aa, synthetic construct
  REGION 1..8: note = Description of Artificial Sequence: Synthetic peptide
FQTKGLGI

SEQ ID NO: 7111 - protein, 9 aa, synthetic construct
  REGION 1..9: note = Description of Artificial Sequence: Synthetic peptide
AVISIVNRV

SEQ ID NO: 7112 - protein, 9 aa, synthetic construct
  REGION 1..9: note = Description of Artificial Sequence: Synthetic peptide
LQTGTKELI

SEQ ID NO: 7113 - protein, 8 aa, synthetic construct
  REGION 1..8: note = Description of Artificial Sequence: Synthetic peptide
LQNQILKI

SEQ ID NO: 7114 - protein, 9 aa, synthetic construct
  REGION 1..9: note = Description of Artificial Sequence: Synthetic peptide
AVLSIVNRV

SEQ ID NO: 7115 - protein, 8 aa, synthetic construct
  REGION 1..8: note = Description of Artificial Sequence: Synthetic peptide
FQAKGLGI

SEQ ID NO: 7116 - protein, 10 aa, synthetic construct
  REGION 1..10: note = Description of Artificial Sequence: Synthetic peptide
RQLTEAVQKI

SEQ ID NO: 7117 - protein, 9 aa, synthetic construct
  REGION 1..9: note = Description of Artificial Sequence: Synthetic peptide
VLAEAMSQI

SEQ ID NO: 7118 - protein, 9 aa, synthetic construct
  REGION 1..9: note = Description of Artificial Sequence: Synthetic peptide
ASITLTVQV

SEQ ID NO: 7119 - protein, 9 aa, synthetic construct
  REGION 1..9: note = Description of Artificial Sequence: Synthetic peptide
VQKIALESI

SEQ ID NO: 7120 - protein, 9 aa, synthetic construct
  REGION 1..9: note = Description of Artificial Sequence: Synthetic peptide
VLAEAMSQV

SEQ ID NO: 7121 - protein, 8 aa, synthetic construct
  REGION 1..8: note = Description of Artificial Sequence: Synthetic peptide
SQVNNTTI

SEQ ID NO: 7122 - protein, 10 aa, synthetic construct
  REGION 1..10: note = Description of Artificial Sequence: Synthetic peptide
KQLTEAVQKI

SEQ ID NO: 7123 - protein, 9 aa, synthetic construct
  REGION 1..9: note = Description of Artificial Sequence: Synthetic peptide
GQVNCSPGI

SEQ ID NO: 7124 - protein, 9 aa, synthetic construct
  REGION 1..9: note = Description of Artificial Sequence: Synthetic peptide
RIIEVIQGI

SEQ ID NO: 7125 - protein, 8 aa, synthetic construct
  REGION 1..8: note = Description of Artificial Sequence: Synthetic peptide
NQIIEQLI

SEQ ID NO: 7126 - protein, 10 aa, synthetic construct
  REGION 1..10: note = Description of Artificial Sequence: Synthetic peptide
IQTKELQNQI

SEQ ID NO: 7127 - protein, 9 aa, synthetic construct
  REGION 1..9: note = Description of Artificial Sequence: Synthetic peptide
KQMAGADCV

SEQ ID NO: 7128 - protein, 9 aa, synthetic construct
  REGION 1..9: note = Description of Artificial Sequence: Synthetic peptide
RLIEGLQGI

SEQ ID NO: 7129 - protein, 9 aa, synthetic construct
  REGION 1..9: note = Description of Artificial Sequence: Synthetic peptide
VLAEAMSKV

SEQ ID NO: 7130 - protein, 10 aa, synthetic construct
  REGION 1..10: note = Description of Artificial Sequence: Synthetic peptide
KVVEVKPLGV

SEQ ID NO: 7131 - protein, 9 aa, synthetic construct
  REGION 1..9: note = Description of Artificial Sequence: Synthetic peptide
VQLNESVEI

SEQ ID NO: 7132 - protein, 10 aa, synthetic construct
  REGION 1..10: note = Description of Artificial Sequence: Synthetic peptide
SLFGSDPLST

SEQ ID NO: 7133 - protein, 9 aa, synthetic construct
  REGION 1..9: note = Description of Artificial Sequence: Synthetic peptide
VQNMQGQMV

SEQ ID NO: 7134 - protein, 8 aa, synthetic construct
  REGION 1..8: note = Description of Artificial Sequence: Synthetic peptide
GQMVHQPI

SEQ ID NO: 7135 - protein, 8 aa, synthetic construct
  REGION 1..8: note = Description of Artificial Sequence: Synthetic peptide
GQETAYFI

SEQ ID NO: 7136 - protein, 9 aa, synthetic construct
  REGION 1..9: note = Description of Artificial Sequence: Synthetic peptide
ASVDYRLGV

SEQ ID NO: 7137 - protein, 9 aa, synthetic construct
  REGION 1..9: note = Description of Artificial Sequence: Synthetic peptide
ALTQACPKV

SEQ ID NO: 7138 - protein, 9 aa, synthetic construct
  REGION 1..9: note = Description of Artificial Sequence: Synthetic peptide
NQKTELQAI

SEQ ID NO: 7139 - protein, 10 aa, synthetic construct
  REGION 1..10: note = Description of Artificial Sequence: Synthetic peptide
KQLTAVVQKI

SEQ ID NO: 7140 - protein, 9 aa, synthetic construct
  REGION 1..9: note = Description of Artificial Sequence: Synthetic peptide
NQKAELQAI

SEQ ID NO: 7141 - protein, 9 aa, synthetic construct
  REGION 1..9: note = Description of Artificial Sequence: Synthetic peptide
ERYLRDQQL

SEQ ID NO: 7142 - protein, 9 aa, synthetic construct
  REGION 1..9: note = Description of Artificial Sequence: Synthetic peptide
DRFAVNPGL

SEQ ID NO: 7143 - protein, 9 aa, synthetic construct
  REGION 1..9: note = Description of Artificial Sequence: Synthetic peptide
ERYLKDQQL

SEQ ID NO: 7144 - protein, 8 aa, synthetic construct
  REGION 1..8: note = Description of Artificial Sequence: Synthetic peptide
ERILSTCL

SEQ ID NO: 7145 - protein, 9 aa, synthetic construct
  REGION 1..9: note = Description of Artificial Sequence: Synthetic peptide
ERFALNPGL

SEQ ID NO: 7146 - protein, 9 aa, synthetic construct
  REGION 1..9: note = Description of Artificial Sequence: Synthetic peptide
ERYLRDQQL

SEQ ID NO: 7147 - protein, 9 aa, synthetic construct
  REGION 1..9: note = Description of Artificial Sequence: Synthetic peptide
ERYLKDQQL

SEQ ID NO: 7148 - protein, 8 aa, synthetic construct
  REGION 1..8: note = Description of Artificial Sequence: Synthetic peptide
GQMVHQAI

SEQ ID NO: 7149 - protein, 8 aa, synthetic construct
  REGION 1..8: note = Description of Artificial Sequence: Synthetic peptide
GQMVHQPL

SEQ ID NO: 7150 - protein, 9 aa, synthetic construct
  REGION 1..9: note = Description of Artificial Sequence: Synthetic peptide
DEMEREGKI

SEQ ID NO: 7151 - protein, 8 aa, synthetic construct
  REGION 1..8: note = Description of Artificial Sequence: Synthetic peptide
DLDKHGAL

SEQ ID NO: 7152 - protein, 9 aa, synthetic construct
  REGION 1..9: note = Description of Artificial Sequence: Synthetic peptide
DRFAVNPGL

SEQ ID NO: 7153 - protein, 9 aa, synthetic construct
  REGION 1..9: note = Description of Artificial Sequence: Synthetic peptide
QDLDRYGAL

SEQ ID NO: 7154 - protein, 8 aa, synthetic construct
  REGION 1..8: note = Description of Artificial Sequence: Synthetic peptide
IQKLVGKL

SEQ ID NO: 7155 - protein, 9 aa, synthetic construct
  REGION 1..9: note = Description of Artificial Sequence: Synthetic peptide
QDLDKHGAL

SEQ ID NO: 7156 - protein, 9 aa, synthetic construct
  REGION 1..9: note = Description of Artificial Sequence: Synthetic peptide
TEAVQKIAL

SEQ ID NO: 7157 - protein, 8 aa, synthetic construct
  REGION 1..8: note = Description of Artificial Sequence: Synthetic peptide
KEPVHGVF

SEQ ID NO: 7158 - protein, 9 aa, synthetic construct
  REGION 1..9: note = Description of Artificial Sequence: Synthetic peptide
VELLGRSSL

SEQ ID NO: 7159 - protein, 9 aa, synthetic construct
  REGION 1..9: note = Description of Artificial Sequence: Synthetic peptide
DKTQKVNAL

SEQ ID NO: 7160 - protein, 9 aa, synthetic construct
  REGION 1..9: note = Description of Artificial Sequence: Synthetic peptide
AQNPEIVIY

SEQ ID NO: 7161 - protein, 9 aa, synthetic construct
  REGION 1..9: note = Description of Artificial Sequence: Synthetic peptide
QAKGLGISY

SEQ ID NO: 7162 - protein, 9 aa, synthetic construct
  REGION 1..9: note = Description of Artificial Sequence: Synthetic peptide
AQNPEIIIY

SEQ ID NO: 7163 - protein, 9 aa, synthetic construct
  REGION 1..9: note = Description of Artificial Sequence: Synthetic peptide
QTKGLGISY

SEQ ID NO: 7164 - protein, 10 aa, synthetic construct
  REGION 1..10: note = Description of Artificial Sequence: Synthetic peptide
FQAKGLGISY

SEQ ID NO: 7165 - protein, 9 aa, synthetic construct
  REGION 1..9: note = Description of Artificial Sequence: Synthetic peptide
SQINNGNIM

SEQ ID NO: 7166 - protein, 8 aa, synthetic construct
  REGION 1..8: note = Description of Artificial Sequence: Synthetic peptide
GQYVYETY

SEQ ID NO: 7167 - protein, 8 aa, synthetic construct
  REGION 1..8: note = Description of Artificial Sequence: Synthetic peptide
GQYIYETY

SEQ ID NO: 7168 - protein, 9 aa, synthetic construct
  REGION 1..9: note = Description of Artificial Sequence: Synthetic peptide
KQITKVQNF

SEQ ID NO: 7169 - protein, 9 aa, synthetic construct
  REGION 1..9: note = Description of Artificial Sequence: Synthetic peptide
RIGPGQTFY

SEQ ID NO: 7170 - protein, 9 aa, synthetic construct
  REGION 1..9: note = Description of Artificial Sequence: Synthetic peptide
TQKVNALFY

SEQ ID NO: 7171 - protein, 8 aa, synthetic construct
  REGION 1..8: note = Description of Artificial Sequence: Synthetic peptide
GQYIYATY

SEQ ID NO: 7172 - protein, 9 aa, synthetic construct
  REGION 1..9: note = Description of Artificial Sequence: Synthetic peptide
TQACPKVSF

SEQ ID NO: 7173 - protein, 9 aa, synthetic construct
  REGION 1..9: note = Description of Artificial Sequence: Synthetic peptide
VQKIATESI

SEQ ID NO: 7174 - protein, 8 aa, synthetic construct
  REGION 1..8: note = Description of Artificial Sequence: Synthetic peptide
GQHIYETY

SEQ ID NO: 7175 - protein, 9 aa, synthetic construct
  REGION 1..9: note = Description of Artificial Sequence: Synthetic peptide
TQACPKVTF

SEQ ID NO: 7176 - protein, 9 aa, synthetic construct
  REGION 1..9: note = Description of Artificial Sequence: Synthetic peptide
SQVNNTTIM

SEQ ID NO: 7177 - protein, 9 aa, synthetic construct
  REGION 1..9: note = Description of Artificial Sequence: Synthetic peptide
LQVRGSNTF

SEQ ID NO: 7178 - protein, 11 aa, synthetic construct
  REGION 1..11: note = Description of Artificial Sequence: Synthetic peptide
AQNPEIVIYQY

SEQ ID NO: 7179 - protein, 9 aa, synthetic construct
  REGION 1..9: note = Description of Artificial Sequence: Synthetic peptide
KQGQNQWTY

SEQ ID NO: 7180 - protein, 9 aa, synthetic construct
  REGION 1..9: note = Description of Artificial Sequence: Synthetic peptide
TVLDVGDAY

SEQ ID NO: 7181 - protein, 11 aa, synthetic construct
  REGION 1..11: note = Description of Artificial Sequence: Synthetic peptide
IQKQGNDQWTY

SEQ ID NO: 7182 - protein, 9 aa, synthetic construct
  REGION 1..9: note = Description of Artificial Sequence: Synthetic peptide
IQKQGQNQW

SEQ ID NO: 7183 - protein, 10 aa, synthetic construct
  REGION 1..10: note = Description of Artificial Sequence: Synthetic peptide
ILKEPVHGVY

SEQ ID NO: 7184 - protein, 10 aa, synthetic construct
  REGION 1..10: note = Description of Artificial Sequence: Synthetic peptide
FQTKGLGISY

SEQ ID NO: 7185 - protein, 10 aa, synthetic construct
  REGION 1..10: note = Description of Artificial Sequence: Synthetic peptide
FQKKGLGISY

SEQ ID NO: 7186 - protein, 9 aa, synthetic construct
  REGION 1..9: note = Description of Artificial Sequence: Synthetic peptide
IRIGPGQAF

SEQ ID NO: 7187 - protein, 11 aa, synthetic construct
  REGION 1..11: note = Description of Artificial Sequence: Synthetic peptide
AQNPEIIIYQY

SEQ ID NO: 7188 - protein, 9 aa, synthetic construct
  REGION 1..9: note = Description of Artificial Sequence: Synthetic peptide
KQIMKIQNF

SEQ ID NO: 7189 - protein, 9 aa, synthetic construct
  REGION 1..9: note = Description of Artificial Sequence: Synthetic peptide
IRIGPGQTF

SEQ ID NO: 7190 - protein, 9 aa, synthetic construct
  REGION 1..9: note = Description of Artificial Sequence: Synthetic peptide
RIGPGQAFY

SEQ ID NO: 7191 - protein, 9 aa, synthetic construct
  REGION 1..9: note = Description of Artificial Sequence: Synthetic peptide
KQIIKIQNF

SEQ ID NO: 7192 - protein, 9 aa, synthetic construct
  REGION 1..9: note = Description of Artificial Sequence: Synthetic peptide
IQQEFGIPY

SEQ ID NO: 7193 - protein, 10 aa, synthetic construct
  REGION 1..10: note = Description of Artificial Sequence: Synthetic peptide
SQINNGNIMM

SEQ ID NO: 7194 - protein, 9 aa, synthetic construct
  REGION 1..9: note = Description of Artificial Sequence: Synthetic peptide
NQILKIQNF

SEQ ID NO: 7195 - protein, 8 aa, synthetic construct
  REGION 1..8: note = Description of Artificial Sequence: Synthetic peptide
AVHVASGY

SEQ ID NO: 7196 - protein, 11 aa, synthetic construct
  REGION 1..11: note = Description of Artificial Sequence: Synthetic peptide
IQKQGQDQWTY

SEQ ID NO: 7197 - protein, 9 aa, synthetic construct
  REGION 1..9: note = Description of Artificial Sequence: Synthetic peptide
TSSLFNSTY

SEQ ID NO: 7198 - protein, 9 aa, synthetic construct
  REGION 1..9: note = Description of Artificial Sequence: Synthetic peptide
ANIVTDSQY

SEQ ID NO: 7199 - protein, 9 aa, synthetic construct
  REGION 1..9: note = Description of Artificial Sequence: Synthetic peptide
FLGAAGSTM

SEQ ID NO: 7200 - protein, 8 aa, synthetic construct
  REGION 1..8: note = Description of Artificial Sequence: Synthetic peptide
GQMVHQAI

SEQ ID NO: 7201 - protein, 9 aa, synthetic construct
  REGION 1..9: note = Description of Artificial Sequence: Synthetic peptide
TQLGRTLNF

SEQ ID NO: 7202 - protein, 9 aa, synthetic construct
  REGION 1..9: note = Description of Artificial Sequence: Synthetic peptide
ISNYTNTIY

SEQ ID NO: 7203 - protein, 9 aa, synthetic construct
  REGION 1..9: note = Description of Artificial Sequence: Synthetic peptide
KQGQDQWTY

SEQ ID NO: 7204 - protein, 9 aa, synthetic construct
  REGION 1..9: note = Description of Artificial Sequence: Synthetic peptide
FLGTAGSTM

SEQ ID NO: 7205 - protein, 9 aa, synthetic construct
  REGION 1..9: note = Description of Artificial Sequence: Synthetic peptide
IQKQGQDQW

SEQ ID NO: 7206 - protein, 10 aa, synthetic construct
  REGION 1..10: note = Description of Artificial Sequence: Synthetic peptide
SIRIGPGQTF

SEQ ID NO: 7207 - protein, 8 aa, synthetic construct
  REGION 1..8: note = Description of Artificial Sequence: Synthetic peptide
FQNKTIEF

SEQ ID NO: 7208 - protein, 8 aa, synthetic construct
  REGION 1..8: note = Description of Artificial Sequence: Synthetic peptide
TQKVNALF

SEQ ID NO: 7209 - protein, 9 aa, synthetic construct
  REGION 1..9: note = Description of Artificial Sequence: Synthetic peptide
RIGPGQVFY

SEQ ID NO: 7210 - protein, 9 aa, synthetic construct
  REGION 1..9: note = Description of Artificial Sequence: Synthetic peptide
SQIYPGIQV

SEQ ID NO: 7211 - protein, 10 aa, synthetic construct
  REGION 1..10: note = Description of Artificial Sequence: Synthetic peptide
GFLGTAGSTM

SEQ ID NO: 7212 - protein, 9 aa, synthetic construct
  REGION 1..9: note = Description of Artificial Sequence: Synthetic peptide
TVLDVGDAY

SEQ ID NO: 7213 - protein, 9 aa, synthetic construct
  REGION 1..9: note = Description of Artificial Sequence: Synthetic peptide
FLGAAGSTM

SEQ ID NO: 7214 - protein, 9 aa, synthetic construct
  REGION 1..9: note = Description of Artificial Sequence: Synthetic peptide
FLGTAGSTM

SEQ ID NO: 7215 - protein, 9 aa, synthetic construct
  REGION 1..9: note = Description of Artificial Sequence: Synthetic peptide
QAKGLGISY

SEQ ID NO: 7216 - protein, 10 aa, synthetic construct
  REGION 1..10: note = Description of Artificial Sequence: Synthetic peptide
FQAKGLGISY

SEQ ID NO: 7217 - protein, 9 aa, synthetic construct
  REGION 1..9: note = Description of Artificial Sequence: Synthetic peptide
EARLVITTY

SEQ ID NO: 7218 - protein, 9 aa, synthetic construct
  REGION 1..9: note = Description of Artificial Sequence: Synthetic peptide
TQACPKVSF

SEQ ID NO: 7219 - protein, 9 aa, synthetic construct
  REGION 1..9: note = Description of Artificial Sequence: Synthetic peptide
SAISLFDTI

SEQ ID NO: 7220 - protein, 9 aa, synthetic construct
  REGION 1..9: note = Description of Artificial Sequence: Synthetic peptide
TVGGHQAAM

SEQ ID NO: 7221 - protein, 8 aa, synthetic construct
  REGION 1..8: note = Description of Artificial Sequence: Synthetic peptide
FLYASVDY

SEQ ID NO: 7222 - protein, 10 aa, synthetic construct
  REGION 1..10: note = Description of Artificial Sequence: Synthetic peptide
SIRIGPGQAF

SEQ ID NO: 7223 - protein, 10 aa, synthetic construct
  REGION 1..10: note = Description of Artificial Sequence: Synthetic peptide
EINNYTNTIY

SEQ ID NO: 7224 - protein, 10 aa, synthetic construct
  REGION 1..10: note = Description of Artificial Sequence: Synthetic peptide
FQTKGLGISY

SEQ ID NO: 7225 - protein, 9 aa, synthetic construct
  REGION 1..9: note = Description of Artificial Sequence: Synthetic peptide
SQVNNTTIM

SEQ ID NO: 7226 - protein, 9 aa, synthetic construct
  REGION 1..9: note = Description of Artificial Sequence: Synthetic peptide
TQACPKVTF

SEQ ID NO: 7227 - protein, 9 aa, synthetic construct
  REGION 1..9: note = Description of Artificial Sequence: Synthetic peptide
SQINNGNIM

SEQ ID NO: 7228 - protein, 10 aa, synthetic construct
  REGION 1..10: note = Description of Artificial Sequence: Synthetic peptide
SIRIGPGQTF

SEQ ID NO: 7229 - protein, 9 aa, synthetic construct
  REGION 1..9: note = Description of Artificial Sequence: Synthetic peptide
IRIGPGQAF

SEQ ID NO: 7230 - protein, 9 aa, synthetic construct
  REGION 1..9: note = Description of Artificial Sequence: Synthetic peptide
SPAIFQNSM

SEQ ID NO: 7231 - protein, 9 aa, synthetic construct
  REGION 1..9: note = Description of Artificial Sequence: Synthetic peptide
TQKVNALFY

SEQ ID NO: 7232 - protein, 9 aa, synthetic construct
  REGION 1..9: note = Description of Artificial Sequence: Synthetic peptide
EARLVIITY

SEQ ID NO: 7233 - protein, 9 aa, synthetic construct
  REGION 1..9: note = Description of Artificial Sequence: Synthetic peptide
QTKGLGISY

SEQ ID NO: 7234 - protein, 8 aa, synthetic construct
  REGION 1..8: note = Description of Artificial Sequence: Synthetic peptide
NNYTNTIY

SEQ ID NO: 7235 - protein, 9 aa, synthetic construct
  REGION 1..9: note = Description of Artificial Sequence: Synthetic peptide
FPQGEAREF

SEQ ID NO: 7236 - protein, 9 aa, synthetic construct
  REGION 1..9: note = Description of Artificial Sequence: Synthetic peptide
SLDPIPIHY

SEQ ID NO: 7237 - protein, 10 aa, synthetic construct
  REGION 1..10: note = Description of Artificial Sequence: Synthetic peptide
FQKKGLGISY

SEQ ID NO: 7238 - protein, 8 aa, synthetic construct
  REGION 1..8: note = Description of Artificial Sequence: Synthetic peptide
FPNKTIEF

SEQ ID NO: 7239 - protein, 10 aa, synthetic construct
  REGION 1..10: note = Description of Artificial Sequence: Synthetic peptide
EISNYTNTIY

SEQ ID NO: 7240 - protein, 9 aa, synthetic construct
  REGION 1..9: note = Description of Artificial Sequence: Synthetic peptide
DAYFSVPLY

SEQ ID NO: 7241 - protein, 8 aa, synthetic construct
  REGION 1..8: note = Description of Artificial Sequence: Synthetic peptide
GQYIYETY

SEQ ID NO: 7242 - protein, 9 aa, synthetic construct
  REGION 1..9: note = Description of Artificial Sequence: Synthetic peptide
DIAGTTSTL

SEQ ID NO: 7243 - protein, 9 aa, synthetic construct
  REGION 1..9: note = Description of Artificial Sequence: Synthetic peptide
HLNQPVEIM

SEQ ID NO: 7244 - protein, 9 aa, synthetic construct
  REGION 1..9: note = Description of Artificial Sequence: Synthetic peptide
TSSLFNSTY

SEQ ID NO: 7245 - protein, 9 aa, synthetic construct
  REGION 1..9: note = Description of Artificial Sequence: Synthetic peptide
APNPEIVIY

SEQ ID NO: 7246 - protein, 10 aa, synthetic construct
  REGION 1..10: note = Description of Artificial Sequence: Synthetic peptide
EVNIVTDSQY

SEQ ID NO: 7247 - protein, 9 aa, synthetic construct
  REGION 1..9: note = Description of Artificial Sequence: Synthetic peptide
IRIGPGQTF

SEQ ID NO: 7248 - protein, 9 aa, synthetic construct
  REGION 1..9: note = Description of Artificial Sequence: Synthetic peptide
AKNPEIAIY

SEQ ID NO: 7249 - protein, 8 aa, synthetic construct
  REGION 1..8: note = Description of Artificial Sequence: Synthetic peptide
AKGLGISY

SEQ ID NO: 7250 - protein, 9 aa, synthetic construct
  REGION 1..9: note = Description of Artificial Sequence: Synthetic peptide
QKKGLGISY

SEQ ID NO: 7251 - protein, 8 aa, synthetic construct
  REGION 1..8: note = Description of Artificial Sequence: Synthetic peptide
TKGLGISY

SEQ ID NO: 7252 - protein, 9 aa, synthetic construct
  REGION 1..9: note = Description of Artificial Sequence: Synthetic peptide
AQNPEIVIY

SEQ ID NO: 7253 - protein, 9 aa, synthetic construct
  REGION 1..9: note = Description of Artificial Sequence: Synthetic peptide
QAKGLGISY

SEQ ID NO: 7254 - protein, 9 aa, synthetic construct
  REGION 1..9: note = Description of Artificial Sequence: Synthetic peptide
IRIGPGQAF

SEQ ID NO: 7255 - protein, 9 aa, synthetic construct
  REGION 1..9: note = Description of Artificial Sequence: Synthetic peptide
SKVNNTNIM

SEQ ID NO: 7256 - protein, 8 aa, synthetic construct
  REGION 1..8: note = Description of Artificial Sequence: Synthetic peptide
GQYVYETY

SEQ ID NO: 7257 - protein, 8 aa, synthetic construct
  REGION 1..8: note = Description of Artificial Sequence: Synthetic peptide
GQYIYATY

SEQ ID NO: 7258 - protein, 9 aa, synthetic construct
  REGION 1..9: note = Description of Artificial Sequence: Synthetic peptide
AQNPEIIIY

SEQ ID NO: 7259 - protein, 9 aa, synthetic construct
  REGION 1..9: note = Description of Artificial Sequence: Synthetic peptide
IRIGPGQTF

SEQ ID NO: 7260 - protein, 10 aa, synthetic construct
  REGION 1..10: note = Description of Artificial Sequence: Synthetic peptide
FQAKGLGISY

SEQ ID NO: 7261 - protein, 9 aa, synthetic construct
  REGION 1..9: note = Description of Artificial Sequence: Synthetic peptide
GKKAIGTVL

SEQ ID NO: 7262 - protein, 8 aa, synthetic construct
  REGION 1..8: note = Description of Artificial Sequence: Synthetic peptide
GQYIYETY

SEQ ID NO: 7263 - protein, 8 aa, synthetic construct
  REGION 1..8: note = Description of Artificial Sequence: Synthetic peptide
KKGLGISY

SEQ ID NO: 7264 - protein, 9 aa, synthetic construct
  REGION 1..9: note = Description of Artificial Sequence: Synthetic peptide
KQITKVQNF

SEQ ID NO: 7265 - protein, 9 aa, synthetic construct
  REGION 1..9: note = Description of Artificial Sequence: Synthetic peptide
SQVNNTTIM

SEQ ID NO: 7266 - protein, 9 aa, synthetic construct
  REGION 1..9: note = Description of Artificial Sequence: Synthetic peptide
TQKVNALFY

SEQ ID NO: 7267 - protein, 9 aa, synthetic construct
  REGION 1..9: note = Description of Artificial Sequence: Synthetic peptide
TKIGPENPY

SEQ ID NO: 7268 - protein, 9 aa, synthetic construct
  REGION 1..9: note = Description of Artificial Sequence: Synthetic peptide
TKVQNFRVY

SEQ ID NO: 7269 - protein, 9 aa, synthetic construct
  REGION 1..9: note = Description of Artificial Sequence: Synthetic peptide
SQINNGNIM

SEQ ID NO: 7270 - protein, 9 aa, synthetic construct
  REGION 1..9: note = Description of Artificial Sequence: Synthetic peptide
IRIGPGQVF

SEQ ID NO: 7271 - protein, 9 aa, synthetic construct
  REGION 1..9: note = Description of Artificial Sequence: Synthetic peptide
VKVIEEKAF

SEQ ID NO: 7272 - protein, 9 aa, synthetic construct
  REGION 1..9: note = Description of Artificial Sequence: Synthetic peptide
VKVVEEKAF

SEQ ID NO: 7273 - protein, 9 aa, synthetic construct
  REGION 1..9: note = Description of Artificial Sequence: Synthetic peptide
TQACPKVSF

SEQ ID NO: 7274 - protein, 9 aa, synthetic construct
  REGION 1..9: note = Description of Artificial Sequence: Synthetic peptide
EHFPNKTII

SEQ ID NO: 7275 - protein, 9 aa, synthetic construct
  REGION 1..9: note = Description of Artificial Sequence: Synthetic peptide
HQAISPRTL

SEQ ID NO: 7276 - protein, 9 aa, synthetic construct
  REGION 1..9: note = Description of Artificial Sequence: Synthetic peptide
AHTNDVRQL

SEQ ID NO: 7277 - protein, 9 aa, synthetic construct
  REGION 1..9: note = Description of Artificial Sequence: Synthetic peptide
EHLKTAVQM

SEQ ID NO: 7278 - protein, 9 aa, synthetic construct
  REGION 1..9: note = Description of Artificial Sequence: Synthetic peptide
THLEGKIIL

SEQ ID NO: 7279 - protein, 10 aa, synthetic construct
  REGION 1..10: note = Description of Artificial Sequence: Synthetic peptide
VHQPISARTL

SEQ ID NO: 7280 - protein, 9 aa, synthetic construct
  REGION 1..9: note = Description of Artificial Sequence: Synthetic peptide
GHQAAMQML

SEQ ID NO: 7281 - protein, 9 aa, synthetic construct
  REGION 1..9: note = Description of Artificial Sequence: Synthetic peptide
QHRAPIEEL

SEQ ID NO: 7282 - protein, 9 aa, synthetic construct
  REGION 1..9: note = Description of Artificial Sequence: Synthetic peptide
IHSISERIL

SEQ ID NO: 7283 - protein, 9 aa, synthetic construct
  REGION 1..9: note = Description of Artificial Sequence: Synthetic peptide
IHSVSERIL

SEQ ID NO: 7284 - protein, 8 aa, synthetic construct
  REGION 1..8: note = Description of Artificial Sequence: Synthetic peptide
MHQDIISL

SEQ ID NO: 7285 - protein, 10 aa, synthetic construct
  REGION 1..10: note = Description of Artificial Sequence: Synthetic peptide
VHQPLSPRTL

SEQ ID NO: 7286 - protein, 8 aa, synthetic construct
  REGION 1..8: note = Description of Artificial Sequence: Synthetic peptide
LHNTVATL

SEQ ID NO: 7287 - protein, 9 aa, synthetic construct
  REGION 1..9: note = Description of Artificial Sequence: Synthetic peptide
AHCNISREL

SEQ ID NO: 7288 - protein, 9 aa, synthetic construct
  REGION 1..9: note = Description of Artificial Sequence: Synthetic peptide
AHTNDVKQL

SEQ ID NO: 7289 - protein, 8 aa, synthetic construct
  REGION 1..8: note = Description of Artificial Sequence: Synthetic peptide
EHFPNKAI

SEQ ID NO: 7290 - protein, 9 aa, synthetic construct
  REGION 1..9: note = Description of Artificial Sequence: Synthetic peptide
SQIYPGIQV

SEQ ID NO: 7291 - protein, 8 aa, synthetic construct
  REGION 1..8: note = Description of Artificial Sequence: Synthetic peptide
MHEDVISL

SEQ ID NO: 7292 - protein, 9 aa, synthetic construct
  REGION 1..9: note = Description of Artificial Sequence: Synthetic peptide
SQINNGNIM

SEQ ID NO: 7293 - protein, 9 aa, synthetic construct
  REGION 1..9: note = Description of Artificial Sequence: Synthetic peptide
SHNNSSPSP

SEQ ID NO: 7294 - protein, 9 aa, synthetic construct
  REGION 1..9: note = Description of Artificial Sequence: Synthetic peptide
LHISGSESA

SEQ ID NO: 7295 - protein, 9 aa, synthetic construct
  REGION 1..9: note = Description of Artificial Sequence: Synthetic peptide
SQIYPGIKV

SEQ ID NO: 7296 - protein, 9 aa, synthetic construct
  REGION 1..9: note = Description of Artificial Sequence: Synthetic peptide
IRIGPGQAF

SEQ ID NO: 7297 - protein, 9 aa, synthetic construct
  REGION 1..9: note = Description of Artificial Sequence: Synthetic peptide
TVLDVGDAY

SEQ ID NO: 7298 - protein, 9 aa, synthetic construct
  REGION 1..9: note = Description of Artificial Sequence: Synthetic peptide
TINEEAAEW

SEQ ID NO: 7299 - protein, 9 aa, synthetic construct
  REGION 1..9: note = Description of Artificial Sequence: Synthetic peptide
SAISLFDTI

SEQ ID NO: 7300 - protein, 9 aa, synthetic construct
  REGION 1..9: note = Description of Artificial Sequence: Synthetic peptide
TAVPWNSSW

SEQ ID NO: 7301 - protein, 8 aa, synthetic construct
  REGION 1..8: note = Description of Artificial Sequence: Synthetic peptide
DEMKNCSF

SEQ ID NO: 7302 - protein, 9 aa, synthetic construct
  REGION 1..9: note = Description of Artificial Sequence: Synthetic peptide
EENSWVTVY

SEQ ID NO: 7303 - protein, 11 aa, synthetic construct
  REGION 1..11: note = Description of Artificial Sequence: Synthetic peptide
SEVNIVTDSQY

SEQ ID NO: 7304 - protein, 8 aa, synthetic construct
  REGION 1..8: note = Description of Artificial Sequence: Synthetic peptide
DEKVSQNF

SEQ ID NO: 7305 - protein, 8 aa, synthetic construct
  REGION 1..8: note = Description of Artificial Sequence: Synthetic peptide
LEITTHSF

SEQ ID NO: 7306 - protein, 8 aa, synthetic construct
  REGION 1..8: note = Description of Artificial Sequence: Synthetic peptide
LEVTTHSF

SEQ ID NO: 7307 - protein, 8 aa, synthetic construct
  REGION 1..8: note = Description of Artificial Sequence: Synthetic peptide
DEALLQAV

SEQ ID NO: 7308 - protein, 8 aa, synthetic construct
  REGION 1..8: note = Description of Artificial Sequence: Synthetic peptide
NETPGIRY

SEQ ID NO: 7309 - protein, 11 aa, synthetic construct
  REGION 1..11: note = Description of Artificial Sequence: Synthetic peptide
SEANIVTDSQY

SEQ ID NO: 7310 - protein, 8 aa, synthetic construct
  REGION 1..8: note = Description of Artificial Sequence: Synthetic peptide
DEALLKAV

SEQ ID NO: 7311 - protein, 9 aa, synthetic construct
  REGION 1..9: note = Description of Artificial Sequence: Synthetic peptide
TETNKTETF

SEQ ID NO: 7312 - protein, 8 aa, synthetic construct
  REGION 1..8: note = Description of Artificial Sequence: Synthetic peptide
LENVTESF

SEQ ID NO: 7313 - protein, 8 aa, synthetic construct
  REGION 1..8: note = Description of Artificial Sequence: Synthetic peptide
TEAKTTLF

SEQ ID NO: 7314 - protein, 8 aa, synthetic construct
  REGION 1..8: note = Description of Artificial Sequence: Synthetic peptide
MENVTENF

SEQ ID NO: 7315 - protein, 8 aa, synthetic construct
  REGION 1..8: note = Description of Artificial Sequence: Synthetic peptide
TELQAIQL

SEQ ID NO: 7316 - protein, 9 aa, synthetic construct
  REGION 1..9: note = Description of Artificial Sequence: Synthetic peptide
NEFNIPPVV

SEQ ID NO: 7317 - protein, 8 aa, synthetic construct
  REGION 1..8: note = Description of Artificial Sequence: Synthetic peptide
SERILSTF

SEQ ID NO: 7318 - protein, 8 aa, synthetic construct
  REGION 1..8: note = Description of Artificial Sequence: Synthetic peptide
PEIVIYQY

SEQ ID NO: 7319 - protein, 9 aa, synthetic construct
  REGION 1..9: note = Description of Artificial Sequence: Synthetic peptide
DEVGFPVRP

SEQ ID NO: 7320 - protein, 8 aa, synthetic construct
  REGION 1..8: note = Description of Artificial Sequence: Synthetic peptide
NEVLVWKF

SEQ ID NO: 7321 - protein, 9 aa, synthetic construct
  REGION 1..9: note = Description of Artificial Sequence: Synthetic peptide
TERVGNPVF

SEQ ID NO: 7322 - protein, 9 aa, synthetic construct
  REGION 1..9: note = Description of Artificial Sequence: Synthetic peptide
SEFNLPPIV

SEQ ID NO: 7323 - protein, 8 aa, synthetic construct
  REGION 1..8: note = Description of Artificial Sequence: Synthetic peptide
PEIAIYQY

SEQ ID NO: 7324 - protein, 8 aa, synthetic construct
  REGION 1..8: note = Description of Artificial Sequence: Synthetic peptide
PEIIIYQY

SEQ ID NO: 7325 - protein, 8 aa, synthetic construct
  REGION 1..8: note = Description of Artificial Sequence: Synthetic peptide
LENVTENF

SEQ ID NO: 7326 - protein, 8 aa, synthetic construct
  REGION 1..8: note = Description of Artificial Sequence: Synthetic peptide
NEFNIPPV

SEQ ID NO: 7327 - protein, 9 aa, synthetic construct
  REGION 1..9: note = Description of Artificial Sequence: Synthetic peptide
TEAVQKIAL

SEQ ID NO: 7328 - protein, 8 aa, synthetic construct
  REGION 1..8: note = Description of Artificial Sequence: Synthetic peptide
DEELLKAV

SEQ ID NO: 7329 - protein, 9 aa, synthetic construct
  REGION 1..9: note = Description of Artificial Sequence: Synthetic peptide
IRIGPGQTF

SEQ ID NO: 7330 - protein, 10 aa, synthetic construct
  REGION 1..10: note = Description of Artificial Sequence: Synthetic peptide
IRIGPGQAFY

SEQ ID NO: 7331 - protein, 9 aa, synthetic construct
  REGION 1..9: note = Description of Artificial Sequence: Synthetic peptide
IRIGPGQAF

SEQ ID NO: 7332 - protein, 10 aa, synthetic construct
  REGION 1..10: note = Description of Artificial Sequence: Synthetic peptide
SLFGSDPLST

SEQ ID NO: 7333 - protein, 10 aa, synthetic construct
  REGION 1..10: note = Description of Artificial Sequence: Synthetic peptide
VRQGYSPLSF

SEQ ID NO: 7334 - protein, 10 aa, synthetic construct
  REGION 1..10: note = Description of Artificial Sequence: Synthetic peptide
IRIGPGQTFY

SEQ ID NO: 7335 - protein, 10 aa, synthetic construct
  REGION 1..10: note = Description of Artificial Sequence: Synthetic peptide
YRSDIVPLEK

SEQ ID NO: 7336 - protein, 9 aa, synthetic construct
  REGION 1..9: note = Description of Artificial Sequence: Synthetic peptide
TRVLAIERY

SEQ ID NO: 7337 - protein, 9 aa, synthetic construct
  REGION 1..9: note = Description of Artificial Sequence: Synthetic peptide
ARVLAIERY

SEQ ID NO: 7338 - protein, 11 aa, synthetic construct
  REGION 1..11: note = Description of Artificial Sequence: Synthetic peptide
GIVQQQSNLLK

SEQ ID NO: 7339 - protein, 11 aa, synthetic construct
  REGION 1..11: note = Description of Artificial Sequence: Synthetic peptide
KGGLEGLIYSK

SEQ ID NO: 7340 - protein, 9 aa, synthetic construct
  REGION 1..9: note = Description of Artificial Sequence: Synthetic peptide
IRIGPGQVF

SEQ ID NO: 7341 - protein, 10 aa, synthetic construct
  REGION 1..10: note = Description of Artificial Sequence: Synthetic peptide
YFSVPLDEGF

SEQ ID NO: 7342 - protein, 10 aa, synthetic construct
  REGION 1..10: note = Description of Artificial Sequence: Synthetic peptide
EANIVTDSQY

SEQ ID NO: 7343 - protein, 9 aa, synthetic construct
  REGION 1..9: note = Description of Artificial Sequence: Synthetic peptide
SRIGPENPY

SEQ ID NO: 7344 - protein, 10 aa, synthetic construct
  REGION 1..10: note = Description of Artificial Sequence: Synthetic peptide
GGLEGLIWSK

SEQ ID NO: 7345 - protein, 10 aa, synthetic construct
  REGION 1..10: note = Description of Artificial Sequence: Synthetic peptide
IRIGPGQVFY

SEQ ID NO: 7346 - protein, 11 aa, synthetic construct
  REGION 1..11: note = Description of Artificial Sequence: Synthetic peptide
NGSNFISNTVK

SEQ ID NO: 7347 - protein, 9 aa, synthetic construct
  REGION 1..9: note = Description of Artificial Sequence: Synthetic peptide
VLFLDGINK

SEQ ID NO: 7348 - protein, 10 aa, synthetic construct
  REGION 1..10: note = Description of Artificial Sequence: Synthetic peptide
GGLEGLIYSK

SEQ ID NO: 7349 - protein, 10 aa, synthetic construct
  REGION 1..10: note = Description of Artificial Sequence: Synthetic peptide
GALDLSFFLK

SEQ ID NO: 7350 - protein, 9 aa, synthetic construct
  REGION 1..9: note = Description of Artificial Sequence: Synthetic peptide
ILGQVVSPR

SEQ ID NO: 7351 - protein, 11 aa, synthetic construct
  REGION 1..11: note = Description of Artificial Sequence: Synthetic peptide
ELWNNTLEQVK

SEQ ID NO: 7352 - protein, 11 aa, synthetic construct
  REGION 1..11: note = Description of Artificial Sequence: Synthetic peptide
SEANIVTDSQY

SEQ ID NO: 7353 - protein, 11 aa, synthetic construct
  REGION 1..11: note = Description of Artificial Sequence: Synthetic peptide
TRVDPGLADQL

SEQ ID NO: 7354 - protein, 11 aa, synthetic construct
  REGION 1..11: note = Description of Artificial Sequence: Synthetic peptide
YATGEIIGDIR

SEQ ID NO: 7355 - protein, 10 aa, synthetic construct
  REGION 1..10: note = Description of Artificial Sequence: Synthetic peptide
NQIIEQLISK

SEQ ID NO: 7356 - protein, 9 aa, synthetic construct
  REGION 1..9: note = Description of Artificial Sequence: Synthetic peptide
SRIGILPQR

SEQ ID NO: 7357 - protein, 10 aa, synthetic construct
  REGION 1..10: note = Description of Artificial Sequence: Synthetic peptide
GRSSLKGLQR

SEQ ID NO: 7358 - protein, 9 aa, synthetic construct
  REGION 1..9: note = Description of Artificial Sequence: Synthetic peptide
SRIGILRQR

SEQ ID NO: 7359 - protein, 9 aa, synthetic construct
  REGION 1..9: note = Description of Artificial Sequence: Synthetic peptide
GRIDYRLGV

SEQ ID NO: 7360 - protein, 9 aa, synthetic construct
  REGION 1..9: note = Description of Artificial Sequence: Synthetic peptide
IRIGPGQTF

SEQ ID NO: 7361 - protein, 9 aa, synthetic construct
  REGION 1..9: note = Description of Artificial Sequence: Synthetic peptide
GRAAELLGR

SEQ ID NO: 7362 - protein, 10 aa, synthetic construct
  REGION 1..10: note = Description of Artificial Sequence: Synthetic peptide
GRSSLRGIQR

SEQ ID NO: 7363 - protein, 9 aa, synthetic construct
  REGION 1..9: note = Description of Artificial Sequence: Synthetic peptide
IRIGPGQAF

SEQ ID NO: 7364 - protein, 9 aa, synthetic construct
  REGION 1..9: note = Description of Artificial Sequence: Synthetic peptide
ARVLAIERY

SEQ ID NO: 7365 - protein, 10 aa, synthetic construct
  REGION 1..10: note = Description of Artificial Sequence: Synthetic peptide
IRIGPGQTFY

SEQ ID NO: 7366 - protein, 10 aa, synthetic construct
  REGION 1..10: note = Description of Artificial Sequence: Synthetic peptide
IRIGPGQAFY

SEQ ID NO: 7367 - protein, 10 aa, synthetic construct
  REGION 1..10: note = Description of Artificial Sequence: Synthetic peptide
IRIGPGQVFY

SEQ ID NO: 7368 - protein, 10 aa, synthetic construct
  REGION 1..10: note = Description of Artificial Sequence: Synthetic peptide
GRPGNLLQNR

SEQ ID NO: 7369 - protein, 9 aa, synthetic construct
  REGION 1..9: note = Description of Artificial Sequence: Synthetic peptide
IRIGPGQVF

SEQ ID NO: 7370 - protein, 9 aa, synthetic construct
  REGION 1..9: note = Description of Artificial Sequence: Synthetic peptide
SRIGPENPY

SEQ ID NO: 7371 - protein, 9 aa, synthetic construct
  REGION 1..9: note = Description of Artificial Sequence: Synthetic peptide
EPIAGVETF

SEQ ID NO: 7372 - protein, 9 aa, synthetic construct
  REGION 1..9: note = Description of Artificial Sequence: Synthetic peptide
FPEGEAREF

SEQ ID NO: 7373 - protein, 9 aa, synthetic construct
  REGION 1..9: note = Description of Artificial Sequence: Synthetic peptide
EPIAEAETF

SEQ ID NO: 7374 - protein, 9 aa, synthetic construct
  REGION 1..9: note = Description of Artificial Sequence: Synthetic peptide
EPIAGAETF

SEQ ID NO: 7375 - protein, 11 aa, synthetic construct
  REGION 1..11: note = Description of Artificial Sequence: Synthetic peptide
IPAETGQETAY

SEQ ID NO: 7376 - protein, 9 aa, synthetic construct
  REGION 1..9: note = Description of Artificial Sequence: Synthetic peptide
APNPEIVIY

SEQ ID NO: 7377 - protein, 9 aa, synthetic construct
  REGION 1..9: note = Description of Artificial Sequence: Synthetic peptide
NPEIIIYQY

SEQ ID NO: 7378 - protein, 9 aa, synthetic construct
  REGION 1..9: note = Description of Artificial Sequence: Synthetic peptide
FPQGEAREF

SEQ ID NO: 7379 - protein, 9 aa, synthetic construct
  REGION 1..9: note = Description of Artificial Sequence: Synthetic peptide
NPEIVIYQY

SEQ ID NO: 7380 - protein, 9 aa, synthetic construct
  REGION 1..9: note = Description of Artificial Sequence: Synthetic peptide
NPEIAIYQY

SEQ ID NO: 7381 - protein, 9 aa, synthetic construct
  REGION 1..9: note = Description of Artificial Sequence: Synthetic peptide
DPNPQEIVM

SEQ ID NO: 7382 - protein, 9 aa, synthetic construct
  REGION 1..9: note = Description of Artificial Sequence: Synthetic peptide
QAKGLGISY

SEQ ID NO: 7383 - protein, 9 aa, synthetic construct
  REGION 1..9: note = Description of Artificial Sequence: Synthetic peptide
TVLDVGDAY

SEQ ID NO: 7384 - protein, 11 aa, synthetic construct
  REGION 1..11: note = Description of Artificial Sequence: Synthetic peptide
APNPEIVIYQY

SEQ ID NO: 7385 - protein, 8 aa, synthetic construct
  REGION 1..8: note = Description of Artificial Sequence: Synthetic peptide
TPGPGVRY

SEQ ID NO: 7386 - protein, 9 aa, synthetic construct
  REGION 1..9: note = Description of Artificial Sequence: Synthetic peptide
SPAIFQNSM

SEQ ID NO: 7387 - protein, 8 aa, synthetic construct
  REGION 1..8: note = Description of Artificial Sequence: Synthetic peptide
FPNKTIEF

SEQ ID NO: 7388 - protein, 9 aa, synthetic construct
  REGION 1..9: note = Description of Artificial Sequence: Synthetic peptide
PPVPVGDIY

SEQ ID NO: 7389 - protein, 11 aa, synthetic construct
  REGION 1..11: note = Description of Artificial Sequence: Synthetic peptide
LAFPEGEAREF

SEQ ID NO: 7390 - protein, 10 aa, synthetic construct
  REGION 1..10: note = Description of Artificial Sequence: Synthetic peptide
VPLEKNSSEY

SEQ ID NO: 7391 - protein, 10 aa, synthetic construct
  REGION 1..10: note = Description of Artificial Sequence: Synthetic peptide
VPLNNGSTDY

SEQ ID NO: 7392 - protein, 10 aa, synthetic construct
  REGION 1..10: note = Description of Artificial Sequence: Synthetic peptide
VPLDEGFRKY

SEQ ID NO: 7393 - protein, 10 aa, synthetic construct
  REGION 1..10: note = Description of Artificial Sequence: Synthetic peptide
NPPVPVGDIY

SEQ ID NO: 7394 - protein, 10 aa, synthetic construct
  REGION 1..10: note = Description of Artificial Sequence: Synthetic peptide
NPPIPVGDIY

SEQ ID NO: 7395 - protein, 9 aa, synthetic construct
  REGION 1..9: note = Description of Artificial Sequence: Synthetic peptide
EARLVITTY

SEQ ID NO: 7396 - protein, 9 aa, synthetic construct
  REGION 1..9: note = Description of Artificial Sequence: Synthetic peptide
SPAIFQSSM

SEQ ID NO: 7397 - protein, 9 aa, synthetic construct
  REGION 1..9: note = Description of Artificial Sequence: Synthetic peptide
DAYFSVPLY

SEQ ID NO: 7398 - protein, 10 aa, synthetic construct
  REGION 1..10: note = Description of Artificial Sequence: Synthetic peptide
EPIAGVETFY

SEQ ID NO: 7399 - protein, 8 aa, synthetic construct
  REGION 1..8: note = Description of Artificial Sequence: Synthetic peptide
FPNKAIKF

SEQ ID NO: 7400 - protein, 9 aa, synthetic construct
  REGION 1..9: note = Description of Artificial Sequence: Synthetic peptide
DANNNTITL

SEQ ID NO: 7401 - protein, 9 aa, synthetic construct
  REGION 1..9: note = Description of Artificial Sequence: Synthetic peptide
PPIPVGDIY

SEQ ID NO: 7402 - protein, 10 aa, synthetic construct
  REGION 1..10: note = Description of Artificial Sequence: Synthetic peptide
EANIVTDSQY

SEQ ID NO: 7403 - protein, 10 aa, synthetic construct
  REGION 1..10: note = Description of Artificial Sequence: Synthetic peptide
EPIAGAETFY

SEQ ID NO: 7404 - protein, 9 aa, synthetic construct
  REGION 1..9: note = Description of Artificial Sequence: Synthetic peptide
VPLTEEAEL

SEQ ID NO: 7405 - protein, 9 aa, synthetic construct
  REGION 1..9: note = Description of Artificial Sequence: Synthetic peptide
FPISPIETV

SEQ ID NO: 7406 - protein, 9 aa, synthetic construct
  REGION 1..9: note = Description of Artificial Sequence: Synthetic peptide
DPNPQEIVM

SEQ ID NO: 7407 - protein, 9 aa, synthetic construct
  REGION 1..9: note = Description of Artificial Sequence: Synthetic peptide
VPLTEEAEL

SEQ ID NO: 7408 - protein, 9 aa, synthetic construct
  REGION 1..9: note = Description of Artificial Sequence: Synthetic peptide
FPEGEAREF

SEQ ID NO: 7409 - protein, 9 aa, synthetic construct
  REGION 1..9: note = Description of Artificial Sequence: Synthetic peptide
DPNPQEMVL

SEQ ID NO: 7410 - protein, 9 aa, synthetic construct
  REGION 1..9: note = Description of Artificial Sequence: Synthetic peptide
QPDKSESEL

SEQ ID NO: 7411 - protein, 9 aa, synthetic construct
  REGION 1..9: note = Description of Artificial Sequence: Synthetic peptide
VAEGTDRIL

SEQ ID NO: 7412 - protein, 9 aa, synthetic construct
  REGION 1..9: note = Description of Artificial Sequence: Synthetic peptide
EPIAEAETF

SEQ ID NO: 7413 - protein, 9 aa, synthetic construct
  REGION 1..9: note = Description of Artificial Sequence: Synthetic peptide
FPQGEAREF

SEQ ID NO: 7414 - protein, 9 aa, synthetic construct
  REGION 1..9: note = Description of Artificial Sequence: Synthetic peptide
YSTRVDPGL

SEQ ID NO: 7415 - protein, 9 aa, synthetic construct
  REGION 1..9: note = Description of Artificial Sequence: Synthetic peptide
YSTQVDPGL

SEQ ID NO: 7416 - protein, 9 aa, synthetic construct
  REGION 1..9: note = Description of Artificial Sequence: Synthetic peptide
DPSPQELVL

SEQ ID NO: 7417 - protein, 9 aa, synthetic construct
  REGION 1..9: note = Description of Artificial Sequence: Synthetic peptide
EPIAGAETF

SEQ ID NO: 7418 - protein, 10 aa, synthetic construct
  REGION 1..10: note = Description of Artificial Sequence: Synthetic peptide
TPNPGGPDRL

SEQ ID NO: 7419 - protein, 8 aa, synthetic construct
  REGION 1..8: note = Description of Artificial Sequence: Synthetic peptide
YASVDYRL

SEQ ID NO: 7420 - protein, 9 aa, synthetic construct
  REGION 1..9: note = Description of Artificial Sequence: Synthetic peptide
YSTQVEPGL

SEQ ID NO: 7421 - protein, 10 aa, synthetic construct
  REGION 1..10: note = Description of Artificial Sequence: Synthetic peptide
YAPPIEGIIM

SEQ ID NO: 7422 - protein, 9 aa, synthetic construct
  REGION 1..9: note = Description of Artificial Sequence: Synthetic peptide
HPVPAGPIA

SEQ ID NO: 7423 - protein, 9 aa, synthetic construct
  REGION 1..9: note = Description of Artificial Sequence: Synthetic peptide
EPIAGVETF

SEQ ID NO: 7424 - protein, 9 aa, synthetic construct
  REGION 1..9: note = Description of Artificial Sequence: Synthetic peptide
FPISPIETV

SEQ ID NO: 7425 - protein, 9 aa, synthetic construct
  REGION 1..9: note = Description of Artificial Sequence: Synthetic peptide
FPEGEAREF

SEQ ID NO: 7426 - protein, 9 aa, synthetic construct
  REGION 1..9: note = Description of Artificial Sequence: Synthetic peptide
DPNPQEIVM

SEQ ID NO: 7427 - protein, 9 aa, synthetic construct
  REGION 1..9: note = Description of Artificial Sequence: Synthetic peptide
VPLTEEAEL

SEQ ID NO: 7428 - protein, 9 aa, synthetic construct
  REGION 1..9: note = Description of Artificial Sequence: Synthetic peptide
EPIAEAETF

SEQ ID NO: 7429 - protein, 9 aa, synthetic construct
  REGION 1..9: note = Description of Artificial Sequence: Synthetic peptide
DPNPQEMVL

SEQ ID NO: 7430 - protein, 9 aa, synthetic construct
  REGION 1..9: note = Description of Artificial Sequence: Synthetic peptide
FPISPIETV

SEQ ID NO: 7431 - protein, 9 aa, synthetic construct
  REGION 1..9: note = Description of Artificial Sequence: Synthetic peptide
DANNNTITL

SEQ ID NO: 7432 - protein, 9 aa, synthetic construct
  REGION 1..9: note = Description of Artificial Sequence: Synthetic peptide
FPQGEAREF

SEQ ID NO: 7433 - protein, 9 aa, synthetic construct
  REGION 1..9: note = Description of Artificial Sequence: Synthetic peptide
EPIAGAETF

SEQ ID NO: 7434 - protein, 9 aa, synthetic construct
  REGION 1..9: note = Description of Artificial Sequence: Synthetic peptide
HPVPAGPIA

SEQ ID NO: 7435 - protein, 9 aa, synthetic construct
  REGION 1..9: note = Description of Artificial Sequence: Synthetic peptide
HPVHAGPVA

SEQ ID NO: 7436 - protein, 11 aa, synthetic construct
  REGION 1..11: note = Description of Artificial Sequence: Synthetic peptide
VPLTEEAELEL

SEQ ID NO: 7437 - protein, 9 aa, synthetic construct
  REGION 1..9: note = Description of Artificial Sequence: Synthetic peptide
TAVVQKIAL

SEQ ID NO: 7438 - protein, 9 aa, synthetic construct
  REGION 1..9: note = Description of Artificial Sequence: Synthetic peptide
DPSPQELVL

SEQ ID NO: 7439 - protein, 9 aa, synthetic construct
  REGION 1..9: note = Description of Artificial Sequence: Synthetic peptide
TPQDLNTML

SEQ ID NO: 7440 - protein, 9 aa, synthetic construct
  REGION 1..9: note = Description of Artificial Sequence: Synthetic peptide
EPIAGVETF

SEQ ID NO: 7441 - protein, 9 aa, synthetic construct
  REGION 1..9: note = Description of Artificial Sequence: Synthetic peptide
YSTQVDPGL

SEQ ID NO: 7442 - protein, 11 aa, synthetic construct
  REGION 1..11: note = Description of Artificial Sequence: Synthetic peptide
IAVAEGTDRIL

SEQ ID NO: 7443 - protein, 9 aa, synthetic construct
  REGION 1..9: note = Description of Artificial Sequence: Synthetic peptide
VAEGTDRIL

SEQ ID NO: 7444 - protein, 9 aa, synthetic construct
  REGION 1..9: note = Description of Artificial Sequence: Synthetic peptide
YSTRVDPGL

SEQ ID NO: 7445 - protein, 9 aa, synthetic construct
  REGION 1..9: note = Description of Artificial Sequence: Synthetic peptide
IVTDSQYAL

SEQ ID NO: 7446 - protein, 10 aa, synthetic construct
  REGION 1..10: note = Description of Artificial Sequence: Synthetic peptide
SPIETVPVKL

SEQ ID NO: 7447 - protein, 8 aa, synthetic construct
  REGION 1..8: note = Description of Artificial Sequence: Synthetic peptide
PPIEGIIM

SEQ ID NO: 7448 - protein, 10 aa, synthetic construct
  REGION 1..10: note = Description of Artificial Sequence: Synthetic peptide
VPTDPSPQEL

SEQ ID NO: 7449 - protein, 9 aa, synthetic construct
  REGION 1..9: note = Description of Artificial Sequence: Synthetic peptide
SPAIFQNSM

SEQ ID NO: 7450 - protein, 8 aa, synthetic construct
  REGION 1..8: note = Description of Artificial Sequence: Synthetic peptide
YASVDYRL

SEQ ID NO: 7451 - protein, 10 aa, synthetic construct
  REGION 1..10: note = Description of Artificial Sequence: Synthetic peptide
TPNPGGPDRL

SEQ ID NO: 7452 - protein, 10 aa, synthetic construct
  REGION 1..10: note = Description of Artificial Sequence: Synthetic peptide
NANPDCKTIL

SEQ ID NO: 7453 - protein, 8 aa, synthetic construct
  REGION 1..8: note = Description of Artificial Sequence: Synthetic peptide
FPNKTIEF

SEQ ID NO: 7454 - protein, 8 aa, synthetic construct
  REGION 1..8: note = Description of Artificial Sequence: Synthetic peptide
TPGPGVRL

SEQ ID NO: 7455 - protein, 10 aa, synthetic construct
  REGION 1..10: note = Description of Artificial Sequence: Synthetic peptide
VPTDPNPQEM

SEQ ID NO: 7456 - protein, 9 aa, synthetic construct
  REGION 1..9: note = Description of Artificial Sequence: Synthetic peptide
YNTQVDPGL

SEQ ID NO: 7457 - protein, 9 aa, synthetic construct
  REGION 1..9: note = Description of Artificial Sequence: Synthetic peptide
QPDKSESEL

SEQ ID NO: 7458 - protein, 9 aa, synthetic construct
  REGION 1..9: note = Description of Artificial Sequence: Synthetic peptide
FPEGEAREF

SEQ ID NO: 7459 - protein, 11 aa, synthetic construct
  REGION 1..11: note = Description of Artificial Sequence: Synthetic peptide
IPAETGQETAY

SEQ ID NO: 7460 - protein, 9 aa, synthetic construct
  REGION 1..9: note = Description of Artificial Sequence: Synthetic peptide
EPIAEAETF

SEQ ID NO: 7461 - protein, 9 aa, synthetic construct
  REGION 1..9: note = Description of Artificial Sequence: Synthetic peptide
DPNPQEIVM

SEQ ID NO: 7462 - protein, 9 aa, synthetic construct
  REGION 1..9: note = Description of Artificial Sequence: Synthetic peptide
APNPEIVIY

SEQ ID NO: 7463 - protein, 9 aa, synthetic construct
  REGION 1..9: note = Description of Artificial Sequence: Synthetic peptide
FPQGEAREF

SEQ ID NO: 7464 - protein, 9 aa, synthetic construct
  REGION 1..9: note = Description of Artificial Sequence: Synthetic peptide
EPIAGVETF

SEQ ID NO: 7465 - protein, 9 aa, synthetic construct
  REGION 1..9: note = Description of Artificial Sequence: Synthetic peptide
EPIAGAETF

SEQ ID NO: 7466 - protein, 9 aa, synthetic construct
  REGION 1..9: note = Description of Artificial Sequence: Synthetic peptide
NPEIAIYQY

SEQ ID NO: 7467 - protein, 10 aa, synthetic construct
  REGION 1..10: note = Description of Artificial Sequence: Synthetic peptide
NPPIPVGDIY

SEQ ID NO: 7468 - protein, 9 aa, synthetic construct
  REGION 1..9: note = Description of Artificial Sequence: Synthetic peptide
NPEIIIYQY

SEQ ID NO: 7469 - protein, 9 aa, synthetic construct
  REGION 1..9: note = Description of Artificial Sequence: Synthetic peptide
NPEIVIYQY

SEQ ID NO: 7470 - protein, 9 aa, synthetic construct
  REGION 1..9: note = Description of Artificial Sequence: Synthetic peptide
VPLTEEAEL

SEQ ID NO: 7471 - protein, 10 aa, synthetic construct
  REGION 1..10: note = Description of Artificial Sequence: Synthetic peptide
NPPVPVGDIY

SEQ ID NO: 7472 - protein, 10 aa, synthetic construct
  REGION 1..10: note = Description of Artificial Sequence: Synthetic peptide
EPIAEAETFY

SEQ ID NO: 7473 - protein, 9 aa, synthetic construct
  REGION 1..9: note = Description of Artificial Sequence: Synthetic peptide
PPIPVGDIY

SEQ ID NO: 7474 - protein, 8 aa, synthetic construct
  REGION 1..8: note = Description of Artificial Sequence: Synthetic peptide
TPGPGVRY

SEQ ID NO: 7475 - protein, 9 aa, synthetic construct
  REGION 1..9: note = Description of Artificial Sequence: Synthetic peptide
TVLDVGDAY

SEQ ID NO: 7476 - protein, 9 aa, synthetic construct
  REGION 1..9: note = Description of Artificial Sequence: Synthetic peptide
PPVPVGDIY

SEQ ID NO: 7477 - protein, 9 aa, synthetic construct
  REGION 1..9: note = Description of Artificial Sequence: Synthetic peptide
APPIEGIIM

SEQ ID NO: 7478 - protein, 9 aa, synthetic construct
  REGION 1..9: note = Description of Artificial Sequence: Synthetic peptide
FPEGEAREF

SEQ ID NO: 7479 - protein, 9 aa, synthetic construct
  REGION 1..9: note = Description of Artificial Sequence: Synthetic peptide
DPNPQEIVM

SEQ ID NO: 7480 - protein, 9 aa, synthetic construct
  REGION 1..9: note = Description of Artificial Sequence: Synthetic peptide
VPLTEEAEL

SEQ ID NO: 7481 - protein, 9 aa, synthetic construct
  REGION 1..9: note = Description of Artificial Sequence: Synthetic peptide
DPNPQEMVL

SEQ ID NO: 7482 - protein, 9 aa, synthetic construct
  REGION 1..9: note = Description of Artificial Sequence: Synthetic peptide
EPIAEAETF

SEQ ID NO: 7483 - protein, 9 aa, synthetic construct
  REGION 1..9: note = Description of Artificial Sequence: Synthetic peptide
QPDKSESEL

SEQ ID NO: 7484 - protein, 9 aa, synthetic construct
  REGION 1..9: note = Description of Artificial Sequence: Synthetic peptide
FPQGEAREF

SEQ ID NO: 7485 - protein, 9 aa, synthetic construct
  REGION 1..9: note = Description of Artificial Sequence: Synthetic peptide
DPSPQELVL

SEQ ID NO: 7486 - protein, 10 aa, synthetic construct
  REGION 1..10: note = Description of Artificial Sequence: Synthetic peptide
TPNPGGPDRL

SEQ ID NO: 7487 - protein, 9 aa, synthetic construct
  REGION 1..9: note = Description of Artificial Sequence: Synthetic peptide
VAEGTDRIL

SEQ ID NO: 7488 - protein, 8 aa, synthetic construct
  REGION 1..8: note = Description of Artificial Sequence: Synthetic peptide
YASVDYRL

SEQ ID NO: 7489 - protein, 9 aa, synthetic construct
  REGION 1..9: note = Description of Artificial Sequence: Synthetic peptide
EPIAGAETF

SEQ ID NO: 7490 - protein, 9 aa, synthetic construct
  REGION 1..9: note = Description of Artificial Sequence: Synthetic peptide
YSTRVDPGL

SEQ ID NO: 7491 - protein, 9 aa, synthetic construct
  REGION 1..9: note = Description of Artificial Sequence: Synthetic peptide
EPIAGVETF

SEQ ID NO: 7492 - protein, 11 aa, synthetic construct
  REGION 1..11: note = Description of Artificial Sequence: Synthetic peptide
VPLTEEAELEL

SEQ ID NO: 7493 - protein, 9 aa, synthetic construct
  REGION 1..9: note = Description of Artificial Sequence: Synthetic peptide
FPISPIETV

SEQ ID NO: 7494 - protein, 9 aa, synthetic construct
  REGION 1..9: note = Description of Artificial Sequence: Synthetic peptide
YSTQVDPGL

SEQ ID NO: 7495 - protein, 9 aa, synthetic construct
  REGION 1..9: note = Description of Artificial Sequence: Synthetic peptide
DTVLEEVSL

SEQ ID NO: 7496 - protein, 9 aa, synthetic construct
  REGION 1..9: note = Description of Artificial Sequence: Synthetic peptide
HPVHAGPVA

SEQ ID NO: 7497 - protein, 9 aa, synthetic construct
  REGION 1..9: note = Description of Artificial Sequence: Synthetic peptide
HPVPAGPIA

SEQ ID NO: 7498 - protein, 9 aa, synthetic construct
  REGION 1..9: note = Description of Artificial Sequence: Synthetic peptide
QPNKSESEL

SEQ ID NO: 7499 - protein, 8 aa, synthetic construct
  REGION 1..8: note = Description of Artificial Sequence: Synthetic peptide
MENVTENF

SEQ ID NO: 7500 - protein, 9 aa, synthetic construct
  REGION 1..9: note = Description of Artificial Sequence: Synthetic peptide
QDLDRYGAL

SEQ ID NO: 7501 - protein, 9 aa, synthetic construct
  REGION 1..9: note = Description of Artificial Sequence: Synthetic peptide
AELLGRSSL

SEQ ID NO: 7502 - protein, 8 aa, synthetic construct
  REGION 1..8: note = Description of Artificial Sequence: Synthetic peptide
YDAEVHNV

SEQ ID NO: 7503 - protein, 8 aa, synthetic construct
  REGION 1..8: note = Description of Artificial Sequence: Synthetic peptide
YDTEVHNV

SEQ ID NO: 7504 - protein, 8 aa, synthetic construct
  REGION 1..8: note = Description of Artificial Sequence: Synthetic peptide
AEHLKTAV

SEQ ID NO: 7505 - protein, 8 aa, synthetic construct
  REGION 1..8: note = Description of Artificial Sequence: Synthetic peptide
AELQAIQL

SEQ ID NO: 7506 - protein, 8 aa, synthetic construct
  REGION 1..8: note = Description of Artificial Sequence: Synthetic peptide
LENVTESF

SEQ ID NO: 7507 - protein, 8 aa, synthetic construct
  REGION 1..8: note = Description of Artificial Sequence: Synthetic peptide
LENVTENF

SEQ ID NO: 7508 - protein, 11 aa, synthetic construct
  REGION 1..11: note = Description of Artificial Sequence: Synthetic peptide
SEAGAERQGTF

SEQ ID NO: 7509 - protein, 9 aa, synthetic construct
  REGION 1..9: note = Description of Artificial Sequence: Synthetic peptide
TEAVQKIAL

SEQ ID NO: 7510 - protein, 9 aa, synthetic construct
  REGION 1..9: note = Description of Artificial Sequence: Synthetic peptide
TDNVKTIIV

SEQ ID NO: 7511 - protein, 8 aa, synthetic construct
  REGION 1..8: note = Description of Artificial Sequence: Synthetic peptide
SDIQTKEL

SEQ ID NO: 7512 - protein, 9 aa, synthetic construct
  REGION 1..9: note = Description of Artificial Sequence: Synthetic peptide
AERQGTFNF

SEQ ID NO: 7513 - protein, 9 aa, synthetic construct
  REGION 1..9: note = Description of Artificial Sequence: Synthetic peptide
VHLNESVEI

SEQ ID NO: 7514 - protein, 9 aa, synthetic construct
  REGION 1..9: note = Description of Artificial Sequence: Synthetic peptide
IHTDNGSNF

SEQ ID NO: 7515 - protein, 11 aa, synthetic construct
  REGION 1..11: note = Description of Artificial Sequence: Synthetic peptide
TQVDPGLADQL

SEQ ID NO: 7516 - protein, 10 aa, synthetic construct
  REGION 1..10: note = Description of Artificial Sequence: Synthetic peptide
IHTDNGSNFI

SEQ ID NO: 7517 - protein, 9 aa, synthetic construct
  REGION 1..9: note = Description of Artificial Sequence: Synthetic peptide
EHFPNKTII

SEQ ID NO: 7518 - protein, 9 aa, synthetic construct
  REGION 1..9: note = Description of Artificial Sequence: Synthetic peptide
IRIGPGQTF

SEQ ID NO: 7519 - protein, 11 aa, synthetic construct
  REGION 1..11: note = Description of Artificial Sequence: Synthetic peptide
TQVDPGLADHL

SEQ ID NO: 7520 - protein, 11 aa, synthetic construct
  REGION 1..11: note = Description of Artificial Sequence: Synthetic peptide
TQVEPGLADQL

SEQ ID NO: 7521 - protein, 9 aa, synthetic construct
  REGION 1..9: note = Description of Artificial Sequence: Synthetic peptide
TQDFWEVQL

SEQ ID NO: 7522 - protein, 9 aa, synthetic construct
  REGION 1..9: note = Description of Artificial Sequence: Synthetic peptide
VHLNQPVEI

SEQ ID NO: 7523 - protein, 11 aa, synthetic construct
  REGION 1..11: note = Description of Artificial Sequence: Synthetic peptide
TRVDPGLADQL

SEQ ID NO: 7524 - protein, 9 aa, synthetic construct
  REGION 1..9: note = Description of Artificial Sequence: Synthetic peptide
KHSGGDLEI

SEQ ID NO: 7525 - protein, 9 aa, synthetic construct
  REGION 1..9: note = Description of Artificial Sequence: Synthetic peptide
GHQAAMQML

SEQ ID NO: 7526 - protein, 10 aa, synthetic construct
  REGION 1..10: note = Description of Artificial Sequence: Synthetic peptide
EHFQNKTIEF

SEQ ID NO: 7527 - protein, 9 aa, synthetic construct
  REGION 1..9: note = Description of Artificial Sequence: Synthetic peptide
IRIGPGQAF

SEQ ID NO: 7528 - protein, 9 aa, synthetic construct
  REGION 1..9: note = Description of Artificial Sequence: Synthetic peptide
THLEGKIIL

SEQ ID NO: 7529 - protein, 9 aa, synthetic construct
  REGION 1..9: note = Description of Artificial Sequence: Synthetic peptide
AHTNDVKQL

SEQ ID NO: 7530 - protein, 9 aa, synthetic construct
  REGION 1..9: note = Description of Artificial Sequence: Synthetic peptide
EHLKTAVQM

SEQ ID NO: 7531 - protein, 9 aa, synthetic construct
  REGION 1..9: note = Description of Artificial Sequence: Synthetic peptide
AHTNDVRQL

SEQ ID NO: 7532 - protein, 10 aa, synthetic construct
  REGION 1..10: note = Description of Artificial Sequence: Synthetic peptide
THSKTYNESM

SEQ ID NO: 7533 - protein, 9 aa, synthetic construct
  REGION 1..9: note = Description of Artificial Sequence: Synthetic peptide
SQIYPGIQV

SEQ ID NO: 7534 - protein, 11 aa, synthetic construct
  REGION 1..11: note = Description of Artificial Sequence: Synthetic peptide
TRVDPGLADQL

SEQ ID NO: 7535 - protein, 11 aa, synthetic construct
  REGION 1..11: note = Description of Artificial Sequence: Synthetic peptide
TQVDPGLADQL

SEQ ID NO: 7536 - protein, 9 aa, synthetic construct
  REGION 1..9: note = Description of Artificial Sequence: Synthetic peptide
SQINNGNIM

SEQ ID NO: 7537 - protein, 11 aa, synthetic construct
  REGION 1..11: note = Description of Artificial Sequence: Synthetic peptide
VHAGPVAPGQM

SEQ ID NO: 7538 - protein, 9 aa, synthetic construct
  REGION 1..9: note = Description of Artificial Sequence: Synthetic peptide
EHLKTAVQM

SEQ ID NO: 7539 - protein, 9 aa, synthetic construct
  REGION 1..9: note = Description of Artificial Sequence: Synthetic peptide
EHFPNKTII

SEQ ID NO: 7540 - protein, 11 aa, synthetic construct
  REGION 1..11: note = Description of Artificial Sequence: Synthetic peptide
TQVEPGLADQL

SEQ ID NO: 7541 - protein, 8 aa, synthetic construct
  REGION 1..8: note = Description of Artificial Sequence: Synthetic peptide
FGSDPLST

SEQ ID NO: 7542 - protein, 11 aa, synthetic construct
  REGION 1..11: note = Description of Artificial Sequence: Synthetic peptide
TQVDPGLADHL

SEQ ID NO: 7543 - protein, 9 aa, synthetic construct
  REGION 1..9: note = Description of Artificial Sequence: Synthetic peptide
IRIGPGQTF

SEQ ID NO: 7544 - protein, 9 aa, synthetic construct
  REGION 1..9: note = Description of Artificial Sequence: Synthetic peptide
IRIGPGQAF

SEQ ID NO: 7545 - protein, 8 aa, synthetic construct
  REGION 1..8: note = Description of Artificial Sequence: Synthetic peptide
MHEDVISL

SEQ ID NO: 7546 - protein, 9 aa, synthetic construct
  REGION 1..9: note = Description of Artificial Sequence: Synthetic peptide
IHTDNGSNF

SEQ ID NO: 7547 - protein, 9 aa, synthetic construct
  REGION 1..9: note = Description of Artificial Sequence: Synthetic peptide
SQVNNTTIM

SEQ ID NO: 7548 - protein, 9 aa, synthetic construct
  REGION 1..9: note = Description of Artificial Sequence: Synthetic peptide
SQTNSAILM

SEQ ID NO: 7549 - protein, 9 aa, synthetic construct
  REGION 1..9: note = Description of Artificial Sequence: Synthetic peptide
HQAISPRTL

SEQ ID NO: 7550 - protein, 9 aa, synthetic construct
  REGION 1..9: note = Description of Artificial Sequence: Synthetic peptide
VHLNQPVEI

SEQ ID NO: 7551 - protein, 8 aa, synthetic construct
  REGION 1..8: note = Description of Artificial Sequence: Synthetic peptide
HRAPIEEL

SEQ ID NO: 7552 - protein, 9 aa, synthetic construct
  REGION 1..9: note = Description of Artificial Sequence: Synthetic peptide
QMVHQPISA

SEQ ID NO: 7553 - protein, 10 aa, synthetic construct
  REGION 1..10: note = Description of Artificial Sequence: Synthetic peptide
GQMVHQPISA

SEQ ID NO: 7554 - protein, 10 aa, synthetic construct
  REGION 1..10: note = Description of Artificial Sequence: Synthetic peptide
SQYALGIIQA

SEQ ID NO: 7555 - protein, 9 aa, synthetic construct
  REGION 1..9: note = Description of Artificial Sequence: Synthetic peptide
VQLGIPHPA

SEQ ID NO: 7556 - protein, 8 aa, synthetic construct
  REGION 1..8: note = Description of Artificial Sequence: Synthetic peptide
THGIKPVV

SEQ ID NO: 7557 - protein, 8 aa, synthetic construct
  REGION 1..8: note = Description of Artificial Sequence: Synthetic peptide
DRIAIAVA

SEQ ID NO: 7558 - protein, 10 aa, synthetic construct
  REGION 1..10: note = Description of Artificial Sequence: Synthetic peptide
SQYALGIILA

SEQ ID NO: 7559 - protein, 8 aa, synthetic construct
  REGION 1..8: note = Description of Artificial Sequence: Synthetic peptide
DQIIIEIC

SEQ ID NO: 7560 - protein, 8 aa, synthetic construct
  REGION 1..8: note = Description of Artificial Sequence: Synthetic peptide
EHFPNKAI

SEQ ID NO: 7561 - protein, 8 aa, synthetic construct
  REGION 1..8: note = Description of Artificial Sequence: Synthetic peptide
VHIPLGEA

SEQ ID NO: 7562 - protein, 9 aa, synthetic construct
  REGION 1..9: note = Description of Artificial Sequence: Synthetic peptide
LHISGSESA

SEQ ID NO: 7563 - protein, 9 aa, synthetic construct
  REGION 1..9: note = Description of Artificial Sequence: Synthetic peptide
EHFPNKTII

SEQ ID NO: 7564 - protein, 8 aa, synthetic construct
  REGION 1..8: note = Description of Artificial Sequence: Synthetic peptide
DQILIEIC

SEQ ID NO: 7565 - protein, 9 aa, synthetic construct
  REGION 1..9: note = Description of Artificial Sequence: Synthetic peptide
YQLEKEPIA

SEQ ID NO: 7566 - protein, 8 aa, synthetic construct
  REGION 1..8: note = Description of Artificial Sequence: Synthetic peptide
SNFISNTV

SEQ ID NO: 7567 - protein, 8 aa, synthetic construct
  REGION 1..8: note = Description of Artificial Sequence: Synthetic peptide
QHMLQLTV

SEQ ID NO: 7568 - protein, 9 aa, synthetic construct
  REGION 1..9: note = Description of Artificial Sequence: Synthetic peptide
TSNLFNITA

SEQ ID NO: 7569 - protein, 9 aa, synthetic construct
  REGION 1..9: note = Description of Artificial Sequence: Synthetic peptide
QQHLLQLTV

SEQ ID NO: 7570 - protein, 9 aa, synthetic construct
  REGION 1..9: note = Description of Artificial Sequence: Synthetic peptide
VHLNQPVEI

SEQ ID NO: 7571 - protein, 8 aa, synthetic construct
  REGION 1..8: note = Description of Artificial Sequence: Synthetic peptide
THGTKPVV

SEQ ID NO: 7572 - protein, 9 aa, synthetic construct
  REGION 1..9: note = Description of Artificial Sequence: Synthetic peptide
TEAVQKIAL

SEQ ID NO: 7573 - protein, 10 aa, synthetic construct
  REGION 1..10: note = Description of Artificial Sequence: Synthetic peptide
IEIKDTKEAL

SEQ ID NO: 7574 - protein, 10 aa, synthetic construct
  REGION 1..10: note = Description of Artificial Sequence: Synthetic peptide
SETTNQKAEL

SEQ ID NO: 7575 - protein, 10 aa, synthetic construct
  REGION 1..10: note = Description of Artificial Sequence: Synthetic peptide
TETTNQKTEL

SEQ ID NO: 7576 - protein, 9 aa, synthetic construct
  REGION 1..9: note = Description of Artificial Sequence: Synthetic peptide
MEDEHREVL

SEQ ID NO: 7577 - protein, 9 aa, synthetic construct
  REGION 1..9: note = Description of Artificial Sequence: Synthetic peptide
MEDEDREVL

SEQ ID NO: 7578 - protein, 9 aa, synthetic construct
  REGION 1..9: note = Description of Artificial Sequence: Synthetic peptide
MEDDHNEVL

SEQ ID NO: 7579 - protein, 9 aa, synthetic construct
  REGION 1..9: note = Description of Artificial Sequence: Synthetic peptide
MEDSHREVL

SEQ ID NO: 7580 - protein, 9 aa, synthetic construct
  REGION 1..9: note = Description of Artificial Sequence: Synthetic peptide
SEDKWNETL

SEQ ID NO: 7581 - protein, 10 aa, synthetic construct
  REGION 1..10: note = Description of Artificial Sequence: Synthetic peptide
IEVRDTKEAL

SEQ ID NO: 7582 - protein, 9 aa, synthetic construct
  REGION 1..9: note = Description of Artificial Sequence: Synthetic peptide
AELLGRSSL

SEQ ID NO: 7583 - protein, 10 aa, synthetic construct
  REGION 1..10: note = Description of Artificial Sequence: Synthetic peptide
GEIIIRSENL

SEQ ID NO: 7584 - protein, 9 aa, synthetic construct
  REGION 1..9: note = Description of Artificial Sequence: Synthetic peptide
AEGETIIRF

SEQ ID NO: 7585 - protein, 9 aa, synthetic construct
  REGION 1..9: note = Description of Artificial Sequence: Synthetic peptide
QEENEKDLL

SEQ ID NO: 7586 - protein, 9 aa, synthetic construct
  REGION 1..9: note = Description of Artificial Sequence: Synthetic peptide
SEGATPQDL

SEQ ID NO: 7587 - protein, 8 aa, synthetic construct
  REGION 1..8: note = Description of Artificial Sequence: Synthetic peptide
AELQAIQL

SEQ ID NO: 7588 - protein, 8 aa, synthetic construct
  REGION 1..8: note = Description of Artificial Sequence: Synthetic peptide
IETVPVKL

SEQ ID NO: 7589 - protein, 11 aa, synthetic construct
  REGION 1..11: note = Description of Artificial Sequence: Synthetic peptide
SEAGAERQGSL

SEQ ID NO: 7590 - protein, 10 aa, synthetic construct
  REGION 1..10: note = Description of Artificial Sequence: Synthetic peptide
AEGTDRILEL

SEQ ID NO: 7591 - protein, 9 aa, synthetic construct
  REGION 1..9: note = Description of Artificial Sequence: Synthetic peptide
TETNKTETF

SEQ ID NO: 7592 - protein, 9 aa, synthetic construct
  REGION 1..9: note = Description of Artificial Sequence: Synthetic peptide
QEKNEQDLL

SEQ ID NO: 7593 - protein, 11 aa, synthetic construct
  REGION 1..11: note = Description of Artificial Sequence: Synthetic peptide
SEIVNQIIEQL

SEQ ID NO: 7594 - protein, 11 aa, synthetic construct
  REGION 1..11: note = Description of Artificial Sequence: Synthetic peptide
EEINEGENNCL

SEQ ID NO: 7595 - protein, 8 aa, synthetic construct
  REGION 1..8: note = Description of Artificial Sequence: Synthetic peptide
TELQAIQL

SEQ ID NO: 7596 - protein, 9 aa, synthetic construct
  REGION 1..9: note = Description of Artificial Sequence: Synthetic peptide
VEPGLADQL

SEQ ID NO: 7597 - protein, 8 aa, synthetic construct
  REGION 1..8: note = Description of Artificial Sequence: Synthetic peptide
IEAQQHML

SEQ ID NO: 7598 - protein, 10 aa, synthetic construct
  REGION 1..10: note = Description of Artificial Sequence: Synthetic peptide
IEAQQHLLQL

SEQ ID NO: 7599 - protein, 9 aa, synthetic construct
  REGION 1..9: note = Description of Artificial Sequence: Synthetic peptide
VELLGRSSL

SEQ ID NO: 7600 - protein, 9 aa, synthetic construct
  REGION 1..9: note = Description of Artificial Sequence: Synthetic peptide
SESEIVNQI

SEQ ID NO: 7601 - protein, 10 aa, synthetic construct
  REGION 1..10: note = Description of Artificial Sequence: Synthetic peptide
IEAQQHMLQL

SEQ ID NO: 7602 - protein, 9 aa, synthetic construct
  REGION 1..9: note = Description of Artificial Sequence: Synthetic peptide
SEFNLPPIV

SEQ ID NO: 7603 - protein, 10 aa, synthetic construct
  REGION 1..10: note = Description of Artificial Sequence: Synthetic peptide
LEEKGGLEGL

SEQ ID NO: 7604 - protein, 10 aa, synthetic construct
  REGION 1..10: note = Description of Artificial Sequence: Synthetic peptide
AEHLKTAVQM

SEQ ID NO: 7605 - protein, 11 aa, synthetic construct
  REGION 1..11: note = Description of Artificial Sequence: Synthetic peptide
IEFQPPAGGDL

SEQ ID NO: 7606 - protein, 11 aa, synthetic construct
  REGION 1..11: note = Description of Artificial Sequence: Synthetic peptide
EEATPSPKQEL

SEQ ID NO: 7607 - protein, 9 aa, synthetic construct
  REGION 1..9: note = Description of Artificial Sequence: Synthetic peptide
GEENSWVTV

SEQ ID NO: 7608 - protein, 8 aa, synthetic construct
  REGION 1..8: note = Description of Artificial Sequence: Synthetic peptide
IEAQQHLL

SEQ ID NO: 7609 - protein, 10 aa, synthetic construct
  REGION 1..10: note = Description of Artificial Sequence: Synthetic peptide
KEPIAGVETF

SEQ ID NO: 7610 - protein, 11 aa, synthetic construct
  REGION 1..11: note = Description of Artificial Sequence: Synthetic peptide
IEFKPSSGGDL

SEQ ID NO: 7611 - protein, 9 aa, synthetic construct
  REGION 1..9: note = Description of Artificial Sequence: Synthetic peptide
WENDMVEQM

SEQ ID NO: 7612 - protein, 10 aa, synthetic construct
  REGION 1..10: note = Description of Artificial Sequence: Synthetic peptide
KEPIAEAETF

SEQ ID NO: 7613 - protein, 9 aa, synthetic construct
  REGION 1..9: note = Description of Artificial Sequence: Synthetic peptide
QELKDREAL

SEQ ID NO: 7614 - protein, 11 aa, synthetic construct
  REGION 1..11: note = Description of Artificial Sequence: Synthetic peptide
EEANTGENNSL

SEQ ID NO: 7615 - protein, 9 aa, synthetic construct
  REGION 1..9: note = Description of Artificial Sequence: Synthetic peptide
TEAVQKIAL

SEQ ID NO: 7616 - protein, 10 aa, synthetic construct
  REGION 1..10: note = Description of Artificial Sequence: Synthetic peptide
GEIIGDIRQA

SEQ ID NO: 7617 - protein, 10 aa, synthetic construct
  REGION 1..10: note = Description of Artificial Sequence: Synthetic peptide
GEIIIRSENL

SEQ ID NO: 7618 - protein, 8 aa, synthetic construct
  REGION 1..8: note = Description of Artificial Sequence: Synthetic peptide
AELQAIQL

SEQ ID NO: 7619 - protein, 8 aa, synthetic construct
  REGION 1..8: note = Description of Artificial Sequence: Synthetic peptide
SDIQTKEL

SEQ ID NO: 7620 - protein, 9 aa, synthetic construct
  REGION 1..9: note = Description of Artificial Sequence: Synthetic peptide
SEFNLPPIV

SEQ ID NO: 7621 - protein, 10 aa, synthetic construct
  REGION 1..10: note = Description of Artificial Sequence: Synthetic peptide
TETTNQKTEL

SEQ ID NO: 7622 - protein, 9 aa, synthetic construct
  REGION 1..9: note = Description of Artificial Sequence: Synthetic peptide
AELLGRSSL

SEQ ID NO: 7623 - protein, 10 aa, synthetic construct
  REGION 1..10: note = Description of Artificial Sequence: Synthetic peptide
SETTNQKAEL

SEQ ID NO: 7624 - protein, 10 aa, synthetic construct
  REGION 1..10: note = Description of Artificial Sequence: Synthetic peptide
IEIKDTKEAL

SEQ ID NO: 7625 - protein, 9 aa, synthetic construct
  REGION 1..9: note = Description of Artificial Sequence: Synthetic peptide
AEGETIIRF

SEQ ID NO: 7626 - protein, 11 aa, synthetic construct
  REGION 1..11: note = Description of Artificial Sequence: Synthetic peptide
SEIVNQIIEQL

SEQ ID NO: 7627 - protein, 8 aa, synthetic construct
  REGION 1..8: note = Description of Artificial Sequence: Synthetic peptide
TDIQTKEL

SEQ ID NO: 7628 - protein, 8 aa, synthetic construct
  REGION 1..8: note = Description of Artificial Sequence: Synthetic peptide
IEAQQHML

SEQ ID NO: 7629 - protein, 10 aa, synthetic construct
  REGION 1..10: note = Description of Artificial Sequence: Synthetic peptide
AEHLKTAVQM

SEQ ID NO: 7630 - protein, 11 aa, synthetic construct
  REGION 1..11: note = Description of Artificial Sequence: Synthetic peptide
EEATPSPKQEL

SEQ ID NO: 7631 - protein, 9 aa, synthetic construct
  REGION 1..9: note = Description of Artificial Sequence: Synthetic peptide
NEFNIPPVV

SEQ ID NO: 7632 - protein, 9 aa, synthetic construct
  REGION 1..9: note = Description of Artificial Sequence: Synthetic peptide
MEDEHREVL

SEQ ID NO: 7633 - protein, 10 aa, synthetic construct
  REGION 1..10: note = Description of Artificial Sequence: Synthetic peptide
AEGTDRILEL

SEQ ID NO: 7634 - protein, 8 aa, synthetic construct
  REGION 1..8: note = Description of Artificial Sequence: Synthetic peptide
TELQAIQL

SEQ ID NO: 7635 - protein, 9 aa, synthetic construct
  REGION 1..9: note = Description of Artificial Sequence: Synthetic peptide
TETNKTETF

SEQ ID NO: 7636 - protein, 9 aa, synthetic construct
  REGION 1..9: note = Description of Artificial Sequence: Synthetic peptide
AEHFPNKAI

SEQ ID NO: 7637 - protein, 10 aa, synthetic construct
  REGION 1..10: note = Description of Artificial Sequence: Synthetic peptide
IEAQQHLLQL

SEQ ID NO: 7638 - protein, 9 aa, synthetic construct
  REGION 1..9: note = Description of Artificial Sequence: Synthetic peptide
TERVGNPVF

SEQ ID NO: 7639 - protein, 8 aa, synthetic construct
  REGION 1..8: note = Description of Artificial Sequence: Synthetic peptide
IETVPVKL

SEQ ID NO: 7640 - protein, 9 aa, synthetic construct
  REGION 1..9: note = Description of Artificial Sequence: Synthetic peptide
SESEIVNQI

SEQ ID NO: 7641 - protein, 9 aa, synthetic construct
  REGION 1..9: note = Description of Artificial Sequence: Synthetic peptide
MEDSHREVL

SEQ ID NO: 7642 - protein, 8 aa, synthetic construct
  REGION 1..8: note = Description of Artificial Sequence: Synthetic peptide
KELPLTSL

SEQ ID NO: 7643 - protein, 10 aa, synthetic construct
  REGION 1..10: note = Description of Artificial Sequence: Synthetic peptide
SEFNLPPIVA

SEQ ID NO: 7644 - protein, 10 aa, synthetic construct
  REGION 1..10: note = Description of Artificial Sequence: Synthetic peptide
IEAQQHMLQL

SEQ ID NO: 7645 - protein, 9 aa, synthetic construct
  REGION 1..9: note = Description of Artificial Sequence: Synthetic peptide
VELLGRSSL

SEQ ID NO: 7646 - protein, 10 aa, synthetic construct
  REGION 1..10: note = Description of Artificial Sequence: Synthetic peptide
REINNYTNTI

SEQ ID NO: 7647 - protein, 8 aa, synthetic construct
  REGION 1..8: note = Description of Artificial Sequence: Synthetic peptide
TELQAICL

SEQ ID NO: 7648 - protein, 10 aa, synthetic construct
  REGION 1..10: note = Description of Artificial Sequence: Synthetic peptide
REISNYTNTI

SEQ ID NO: 7649 - protein, 8 aa, synthetic construct
  REGION 1..8: note = Description of Artificial Sequence: Synthetic peptide
IEAQQHLL

SEQ ID NO: 7650 - protein, 9 aa, synthetic construct
  REGION 1..9: note = Description of Artificial Sequence: Synthetic peptide
SDFNLPPVV

SEQ ID NO: 7651 - protein, 9 aa, synthetic construct
  REGION 1..9: note = Description of Artificial Sequence: Synthetic peptide
SERILSTCL

SEQ ID NO: 7652 - protein, 10 aa, synthetic construct
  REGION 1..10: note = Description of Artificial Sequence: Synthetic peptide
IEVRDTKEAL

SEQ ID NO: 7653 - protein, 9 aa, synthetic construct
  REGION 1..9: note = Description of Artificial Sequence: Synthetic peptide
WENDMVEQM

SEQ ID NO: 7654 - protein, 9 aa, synthetic construct
  REGION 1..9: note = Description of Artificial Sequence: Synthetic peptide
MEDEDREVL

SEQ ID NO: 7655 - protein, 10 aa, synthetic construct
  REGION 1..10: note = Description of Artificial Sequence: Synthetic peptide
AELQAIQLAL

SEQ ID NO: 7656 - protein, 10 aa, synthetic construct
  REGION 1..10: note = Description of Artificial Sequence: Synthetic peptide
GEAIHGQVNC

SEQ ID NO: 7657 - protein, 11 aa, synthetic construct
  REGION 1..11: note = Description of Artificial Sequence: Synthetic peptide
SELVNQIIEQL

SEQ ID NO: 7658 - protein, 9 aa, synthetic construct
  REGION 1..9: note = Description of Artificial Sequence: Synthetic peptide
SEGATPQDL

SEQ ID NO: 7659 - protein, 11 aa, synthetic construct
  REGION 1..11: note = Description of Artificial Sequence: Synthetic peptide
VEALIRTLQQL

SEQ ID NO: 7660 - protein, 11 aa, synthetic construct
  REGION 1..11: note = Description of Artificial Sequence: Synthetic peptide
SEAGAERQGSL

SEQ ID NO: 7661 - protein, 11 aa, synthetic construct
  REGION 1..11: note = Description of Artificial Sequence: Synthetic peptide
VEQMHQDIISL

SEQ ID NO: 7662 - protein, 10 aa, synthetic construct
  REGION 1..10: note = Description of Artificial Sequence: Synthetic peptide
KEPIAGVETF

SEQ ID NO: 7663 - protein, 9 aa, synthetic construct
  REGION 1..9: note = Description of Artificial Sequence: Synthetic peptide
SESELVNQI

SEQ ID NO: 7664 - protein, 10 aa, synthetic construct
  REGION 1..10: note = Description of Artificial Sequence: Synthetic peptide
REFPSEQTRA

SEQ ID NO: 7665 - protein, 9 aa, synthetic construct
  REGION 1..9: note = Description of Artificial Sequence: Synthetic peptide
LEKEPIAGV

SEQ ID NO: 7666 - protein, 10 aa, synthetic construct
  REGION 1..10: note = Description of Artificial Sequence: Synthetic peptide
GEIIGDIRQA

SEQ ID NO: 7667 - protein, 10 aa, synthetic construct
  REGION 1..10: note = Description of Artificial Sequence: Synthetic peptide
REFSPEQTRA

SEQ ID NO: 7668 - protein, 10 aa, synthetic construct
  REGION 1..10: note = Description of Artificial Sequence: Synthetic peptide
REFPSEQTRA

SEQ ID NO: 7669 - protein, 10 aa, synthetic construct
  REGION 1..10: note = Description of Artificial Sequence: Synthetic peptide
SEFNLPPIVA

SEQ ID NO: 7670 - protein, 9 aa, synthetic construct
  REGION 1..9: note = Description of Artificial Sequence: Synthetic peptide
REFPPETRA

SEQ ID NO: 7671 - protein, 9 aa, synthetic construct
  REGION 1..9: note = Description of Artificial Sequence: Synthetic peptide
LEKEPIAGA

SEQ ID NO: 7672 - protein, 9 aa, synthetic construct
  REGION 1..9: note = Description of Artificial Sequence: Synthetic peptide
LEKEPIAEA

SEQ ID NO: 7673 - protein, 10 aa, synthetic construct
  REGION 1..10: note = Description of Artificial Sequence: Synthetic peptide
NEIIGNIRQA

SEQ ID NO: 7674 - protein, 9 aa, synthetic construct
  REGION 1..9: note = Description of Artificial Sequence: Synthetic peptide
IEIKDTKEA

SEQ ID NO: 7675 - protein, 9 aa, synthetic construct
  REGION 1..9: note = Description of Artificial Sequence: Synthetic peptide
SEFNLPPIV

SEQ ID NO: 7676 - protein, 9 aa, synthetic construct
  REGION 1..9: note = Description of Artificial Sequence: Synthetic peptide
KTIEFQPPA

SEQ ID NO: 7677 - protein, 9 aa, synthetic construct
  REGION 1..9: note = Description of Artificial Sequence: Synthetic peptide
TETLLVQNA

SEQ ID NO: 7678 - protein, 9 aa, synthetic construct
  REGION 1..9: note = Description of Artificial Sequence: Synthetic peptide
TENSIITIP

SEQ ID NO: 7679 - protein, 9 aa, synthetic construct
  REGION 1..9: note = Description of Artificial Sequence: Synthetic peptide
EEVGFPVRP

SEQ ID NO: 7680 - protein, 8 aa, synthetic construct
  REGION 1..8: note = Description of Artificial Sequence: Synthetic peptide
RDFILVAA

SEQ ID NO: 7681 - protein, 9 aa, synthetic construct
  REGION 1..9: note = Description of Artificial Sequence: Synthetic peptide
NEFNIPPVV

SEQ ID NO: 7682 - protein, 10 aa, synthetic construct
  REGION 1..10: note = Description of Artificial Sequence: Synthetic peptide
SEVHIPLGEA

SEQ ID NO: 7683 - protein, 10 aa, synthetic construct
  REGION 1..10: note = Description of Artificial Sequence: Synthetic peptide
VEVKPLGVAP

SEQ ID NO: 7684 - protein, 9 aa, synthetic construct
  REGION 1..9: note = Description of Artificial Sequence: Synthetic peptide
QEFGIPYNP

SEQ ID NO: 7685 - protein, 10 aa, synthetic construct
  REGION 1..10: note = Description of Artificial Sequence: Synthetic peptide
VEIKPLGVAP

SEQ ID NO: 7686 - protein, 10 aa, synthetic construct
  REGION 1..10: note = Description of Artificial Sequence: Synthetic peptide
SDFNLPPVVA

SEQ ID NO: 7687 - protein, 9 aa, synthetic construct
  REGION 1..9: note = Description of Artificial Sequence: Synthetic peptide
GENNSLLHP

SEQ ID NO: 7688 - protein, 9 aa, synthetic construct
  REGION 1..9: note = Description of Artificial Sequence: Synthetic peptide
AEGEIIIRS

SEQ ID NO: 7689 - protein, 9 aa, synthetic construct
  REGION 1..9: note = Description of Artificial Sequence: Synthetic peptide
AELQAIQLA

SEQ ID NO: 7690 - protein, 9 aa, synthetic construct
  REGION 1..9: note = Description of Artificial Sequence: Synthetic peptide
TEAVQKIAL

SEQ ID NO: 7691 - protein, 9 aa, synthetic construct
  REGION 1..9: note = Description of Artificial Sequence: Synthetic peptide
AELLGRSSL

SEQ ID NO: 7692 - protein, 9 aa, synthetic construct
  REGION 1..9: note = Description of Artificial Sequence: Synthetic peptide
MEDEHREVL

SEQ ID NO: 7693 - protein, 9 aa, synthetic construct
  REGION 1..9: note = Description of Artificial Sequence: Synthetic peptide
TERVGNPVF

SEQ ID NO: 7694 - protein, 8 aa, synthetic construct
  REGION 1..8: note = Description of Artificial Sequence: Synthetic peptide
SDIQTKEL

SEQ ID NO: 7695 - protein, 8 aa, synthetic construct
  REGION 1..8: note = Description of Artificial Sequence: Synthetic peptide
TDIQTKEL

SEQ ID NO: 7696 - protein, 9 aa, synthetic construct
  REGION 1..9: note = Description of Artificial Sequence: Synthetic peptide
MEDSHREVL

SEQ ID NO: 7697 - protein, 8 aa, synthetic construct
  REGION 1..8: note = Description of Artificial Sequence: Synthetic peptide
AELQAIQL

SEQ ID NO: 7698 - protein, 8 aa, synthetic construct
  REGION 1..8: note = Description of Artificial Sequence: Synthetic peptide
IEAQQHML

SEQ ID NO: 7699 - protein, 9 aa, synthetic construct
  REGION 1..9: note = Description of Artificial Sequence: Synthetic peptide
SERILSTCL

SEQ ID NO: 7700 - protein, 8 aa, synthetic construct
  REGION 1..8: note = Description of Artificial Sequence: Synthetic peptide
AEHLKTAV

SEQ ID NO: 7701 - protein, 9 aa, synthetic construct
  REGION 1..9: note = Description of Artificial Sequence: Synthetic peptide
MEDEDREVL

SEQ ID NO: 7702 - protein, 9 aa, synthetic construct
  REGION 1..9: note = Description of Artificial Sequence: Synthetic peptide
VELLGRSSL

SEQ ID NO: 7703 - protein, 9 aa, synthetic construct
  REGION 1..9: note = Description of Artificial Sequence: Synthetic peptide
AESAIRKAI

SEQ ID NO: 7704 - protein, 9 aa, synthetic construct
  REGION 1..9: note = Description of Artificial Sequence: Synthetic peptide
AEHFPNKAI

SEQ ID NO: 7705 - protein, 9 aa, synthetic construct
  REGION 1..9: note = Description of Artificial Sequence: Synthetic peptide
TETNKTETF

SEQ ID NO: 7706 - protein, 10 aa, synthetic construct
  REGION 1..10: note = Description of Artificial Sequence: Synthetic peptide
SETTNQKAEL

SEQ ID NO: 7707 - protein, 9 aa, synthetic construct
  REGION 1..9: note = Description of Artificial Sequence: Synthetic peptide
AEGETIIRF

SEQ ID NO: 7708 - protein, 10 aa, synthetic construct
  REGION 1..10: note = Description of Artificial Sequence: Synthetic peptide
TETTNQKTEL

SEQ ID NO: 7709 - protein, 9 aa, synthetic construct
  REGION 1..9: note = Description of Artificial Sequence: Synthetic peptide
QELKDREAL

SEQ ID NO: 7710 - protein, 8 aa, synthetic construct
  REGION 1..8: note = Description of Artificial Sequence: Synthetic peptide
TELQAIQL

SEQ ID NO: 7711 - protein, 8 aa, synthetic construct
  REGION 1..8: note = Description of Artificial Sequence: Synthetic peptide
KELPLTSL

SEQ ID NO: 7712 - protein, 8 aa, synthetic construct
  REGION 1..8: note = Description of Artificial Sequence: Synthetic peptide
TDLQTKEL

SEQ ID NO: 7713 - protein, 8 aa, synthetic construct
  REGION 1..8: note = Description of Artificial Sequence: Synthetic peptide
IEAQQHLL

SEQ ID NO: 7714 - protein, 9 aa, synthetic construct
  REGION 1..9: note = Description of Artificial Sequence: Synthetic peptide
QEKNEQDLL

SEQ ID NO: 7715 - protein, 9 aa, synthetic construct
  REGION 1..9: note = Description of Artificial Sequence: Synthetic peptide
LEKEPIAGV

SEQ ID NO: 7716 - protein, 9 aa, synthetic construct
  REGION 1..9: note = Description of Artificial Sequence: Synthetic peptide
AEHFPNKTI

SEQ ID NO: 7717 - protein, 9 aa, synthetic construct
  REGION 1..9: note = Description of Artificial Sequence: Synthetic peptide
KDREPLTSL

SEQ ID NO: 7718 - protein, 10 aa, synthetic construct
  REGION 1..10: note = Description of Artificial Sequence: Synthetic peptide
GEIIIRSENL

SEQ ID NO: 7719 - protein, 9 aa, synthetic construct
  REGION 1..9: note = Description of Artificial Sequence: Synthetic peptide
KEKGGLEGL

SEQ ID NO: 7720 - protein, 8 aa, synthetic construct
  REGION 1..8: note = Description of Artificial Sequence: Synthetic peptide
TELQAICL

SEQ ID NO: 7721 - protein, 9 aa, synthetic construct
  REGION 1..9: note = Description of Artificial Sequence: Synthetic peptide
GEQDRDRSI

SEQ ID NO: 7722 - protein, 9 aa, synthetic construct
  REGION 1..9: note = Description of Artificial Sequence: Synthetic peptide
AERQGTFNF

SEQ ID NO: 7723 - protein, 9 aa, synthetic construct
  REGION 1..9: note = Description of Artificial Sequence: Synthetic peptide
SERILSTCV

SEQ ID NO: 7724 - protein, 10 aa, synthetic construct
  REGION 1..10: note = Description of Artificial Sequence: Synthetic peptide
AEHLKTAVQM

SEQ ID NO: 7725 - protein, 9 aa, synthetic construct
  REGION 1..9: note = Description of Artificial Sequence: Synthetic peptide
KDREALTSL

SEQ ID NO: 7726 - protein, 8 aa, synthetic construct
  REGION 1..8: note = Description of Artificial Sequence: Synthetic peptide
TERQANFL

SEQ ID NO: 7727 - protein, 8 aa, synthetic construct
  REGION 1..8: note = Description of Artificial Sequence: Synthetic peptide
SEEKIKAL

SEQ ID NO: 7728 - protein, 9 aa, synthetic construct
  REGION 1..9: note = Description of Artificial Sequence: Synthetic peptide
QEKNEKDLL

SEQ ID NO: 7729 - protein, 10 aa, synthetic construct
  REGION 1..10: note = Description of Artificial Sequence: Synthetic peptide
IEIKDTKEAL

SEQ ID NO: 7730 - protein, 10 aa, synthetic construct
  REGION 1..10: note = Description of Artificial Sequence: Synthetic peptide
AEGTDRILEL

SEQ ID NO: 7731 - protein, 8 aa, synthetic construct
  REGION 1..8: note = Description of Artificial Sequence: Synthetic peptide
TDRLIEGL

SEQ ID NO: 7732 - protein, 8 aa, synthetic construct
  REGION 1..8: note = Description of Artificial Sequence: Synthetic peptide
SERILSTF

SEQ ID NO: 7733 - protein, 9 aa, synthetic construct
  REGION 1..9: note = Description of Artificial Sequence: Synthetic peptide
SEFNLPPIV

SEQ ID NO: 7734 - protein, 11 aa, synthetic construct
  REGION 1..11: note = Description of Artificial Sequence: Synthetic peptide
SEAGAERQGSL

SEQ ID NO: 7735 - protein, 8 aa, synthetic construct
  REGION 1..8: note = Description of Artificial Sequence: Synthetic peptide
VEALIRTL

SEQ ID NO: 7736 - protein, 9 aa, synthetic construct
  REGION 1..9: note = Description of Artificial Sequence: Synthetic peptide
AERQGSLNF

SEQ ID NO: 7737 - protein, 9 aa, synthetic construct
  REGION 1..9: note = Description of Artificial Sequence: Synthetic peptide
MEDDHNEVL

SEQ ID NO: 7738 - protein, 10 aa, synthetic construct
  REGION 1..10: note = Description of Artificial Sequence: Synthetic peptide
IDKELPLTSL

SEQ ID NO: 7739 - protein, 11 aa, synthetic construct
  REGION 1..11: note = Description of Artificial Sequence: Synthetic peptide
EEATPSPKQEL

SEQ ID NO: 7740 - protein, 10 aa, synthetic construct
  REGION 1..10: note = Description of Artificial Sequence: Synthetic peptide
AESAIRKAIL

SEQ ID NO: 7741 - protein, 9 aa, synthetic construct
  REGION 1..9: note = Description of Artificial Sequence: Synthetic peptide
ANSPTRREL

SEQ ID NO: 7742 - protein, 9 aa, synthetic construct
  REGION 1..9: note = Description of Artificial Sequence: Synthetic peptide
GEQDKDRSI

SEQ ID NO: 7743 - protein, 9 aa, synthetic construct
  REGION 1..9: note = Description of Artificial Sequence: Synthetic peptide
AEGETIIRF

SEQ ID NO: 7744 - protein, 11 aa, synthetic construct
  REGION 1..11: note = Description of Artificial Sequence: Synthetic peptide
AEQATQDVKNW

SEQ ID NO: 7745 - protein, 11 aa, synthetic construct
  REGION 1..11: note = Description of Artificial Sequence: Synthetic peptide
AEQATQEVKNW

SEQ ID NO: 7746 - protein, 11 aa, synthetic construct
  REGION 1..11: note = Description of Artificial Sequence: Synthetic peptide
SEANIVTDSQY

SEQ ID NO: 7747 - protein, 11 aa, synthetic construct
  REGION 1..11: note = Description of Artificial Sequence: Synthetic peptide
AEIQKQGQNQW

SEQ ID NO: 7748 - protein, 9 aa, synthetic construct
  REGION 1..9: note = Description of Artificial Sequence: Synthetic peptide
TETNKTETF

SEQ ID NO: 7749 - protein, 9 aa, synthetic construct
  REGION 1..9: note = Description of Artificial Sequence: Synthetic peptide
EEINLPGKW

SEQ ID NO: 7750 - protein, 11 aa, synthetic construct
  REGION 1..11: note = Description of Artificial Sequence: Synthetic peptide
SEVNIVTDSQY

SEQ ID NO: 7751 - protein, 9 aa, synthetic construct
  REGION 1..9: note = Description of Artificial Sequence: Synthetic peptide
AESAIRKAI

SEQ ID NO: 7752 - protein, 11 aa, synthetic construct
  REGION 1..11: note = Description of Artificial Sequence: Synthetic peptide
AEIQKQGQDQW

SEQ ID NO: 7753 - protein, 11 aa, synthetic construct
  REGION 1..11: note = Description of Artificial Sequence: Synthetic peptide
AEIQKQGNDQW

SEQ ID NO: 7754 - protein, 9 aa, synthetic construct
  REGION 1..9: note = Description of Artificial Sequence: Synthetic peptide
EEVSLPGKW

SEQ ID NO: 7755 - protein, 9 aa, synthetic construct
  REGION 1..9: note = Description of Artificial Sequence: Synthetic peptide
AEHFPNKAI

SEQ ID NO: 7756 - protein, 10 aa, synthetic construct
  REGION 1..10: note = Description of Artificial Sequence: Synthetic peptide
GEARLIIKTY

SEQ ID NO: 7757 - protein, 11 aa, synthetic construct
  REGION 1..11: note = Description of Artificial Sequence: Synthetic peptide
NEQDLLALDKW

SEQ ID NO: 7758 - protein, 9 aa, synthetic construct
  REGION 1..9: note = Description of Artificial Sequence: Synthetic peptide
EENSWVTVY

SEQ ID NO: 7759 - protein, 10 aa, synthetic construct
  REGION 1..10: note = Description of Artificial Sequence: Synthetic peptide
GEARLVITTY

SEQ ID NO: 7760 - protein, 9 aa, synthetic construct
  REGION 1..9: note = Description of Artificial Sequence: Synthetic peptide
SESEIVNQI

SEQ ID NO: 7761 - protein, 10 aa, synthetic construct
  REGION 1..10: note = Description of Artificial Sequence: Synthetic peptide
NETPGIRYQY

SEQ ID NO: 7762 - protein, 9 aa, synthetic construct
  REGION 1..9: note = Description of Artificial Sequence: Synthetic peptide
EEIWDNMTW

SEQ ID NO: 7763 - protein, 9 aa, synthetic construct
  REGION 1..9: note = Description of Artificial Sequence: Synthetic peptide
AELLGRSSL

SEQ ID NO: 7764 - protein, 10 aa, synthetic construct
  REGION 1..10: note = Description of Artificial Sequence: Synthetic peptide
GEARLVIKTY

SEQ ID NO: 7765 - protein, 9 aa, synthetic construct
  REGION 1..9: note = Description of Artificial Sequence: Synthetic peptide
AETGQETAY

SEQ ID NO: 7766 - protein, 9 aa, synthetic construct
  REGION 1..9: note = Description of Artificial Sequence: Synthetic peptide
AEHFPNKTI

SEQ ID NO: 7767 - protein, 10 aa, synthetic construct
  REGION 1..10: note = Description of Artificial Sequence: Synthetic peptide
QENDSNSSGY

SEQ ID NO: 7768 - protein, 11 aa, synthetic construct
  REGION 1..11: note = Description of Artificial Sequence: Synthetic peptide
NEKDLLALDSW

SEQ ID NO: 7769 - protein, 11 aa, synthetic construct
  REGION 1..11: note = Description of Artificial Sequence: Synthetic peptide
SEAGAERQGTF

SEQ ID NO: 7770 - protein, 9 aa, synthetic construct
  REGION 1..9: note = Description of Artificial Sequence: Synthetic peptide
AERQGTFNF

SEQ ID NO: 7771 - protein, 9 aa, synthetic construct
  REGION 1..9: note = Description of Artificial Sequence: Synthetic peptide
EEIKLPGNW

SEQ ID NO: 7772 - protein, 10 aa, synthetic construct
  REGION 1..10: note = Description of Artificial Sequence: Synthetic peptide
QEDIWNNMTW

SEQ ID NO: 7773 - protein, 9 aa, synthetic construct
  REGION 1..9: note = Description of Artificial Sequence: Synthetic peptide
AEGETIIRF

SEQ ID NO: 7774 - protein, 11 aa, synthetic construct
  REGION 1..11: note = Description of Artificial Sequence: Synthetic peptide
SEVNIVTDSQY

SEQ ID NO: 7775 - protein, 11 aa, synthetic construct
  REGION 1..11: note = Description of Artificial Sequence: Synthetic peptide
SEANIVTDSQY

SEQ ID NO: 7776 - protein, 11 aa, synthetic construct
  REGION 1..11: note = Description of Artificial Sequence: Synthetic peptide
AEQATQDVKNW

SEQ ID NO: 7777 - protein, 11 aa, synthetic construct
  REGION 1..11: note = Description of Artificial Sequence: Synthetic peptide
AEIQKQGQNQW

SEQ ID NO: 7778 - protein, 9 aa, synthetic construct
  REGION 1..9: note = Description of Artificial Sequence: Synthetic peptide
EEINLPGKW

SEQ ID NO: 7779 - protein, 11 aa, synthetic construct
  REGION 1..11: note = Description of Artificial Sequence: Synthetic peptide
AEQATQEVKNW

SEQ ID NO: 7780 - protein, 9 aa, synthetic construct
  REGION 1..9: note = Description of Artificial Sequence: Synthetic peptide
TETNKTETF

SEQ ID NO: 7781 - protein, 9 aa, synthetic construct
  REGION 1..9: note = Description of Artificial Sequence: Synthetic peptide
EEVSLPGKW

SEQ ID NO: 7782 - protein, 11 aa, synthetic construct
  REGION 1..11: note = Description of Artificial Sequence: Synthetic peptide
AEIQKQGQDQW

SEQ ID NO: 7783 - protein, 11 aa, synthetic construct
  REGION 1..11: note = Description of Artificial Sequence: Synthetic peptide
AEIQKQGNDQW

SEQ ID NO: 7784 - protein, 9 aa, synthetic construct
  REGION 1..9: note = Description of Artificial Sequence: Synthetic peptide
AESAIRKAI

SEQ ID NO: 7785 - protein, 10 aa, synthetic construct
  REGION 1..10: note = Description of Artificial Sequence: Synthetic peptide
GEARLIIKTY

SEQ ID NO: 7786 - protein, 9 aa, synthetic construct
  REGION 1..9: note = Description of Artificial Sequence: Synthetic peptide
SESEIVNQI

SEQ ID NO: 7787 - protein, 9 aa, synthetic construct
  REGION 1..9: note = Description of Artificial Sequence: Synthetic peptide
AEHFPNKAI

SEQ ID NO: 7788 - protein, 10 aa, synthetic construct
  REGION 1..10: note = Description of Artificial Sequence: Synthetic peptide
GEARLVITTY

SEQ ID NO: 7789 - protein, 10 aa, synthetic construct
  REGION 1..10: note = Description of Artificial Sequence: Synthetic peptide
GEARLVIKTY

SEQ ID NO: 7790 - protein, 10 aa, synthetic construct
  REGION 1..10: note = Description of Artificial Sequence: Synthetic peptide
NETPGIRYQY

SEQ ID NO: 7791 - protein, 9 aa, synthetic construct
  REGION 1..9: note = Description of Artificial Sequence: Synthetic peptide
AEHFPNKTI

SEQ ID NO: 7792 - protein, 9 aa, synthetic construct
  REGION 1..9: note = Description of Artificial Sequence: Synthetic peptide
EEIKLPGNW

SEQ ID NO: 7793 - protein, 10 aa, synthetic construct
  REGION 1..10: note = Description of Artificial Sequence: Synthetic peptide
GEARLVIITY

SEQ ID NO: 7794 - protein, 11 aa, synthetic construct
  REGION 1..11: note = Description of Artificial Sequence: Synthetic peptide
NEQDLLALDKW

SEQ ID NO: 7795 - protein, 9 aa, synthetic construct
  REGION 1..9: note = Description of Artificial Sequence: Synthetic peptide
SESELVNQI

SEQ ID NO: 7796 - protein, 9 aa, synthetic construct
  REGION 1..9: note = Description of Artificial Sequence: Synthetic peptide
EENSWVTVY

SEQ ID NO: 7797 - protein, 9 aa, synthetic construct
  REGION 1..9: note = Description of Artificial Sequence: Synthetic peptide
AELLGRSSL

SEQ ID NO: 7798 - protein, 11 aa, synthetic construct
  REGION 1..11: note = Description of Artificial Sequence: Synthetic peptide
SEAGAERQGTF

SEQ ID NO: 7799 - protein, 11 aa, synthetic construct
  REGION 1..11: note = Description of Artificial Sequence: Synthetic peptide
KEDDGKVSQNY

SEQ ID NO: 7800 - protein, 10 aa, synthetic construct
  REGION 1..10: note = Description of Artificial Sequence: Synthetic peptide
RETKIGKAGY

SEQ ID NO: 7801 - protein, 9 aa, synthetic construct
  REGION 1..9: note = Description of Artificial Sequence: Synthetic peptide
AETGQETAY

SEQ ID NO: 7802 - protein, 11 aa, synthetic construct
  REGION 1..11: note = Description of Artificial Sequence: Synthetic peptide
EEATPSPKQEL

SEQ ID NO: 7803 - protein, 10 aa, synthetic construct
  REGION 1..10: note = Description of Artificial Sequence: Synthetic peptide
AETGQETAYY

SEQ ID NO: 7804 - protein, 9 aa, synthetic construct
  REGION 1..9: note = Description of Artificial Sequence: Synthetic peptide
EEIWDNMTW

SEQ ID NO: 7805 - protein, 9 aa, synthetic construct
  REGION 1..9: note = Description of Artificial Sequence: Synthetic peptide
EEMEQEGKI

SEQ ID NO: 7806 - protein, 10 aa, synthetic construct
  REGION 1..10: note = Description of Artificial Sequence: Synthetic peptide
EEHEKYHSNW

SEQ ID NO: 7807 - protein, 9 aa, synthetic construct
  REGION 1..9: note = Description of Artificial Sequence: Synthetic peptide
EEMEKEGKI

SEQ ID NO: 7808 - protein, 9 aa, synthetic construct
  REGION 1..9: note = Description of Artificial Sequence: Synthetic peptide
DEDREVLKW

SEQ ID NO: 7809 - protein, 9 aa, synthetic construct
  REGION 1..9: note = Description of Artificial Sequence: Synthetic peptide
DEHREVLKW

SEQ ID NO: 7810 - protein, 10 aa, synthetic construct
  REGION 1..10: note = Description of Artificial Sequence: Synthetic peptide
QEDIWNNMTW

SEQ ID NO: 7811 - protein, 10 aa, synthetic construct
  REGION 1..10: note = Description of Artificial Sequence: Synthetic peptide
EEHEKYHNNW

SEQ ID NO: 7812 - protein, 11 aa, synthetic construct
  REGION 1..11: note = Description of Artificial Sequence: Synthetic peptide
NEKDLLALDSW

SEQ ID NO: 7813 - protein, 11 aa, synthetic construct
  REGION 1..11: note = Description of Artificial Sequence: Synthetic peptide
GEARLVITTYW

SEQ ID NO: 7814 - protein, 9 aa, synthetic construct
  REGION 1..9: note = Description of Artificial Sequence: Synthetic peptide
TERVGNPVF

SEQ ID NO: 7815 - protein, 9 aa, synthetic construct
  REGION 1..9: note = Description of Artificial Sequence: Synthetic peptide
AERQGSLNF

SEQ ID NO: 7816 - protein, 11 aa, synthetic construct
  REGION 1..11: note = Description of Artificial Sequence: Synthetic peptide
MEDEDREVLKW

SEQ ID NO: 7817 - protein, 10 aa, synthetic construct
  REGION 1..10: note = Description of Artificial Sequence: Synthetic peptide
AETGQETAYF

SEQ ID NO: 7818 - protein, 9 aa, synthetic construct
  REGION 1..9: note = Description of Artificial Sequence: Synthetic peptide
YEKEVHNVW

SEQ ID NO: 7819 - protein, 8 aa, synthetic construct
  REGION 1..8: note = Description of Artificial Sequence: Synthetic peptide
NETPGIRY

SEQ ID NO: 7820 - protein, 9 aa, synthetic construct
  REGION 1..9: note = Description of Artificial Sequence: Synthetic peptide
AERQGTFNF

SEQ ID NO: 7821 - protein, 9 aa, synthetic construct
  REGION 1..9: note = Description of Artificial Sequence: Synthetic peptide
YDTEVHNVW

SEQ ID NO: 7822 - protein, 10 aa, synthetic construct
  REGION 1..10: note = Description of Artificial Sequence: Synthetic peptide
QENDSNSSGY

SEQ ID NO: 7823 - protein, 11 aa, synthetic construct
  REGION 1..11: note = Description of Artificial Sequence: Synthetic peptide
GEARLVIITYW

SEQ ID NO: 7824 - protein, 11 aa, synthetic construct
  REGION 1..11: note = Description of Artificial Sequence: Synthetic peptide
AEHFPNKAIKF

SEQ ID NO: 7825 - protein, 9 aa, synthetic construct
  REGION 1..9: note = Description of Artificial Sequence: Synthetic peptide
REFPSEQTR

SEQ ID NO: 7826 - protein, 9 aa, synthetic construct
  REGION 1..9: note = Description of Artificial Sequence: Synthetic peptide
YDAEVHNVW

SEQ ID NO: 7827 - protein, 9 aa, synthetic construct
  REGION 1..9: note = Description of Artificial Sequence: Synthetic peptide
AEGETIIRF

SEQ ID NO: 7828 - protein, 11 aa, synthetic construct
  REGION 1..11: note = Description of Artificial Sequence: Synthetic peptide
AEIQKQGQNQW

SEQ ID NO: 7829 - protein, 9 aa, synthetic construct
  REGION 1..9: note = Description of Artificial Sequence: Synthetic peptide
TETNKTETF

SEQ ID NO: 7830 - protein, 11 aa, synthetic construct
  REGION 1..11: note = Description of Artificial Sequence: Synthetic peptide
AEIQKQGNDQW

SEQ ID NO: 7831 - protein, 11 aa, synthetic construct
  REGION 1..11: note = Description of Artificial Sequence: Synthetic peptide
AEIQKQGQDQW

SEQ ID NO: 7832 - protein, 11 aa, synthetic construct
  REGION 1..11: note = Description of Artificial Sequence: Synthetic peptide
EEATPSPKQEL

SEQ ID NO: 7833 - protein, 10 aa, synthetic construct
  REGION 1..10: note = Description of Artificial Sequence: Synthetic peptide
SETTNQKAEL

SEQ ID NO: 7834 - protein, 9 aa, synthetic construct
  REGION 1..9: note = Description of Artificial Sequence: Synthetic peptide
TEAVQKIAL

SEQ ID NO: 7835 - protein, 11 aa, synthetic construct
  REGION 1..11: note = Description of Artificial Sequence: Synthetic peptide
SEAGAERQGTF

SEQ ID NO: 7836 - protein, 11 aa, synthetic construct
  REGION 1..11: note = Description of Artificial Sequence: Synthetic peptide
AEQATQEVKNW

SEQ ID NO: 7837 - protein, 9 aa, synthetic construct
  REGION 1..9: note = Description of Artificial Sequence: Synthetic peptide
AELLGRSSL

SEQ ID NO: 7838 - protein, 11 aa, synthetic construct
  REGION 1..11: note = Description of Artificial Sequence: Synthetic peptide
AEQATQDVKNW

SEQ ID NO: 7839 - protein, 9 aa, synthetic construct
  REGION 1..9: note = Description of Artificial Sequence: Synthetic peptide
TERVGNPVF

SEQ ID NO: 7840 - protein, 11 aa, synthetic construct
  REGION 1..11: note = Description of Artificial Sequence: Synthetic peptide
SEVNIVTDSQY

SEQ ID NO: 7841 - protein, 10 aa, synthetic construct
  REGION 1..10: note = Description of Artificial Sequence: Synthetic peptide
AETGQETAYF

SEQ ID NO: 7842 - protein, 10 aa, synthetic construct
  REGION 1..10: note = Description of Artificial Sequence: Synthetic peptide
REINNYTNTI

SEQ ID NO: 7843 - protein, 9 aa, synthetic construct
  REGION 1..9: note = Description of Artificial Sequence: Synthetic peptide
EEINLPGKW

SEQ ID NO: 7844 - protein, 10 aa, synthetic construct
  REGION 1..10: note = Description of Artificial Sequence: Synthetic peptide
TETTNQKTEL

SEQ ID NO: 7845 - protein, 11 aa, synthetic construct
  REGION 1..11: note = Description of Artificial Sequence: Synthetic peptide
SEANIVTDSQY

SEQ ID NO: 7846 - protein, 9 aa, synthetic construct
  REGION 1..9: note = Description of Artificial Sequence: Synthetic peptide
SESEIVNQI

SEQ ID NO: 7847 - protein, 11 aa, synthetic construct
  REGION 1..11: note = Description of Artificial Sequence: Synthetic peptide
SEIVNQIIEQL

SEQ ID NO: 7848 - protein, 9 aa, synthetic construct
  REGION 1..9: note = Description of Artificial Sequence: Synthetic peptide
EEMEQEGKI

SEQ ID NO: 7849 - protein, 11 aa, synthetic construct
  REGION 1..11: note = Description of Artificial Sequence: Synthetic peptide
EEINEGENNCL

SEQ ID NO: 7850 - protein, 10 aa, synthetic construct
  REGION 1..10: note = Description of Artificial Sequence: Synthetic peptide
GEIIIRSENL

SEQ ID NO: 7851 - protein, 10 aa, synthetic construct
  REGION 1..10: note = Description of Artificial Sequence: Synthetic peptide
REISNYTNTI

SEQ ID NO: 7852 - protein, 9 aa, synthetic construct
  REGION 1..9: note = Description of Artificial Sequence: Synthetic peptide
AEHFPNKAI

SEQ ID NO: 7853 - protein, 10 aa, synthetic construct
  REGION 1..10: note = Description of Artificial Sequence: Synthetic peptide
KEPIAGVETF

SEQ ID NO: 7854 - protein, 9 aa, synthetic construct
  REGION 1..9: note = Description of Artificial Sequence: Synthetic peptide
EEVSLPGKW

SEQ ID NO: 7855 - protein, 11 aa, synthetic construct
  REGION 1..11: note = Description of Artificial Sequence: Synthetic peptide
AELELAENREI

SEQ ID NO: 7856 - protein, 9 aa, synthetic construct
  REGION 1..9: note = Description of Artificial Sequence: Synthetic peptide
AERQGSLNF

SEQ ID NO: 7857 - protein, 11 aa, synthetic construct
  REGION 1..11: note = Description of Artificial Sequence: Synthetic peptide
SETGAERQGTF

SEQ ID NO: 7858 - protein, 9 aa, synthetic construct
  REGION 1..9: note = Description of Artificial Sequence: Synthetic peptide
TEEEEGVGF

SEQ ID NO: 7859 - protein, 10 aa, synthetic construct
  REGION 1..10: note = Description of Artificial Sequence: Synthetic peptide
AEGTDRILEL

SEQ ID NO: 7860 - protein, 11 aa, synthetic construct
  REGION 1..11: note = Description of Artificial Sequence: Synthetic peptide
EETTPAPKQEL

SEQ ID NO: 7861 - protein, 8 aa, synthetic construct
  REGION 1..8: note = Description of Artificial Sequence: Synthetic peptide
AELQAIQL

SEQ ID NO: 7862 - protein, 10 aa, synthetic construct
  REGION 1..10: note = Description of Artificial Sequence: Synthetic peptide
KEPIAGAETF

SEQ ID NO: 7863 - protein, 10 aa, synthetic construct
  REGION 1..10: note = Description of Artificial Sequence: Synthetic peptide
KEPIAEAETF

SEQ ID NO: 7864 - protein, 9 aa, synthetic construct
  REGION 1..9: note = Description of Artificial Sequence: Synthetic peptide
ADEKVSQNF

SEQ ID NO: 7865 - protein, 10 aa, synthetic construct
  REGION 1..10: note = Description of Artificial Sequence: Synthetic peptide
AEHLKTAVQM

SEQ ID NO: 7866 - protein, 9 aa, synthetic construct
  REGION 1..9: note = Description of Artificial Sequence: Synthetic peptide
AEHFPNKTI

SEQ ID NO: 7867 - protein, 9 aa, synthetic construct
  REGION 1..9: note = Description of Artificial Sequence: Synthetic peptide
SESELVNQI

SEQ ID NO: 7868 - protein, 9 aa, synthetic construct
  REGION 1..9: note = Description of Artificial Sequence: Synthetic peptide
AESAIRKAI

SEQ ID NO: 7869 - protein, 10 aa, synthetic construct
  REGION 1..10: note = Description of Artificial Sequence: Synthetic peptide
AELQAIQLAL

SEQ ID NO: 7870 - protein, 9 aa, synthetic construct
  REGION 1..9: note = Description of Artificial Sequence: Synthetic peptide
AERQGTFNF

SEQ ID NO: 7871 - protein, 9 aa, synthetic construct
  REGION 1..9: note = Description of Artificial Sequence: Synthetic peptide
EEMEKEGKI

SEQ ID NO: 7872 - protein, 9 aa, synthetic construct
  REGION 1..9: note = Description of Artificial Sequence: Synthetic peptide
MEDEHREVL

SEQ ID NO: 7873 - protein, 9 aa, synthetic construct
  REGION 1..9: note = Description of Artificial Sequence: Synthetic peptide
EEIKLPGNW

SEQ ID NO: 7874 - protein, 9 aa, synthetic construct
  REGION 1..9: note = Description of Artificial Sequence: Synthetic peptide
SEDKWNETL

SEQ ID NO: 7875 - protein, 9 aa, synthetic construct
  REGION 1..9: note = Description of Artificial Sequence: Synthetic peptide
QEEEDEVGF

SEQ ID NO: 7876 - protein, 11 aa, synthetic construct
  REGION 1..11: note = Description of Artificial Sequence: Synthetic peptide
SEAGAERQGSL

SEQ ID NO: 7877 - protein, 9 aa, synthetic construct
  REGION 1..9: note = Description of Artificial Sequence: Synthetic peptide
QEEEEEVGF

SEQ ID NO: 7878 - protein, 9 aa, synthetic construct
  REGION 1..9: note = Description of Artificial Sequence: Synthetic peptide
SEGATPQDL

SEQ ID NO: 7879 - protein, 11 aa, synthetic construct
  REGION 1..11: note = Description of Artificial Sequence: Synthetic peptide
TEPTAPPEESF

SEQ ID NO: 7880 - protein, 11 aa, synthetic construct
  REGION 1..11: note = Description of Artificial Sequence: Synthetic peptide
SELVNQIIEQL

SEQ ID NO: 7881 - protein, 10 aa, synthetic construct
  REGION 1..10: note = Description of Artificial Sequence: Synthetic peptide
MEQEGKISRI

SEQ ID NO: 7882 - protein, 10 aa, synthetic construct
  REGION 1..10: note = Description of Artificial Sequence: Synthetic peptide
EELKSLFNTI

SEQ ID NO: 7883 - protein, 11 aa, synthetic construct
  REGION 1..11: note = Description of Artificial Sequence: Synthetic peptide
EEANTGENNSL

SEQ ID NO: 7884 - protein, 10 aa, synthetic construct
  REGION 1..10: note = Description of Artificial Sequence: Synthetic peptide
SESEIVNQII

SEQ ID NO: 7885 - protein, 9 aa, synthetic construct
  REGION 1..9: note = Description of Artificial Sequence: Synthetic peptide
QEKNEQDLL

SEQ ID NO: 7886 - protein, 9 aa, synthetic construct
  REGION 1..9: note = Description of Artificial Sequence: Synthetic peptide
GEQDKDRSI

SEQ ID NO: 7887 - protein, 9 aa, synthetic construct
  REGION 1..9: note = Description of Artificial Sequence: Synthetic peptide
MEDSHREVL

SEQ ID NO: 7888 - protein, 11 aa, synthetic construct
  REGION 1..11: note = Description of Artificial Sequence: Synthetic peptide
SENLTNNVKTI

SEQ ID NO: 7889 - protein, 10 aa, synthetic construct
  REGION 1..10: note = Description of Artificial Sequence: Synthetic peptide
IEIKDTKEAL

SEQ ID NO: 7890 - protein, 11 aa, synthetic construct
  REGION 1..11: note = Description of Artificial Sequence: Synthetic peptide
NETLQNVSKKL

SEQ ID NO: 7891 - protein, 10 aa, synthetic construct
  REGION 1..10: note = Description of Artificial Sequence: Synthetic peptide
KELQNQILKI

SEQ ID NO: 7892 - protein, 10 aa, synthetic construct
  REGION 1..10: note = Description of Artificial Sequence: Synthetic peptide
AEHFPNKTII

SEQ ID NO: 7893 - protein, 10 aa, synthetic construct
  REGION 1..10: note = Description of Artificial Sequence: Synthetic peptide
AETGQETAYY

SEQ ID NO: 7894 - protein, 11 aa, synthetic construct
  REGION 1..11: note = Description of Artificial Sequence: Synthetic peptide
AEHFPNKAIKF

SEQ ID NO: 7895 - protein, 9 aa, synthetic construct
  REGION 1..9: note = Description of Artificial Sequence: Synthetic peptide
VEQMHQDII

SEQ ID NO: 7896 - protein, 8 aa, synthetic construct
  REGION 1..8: note = Description of Artificial Sequence: Synthetic peptide
TELQAIQL

SEQ ID NO: 7897 - protein, 10 aa, synthetic construct
  REGION 1..10: note = Description of Artificial Sequence: Synthetic peptide
AESAIRKAIL

SEQ ID NO: 7898 - protein, 9 aa, synthetic construct
  REGION 1..9: note = Description of Artificial Sequence: Synthetic peptide
QEKNEKDLL

SEQ ID NO: 7899 - protein, 9 aa, synthetic construct
  REGION 1..9: note = Description of Artificial Sequence: Synthetic peptide
WENDMVEQM

SEQ ID NO: 7900 - protein, 9 aa, synthetic construct
  REGION 1..9: note = Description of Artificial Sequence: Synthetic peptide
GEQDRDRSI

SEQ ID NO: 7901 - protein, 8 aa, synthetic construct
  REGION 1..8: note = Description of Artificial Sequence: Synthetic peptide
SDIQTKEL

SEQ ID NO: 7902 - protein, 11 aa, synthetic construct
  REGION 1..11: note = Description of Artificial Sequence: Synthetic peptide
AEAMSQTNSAI

SEQ ID NO: 7903 - protein, 10 aa, synthetic construct
  REGION 1..10: note = Description of Artificial Sequence: Synthetic peptide
GDLEVTTHSF

SEQ ID NO: 7904 - protein, 9 aa, synthetic construct
  REGION 1..9: note = Description of Artificial Sequence: Synthetic peptide
QAKGLGISY

SEQ ID NO: 7905 - protein, 9 aa, synthetic construct
  REGION 1..9: note = Description of Artificial Sequence: Synthetic peptide
QTKGLGISY

SEQ ID NO: 7906 - protein, 10 aa, synthetic construct
  REGION 1..10: note = Description of Artificial Sequence: Synthetic peptide
ILKEPVHGVY

SEQ ID NO: 7907 - protein, 9 aa, synthetic construct
  REGION 1..9: note = Description of Artificial Sequence: Synthetic peptide
RAVGIGAVF

SEQ ID NO: 7908 - protein, 10 aa, synthetic construct
  REGION 1..10: note = Description of Artificial Sequence: Synthetic peptide
SIRIGPGQAF

SEQ ID NO: 7909 - protein, 9 aa, synthetic construct
  REGION 1..9: note = Description of Artificial Sequence: Synthetic peptide
KAKPPLPSV

SEQ ID NO: 7910 - protein, 9 aa, synthetic construct
  REGION 1..9: note = Description of Artificial Sequence: Synthetic peptide
FLGTAGSTM

SEQ ID NO: 7911 - protein, 10 aa, synthetic construct
  REGION 1..10: note = Description of Artificial Sequence: Synthetic peptide
SLFGSDPLST

SEQ ID NO: 7912 - protein, 9 aa, synthetic construct
  REGION 1..9: note = Description of Artificial Sequence: Synthetic peptide
KALTDIVTL

SEQ ID NO: 7913 - protein, 9 aa, synthetic construct
  REGION 1..9: note = Description of Artificial Sequence: Synthetic peptide
GKKAIGTVL

SEQ ID NO: 7914 - protein, 8 aa, synthetic construct
  REGION 1..8: note = Description of Artificial Sequence: Synthetic peptide
HQAAMQML

SEQ ID NO: 7915 - protein, 9 aa, synthetic construct
  REGION 1..9: note = Description of Artificial Sequence: Synthetic peptide
HQAISPRTL

SEQ ID NO: 7916 - protein, 9 aa, synthetic construct
  REGION 1..9: note = Description of Artificial Sequence: Synthetic peptide
IKPVVSTQL

SEQ ID NO: 7917 - protein, 10 aa, synthetic construct
  REGION 1..10: note = Description of Artificial Sequence: Synthetic peptide
HQNPISKQPL

SEQ ID NO: 7918 - protein, 9 aa, synthetic construct
  REGION 1..9: note = Description of Artificial Sequence: Synthetic peptide
RAIEAQQHL

SEQ ID NO: 7919 - protein, 9 aa, synthetic construct
  REGION 1..9: note = Description of Artificial Sequence: Synthetic peptide
TKPVVSTQL

SEQ ID NO: 7920 - protein, 8 aa, synthetic construct
  REGION 1..8: note = Description of Artificial Sequence: Synthetic peptide
AKIIIVQL

SEQ ID NO: 7921 - protein, 9 aa, synthetic construct
  REGION 1..9: note = Description of Artificial Sequence: Synthetic peptide
RALGPGASL

SEQ ID NO: 7922 - protein, 8 aa, synthetic construct
  REGION 1..8: note = Description of Artificial Sequence: Synthetic peptide
GQMVHQPL

SEQ ID NO: 7923 - protein, 8 aa, synthetic construct
  REGION 1..8: note = Description of Artificial Sequence: Synthetic peptide
KQLQARVL

SEQ ID NO: 7924 - protein, 9 aa, synthetic construct
  REGION 1..9: note = Description of Artificial Sequence: Synthetic peptide
RALGPGATL

SEQ ID NO: 7925 - protein, 9 aa, synthetic construct
  REGION 1..9: note = Description of Artificial Sequence: Synthetic peptide
RAVGLGAVL

SEQ ID NO: 7926 - protein, 8 aa, synthetic construct
  REGION 1..8: note = Description of Artificial Sequence: Synthetic peptide
KKAIGTVL

SEQ ID NO: 7927 - protein, 10 aa, synthetic construct
  REGION 1..10: note = Description of Artificial Sequence: Synthetic peptide
REINNYTNTI

SEQ ID NO: 7928 - protein, 9 aa, synthetic construct
  REGION 1..9: note = Description of Artificial Sequence: Synthetic peptide
AEHFPNKTI

SEQ ID NO: 7929 - protein, 9 aa, synthetic construct
  REGION 1..9: note = Description of Artificial Sequence: Synthetic peptide
SESEIVNQI

SEQ ID NO: 7930 - protein, 9 aa, synthetic construct
  REGION 1..9: note = Description of Artificial Sequence: Synthetic peptide
AEHFPNKAI

SEQ ID NO: 7931 - protein, 9 aa, synthetic construct
  REGION 1..9: note = Description of Artificial Sequence: Synthetic peptide
SESELVNQI

SEQ ID NO: 7932 - protein, 10 aa, synthetic construct
  REGION 1..10: note = Description of Artificial Sequence: Synthetic peptide
REISNYTNTI

SEQ ID NO: 7933 - protein, 9 aa, synthetic construct
  REGION 1..9: note = Description of Artificial Sequence: Synthetic peptide
SEFNLPPIV

SEQ ID NO: 7934 - protein, 9 aa, synthetic construct
  REGION 1..9: note = Description of Artificial Sequence: Synthetic peptide
GEENSWVTV

SEQ ID NO: 7935 - protein, 9 aa, synthetic construct
  REGION 1..9: note = Description of Artificial Sequence: Synthetic peptide
NEFNIPPVV

SEQ ID NO: 7936 - protein, 8 aa, synthetic construct
  REGION 1..8: note = Description of Artificial Sequence: Synthetic peptide
VEIKPLGV

SEQ ID NO: 7937 - protein, 8 aa, synthetic construct
  REGION 1..8: note = Description of Artificial Sequence: Synthetic peptide
VEVKPLGV

SEQ ID NO: 7938 - protein, 8 aa, synthetic construct
  REGION 1..8: note = Description of Artificial Sequence: Synthetic peptide
VEIKPLGI

SEQ ID NO: 7939 - protein, 9 aa, synthetic construct
  REGION 1..9: note = Description of Artificial Sequence: Synthetic peptide
LEKEPIAGV

SEQ ID NO: 7940 - protein, 10 aa, synthetic construct
  REGION 1..10: note = Description of Artificial Sequence: Synthetic peptide
AEHFPNKTII

SEQ ID NO: 7941 - protein, 9 aa, synthetic construct
  REGION 1..9: note = Description of Artificial Sequence: Synthetic peptide
REISNYTDI

SEQ ID NO: 7942 - protein, 10 aa, synthetic construct
  REGION 1..10: note = Description of Artificial Sequence: Synthetic peptide
EELKSLFNTV

SEQ ID NO: 7943 - protein, 9 aa, synthetic construct
  REGION 1..9: note = Description of Artificial Sequence: Synthetic peptide
REINNYTDI

SEQ ID NO: 7944 - protein, 8 aa, synthetic construct
  REGION 1..8: note = Description of Artificial Sequence: Synthetic peptide
TENSIITI

SEQ ID NO: 7945 - protein, 8 aa, synthetic construct
  REGION 1..8: note = Description of Artificial Sequence: Synthetic peptide
GEAIHGQV

SEQ ID NO: 7946 - protein, 10 aa, synthetic construct
  REGION 1..10: note = Description of Artificial Sequence: Synthetic peptide
EELKSLFNTI

SEQ ID NO: 7947 - protein, 10 aa, synthetic construct
  REGION 1..10: note = Description of Artificial Sequence: Synthetic peptide
GEIIGDIRQA

SEQ ID NO: 7948 - protein, 9 aa, synthetic construct
  REGION 1..9: note = Description of Artificial Sequence: Synthetic peptide
AESAIRKAI

SEQ ID NO: 7949 - protein, 8 aa, synthetic construct
  REGION 1..8: note = Description of Artificial Sequence: Synthetic peptide
QEIVMENV

SEQ ID NO: 7950 - protein, 8 aa, synthetic construct
  REGION 1..8: note = Description of Artificial Sequence: Synthetic peptide
SEIVNQII

SEQ ID NO: 7951 - protein, 8 aa, synthetic construct
  REGION 1..8: note = Description of Artificial Sequence: Synthetic peptide
IEEEQNKI

SEQ ID NO: 7952 - protein, 11 aa, synthetic construct
  REGION 1..11: note = Description of Artificial Sequence: Synthetic peptide
AELELAENREI

SEQ ID NO: 7953 - protein, 8 aa, synthetic construct
  REGION 1..8: note = Description of Artificial Sequence: Synthetic peptide
AEAETFYV

SEQ ID NO: 7954 - protein, 9 aa, synthetic construct
  REGION 1..9: note = Description of Artificial Sequence: Synthetic peptide
TEAVQKIAL

SEQ ID NO: 7955 - protein, 10 aa, synthetic construct
  REGION 1..10: note = Description of Artificial Sequence: Synthetic peptide
EELRSLFNTV

SEQ ID NO: 7956 - protein, 8 aa, synthetic construct
  REGION 1..8: note = Description of Artificial Sequence: Synthetic peptide
YEEIPIEI

SEQ ID NO: 7957 - protein, 8 aa, synthetic construct
  REGION 1..8: note = Description of Artificial Sequence: Synthetic peptide
DEALLQAV

SEQ ID NO: 7958 - protein, 9 aa, synthetic construct
  REGION 1..9: note = Description of Artificial Sequence: Synthetic peptide
EEMEQEGKI

SEQ ID NO: 7959 - protein, 8 aa, synthetic construct
  REGION 1..8: note = Description of Artificial Sequence: Synthetic peptide
YEKEVHNV

SEQ ID NO: 7960 - protein, 10 aa, synthetic construct
  REGION 1..10: note = Description of Artificial Sequence: Synthetic peptide
KELQKQITKV

SEQ ID NO: 7961 - protein, 8 aa, synthetic construct
  REGION 1..8: note = Description of Artificial Sequence: Synthetic peptide
SEFNLPPI

SEQ ID NO: 7962 - protein, 9 aa, synthetic construct
  REGION 1..9: note = Description of Artificial Sequence: Synthetic peptide
VEQMHQDII

SEQ ID NO: 7963 - protein, 8 aa, synthetic construct
  REGION 1..8: note = Description of Artificial Sequence: Synthetic peptide
IEELATMV

SEQ ID NO: 7964 - protein, 9 aa, synthetic construct
  REGION 1..9: note = Description of Artificial Sequence: Synthetic peptide
SERILSTCV

SEQ ID NO: 7965 - protein, 10 aa, synthetic construct
  REGION 1..10: note = Description of Artificial Sequence: Synthetic peptide
MEQEGKISRI

SEQ ID NO: 7966 - protein, 8 aa, synthetic construct
  REGION 1..8: note = Description of Artificial Sequence: Synthetic peptide
SENLTNNV

SEQ ID NO: 7967 - protein, 9 aa, synthetic construct
  REGION 1..9: note = Description of Artificial Sequence: Synthetic peptide
MEDDHNEVL

SEQ ID NO: 7968 - protein, 9 aa, synthetic construct
  REGION 1..9: note = Description of Artificial Sequence: Synthetic peptide
IEIKDTKEA

SEQ ID NO: 7969 - protein, 10 aa, synthetic construct
  REGION 1..10: note = Description of Artificial Sequence: Synthetic peptide
GEIIGDIRQA

SEQ ID NO: 7970 - protein, 9 aa, synthetic construct
  REGION 1..9: note = Description of Artificial Sequence: Synthetic peptide
LEKEPIAEA

SEQ ID NO: 7971 - protein, 9 aa, synthetic construct
  REGION 1..9: note = Description of Artificial Sequence: Synthetic peptide
REFPPETRA

SEQ ID NO: 7972 - protein, 9 aa, synthetic construct
  REGION 1..9: note = Description of Artificial Sequence: Synthetic peptide
VEIKPLGVA

SEQ ID NO: 7973 - protein, 9 aa, synthetic construct
  REGION 1..9: note = Description of Artificial Sequence: Synthetic peptide
LEKEPIAGA

SEQ ID NO: 7974 - protein, 10 aa, synthetic construct
  REGION 1..10: note = Description of Artificial Sequence: Synthetic peptide
REFPSEQTRA

SEQ ID NO: 7975 - protein, 9 aa, synthetic construct
  REGION 1..9: note = Description of Artificial Sequence: Synthetic peptide
VEVKPLGVA

SEQ ID NO: 7976 - protein, 9 aa, synthetic construct
  REGION 1..9: note = Description of Artificial Sequence: Synthetic peptide
IEVRDTKEA

SEQ ID NO: 7977 - protein, 9 aa, synthetic construct
  REGION 1..9: note = Description of Artificial Sequence: Synthetic peptide
LEIGQHRAP

SEQ ID NO: 7978 - protein, 10 aa, synthetic construct
  REGION 1..10: note = Description of Artificial Sequence: Synthetic peptide
SEFNLPPIVA

SEQ ID NO: 7979 - protein, 9 aa, synthetic construct
  REGION 1..9: note = Description of Artificial Sequence: Synthetic peptide
AETFYVDGA

SEQ ID NO: 7980 - protein, 10 aa, synthetic construct
  REGION 1..10: note = Description of Artificial Sequence: Synthetic peptide
REFSPEQTRA

SEQ ID NO: 7981 - protein, 10 aa, synthetic construct
  REGION 1..10: note = Description of Artificial Sequence: Synthetic peptide
SEVHIPLGEA

SEQ ID NO: 7982 - protein, 9 aa, synthetic construct
  REGION 1..9: note = Description of Artificial Sequence: Synthetic peptide
KTIEFQPPA

SEQ ID NO: 7983 - protein, 9 aa, synthetic construct
  REGION 1..9: note = Description of Artificial Sequence: Synthetic peptide
QEVGRAMYA

SEQ ID NO: 7984 - protein, 9 aa, synthetic construct
  REGION 1..9: note = Description of Artificial Sequence: Synthetic peptide
AVISIVNRV

SEQ ID NO: 7985 - protein, 9 aa, synthetic construct
  REGION 1..9: note = Description of Artificial Sequence: Synthetic peptide
VVAEGTDRL

SEQ ID NO: 7986 - protein, 9 aa, synthetic construct
  REGION 1..9: note = Description of Artificial Sequence: Synthetic peptide
ASITLTVQA

SEQ ID NO: 7987 - protein, 9 aa, synthetic construct
  REGION 1..9: note = Description of Artificial Sequence: Synthetic peptide
TETLLVQNA

SEQ ID NO: 7988 - protein, 9 aa, synthetic construct
  REGION 1..9: note = Description of Artificial Sequence: Synthetic peptide
AVFLGFLGA

SEQ ID NO: 7989 - protein, 10 aa, synthetic construct
  REGION 1..10: note = Description of Artificial Sequence: Synthetic peptide
AETFYVDGAA

SEQ ID NO: 7990 - protein, 10 aa, synthetic construct
  REGION 1..10: note = Description of Artificial Sequence: Synthetic peptide
AVNPGLLETA

SEQ ID NO: 7991 - protein, 9 aa, synthetic construct
  REGION 1..9: note = Description of Artificial Sequence: Synthetic peptide
EIIGDIRQA

SEQ ID NO: 7992 - protein, 10 aa, synthetic construct
  REGION 1..10: note = Description of Artificial Sequence: Synthetic peptide
AEAMSQTNSA

SEQ ID NO: 7993 - protein, 9 aa, synthetic construct
  REGION 1..9: note = Description of Artificial Sequence: Synthetic peptide
YEDFRKYTA

SEQ ID NO: 7994 - protein, 10 aa, synthetic construct
  REGION 1..10: note = Description of Artificial Sequence: Synthetic peptide
AERQGTFNFP

SEQ ID NO: 7995 - protein, 9 aa, synthetic construct
  REGION 1..9: note = Description of Artificial Sequence: Synthetic peptide
SEFNLPPIV

SEQ ID NO: 7996 - protein, 9 aa, synthetic construct
  REGION 1..9: note = Description of Artificial Sequence: Synthetic peptide
VEIKPLGIA

SEQ ID NO: 7997 - protein, 8 aa, synthetic construct
  REGION 1..8: note = Description of Artificial Sequence: Synthetic peptide
SEYILINC

SEQ ID NO: 7998 - protein, 10 aa, synthetic construct
  REGION 1..10: note = Description of Artificial Sequence: Synthetic peptide
AVFLGFLGAA

SEQ ID NO: 7999 - protein, 9 aa, synthetic construct
  REGION 1..9: note = Description of Artificial Sequence: Synthetic peptide
VETFYVDGA

SEQ ID NO: 8000 - protein, 10 aa, synthetic construct
  REGION 1..10: note = Description of Artificial Sequence: Synthetic peptide
VEVKPLGVAP

SEQ ID NO: 8001 - protein, 10 aa, synthetic construct
  REGION 1..10: note = Description of Artificial Sequence: Synthetic peptide
VEIKPLGVAP

SEQ ID NO: 8002 - protein, 9 aa, synthetic construct
  REGION 1..9: note = Description of Artificial Sequence: Synthetic peptide
ATLEEMMAA

SEQ ID NO: 8003 - protein, 10 aa, synthetic construct
  REGION 1..10: note = Description of Artificial Sequence: Synthetic peptide
REQAEHLKTA

SEQ ID NO: 8004 - protein, 9 aa, synthetic construct
  REGION 1..9: note = Description of Artificial Sequence: Synthetic peptide
EEVGFPVRP

SEQ ID NO: 8005 - protein, 9 aa, synthetic construct
  REGION 1..9: note = Description of Artificial Sequence: Synthetic peptide
ALFLGFLGA

SEQ ID NO: 8006 - protein, 9 aa, synthetic construct
  REGION 1..9: note = Description of Artificial Sequence: Synthetic peptide
AELQAIQLA

SEQ ID NO: 8007 - protein, 11 aa, synthetic construct
  REGION 1..11: note = Description of Artificial Sequence: Synthetic peptide
TQVEPGLADQL

SEQ ID NO: 8008 - protein, 9 aa, synthetic construct
  REGION 1..9: note = Description of Artificial Sequence: Synthetic peptide
LEKEPIAGV

SEQ ID NO: 8009 - protein, 8 aa, synthetic construct
  REGION 1..8: note = Description of Artificial Sequence: Synthetic peptide
TAFTIPSI

SEQ ID NO: 8010 - protein, 9 aa, synthetic construct
  REGION 1..9: note = Description of Artificial Sequence: Synthetic peptide
FPISPIETV

SEQ ID NO: 8011 - protein, 8 aa, synthetic construct
  REGION 1..8: note = Description of Artificial Sequence: Synthetic peptide
TALNFPQI

SEQ ID NO: 8012 - protein, 9 aa, synthetic construct
  REGION 1..9: note = Description of Artificial Sequence: Synthetic peptide
DAKAYDTEV

SEQ ID NO: 8013 - protein, 9 aa, synthetic construct
  REGION 1..9: note = Description of Artificial Sequence: Synthetic peptide
IPPVVPKEI

SEQ ID NO: 8014 - protein, 10 aa, synthetic construct
  REGION 1..10: note = Description of Artificial Sequence: Synthetic peptide
IPYNPQSQGV

SEQ ID NO: 8015 - protein, 8 aa, synthetic construct
  REGION 1..8: note = Description of Artificial Sequence: Synthetic peptide
VPVDPSEV

SEQ ID NO: 8016 - protein, 9 aa, synthetic construct
  REGION 1..9: note = Description of Artificial Sequence: Synthetic peptide
DANNNTITL

SEQ ID NO: 8017 - protein, 8 aa, synthetic construct
  REGION 1..8: note = Description of Artificial Sequence: Synthetic peptide
VPVDPREV

SEQ ID NO: 8018 - protein, 9 aa, synthetic construct
  REGION 1..9: note = Description of Artificial Sequence: Synthetic peptide
DPGLADHLI

SEQ ID NO: 8019 - protein, 9 aa, synthetic construct
  REGION 1..9: note = Description of Artificial Sequence: Synthetic peptide
LPPVVAKEI

SEQ ID NO: 8020 - protein, 9 aa, synthetic construct
  REGION 1..9: note = Description of Artificial Sequence: Synthetic peptide
SPLSFQTLI

SEQ ID NO: 8021 - protein, 9 aa, synthetic construct
  REGION 1..9: note = Description of Artificial Sequence: Synthetic peptide
LPPIVAKEI

SEQ ID NO: 8022 - protein, 8 aa, synthetic construct
  REGION 1..8: note = Description of Artificial Sequence: Synthetic peptide
DSWTVNDI

SEQ ID NO: 8023 - protein, 9 aa, synthetic construct
  REGION 1..9: note = Description of Artificial Sequence: Synthetic peptide
DAKAYDAEV

SEQ ID NO: 8024 - protein, 8 aa, synthetic construct
  REGION 1..8: note = Description of Artificial Sequence: Synthetic peptide
DAWEKIKL

SEQ ID NO: 8025 - protein, 9 aa, synthetic construct
  REGION 1..9: note = Description of Artificial Sequence: Synthetic peptide
DAKAYEKEV

SEQ ID NO: 8026 - protein, 8 aa, synthetic construct
  REGION 1..8: note = Description of Artificial Sequence: Synthetic peptide
TAYYILKL

SEQ ID NO: 8027 - protein, 8 aa, synthetic construct
  REGION 1..8: note = Description of Artificial Sequence: Synthetic peptide
NPYNTPVF

SEQ ID NO: 8028 - protein, 9 aa, synthetic construct
  REGION 1..9: note = Description of Artificial Sequence: Synthetic peptide
IPLGEARLI

SEQ ID NO: 8029 - protein, 10 aa, synthetic construct
  REGION 1..10: note = Description of Artificial Sequence: Synthetic peptide
IPLGEARLII

SEQ ID NO: 8030 - protein, 8 aa, synthetic construct
  REGION 1..8: note = Description of Artificial Sequence: Synthetic peptide
TAYFILKL

SEQ ID NO: 8031 - protein, 9 aa, synthetic construct
  REGION 1..9: note = Description of Artificial Sequence: Synthetic peptide
IPLGEARLV

SEQ ID NO: 8032 - protein, 9 aa, synthetic construct
  REGION 1..9: note = Description of Artificial Sequence: Synthetic peptide
EALLQAVRI

SEQ ID NO: 8033 - protein, 8 aa, synthetic construct
  REGION 1..8: note = Description of Artificial Sequence: Synthetic peptide
VAFIVALI

SEQ ID NO: 8034 - protein, 9 aa, synthetic construct
  REGION 1..9: note = Description of Artificial Sequence: Synthetic peptide
YAPPIAGNI

SEQ ID NO: 8035 - protein, 9 aa, synthetic construct
  REGION 1..9: note = Description of Artificial Sequence: Synthetic peptide
DAYFSVPLY

SEQ ID NO: 8036 - protein, 11 aa, synthetic construct
  REGION 1..11: note = Description of Artificial Sequence: Synthetic peptide
IPYNPQSQGVV

SEQ ID NO: 8037 - protein, 8 aa, synthetic construct
  REGION 1..8: note = Description of Artificial Sequence: Synthetic peptide
SPVSILDI

SEQ ID NO: 8038 - protein, 9 aa, synthetic construct
  REGION 1..9: note = Description of Artificial Sequence: Synthetic peptide
HPVHAGPVA

SEQ ID NO: 8039 - protein, 9 aa, synthetic construct
  REGION 1..9: note = Description of Artificial Sequence: Synthetic peptide
FPISPIETV

SEQ ID NO: 8040 - protein, 9 aa, synthetic construct
  REGION 1..9: note = Description of Artificial Sequence: Synthetic peptide
HPVPAGPIA

SEQ ID NO: 8041 - protein, 9 aa, synthetic construct
  REGION 1..9: note = Description of Artificial Sequence: Synthetic peptide
FPNKAIKFA

SEQ ID NO: 8042 - protein, 10 aa, synthetic construct
  REGION 1..10: note = Description of Artificial Sequence: Synthetic peptide
YPTPEGTRQA

SEQ ID NO: 8043 - protein, 9 aa, synthetic construct
  REGION 1..9: note = Description of Artificial Sequence: Synthetic peptide
HVASGYIEA

SEQ ID NO: 8044 - protein, 9 aa, synthetic construct
  REGION 1..9: note = Description of Artificial Sequence: Synthetic peptide
EAMSQTNSA

SEQ ID NO: 8045 - protein, 9 aa, synthetic construct
  REGION 1..9: note = Description of Artificial Sequence: Synthetic peptide
NPYNTPIFA

SEQ ID NO: 8046 - protein, 9 aa, synthetic construct
  REGION 1..9: note = Description of Artificial Sequence: Synthetic peptide
HPGSQPKTA

SEQ ID NO: 8047 - protein, 9 aa, synthetic construct
  REGION 1..9: note = Description of Artificial Sequence: Synthetic peptide
QMVHQPISA

SEQ ID NO: 8048 - protein, 10 aa, synthetic construct
  REGION 1..10: note = Description of Artificial Sequence: Synthetic peptide
YPKPEGTRQA

SEQ ID NO: 8049 - protein, 9 aa, synthetic construct
  REGION 1..9: note = Description of Artificial Sequence: Synthetic peptide
NPYNTPVFA

SEQ ID NO: 8050 - protein, 9 aa, synthetic construct
  REGION 1..9: note = Description of Artificial Sequence: Synthetic peptide
DASPTLFCA

SEQ ID NO: 8051 - protein, 9 aa, synthetic construct
  REGION 1..9: note = Description of Artificial Sequence: Synthetic peptide
HVASGYMEA

SEQ ID NO: 8052 - protein, 9 aa, synthetic construct
  REGION 1..9: note = Description of Artificial Sequence: Synthetic peptide
SPVSGKPCA

SEQ ID NO: 8053 - protein, 11 aa, synthetic construct
  REGION 1..11: note = Description of Artificial Sequence: Synthetic peptide
VPVDPREVEEA

SEQ ID NO: 8054 - protein, 8 aa, synthetic construct
  REGION 1..8: note = Description of Artificial Sequence: Synthetic peptide
TAFTIPSI

SEQ ID NO: 8055 - protein, 9 aa, synthetic construct
  REGION 1..9: note = Description of Artificial Sequence: Synthetic peptide
DPIPIHYCA

SEQ ID NO: 8056 - protein, 9 aa, synthetic construct
  REGION 1..9: note = Description of Artificial Sequence: Synthetic peptide
TSNLFNITA

SEQ ID NO: 8057 - protein, 11 aa, synthetic construct
  REGION 1..11: note = Description of Artificial Sequence: Synthetic peptide
FAVNPGLLETA

SEQ ID NO: 8058 - protein, 8 aa, synthetic construct
  REGION 1..8: note = Description of Artificial Sequence: Synthetic peptide
NPYPTPEG

SEQ ID NO: 8059 - protein, 8 aa, synthetic construct
  REGION 1..8: note = Description of Artificial Sequence: Synthetic peptide
FPNKTIEF

SEQ ID NO: 8060 - protein, 10 aa, synthetic construct
  REGION 1..10: note = Description of Artificial Sequence: Synthetic peptide
KPLGVAPTTA

SEQ ID NO: 8061 - protein, 11 aa, synthetic construct
  REGION 1..11: note = Description of Artificial Sequence: Synthetic peptide
LPPVVAKEIVA

SEQ ID NO: 8062 - protein, 8 aa, synthetic construct
  REGION 1..8: note = Description of Artificial Sequence: Synthetic peptide
TAFTIPST

SEQ ID NO: 8063 - protein, 11 aa, synthetic construct
  REGION 1..11: note = Description of Artificial Sequence: Synthetic peptide
FPISPIETVPV

SEQ ID NO: 8064 - protein, 8 aa, synthetic construct
  REGION 1..8: note = Description of Artificial Sequence: Synthetic peptide
FPSEQTRA

SEQ ID NO: 8065 - protein, 10 aa, synthetic construct
  REGION 1..10: note = Description of Artificial Sequence: Synthetic peptide
MPQILEPFRA

SEQ ID NO: 8066 - protein, 9 aa, synthetic construct
  REGION 1..9: note = Description of Artificial Sequence: Synthetic peptide
NPISGKPCA

SEQ ID NO: 8067 - protein, 11 aa, synthetic construct
  REGION 1..11: note = Description of Artificial Sequence: Synthetic peptide
MLNTVGGHQAA

SEQ ID NO: 8068 - protein, 9 aa, synthetic construct
  REGION 1..9: note = Description of Artificial Sequence: Synthetic peptide
EANTTLFCA

SEQ ID NO: 8069 - protein, 10 aa, synthetic construct
  REGION 1..10: note = Description of Artificial Sequence: Synthetic peptide
KPLGIAPTKA

SEQ ID NO: 8070 - protein, 8 aa, synthetic construct
  REGION 1..8: note = Description of Artificial Sequence: Synthetic peptide
MVHQPISA

SEQ ID NO: 8071 - protein, 9 aa, synthetic construct
  REGION 1..9: note = Description of Artificial Sequence: Synthetic peptide
FPIVQNLQG

SEQ ID NO: 8072 - protein, 10 aa, synthetic construct
  REGION 1..10: note = Description of Artificial Sequence: Synthetic peptide
HPVHAGPVAP

SEQ ID NO: 8073 - protein, 9 aa, synthetic construct
  REGION 1..9: note = Description of Artificial Sequence: Synthetic peptide
YPIVQNMQG

SEQ ID NO: 8074 - protein, 9 aa, synthetic construct
  REGION 1..9: note = Description of Artificial Sequence: Synthetic peptide
FPEGEAREF

SEQ ID NO: 8075 - protein, 9 aa, synthetic construct
  REGION 1..9: note = Description of Artificial Sequence: Synthetic peptide
KTIEFQPPA

SEQ ID NO: 8076 - protein, 9 aa, synthetic construct
  REGION 1..9: note = Description of Artificial Sequence: Synthetic peptide
HPVHAGPVA

SEQ ID NO: 8077 - protein, 9 aa, synthetic construct
  REGION 1..9: note = Description of Artificial Sequence: Synthetic peptide
HPVPAGPIA

SEQ ID NO: 8078 - protein, 9 aa, synthetic construct
  REGION 1..9: note = Description of Artificial Sequence: Synthetic peptide
IPKQPLPQT

SEQ ID NO: 8079 - protein, 10 aa, synthetic construct
  REGION 1..10: note = Description of Artificial Sequence: Synthetic peptide
YPKPEGTRQA

SEQ ID NO: 8080 - protein, 10 aa, synthetic construct
  REGION 1..10: note = Description of Artificial Sequence: Synthetic peptide
KPLGVAPTTA

SEQ ID NO: 8081 - protein, 9 aa, synthetic construct
  REGION 1..9: note = Description of Artificial Sequence: Synthetic peptide
FPISPIETV

SEQ ID NO: 8082 - protein, 9 aa, synthetic construct
  REGION 1..9: note = Description of Artificial Sequence: Synthetic peptide
KAKPPLPSV

SEQ ID NO: 8083 - protein, 9 aa, synthetic construct
  REGION 1..9: note = Description of Artificial Sequence: Synthetic peptide
RPEPTAPPA

SEQ ID NO: 8084 - protein, 10 aa, synthetic construct
  REGION 1..10: note = Description of Artificial Sequence: Synthetic peptide
YPTPEGTRQA

SEQ ID NO: 8085 - protein, 9 aa, synthetic construct
  REGION 1..9: note = Description of Artificial Sequence: Synthetic peptide
SPVSGKPCA

SEQ ID NO: 8086 - protein, 10 aa, synthetic construct
  REGION 1..10: note = Description of Artificial Sequence: Synthetic peptide
KPLGIAPTKA

SEQ ID NO: 8087 - protein, 9 aa, synthetic construct
  REGION 1..9: note = Description of Artificial Sequence: Synthetic peptide
NPISGKPCA

SEQ ID NO: 8088 - protein, 8 aa, synthetic construct
  REGION 1..8: note = Description of Artificial Sequence: Synthetic peptide
VPKEIVAC

SEQ ID NO: 8089 - protein, 9 aa, synthetic construct
  REGION 1..9: note = Description of Artificial Sequence: Synthetic peptide
HPVHAGPVA

SEQ ID NO: 8090 - protein, 10 aa, synthetic construct
  REGION 1..10: note = Description of Artificial Sequence: Synthetic peptide
KPLGVAPTTA

SEQ ID NO: 8091 - protein, 9 aa, synthetic construct
  REGION 1..9: note = Description of Artificial Sequence: Synthetic peptide
FPISPIETV

SEQ ID NO: 8092 - protein, 9 aa, synthetic construct
  REGION 1..9: note = Description of Artificial Sequence: Synthetic peptide
HPVPAGPIA

SEQ ID NO: 8093 - protein, 10 aa, synthetic construct
  REGION 1..10: note = Description of Artificial Sequence: Synthetic peptide
KPLGIAPTKA

SEQ ID NO: 8094 - protein, 9 aa, synthetic construct
  REGION 1..9: note = Description of Artificial Sequence: Synthetic peptide
APAAEGVGA

SEQ ID NO: 8095 - protein, 9 aa, synthetic construct
  REGION 1..9: note = Description of Artificial Sequence: Synthetic peptide
SPVSGKPCA

SEQ ID NO: 8096 - protein, 10 aa, synthetic construct
  REGION 1..10: note = Description of Artificial Sequence: Synthetic peptide
YPTPEGTRQA

SEQ ID NO: 8097 - protein, 10 aa, synthetic construct
  REGION 1..10: note = Description of Artificial Sequence: Synthetic peptide
IPAETGQETA

SEQ ID NO: 8098 - protein, 9 aa, synthetic construct
  REGION 1..9: note = Description of Artificial Sequence: Synthetic peptide
NPISGKPCA

SEQ ID NO: 8099 - protein, 10 aa, synthetic construct
  REGION 1..10: note = Description of Artificial Sequence: Synthetic peptide
APAAEGVGAA

SEQ ID NO: 8100 - protein, 9 aa, synthetic construct
  REGION 1..9: note = Description of Artificial Sequence: Synthetic peptide
NPYNTPVFA

SEQ ID NO: 8101 - protein, 9 aa, synthetic construct
  REGION 1..9: note = Description of Artificial Sequence: Synthetic peptide
QMVHQPISA

SEQ ID NO: 8102 - protein, 9 aa, synthetic construct
  REGION 1..9: note = Description of Artificial Sequence: Synthetic peptide
NPYNTPIFA

SEQ ID NO: 8103 - protein, 10 aa, synthetic construct
  REGION 1..10: note = Description of Artificial Sequence: Synthetic peptide
SPVSGKPCAV

SEQ ID NO: 8104 - protein, 9 aa, synthetic construct
  REGION 1..9: note = Description of Artificial Sequence: Synthetic peptide
RPEPTAPPA

SEQ ID NO: 8105 - protein, 9 aa, synthetic construct
  REGION 1..9: note = Description of Artificial Sequence: Synthetic peptide
KPLGVAPTT

SEQ ID NO: 8106 - protein, 9 aa, synthetic construct
  REGION 1..9: note = Description of Artificial Sequence: Synthetic peptide
HPGSQPKTA

SEQ ID NO: 8107 - protein, 10 aa, synthetic construct
  REGION 1..10: note = Description of Artificial Sequence: Synthetic peptide
YPKPEGTRQA

SEQ ID NO: 8108 - protein, 9 aa, synthetic construct
  REGION 1..9: note = Description of Artificial Sequence: Synthetic peptide
IPKQPLPQT

SEQ ID NO: 8109 - protein, 10 aa, synthetic construct
  REGION 1..10: note = Description of Artificial Sequence: Synthetic peptide
IPYNPQSQGV

SEQ ID NO: 8110 - protein, 9 aa, synthetic construct
  REGION 1..9: note = Description of Artificial Sequence: Synthetic peptide
HPVHAGPVA

SEQ ID NO: 8111 - protein, 10 aa, synthetic construct
  REGION 1..10: note = Description of Artificial Sequence: Synthetic peptide
KPLGVAPTTA

SEQ ID NO: 8112 - protein, 9 aa, synthetic construct
  REGION 1..9: note = Description of Artificial Sequence: Synthetic peptide
FPISPIETV

SEQ ID NO: 8113 - protein, 10 aa, synthetic construct
  REGION 1..10: note = Description of Artificial Sequence: Synthetic peptide
KPLGIAPTKA

SEQ ID NO: 8114 - protein, 9 aa, synthetic construct
  REGION 1..9: note = Description of Artificial Sequence: Synthetic peptide
QMVHQPISA

SEQ ID NO: 8115 - protein, 9 aa, synthetic construct
  REGION 1..9: note = Description of Artificial Sequence: Synthetic peptide
HPVPAGPIA

SEQ ID NO: 8116 - protein, 9 aa, synthetic construct
  REGION 1..9: note = Description of Artificial Sequence: Synthetic peptide
SPVSGKPCA

SEQ ID NO: 8117 - protein, 9 aa, synthetic construct
  REGION 1..9: note = Description of Artificial Sequence: Synthetic peptide
APAAEGVGA

SEQ ID NO: 8118 - protein, 10 aa, synthetic construct
  REGION 1..10: note = Description of Artificial Sequence: Synthetic peptide
IPYNPQSQGV

SEQ ID NO: 8119 - protein, 10 aa, synthetic construct
  REGION 1..10: note = Description of Artificial Sequence: Synthetic peptide
YPTPEGTRQA

SEQ ID NO: 8120 - protein, 10 aa, synthetic construct
  REGION 1..10: note = Description of Artificial Sequence: Synthetic peptide
APAAEGVGAA

SEQ ID NO: 8121 - protein, 10 aa, synthetic construct
  REGION 1..10: note = Description of Artificial Sequence: Synthetic peptide
SPVSGKPCAV

SEQ ID NO: 8122 - protein, 8 aa, synthetic construct
  REGION 1..8: note = Description of Artificial Sequence: Synthetic peptide
VPKEIVAC

SEQ ID NO: 8123 - protein, 9 aa, synthetic construct
  REGION 1..9: note = Description of Artificial Sequence: Synthetic peptide
IPKQPLPQT

SEQ ID NO: 8124 - protein, 9 aa, synthetic construct
  REGION 1..9: note = Description of Artificial Sequence: Synthetic peptide
SPTSRELQV

SEQ ID NO: 8125 - protein, 11 aa, synthetic construct
  REGION 1..11: note = Description of Artificial Sequence: Synthetic peptide
VPVDPREVEEA

SEQ ID NO: 8126 - protein, 10 aa, synthetic construct
  REGION 1..10: note = Description of Artificial Sequence: Synthetic peptide
IPAETGQETA

SEQ ID NO: 8127 - protein, 10 aa, synthetic construct
  REGION 1..10: note = Description of Artificial Sequence: Synthetic peptide
YPKPEGTRQA

SEQ ID NO: 8128 - protein, 9 aa, synthetic construct
  REGION 1..9: note = Description of Artificial Sequence: Synthetic peptide
RPEPTAPPA

SEQ ID NO: 8129 - protein, 10 aa, synthetic construct
  REGION 1..10: note = Description of Artificial Sequence: Synthetic peptide
NPNANITIPC

SEQ ID NO: 8130 - protein, 9 aa, synthetic construct
  REGION 1..9: note = Description of Artificial Sequence: Synthetic peptide
NPISGKPCA

SEQ ID NO: 8131 - protein, 10 aa, synthetic construct
  REGION 1..10: note = Description of Artificial Sequence: Synthetic peptide
SPISGKSCTV

SEQ ID NO: 8132 - protein, 9 aa, synthetic construct
  REGION 1..9: note = Description of Artificial Sequence: Synthetic peptide
HPGSQPKTA

SEQ ID NO: 8133 - protein, 10 aa, synthetic construct
  REGION 1..10: note = Description of Artificial Sequence: Synthetic peptide
APAGYAILKC

SEQ ID NO: 8134 - protein, 9 aa, synthetic construct
  REGION 1..9: note = Description of Artificial Sequence: Synthetic peptide
NPYNTPIFA

SEQ ID NO: 8135 - protein, 10 aa, synthetic construct
  REGION 1..10: note = Description of Artificial Sequence: Synthetic peptide
APPIEGKITC

SEQ ID NO: 8136 - protein, 9 aa, synthetic construct
  REGION 1..9: note = Description of Artificial Sequence: Synthetic peptide
NPYPKPEGT

SEQ ID NO: 8137 - protein, 11 aa, synthetic construct
  REGION 1..11: note = Description of Artificial Sequence: Synthetic peptide
KAYDAEVHNVW

SEQ ID NO: 8138 - protein, 11 aa, synthetic construct
  REGION 1..11: note = Description of Artificial Sequence: Synthetic peptide
KAYDTEVHNVW

SEQ ID NO: 8139 - protein, 10 aa, synthetic construct
  REGION 1..10: note = Description of Artificial Sequence: Synthetic peptide
SSLRGLQTGW

SEQ ID NO: 8140 - protein, 9 aa, synthetic construct
  REGION 1..9: note = Description of Artificial Sequence: Synthetic peptide
RVEGIQRNW

SEQ ID NO: 8141 - protein, 9 aa, synthetic construct
  REGION 1..9: note = Description of Artificial Sequence: Synthetic peptide
VSKLVEDKW

SEQ ID NO: 8142 - protein, 9 aa, synthetic construct
  REGION 1..9: note = Description of Artificial Sequence: Synthetic peptide
TAVPWNSSW

SEQ ID NO: 8143 - protein, 9 aa, synthetic construct
  REGION 1..9: note = Description of Artificial Sequence: Synthetic peptide
STLQEQITW

SEQ ID NO: 8144 - protein, 11 aa, synthetic construct
  REGION 1..11: note = Description of Artificial Sequence: Synthetic peptide
KSIRIGPGQTF

SEQ ID NO: 8145 - protein, 10 aa, synthetic construct
  REGION 1..10: note = Description of Artificial Sequence: Synthetic peptide
RSLRGLQRGW

SEQ ID NO: 8146 - protein, 10 aa, synthetic construct
  REGION 1..10: note = Description of Artificial Sequence: Synthetic peptide
SSLRGIQRGW

SEQ ID NO: 8147 - protein, 10 aa, synthetic construct
  REGION 1..10: note = Description of Artificial Sequence: Synthetic peptide
SSLKGLQRGW

SEQ ID NO: 8148 - protein, 9 aa, synthetic construct
  REGION 1..9: note = Description of Artificial Sequence: Synthetic peptide
TAVHWNSSW

SEQ ID NO: 8149 - protein, 11 aa, synthetic construct
  REGION 1..11: note = Description of Artificial Sequence: Synthetic peptide
KAYEKEVHNVW

SEQ ID NO: 8150 - protein, 9 aa, synthetic construct
  REGION 1..9: note = Description of Artificial Sequence: Synthetic peptide
KTQKVNALF

SEQ ID NO: 8151 - protein, 11 aa, synthetic construct
  REGION 1..11: note = Description of Artificial Sequence: Synthetic peptide
GTFNFPQITLW

SEQ ID NO: 8152 - protein, 11 aa, synthetic construct
  REGION 1..11: note = Description of Artificial Sequence: Synthetic peptide
KSIRIGPGQVF

SEQ ID NO: 8153 - protein, 10 aa, synthetic construct
  REGION 1..10: note = Description of Artificial Sequence: Synthetic peptide
LALDSWNNLW

SEQ ID NO: 8154 - protein, 9 aa, synthetic construct
  REGION 1..9: note = Description of Artificial Sequence: Synthetic peptide
KIKQIINMW

SEQ ID NO: 8155 - protein, 10 aa, synthetic construct
  REGION 1..10: note = Description of Artificial Sequence: Synthetic peptide
TTAVPWNSSW

SEQ ID NO: 8156 - protein, 9 aa, synthetic construct
  REGION 1..9: note = Description of Artificial Sequence: Synthetic peptide
RIKQIINMW

SEQ ID NO: 8157 - protein, 9 aa, synthetic construct
  REGION 1..9: note = Description of Artificial Sequence: Synthetic peptide
ISARTLNAW

SEQ ID NO: 8158 - protein, 11 aa, synthetic construct
  REGION 1..11: note = Description of Artificial Sequence: Synthetic peptide
LAFPEGEAREF

SEQ ID NO: 8159 - protein, 9 aa, synthetic construct
  REGION 1..9: note = Description of Artificial Sequence: Synthetic peptide
RSIRLVNGF

SEQ ID NO: 8160 - protein, 11 aa, synthetic construct
  REGION 1..11: note = Description of Artificial Sequence: Synthetic peptide
TTSTLQEQITW

SEQ ID NO: 8161 - protein, 9 aa, synthetic construct
  REGION 1..9: note = Description of Artificial Sequence: Synthetic peptide
VSKKLAEHF

SEQ ID NO: 8162 - protein, 9 aa, synthetic construct
  REGION 1..9: note = Description of Artificial Sequence: Synthetic peptide
KALTDIVTL

SEQ ID NO: 8163 - protein, 9 aa, synthetic construct
  REGION 1..9: note = Description of Artificial Sequence: Synthetic peptide
STLQEQIAW

SEQ ID NO: 8164 - protein, 9 aa, synthetic construct
  REGION 1..9: note = Description of Artificial Sequence: Synthetic peptide
RVRGILRNW

SEQ ID NO: 8165 - protein, 9 aa, synthetic construct
  REGION 1..9: note = Description of Artificial Sequence: Synthetic peptide
QTKGLGISY

SEQ ID NO: 8166 - protein, 10 aa, synthetic construct
  REGION 1..10: note = Description of Artificial Sequence: Synthetic peptide
KIATESIVIW

SEQ ID NO: 8167 - protein, 10 aa, synthetic construct
  REGION 1..10: note = Description of Artificial Sequence: Synthetic peptide
LALDSWKNLW

SEQ ID NO: 8168 - protein, 11 aa, synthetic construct
  REGION 1..11: note = Description of Artificial Sequence: Synthetic peptide
LAFPQGEAREF

SEQ ID NO: 8169 - protein, 9 aa, synthetic construct
  REGION 1..9: note = Description of Artificial Sequence: Synthetic peptide
KIKPPLPSI

SEQ ID NO: 8170 - protein, 10 aa, synthetic construct
  REGION 1..10: note = Description of Artificial Sequence: Synthetic peptide
VTVYYGVPVW

SEQ ID NO: 8171 - protein, 11 aa, synthetic construct
  REGION 1..11: note = Description of Artificial Sequence: Synthetic peptide
RSSLRGLQTGW

SEQ ID NO: 8172 - protein, 11 aa, synthetic construct
  REGION 1..11: note = Description of Artificial Sequence: Synthetic peptide
KAADEKVSQNF

SEQ ID NO: 8173 - protein, 9 aa, synthetic construct
  REGION 1..9: note = Description of Artificial Sequence: Synthetic peptide
LGHGVSIEW

SEQ ID NO: 8174 - protein, 11 aa, synthetic construct
  REGION 1..11: note = Description of Artificial Sequence: Synthetic peptide
KSIRIGPGQAF

SEQ ID NO: 8175 - protein, 9 aa, synthetic construct
  REGION 1..9: note = Description of Artificial Sequence: Synthetic peptide
STTKILEPF

SEQ ID NO: 8176 - protein, 9 aa, synthetic construct
  REGION 1..9: note = Description of Artificial Sequence: Synthetic peptide
ISERILSTF

SEQ ID NO: 8177 - protein, 11 aa, synthetic construct
  REGION 1..11: note = Description of Artificial Sequence: Synthetic peptide
KSLFNTIAVLY

SEQ ID NO: 8178 - protein, 10 aa, synthetic construct
  REGION 1..10: note = Description of Artificial Sequence: Synthetic peptide
TTAVHWNSSW

SEQ ID NO: 8179 - protein, 10 aa, synthetic construct
  REGION 1..10: note = Description of Artificial Sequence: Synthetic peptide
KTQKVNALFY

SEQ ID NO: 8180 - protein, 10 aa, synthetic construct
  REGION 1..10: note = Description of Artificial Sequence: Synthetic peptide
KYLGGLVQYW

SEQ ID NO: 8181 - protein, 9 aa, synthetic construct
  REGION 1..9: note = Description of Artificial Sequence: Synthetic peptide
QANFLGRLW

SEQ ID NO: 8182 - protein, 11 aa, synthetic construct
  REGION 1..11: note = Description of Artificial Sequence: Synthetic peptide
KSLFNTVATLY

SEQ ID NO: 8183 - protein, 9 aa, synthetic construct
  REGION 1..9: note = Description of Artificial Sequence: Synthetic peptide
RSIRLVSGF

SEQ ID NO: 8184 - protein, 9 aa, synthetic construct
  REGION 1..9: note = Description of Artificial Sequence: Synthetic peptide
QATQDVKNW

SEQ ID NO: 8185 - protein, 9 aa, synthetic construct
  REGION 1..9: note = Description of Artificial Sequence: Synthetic peptide
KTAVQMAVF

SEQ ID NO: 8186 - protein, 9 aa, synthetic construct
  REGION 1..9: note = Description of Artificial Sequence: Synthetic peptide
SLRGLQTGW

SEQ ID NO: 8187 - protein, 9 aa, synthetic construct
  REGION 1..9: note = Description of Artificial Sequence: Synthetic peptide
WSKSSIVGW

SEQ ID NO: 8188 - protein, 9 aa, synthetic construct
  REGION 1..9: note = Description of Artificial Sequence: Synthetic peptide
KSVAIVCTR

SEQ ID NO: 8189 - protein, 11 aa, synthetic construct
  REGION 1..11: note = Description of Artificial Sequence: Synthetic peptide
KAADEKVSQNF

SEQ ID NO: 8190 - protein, 10 aa, synthetic construct
  REGION 1..10: note = Description of Artificial Sequence: Synthetic peptide
SSLRGLQTGW

SEQ ID NO: 8191 - protein, 9 aa, synthetic construct
  REGION 1..9: note = Description of Artificial Sequence: Synthetic peptide
STLQEQITW

SEQ ID NO: 8192 - protein, 11 aa, synthetic construct
  REGION 1..11: note = Description of Artificial Sequence: Synthetic peptide
KSIRIGPGQTF

SEQ ID NO: 8193 - protein, 9 aa, synthetic construct
  REGION 1..9: note = Description of Artificial Sequence: Synthetic peptide
KALTDIVTL

SEQ ID NO: 8194 - protein, 9 aa, synthetic construct
  REGION 1..9: note = Description of Artificial Sequence: Synthetic peptide
KTQKVNALF

SEQ ID NO: 8195 - protein, 9 aa, synthetic construct
  REGION 1..9: note = Description of Artificial Sequence: Synthetic peptide
KAIEAQQHM

SEQ ID NO: 8196 - protein, 9 aa, synthetic construct
  REGION 1..9: note = Description of Artificial Sequence: Synthetic peptide
RAVGIGAVF

SEQ ID NO: 8197 - protein, 11 aa, synthetic construct
  REGION 1..11: note = Description of Artificial Sequence: Synthetic peptide
KAYDAEVHNVW

SEQ ID NO: 8198 - protein, 11 aa, synthetic construct
  REGION 1..11: note = Description of Artificial Sequence: Synthetic peptide
KAYDTEVHNVW

SEQ ID NO: 8199 - protein, 9 aa, synthetic construct
  REGION 1..9: note = Description of Artificial Sequence: Synthetic peptide
TAVPWNSSW

SEQ ID NO: 8200 - protein, 9 aa, synthetic construct
  REGION 1..9: note = Description of Artificial Sequence: Synthetic peptide
ISERILSTF

SEQ ID NO: 8201 - protein, 9 aa, synthetic construct
  REGION 1..9: note = Description of Artificial Sequence: Synthetic peptide
RAIEAQQHL

SEQ ID NO: 8202 - protein, 9 aa, synthetic construct
  REGION 1..9: note = Description of Artificial Sequence: Synthetic peptide
RAIEAQQHM

SEQ ID NO: 8203 - protein, 9 aa, synthetic construct
  REGION 1..9: note = Description of Artificial Sequence: Synthetic peptide
ISARTLNAW

SEQ ID NO: 8204 - protein, 9 aa, synthetic construct
  REGION 1..9: note = Description of Artificial Sequence: Synthetic peptide
STLQEQIAW

SEQ ID NO: 8205 - protein, 9 aa, synthetic construct
  REGION 1..9: note = Description of Artificial Sequence: Synthetic peptide
YSTRVDPGL

SEQ ID NO: 8206 - protein, 9 aa, synthetic construct
  REGION 1..9: note = Description of Artificial Sequence: Synthetic peptide
YSTQVEPGL

SEQ ID NO: 8207 - protein, 10 aa, synthetic construct
  REGION 1..10: note = Description of Artificial Sequence: Synthetic peptide
TSNLQEQVAW

SEQ ID NO: 8208 - protein, 9 aa, synthetic construct
  REGION 1..9: note = Description of Artificial Sequence: Synthetic peptide
YSTQVDPGL

SEQ ID NO: 8209 - protein, 11 aa, synthetic construct
  REGION 1..11: note = Description of Artificial Sequence: Synthetic peptide
KSIRIGPGQAF

SEQ ID NO: 8210 - protein, 10 aa, synthetic construct
  REGION 1..10: note = Description of Artificial Sequence: Synthetic peptide
KAIEAQQHML

SEQ ID NO: 8211 - protein, 11 aa, synthetic construct
  REGION 1..11: note = Description of Artificial Sequence: Synthetic peptide
KSIRIGPGQVF

SEQ ID NO: 8212 - protein, 9 aa, synthetic construct
  REGION 1..9: note = Description of Artificial Sequence: Synthetic peptide
KTAVQMAVF

SEQ ID NO: 8213 - protein, 10 aa, synthetic construct
  REGION 1..10: note = Description of Artificial Sequence: Synthetic peptide
RAIEAQQHLL

SEQ ID NO: 8214 - protein, 9 aa, synthetic construct
  REGION 1..9: note = Description of Artificial Sequence: Synthetic peptide
QATQDVKNW

SEQ ID NO: 8215 - protein, 9 aa, synthetic construct
  REGION 1..9: note = Description of Artificial Sequence: Synthetic peptide
IQKQGQNQW

SEQ ID NO: 8216 - protein, 9 aa, synthetic construct
  REGION 1..9: note = Description of Artificial Sequence: Synthetic peptide
TSSLFNSTY

SEQ ID NO: 8217 - protein, 9 aa, synthetic construct
  REGION 1..9: note = Description of Artificial Sequence: Synthetic peptide
TINEEAAEW

SEQ ID NO: 8218 - protein, 9 aa, synthetic construct
  REGION 1..9: note = Description of Artificial Sequence: Synthetic peptide
ASITLTVQV

SEQ ID NO: 8219 - protein, 8 aa, synthetic construct
  REGION 1..8: note = Description of Artificial Sequence: Synthetic peptide
NSPTSREL

SEQ ID NO: 8220 - protein, 9 aa, synthetic construct
  REGION 1..9: note = Description of Artificial Sequence: Synthetic peptide
YSPLSFQTL

SEQ ID NO: 8221 - protein, 9 aa, synthetic construct
  REGION 1..9: note = Description of Artificial Sequence: Synthetic peptide
TTPAPKQEL

SEQ ID NO: 8222 - protein, 8 aa, synthetic construct
  REGION 1..8: note = Description of Artificial Sequence: Synthetic peptide
NSPTRREL

SEQ ID NO: 8223 - protein, 9 aa, synthetic construct
  REGION 1..9: note = Description of Artificial Sequence: Synthetic peptide
ATPSPKQEL

SEQ ID NO: 8224 - protein, 9 aa, synthetic construct
  REGION 1..9: note = Description of Artificial Sequence: Synthetic peptide
YSPVSILDI

SEQ ID NO: 8225 - protein, 9 aa, synthetic construct
  REGION 1..9: note = Description of Artificial Sequence: Synthetic peptide
QAKGLGISY

SEQ ID NO: 8226 - protein, 9 aa, synthetic construct
  REGION 1..9: note = Description of Artificial Sequence: Synthetic peptide
RAVGIGAVF

SEQ ID NO: 8227 - protein, 10 aa, synthetic construct
  REGION 1..10: note = Description of Artificial Sequence: Synthetic peptide
FQKKGLGISY

SEQ ID NO: 8228 - protein, 9 aa, synthetic construct
  REGION 1..9: note = Description of Artificial Sequence: Synthetic peptide
QAKGLGISY

SEQ ID NO: 8229 - protein, 9 aa, synthetic construct
  REGION 1..9: note = Description of Artificial Sequence: Synthetic peptide
EARLVITTY

SEQ ID NO: 8230 - protein, 9 aa, synthetic construct
  REGION 1..9: note = Description of Artificial Sequence: Synthetic peptide
QTKGLGISY

SEQ ID NO: 8231 - protein, 9 aa, synthetic construct
  REGION 1..9: note = Description of Artificial Sequence: Synthetic peptide
SLDPIPIHY

SEQ ID NO: 8232 - protein, 9 aa, synthetic construct
  REGION 1..9: note = Description of Artificial Sequence: Synthetic peptide
MVHQPISAR

SEQ ID NO: 8233 - protein, 8 aa, synthetic construct
  REGION 1..8: note = Description of Artificial Sequence: Synthetic peptide
VLDVGDAY

SEQ ID NO: 8234 - protein, 9 aa, synthetic construct
  REGION 1..9: note = Description of Artificial Sequence: Synthetic peptide
RALGPGASL

SEQ ID NO: 8235 - protein, 9 aa, synthetic construct
  REGION 1..9: note = Description of Artificial Sequence: Synthetic peptide
RAIEAQQHL

SEQ ID NO: 8236 - protein, 9 aa, synthetic construct
  REGION 1..9: note = Description of Artificial Sequence: Synthetic peptide
RALGPGATL

SEQ ID NO: 8237 - protein, 9 aa, synthetic construct
  REGION 1..9: note = Description of Artificial Sequence: Synthetic peptide
LAWDDLRSL

SEQ ID NO: 8238 - protein, 9 aa, synthetic construct
  REGION 1..9: note = Description of Artificial Sequence: Synthetic peptide
VAEGTDRIL

SEQ ID NO: 8239 - protein, 9 aa, synthetic construct
  REGION 1..9: note = Description of Artificial Sequence: Synthetic peptide
TAVVQKIAL

SEQ ID NO: 8240 - protein, 9 aa, synthetic construct
  REGION 1..9: note = Description of Artificial Sequence: Synthetic peptide
VAEGTDRIL

SEQ ID NO: 8241 - protein, 9 aa, synthetic construct
  REGION 1..9: note = Description of Artificial Sequence: Synthetic peptide
RALGPGASL

SEQ ID NO: 8242 - protein, 9 aa, synthetic construct
  REGION 1..9: note = Description of Artificial Sequence: Synthetic peptide
RAIEAQQHL

SEQ ID NO: 8243 - protein, 8 aa, synthetic construct
  REGION 1..8: note = Description of Artificial Sequence: Synthetic peptide
LTQLGRTL

SEQ ID NO: 8244 - protein, 9 aa, synthetic construct
  REGION 1..9: note = Description of Artificial Sequence: Synthetic peptide
TAVVQKIAL

SEQ ID NO: 8245 - protein, 8 aa, synthetic construct
  REGION 1..8: note = Description of Artificial Sequence: Synthetic peptide
IAARAVEL

SEQ ID NO: 8246 - protein, 9 aa, synthetic construct
  REGION 1..9: note = Description of Artificial Sequence: Synthetic peptide
RALGPGATL

SEQ ID NO: 8247 - protein, 9 aa, synthetic construct
  REGION 1..9: note = Description of Artificial Sequence: Synthetic peptide
ATDIQTKEL

SEQ ID NO: 8248 - protein, 9 aa, synthetic construct
  REGION 1..9: note = Description of Artificial Sequence: Synthetic peptide
YVDRFFKTL

SEQ ID NO: 8249 - protein, 9 aa, synthetic construct
  REGION 1..9: note = Description of Artificial Sequence: Synthetic peptide
LAWDDLRSL

SEQ ID NO: 8250 - protein, 9 aa, synthetic construct
  REGION 1..9: note = Description of Artificial Sequence: Synthetic peptide
YSTQVDPGL

SEQ ID NO: 8251 - protein, 9 aa, synthetic construct
  REGION 1..9: note = Description of Artificial Sequence: Synthetic peptide
TFDPIPIHY

SEQ ID NO: 8252 - protein, 9 aa, synthetic construct
  REGION 1..9: note = Description of Artificial Sequence: Synthetic peptide
QYDQIIIEI

SEQ ID NO: 8253 - protein, 9 aa, synthetic construct
  REGION 1..9: note = Description of Artificial Sequence: Synthetic peptide
LFDTTAIVV

SEQ ID NO: 8254 - protein, 9 aa, synthetic construct
  REGION 1..9: note = Description of Artificial Sequence: Synthetic peptide
FYDPSKDLI

SEQ ID NO: 8255 - protein, 9 aa, synthetic construct
  REGION 1..9: note = Description of Artificial Sequence: Synthetic peptide
QYDQILIEI

SEQ ID NO: 8256 - protein, 9 aa, synthetic construct
  REGION 1..9: note = Description of Artificial Sequence: Synthetic peptide
FPEGEAREF

SEQ ID NO: 8257 - protein, 9 aa, synthetic construct
  REGION 1..9: note = Description of Artificial Sequence: Synthetic peptide
SFDPIPIHY

SEQ ID NO: 8258 - protein, 8 aa, synthetic construct
  REGION 1..8: note = Description of Artificial Sequence: Synthetic peptide
HTDNGSNF

SEQ ID NO: 8259 - protein, 9 aa, synthetic construct
  REGION 1..9: note = Description of Artificial Sequence: Synthetic peptide
IIDIIATDL

SEQ ID NO: 8260 - protein, 9 aa, synthetic construct
  REGION 1..9: note = Description of Artificial Sequence: Synthetic peptide
KAELQAIQL

SEQ ID NO: 8261 - protein, 9 aa, synthetic construct
  REGION 1..9: note = Description of Artificial Sequence: Synthetic peptide
VLDVGDAYF

SEQ ID NO: 8262 - protein, 9 aa, synthetic construct
  REGION 1..9: note = Description of Artificial Sequence: Synthetic peptide
IQDNSDIKV

SEQ ID NO: 8263 - protein, 9 aa, synthetic construct
  REGION 1..9: note = Description of Artificial Sequence: Synthetic peptide
QRPLVTIKI

SEQ ID NO: 8264 - protein, 9 aa, synthetic construct
  REGION 1..9: note = Description of Artificial Sequence: Synthetic peptide
KRKAYALFY

SEQ ID NO: 8265 - protein, 9 aa, synthetic construct
  REGION 1..9: note = Description of Artificial Sequence: Synthetic peptide
SAISLFDTI

SEQ ID NO: 8266 - protein, 9 aa, synthetic construct
  REGION 1..9: note = Description of Artificial Sequence: Synthetic peptide
EARLVITTY

SEQ ID NO: 8267 - protein, 9 aa, synthetic construct
  REGION 1..9: note = Description of Artificial Sequence: Synthetic peptide
KALTDIVTL

SEQ ID NO: 8268 - protein, 9 aa, synthetic construct
  REGION 1..9: note = Description of Artificial Sequence: Synthetic peptide
VAEGTDRIL

SEQ ID NO: 8269 - protein, 9 aa, synthetic construct
  REGION 1..9: note = Description of Artificial Sequence: Synthetic peptide
QAKGLGISY

SEQ ID NO: 8270 - protein, 9 aa, synthetic construct
  REGION 1..9: note = Description of Artificial Sequence: Synthetic peptide
FLGAAGSTM

SEQ ID NO: 8271 - protein, 9 aa, synthetic construct
  REGION 1..9: note = Description of Artificial Sequence: Synthetic peptide
TAVVQKIAL

SEQ ID NO: 8272 - protein, 9 aa, synthetic construct
  REGION 1..9: note = Description of Artificial Sequence: Synthetic peptide
TVLDVGDAY

SEQ ID NO: 8273 - protein, 9 aa, synthetic construct
  REGION 1..9: note = Description of Artificial Sequence: Synthetic peptide
IVTDSQYAL

SEQ ID NO: 8274 - protein, 9 aa, synthetic construct
  REGION 1..9: note = Description of Artificial Sequence: Synthetic peptide
SQVNNTTIM

SEQ ID NO: 8275 - protein, 9 aa, synthetic construct
  REGION 1..9: note = Description of Artificial Sequence: Synthetic peptide
ASDIQTKEL

SEQ ID NO: 8276 - protein, 10 aa, synthetic construct
  REGION 1..10: note = Description of Artificial Sequence: Synthetic peptide
AGDDRQGTAL

SEQ ID NO: 8277 - protein, 9 aa, synthetic construct
  REGION 1..9: note = Description of Artificial Sequence: Synthetic peptide
ATDLQTKEL

SEQ ID NO: 8278 - protein, 10 aa, synthetic construct
  REGION 1..10: note = Description of Artificial Sequence: Synthetic peptide
YVDGAANREI

SEQ ID NO: 8279 - protein, 9 aa, synthetic construct
  REGION 1..9: note = Description of Artificial Sequence: Synthetic peptide
IIDIIATDL

SEQ ID NO: 8280 - protein, 9 aa, synthetic construct
  REGION 1..9: note = Description of Artificial Sequence: Synthetic peptide
ATDIQTKEL

SEQ ID NO: 8281 - protein, 9 aa, synthetic construct
  REGION 1..9: note = Description of Artificial Sequence: Synthetic peptide
ASDANNNTI

SEQ ID NO: 8282 - protein, 11 aa, synthetic construct
  REGION 1..11: note = Description of Artificial Sequence: Synthetic peptide
TIDKELPLTSL

SEQ ID NO: 8283 - protein, 10 aa, synthetic construct
  REGION 1..10: note = Description of Artificial Sequence: Synthetic peptide
SQDLDKHGAL

SEQ ID NO: 8284 - protein, 9 aa, synthetic construct
  REGION 1..9: note = Description of Artificial Sequence: Synthetic peptide
HTDNGSNFI

SEQ ID NO: 8285 - protein, 10 aa, synthetic construct
  REGION 1..10: note = Description of Artificial Sequence: Synthetic peptide
AADEKVSQNF

SEQ ID NO: 8286 - protein, 9 aa, synthetic construct
  REGION 1..9: note = Description of Artificial Sequence: Synthetic peptide
TQDFWEVQL

SEQ ID NO: 8287 - protein, 8 aa, synthetic construct
  REGION 1..8: note = Description of Artificial Sequence: Synthetic peptide
DLDKHGAL

SEQ ID NO: 8288 - protein, 9 aa, synthetic construct
  REGION 1..9: note = Description of Artificial Sequence: Synthetic peptide
KAELQAIQL

SEQ ID NO: 8289 - protein, 10 aa, synthetic construct
  REGION 1..10: note = Description of Artificial Sequence: Synthetic peptide
SLFGSDPLST

SEQ ID NO: 8290 - protein, 9 aa, synthetic construct
  REGION 1..9: note = Description of Artificial Sequence: Synthetic peptide
RALGPGATL

SEQ ID NO: 8291 - protein, 10 aa, synthetic construct
  REGION 1..10: note = Description of Artificial Sequence: Synthetic peptide
SLFGSDPLSQ

SEQ ID NO: 8292 - protein, 9 aa, synthetic construct
  REGION 1..9: note = Description of Artificial Sequence: Synthetic peptide
RALGPGASL

SEQ ID NO: 8293 - protein, 9 aa, synthetic construct
  REGION 1..9: note = Description of Artificial Sequence: Synthetic peptide
RAVGLGAVL

SEQ ID NO: 8294 - protein, 9 aa, synthetic construct
  REGION 1..9: note = Description of Artificial Sequence: Synthetic peptide
KALTDIVTL

SEQ ID NO: 8295 - protein, 10 aa, synthetic construct
  REGION 1..10: note = Description of Artificial Sequence: Synthetic peptide
TDNGSNFTSN

SEQ ID NO: 8296 - protein, 10 aa, synthetic construct
  REGION 1..10: note = Description of Artificial Sequence: Synthetic peptide
VSFDPIPIHY

SEQ ID NO: 8297 - protein, 10 aa, synthetic construct
  REGION 1..10: note = Description of Artificial Sequence: Synthetic peptide
VTFDPIPIHY

SEQ ID NO: 8298 - protein, 9 aa, synthetic construct
  REGION 1..9: note = Description of Artificial Sequence: Synthetic peptide
NAKTIIVHL

SEQ ID NO: 8299 - protein, 9 aa, synthetic construct
  REGION 1..9: note = Description of Artificial Sequence: Synthetic peptide
QAKGLGISY

SEQ ID NO: 8300 - protein, 9 aa, synthetic construct
  REGION 1..9: note = Description of Artificial Sequence: Synthetic peptide
KAKPPLPSV

SEQ ID NO: 8301 - protein, 9 aa, synthetic construct
  REGION 1..9: note = Description of Artificial Sequence: Synthetic peptide
GAASITLTV

SEQ ID NO: 8302 - protein, 9 aa, synthetic construct
  REGION 1..9: note = Description of Artificial Sequence: Synthetic peptide
ASITLTVQV

SEQ ID NO: 8303 - protein, 9 aa, synthetic construct
  REGION 1..9: note = Description of Artificial Sequence: Synthetic peptide
HFPNKTIEF

SEQ ID NO: 8304 - protein, 9 aa, synthetic construct
  REGION 1..9: note = Description of Artificial Sequence: Synthetic peptide
HFQNKTIEF

SEQ ID NO: 8305 - protein, 10 aa, synthetic construct
  REGION 1..10: note = Description of Artificial Sequence: Synthetic peptide
AFPEGEAREF

SEQ ID NO: 8306 - protein, 9 aa, synthetic construct
  REGION 1..9: note = Description of Artificial Sequence: Synthetic peptide
FYQEPFKNL

SEQ ID NO: 8307 - protein, 9 aa, synthetic construct
  REGION 1..9: note = Description of Artificial Sequence: Synthetic peptide
HFPNKAIKF

SEQ ID NO: 8308 - protein, 8 aa, synthetic construct
  REGION 1..8: note = Description of Artificial Sequence: Synthetic peptide
SFNITTEL

SEQ ID NO: 8309 - protein, 10 aa, synthetic construct
  REGION 1..10: note = Description of Artificial Sequence: Synthetic peptide
AFPQGEAREF

SEQ ID NO: 8310 - protein, 9 aa, synthetic construct
  REGION 1..9: note = Description of Artificial Sequence: Synthetic peptide
HFPNKTIIF

SEQ ID NO: 8311 - protein, 9 aa, synthetic construct
  REGION 1..9: note = Description of Artificial Sequence: Synthetic peptide
IYQEPFKNL

SEQ ID NO: 8312 - protein, 8 aa, synthetic construct
  REGION 1..8: note = Description of Artificial Sequence: Synthetic peptide
SFNATTEL

SEQ ID NO: 8313 - protein, 9 aa, synthetic construct
  REGION 1..9: note = Description of Artificial Sequence: Synthetic peptide
SFLYASVDY

SEQ ID NO: 8314 - protein, 10 aa, synthetic construct
  REGION 1..10: note = Description of Artificial Sequence: Synthetic peptide
GFLGTAGSTM

SEQ ID NO: 8315 - protein, 9 aa, synthetic construct
  REGION 1..9: note = Description of Artificial Sequence: Synthetic peptide
LFNSTKLEL

SEQ ID NO: 8316 - protein, 9 aa, synthetic construct
  REGION 1..9: note = Description of Artificial Sequence: Synthetic peptide
AYIEYRKLL

SEQ ID NO: 8317 - protein, 10 aa, synthetic construct
  REGION 1..10: note = Description of Artificial Sequence: Synthetic peptide
AFQQGKAREF

SEQ ID NO: 8318 - protein, 9 aa, synthetic construct
  REGION 1..9: note = Description of Artificial Sequence: Synthetic peptide
TYQIYQEPF

SEQ ID NO: 8319 - protein, 8 aa, synthetic construct
  REGION 1..8: note = Description of Artificial Sequence: Synthetic peptide
VYNTQGYF

SEQ ID NO: 8320 - protein, 10 aa, synthetic construct
  REGION 1..10: note = Description of Artificial Sequence: Synthetic peptide
GFLGAAGSTM

SEQ ID NO: 8321 - protein, 9 aa, synthetic construct
  REGION 1..9: note = Description of Artificial Sequence: Synthetic peptide
KYLGSLVQY

SEQ ID NO: 8322 - protein, 8 aa, synthetic construct
  REGION 1..8: note = Description of Artificial Sequence: Synthetic peptide
VYHTQGYF

SEQ ID NO: 8323 - protein, 11 aa, synthetic construct
  REGION 1..11: note = Description of Artificial Sequence: Synthetic peptide
FYVDGAANREI

SEQ ID NO: 8324 - protein, 9 aa, synthetic construct
  REGION 1..9: note = Description of Artificial Sequence: Synthetic peptide
FFYCNTSSL

SEQ ID NO: 8325 - protein, 9 aa, synthetic construct
  REGION 1..9: note = Description of Artificial Sequence: Synthetic peptide
LFNTVATLY

SEQ ID NO: 8326 - protein, 9 aa, synthetic construct
  REGION 1..9: note = Description of Artificial Sequence: Synthetic peptide
IFRPGGGNM

SEQ ID NO: 8327 - protein, 9 aa, synthetic construct
  REGION 1..9: note = Description of Artificial Sequence: Synthetic peptide
IFWDDLRSL

SEQ ID NO: 8328 - protein, 9 aa, synthetic construct
  REGION 1..9: note = Description of Artificial Sequence: Synthetic peptide
KYHSNWRAM

SEQ ID NO: 8329 - protein, 8 aa, synthetic construct
  REGION 1..8: note = Description of Artificial Sequence: Synthetic peptide
NYPIVQNL

SEQ ID NO: 8330 - protein, 8 aa, synthetic construct
  REGION 1..8: note = Description of Artificial Sequence: Synthetic peptide
SFNITTEL

SEQ ID NO: 8331 - protein, 9 aa, synthetic construct
  REGION 1..9: note = Description of Artificial Sequence: Synthetic peptide
HFQNKTIEF

SEQ ID NO: 8332 - protein, 10 aa, synthetic construct
  REGION 1..10: note = Description of Artificial Sequence: Synthetic peptide
AFPEGEAREF

SEQ ID NO: 8333 - protein, 9 aa, synthetic construct
  REGION 1..9: note = Description of Artificial Sequence: Synthetic peptide
IYQEPFKNL

SEQ ID NO: 8334 - protein, 10 aa, synthetic construct
  REGION 1..10: note = Description of Artificial Sequence: Synthetic peptide
GFLGTAGSTM

SEQ ID NO: 8335 - protein, 10 aa, synthetic construct
  REGION 1..10: note = Description of Artificial Sequence: Synthetic peptide
GFLGAAGSTM

SEQ ID NO: 8336 - protein, 9 aa, synthetic construct
  REGION 1..9: note = Description of Artificial Sequence: Synthetic peptide
FYQEPFKNL

SEQ ID NO: 8337 - protein, 9 aa, synthetic construct
  REGION 1..9: note = Description of Artificial Sequence: Synthetic peptide
HFPNKTIEF

SEQ ID NO: 8338 - protein, 10 aa, synthetic construct
  REGION 1..10: note = Description of Artificial Sequence: Synthetic peptide
AFPQGEAREF

SEQ ID NO: 8339 - protein, 9 aa, synthetic construct
  REGION 1..9: note = Description of Artificial Sequence: Synthetic peptide
KYLGSLVQY

SEQ ID NO: 8340 - protein, 8 aa, synthetic construct
  REGION 1..8: note = Description of Artificial Sequence: Synthetic peptide
SFNATTEL

SEQ ID NO: 8341 - protein, 9 aa, synthetic construct
  REGION 1..9: note = Description of Artificial Sequence: Synthetic peptide
TYQIYQEPF

SEQ ID NO: 8342 - protein, 8 aa, synthetic construct
  REGION 1..8: note = Description of Artificial Sequence: Synthetic peptide
VYNTQGYF

SEQ ID NO: 8343 - protein, 9 aa, synthetic construct
  REGION 1..9: note = Description of Artificial Sequence: Synthetic peptide
SSTSRELQV

SEQ ID NO: 8344 - protein, 9 aa, synthetic construct
  REGION 1..9: note = Description of Artificial Sequence: Synthetic peptide
ASITLTVQV

SEQ ID NO: 8345 - protein, 9 aa, synthetic construct
  REGION 1..9: note = Description of Artificial Sequence: Synthetic peptide
SNITGLLLV

SEQ ID NO: 8346 - protein, 9 aa, synthetic construct
  REGION 1..9: note = Description of Artificial Sequence: Synthetic peptide
RSNITGLLL

SEQ ID NO: 8347 - protein, 10 aa, synthetic construct
  REGION 1..10: note = Description of Artificial Sequence: Synthetic peptide
KVVEIKPLGV

SEQ ID NO: 8348 - protein, 10 aa, synthetic construct
  REGION 1..10: note = Description of Artificial Sequence: Synthetic peptide
KVVEVKPLGV

SEQ ID NO: 8349 - protein, 9 aa, synthetic construct
  REGION 1..9: note = Description of Artificial Sequence: Synthetic peptide
ASVDYRLGV

SEQ ID NO: 8350 - protein, 9 aa, synthetic construct
  REGION 1..9: note = Description of Artificial Sequence: Synthetic peptide
YTNTIYRLL

SEQ ID NO: 8351 - protein, 9 aa, synthetic construct
  REGION 1..9: note = Description of Artificial Sequence: Synthetic peptide
RILQRLLFV

SEQ ID NO: 8352 - protein, 9 aa, synthetic construct
  REGION 1..9: note = Description of Artificial Sequence: Synthetic peptide
TNNAKIIIV

SEQ ID NO: 8353 - protein, 9 aa, synthetic construct
  REGION 1..9: note = Description of Artificial Sequence: Synthetic peptide
ANSPTSREL

SEQ ID NO: 8354 - protein, 9 aa, synthetic construct
  REGION 1..9: note = Description of Artificial Sequence: Synthetic peptide
GAASITLTV

SEQ ID NO: 8355 - protein, 8 aa, synthetic construct
  REGION 1..8: note = Description of Artificial Sequence: Synthetic peptide
NSSTSREL

SEQ ID NO: 8356 - protein, 9 aa, synthetic construct
  REGION 1..9: note = Description of Artificial Sequence: Synthetic peptide
SSTSRELQV

SEQ ID NO: 8357 - protein, 9 aa, synthetic construct
  REGION 1..9: note = Description of Artificial Sequence: Synthetic peptide
VSSGIRKVL

SEQ ID NO: 8358 - protein, 11 aa, synthetic construct
  REGION 1..11: note = Description of Artificial Sequence: Synthetic peptide
LAFPEGEAREF

SEQ ID NO: 8359 - protein, 9 aa, synthetic construct
  REGION 1..9: note = Description of Artificial Sequence: Synthetic peptide
ANSPTSREL

SEQ ID NO: 8360 - protein, 9 aa, synthetic construct
  REGION 1..9: note = Description of Artificial Sequence: Synthetic peptide
KAKPPLPSV

SEQ ID NO: 8361 - protein, 10 aa, synthetic construct
  REGION 1..10: note = Description of Artificial Sequence: Synthetic peptide
IATDIQTKEL

SEQ ID NO: 8362 - protein, 10 aa, synthetic construct
  REGION 1..10: note = Description of Artificial Sequence: Synthetic peptide
IASDIQTKEL

SEQ ID NO: 8363 - protein, 10 aa, synthetic construct
  REGION 1..10: note = Description of Artificial Sequence: Synthetic peptide
IATDLQTKEL

SEQ ID NO: 8364 - protein, 9 aa, synthetic construct
  REGION 1..9: note = Description of Artificial Sequence: Synthetic peptide
QAKGLGISY

SEQ ID NO: 8365 - protein, 9 aa, synthetic construct
  REGION 1..9: note = Description of Artificial Sequence: Synthetic peptide
KAIEAQQHM

SEQ ID NO: 8366 - protein, 9 aa, synthetic construct
  REGION 1..9: note = Description of Artificial Sequence: Synthetic peptide
RAIEAQQHL

SEQ ID NO: 8367 - protein, 9 aa, synthetic construct
  REGION 1..9: note = Description of Artificial Sequence: Synthetic peptide
RAIEAQQHM

SEQ ID NO: 8368 - protein, 9 aa, synthetic construct
  REGION 1..9: note = Description of Artificial Sequence: Synthetic peptide
GAASITLTV

SEQ ID NO: 8369 - protein, 9 aa, synthetic construct
  REGION 1..9: note = Description of Artificial Sequence: Synthetic peptide
AEGETIIRF

SEQ ID NO: 8370 - protein, 11 aa, synthetic construct
  REGION 1..11: note = Description of Artificial Sequence: Synthetic peptide
AEIQKQGQNQW

SEQ ID NO: 8371 - protein, 11 aa, synthetic construct
  REGION 1..11: note = Description of Artificial Sequence: Synthetic peptide
AEIQKQGNDQW

SEQ ID NO: 8372 - protein, 9 aa, synthetic construct
  REGION 1..9: note = Description of Artificial Sequence: Synthetic peptide
IRIGPGQTF

SEQ ID NO: 8373 - protein, 11 aa, synthetic construct
  REGION 1..11: note = Description of Artificial Sequence: Synthetic peptide
AEIQKQGQDQW

SEQ ID NO: 8374 - protein, 11 aa, synthetic construct
  REGION 1..11: note = Description of Artificial Sequence: Synthetic peptide
SEVNIVTDSQY

SEQ ID NO: 8375 - protein, 9 aa, synthetic construct
  REGION 1..9: note = Description of Artificial Sequence: Synthetic peptide
IRIGPGQAF

SEQ ID NO: 8376 - protein, 9 aa, synthetic construct
  REGION 1..9: note = Description of Artificial Sequence: Synthetic peptide
IRIGPGQVF

SEQ ID NO: 8377 - protein, 9 aa, synthetic construct
  REGION 1..9: note = Description of Artificial Sequence: Synthetic peptide
QAKGLGISY

SEQ ID NO: 8378 - protein, 9 aa, synthetic construct
  REGION 1..9: note = Description of Artificial Sequence: Synthetic peptide
EEINLPGKW

SEQ ID NO: 8379 - protein, 11 aa, synthetic construct
  REGION 1..11: note = Description of Artificial Sequence: Synthetic peptide
SEANIVTDSQY

SEQ ID NO: 8380 - protein, 9 aa, synthetic construct
  REGION 1..9: note = Description of Artificial Sequence: Synthetic peptide
EEVSLPGKW

SEQ ID NO: 8381 - protein, 11 aa, synthetic construct
  REGION 1..11: note = Description of Artificial Sequence: Synthetic peptide
AEQATQDVKNW

SEQ ID NO: 8382 - protein, 9 aa, synthetic construct
  REGION 1..9: note = Description of Artificial Sequence: Synthetic peptide
KALTDIVTL

SEQ ID NO: 8383 - protein, 9 aa, synthetic construct
  REGION 1..9: note = Description of Artificial Sequence: Synthetic peptide
MIVGGVIGL

SEQ ID NO: 8384 - protein, 8 aa, synthetic construct
  REGION 1..8: note = Description of Artificial Sequence: Synthetic peptide
VAARVLEL

SEQ ID NO: 8385 - protein, 10 aa, synthetic construct
  REGION 1..10: note = Description of Artificial Sequence: Synthetic peptide
RAVGIGAVFL

SEQ ID NO: 8386 - protein, 8 aa, synthetic construct
  REGION 1..8: note = Description of Artificial Sequence: Synthetic peptide
IAARAVEL

SEQ ID NO: 8387 - protein, 8 aa, synthetic construct
  REGION 1..8: note = Description of Artificial Sequence: Synthetic peptide
IAARTVEL

SEQ ID NO: 8388 - protein, 10 aa, synthetic construct
  REGION 1..10: note = Description of Artificial Sequence: Synthetic peptide
YAPPIEGIIM

SEQ ID NO: 8389 - protein, 8 aa, synthetic construct
  REGION 1..8: note = Description of Artificial Sequence: Synthetic peptide
FALNPDLL

SEQ ID NO: 8390 - protein, 9 aa, synthetic construct
  REGION 1..9: note = Description of Artificial Sequence: Synthetic peptide
TSEPIPIHY

SEQ ID NO: 8391 - protein, 11 aa, synthetic construct
  REGION 1..11: note = Description of Artificial Sequence: Synthetic peptide
ISEAQDDHDKY

SEQ ID NO: 8392 - protein, 9 aa, synthetic construct
  REGION 1..9: note = Description of Artificial Sequence: Synthetic peptide
GTEELRSLY

SEQ ID NO: 8393 - protein, 9 aa, synthetic construct
  REGION 1..9: note = Description of Artificial Sequence: Synthetic peptide
GSEEIKSLY

SEQ ID NO: 8394 - protein, 8 aa, synthetic construct
  REGION 1..8: note = Description of Artificial Sequence: Synthetic peptide
VLDVGDAY

SEQ ID NO: 8395 - protein, 10 aa, synthetic construct
  REGION 1..10: note = Description of Artificial Sequence: Synthetic peptide
VTVLDVGDAY

SEQ ID NO: 8396 - protein, 10 aa, synthetic construct
  REGION 1..10: note = Description of Artificial Sequence: Synthetic peptide
PSETGQETAY

SEQ ID NO: 8397 - protein, 9 aa, synthetic construct
  REGION 1..9: note = Description of Artificial Sequence: Synthetic peptide
LADQLIHMY

SEQ ID NO: 8398 - protein, 9 aa, synthetic construct
  REGION 1..9: note = Description of Artificial Sequence: Synthetic peptide
SLYNTVVTL

SEQ ID NO: 8399 - protein, 9 aa, synthetic construct
  REGION 1..9: note = Description of Artificial Sequence: Synthetic peptide
SLYNTVATL

SEQ ID NO: 8400 - protein, 9 aa, synthetic construct
  REGION 1..9: note = Description of Artificial Sequence: Synthetic peptide
VLAEAMSQA

SEQ ID NO: 8401 - protein, 9 aa, synthetic construct
  REGION 1..9: note = Description of Artificial Sequence: Synthetic peptide
AVLSVVNRV

SEQ ID NO: 8402 - protein, 9 aa, synthetic construct
  REGION 1..9: note = Description of Artificial Sequence: Synthetic peptide
ILKEPVHGV

SEQ ID NO: 8403 - protein, 9 aa, synthetic construct
  REGION 1..9: note = Description of Artificial Sequence: Synthetic peptide
SLFNTVATL

SEQ ID NO: 8404 - protein, 9 aa, synthetic construct
  REGION 1..9: note = Description of Artificial Sequence: Synthetic peptide
GLADQLIHI

SEQ ID NO: 8405 - protein, 9 aa, synthetic construct
  REGION 1..9: note = Description of Artificial Sequence: Synthetic peptide
QLTEAVQKI

SEQ ID NO: 8406 - protein, 9 aa, synthetic construct
  REGION 1..9: note = Description of Artificial Sequence: Synthetic peptide
ILGQLQPAL

SEQ ID NO: 8407 - protein, 9 aa, synthetic construct
  REGION 1..9: note = Description of Artificial Sequence: Synthetic peptide
QLAEAVQRI

SEQ ID NO: 8408 - protein, 9 aa, synthetic construct
  REGION 1..9: note = Description of Artificial Sequence: Synthetic peptide
ALIEICSEL

SEQ ID NO: 8409 - protein, 9 aa, synthetic construct
  REGION 1..9: note = Description of Artificial Sequence: Synthetic peptide
AMSQATNSV

SEQ ID NO: 8410 - protein, 9 aa, synthetic construct
  REGION 1..9: note = Description of Artificial Sequence: Synthetic peptide
ALTEICTEM

SEQ ID NO: 8411 - protein, 10 aa, synthetic construct
  REGION 1..10: note = Description of Artificial Sequence: Synthetic peptide
TLWQRPVVTV

SEQ ID NO: 8412 - protein, 9 aa, synthetic construct
  REGION 1..9: note = Description of Artificial Sequence: Synthetic peptide
RLINCTTSV

SEQ ID NO: 8413 - protein, 9 aa, synthetic construct
  REGION 1..9: note = Description of Artificial Sequence: Synthetic peptide
IITDSQYAL

SEQ ID NO: 8414 - protein, 9 aa, synthetic construct
  REGION 1..9: note = Description of Artificial Sequence: Synthetic peptide
AVLSLVNRV

SEQ ID NO: 8415 - protein, 9 aa, synthetic construct
  REGION 1..9: note = Description of Artificial Sequence: Synthetic peptide
IVTDSQYAL

SEQ ID NO: 8416 - protein, 9 aa, synthetic construct
  REGION 1..9: note = Description of Artificial Sequence: Synthetic peptide
ILKEPVHGV

SEQ ID NO: 8417 - protein, 9 aa, synthetic construct
  REGION 1..9: note = Description of Artificial Sequence: Synthetic peptide
VLAEAMSQA

SEQ ID NO: 8418 - protein, 9 aa, synthetic construct
  REGION 1..9: note = Description of Artificial Sequence: Synthetic peptide
SLYNTVATL

SEQ ID NO: 8419 - protein, 9 aa, synthetic construct
  REGION 1..9: note = Description of Artificial Sequence: Synthetic peptide
VVKIEPLGV

SEQ ID NO: 8420 - protein, 9 aa, synthetic construct
  REGION 1..9: note = Description of Artificial Sequence: Synthetic peptide
QLAEAVQRI

SEQ ID NO: 8421 - protein, 9 aa, synthetic construct
  REGION 1..9: note = Description of Artificial Sequence: Synthetic peptide
SLFNTVATL

SEQ ID NO: 8422 - protein, 9 aa, synthetic construct
  REGION 1..9: note = Description of Artificial Sequence: Synthetic peptide
SLYNTVVTL

SEQ ID NO: 8423 - protein, 9 aa, synthetic construct
  REGION 1..9: note = Description of Artificial Sequence: Synthetic peptide
ILKEPVHGA

SEQ ID NO: 8424 - protein, 9 aa, synthetic construct
  REGION 1..9: note = Description of Artificial Sequence: Synthetic peptide
NIIGNIRQA

SEQ ID NO: 8425 - protein, 9 aa, synthetic construct
  REGION 1..9: note = Description of Artificial Sequence: Synthetic peptide
QIKPPLPSV

SEQ ID NO: 8426 - protein, 9 aa, synthetic construct
  REGION 1..9: note = Description of Artificial Sequence: Synthetic peptide
AMSQATNSV

SEQ ID NO: 8427 - protein, 9 aa, synthetic construct
  REGION 1..9: note = Description of Artificial Sequence: Synthetic peptide
QLQARILAV

SEQ ID NO: 8428 - protein, 10 aa, synthetic construct
  REGION 1..10: note = Description of Artificial Sequence: Synthetic peptide
YLKDQQLLGI

SEQ ID NO: 8429 - protein, 9 aa, synthetic construct
  REGION 1..9: note = Description of Artificial Sequence: Synthetic peptide
KIKPPLPSV

SEQ ID NO: 8430 - protein, 9 aa, synthetic construct
  REGION 1..9: note = Description of Artificial Sequence: Synthetic peptide
QLKKIIGQV

SEQ ID NO: 8431 - protein, 11 aa, synthetic construct
  REGION 1..11: note = Description of Artificial Sequence: Synthetic peptide
FLKDKGGLEGL

SEQ ID NO: 8432 - protein, 10 aa, synthetic construct
  REGION 1..10: note = Description of Artificial Sequence: Synthetic peptide
ALTEVIPLTA

SEQ ID NO: 8433 - protein, 9 aa, synthetic construct
  REGION 1..9: note = Description of Artificial Sequence: Synthetic peptide
VVRIEPIGV

SEQ ID NO: 8434 - protein, 10 aa, synthetic construct
  REGION 1..10: note = Description of Artificial Sequence: Synthetic peptide
TLWQRPVVTV

SEQ ID NO: 8435 - protein, 9 aa, synthetic construct
  REGION 1..9: note = Description of Artificial Sequence: Synthetic peptide
AVLSVVNRV

SEQ ID NO: 8436 - protein, 10 aa, synthetic construct
  REGION 1..10: note = Description of Artificial Sequence: Synthetic peptide
ILIATRIVGL

SEQ ID NO: 8437 - protein, 9 aa, synthetic construct
  REGION 1..9: note = Description of Artificial Sequence: Synthetic peptide
ALFYKLDVV

SEQ ID NO: 8438 - protein, 9 aa, synthetic construct
  REGION 1..9: note = Description of Artificial Sequence: Synthetic peptide
ALKTGTEEL

SEQ ID NO: 8439 - protein, 9 aa, synthetic construct
  REGION 1..9: note = Description of Artificial Sequence: Synthetic peptide
ELKSLFNTV

SEQ ID NO: 8440 - protein, 8 aa, synthetic construct
  REGION 1..8: note = Description of Artificial Sequence: Synthetic peptide
VLSVVNRV

SEQ ID NO: 8441 - protein, 10 aa, synthetic construct
  REGION 1..10: note = Description of Artificial Sequence: Synthetic peptide
ALFLGFLGTA

SEQ ID NO: 8442 - protein, 9 aa, synthetic construct
  REGION 1..9: note = Description of Artificial Sequence: Synthetic peptide
QLQARVLAV

SEQ ID NO: 8443 - protein, 11 aa, synthetic construct
  REGION 1..11: note = Description of Artificial Sequence: Synthetic peptide
FLKEKGGLEGL

SEQ ID NO: 8444 - protein, 9 aa, synthetic construct
  REGION 1..9: note = Description of Artificial Sequence: Synthetic peptide
TVFSLVNRV

SEQ ID NO: 8445 - protein, 9 aa, synthetic construct
  REGION 1..9: note = Description of Artificial Sequence: Synthetic peptide
ALIEICSEL

SEQ ID NO: 8446 - protein, 9 aa, synthetic construct
  REGION 1..9: note = Description of Artificial Sequence: Synthetic peptide
ALNPGLLET

SEQ ID NO: 8447 - protein, 9 aa, synthetic construct
  REGION 1..9: note = Description of Artificial Sequence: Synthetic peptide
QLTEAVQKI

SEQ ID NO: 8448 - protein, 9 aa, synthetic construct
  REGION 1..9: note = Description of Artificial Sequence: Synthetic peptide
TLWQRPLVA

SEQ ID NO: 8449 - protein, 9 aa, synthetic construct
  REGION 1..9: note = Description of Artificial Sequence: Synthetic peptide
ILRETVHGA

SEQ ID NO: 8450 - protein, 10 aa, synthetic construct
  REGION 1..10: note = Description of Artificial Sequence: Synthetic peptide
ALIWDDLRSL

SEQ ID NO: 8451 - protein, 9 aa, synthetic construct
  REGION 1..9: note = Description of Artificial Sequence: Synthetic peptide
GAASVTLTV

SEQ ID NO: 8452 - protein, 9 aa, synthetic construct
  REGION 1..9: note = Description of Artificial Sequence: Synthetic peptide
NVKTIIVQL

SEQ ID NO: 8453 - protein, 9 aa, synthetic construct
  REGION 1..9: note = Description of Artificial Sequence: Synthetic peptide
ALSPRTLNA

SEQ ID NO: 8454 - protein, 10 aa, synthetic construct
  REGION 1..10: note = Description of Artificial Sequence: Synthetic peptide
ALIWDDLRNL

SEQ ID NO: 8455 - protein, 10 aa, synthetic construct
  REGION 1..10: note = Description of Artificial Sequence: Synthetic peptide
SLFDAIAIAV

SEQ ID NO: 8456 - protein, 9 aa, synthetic construct
  REGION 1..9: note = Description of Artificial Sequence: Synthetic peptide
ELKKIIGQV

SEQ ID NO: 8457 - protein, 10 aa, synthetic construct
  REGION 1..10: note = Description of Artificial Sequence: Synthetic peptide
VLFLDGISEA

SEQ ID NO: 8458 - protein, 9 aa, synthetic construct
  REGION 1..9: note = Description of Artificial Sequence: Synthetic peptide
VVQIEPLGV

SEQ ID NO: 8459 - protein, 9 aa, synthetic construct
  REGION 1..9: note = Description of Artificial Sequence: Synthetic peptide
MIIGGLIGL

SEQ ID NO: 8460 - protein, 10 aa, synthetic construct
  REGION 1..10: note = Description of Artificial Sequence: Synthetic peptide
KLVSQGIRKV

SEQ ID NO: 8461 - protein, 9 aa, synthetic construct
  REGION 1..9: note = Description of Artificial Sequence: Synthetic peptide
RLINCTTSV

SEQ ID NO: 8462 - protein, 10 aa, synthetic construct
  REGION 1..10: note = Description of Artificial Sequence: Synthetic peptide
KVVKIEPLGV

SEQ ID NO: 8463 - protein, 9 aa, synthetic construct
  REGION 1..9: note = Description of Artificial Sequence: Synthetic peptide
AVLSLVNRV

SEQ ID NO: 8464 - protein, 9 aa, synthetic construct
  REGION 1..9: note = Description of Artificial Sequence: Synthetic peptide
SLFNAVAVL

SEQ ID NO: 8465 - protein, 9 aa, synthetic construct
  REGION 1..9: note = Description of Artificial Sequence: Synthetic peptide
GLADQLIHI

SEQ ID NO: 8466 - protein, 10 aa, synthetic construct
  REGION 1..10: note = Description of Artificial Sequence: Synthetic peptide
GLIGLRIVFA

SEQ ID NO: 8467 - protein, 9 aa, synthetic construct
  REGION 1..9: note = Description of Artificial Sequence: Synthetic peptide
LIAARIVEL

SEQ ID NO: 8468 - protein, 10 aa, synthetic construct
  REGION 1..10: note = Description of Artificial Sequence: Synthetic peptide
KVVQIEPLGV

SEQ ID NO: 8469 - protein, 9 aa, synthetic construct
  REGION 1..9: note = Description of Artificial Sequence: Synthetic peptide
KVIGDIRQA

SEQ ID NO: 8470 - protein, 8 aa, synthetic construct
  REGION 1..8: note = Description of Artificial Sequence: Synthetic peptide
VLSLVNRV

SEQ ID NO: 8471 - protein, 9 aa, synthetic construct
  REGION 1..9: note = Description of Artificial Sequence: Synthetic peptide
GAASLTLTV

SEQ ID NO: 8472 - protein, 9 aa, synthetic construct
  REGION 1..9: note = Description of Artificial Sequence: Synthetic peptide
GQALFTTKV

SEQ ID NO: 8473 - protein, 10 aa, synthetic construct
  REGION 1..10: note = Description of Artificial Sequence: Synthetic peptide
ILIAVRIVEL

SEQ ID NO: 8474 - protein, 9 aa, synthetic construct
  REGION 1..9: note = Description of Artificial Sequence: Synthetic peptide
LLNTTAIAV

SEQ ID NO: 8475 - protein, 9 aa, synthetic construct
  REGION 1..9: note = Description of Artificial Sequence: Synthetic peptide
LLQYWIQEL

SEQ ID NO: 8476 - protein, 9 aa, synthetic construct
  REGION 1..9: note = Description of Artificial Sequence: Synthetic peptide
SLYNTVVTL

SEQ ID NO: 8477 - protein, 9 aa, synthetic construct
  REGION 1..9: note = Description of Artificial Sequence: Synthetic peptide
SISNWLWYI

SEQ ID NO: 8478 - protein, 9 aa, synthetic construct
  REGION 1..9: note = Description of Artificial Sequence: Synthetic peptide
SITQWLWYI

SEQ ID NO: 8479 - protein, 9 aa, synthetic construct
  REGION 1..9: note = Description of Artificial Sequence: Synthetic peptide
SLFNTVATL

SEQ ID NO: 8480 - protein, 9 aa, synthetic construct
  REGION 1..9: note = Description of Artificial Sequence: Synthetic peptide
SLYNTVATL

SEQ ID NO: 8481 - protein, 9 aa, synthetic construct
  REGION 1..9: note = Description of Artificial Sequence: Synthetic peptide
AVLSVVNRV

SEQ ID NO: 8482 - protein, 10 aa, synthetic construct
  REGION 1..10: note = Description of Artificial Sequence: Synthetic peptide
NLLQYWIQEL

SEQ ID NO: 8483 - protein, 9 aa, synthetic construct
  REGION 1..9: note = Description of Artificial Sequence: Synthetic peptide
ILKEPVHGV

SEQ ID NO: 8484 - protein, 10 aa, synthetic construct
  REGION 1..10: note = Description of Artificial Sequence: Synthetic peptide
ALIWDDLRNL

SEQ ID NO: 8485 - protein, 9 aa, synthetic construct
  REGION 1..9: note = Description of Artificial Sequence: Synthetic peptide
ILAIVVWTI

SEQ ID NO: 8486 - protein, 9 aa, synthetic construct
  REGION 1..9: note = Description of Artificial Sequence: Synthetic peptide
GLADQLIHI

SEQ ID NO: 8487 - protein, 9 aa, synthetic construct
  REGION 1..9: note = Description of Artificial Sequence: Synthetic peptide
AVLSLVNRV

SEQ ID NO: 8488 - protein, 9 aa, synthetic construct
  REGION 1..9: note = Description of Artificial Sequence: Synthetic peptide
VVSQIIEQL

SEQ ID NO: 8489 - protein, 9 aa, synthetic construct
  REGION 1..9: note = Description of Artificial Sequence: Synthetic peptide
LIWDDLRNL

SEQ ID NO: 8490 - protein, 10 aa, synthetic construct
  REGION 1..10: note = Description of Artificial Sequence: Synthetic peptide
ALIWDDLRSL

SEQ ID NO: 8491 - protein, 9 aa, synthetic construct
  REGION 1..9: note = Description of Artificial Sequence: Synthetic peptide
AILNIPVRI

SEQ ID NO: 8492 - protein, 9 aa, synthetic construct
  REGION 1..9: note = Description of Artificial Sequence: Synthetic peptide
LLQYWSQEL

SEQ ID NO: 8493 - protein, 9 aa, synthetic construct
  REGION 1..9: note = Description of Artificial Sequence: Synthetic peptide
ILGQLQPAL

SEQ ID NO: 8494 - protein, 9 aa, synthetic construct
  REGION 1..9: note = Description of Artificial Sequence: Synthetic peptide
ALTEIIPLT

SEQ ID NO: 8495 - protein, 9 aa, synthetic construct
  REGION 1..9: note = Description of Artificial Sequence: Synthetic peptide
TLNAWVKVI

SEQ ID NO: 8496 - protein, 9 aa, synthetic construct
  REGION 1..9: note = Description of Artificial Sequence: Synthetic peptide
ALIEICSEL

SEQ ID NO: 8497 - protein, 9 aa, synthetic construct
  REGION 1..9: note = Description of Artificial Sequence: Synthetic peptide
LIWDDLRSL

SEQ ID NO: 8498 - protein, 10 aa, synthetic construct
  REGION 1..10: note = Description of Artificial Sequence: Synthetic peptide
TLWQRPLVTI

SEQ ID NO: 8499 - protein, 9 aa, synthetic construct
  REGION 1..9: note = Description of Artificial Sequence: Synthetic peptide
HLWKWGTML

SEQ ID NO: 8500 - protein, 10 aa, synthetic construct
  REGION 1..10: note = Description of Artificial Sequence: Synthetic peptide
ILIAVRIVEL

SEQ ID NO: 8501 - protein, 9 aa, synthetic construct
  REGION 1..9: note = Description of Artificial Sequence: Synthetic peptide
GLFNSTWNI

SEQ ID NO: 8502 - protein, 10 aa, synthetic construct
  REGION 1..10: note = Description of Artificial Sequence: Synthetic peptide
ILIATRIVGL

SEQ ID NO: 8503 - protein, 9 aa, synthetic construct
  REGION 1..9: note = Description of Artificial Sequence: Synthetic peptide
LVNQIIEQL

SEQ ID NO: 8504 - protein, 9 aa, synthetic construct
  REGION 1..9: note = Description of Artificial Sequence: Synthetic peptide
LVSQIIEQL

SEQ ID NO: 8505 - protein, 9 aa, synthetic construct
  REGION 1..9: note = Description of Artificial Sequence: Synthetic peptide
MIIGGLIGL

SEQ ID NO: 8506 - protein, 9 aa, synthetic construct
  REGION 1..9: note = Description of Artificial Sequence: Synthetic peptide
KIKPPLPSV

SEQ ID NO: 8507 - protein, 10 aa, synthetic construct
  REGION 1..10: note = Description of Artificial Sequence: Synthetic peptide
TLWQRPVVTV

SEQ ID NO: 8508 - protein, 10 aa, synthetic construct
  REGION 1..10: note = Description of Artificial Sequence: Synthetic peptide
ILIAARIVEL

SEQ ID NO: 8509 - protein, 9 aa, synthetic construct
  REGION 1..9: note = Description of Artificial Sequence: Synthetic peptide
ALFYKLDVV

SEQ ID NO: 8510 - protein, 9 aa, synthetic construct
  REGION 1..9: note = Description of Artificial Sequence: Synthetic peptide
TVFSLVNRV

SEQ ID NO: 8511 - protein, 9 aa, synthetic construct
  REGION 1..9: note = Description of Artificial Sequence: Synthetic peptide
SLFNAVAVL

SEQ ID NO: 8512 - protein, 9 aa, synthetic construct
  REGION 1..9: note = Description of Artificial Sequence: Synthetic peptide
ALTEVIPLT

SEQ ID NO: 8513 - protein, 10 aa, synthetic construct
  REGION 1..10: note = Description of Artificial Sequence: Synthetic peptide
SLLNVTAIAV

SEQ ID NO: 8514 - protein, 9 aa, synthetic construct
  REGION 1..9: note = Description of Artificial Sequence: Synthetic peptide
QLQARILAV

SEQ ID NO: 8515 - protein, 9 aa, synthetic construct
  REGION 1..9: note = Description of Artificial Sequence: Synthetic peptide
LIAARIVEL

SEQ ID NO: 8516 - protein, 10 aa, synthetic construct
  REGION 1..10: note = Description of Artificial Sequence: Synthetic peptide
SLFDAIAIAV

SEQ ID NO: 8517 - protein, 9 aa, synthetic construct
  REGION 1..9: note = Description of Artificial Sequence: Synthetic peptide
HLWRWGIML

SEQ ID NO: 8518 - protein, 9 aa, synthetic construct
  REGION 1..9: note = Description of Artificial Sequence: Synthetic peptide
LLNTTAIAV

SEQ ID NO: 8519 - protein, 9 aa, synthetic construct
  REGION 1..9: note = Description of Artificial Sequence: Synthetic peptide
TVNDIQNLV

SEQ ID NO: 8520 - protein, 9 aa, synthetic construct
  REGION 1..9: note = Description of Artificial Sequence: Synthetic peptide
LLNKTIIKF

SEQ ID NO: 8521 - protein, 9 aa, synthetic construct
  REGION 1..9: note = Description of Artificial Sequence: Synthetic peptide
VIWGKIPKF

SEQ ID NO: 8522 - protein, 9 aa, synthetic construct
  REGION 1..9: note = Description of Artificial Sequence: Synthetic peptide
AALDLSHFL

SEQ ID NO: 8523 - protein, 10 aa, synthetic construct
  REGION 1..10: note = Description of Artificial Sequence: Synthetic peptide
TLWQRPLVAI

SEQ ID NO: 8524 - protein, 11 aa, synthetic construct
  REGION 1..11: note = Description of Artificial Sequence: Synthetic peptide
FLKDKGGLEGL

SEQ ID NO: 8525 - protein, 9 aa, synthetic construct
  REGION 1..9: note = Description of Artificial Sequence: Synthetic peptide
LLNKTIINF

SEQ ID NO: 8526 - protein, 9 aa, synthetic construct
  REGION 1..9: note = Description of Artificial Sequence: Synthetic peptide
IIAIVVWTI

SEQ ID NO: 8527 - protein, 9 aa, synthetic construct
  REGION 1..9: note = Description of Artificial Sequence: Synthetic peptide
NVKTIIVQL

SEQ ID NO: 8528 - protein, 9 aa, synthetic construct
  REGION 1..9: note = Description of Artificial Sequence: Synthetic peptide
TVSFNLPQI

SEQ ID NO: 8529 - protein, 9 aa, synthetic construct
  REGION 1..9: note = Description of Artificial Sequence: Synthetic peptide
IITDSQYAL

SEQ ID NO: 8530 - protein, 9 aa, synthetic construct
  REGION 1..9: note = Description of Artificial Sequence: Synthetic peptide
LLRYWSQEL

SEQ ID NO: 8531 - protein, 11 aa, synthetic construct
  REGION 1..11: note = Description of Artificial Sequence: Synthetic peptide
RHFPGPWLHSL

SEQ ID NO: 8532 - protein, 10 aa, synthetic construct
  REGION 1..10: note = Description of Artificial Sequence: Synthetic peptide
NLLQYWSQEL

SEQ ID NO: 8533 - protein, 9 aa, synthetic construct
  REGION 1..9: note = Description of Artificial Sequence: Synthetic peptide
YQSNPPPSL

SEQ ID NO: 8534 - protein, 9 aa, synthetic construct
  REGION 1..9: note = Description of Artificial Sequence: Synthetic peptide
QIKPPLPSV

SEQ ID NO: 8535 - protein, 9 aa, synthetic construct
  REGION 1..9: note = Description of Artificial Sequence: Synthetic peptide
IVTDSQYAL

SEQ ID NO: 8536 - protein, 9 aa, synthetic construct
  REGION 1..9: note = Description of Artificial Sequence: Synthetic peptide
HLEGKVILV

SEQ ID NO: 8537 - protein, 9 aa, synthetic construct
  REGION 1..9: note = Description of Artificial Sequence: Synthetic peptide
TLQQVATKL

SEQ ID NO: 8538 - protein, 11 aa, synthetic construct
  REGION 1..11: note = Description of Artificial Sequence: Synthetic peptide
FLKEKGGLEGL

SEQ ID NO: 8539 - protein, 9 aa, synthetic construct
  REGION 1..9: note = Description of Artificial Sequence: Synthetic peptide
QVQALFYKL

SEQ ID NO: 8540 - protein, 9 aa, synthetic construct
  REGION 1..9: note = Description of Artificial Sequence: Synthetic peptide
QLAEAVQRI

SEQ ID NO: 8541 - protein, 9 aa, synthetic construct
  REGION 1..9: note = Description of Artificial Sequence: Synthetic peptide
YQLEKEPIV

SEQ ID NO: 8542 - protein, 9 aa, synthetic construct
  REGION 1..9: note = Description of Artificial Sequence: Synthetic peptide
ALNPGLLET

SEQ ID NO: 8543 - protein, 9 aa, synthetic construct
  REGION 1..9: note = Description of Artificial Sequence: Synthetic peptide
FPGPWLHSL

SEQ ID NO: 8544 - protein, 9 aa, synthetic construct
  REGION 1..9: note = Description of Artificial Sequence: Synthetic peptide
DILKYLWNL

SEQ ID NO: 8545 - protein, 9 aa, synthetic construct
  REGION 1..9: note = Description of Artificial Sequence: Synthetic peptide
LLQLTVWGI

SEQ ID NO: 8546 - protein, 10 aa, synthetic construct
  REGION 1..10: note = Description of Artificial Sequence: Synthetic peptide
TLLNKTIIKF

SEQ ID NO: 8547 - protein, 9 aa, synthetic construct
  REGION 1..9: note = Description of Artificial Sequence: Synthetic peptide
AIIRILQQL

SEQ ID NO: 8548 - protein, 11 aa, synthetic construct
  REGION 1..11: note = Description of Artificial Sequence: Synthetic peptide
GLFNSTWNISA

SEQ ID NO: 8549 - protein, 9 aa, synthetic construct
  REGION 1..9: note = Description of Artificial Sequence: Synthetic peptide
HLIWASNEL

SEQ ID NO: 8550 - protein, 9 aa, synthetic construct
  REGION 1..9: note = Description of Artificial Sequence: Synthetic peptide
SLNEIWQNM

SEQ ID NO: 8551 - protein, 11 aa, synthetic construct
  REGION 1..11: note = Description of Artificial Sequence: Synthetic peptide
VQLGIPHPAGL

SEQ ID NO: 8552 - protein, 10 aa, synthetic construct
  REGION 1..10: note = Description of Artificial Sequence: Synthetic peptide
RTQDFWEVQL

SEQ ID NO: 8553 - protein, 9 aa, synthetic construct
  REGION 1..9: note = Description of Artificial Sequence: Synthetic peptide
LIAVRIVEL

SEQ ID NO: 8554 - protein, 9 aa, synthetic construct
  REGION 1..9: note = Description of Artificial Sequence: Synthetic peptide
LLNVTAIAV

SEQ ID NO: 8555 - protein, 10 aa, synthetic construct
  REGION 1..10: note = Description of Artificial Sequence: Synthetic peptide
NLLRYWSQEL

SEQ ID NO: 8556 - protein, 9 aa, synthetic construct
  REGION 1..9: note = Description of Artificial Sequence: Synthetic peptide
YQLEKEPII

SEQ ID NO: 8557 - protein, 9 aa, synthetic construct
  REGION 1..9: note = Description of Artificial Sequence: Synthetic peptide
LIATRIVGL

SEQ ID NO: 8558 - protein, 9 aa, synthetic construct
  REGION 1..9: note = Description of Artificial Sequence: Synthetic peptide
KLTPLCVTL

SEQ ID NO: 8559 - protein, 9 aa, synthetic construct
  REGION 1..9: note = Description of Artificial Sequence: Synthetic peptide
RVIEIIQRA

SEQ ID NO: 8560 - protein, 9 aa, synthetic construct
  REGION 1..9: note = Description of Artificial Sequence: Synthetic peptide
VVSQIIEQL

SEQ ID NO: 8561 - protein, 9 aa, synthetic construct
  REGION 1..9: note = Description of Artificial Sequence: Synthetic peptide
KVIGDIRQA

SEQ ID NO: 8562 - protein, 9 aa, synthetic construct
  REGION 1..9: note = Description of Artificial Sequence: Synthetic peptide
LVSQIIEQL

SEQ ID NO: 8563 - protein, 9 aa, synthetic construct
  REGION 1..9: note = Description of Artificial Sequence: Synthetic peptide
TVFSLVNRV

SEQ ID NO: 8564 - protein, 9 aa, synthetic construct
  REGION 1..9: note = Description of Artificial Sequence: Synthetic peptide
VVAKEIVAC

SEQ ID NO: 8565 - protein, 11 aa, synthetic construct
  REGION 1..11: note = Description of Artificial Sequence: Synthetic peptide
TQIDPGLADQL

SEQ ID NO: 8566 - protein, 9 aa, synthetic construct
  REGION 1..9: note = Description of Artificial Sequence: Synthetic peptide
NIIGNIRQA

SEQ ID NO: 8567 - protein, 9 aa, synthetic construct
  REGION 1..9: note = Description of Artificial Sequence: Synthetic peptide
VLAEAMSQA

SEQ ID NO: 8568 - protein, 9 aa, synthetic construct
  REGION 1..9: note = Description of Artificial Sequence: Synthetic peptide
AVLSVVNRV

SEQ ID NO: 8569 - protein, 10 aa, synthetic construct
  REGION 1..10: note = Description of Artificial Sequence: Synthetic peptide
GVVESMNNQL

SEQ ID NO: 8570 - protein, 9 aa, synthetic construct
  REGION 1..9: note = Description of Artificial Sequence: Synthetic peptide
SQATNVNAA

SEQ ID NO: 8571 - protein, 9 aa, synthetic construct
  REGION 1..9: note = Description of Artificial Sequence: Synthetic peptide
AVAEGTDRV

SEQ ID NO: 8572 - protein, 9 aa, synthetic construct
  REGION 1..9: note = Description of Artificial Sequence: Synthetic peptide
GQALFTTKV

SEQ ID NO: 8573 - protein, 11 aa, synthetic construct
  REGION 1..11: note = Description of Artificial Sequence: Synthetic peptide
TQVDPGLADQL

SEQ ID NO: 8574 - protein, 9 aa, synthetic construct
  REGION 1..9: note = Description of Artificial Sequence: Synthetic peptide
QLAEAVQRI

SEQ ID NO: 8575 - protein, 11 aa, synthetic construct
  REGION 1..11: note = Description of Artificial Sequence: Synthetic peptide
VVIQDNSDIKV

SEQ ID NO: 8576 - protein, 10 aa, synthetic construct
  REGION 1..10: note = Description of Artificial Sequence: Synthetic peptide
SEFNLPPVVA

SEQ ID NO: 8577 - protein, 9 aa, synthetic construct
  REGION 1..9: note = Description of Artificial Sequence: Synthetic peptide
SAVSLFNTI

SEQ ID NO: 8578 - protein, 9 aa, synthetic construct
  REGION 1..9: note = Description of Artificial Sequence: Synthetic peptide
RIIEIIQRA

SEQ ID NO: 8579 - protein, 10 aa, synthetic construct
  REGION 1..10: note = Description of Artificial Sequence: Synthetic peptide
SQATAGMNAA

SEQ ID NO: 8580 - protein, 9 aa, synthetic construct
  REGION 1..9: note = Description of Artificial Sequence: Synthetic peptide
WTVNDIQKL

SEQ ID NO: 8581 - protein, 9 aa, synthetic construct
  REGION 1..9: note = Description of Artificial Sequence: Synthetic peptide
ATLEEMMTA

SEQ ID NO: 8582 - protein, 9 aa, synthetic construct
  REGION 1..9: note = Description of Artificial Sequence: Synthetic peptide
IVTDSQYAL

SEQ ID NO: 8583 - protein, 9 aa, synthetic construct
  REGION 1..9: note = Description of Artificial Sequence: Synthetic peptide
REFPSEQTP

SEQ ID NO: 8584 - protein, 10 aa, synthetic construct
  REGION 1..10: note = Description of Artificial Sequence: Synthetic peptide
QVAEKLGNLL

SEQ ID NO: 8585 - protein, 9 aa, synthetic construct
  REGION 1..9: note = Description of Artificial Sequence: Synthetic peptide
ALIEICSEL

SEQ ID NO: 8586 - protein, 9 aa, synthetic construct
  REGION 1..9: note = Description of Artificial Sequence: Synthetic peptide
CTTSVITQA

SEQ ID NO: 8587 - protein, 9 aa, synthetic construct
  REGION 1..9: note = Description of Artificial Sequence: Synthetic peptide
MIIGGLIGL

SEQ ID NO: 8588 - protein, 9 aa, synthetic construct
  REGION 1..9: note = Description of Artificial Sequence: Synthetic peptide
YQSNPPPSL

SEQ ID NO: 8589 - protein, 9 aa, synthetic construct
  REGION 1..9: note = Description of Artificial Sequence: Synthetic peptide
AVLSLVNRV

SEQ ID NO: 8590 - protein, 9 aa, synthetic construct
  REGION 1..9: note = Description of Artificial Sequence: Synthetic peptide
SLFNTVATL

SEQ ID NO: 8591 - protein, 9 aa, synthetic construct
  REGION 1..9: note = Description of Artificial Sequence: Synthetic peptide
VVIQDNSEI

SEQ ID NO: 8592 - protein, 9 aa, synthetic construct
  REGION 1..9: note = Description of Artificial Sequence: Synthetic peptide
STKEALDKI

SEQ ID NO: 8593 - protein, 9 aa, synthetic construct
  REGION 1..9: note = Description of Artificial Sequence: Synthetic peptide
NVKTIIVQL

SEQ ID NO: 8594 - protein, 9 aa, synthetic construct
  REGION 1..9: note = Description of Artificial Sequence: Synthetic peptide
GQTFFTAEV

SEQ ID NO: 8595 - protein, 9 aa, synthetic construct
  REGION 1..9: note = Description of Artificial Sequence: Synthetic peptide
LVNQIIEQL

SEQ ID NO: 8596 - protein, 9 aa, synthetic construct
  REGION 1..9: note = Description of Artificial Sequence: Synthetic peptide
LEKEPIIGA

SEQ ID NO: 8597 - protein, 9 aa, synthetic construct
  REGION 1..9: note = Description of Artificial Sequence: Synthetic peptide
WTVNDIQNL

SEQ ID NO: 8598 - protein, 10 aa, synthetic construct
  REGION 1..10: note = Description of Artificial Sequence: Synthetic peptide
SQYALGIIQA

SEQ ID NO: 8599 - protein, 9 aa, synthetic construct
  REGION 1..9: note = Description of Artificial Sequence: Synthetic peptide
LEKEPIVGA

SEQ ID NO: 8600 - protein, 10 aa, synthetic construct
  REGION 1..10: note = Description of Artificial Sequence: Synthetic peptide
RELPSEQTRA

SEQ ID NO: 8601 - protein, 9 aa, synthetic construct
  REGION 1..9: note = Description of Artificial Sequence: Synthetic peptide
VVESMNNQL

SEQ ID NO: 8602 - protein, 9 aa, synthetic construct
  REGION 1..9: note = Description of Artificial Sequence: Synthetic peptide
SQATAGMNA

SEQ ID NO: 8603 - protein, 9 aa, synthetic construct
  REGION 1..9: note = Description of Artificial Sequence: Synthetic peptide
RAIELVQRA

SEQ ID NO: 8604 - protein, 9 aa, synthetic construct
  REGION 1..9: note = Description of Artificial Sequence: Synthetic peptide
RAIEAQQHL

SEQ ID NO: 8605 - protein, 9 aa, synthetic construct
  REGION 1..9: note = Description of Artificial Sequence: Synthetic peptide
STNSTNYRL

SEQ ID NO: 8606 - protein, 9 aa, synthetic construct
  REGION 1..9: note = Description of Artificial Sequence: Synthetic peptide
SQIYSGIKV

SEQ ID NO: 8607 - protein, 9 aa, synthetic construct
  REGION 1..9: note = Description of Artificial Sequence: Synthetic peptide
QLTEAVQKI

SEQ ID NO: 8608 - protein, 11 aa, synthetic construct
  REGION 1..11: note = Description of Artificial Sequence: Synthetic peptide
VVIQDNSEIKV

SEQ ID NO: 8609 - protein, 9 aa, synthetic construct
  REGION 1..9: note = Description of Artificial Sequence: Synthetic peptide
AEAMSQATA

SEQ ID NO: 8610 - protein, 9 aa, synthetic construct
  REGION 1..9: note = Description of Artificial Sequence: Synthetic peptide
SLYNTVVTL

SEQ ID NO: 8611 - protein, 10 aa, synthetic construct
  REGION 1..10: note = Description of Artificial Sequence: Synthetic peptide
AEWDKTLQQV

SEQ ID NO: 8612 - protein, 10 aa, synthetic construct
  REGION 1..10: note = Description of Artificial Sequence: Synthetic peptide
AEVTGDIRKA

SEQ ID NO: 8613 - protein, 9 aa, synthetic construct
  REGION 1..9: note = Description of Artificial Sequence: Synthetic peptide
SQIYPGIKV

SEQ ID NO: 8614 - protein, 9 aa, synthetic construct
  REGION 1..9: note = Description of Artificial Sequence: Synthetic peptide
ATAGMNAAI

SEQ ID NO: 8615 - protein, 9 aa, synthetic construct
  REGION 1..9: note = Description of Artificial Sequence: Synthetic peptide
TTSNLQEQI

SEQ ID NO: 8616 - protein, 9 aa, synthetic construct
  REGION 1..9: note = Description of Artificial Sequence: Synthetic peptide
SLYNTVATL

SEQ ID NO: 8617 - protein, 9 aa, synthetic construct
  REGION 1..9: note = Description of Artificial Sequence: Synthetic peptide
TETLLVQNA

SEQ ID NO: 8618 - protein, 9 aa, synthetic construct
  REGION 1..9: note = Description of Artificial Sequence: Synthetic peptide
TVNDIQNLV

SEQ ID NO: 8619 - protein, 9 aa, synthetic construct
  REGION 1..9: note = Description of Artificial Sequence: Synthetic peptide
EVIPLTAEA

SEQ ID NO: 8620 - protein, 9 aa, synthetic construct
  REGION 1..9: note = Description of Artificial Sequence: Synthetic peptide
ASVTLTVQA

SEQ ID NO: 8621 - protein, 9 aa, synthetic construct
  REGION 1..9: note = Description of Artificial Sequence: Synthetic peptide
IEVKDTKEA

SEQ ID NO: 8622 - protein, 9 aa, synthetic construct
  REGION 1..9: note = Description of Artificial Sequence: Synthetic peptide
FTSAAVKAA

SEQ ID NO: 8623 - protein, 9 aa, synthetic construct
  REGION 1..9: note = Description of Artificial Sequence: Synthetic peptide
NESVKITCA

SEQ ID NO: 8624 - protein, 9 aa, synthetic construct
  REGION 1..9: note = Description of Artificial Sequence: Synthetic peptide
EAVDLSHFL

SEQ ID NO: 8625 - protein, 9 aa, synthetic construct
  REGION 1..9: note = Description of Artificial Sequence: Synthetic peptide
ILKEPVHGV

SEQ ID NO: 8626 - protein, 9 aa, synthetic construct
  REGION 1..9: note = Description of Artificial Sequence: Synthetic peptide
NAKNIIVQL

SEQ ID NO: 8627 - protein, 9 aa, synthetic construct
  REGION 1..9: note = Description of Artificial Sequence: Synthetic peptide
AVLSVVNRV

SEQ ID NO: 8628 - protein, 9 aa, synthetic construct
  REGION 1..9: note = Description of Artificial Sequence: Synthetic peptide
IVTDSQYAL

SEQ ID NO: 8629 - protein, 9 aa, synthetic construct
  REGION 1..9: note = Description of Artificial Sequence: Synthetic peptide
IQDNSDIKV

SEQ ID NO: 8630 - protein, 11 aa, synthetic construct
  REGION 1..11: note = Description of Artificial Sequence: Synthetic peptide
VVIQDNSDIKV

SEQ ID NO: 8631 - protein, 9 aa, synthetic construct
  REGION 1..9: note = Description of Artificial Sequence: Synthetic peptide
IQDNSEIKV

SEQ ID NO: 8632 - protein, 9 aa, synthetic construct
  REGION 1..9: note = Description of Artificial Sequence: Synthetic peptide
RVIEIIQRA

SEQ ID NO: 8633 - protein, 9 aa, synthetic construct
  REGION 1..9: note = Description of Artificial Sequence: Synthetic peptide
YSTQIDPGL

SEQ ID NO: 8634 - protein, 9 aa, synthetic construct
  REGION 1..9: note = Description of Artificial Sequence: Synthetic peptide
AVLSLVNRV

SEQ ID NO: 8635 - protein, 9 aa, synthetic construct
  REGION 1..9: note = Description of Artificial Sequence: Synthetic peptide
SAVSLFNTI

SEQ ID NO: 8636 - protein, 9 aa, synthetic construct
  REGION 1..9: note = Description of Artificial Sequence: Synthetic peptide
VVAKEIVAC

SEQ ID NO: 8637 - protein, 9 aa, synthetic construct
  REGION 1..9: note = Description of Artificial Sequence: Synthetic peptide
IQDKSDIKV

SEQ ID NO: 8638 - protein, 9 aa, synthetic construct
  REGION 1..9: note = Description of Artificial Sequence: Synthetic peptide
GQTFFTAEV

SEQ ID NO: 8639 - protein, 10 aa, synthetic construct
  REGION 1..10: note = Description of Artificial Sequence: Synthetic peptide
KVVQIEPLGV

SEQ ID NO: 8640 - protein, 11 aa, synthetic construct
  REGION 1..11: note = Description of Artificial Sequence: Synthetic peptide
TQVDPGLADQL

SEQ ID NO: 8641 - protein, 9 aa, synthetic construct
  REGION 1..9: note = Description of Artificial Sequence: Synthetic peptide
SQIYSGIKV

SEQ ID NO: 8642 - protein, 11 aa, synthetic construct
  REGION 1..11: note = Description of Artificial Sequence: Synthetic peptide
VVIQDNSEIKV

SEQ ID NO: 8643 - protein, 9 aa, synthetic construct
  REGION 1..9: note = Description of Artificial Sequence: Synthetic peptide
GGIGGFIKV

SEQ ID NO: 8644 - protein, 10 aa, synthetic construct
  REGION 1..10: note = Description of Artificial Sequence: Synthetic peptide
GVVESMNNQL

SEQ ID NO: 8645 - protein, 9 aa, synthetic construct
  REGION 1..9: note = Description of Artificial Sequence: Synthetic peptide
KVIGDIRQA

SEQ ID NO: 8646 - protein, 9 aa, synthetic construct
  REGION 1..9: note = Description of Artificial Sequence: Synthetic peptide
SQIYPGIKV

SEQ ID NO: 8647 - protein, 9 aa, synthetic construct
  REGION 1..9: note = Description of Artificial Sequence: Synthetic peptide
IQDHSDIKV

SEQ ID NO: 8648 - protein, 9 aa, synthetic construct
  REGION 1..9: note = Description of Artificial Sequence: Synthetic peptide
VVSQIIEQL

SEQ ID NO: 8649 - protein, 9 aa, synthetic construct
  REGION 1..9: note = Description of Artificial Sequence: Synthetic peptide
IITDSQYAL

SEQ ID NO: 8650 - protein, 10 aa, synthetic construct
  REGION 1..10: note = Description of Artificial Sequence: Synthetic peptide
TVLDVGDAYF

SEQ ID NO: 8651 - protein, 9 aa, synthetic construct
  REGION 1..9: note = Description of Artificial Sequence: Synthetic peptide
GQALFTTKV

SEQ ID NO: 8652 - protein, 11 aa, synthetic construct
  REGION 1..11: note = Description of Artificial Sequence: Synthetic peptide
TQIDPGLADQL

SEQ ID NO: 8653 - protein, 9 aa, synthetic construct
  REGION 1..9: note = Description of Artificial Sequence: Synthetic peptide
MIIGGLIGL

SEQ ID NO: 8654 - protein, 9 aa, synthetic construct
  REGION 1..9: note = Description of Artificial Sequence: Synthetic peptide
VLAEAMSQA

SEQ ID NO: 8655 - protein, 9 aa, synthetic construct
  REGION 1..9: note = Description of Artificial Sequence: Synthetic peptide
GAASVTLTV

SEQ ID NO: 8656 - protein, 9 aa, synthetic construct
  REGION 1..9: note = Description of Artificial Sequence: Synthetic peptide
VVIQDNSEI

SEQ ID NO: 8657 - protein, 9 aa, synthetic construct
  REGION 1..9: note = Description of Artificial Sequence: Synthetic peptide
VQLNETVKI

SEQ ID NO: 8658 - protein, 9 aa, synthetic construct
  REGION 1..9: note = Description of Artificial Sequence: Synthetic peptide
NIIGNIRQA

SEQ ID NO: 8659 - protein, 9 aa, synthetic construct
  REGION 1..9: note = Description of Artificial Sequence: Synthetic peptide
GQLDAWEKI

SEQ ID NO: 8660 - protein, 10 aa, synthetic construct
  REGION 1..10: note = Description of Artificial Sequence: Synthetic peptide
KVVKIEPLGV

SEQ ID NO: 8661 - protein, 9 aa, synthetic construct
  REGION 1..9: note = Description of Artificial Sequence: Synthetic peptide
AVAEGTDRV

SEQ ID NO: 8662 - protein, 9 aa, synthetic construct
  REGION 1..9: note = Description of Artificial Sequence: Synthetic peptide
QLTEAVQKI

SEQ ID NO: 8663 - protein, 9 aa, synthetic construct
  REGION 1..9: note = Description of Artificial Sequence: Synthetic peptide
YQSNPPPSL

SEQ ID NO: 8664 - protein, 9 aa, synthetic construct
  REGION 1..9: note = Description of Artificial Sequence: Synthetic peptide
TVSFNLPQI

SEQ ID NO: 8665 - protein, 9 aa, synthetic construct
  REGION 1..9: note = Description of Artificial Sequence: Synthetic peptide
ASDFNLPSV

SEQ ID NO: 8666 - protein, 9 aa, synthetic construct
  REGION 1..9: note = Description of Artificial Sequence: Synthetic peptide
RIIEIIQRA

SEQ ID NO: 8667 - protein, 11 aa, synthetic construct
  REGION 1..11: note = Description of Artificial Sequence: Synthetic peptide
VVIQDHSDIKV

SEQ ID NO: 8668 - protein, 9 aa, synthetic construct
  REGION 1..9: note = Description of Artificial Sequence: Synthetic peptide
GTNTTDPRL

SEQ ID NO: 8669 - protein, 9 aa, synthetic construct
  REGION 1..9: note = Description of Artificial Sequence: Synthetic peptide
YQLEKEPIV

SEQ ID NO: 8670 - protein, 9 aa, synthetic construct
  REGION 1..9: note = Description of Artificial Sequence: Synthetic peptide
AALDLSHFL

SEQ ID NO: 8671 - protein, 9 aa, synthetic construct
  REGION 1..9: note = Description of Artificial Sequence: Synthetic peptide
QLAEAVQRI

SEQ ID NO: 8672 - protein, 9 aa, synthetic construct
  REGION 1..9: note = Description of Artificial Sequence: Synthetic peptide
SLDDIWQNM

SEQ ID NO: 8673 - protein, 9 aa, synthetic construct
  REGION 1..9: note = Description of Artificial Sequence: Synthetic peptide
SLDDIWNNM

SEQ ID NO: 8674 - protein, 9 aa, synthetic construct
  REGION 1..9: note = Description of Artificial Sequence: Synthetic peptide
VLDNVTENF

SEQ ID NO: 8675 - protein, 9 aa, synthetic construct
  REGION 1..9: note = Description of Artificial Sequence: Synthetic peptide
SVDEIWNNM

SEQ ID NO: 8676 - protein, 9 aa, synthetic construct
  REGION 1..9: note = Description of Artificial Sequence: Synthetic peptide
YVDRFYKTL

SEQ ID NO: 8677 - protein, 9 aa, synthetic construct
  REGION 1..9: note = Description of Artificial Sequence: Synthetic peptide
AVLSVVNRV

SEQ ID NO: 8678 - protein, 9 aa, synthetic construct
  REGION 1..9: note = Description of Artificial Sequence: Synthetic peptide
ILKEPVHGV

SEQ ID NO: 8679 - protein, 9 aa, synthetic construct
  REGION 1..9: note = Description of Artificial Sequence: Synthetic peptide
KIDWLIDRI

SEQ ID NO: 8680 - protein, 9 aa, synthetic construct
  REGION 1..9: note = Description of Artificial Sequence: Synthetic peptide
AVLSLVNRV

SEQ ID NO: 8681 - protein, 9 aa, synthetic construct
  REGION 1..9: note = Description of Artificial Sequence: Synthetic peptide
FSPEVIPMF

SEQ ID NO: 8682 - protein, 9 aa, synthetic construct
  REGION 1..9: note = Description of Artificial Sequence: Synthetic peptide
IIDIIASDL

SEQ ID NO: 8683 - protein, 10 aa, synthetic construct
  REGION 1..10: note = Description of Artificial Sequence: Synthetic peptide
TLWQRPVVTV

SEQ ID NO: 8684 - protein, 9 aa, synthetic construct
  REGION 1..9: note = Description of Artificial Sequence: Synthetic peptide
LIWDDLRNL

SEQ ID NO: 8685 - protein, 9 aa, synthetic construct
  REGION 1..9: note = Description of Artificial Sequence: Synthetic peptide
TVFSLVNRV

SEQ ID NO: 8686 - protein, 9 aa, synthetic construct
  REGION 1..9: note = Description of Artificial Sequence: Synthetic peptide
AADNLWVTV

SEQ ID NO: 8687 - protein, 10 aa, synthetic construct
  REGION 1..10: note = Description of Artificial Sequence: Synthetic peptide
KLPEKESWTV

SEQ ID NO: 8688 - protein, 9 aa, synthetic construct
  REGION 1..9: note = Description of Artificial Sequence: Synthetic peptide
HLEGKVILV

SEQ ID NO: 8689 - protein, 10 aa, synthetic construct
  REGION 1..10: note = Description of Artificial Sequence: Synthetic peptide
SLFDAIAIAV

SEQ ID NO: 8690 - protein, 9 aa, synthetic construct
  REGION 1..9: note = Description of Artificial Sequence: Synthetic peptide
KVIGDIRQA

SEQ ID NO: 8691 - protein, 9 aa, synthetic construct
  REGION 1..9: note = Description of Artificial Sequence: Synthetic peptide
RVIEIIQRA

SEQ ID NO: 8692 - protein, 9 aa, synthetic construct
  REGION 1..9: note = Description of Artificial Sequence: Synthetic peptide
VVSQIIEQL

SEQ ID NO: 8693 - protein, 10 aa, synthetic construct
  REGION 1..10: note = Description of Artificial Sequence: Synthetic peptide
KVVRIEPIGV

SEQ ID NO: 8694 - protein, 9 aa, synthetic construct
  REGION 1..9: note = Description of Artificial Sequence: Synthetic peptide
VVAKEIVAC

SEQ ID NO: 8695 - protein, 10 aa, synthetic construct
  REGION 1..10: note = Description of Artificial Sequence: Synthetic peptide
KVVKIEPLGV

SEQ ID NO: 8696 - protein, 10 aa, synthetic construct
  REGION 1..10: note = Description of Artificial Sequence: Synthetic peptide
KVVQIEPLGV

SEQ ID NO: 8697 - protein, 9 aa, synthetic construct
  REGION 1..9: note = Description of Artificial Sequence: Synthetic peptide
AVLSVVNRV

SEQ ID NO: 8698 - protein, 10 aa, synthetic construct
  REGION 1..10: note = Description of Artificial Sequence: Synthetic peptide
KTLQQVATKL

SEQ ID NO: 8699 - protein, 10 aa, synthetic construct
  REGION 1..10: note = Description of Artificial Sequence: Synthetic peptide
GVVESMNNQL

SEQ ID NO: 8700 - protein, 9 aa, synthetic construct
  REGION 1..9: note = Description of Artificial Sequence: Synthetic peptide
LVSQIIEQL

SEQ ID NO: 8701 - protein, 9 aa, synthetic construct
  REGION 1..9: note = Description of Artificial Sequence: Synthetic peptide
WTVNDIQKL

SEQ ID NO: 8702 - protein, 9 aa, synthetic construct
  REGION 1..9: note = Description of Artificial Sequence: Synthetic peptide
RIIEIIQRA

SEQ ID NO: 8703 - protein, 9 aa, synthetic construct
  REGION 1..9: note = Description of Artificial Sequence: Synthetic peptide
LEKEPIVGA

SEQ ID NO: 8704 - protein, 9 aa, synthetic construct
  REGION 1..9: note = Description of Artificial Sequence: Synthetic peptide
AIIRILQQL

SEQ ID NO: 8705 - protein, 10 aa, synthetic construct
  REGION 1..10: note = Description of Artificial Sequence: Synthetic peptide
RELPSEQTRA

SEQ ID NO: 8706 - protein, 9 aa, synthetic construct
  REGION 1..9: note = Description of Artificial Sequence: Synthetic peptide
VLAEAMSQA

SEQ ID NO: 8707 - protein, 9 aa, synthetic construct
  REGION 1..9: note = Description of Artificial Sequence: Synthetic peptide
STKEALDKI

SEQ ID NO: 8708 - protein, 10 aa, synthetic construct
  REGION 1..10: note = Description of Artificial Sequence: Synthetic peptide
KTLQQVAEKL

SEQ ID NO: 8709 - protein, 10 aa, synthetic construct
  REGION 1..10: note = Description of Artificial Sequence: Synthetic peptide
KSFDTEAHNI

SEQ ID NO: 8710 - protein, 9 aa, synthetic construct
  REGION 1..9: note = Description of Artificial Sequence: Synthetic peptide
KIKPPLPSV

SEQ ID NO: 8711 - protein, 9 aa, synthetic construct
  REGION 1..9: note = Description of Artificial Sequence: Synthetic peptide
SQATAGMNA

SEQ ID NO: 8712 - protein, 9 aa, synthetic construct
  REGION 1..9: note = Description of Artificial Sequence: Synthetic peptide
TVFSLVNRV

SEQ ID NO: 8713 - protein, 9 aa, synthetic construct
  REGION 1..9: note = Description of Artificial Sequence: Synthetic peptide
MIIGGLIGL

SEQ ID NO: 8714 - protein, 9 aa, synthetic construct
  REGION 1..9: note = Description of Artificial Sequence: Synthetic peptide
LEKEPIIGA

SEQ ID NO: 8715 - protein, 10 aa, synthetic construct
  REGION 1..10: note = Description of Artificial Sequence: Synthetic peptide
RTPIGLGQSL

SEQ ID NO: 8716 - protein, 11 aa, synthetic construct
  REGION 1..11: note = Description of Artificial Sequence: Synthetic peptide
VVIQDNSDIKV

SEQ ID NO: 8717 - protein, 9 aa, synthetic construct
  REGION 1..9: note = Description of Artificial Sequence: Synthetic peptide
KVVSLTDTT

SEQ ID NO: 8718 - protein, 9 aa, synthetic construct
  REGION 1..9: note = Description of Artificial Sequence: Synthetic peptide
KVASTKEAL

SEQ ID NO: 8719 - protein, 9 aa, synthetic construct
  REGION 1..9: note = Description of Artificial Sequence: Synthetic peptide
GTAGSTMGA

SEQ ID NO: 8720 - protein, 10 aa, synthetic construct
  REGION 1..10: note = Description of Artificial Sequence: Synthetic peptide
KQIKPPLPSV

SEQ ID NO: 8721 - protein, 10 aa, synthetic construct
  REGION 1..10: note = Description of Artificial Sequence: Synthetic peptide
RVLAEAMSQA

SEQ ID NO: 8722 - protein, 9 aa, synthetic construct
  REGION 1..9: note = Description of Artificial Sequence: Synthetic peptide
IEVKDTKEA

SEQ ID NO: 8723 - protein, 9 aa, synthetic construct
  REGION 1..9: note = Description of Artificial Sequence: Synthetic peptide
IVQQQNNLL

SEQ ID NO: 8724 - protein, 10 aa, synthetic construct
  REGION 1..10: note = Description of Artificial Sequence: Synthetic peptide
KVVKLEPIGL

SEQ ID NO: 8725 - protein, 9 aa, synthetic construct
  REGION 1..9: note = Description of Artificial Sequence: Synthetic peptide
KVVSFTNTT

SEQ ID NO: 8726 - protein, 10 aa, synthetic construct
  REGION 1..10: note = Description of Artificial Sequence: Synthetic peptide
SQATAGMNAA

SEQ ID NO: 8727 - protein, 9 aa, synthetic construct
  REGION 1..9: note = Description of Artificial Sequence: Synthetic peptide
ILKEPVHGV

SEQ ID NO: 8728 - protein, 9 aa, synthetic construct
  REGION 1..9: note = Description of Artificial Sequence: Synthetic peptide
RTNPAADGV

SEQ ID NO: 8729 - protein, 10 aa, synthetic construct
  REGION 1..10: note = Description of Artificial Sequence: Synthetic peptide
KTIIVQLNET

SEQ ID NO: 8730 - protein, 9 aa, synthetic construct
  REGION 1..9: note = Description of Artificial Sequence: Synthetic peptide
WTVNDIQNL

SEQ ID NO: 8731 - protein, 9 aa, synthetic construct
  REGION 1..9: note = Description of Artificial Sequence: Synthetic peptide
YQSNPPPSL

SEQ ID NO: 8732 - protein, 9 aa, synthetic construct
  REGION 1..9: note = Description of Artificial Sequence: Synthetic peptide
VVKIEPLGV

SEQ ID NO: 8733 - protein, 9 aa, synthetic construct
  REGION 1..9: note = Description of Artificial Sequence: Synthetic peptide
KVVPLTDTT

SEQ ID NO: 8734 - protein, 9 aa, synthetic construct
  REGION 1..9: note = Description of Artificial Sequence: Synthetic peptide
QIYSGIKVK

SEQ ID NO: 8735 - protein, 9 aa, synthetic construct
  REGION 1..9: note = Description of Artificial Sequence: Synthetic peptide
AIYAPPIER

SEQ ID NO: 8736 - protein, 9 aa, synthetic construct
  REGION 1..9: note = Description of Artificial Sequence: Synthetic peptide
SANNISIVK

SEQ ID NO: 8737 - protein, 9 aa, synthetic construct
  REGION 1..9: note = Description of Artificial Sequence: Synthetic peptide
TTDPRLIEK

SEQ ID NO: 8738 - protein, 9 aa, synthetic construct
  REGION 1..9: note = Description of Artificial Sequence: Synthetic peptide
AIFQSSMTK

SEQ ID NO: 8739 - protein, 9 aa, synthetic construct
  REGION 1..9: note = Description of Artificial Sequence: Synthetic peptide
KTLQQVATK

SEQ ID NO: 8740 - protein, 10 aa, synthetic construct
  REGION 1..10: note = Description of Artificial Sequence: Synthetic peptide
ATKLGDLLNK

SEQ ID NO: 8741 - protein, 9 aa, synthetic construct
  REGION 1..9: note = Description of Artificial Sequence: Synthetic peptide
AVYLSQFLK

SEQ ID NO: 8742 - protein, 9 aa, synthetic construct
  REGION 1..9: note = Description of Artificial Sequence: Synthetic peptide
SVTTAMMQR

SEQ ID NO: 8743 - protein, 10 aa, synthetic construct
  REGION 1..10: note = Description of Artificial Sequence: Synthetic peptide
ALTEVIPLTK

SEQ ID NO: 8744 - protein, 9 aa, synthetic construct
  REGION 1..9: note = Description of Artificial Sequence: Synthetic peptide
KTLHQVAQK

SEQ ID NO: 8745 - protein, 9 aa, synthetic construct
  REGION 1..9: note = Description of Artificial Sequence: Synthetic peptide
QIYPGIKVR

SEQ ID NO: 8746 - protein, 11 aa, synthetic construct
  REGION 1..11: note = Description of Artificial Sequence: Synthetic peptide
IGPGQALFTTK

SEQ ID NO: 8747 - protein, 9 aa, synthetic construct
  REGION 1..9: note = Description of Artificial Sequence: Synthetic peptide
ELYPSASLK

SEQ ID NO: 8748 - protein, 10 aa, synthetic construct
  REGION 1..10: note = Description of Artificial Sequence: Synthetic peptide
TVYYGVPVWK

SEQ ID NO: 8749 - protein, 8 aa, synthetic construct
  REGION 1..8: note = Description of Artificial Sequence: Synthetic peptide
KLGTLLNK

SEQ ID NO: 8750 - protein, 9 aa, synthetic construct
  REGION 1..9: note = Description of Artificial Sequence: Synthetic peptide
KTLQQVAEK

SEQ ID NO: 8751 - protein, 11 aa, synthetic construct
  REGION 1..11: note = Description of Artificial Sequence: Synthetic peptide
TVNDIQKLVGK

SEQ ID NO: 8752 - protein, 10 aa, synthetic construct
  REGION 1..10: note = Description of Artificial Sequence: Synthetic peptide
QVPERPVTYK

SEQ ID NO: 8753 - protein, 10 aa, synthetic construct
  REGION 1..10: note = Description of Artificial Sequence: Synthetic peptide
SSANNISIVK

SEQ ID NO: 8754 - protein, 10 aa, synthetic construct
  REGION 1..10: note = Description of Artificial Sequence: Synthetic peptide
GQAHQVPIPK

SEQ ID NO: 8755 - protein, 9 aa, synthetic construct
  REGION 1..9: note = Description of Artificial Sequence: Synthetic peptide
ALTALIAPK

SEQ ID NO: 8756 - protein, 11 aa, synthetic construct
  REGION 1..11: note = Description of Artificial Sequence: Synthetic peptide
KIKPPLPSVGK

SEQ ID NO: 8757 - protein, 10 aa, synthetic construct
  REGION 1..10: note = Description of Artificial Sequence: Synthetic peptide
SLFGNDPLSQ

SEQ ID NO: 8758 - protein, 10 aa, synthetic construct
  REGION 1..10: note = Description of Artificial Sequence: Synthetic peptide
ALTEIIPLTK

SEQ ID NO: 8759 - protein, 9 aa, synthetic construct
  REGION 1..9: note = Description of Artificial Sequence: Synthetic peptide
KTLQQVARK

SEQ ID NO: 8760 - protein, 10 aa, synthetic construct
  REGION 1..10: note = Description of Artificial Sequence: Synthetic peptide
LLNQTTIIFK

SEQ ID NO: 8761 - protein, 9 aa, synthetic construct
  REGION 1..9: note = Description of Artificial Sequence: Synthetic peptide
SVITQACPK

SEQ ID NO: 8762 - protein, 11 aa, synthetic construct
  REGION 1..11: note = Description of Artificial Sequence: Synthetic peptide
TVNDIQKLVGK

SEQ ID NO: 8763 - protein, 9 aa, synthetic construct
  REGION 1..9: note = Description of Artificial Sequence: Synthetic peptide
SANNISIVK

SEQ ID NO: 8764 - protein, 10 aa, synthetic construct
  REGION 1..10: note = Description of Artificial Sequence: Synthetic peptide
TVQPITLPEK

SEQ ID NO: 8765 - protein, 9 aa, synthetic construct
  REGION 1..9: note = Description of Artificial Sequence: Synthetic peptide
QIYSGIKVK

SEQ ID NO: 8766 - protein, 9 aa, synthetic construct
  REGION 1..9: note = Description of Artificial Sequence: Synthetic peptide
KTLQQVATK

SEQ ID NO: 8767 - protein, 10 aa, synthetic construct
  REGION 1..10: note = Description of Artificial Sequence: Synthetic peptide
TVQSIKLPEK

SEQ ID NO: 8768 - protein, 9 aa, synthetic construct
  REGION 1..9: note = Description of Artificial Sequence: Synthetic peptide
AIYAPPIER

SEQ ID NO: 8769 - protein, 10 aa, synthetic construct
  REGION 1..10: note = Description of Artificial Sequence: Synthetic peptide
SSANNISIVK

SEQ ID NO: 8770 - protein, 10 aa, synthetic construct
  REGION 1..10: note = Description of Artificial Sequence: Synthetic peptide
TVQPIKLPEK

SEQ ID NO: 8771 - protein, 10 aa, synthetic construct
  REGION 1..10: note = Description of Artificial Sequence: Synthetic peptide
TVQPIHLPEK

SEQ ID NO: 8772 - protein, 9 aa, synthetic construct
  REGION 1..9: note = Description of Artificial Sequence: Synthetic peptide
KTLQQVAEK

SEQ ID NO: 8773 - protein, 10 aa, synthetic construct
  REGION 1..10: note = Description of Artificial Sequence: Synthetic peptide
SANNISIVKK

SEQ ID NO: 8774 - protein, 9 aa, synthetic construct
  REGION 1..9: note = Description of Artificial Sequence: Synthetic peptide
AIFQSSMTK

SEQ ID NO: 8775 - protein, 10 aa, synthetic construct
  REGION 1..10: note = Description of Artificial Sequence: Synthetic peptide
ILGQLQPALK

SEQ ID NO: 8776 - protein, 9 aa, synthetic construct
  REGION 1..9: note = Description of Artificial Sequence: Synthetic peptide
ANNISIVKK

SEQ ID NO: 8777 - protein, 10 aa, synthetic construct
  REGION 1..10: note = Description of Artificial Sequence: Synthetic peptide
GSNFTSAAVK

SEQ ID NO: 8778 - protein, 9 aa, synthetic construct
  REGION 1..9: note = Description of Artificial Sequence: Synthetic peptide
KTLHQVAQK

SEQ ID NO: 8779 - protein, 9 aa, synthetic construct
  REGION 1..9: note = Description of Artificial Sequence: Synthetic peptide
AVDLSHFLK

SEQ ID NO: 8780 - protein, 11 aa, synthetic construct
  REGION 1..11: note = Description of Artificial Sequence: Synthetic peptide
VVSLTDTTNQK

SEQ ID NO: 8781 - protein, 9 aa, synthetic construct
  REGION 1..9: note = Description of Artificial Sequence: Synthetic peptide
SFNTTTILK

SEQ ID NO: 8782 - protein, 10 aa, synthetic construct
  REGION 1..10: note = Description of Artificial Sequence: Synthetic peptide
GSNFTSATVK

SEQ ID NO: 8783 - protein, 10 aa, synthetic construct
  REGION 1..10: note = Description of Artificial Sequence: Synthetic peptide
VVESMNNQLK

SEQ ID NO: 8784 - protein, 10 aa, synthetic construct
  REGION 1..10: note = Description of Artificial Sequence: Synthetic peptide
ALTEVIPLTK

SEQ ID NO: 8785 - protein, 9 aa, synthetic construct
  REGION 1..9: note = Description of Artificial Sequence: Synthetic peptide
SVITQACPK

SEQ ID NO: 8786 - protein, 9 aa, synthetic construct
  REGION 1..9: note = Description of Artificial Sequence: Synthetic peptide
APAGFAILK

SEQ ID NO: 8787 - protein, 9 aa, synthetic construct
  REGION 1..9: note = Description of Artificial Sequence: Synthetic peptide
TTDPRLIEK

SEQ ID NO: 8788 - protein, 10 aa, synthetic construct
  REGION 1..10: note = Description of Artificial Sequence: Synthetic peptide
ALTEIIPLTK

SEQ ID NO: 8789 - protein, 9 aa, synthetic construct
  REGION 1..9: note = Description of Artificial Sequence: Synthetic peptide
ALTALIAPK

SEQ ID NO: 8790 - protein, 11 aa, synthetic construct
  REGION 1..11: note = Description of Artificial Sequence: Synthetic peptide
VVSFTNTTNQK

SEQ ID NO: 8791 - protein, 10 aa, synthetic construct
  REGION 1..10: note = Description of Artificial Sequence: Synthetic peptide
KLDVVPIDKK

SEQ ID NO: 8792 - protein, 11 aa, synthetic construct
  REGION 1..11: note = Description of Artificial Sequence: Synthetic peptide
QSQGVVESMNK

SEQ ID NO: 8793 - protein, 11 aa, synthetic construct
  REGION 1..11: note = Description of Artificial Sequence: Synthetic peptide
KALTEVIPLTK

SEQ ID NO: 8794 - protein, 9 aa, synthetic construct
  REGION 1..9: note = Description of Artificial Sequence: Synthetic peptide
AVYLSQFLK

SEQ ID NO: 8795 - protein, 9 aa, synthetic construct
  REGION 1..9: note = Description of Artificial Sequence: Synthetic peptide
KTLQQVARK

SEQ ID NO: 8796 - protein, 9 aa, synthetic construct
  REGION 1..9: note = Description of Artificial Sequence: Synthetic peptide
SLTDTTNQK

SEQ ID NO: 8797 - protein, 11 aa, synthetic construct
  REGION 1..11: note = Description of Artificial Sequence: Synthetic peptide
GMEDPERQVLK

SEQ ID NO: 8798 - protein, 9 aa, synthetic construct
  REGION 1..9: note = Description of Artificial Sequence: Synthetic peptide
IIATDIQTK

SEQ ID NO: 8799 - protein, 9 aa, synthetic construct
  REGION 1..9: note = Description of Artificial Sequence: Synthetic peptide
SFNVTTVLK

SEQ ID NO: 8800 - protein, 11 aa, synthetic construct
  REGION 1..11: note = Description of Artificial Sequence: Synthetic peptide
ASQIYSGIKVK

SEQ ID NO: 8801 - protein, 10 aa, synthetic construct
  REGION 1..10: note = Description of Artificial Sequence: Synthetic peptide
ATESIVIWGK

SEQ ID NO: 8802 - protein, 9 aa, synthetic construct
  REGION 1..9: note = Description of Artificial Sequence: Synthetic peptide
SVTTAMMQR

SEQ ID NO: 8803 - protein, 9 aa, synthetic construct
  REGION 1..9: note = Description of Artificial Sequence: Synthetic peptide
KLDVVPIDK

SEQ ID NO: 8804 - protein, 8 aa, synthetic construct
  REGION 1..8: note = Description of Artificial Sequence: Synthetic peptide
ANNISIVK

SEQ ID NO: 8805 - protein, 9 aa, synthetic construct
  REGION 1..9: note = Description of Artificial Sequence: Synthetic peptide
SNFTSATVK

SEQ ID NO: 8806 - protein, 9 aa, synthetic construct
  REGION 1..9: note = Description of Artificial Sequence: Synthetic peptide
KQLTEAVQK

SEQ ID NO: 8807 - protein, 11 aa, synthetic construct
  REGION 1..11: note = Description of Artificial Sequence: Synthetic peptide
ATDIQTKELQK

SEQ ID NO: 8808 - protein, 11 aa, synthetic construct
  REGION 1..11: note = Description of Artificial Sequence: Synthetic peptide
SSANNISIVKK

SEQ ID NO: 8809 - protein, 10 aa, synthetic construct
  REGION 1..10: note = Description of Artificial Sequence: Synthetic peptide
VVESMNKELK

SEQ ID NO: 8810 - protein, 9 aa, synthetic construct
  REGION 1..9: note = Description of Artificial Sequence: Synthetic peptide
SANNISIVK

SEQ ID NO: 8811 - protein, 10 aa, synthetic construct
  REGION 1..10: note = Description of Artificial Sequence: Synthetic peptide
SSANNISIVK

SEQ ID NO: 8812 - protein, 11 aa, synthetic construct
  REGION 1..11: note = Description of Artificial Sequence: Synthetic peptide
SSANNISIVKK

SEQ ID NO: 8813 - protein, 10 aa, synthetic construct
  REGION 1..10: note = Description of Artificial Sequence: Synthetic peptide
SANNISIVKK

SEQ ID NO: 8814 - protein, 9 aa, synthetic construct
  REGION 1..9: note = Description of Artificial Sequence: Synthetic peptide
QIYSGIKVK

SEQ ID NO: 8815 - protein, 11 aa, synthetic construct
  REGION 1..11: note = Description of Artificial Sequence: Synthetic peptide
GVVESMNNQLK

SEQ ID NO: 8816 - protein, 9 aa, synthetic construct
  REGION 1..9: note = Description of Artificial Sequence: Synthetic peptide
AIYAPPIER

SEQ ID NO: 8817 - protein, 9 aa, synthetic construct
  REGION 1..9: note = Description of Artificial Sequence: Synthetic peptide
SVITQACPK

SEQ ID NO: 8818 - protein, 9 aa, synthetic construct
  REGION 1..9: note = Description of Artificial Sequence: Synthetic peptide
SVTTAMMQR

SEQ ID NO: 8819 - protein, 10 aa, synthetic construct
  REGION 1..10: note = Description of Artificial Sequence: Synthetic peptide
TVQPITLPEK

SEQ ID NO: 8820 - protein, 9 aa, synthetic construct
  REGION 1..9: note = Description of Artificial Sequence: Synthetic peptide
TTDPRLIEK

SEQ ID NO: 8821 - protein, 11 aa, synthetic construct
  REGION 1..11: note = Description of Artificial Sequence: Synthetic peptide
TVNDIQKLVGK

SEQ ID NO: 8822 - protein, 9 aa, synthetic construct
  REGION 1..9: note = Description of Artificial Sequence: Synthetic peptide
APAGFAILK

SEQ ID NO: 8823 - protein, 10 aa, synthetic construct
  REGION 1..10: note = Description of Artificial Sequence: Synthetic peptide
TVQSIKLPEK

SEQ ID NO: 8824 - protein, 9 aa, synthetic construct
  REGION 1..9: note = Description of Artificial Sequence: Synthetic peptide
AVDLSHFLK

SEQ ID NO: 8825 - protein, 10 aa, synthetic construct
  REGION 1..10: note = Description of Artificial Sequence: Synthetic peptide
GSNFTSATVK

SEQ ID NO: 8826 - protein, 10 aa, synthetic construct
  REGION 1..10: note = Description of Artificial Sequence: Synthetic peptide
ATKLGDLLNK

SEQ ID NO: 8827 - protein, 9 aa, synthetic construct
  REGION 1..9: note = Description of Artificial Sequence: Synthetic peptide
KTLQQVATK

SEQ ID NO: 8828 - protein, 10 aa, synthetic construct
  REGION 1..10: note = Description of Artificial Sequence: Synthetic peptide
TVQPIKLPEK

SEQ ID NO: 8829 - protein, 10 aa, synthetic construct
  REGION 1..10: note = Description of Artificial Sequence: Synthetic peptide
TVQPIHLPEK

SEQ ID NO: 8830 - protein, 9 aa, synthetic construct
  REGION 1..9: note = Description of Artificial Sequence: Synthetic peptide
ANNISIVKK

SEQ ID NO: 8831 - protein, 10 aa, synthetic construct
  REGION 1..10: note = Description of Artificial Sequence: Synthetic peptide
GQAHQVPIPK

SEQ ID NO: 8832 - protein, 10 aa, synthetic construct
  REGION 1..10: note = Description of Artificial Sequence: Synthetic peptide
GSNFTSAAVK

SEQ ID NO: 8833 - protein, 9 aa, synthetic construct
  REGION 1..9: note = Description of Artificial Sequence: Synthetic peptide
AVYLSQFLK

SEQ ID NO: 8834 - protein, 11 aa, synthetic construct
  REGION 1..11: note = Description of Artificial Sequence: Synthetic peptide
ATDIQTKELQK

SEQ ID NO: 8835 - protein, 9 aa, synthetic construct
  REGION 1..9: note = Description of Artificial Sequence: Synthetic peptide
KTLQQVAEK

SEQ ID NO: 8836 - protein, 9 aa, synthetic construct
  REGION 1..9: note = Description of Artificial Sequence: Synthetic peptide
AIFQSSMTK

SEQ ID NO: 8837 - protein, 11 aa, synthetic construct
  REGION 1..11: note = Description of Artificial Sequence: Synthetic peptide
VVPLTDTTNQK

SEQ ID NO: 8838 - protein, 10 aa, synthetic construct
  REGION 1..10: note = Description of Artificial Sequence: Synthetic peptide
ATESIVIWGK

SEQ ID NO: 8839 - protein, 11 aa, synthetic construct
  REGION 1..11: note = Description of Artificial Sequence: Synthetic peptide
VVSLTDTTNQK

SEQ ID NO: 8840 - protein, 10 aa, synthetic construct
  REGION 1..10: note = Description of Artificial Sequence: Synthetic peptide
CSFNTTTILK

SEQ ID NO: 8841 - protein, 9 aa, synthetic construct
  REGION 1..9: note = Description of Artificial Sequence: Synthetic peptide
KTLHQVAQK

SEQ ID NO: 8842 - protein, 9 aa, synthetic construct
  REGION 1..9: note = Description of Artificial Sequence: Synthetic peptide
QIIEQLIKK

SEQ ID NO: 8843 - protein, 9 aa, synthetic construct
  REGION 1..9: note = Description of Artificial Sequence: Synthetic peptide
SAIKQACPK

SEQ ID NO: 8844 - protein, 9 aa, synthetic construct
  REGION 1..9: note = Description of Artificial Sequence: Synthetic peptide
SAITQACPK

SEQ ID NO: 8845 - protein, 10 aa, synthetic construct
  REGION 1..10: note = Description of Artificial Sequence: Synthetic peptide
AALDLSHFLK

SEQ ID NO: 8846 - protein, 11 aa, synthetic construct
  REGION 1..11: note = Description of Artificial Sequence: Synthetic peptide
FTAEVTGDIRK

SEQ ID NO: 8847 - protein, 9 aa, synthetic construct
  REGION 1..9: note = Description of Artificial Sequence: Synthetic peptide
SFNTTTILK

SEQ ID NO: 8848 - protein, 9 aa, synthetic construct
  REGION 1..9: note = Description of Artificial Sequence: Synthetic peptide
SNFTSATVK

SEQ ID NO: 8849 - protein, 11 aa, synthetic construct
  REGION 1..11: note = Description of Artificial Sequence: Synthetic peptide
GVVESMNRELK

SEQ ID NO: 8850 - protein, 11 aa, synthetic construct
  REGION 1..11: note = Description of Artificial Sequence: Synthetic peptide
GVVESMNKELK

SEQ ID NO: 8851 - protein, 9 aa, synthetic construct
  REGION 1..9: note = Description of Artificial Sequence: Synthetic peptide
ATNIIGNIR

SEQ ID NO: 8852 - protein, 10 aa, synthetic construct
  REGION 1..10: note = Description of Artificial Sequence: Synthetic peptide
SVLSGGKLDK

SEQ ID NO: 8853 - protein, 9 aa, synthetic construct
  REGION 1..9: note = Description of Artificial Sequence: Synthetic peptide
ALTALIAPK

SEQ ID NO: 8854 - protein, 9 aa, synthetic construct
  REGION 1..9: note = Description of Artificial Sequence: Synthetic peptide
KTLQQVARK

SEQ ID NO: 8855 - protein, 9 aa, synthetic construct
  REGION 1..9: note = Description of Artificial Sequence: Synthetic peptide
QIYPGIKVR

SEQ ID NO: 8856 - protein, 9 aa, synthetic construct
  REGION 1..9: note = Description of Artificial Sequence: Synthetic peptide
SVTLTVQAR

SEQ ID NO: 8857 - protein, 10 aa, synthetic construct
  REGION 1..10: note = Description of Artificial Sequence: Synthetic peptide
GTLLNKTIIK

SEQ ID NO: 8858 - protein, 8 aa, synthetic construct
  REGION 1..8: note = Description of Artificial Sequence: Synthetic peptide
FTDSAIRK

SEQ ID NO: 8859 - protein, 10 aa, synthetic construct
  REGION 1..10: note = Description of Artificial Sequence: Synthetic peptide
ALTEVIPLTK

SEQ ID NO: 8860 - protein, 9 aa, synthetic construct
  REGION 1..9: note = Description of Artificial Sequence: Synthetic peptide
YVNTPPLVK

SEQ ID NO: 8861 - protein, 10 aa, synthetic construct
  REGION 1..10: note = Description of Artificial Sequence: Synthetic peptide
VSFTNTTNQK

SEQ ID NO: 8862 - protein, 10 aa, synthetic construct
  REGION 1..10: note = Description of Artificial Sequence: Synthetic peptide
ATNIIGNIRQ

SEQ ID NO: 8863 - protein, 9 aa, synthetic construct
  REGION 1..9: note = Description of Artificial Sequence: Synthetic peptide
NYTGVIYSL

SEQ ID NO: 8864 - protein, 9 aa, synthetic construct
  REGION 1..9: note = Description of Artificial Sequence: Synthetic peptide
NYTELVYSL

SEQ ID NO: 8865 - protein, 9 aa, synthetic construct
  REGION 1..9: note = Description of Artificial Sequence: Synthetic peptide
NYTGLIYSL

SEQ ID NO: 8866 - protein, 9 aa, synthetic construct
  REGION 1..9: note = Description of Artificial Sequence: Synthetic peptide
SYLKDQQLL

SEQ ID NO: 8867 - protein, 9 aa, synthetic construct
  REGION 1..9: note = Description of Artificial Sequence: Synthetic peptide
IYQEPFKNL

SEQ ID NO: 8868 - protein, 9 aa, synthetic construct
  REGION 1..9: note = Description of Artificial Sequence: Synthetic peptide
IYQEQYKNL

SEQ ID NO: 8869 - protein, 9 aa, synthetic construct
  REGION 1..9: note = Description of Artificial Sequence: Synthetic peptide
MYAPPIEGF

SEQ ID NO: 8870 - protein, 9 aa, synthetic construct
  REGION 1..9: note = Description of Artificial Sequence: Synthetic peptide
RYLKDQQLL

SEQ ID NO: 8871 - protein, 9 aa, synthetic construct
  REGION 1..9: note = Description of Artificial Sequence: Synthetic peptide
VLDNVTENF

SEQ ID NO: 8872 - protein, 9 aa, synthetic construct
  REGION 1..9: note = Description of Artificial Sequence: Synthetic peptide
SYLKDQQLL

SEQ ID NO: 8873 - protein, 9 aa, synthetic construct
  REGION 1..9: note = Description of Artificial Sequence: Synthetic peptide
NYTELVYSL

SEQ ID NO: 8874 - protein, 9 aa, synthetic construct
  REGION 1..9: note = Description of Artificial Sequence: Synthetic peptide
IYQEQYKNL

SEQ ID NO: 8875 - protein, 9 aa, synthetic construct
  REGION 1..9: note = Description of Artificial Sequence: Synthetic peptide
NYTGVIYSL

SEQ ID NO: 8876 - protein, 9 aa, synthetic construct
  REGION 1..9: note = Description of Artificial Sequence: Synthetic peptide
IYQEPFKNL

SEQ ID NO: 8877 - protein, 9 aa, synthetic construct
  REGION 1..9: note = Description of Artificial Sequence: Synthetic peptide
MYAPPIEGF

SEQ ID NO: 8878 - protein, 9 aa, synthetic construct
  REGION 1..9: note = Description of Artificial Sequence: Synthetic peptide
FYATYATNI

SEQ ID NO: 8879 - protein, 9 aa, synthetic construct
  REGION 1..9: note = Description of Artificial Sequence: Synthetic peptide
RYLKDQQLL

SEQ ID NO: 8880 - protein, 9 aa, synthetic construct
  REGION 1..9: note = Description of Artificial Sequence: Synthetic peptide
NYTGLIYSL

SEQ ID NO: 8881 - protein, 9 aa, synthetic construct
  REGION 1..9: note = Description of Artificial Sequence: Synthetic peptide
FYILDIVGI

SEQ ID NO: 8882 - protein, 11 aa, synthetic construct
  REGION 1..11: note = Description of Artificial Sequence: Synthetic peptide
IYAPPIERNIL

SEQ ID NO: 8883 - protein, 9 aa, synthetic construct
  REGION 1..9: note = Description of Artificial Sequence: Synthetic peptide
FYKLDVVKI

SEQ ID NO: 8884 - protein, 9 aa, synthetic construct
  REGION 1..9: note = Description of Artificial Sequence: Synthetic peptide
TYSAAGNLW

SEQ ID NO: 8885 - protein, 9 aa, synthetic construct
  REGION 1..9: note = Description of Artificial Sequence: Synthetic peptide
YYDPSKDLI

SEQ ID NO: 8886 - protein, 10 aa, synthetic construct
  REGION 1..10: note = Description of Artificial Sequence: Synthetic peptide
EIAERILGTY

SEQ ID NO: 8887 - protein, 10 aa, synthetic construct
  REGION 1..10: note = Description of Artificial Sequence: Synthetic peptide
ETINEEAAEW

SEQ ID NO: 8888 - protein, 10 aa, synthetic construct
  REGION 1..10: note = Description of Artificial Sequence: Synthetic peptide
DTINEEAAEW

SEQ ID NO: 8889 - protein, 10 aa, synthetic construct
  REGION 1..10: note = Description of Artificial Sequence: Synthetic peptide
EVTGDIRKAY

SEQ ID NO: 8890 - protein, 9 aa, synthetic construct
  REGION 1..9: note = Description of Artificial Sequence: Synthetic peptide
EVIPMFSAL

SEQ ID NO: 8891 - protein, 11 aa, synthetic construct
  REGION 1..11: note = Description of Artificial Sequence: Synthetic peptide
DSIGERILSTY

SEQ ID NO: 8892 - protein, 10 aa, synthetic construct
  REGION 1..10: note = Description of Artificial Sequence: Synthetic peptide
EVNIITDSQY

SEQ ID NO: 8893 - protein, 10 aa, synthetic construct
  REGION 1..10: note = Description of Artificial Sequence: Synthetic peptide
EVQKQGDGQW

SEQ ID NO: 8894 - protein, 9 aa, synthetic construct
  REGION 1..9: note = Description of Artificial Sequence: Synthetic peptide
DIAGTTSTL

SEQ ID NO: 8895 - protein, 9 aa, synthetic construct
  REGION 1..9: note = Description of Artificial Sequence: Synthetic peptide
NVSENFNMW

SEQ ID NO: 8896 - protein, 11 aa, synthetic construct
  REGION 1..11: note = Description of Artificial Sequence: Synthetic peptide
SVLSGGQLDAW

SEQ ID NO: 8897 - protein, 9 aa, synthetic construct
  REGION 1..9: note = Description of Artificial Sequence: Synthetic peptide
NVTENFNMW

SEQ ID NO: 8898 - protein, 10 aa, synthetic construct
  REGION 1..10: note = Description of Artificial Sequence: Synthetic peptide
EVVSQIIEQL

SEQ ID NO: 8899 - protein, 10 aa, synthetic construct
  REGION 1..10: note = Description of Artificial Sequence: Synthetic peptide
EIQKQGHGQW

SEQ ID NO: 8900 - protein, 9 aa, synthetic construct
  REGION 1..9: note = Description of Artificial Sequence: Synthetic peptide
EVIIRSENL

SEQ ID NO: 8901 - protein, 10 aa, synthetic construct
  REGION 1..10: note = Description of Artificial Sequence: Synthetic peptide
NTSGLFNSTW

SEQ ID NO: 8902 - protein, 10 aa, synthetic construct
  REGION 1..10: note = Description of Artificial Sequence: Synthetic peptide
FTKKGLGVSY

SEQ ID NO: 8903 - protein, 10 aa, synthetic construct
  REGION 1..10: note = Description of Artificial Sequence: Synthetic peptide
EVNIVTDSQY

SEQ ID NO: 8904 - protein, 10 aa, synthetic construct
  REGION 1..10: note = Description of Artificial Sequence: Synthetic peptide
EIAERILGTY

SEQ ID NO: 8905 - protein, 10 aa, synthetic construct
  REGION 1..10: note = Description of Artificial Sequence: Synthetic peptide
EVNIITDSQY

SEQ ID NO: 8906 - protein, 11 aa, synthetic construct
  REGION 1..11: note = Description of Artificial Sequence: Synthetic peptide
DSIGERILSTY

SEQ ID NO: 8907 - protein, 10 aa, synthetic construct
  REGION 1..10: note = Description of Artificial Sequence: Synthetic peptide
EVTGDIRKAY

SEQ ID NO: 8908 - protein, 10 aa, synthetic construct
  REGION 1..10: note = Description of Artificial Sequence: Synthetic peptide
EVNIVTDSQY

SEQ ID NO: 8909 - protein, 9 aa, synthetic construct
  REGION 1..9: note = Description of Artificial Sequence: Synthetic peptide
EVIPMFSAL

SEQ ID NO: 8910 - protein, 9 aa, synthetic construct
  REGION 1..9: note = Description of Artificial Sequence: Synthetic peptide
ETKLGKAGY

SEQ ID NO: 8911 - protein, 9 aa, synthetic construct
  REGION 1..9: note = Description of Artificial Sequence: Synthetic peptide
ETPGIRYQY

SEQ ID NO: 8912 - protein, 9 aa, synthetic construct
  REGION 1..9: note = Description of Artificial Sequence: Synthetic peptide
DIVSPRCEY

SEQ ID NO: 8913 - protein, 9 aa, synthetic construct
  REGION 1..9: note = Description of Artificial Sequence: Synthetic peptide
DTKLGKAGY

SEQ ID NO: 8914 - protein, 9 aa, synthetic construct
  REGION 1..9: note = Description of Artificial Sequence: Synthetic peptide
ETRLGKAGY

SEQ ID NO: 8915 - protein, 10 aa, synthetic construct
  REGION 1..10: note = Description of Artificial Sequence: Synthetic peptide
EVIPAETGQE

SEQ ID NO: 8916 - protein, 9 aa, synthetic construct
  REGION 1..9: note = Description of Artificial Sequence: Synthetic peptide
EVTGDIRKA

SEQ ID NO: 8917 - protein, 9 aa, synthetic construct
  REGION 1..9: note = Description of Artificial Sequence: Synthetic peptide
YTPGPGTRY

SEQ ID NO: 8918 - protein, 10 aa, synthetic construct
  REGION 1..10: note = Description of Artificial Sequence: Synthetic peptide
ETFRPGGGDM

SEQ ID NO: 8919 - protein, 9 aa, synthetic construct
  REGION 1..9: note = Description of Artificial Sequence: Synthetic peptide
EVVSQIIEQ

SEQ ID NO: 8920 - protein, 10 aa, synthetic construct
  REGION 1..10: note = Description of Artificial Sequence: Synthetic peptide
EVVSQIIEQL

SEQ ID NO: 8921 - protein, 9 aa, synthetic construct
  REGION 1..9: note = Description of Artificial Sequence: Synthetic peptide
EVIPSETGQ

SEQ ID NO: 8922 - protein, 10 aa, synthetic construct
  REGION 1..10: note = Description of Artificial Sequence: Synthetic peptide
EIFRPGGGDM

SEQ ID NO: 8923 - protein, 9 aa, synthetic construct
  REGION 1..9: note = Description of Artificial Sequence: Synthetic peptide
EVIPAETGQ

SEQ ID NO: 8924 - protein, 11 aa, synthetic construct
  REGION 1..11: note = Description of Artificial Sequence: Synthetic peptide
HSIGERIISTY

SEQ ID NO: 8925 - protein, 8 aa, synthetic construct
  REGION 1..8: note = Description of Artificial Sequence: Synthetic peptide
ETVHGAYY

SEQ ID NO: 8926 - protein, 10 aa, synthetic construct
  REGION 1..10: note = Description of Artificial Sequence: Synthetic peptide
EAMSQATAGM

SEQ ID NO: 8927 - protein, 10 aa, synthetic construct
  REGION 1..10: note = Description of Artificial Sequence: Synthetic peptide
EVIPSETGQE

SEQ ID NO: 8928 - protein, 10 aa, synthetic construct
  REGION 1..10: note = Description of Artificial Sequence: Synthetic peptide
EIAERILGTY

SEQ ID NO: 8929 - protein, 9 aa, synthetic construct
  REGION 1..9: note = Description of Artificial Sequence: Synthetic peptide
EVIPMFSAL

SEQ ID NO: 8930 - protein, 10 aa, synthetic construct
  REGION 1..10: note = Description of Artificial Sequence: Synthetic peptide
EVNIITDSQY

SEQ ID NO: 8931 - protein, 10 aa, synthetic construct
  REGION 1..10: note = Description of Artificial Sequence: Synthetic peptide
EVNIVTDSQY

SEQ ID NO: 8932 - protein, 10 aa, synthetic construct
  REGION 1..10: note = Description of Artificial Sequence: Synthetic peptide
EVVSQIIEQL

SEQ ID NO: 8933 - protein, 9 aa, synthetic construct
  REGION 1..9: note = Description of Artificial Sequence: Synthetic peptide
DIAGTTSTL

SEQ ID NO: 8934 - protein, 9 aa, synthetic construct
  REGION 1..9: note = Description of Artificial Sequence: Synthetic peptide
DTKEALEKM

SEQ ID NO: 8935 - protein, 10 aa, synthetic construct
  REGION 1..10: note = Description of Artificial Sequence: Synthetic peptide
EIFRPGGGDM

SEQ ID NO: 8936 - protein, 11 aa, synthetic construct
  REGION 1..11: note = Description of Artificial Sequence: Synthetic peptide
DSIGERILSTY

SEQ ID NO: 8937 - protein, 10 aa, synthetic construct
  REGION 1..10: note = Description of Artificial Sequence: Synthetic peptide
SIGERIISTY

SEQ ID NO: 8938 - protein, 9 aa, synthetic construct
  REGION 1..9: note = Description of Artificial Sequence: Synthetic peptide
EVIPMFSAL

SEQ ID NO: 8939 - protein, 11 aa, synthetic construct
  REGION 1..11: note = Description of Artificial Sequence: Synthetic peptide
DIVGIDNSSNR

SEQ ID NO: 8940 - protein, 10 aa, synthetic construct
  REGION 1..10: note = Description of Artificial Sequence: Synthetic peptide
EAMSQATAGM

SEQ ID NO: 8941 - protein, 10 aa, synthetic construct
  REGION 1..10: note = Description of Artificial Sequence: Synthetic peptide
EIAERILGTY

SEQ ID NO: 8942 - protein, 9 aa, synthetic construct
  REGION 1..9: note = Description of Artificial Sequence: Synthetic peptide
SVTTAMMQR

SEQ ID NO: 8943 - protein, 9 aa, synthetic construct
  REGION 1..9: note = Description of Artificial Sequence: Synthetic peptide
ETVKINCTR

SEQ ID NO: 8944 - protein, 10 aa, synthetic construct
  REGION 1..10: note = Description of Artificial Sequence: Synthetic peptide
EVTGDIRKAY

SEQ ID NO: 8945 - protein, 9 aa, synthetic construct
  REGION 1..9: note = Description of Artificial Sequence: Synthetic peptide
EVTGDIRKA

SEQ ID NO: 8946 - protein, 9 aa, synthetic construct
  REGION 1..9: note = Description of Artificial Sequence: Synthetic peptide
EVIPLTAEA

SEQ ID NO: 8947 - protein, 9 aa, synthetic construct
  REGION 1..9: note = Description of Artificial Sequence: Synthetic peptide
EPIGVAPTR

SEQ ID NO: 8948 - protein, 9 aa, synthetic construct
  REGION 1..9: note = Description of Artificial Sequence: Synthetic peptide
MVHQAISPR

SEQ ID NO: 8949 - protein, 9 aa, synthetic construct
  REGION 1..9: note = Description of Artificial Sequence: Synthetic peptide
EVIIRSENL

SEQ ID NO: 8950 - protein, 9 aa, synthetic construct
  REGION 1..9: note = Description of Artificial Sequence: Synthetic peptide
DIAGTTSTL

SEQ ID NO: 8951 - protein, 10 aa, synthetic construct
  REGION 1..10: note = Description of Artificial Sequence: Synthetic peptide
EVNIITDSQY

SEQ ID NO: 8952 - protein, 10 aa, synthetic construct
  REGION 1..10: note = Description of Artificial Sequence: Synthetic peptide
DNSDIKVVPR

SEQ ID NO: 8953 - protein, 9 aa, synthetic construct
  REGION 1..9: note = Description of Artificial Sequence: Synthetic peptide
QIIKMVAGR

SEQ ID NO: 8954 - protein, 9 aa, synthetic construct
  REGION 1..9: note = Description of Artificial Sequence: Synthetic peptide
NTINITCVR

SEQ ID NO: 8955 - protein, 10 aa, synthetic construct
  REGION 1..10: note = Description of Artificial Sequence: Synthetic peptide
EVVSQIIEQL

SEQ ID NO: 8956 - protein, 11 aa, synthetic construct
  REGION 1..11: note = Description of Artificial Sequence: Synthetic peptide
DVKQLAEAVQR

SEQ ID NO: 8957 - protein, 9 aa, synthetic construct
  REGION 1..9: note = Description of Artificial Sequence: Synthetic peptide
ESVKITCAR

SEQ ID NO: 8958 - protein, 9 aa, synthetic construct
  REGION 1..9: note = Description of Artificial Sequence: Synthetic peptide
EVIPLTKEA

SEQ ID NO: 8959 - protein, 9 aa, synthetic construct
  REGION 1..9: note = Description of Artificial Sequence: Synthetic peptide
MVHQALSPR

SEQ ID NO: 8960 - protein, 9 aa, synthetic construct
  REGION 1..9: note = Description of Artificial Sequence: Synthetic peptide
LFNTVATLY

SEQ ID NO: 8961 - protein, 9 aa, synthetic construct
  REGION 1..9: note = Description of Artificial Sequence: Synthetic peptide
TVLDVGDAY

SEQ ID NO: 8962 - protein, 9 aa, synthetic construct
  REGION 1..9: note = Description of Artificial Sequence: Synthetic peptide
LYNTVATLY

SEQ ID NO: 8963 - protein, 9 aa, synthetic construct
  REGION 1..9: note = Description of Artificial Sequence: Synthetic peptide
LFNAVAVLY

SEQ ID NO: 8964 - protein, 9 aa, synthetic construct
  REGION 1..9: note = Description of Artificial Sequence: Synthetic peptide
LYNTVVTLY

SEQ ID NO: 8965 - protein, 10 aa, synthetic construct
  REGION 1..10: note = Description of Artificial Sequence: Synthetic peptide
GSSSQVSQNY

SEQ ID NO: 8966 - protein, 9 aa, synthetic construct
  REGION 1..9: note = Description of Artificial Sequence: Synthetic peptide
ITKGLGISY

SEQ ID NO: 8967 - protein, 9 aa, synthetic construct
  REGION 1..9: note = Description of Artificial Sequence: Synthetic peptide
NSSQVSQNY

SEQ ID NO: 8968 - protein, 9 aa, synthetic construct
  REGION 1..9: note = Description of Artificial Sequence: Synthetic peptide
NNSQVSQNY

SEQ ID NO: 8969 - protein, 9 aa, synthetic construct
  REGION 1..9: note = Description of Artificial Sequence: Synthetic peptide
SSSQVSQNY

SEQ ID NO: 8970 - protein, 9 aa, synthetic construct
  REGION 1..9: note = Description of Artificial Sequence: Synthetic peptide
TYQIYQEQY

SEQ ID NO: 8971 - protein, 10 aa, synthetic construct
  REGION 1..10: note = Description of Artificial Sequence: Synthetic peptide
MTFEPIPIHY

SEQ ID NO: 8972 - protein, 9 aa, synthetic construct
  REGION 1..9: note = Description of Artificial Sequence: Synthetic peptide
SFEPIPIHY

SEQ ID NO: 8973 - protein, 9 aa, synthetic construct
  REGION 1..9: note = Description of Artificial Sequence: Synthetic peptide
TFEPIPIHY

SEQ ID NO: 8974 - protein, 10 aa, synthetic construct
  REGION 1..10: note = Description of Artificial Sequence: Synthetic peptide
FLNKGLGISY

SEQ ID NO: 8975 - protein, 10 aa, synthetic construct
  REGION 1..10: note = Description of Artificial Sequence: Synthetic peptide
ITSEPIPIHY

SEQ ID NO: 8976 - protein, 10 aa, synthetic construct
  REGION 1..10: note = Description of Artificial Sequence: Synthetic peptide
SLYNTVATLY

SEQ ID NO: 8977 - protein, 9 aa, synthetic construct
  REGION 1..9: note = Description of Artificial Sequence: Synthetic peptide
LFNTVATLY

SEQ ID NO: 8978 - protein, 9 aa, synthetic construct
  REGION 1..9: note = Description of Artificial Sequence: Synthetic peptide
GFFPDWHNY

SEQ ID NO: 8979 - protein, 9 aa, synthetic construct
  REGION 1..9: note = Description of Artificial Sequence: Synthetic peptide
GFFPDWQNY

SEQ ID NO: 8980 - protein, 9 aa, synthetic construct
  REGION 1..9: note = Description of Artificial Sequence: Synthetic peptide
LYNTVATLY

SEQ ID NO: 8981 - protein, 9 aa, synthetic construct
  REGION 1..9: note = Description of Artificial Sequence: Synthetic peptide
LFNAVAVLY

SEQ ID NO: 8982 - protein, 9 aa, synthetic construct
  REGION 1..9: note = Description of Artificial Sequence: Synthetic peptide
LYNTVVTLY

SEQ ID NO: 8983 - protein, 9 aa, synthetic construct
  REGION 1..9: note = Description of Artificial Sequence: Synthetic peptide
SFEPIPIHY

SEQ ID NO: 8984 - protein, 10 aa, synthetic construct
  REGION 1..10: note = Description of Artificial Sequence: Synthetic peptide
INLGPGQAFY

SEQ ID NO: 8985 - protein, 10 aa, synthetic construct
  REGION 1..10: note = Description of Artificial Sequence: Synthetic peptide
MTFEPIPIHY

SEQ ID NO: 8986 - protein, 9 aa, synthetic construct
  REGION 1..9: note = Description of Artificial Sequence: Synthetic peptide
TFEPIPIHY

SEQ ID NO: 8987 - protein, 9 aa, synthetic construct
  REGION 1..9: note = Description of Artificial Sequence: Synthetic peptide
NNSQVSQNY

SEQ ID NO: 8988 - protein, 9 aa, synthetic construct
  REGION 1..9: note = Description of Artificial Sequence: Synthetic peptide
VWTIVFIEY

SEQ ID NO: 8989 - protein, 10 aa, synthetic construct
  REGION 1..10: note = Description of Artificial Sequence: Synthetic peptide
ITSEPIPIHY

SEQ ID NO: 8990 - protein, 9 aa, synthetic construct
  REGION 1..9: note = Description of Artificial Sequence: Synthetic peptide
GIFPDWQNY

SEQ ID NO: 8991 - protein, 9 aa, synthetic construct
  REGION 1..9: note = Description of Artificial Sequence: Synthetic peptide
ITKGLGISY

SEQ ID NO: 8992 - protein, 10 aa, synthetic construct
  REGION 1..10: note = Description of Artificial Sequence: Synthetic peptide
GNNSQVSQNY

SEQ ID NO: 8993 - protein, 10 aa, synthetic construct
  REGION 1..10: note = Description of Artificial Sequence: Synthetic peptide
YFSVPLHEDF

SEQ ID NO: 8994 - protein, 9 aa, synthetic construct
  REGION 1..9: note = Description of Artificial Sequence: Synthetic peptide
NSSQVSQNY

SEQ ID NO: 8995 - protein, 10 aa, synthetic construct
  REGION 1..10: note = Description of Artificial Sequence: Synthetic peptide
GSSSQVSQNY

SEQ ID NO: 8996 - protein, 9 aa, synthetic construct
  REGION 1..9: note = Description of Artificial Sequence: Synthetic peptide
LNKGLGISY

SEQ ID NO: 8997 - protein, 9 aa, synthetic construct
  REGION 1..9: note = Description of Artificial Sequence: Synthetic peptide
VTKGLGISY

SEQ ID NO: 8998 - protein, 10 aa, synthetic construct
  REGION 1..10: note = Description of Artificial Sequence: Synthetic peptide
SLFNAVAVLY

SEQ ID NO: 8999 - protein, 9 aa, synthetic construct
  REGION 1..9: note = Description of Artificial Sequence: Synthetic peptide
TVLDVGDAY

SEQ ID NO: 9000 - protein, 9 aa, synthetic construct
  REGION 1..9: note = Description of Artificial Sequence: Synthetic peptide
SSSQVSQNY

SEQ ID NO: 9001 - protein, 9 aa, synthetic construct
  REGION 1..9: note = Description of Artificial Sequence: Synthetic peptide
SEFNLPPVV

SEQ ID NO: 9002 - protein, 9 aa, synthetic construct
  REGION 1..9: note = Description of Artificial Sequence: Synthetic peptide
AERQGTVSF

SEQ ID NO: 9003 - protein, 9 aa, synthetic construct
  REGION 1..9: note = Description of Artificial Sequence: Synthetic peptide
QIKPPLPSV

SEQ ID NO: 9004 - protein, 9 aa, synthetic construct
  REGION 1..9: note = Description of Artificial Sequence: Synthetic peptide
YQSNPPPSL

SEQ ID NO: 9005 - protein, 11 aa, synthetic construct
  REGION 1..11: note = Description of Artificial Sequence: Synthetic peptide
AERQGQGTVSF

SEQ ID NO: 9006 - protein, 9 aa, synthetic construct
  REGION 1..9: note = Description of Artificial Sequence: Synthetic peptide
KIKPPLPSV

SEQ ID NO: 9007 - protein, 9 aa, synthetic construct
  REGION 1..9: note = Description of Artificial Sequence: Synthetic peptide
QELYPLTSL

SEQ ID NO: 9008 - protein, 9 aa, synthetic construct
  REGION 1..9: note = Description of Artificial Sequence: Synthetic peptide
KELYPSASL

SEQ ID NO: 9009 - protein, 9 aa, synthetic construct
  REGION 1..9: note = Description of Artificial Sequence: Synthetic peptide
VVRIEPIGV

SEQ ID NO: 9010 - protein, 9 aa, synthetic construct
  REGION 1..9: note = Description of Artificial Sequence: Synthetic peptide
KELYPLTSL

SEQ ID NO: 9011 - protein, 9 aa, synthetic construct
  REGION 1..9: note = Description of Artificial Sequence: Synthetic peptide
AIYAPPIER

SEQ ID NO: 9012 - protein, 9 aa, synthetic construct
  REGION 1..9: note = Description of Artificial Sequence: Synthetic peptide
NESVPINCI

SEQ ID NO: 9013 - protein, 9 aa, synthetic construct
  REGION 1..9: note = Description of Artificial Sequence: Synthetic peptide
VTKGLGISY

SEQ ID NO: 9014 - protein, 9 aa, synthetic construct
  REGION 1..9: note = Description of Artificial Sequence: Synthetic peptide
ITKGLGISY

SEQ ID NO: 9015 - protein, 10 aa, synthetic construct
  REGION 1..10: note = Description of Artificial Sequence: Synthetic peptide
KVNIVTDSQY

SEQ ID NO: 9016 - protein, 11 aa, synthetic construct
  REGION 1..11: note = Description of Artificial Sequence: Synthetic peptide
KQNPEIVIYQY

SEQ ID NO: 9017 - protein, 9 aa, synthetic construct
  REGION 1..9: note = Description of Artificial Sequence: Synthetic peptide
SSSQVSQNY

SEQ ID NO: 9018 - protein, 10 aa, synthetic construct
  REGION 1..10: note = Description of Artificial Sequence: Synthetic peptide
GSSSQVSQNY

SEQ ID NO: 9019 - protein, 9 aa, synthetic construct
  REGION 1..9: note = Description of Artificial Sequence: Synthetic peptide
RVMETQRNY

SEQ ID NO: 9020 - protein, 9 aa, synthetic construct
  REGION 1..9: note = Description of Artificial Sequence: Synthetic peptide
RVMGIERNY

SEQ ID NO: 9021 - protein, 9 aa, synthetic construct
  REGION 1..9: note = Description of Artificial Sequence: Synthetic peptide
NSSQVSQNY

SEQ ID NO: 9022 - protein, 11 aa, synthetic construct
  REGION 1..11: note = Description of Artificial Sequence: Synthetic peptide
KQNPEMVIYQY

SEQ ID NO: 9023 - protein, 11 aa, synthetic construct
  REGION 1..11: note = Description of Artificial Sequence: Synthetic peptide
QTGSEEIKSLY

SEQ ID NO: 9024 - protein, 9 aa, synthetic construct
  REGION 1..9: note = Description of Artificial Sequence: Synthetic peptide
GTEELRSLY

SEQ ID NO: 9025 - protein, 9 aa, synthetic construct
  REGION 1..9: note = Description of Artificial Sequence: Synthetic peptide
VTGDIRKAY

SEQ ID NO: 9026 - protein, 9 aa, synthetic construct
  REGION 1..9: note = Description of Artificial Sequence: Synthetic peptide
KQNPEIVIY

SEQ ID NO: 9027 - protein, 9 aa, synthetic construct
  REGION 1..9: note = Description of Artificial Sequence: Synthetic peptide
KQNPEMVIY

SEQ ID NO: 9028 - protein, 9 aa, synthetic construct
  REGION 1..9: note = Description of Artificial Sequence: Synthetic peptide
TVLDVGDAY

SEQ ID NO: 9029 - protein, 11 aa, synthetic construct
  REGION 1..11: note = Description of Artificial Sequence: Synthetic peptide
KQNPELIIYSY

SEQ ID NO: 9030 - protein, 11 aa, synthetic construct
  REGION 1..11: note = Description of Artificial Sequence: Synthetic peptide
TGSSSQVSQNY

SEQ ID NO: 9031 - protein, 10 aa, synthetic construct
  REGION 1..10: note = Description of Artificial Sequence: Synthetic peptide
ILKEPVHGAY

SEQ ID NO: 9032 - protein, 9 aa, synthetic construct
  REGION 1..9: note = Description of Artificial Sequence: Synthetic peptide
LGQHIYETY

SEQ ID NO: 9033 - protein, 10 aa, synthetic construct
  REGION 1..10: note = Description of Artificial Sequence: Synthetic peptide
ILKEPVHGVY

SEQ ID NO: 9034 - protein, 9 aa, synthetic construct
  REGION 1..9: note = Description of Artificial Sequence: Synthetic peptide
TYQIYQEQY

SEQ ID NO: 9035 - protein, 11 aa, synthetic construct
  REGION 1..11: note = Description of Artificial Sequence: Synthetic peptide
TGNNSQVSQNY

SEQ ID NO: 9036 - protein, 11 aa, synthetic construct
  REGION 1..11: note = Description of Artificial Sequence: Synthetic peptide
QTGTEELRSLY

SEQ ID NO: 9037 - protein, 9 aa, synthetic construct
  REGION 1..9: note = Description of Artificial Sequence: Synthetic peptide
KQNPEMIIY

SEQ ID NO: 9038 - protein, 10 aa, synthetic construct
  REGION 1..10: note = Description of Artificial Sequence: Synthetic peptide
GDNKQVSQNY

SEQ ID NO: 9039 - protein, 9 aa, synthetic construct
  REGION 1..9: note = Description of Artificial Sequence: Synthetic peptide
KAQEEHEKY

SEQ ID NO: 9040 - protein, 10 aa, synthetic construct
  REGION 1..10: note = Description of Artificial Sequence: Synthetic peptide
GLADQLIHIY

SEQ ID NO: 9041 - protein, 9 aa, synthetic construct
  REGION 1..9: note = Description of Artificial Sequence: Synthetic peptide
ITKGLGISY

SEQ ID NO: 9042 - protein, 9 aa, synthetic construct
  REGION 1..9: note = Description of Artificial Sequence: Synthetic peptide
VTKGLGISY

SEQ ID NO: 9043 - protein, 11 aa, synthetic construct
  REGION 1..11: note = Description of Artificial Sequence: Synthetic peptide
KQNPEIVIYQY

SEQ ID NO: 9044 - protein, 10 aa, synthetic construct
  REGION 1..10: note = Description of Artificial Sequence: Synthetic peptide
KVNIVTDSQY

SEQ ID NO: 9045 - protein, 10 aa, synthetic construct
  REGION 1..10: note = Description of Artificial Sequence: Synthetic peptide
GSSSQVSQNY

SEQ ID NO: 9046 - protein, 9 aa, synthetic construct
  REGION 1..9: note = Description of Artificial Sequence: Synthetic peptide
VTGDIRKAY

SEQ ID NO: 9047 - protein, 9 aa, synthetic construct
  REGION 1..9: note = Description of Artificial Sequence: Synthetic peptide
RVMETQRNY

SEQ ID NO: 9048 - protein, 9 aa, synthetic construct
  REGION 1..9: note = Description of Artificial Sequence: Synthetic peptide
KQNPEIVIY

SEQ ID NO: 9049 - protein, 9 aa, synthetic construct
  REGION 1..9: note = Description of Artificial Sequence: Synthetic peptide
SSSQVSQNY

SEQ ID NO: 9050 - protein, 11 aa, synthetic construct
  REGION 1..11: note = Description of Artificial Sequence: Synthetic peptide
QTGSEEIKSLY

SEQ ID NO: 9051 - protein, 9 aa, synthetic construct
  REGION 1..9: note = Description of Artificial Sequence: Synthetic peptide
RVMGIERNY

SEQ ID NO: 9052 - protein, 11 aa, synthetic construct
  REGION 1..11: note = Description of Artificial Sequence: Synthetic peptide
KQNPELIIYSY

SEQ ID NO: 9053 - protein, 9 aa, synthetic construct
  REGION 1..9: note = Description of Artificial Sequence: Synthetic peptide
KQNPEMVIY

SEQ ID NO: 9054 - protein, 9 aa, synthetic construct
  REGION 1..9: note = Description of Artificial Sequence: Synthetic peptide
KQNPELIIY

SEQ ID NO: 9055 - protein, 10 aa, synthetic construct
  REGION 1..10: note = Description of Artificial Sequence: Synthetic peptide
FTKKGLGVSY

SEQ ID NO: 9056 - protein, 9 aa, synthetic construct
  REGION 1..9: note = Description of Artificial Sequence: Synthetic peptide
GTEELRSLY

SEQ ID NO: 9057 - protein, 9 aa, synthetic construct
  REGION 1..9: note = Description of Artificial Sequence: Synthetic peptide
KQNPEMIIY

SEQ ID NO: 9058 - protein, 10 aa, synthetic construct
  REGION 1..10: note = Description of Artificial Sequence: Synthetic peptide
FLNKGLGISY

SEQ ID NO: 9059 - protein, 9 aa, synthetic construct
  REGION 1..9: note = Description of Artificial Sequence: Synthetic peptide
VVNRVRQGY

SEQ ID NO: 9060 - protein, 11 aa, synthetic construct
  REGION 1..11: note = Description of Artificial Sequence: Synthetic peptide
KQNPEMVIYQY

SEQ ID NO: 9061 - protein, 9 aa, synthetic construct
  REGION 1..9: note = Description of Artificial Sequence: Synthetic peptide
ATNIIGNIR

SEQ ID NO: 9062 - protein, 11 aa, synthetic construct
  REGION 1..11: note = Description of Artificial Sequence: Synthetic peptide
TVNDIQNLVER

SEQ ID NO: 9063 - protein, 9 aa, synthetic construct
  REGION 1..9: note = Description of Artificial Sequence: Synthetic peptide
AIYAPPIER

SEQ ID NO: 9064 - protein, 9 aa, synthetic construct
  REGION 1..9: note = Description of Artificial Sequence: Synthetic peptide
SVTTAMMQR

SEQ ID NO: 9065 - protein, 9 aa, synthetic construct
  REGION 1..9: note = Description of Artificial Sequence: Synthetic peptide
TTKVIGDIR

SEQ ID NO: 9066 - protein, 11 aa, synthetic construct
  REGION 1..11: note = Description of Artificial Sequence: Synthetic peptide
VTKGLGISYGR

SEQ ID NO: 9067 - protein, 9 aa, synthetic construct
  REGION 1..9: note = Description of Artificial Sequence: Synthetic peptide
VGWPAVRER

SEQ ID NO: 9068 - protein, 9 aa, synthetic construct
  REGION 1..9: note = Description of Artificial Sequence: Synthetic peptide
QIYPGIKVR

SEQ ID NO: 9069 - protein, 11 aa, synthetic construct
  REGION 1..11: note = Description of Artificial Sequence: Synthetic peptide
ITKGLGISYGR

SEQ ID NO: 9070 - protein, 11 aa, synthetic construct
  REGION 1..11: note = Description of Artificial Sequence: Synthetic peptide
TVNDIQKLVGK

SEQ ID NO: 9071 - protein, 9 aa, synthetic construct
  REGION 1..9: note = Description of Artificial Sequence: Synthetic peptide
KGLGISYGR

SEQ ID NO: 9072 - protein, 11 aa, synthetic construct
  REGION 1..11: note = Description of Artificial Sequence: Synthetic peptide
KGRPGNFLQSR

SEQ ID NO: 9073 - protein, 9 aa, synthetic construct
  REGION 1..9: note = Description of Artificial Sequence: Synthetic peptide
ILNIPVRIR

SEQ ID NO: 9074 - protein, 9 aa, synthetic construct
  REGION 1..9: note = Description of Artificial Sequence: Synthetic peptide
KGLGVSYGR

SEQ ID NO: 9075 - protein, 9 aa, synthetic construct
  REGION 1..9: note = Description of Artificial Sequence: Synthetic peptide
RQIDRLIDR

SEQ ID NO: 9076 - protein, 9 aa, synthetic construct
  REGION 1..9: note = Description of Artificial Sequence: Synthetic peptide
RLIDRIRER

SEQ ID NO: 9077 - protein, 10 aa, synthetic construct
  REGION 1..10: note = Description of Artificial Sequence: Synthetic peptide
KAIYAPPIER

SEQ ID NO: 9078 - protein, 9 aa, synthetic construct
  REGION 1..9: note = Description of Artificial Sequence: Synthetic peptide
SVTLTVQAR

SEQ ID NO: 9079 - protein, 11 aa, synthetic construct
  REGION 1..11: note = Description of Artificial Sequence: Synthetic peptide
VGPTPVNIIGR

SEQ ID NO: 9080 - protein, 9 aa, synthetic construct
  REGION 1..9: note = Description of Artificial Sequence: Synthetic peptide
ILGDIVSPR

SEQ ID NO: 9081 - protein, 9 aa, synthetic construct
  REGION 1..9: note = Description of Artificial Sequence: Synthetic peptide
CARPYQNTR

SEQ ID NO: 9082 - protein, 10 aa, synthetic construct
  REGION 1..10: note = Description of Artificial Sequence: Synthetic peptide
QIKPPLPSVR

SEQ ID NO: 9083 - protein, 9 aa, synthetic construct
  REGION 1..9: note = Description of Artificial Sequence: Synthetic peptide
VVNRVRQGY

SEQ ID NO: 9084 - protein, 9 aa, synthetic construct
  REGION 1..9: note = Description of Artificial Sequence: Synthetic peptide
VTKGLGISY

SEQ ID NO: 9085 - protein, 9 aa, synthetic construct
  REGION 1..9: note = Description of Artificial Sequence: Synthetic peptide
ITKGLGISY

SEQ ID NO: 9086 - protein, 9 aa, synthetic construct
  REGION 1..9: note = Description of Artificial Sequence: Synthetic peptide
VTGDIRKAY

SEQ ID NO: 9087 - protein, 9 aa, synthetic construct
  REGION 1..9: note = Description of Artificial Sequence: Synthetic peptide
LVNRVRQGY

SEQ ID NO: 9088 - protein, 10 aa, synthetic construct
  REGION 1..10: note = Description of Artificial Sequence: Synthetic peptide
SVVNRVRQGY

SEQ ID NO: 9089 - protein, 9 aa, synthetic construct
  REGION 1..9: note = Description of Artificial Sequence: Synthetic peptide
ATNSVTTAM

SEQ ID NO: 9090 - protein, 9 aa, synthetic construct
  REGION 1..9: note = Description of Artificial Sequence: Synthetic peptide
RVMETQRNY

SEQ ID NO: 9091 - protein, 9 aa, synthetic construct
  REGION 1..9: note = Description of Artificial Sequence: Synthetic peptide
RQRPGTVSF

SEQ ID NO: 9092 - protein, 11 aa, synthetic construct
  REGION 1..11: note = Description of Artificial Sequence: Synthetic peptide
DVKQLAEAVQR

SEQ ID NO: 9093 - protein, 11 aa, synthetic construct
  REGION 1..11: note = Description of Artificial Sequence: Synthetic peptide
ETFYVDGAANR

SEQ ID NO: 9094 - protein, 10 aa, synthetic construct
  REGION 1..10: note = Description of Artificial Sequence: Synthetic peptide
DNSDIKVVPR

SEQ ID NO: 9095 - protein, 11 aa, synthetic construct
  REGION 1..11: note = Description of Artificial Sequence: Synthetic peptide
TVNDIQNLVER

SEQ ID NO: 9096 - protein, 11 aa, synthetic construct
  REGION 1..11: note = Description of Artificial Sequence: Synthetic peptide
DNTSSETGAER

SEQ ID NO: 9097 - protein, 11 aa, synthetic construct
  REGION 1..11: note = Description of Artificial Sequence: Synthetic peptide
DIVGIDNSSNR

SEQ ID NO: 9098 - protein, 9 aa, synthetic construct
  REGION 1..9: note = Description of Artificial Sequence: Synthetic peptide
NTINITCVR

SEQ ID NO: 9099 - protein, 10 aa, synthetic construct
  REGION 1..10: note = Description of Artificial Sequence: Synthetic peptide
NANTAIMMQR

SEQ ID NO: 9100 - protein, 10 aa, synthetic construct
  REGION 1..10: note = Description of Artificial Sequence: Synthetic peptide
DNSEIKVVPR

SEQ ID NO: 9101 - protein, 9 aa, synthetic construct
  REGION 1..9: note = Description of Artificial Sequence: Synthetic peptide
MNAAIMMQR

SEQ ID NO: 9102 - protein, 11 aa, synthetic construct
  REGION 1..11: note = Description of Artificial Sequence: Synthetic peptide
DVKQLTEAVQK

SEQ ID NO: 9103 - protein, 9 aa, synthetic construct
  REGION 1..9: note = Description of Artificial Sequence: Synthetic peptide
NDIQNLVER

SEQ ID NO: 9104 - protein, 9 aa, synthetic construct
  REGION 1..9: note = Description of Artificial Sequence: Synthetic peptide
MVHHPLSPR

SEQ ID NO: 9105 - protein, 10 aa, synthetic construct
  REGION 1..10: note = Description of Artificial Sequence: Synthetic peptide
NVNAAIMMQR

SEQ ID NO: 9106 - protein, 9 aa, synthetic construct
  REGION 1..9: note = Description of Artificial Sequence: Synthetic peptide
DAWEKIRLR

SEQ ID NO: 9107 - protein, 9 aa, synthetic construct
  REGION 1..9: note = Description of Artificial Sequence: Synthetic peptide
QARVLAVER

SEQ ID NO: 9108 - protein, 11 aa, synthetic construct
  REGION 1..11: note = Description of Artificial Sequence: Synthetic peptide
TDMEKEGKISR

SEQ ID NO: 9109 - protein, 10 aa, synthetic construct
  REGION 1..10: note = Description of Artificial Sequence: Synthetic peptide
EAVDLSHFLK

SEQ ID NO: 9110 - protein, 9 aa, synthetic construct
  REGION 1..9: note = Description of Artificial Sequence: Synthetic peptide
MVHQAISPR

SEQ ID NO: 9111 - protein, 9 aa, synthetic construct
  REGION 1..9: note = Description of Artificial Sequence: Synthetic peptide
NTNITLQCR

SEQ ID NO: 9112 - protein, 11 aa, synthetic construct
  REGION 1..11: note = Description of Artificial Sequence: Synthetic peptide
TNANTAIMMQR

SEQ ID NO: 9113 - protein, 11 aa, synthetic construct
  REGION 1..11: note = Description of Artificial Sequence: Synthetic peptide
ETFYVDGAANR

SEQ ID NO: 9114 - protein, 9 aa, synthetic construct
  REGION 1..9: note = Description of Artificial Sequence: Synthetic peptide
ETVKINCTR

SEQ ID NO: 9115 - protein, 11 aa, synthetic construct
  REGION 1..11: note = Description of Artificial Sequence: Synthetic peptide
DVKQLAEAVQR

SEQ ID NO: 9116 - protein, 11 aa, synthetic construct
  REGION 1..11: note = Description of Artificial Sequence: Synthetic peptide
TVNDIQNLVER

SEQ ID NO: 9117 - protein, 9 aa, synthetic construct
  REGION 1..9: note = Description of Artificial Sequence: Synthetic peptide
NTINITCVR

SEQ ID NO: 9118 - protein, 9 aa, synthetic construct
  REGION 1..9: note = Description of Artificial Sequence: Synthetic peptide
TTKVIGDIR

SEQ ID NO: 9119 - protein, 9 aa, synthetic construct
  REGION 1..9: note = Description of Artificial Sequence: Synthetic peptide
ESVKITCAR

SEQ ID NO: 9120 - protein, 9 aa, synthetic construct
  REGION 1..9: note = Description of Artificial Sequence: Synthetic peptide
ATNIIGNIR

SEQ ID NO: 9121 - protein, 10 aa, synthetic construct
  REGION 1..10: note = Description of Artificial Sequence: Synthetic peptide
NANTAIMMQR

SEQ ID NO: 9122 - protein, 9 aa, synthetic construct
  REGION 1..9: note = Description of Artificial Sequence: Synthetic peptide
MVHQAISPR

SEQ ID NO: 9123 - protein, 10 aa, synthetic construct
  REGION 1..10: note = Description of Artificial Sequence: Synthetic peptide
DNSDIKVVPR

SEQ ID NO: 9124 - protein, 9 aa, synthetic construct
  REGION 1..9: note = Description of Artificial Sequence: Synthetic peptide
MVHHPLSPR

SEQ ID NO: 9125 - protein, 9 aa, synthetic construct
  REGION 1..9: note = Description of Artificial Sequence: Synthetic peptide
QARVLAVER

SEQ ID NO: 9126 - protein, 9 aa, synthetic construct
  REGION 1..9: note = Description of Artificial Sequence: Synthetic peptide
QARILAVER

SEQ ID NO: 9127 - protein, 9 aa, synthetic construct
  REGION 1..9: note = Description of Artificial Sequence: Synthetic peptide
FYVDGAANR

SEQ ID NO: 9128 - protein, 9 aa, synthetic construct
  REGION 1..9: note = Description of Artificial Sequence: Synthetic peptide
MVHQALSPR

SEQ ID NO: 9129 - protein, 9 aa, synthetic construct
  REGION 1..9: note = Description of Artificial Sequence: Synthetic peptide
EVSQIQQEK

SEQ ID NO: 9130 - protein, 11 aa, synthetic construct
  REGION 1..11: note = Description of Artificial Sequence: Synthetic peptide
DIVGIDNSSNR

SEQ ID NO: 9131 - protein, 9 aa, synthetic construct
  REGION 1..9: note = Description of Artificial Sequence: Synthetic peptide
MNAAIMMQR

SEQ ID NO: 9132 - protein, 11 aa, synthetic construct
  REGION 1..11: note = Description of Artificial Sequence: Synthetic peptide
TVNDIQKLVGK

SEQ ID NO: 9133 - protein, 9 aa, synthetic construct
  REGION 1..9: note = Description of Artificial Sequence: Synthetic peptide
SVTTAMMQR

SEQ ID NO: 9134 - protein, 9 aa, synthetic construct
  REGION 1..9: note = Description of Artificial Sequence: Synthetic peptide
HSDIKVVPR

SEQ ID NO: 9135 - protein, 11 aa, synthetic construct
  REGION 1..11: note = Description of Artificial Sequence: Synthetic peptide
EVKDTKEALEK

SEQ ID NO: 9136 - protein, 10 aa, synthetic construct
  REGION 1..10: note = Description of Artificial Sequence: Synthetic peptide
NVNAAIMMQR

SEQ ID NO: 9137 - protein, 9 aa, synthetic construct
  REGION 1..9: note = Description of Artificial Sequence: Synthetic peptide
EYRKIKKQR

SEQ ID NO: 9138 - protein, 10 aa, synthetic construct
  REGION 1..10: note = Description of Artificial Sequence: Synthetic peptide
EVHIPLGEAR

SEQ ID NO: 9139 - protein, 9 aa, synthetic construct
  REGION 1..9: note = Description of Artificial Sequence: Synthetic peptide
AIYAPPIER

SEQ ID NO: 9140 - protein, 10 aa, synthetic construct
  REGION 1..10: note = Description of Artificial Sequence: Synthetic peptide
DNSEIKVVPR

SEQ ID NO: 9141 - protein, 9 aa, synthetic construct
  REGION 1..9: note = Description of Artificial Sequence: Synthetic peptide
NSEIKVVPR

SEQ ID NO: 9142 - protein, 9 aa, synthetic construct
  REGION 1..9: note = Description of Artificial Sequence: Synthetic peptide
NSDIKVVPR

SEQ ID NO: 9143 - protein, 9 aa, synthetic construct
  REGION 1..9: note = Description of Artificial Sequence: Synthetic peptide
ESVPINCIR

SEQ ID NO: 9144 - protein, 8 aa, synthetic construct
  REGION 1..8: note = Description of Artificial Sequence: Synthetic peptide
NAAIMMQR

SEQ ID NO: 9145 - protein, 9 aa, synthetic construct
  REGION 1..9: note = Description of Artificial Sequence: Synthetic peptide
MYVSKKANR

SEQ ID NO: 9146 - protein, 9 aa, synthetic construct
  REGION 1..9: note = Description of Artificial Sequence: Synthetic peptide
QIYPGIKVR

SEQ ID NO: 9147 - protein, 11 aa, synthetic construct
  REGION 1..11: note = Description of Artificial Sequence: Synthetic peptide
TYATNIIGNIR

SEQ ID NO: 9148 - protein, 8 aa, synthetic construct
  REGION 1..8: note = Description of Artificial Sequence: Synthetic peptide
NTAIMMQR

SEQ ID NO: 9149 - protein, 9 aa, synthetic construct
  REGION 1..9: note = Description of Artificial Sequence: Synthetic peptide
NTNITLQCR

SEQ ID NO: 9150 - protein, 11 aa, synthetic construct
  REGION 1..11: note = Description of Artificial Sequence: Synthetic peptide
TNANTAIMMQR

SEQ ID NO: 9151 - protein, 9 aa, synthetic construct
  REGION 1..9: note = Description of Artificial Sequence: Synthetic peptide
ILGDIVSPR

SEQ ID NO: 9152 - protein, 10 aa, synthetic construct
  REGION 1..10: note = Description of Artificial Sequence: Synthetic peptide
ELKKIIGQVR

SEQ ID NO: 9153 - protein, 10 aa, synthetic construct
  REGION 1..10: note = Description of Artificial Sequence: Synthetic peptide
EFNLPPVVAK

SEQ ID NO: 9154 - protein, 8 aa, synthetic construct
  REGION 1..8: note = Description of Artificial Sequence: Synthetic peptide
IYAPPIER

SEQ ID NO: 9155 - protein, 11 aa, synthetic construct
  REGION 1..11: note = Description of Artificial Sequence: Synthetic peptide
ETFRPGGGDMR

SEQ ID NO: 9156 - protein, 10 aa, synthetic construct
  REGION 1..10: note = Description of Artificial Sequence: Synthetic peptide
QIKPPLPSVR

SEQ ID NO: 9157 - protein, 10 aa, synthetic construct
  REGION 1..10: note = Description of Artificial Sequence: Synthetic peptide
EVHIPLGDAR

SEQ ID NO: 9158 - protein, 11 aa, synthetic construct
  REGION 1..11: note = Description of Artificial Sequence: Synthetic peptide
HAGPVAPGQLR

SEQ ID NO: 9159 - protein, 9 aa, synthetic construct
  REGION 1..9: note = Description of Artificial Sequence: Synthetic peptide
EPIGVAPTR

SEQ ID NO: 9160 - protein, 8 aa, synthetic construct
  REGION 1..8: note = Description of Artificial Sequence: Synthetic peptide
TVFSLVNR

SEQ ID NO: 9161 - protein, 8 aa, synthetic construct
  REGION 1..8: note = Description of Artificial Sequence: Synthetic peptide
HSRIGINR

SEQ ID NO: 9162 - protein, 11 aa, synthetic construct
  REGION 1..11: note = Description of Artificial Sequence: Synthetic peptide
ENLAFQQGKAR

SEQ ID NO: 9163 - protein, 9 aa, synthetic construct
  REGION 1..9: note = Description of Artificial Sequence: Synthetic peptide
NDIQNLVER

SEQ ID NO: 9164 - protein, 10 aa, synthetic construct
  REGION 1..10: note = Description of Artificial Sequence: Synthetic peptide
HNYTPGPGTR

SEQ ID NO: 9165 - protein, 11 aa, synthetic construct
  REGION 1..11: note = Description of Artificial Sequence: Synthetic peptide
ETFYVDGAANR

SEQ ID NO: 9166 - protein, 11 aa, synthetic construct
  REGION 1..11: note = Description of Artificial Sequence: Synthetic peptide
DIVGIDNSSNR

SEQ ID NO: 9167 - protein, 9 aa, synthetic construct
  REGION 1..9: note = Description of Artificial Sequence: Synthetic peptide
NTINITCVR

SEQ ID NO: 9168 - protein, 9 aa, synthetic construct
  REGION 1..9: note = Description of Artificial Sequence: Synthetic peptide
EVSQIQQEK

SEQ ID NO: 9169 - protein, 9 aa, synthetic construct
  REGION 1..9: note = Description of Artificial Sequence: Synthetic peptide
SVTTAMMQR

SEQ ID NO: 9170 - protein, 9 aa, synthetic construct
  REGION 1..9: note = Description of Artificial Sequence: Synthetic peptide
ETVKINCTR

SEQ ID NO: 9171 - protein, 9 aa, synthetic construct
  REGION 1..9: note = Description of Artificial Sequence: Synthetic peptide
EPIGVAPTR

SEQ ID NO: 9172 - protein, 11 aa, synthetic construct
  REGION 1..11: note = Description of Artificial Sequence: Synthetic peptide
TVNDIQNLVER

SEQ ID NO: 9173 - protein, 11 aa, synthetic construct
  REGION 1..11: note = Description of Artificial Sequence: Synthetic peptide
FTAEVTGDIRK

SEQ ID NO: 9174 - protein, 10 aa, synthetic construct
  REGION 1..10: note = Description of Artificial Sequence: Synthetic peptide
NANTAIMMQR

SEQ ID NO: 9175 - protein, 11 aa, synthetic construct
  REGION 1..11: note = Description of Artificial Sequence: Synthetic peptide
DVKQLAEAVQR

SEQ ID NO: 9176 - protein, 10 aa, synthetic construct
  REGION 1..10: note = Description of Artificial Sequence: Synthetic peptide
DNSDIKVVPR

SEQ ID NO: 9177 - protein, 10 aa, synthetic construct
  REGION 1..10: note = Description of Artificial Sequence: Synthetic peptide
FTAEVTGDIR

SEQ ID NO: 9178 - protein, 9 aa, synthetic construct
  REGION 1..9: note = Description of Artificial Sequence: Synthetic peptide
SANNISIVK

SEQ ID NO: 9179 - protein, 10 aa, synthetic construct
  REGION 1..10: note = Description of Artificial Sequence: Synthetic peptide
NSVTTAMMQR

SEQ ID NO: 9180 - protein, 11 aa, synthetic construct
  REGION 1..11: note = Description of Artificial Sequence: Synthetic peptide
TVNDIQKLVGK

SEQ ID NO: 9181 - protein, 11 aa, synthetic construct
  REGION 1..11: note = Description of Artificial Sequence: Synthetic peptide
ETFRPGGGDMR

SEQ ID NO: 9182 - protein, 10 aa, synthetic construct
  REGION 1..10: note = Description of Artificial Sequence: Synthetic peptide
SANNISIVKK

SEQ ID NO: 9183 - protein, 11 aa, synthetic construct
  REGION 1..11: note = Description of Artificial Sequence: Synthetic peptide
PAADGVGAVSR

SEQ ID NO: 9184 - protein, 9 aa, synthetic construct
  REGION 1..9: note = Description of Artificial Sequence: Synthetic peptide
SVTLTVQAR

SEQ ID NO: 9185 - protein, 10 aa, synthetic construct
  REGION 1..10: note = Description of Artificial Sequence: Synthetic peptide
SSANNISIVK

SEQ ID NO: 9186 - protein, 10 aa, synthetic construct
  REGION 1..10: note = Description of Artificial Sequence: Synthetic peptide
DNSEIKVVPR

SEQ ID NO: 9187 - protein, 10 aa, synthetic construct
  REGION 1..10: note = Description of Artificial Sequence: Synthetic peptide
NVNAAIMMQR

SEQ ID NO: 9188 - protein, 10 aa, synthetic construct
  REGION 1..10: note = Description of Artificial Sequence: Synthetic peptide
DSSTNSTNYR

SEQ ID NO: 9189 - protein, 11 aa, synthetic construct
  REGION 1..11: note = Description of Artificial Sequence: Synthetic peptide
TNANTAIMMQR

SEQ ID NO: 9190 - protein, 10 aa, synthetic construct
  REGION 1..10: note = Description of Artificial Sequence: Synthetic peptide
YATNIIGNIR

SEQ ID NO: 9191 - protein, 9 aa, synthetic construct
  REGION 1..9: note = Description of Artificial Sequence: Synthetic peptide
NSEIKVVPR

SEQ ID NO: 9192 - protein, 11 aa, synthetic construct
  REGION 1..11: note = Description of Artificial Sequence: Synthetic peptide
SSANNISIVKK

SEQ ID NO: 9193 - protein, 10 aa, synthetic construct
  REGION 1..10: note = Description of Artificial Sequence: Synthetic peptide
EVNIVTDSQY

SEQ ID NO: 9194 - protein, 9 aa, synthetic construct
  REGION 1..9: note = Description of Artificial Sequence: Synthetic peptide
EPLGVAPTR

SEQ ID NO: 9195 - protein, 9 aa, synthetic construct
  REGION 1..9: note = Description of Artificial Sequence: Synthetic peptide
SLAEEVMVR

SEQ ID NO: 9196 - protein, 9 aa, synthetic construct
  REGION 1..9: note = Description of Artificial Sequence: Synthetic peptide
NSDIKVVPR

SEQ ID NO: 9197 - protein, 9 aa, synthetic construct
  REGION 1..9: note = Description of Artificial Sequence: Synthetic peptide
AIYAPPIER

SEQ ID NO: 9198 - protein, 9 aa, synthetic construct
  REGION 1..9: note = Description of Artificial Sequence: Synthetic peptide
ESVPINCIR

SEQ ID NO: 9199 - protein, 9 aa, synthetic construct
  REGION 1..9: note = Description of Artificial Sequence: Synthetic peptide
ATNIIGNIR

SEQ ID NO: 9200 - protein, 9 aa, synthetic construct
  REGION 1..9: note = Description of Artificial Sequence: Synthetic peptide
ESVKITCAR

SEQ ID NO: 9201 - protein, 9 aa, synthetic construct
  REGION 1..9: note = Description of Artificial Sequence: Synthetic peptide
FAVLSVVNR

SEQ ID NO: 9202 - protein, 11 aa, synthetic construct
  REGION 1..11: note = Description of Artificial Sequence: Synthetic peptide
NSSANNISIVK

SEQ ID NO: 9203 - protein, 11 aa, synthetic construct
  REGION 1..11: note = Description of Artificial Sequence: Synthetic peptide
DVKQLTEAVQK

SEQ ID NO: 9204 - protein, 10 aa, synthetic construct
  REGION 1..10: note = Description of Artificial Sequence: Synthetic peptide
EVNIITDSQY

SEQ ID NO: 9205 - protein, 10 aa, synthetic construct
  REGION 1..10: note = Description of Artificial Sequence: Synthetic peptide
EAVDLSHFLK

SEQ ID NO: 9206 - protein, 9 aa, synthetic construct
  REGION 1..9: note = Description of Artificial Sequence: Synthetic peptide
ILGDIVSPR

SEQ ID NO: 9207 - protein, 10 aa, synthetic construct
  REGION 1..10: note = Description of Artificial Sequence: Synthetic peptide
EVVSQIIEQL

SEQ ID NO: 9208 - protein, 10 aa, synthetic construct
  REGION 1..10: note = Description of Artificial Sequence: Synthetic peptide
ASVTLTVQAR

SEQ ID NO: 9209 - protein, 9 aa, synthetic construct
  REGION 1..9: note = Description of Artificial Sequence: Synthetic peptide
LTALIAPKR

SEQ ID NO: 9210 - protein, 9 aa, synthetic construct
  REGION 1..9: note = Description of Artificial Sequence: Synthetic peptide
NITGLLLTR

SEQ ID NO: 9211 - protein, 10 aa, synthetic construct
  REGION 1..10: note = Description of Artificial Sequence: Synthetic peptide
NTSSETGAER

SEQ ID NO: 9212 - protein, 9 aa, synthetic construct
  REGION 1..9: note = Description of Artificial Sequence: Synthetic peptide
TTKVIGDIR

SEQ ID NO: 9213 - protein, 10 aa, synthetic construct
  REGION 1..10: note = Description of Artificial Sequence: Synthetic peptide
NTSDSAETFR

SEQ ID NO: 9214 - protein, 10 aa, synthetic construct
  REGION 1..10: note = Description of Artificial Sequence: Synthetic peptide
DCFTDSAIRK

SEQ ID NO: 9215 - protein, 10 aa, synthetic construct
  REGION 1..10: note = Description of Artificial Sequence: Synthetic peptide
DHSDIKVVPR

SEQ ID NO: 9216 - protein, 9 aa, synthetic construct
  REGION 1..9: note = Description of Artificial Sequence: Synthetic peptide
MNAAIMMQR

SEQ ID NO: 9217 - protein, 9 aa, synthetic construct
  REGION 1..9: note = Description of Artificial Sequence: Synthetic peptide
MVHQAISPR

SEQ ID NO: 9218 - protein, 11 aa, synthetic construct
  REGION 1..11: note = Description of Artificial Sequence: Synthetic peptide
EPIGLAPTAAK

SEQ ID NO: 9219 - protein, 10 aa, synthetic construct
  REGION 1..10: note = Description of Artificial Sequence: Synthetic peptide
DIIATDIQTK

SEQ ID NO: 9220 - protein, 9 aa, synthetic construct
  REGION 1..9: note = Description of Artificial Sequence: Synthetic peptide
HSDIKVVPR

SEQ ID NO: 9221 - protein, 11 aa, synthetic construct
  REGION 1..11: note = Description of Artificial Sequence: Synthetic peptide
TAIAVAEGTDR

SEQ ID NO: 9222 - protein, 11 aa, synthetic construct
  REGION 1..11: note = Description of Artificial Sequence: Synthetic peptide
QVAGDDCVASR

SEQ ID NO: 9223 - protein, 11 aa, synthetic construct
  REGION 1..11: note = Description of Artificial Sequence: Synthetic peptide
VGPTPVNIIGR

SEQ ID NO: 9224 - protein, 10 aa, synthetic construct
  REGION 1..10: note = Description of Artificial Sequence: Synthetic peptide
ESWTVNDIQK

SEQ ID NO: 9225 - protein, 10 aa, synthetic construct
  REGION 1..10: note = Description of Artificial Sequence: Synthetic peptide
AADGVGAVSR

SEQ ID NO: 9226 - protein, 9 aa, synthetic construct
  REGION 1..9: note = Description of Artificial Sequence: Synthetic peptide
NDIQNLVER

SEQ ID NO: 9227 - protein, 8 aa, synthetic construct
  REGION 1..8: note = Description of Artificial Sequence: Synthetic peptide
NTAIMMQR

SEQ ID NO: 9228 - protein, 10 aa, synthetic construct
  REGION 1..10: note = Description of Artificial Sequence: Synthetic peptide
EVTGDIRKAY

SEQ ID NO: 9229 - protein, 9 aa, synthetic construct
  REGION 1..9: note = Description of Artificial Sequence: Synthetic peptide
ETAYFILKL

SEQ ID NO: 9230 - protein, 9 aa, synthetic construct
  REGION 1..9: note = Description of Artificial Sequence: Synthetic peptide
EAVDLSHFL

SEQ ID NO: 9231 - protein, 9 aa, synthetic construct
  REGION 1..9: note = Description of Artificial Sequence: Synthetic peptide
ETAYFLLKL

SEQ ID NO: 9232 - protein, 10 aa, synthetic construct
  REGION 1..10: note = Description of Artificial Sequence: Synthetic peptide
ETYGDTWVGV

SEQ ID NO: 9233 - protein, 9 aa, synthetic construct
  REGION 1..9: note = Description of Artificial Sequence: Synthetic peptide
TVFSLVNRV

SEQ ID NO: 9234 - protein, 9 aa, synthetic construct
  REGION 1..9: note = Description of Artificial Sequence: Synthetic peptide
ETITIPCRI

SEQ ID NO: 9235 - protein, 9 aa, synthetic construct
  REGION 1..9: note = Description of Artificial Sequence: Synthetic peptide
TTSVITQAC

SEQ ID NO: 9236 - protein, 10 aa, synthetic construct
  REGION 1..10: note = Description of Artificial Sequence: Synthetic peptide
EVVSQIIEQL

SEQ ID NO: 9237 - protein, 9 aa, synthetic construct
  REGION 1..9: note = Description of Artificial Sequence: Synthetic peptide
NTSAITQAC

SEQ ID NO: 9238 - protein, 9 aa, synthetic construct
  REGION 1..9: note = Description of Artificial Sequence: Synthetic peptide
EITAIAALV

SEQ ID NO: 9239 - protein, 9 aa, synthetic construct
  REGION 1..9: note = Description of Artificial Sequence: Synthetic peptide
LVSQIIEQL

SEQ ID NO: 9240 - protein, 9 aa, synthetic construct
  REGION 1..9: note = Description of Artificial Sequence: Synthetic peptide
VVSQIIEQL

SEQ ID NO: 9241 - protein, 9 aa, synthetic construct
  REGION 1..9: note = Description of Artificial Sequence: Synthetic peptide
YATNIIGNI

SEQ ID NO: 9242 - protein, 9 aa, synthetic construct
  REGION 1..9: note = Description of Artificial Sequence: Synthetic peptide
EAMSQATNV

SEQ ID NO: 9243 - protein, 11 aa, synthetic construct
  REGION 1..11: note = Description of Artificial Sequence: Synthetic peptide
EVIPLTAEAEL

SEQ ID NO: 9244 - protein, 11 aa, synthetic construct
  REGION 1..11: note = Description of Artificial Sequence: Synthetic peptide
EVIPLTKEAEL

SEQ ID NO: 9245 - protein, 9 aa, synthetic construct
  REGION 1..9: note = Description of Artificial Sequence: Synthetic peptide
EVSQIQQEK

SEQ ID NO: 9246 - protein, 9 aa, synthetic construct
  REGION 1..9: note = Description of Artificial Sequence: Synthetic peptide
QTTELQKQI

SEQ ID NO: 9247 - protein, 9 aa, synthetic construct
  REGION 1..9: note = Description of Artificial Sequence: Synthetic peptide
EALDLSHFL

SEQ ID NO: 9248 - protein, 11 aa, synthetic construct
  REGION 1..11: note = Description of Artificial Sequence: Synthetic peptide
FTAEVTGDIRK

SEQ ID NO: 9249 - protein, 9 aa, synthetic construct
  REGION 1..9: note = Description of Artificial Sequence: Synthetic peptide
TVNDIQKLV

SEQ ID NO: 9250 - protein, 9 aa, synthetic construct
  REGION 1..9: note = Description of Artificial Sequence: Synthetic peptide
TVNDIQNLV

SEQ ID NO: 9251 - protein, 9 aa, synthetic construct
  REGION 1..9: note = Description of Artificial Sequence: Synthetic peptide
EILAIVALV

SEQ ID NO: 9252 - protein, 9 aa, synthetic construct
  REGION 1..9: note = Description of Artificial Sequence: Synthetic peptide
TTSNLQEQI

SEQ ID NO: 9253 - protein, 9 aa, synthetic construct
  REGION 1..9: note = Description of Artificial Sequence: Synthetic peptide
EVIPLTAEA

SEQ ID NO: 9254 - protein, 9 aa, synthetic construct
  REGION 1..9: note = Description of Artificial Sequence: Synthetic peptide
NVKTIIVQL

SEQ ID NO: 9255 - protein, 11 aa, synthetic construct
  REGION 1..11: note = Description of Artificial Sequence: Synthetic peptide
EVVSQIIEQLI

SEQ ID NO: 9256 - protein, 9 aa, synthetic construct
  REGION 1..9: note = Description of Artificial Sequence: Synthetic peptide
MTYSVAEQL

SEQ ID NO: 9257 - protein, 9 aa, synthetic construct
  REGION 1..9: note = Description of Artificial Sequence: Synthetic peptide
ETNNSTITI

SEQ ID NO: 9258 - protein, 9 aa, synthetic construct
  REGION 1..9: note = Description of Artificial Sequence: Synthetic peptide
ETNSLLHPI

SEQ ID NO: 9259 - protein, 9 aa, synthetic construct
  REGION 1..9: note = Description of Artificial Sequence: Synthetic peptide
EIKSLYNTV

SEQ ID NO: 9260 - protein, 9 aa, synthetic construct
  REGION 1..9: note = Description of Artificial Sequence: Synthetic peptide
EVIIRSENL

SEQ ID NO: 9261 - protein, 9 aa, synthetic construct
  REGION 1..9: note = Description of Artificial Sequence: Synthetic peptide
YTAFTISSI

SEQ ID NO: 9262 - protein, 9 aa, synthetic construct
  REGION 1..9: note = Description of Artificial Sequence: Synthetic peptide
FTAEVTGDI

SEQ ID NO: 9263 - protein, 10 aa, synthetic construct
  REGION 1..10: note = Description of Artificial Sequence: Synthetic peptide
ETYGDTWAGV

SEQ ID NO: 9264 - protein, 9 aa, synthetic construct
  REGION 1..9: note = Description of Artificial Sequence: Synthetic peptide
ETITLQCRI

SEQ ID NO: 9265 - protein, 9 aa, synthetic construct
  REGION 1..9: note = Description of Artificial Sequence: Synthetic peptide
FTTKVIGDI

SEQ ID NO: 9266 - protein, 9 aa, synthetic construct
  REGION 1..9: note = Description of Artificial Sequence: Synthetic peptide
SAVSLFNTI

SEQ ID NO: 9267 - protein, 9 aa, synthetic construct
  REGION 1..9: note = Description of Artificial Sequence: Synthetic peptide
NTVATLYCV

SEQ ID NO: 9268 - protein, 11 aa, synthetic construct
  REGION 1..11: note = Description of Artificial Sequence: Synthetic peptide
EVIPLTEEAEL

SEQ ID NO: 9269 - protein, 9 aa, synthetic construct
  REGION 1..9: note = Description of Artificial Sequence: Synthetic peptide
TTSTLQEQI

SEQ ID NO: 9270 - protein, 9 aa, synthetic construct
  REGION 1..9: note = Description of Artificial Sequence: Synthetic peptide
LVAALIIAI

SEQ ID NO: 9271 - protein, 9 aa, synthetic construct
  REGION 1..9: note = Description of Artificial Sequence: Synthetic peptide
EVIPMFSAL

SEQ ID NO: 9272 - protein, 9 aa, synthetic construct
  REGION 1..9: note = Description of Artificial Sequence: Synthetic peptide
EIFGFGEEI

SEQ ID NO: 9273 - protein, 9 aa, synthetic construct
  REGION 1..9: note = Description of Artificial Sequence: Synthetic peptide
EVIPLTEEA

SEQ ID NO: 9274 - protein, 10 aa, synthetic construct
  REGION 1..10: note = Description of Artificial Sequence: Synthetic peptide
FTAEVTGDIR

SEQ ID NO: 9275 - protein, 9 aa, synthetic construct
  REGION 1..9: note = Description of Artificial Sequence: Synthetic peptide
SASSLFDAI

SEQ ID NO: 9276 - protein, 9 aa, synthetic construct
  REGION 1..9: note = Description of Artificial Sequence: Synthetic peptide
GAASVTLTV

SEQ ID NO: 9277 - protein, 11 aa, synthetic construct
  REGION 1..11: note = Description of Artificial Sequence: Synthetic peptide
ETFYVDGAANR

SEQ ID NO: 9278 - protein, 9 aa, synthetic construct
  REGION 1..9: note = Description of Artificial Sequence: Synthetic peptide
DVKQLTEAV

SEQ ID NO: 9279 - protein, 9 aa, synthetic construct
  REGION 1..9: note = Description of Artificial Sequence: Synthetic peptide
LVNQIIEQL

SEQ ID NO: 9280 - protein, 9 aa, synthetic construct
  REGION 1..9: note = Description of Artificial Sequence: Synthetic peptide
ESFGFGEEI

SEQ ID NO: 9281 - protein, 9 aa, synthetic construct
  REGION 1..9: note = Description of Artificial Sequence: Synthetic peptide
NAVAVLYCV

SEQ ID NO: 9282 - protein, 10 aa, synthetic construct
  REGION 1..10: note = Description of Artificial Sequence: Synthetic peptide
NTSAVPNETI

SEQ ID NO: 9283 - protein, 9 aa, synthetic construct
  REGION 1..9: note = Description of Artificial Sequence: Synthetic peptide
MTSNPPIPV

SEQ ID NO: 9284 - protein, 9 aa, synthetic construct
  REGION 1..9: note = Description of Artificial Sequence: Synthetic peptide
CTTSVITQA

SEQ ID NO: 9285 - protein, 10 aa, synthetic construct
  REGION 1..10: note = Description of Artificial Sequence: Synthetic peptide
LVSQIIEQLI

SEQ ID NO: 9286 - protein, 9 aa, synthetic construct
  REGION 1..9: note = Description of Artificial Sequence: Synthetic peptide
STITIPCRI

SEQ ID NO: 9287 - protein, 10 aa, synthetic construct
  REGION 1..10: note = Description of Artificial Sequence: Synthetic peptide
VVSQIIEQLI

SEQ ID NO: 9288 - protein, 9 aa, synthetic construct
  REGION 1..9: note = Description of Artificial Sequence: Synthetic peptide
STNSTNYRL

SEQ ID NO: 9289 - protein, 9 aa, synthetic construct
  REGION 1..9: note = Description of Artificial Sequence: Synthetic peptide
IAALVIASI

SEQ ID NO: 9290 - protein, 9 aa, synthetic construct
  REGION 1..9: note = Description of Artificial Sequence: Synthetic peptide
QNYPIVQNL

SEQ ID NO: 9291 - protein, 9 aa, synthetic construct
  REGION 1..9: note = Description of Artificial Sequence: Synthetic peptide
NAKNIIVQL

SEQ ID NO: 9292 - protein, 9 aa, synthetic construct
  REGION 1..9: note = Description of Artificial Sequence: Synthetic peptide
YSTQIDPGL

SEQ ID NO: 9293 - protein, 9 aa, synthetic construct
  REGION 1..9: note = Description of Artificial Sequence: Synthetic peptide
TPIGLGQSL

SEQ ID NO: 9294 - protein, 9 aa, synthetic construct
  REGION 1..9: note = Description of Artificial Sequence: Synthetic peptide
SPAIFQSSM

SEQ ID NO: 9295 - protein, 9 aa, synthetic construct
  REGION 1..9: note = Description of Artificial Sequence: Synthetic peptide
FPQGKAGEL

SEQ ID NO: 9296 - protein, 9 aa, synthetic construct
  REGION 1..9: note = Description of Artificial Sequence: Synthetic peptide
YPSASLKSL

SEQ ID NO: 9297 - protein, 9 aa, synthetic construct
  REGION 1..9: note = Description of Artificial Sequence: Synthetic peptide
SPTSRELRV

SEQ ID NO: 9298 - protein, 9 aa, synthetic construct
  REGION 1..9: note = Description of Artificial Sequence: Synthetic peptide
RPMTYKEAL

SEQ ID NO: 9299 - protein, 10 aa, synthetic construct
  REGION 1..10: note = Description of Artificial Sequence: Synthetic peptide
RPNSNTRKSI

SEQ ID NO: 9300 - protein, 9 aa, synthetic construct
  REGION 1..9: note = Description of Artificial Sequence: Synthetic peptide
RPMTYKAAL

SEQ ID NO: 9301 - protein, 9 aa, synthetic construct
  REGION 1..9: note = Description of Artificial Sequence: Synthetic peptide
APPIERNIL

SEQ ID NO: 9302 - protein, 9 aa, synthetic construct
  REGION 1..9: note = Description of Artificial Sequence: Synthetic peptide
GPSHKARVL

SEQ ID NO: 9303 - protein, 10 aa, synthetic construct
  REGION 1..10: note = Description of Artificial Sequence: Synthetic peptide
RPAEPVPLQL

SEQ ID NO: 9304 - protein, 10 aa, synthetic construct
  REGION 1..10: note = Description of Artificial Sequence: Synthetic peptide
SPIATVPVKL

SEQ ID NO: 9305 - protein, 8 aa, synthetic construct
  REGION 1..8: note = Description of Artificial Sequence: Synthetic peptide
KPVVSTQL

SEQ ID NO: 9306 - protein, 8 aa, synthetic construct
  REGION 1..8: note = Description of Artificial Sequence: Synthetic peptide
RPVVSTQL

SEQ ID NO: 9307 - protein, 9 aa, synthetic construct
  REGION 1..9: note = Description of Artificial Sequence: Synthetic peptide
AERQGTVSF

SEQ ID NO: 9308 - protein, 10 aa, synthetic construct
  REGION 1..10: note = Description of Artificial Sequence: Synthetic peptide
SPIETVPVKL

SEQ ID NO: 9309 - protein, 10 aa, synthetic construct
  REGION 1..10: note = Description of Artificial Sequence: Synthetic peptide
RPYNNTRQST

SEQ ID NO: 9310 - protein, 9 aa, synthetic construct
  REGION 1..9: note = Description of Artificial Sequence: Synthetic peptide
SPTSRDLRI

SEQ ID NO: 9311 - protein, 9 aa, synthetic construct
  REGION 1..9: note = Description of Artificial Sequence: Synthetic peptide
RPQAPLRPM

SEQ ID NO: 9312 - protein, 9 aa, synthetic construct
  REGION 1..9: note = Description of Artificial Sequence: Synthetic peptide
TPQDLNTML

SEQ ID NO: 9313 - protein, 9 aa, synthetic construct
  REGION 1..9: note = Description of Artificial Sequence: Synthetic peptide
ELKNSAVSL

SEQ ID NO: 9314 - protein, 9 aa, synthetic construct
  REGION 1..9: note = Description of Artificial Sequence: Synthetic peptide
TMGARSVTL

SEQ ID NO: 9315 - protein, 9 aa, synthetic construct
  REGION 1..9: note = Description of Artificial Sequence: Synthetic peptide
EVMVRSENL

SEQ ID NO: 9316 - protein, 9 aa, synthetic construct
  REGION 1..9: note = Description of Artificial Sequence: Synthetic peptide
ELKNSAISL

SEQ ID NO: 9317 - protein, 9 aa, synthetic construct
  REGION 1..9: note = Description of Artificial Sequence: Synthetic peptide
EVIIRSENL

SEQ ID NO: 9318 - protein, 9 aa, synthetic construct
  REGION 1..9: note = Description of Artificial Sequence: Synthetic peptide
DVKDTKEAL

SEQ ID NO: 9319 - protein, 9 aa, synthetic construct
  REGION 1..9: note = Description of Artificial Sequence: Synthetic peptide
DVKQLTEAV

SEQ ID NO: 9320 - protein, 9 aa, synthetic construct
  REGION 1..9: note = Description of Artificial Sequence: Synthetic peptide
DSAIRKAIL

SEQ ID NO: 9321 - protein, 8 aa, synthetic construct
  REGION 1..8: note = Description of Artificial Sequence: Synthetic peptide
TTNQKTEL

SEQ ID NO: 9322 - protein, 8 aa, synthetic construct
  REGION 1..8: note = Description of Artificial Sequence: Synthetic peptide
TVQARQVL

SEQ ID NO: 9323 - protein, 9 aa, synthetic construct
  REGION 1..9: note = Description of Artificial Sequence: Synthetic peptide
DVKQLAEAV

SEQ ID NO: 9324 - protein, 8 aa, synthetic construct
  REGION 1..8: note = Description of Artificial Sequence: Synthetic peptide
HLKTAVQM

SEQ ID NO: 9325 - protein, 9 aa, synthetic construct
  REGION 1..9: note = Description of Artificial Sequence: Synthetic peptide
ELKSLFNTV

SEQ ID NO: 9326 - protein, 11 aa, synthetic construct
  REGION 1..11: note = Description of Artificial Sequence: Synthetic peptide
TQIDPGLADQL

SEQ ID NO: 9327 - protein, 11 aa, synthetic construct
  REGION 1..11: note = Description of Artificial Sequence: Synthetic peptide
TQVDPGLADQL

SEQ ID NO: 9328 - protein, 10 aa, synthetic construct
  REGION 1..10: note = Description of Artificial Sequence: Synthetic peptide
RQIDSIGERI

SEQ ID NO: 9329 - protein, 10 aa, synthetic construct
  REGION 1..10: note = Description of Artificial Sequence: Synthetic peptide
AQEEADEVGF

SEQ ID NO: 9330 - protein, 9 aa, synthetic construct
  REGION 1..9: note = Description of Artificial Sequence: Synthetic peptide
AQTNDACAW

SEQ ID NO: 9331 - protein, 9 aa, synthetic construct
  REGION 1..9: note = Description of Artificial Sequence: Synthetic peptide
GQDQWTYQI

SEQ ID NO: 9332 - protein, 9 aa, synthetic construct
  REGION 1..9: note = Description of Artificial Sequence: Synthetic peptide
KQEQGQWTY

SEQ ID NO: 9333 - protein, 9 aa, synthetic construct
  REGION 1..9: note = Description of Artificial Sequence: Synthetic peptide
KLENVTENF

SEQ ID NO: 9334 - protein, 9 aa, synthetic construct
  REGION 1..9: note = Description of Artificial Sequence: Synthetic peptide
IQKQGQDQW

SEQ ID NO: 9335 - protein, 10 aa, synthetic construct
  REGION 1..10: note = Description of Artificial Sequence: Synthetic peptide
AQEESDEVGF

SEQ ID NO: 9336 - protein, 10 aa, synthetic construct
  REGION 1..10: note = Description of Artificial Sequence: Synthetic peptide
GQVRDQAEHL

SEQ ID NO: 9337 - protein, 9 aa, synthetic construct
  REGION 1..9: note = Description of Artificial Sequence: Synthetic peptide
YQSNPPPSL

SEQ ID NO: 9338 - protein, 9 aa, synthetic construct
  REGION 1..9: note = Description of Artificial Sequence: Synthetic peptide
RQGQGTVSF

SEQ ID NO: 9339 - protein, 9 aa, synthetic construct
  REGION 1..9: note = Description of Artificial Sequence: Synthetic peptide
GQLDAWEKI

SEQ ID NO: 9340 - protein, 9 aa, synthetic construct
  REGION 1..9: note = Description of Artificial Sequence: Synthetic peptide
AQEEEEVGF

SEQ ID NO: 9341 - protein, 9 aa, synthetic construct
  REGION 1..9: note = Description of Artificial Sequence: Synthetic peptide
VLDNVTENF

SEQ ID NO: 9342 - protein, 9 aa, synthetic construct
  REGION 1..9: note = Description of Artificial Sequence: Synthetic peptide
ALENVTENF

SEQ ID NO: 9343 - protein, 10 aa, synthetic construct
  REGION 1..10: note = Description of Artificial Sequence: Synthetic peptide
LQDSGAKVNI

SEQ ID NO: 9344 - protein, 9 aa, synthetic construct
  REGION 1..9: note = Description of Artificial Sequence: Synthetic peptide
KQVAGDDCV

SEQ ID NO: 9345 - protein, 10 aa, synthetic construct
  REGION 1..10: note = Description of Artificial Sequence: Synthetic peptide
KQLTEAVQKI

SEQ ID NO: 9346 - protein, 10 aa, synthetic construct
  REGION 1..10: note = Description of Artificial Sequence: Synthetic peptide
GINNSTNETF

SEQ ID NO: 9347 - protein, 9 aa, synthetic construct
  REGION 1..9: note = Description of Artificial Sequence: Synthetic peptide
QLAEAVQRI

SEQ ID NO: 9348 - protein, 9 aa, synthetic construct
  REGION 1..9: note = Description of Artificial Sequence: Synthetic peptide
GQALFTTKV

SEQ ID NO: 9349 - protein, 9 aa, synthetic construct
  REGION 1..9: note = Description of Artificial Sequence: Synthetic peptide
GAASVTLTV

SEQ ID NO: 9350 - protein, 9 aa, synthetic construct
  REGION 1..9: note = Description of Artificial Sequence: Synthetic peptide
QLAEAVQRI

SEQ ID NO: 9351 - protein, 9 aa, synthetic construct
  REGION 1..9: note = Description of Artificial Sequence: Synthetic peptide
QLTEAVQKI

SEQ ID NO: 9352 - protein, 8 aa, synthetic construct
  REGION 1..8: note = Description of Artificial Sequence: Synthetic peptide
GQMVHQAI

SEQ ID NO: 9353 - protein, 9 aa, synthetic construct
  REGION 1..9: note = Description of Artificial Sequence: Synthetic peptide
SQIYPGIKV

SEQ ID NO: 9354 - protein, 9 aa, synthetic construct
  REGION 1..9: note = Description of Artificial Sequence: Synthetic peptide
SQIYSGIKV

SEQ ID NO: 9355 - protein, 9 aa, synthetic construct
  REGION 1..9: note = Description of Artificial Sequence: Synthetic peptide
GQLDAWEKI

SEQ ID NO: 9356 - protein, 9 aa, synthetic construct
  REGION 1..9: note = Description of Artificial Sequence: Synthetic peptide
QQHLLQLTV

SEQ ID NO: 9357 - protein, 9 aa, synthetic construct
  REGION 1..9: note = Description of Artificial Sequence: Synthetic peptide
GQTFFTAEV

SEQ ID NO: 9358 - protein, 9 aa, synthetic construct
  REGION 1..9: note = Description of Artificial Sequence: Synthetic peptide
GQVDCSPGI

SEQ ID NO: 9359 - protein, 9 aa, synthetic construct
  REGION 1..9: note = Description of Artificial Sequence: Synthetic peptide
GAASLTLTV

SEQ ID NO: 9360 - protein, 9 aa, synthetic construct
  REGION 1..9: note = Description of Artificial Sequence: Synthetic peptide
VQLNETVKI

SEQ ID NO: 9361 - protein, 9 aa, synthetic construct
  REGION 1..9: note = Description of Artificial Sequence: Synthetic peptide
VQKIATESI

SEQ ID NO: 9362 - protein, 9 aa, synthetic construct
  REGION 1..9: note = Description of Artificial Sequence: Synthetic peptide
AVLSVVNRV

SEQ ID NO: 9363 - protein, 9 aa, synthetic construct
  REGION 1..9: note = Description of Artificial Sequence: Synthetic peptide
GQDQWTYQI

SEQ ID NO: 9364 - protein, 8 aa, synthetic construct
  REGION 1..8: note = Description of Artificial Sequence: Synthetic peptide
VQIEPLGV

SEQ ID NO: 9365 - protein, 9 aa, synthetic construct
  REGION 1..9: note = Description of Artificial Sequence: Synthetic peptide
VQRISTESI

SEQ ID NO: 9366 - protein, 10 aa, synthetic construct
  REGION 1..10: note = Description of Artificial Sequence: Synthetic peptide
RQIDSIGERI

SEQ ID NO: 9367 - protein, 10 aa, synthetic construct
  REGION 1..10: note = Description of Artificial Sequence: Synthetic peptide
AQWSKTLQQV

SEQ ID NO: 9368 - protein, 10 aa, synthetic construct
  REGION 1..10: note = Description of Artificial Sequence: Synthetic peptide
RQYDQIPLEI

SEQ ID NO: 9369 - protein, 9 aa, synthetic construct
  REGION 1..9: note = Description of Artificial Sequence: Synthetic peptide
GAVSLTLTV

SEQ ID NO: 9370 - protein, 9 aa, synthetic construct
  REGION 1..9: note = Description of Artificial Sequence: Synthetic peptide
VQKIAQECI

SEQ ID NO: 9371 - protein, 8 aa, synthetic construct
  REGION 1..8: note = Description of Artificial Sequence: Synthetic peptide
SQIIEQLI

SEQ ID NO: 9372 - protein, 9 aa, synthetic construct
  REGION 1..9: note = Description of Artificial Sequence: Synthetic peptide
VQLNNTINI

SEQ ID NO: 9373 - protein, 10 aa, synthetic construct
  REGION 1..10: note = Description of Artificial Sequence: Synthetic peptide
RQYDQIPIEI

SEQ ID NO: 9374 - protein, 9 aa, synthetic construct
  REGION 1..9: note = Description of Artificial Sequence: Synthetic peptide
AILNIPVRI

SEQ ID NO: 9375 - protein, 8 aa, synthetic construct
  REGION 1..8: note = Description of Artificial Sequence: Synthetic peptide
GQMVHQAL

SEQ ID NO: 9376 - protein, 9 aa, synthetic construct
  REGION 1..9: note = Description of Artificial Sequence: Synthetic peptide
AVLSLVNRV

SEQ ID NO: 9377 - protein, 10 aa, synthetic construct
  REGION 1..10: note = Description of Artificial Sequence: Synthetic peptide
SQATNVNAAI

SEQ ID NO: 9378 - protein, 10 aa, synthetic construct
  REGION 1..10: note = Description of Artificial Sequence: Synthetic peptide
KQLTEAVQKI

SEQ ID NO: 9379 - protein, 9 aa, synthetic construct
  REGION 1..9: note = Description of Artificial Sequence: Synthetic peptide
TQGVGSHQI

SEQ ID NO: 9380 - protein, 9 aa, synthetic construct
  REGION 1..9: note = Description of Artificial Sequence: Synthetic peptide
GQLQPALKT

SEQ ID NO: 9381 - protein, 9 aa, synthetic construct
  REGION 1..9: note = Description of Artificial Sequence: Synthetic peptide
VITQACPKI

SEQ ID NO: 9382 - protein, 9 aa, synthetic construct
  REGION 1..9: note = Description of Artificial Sequence: Synthetic peptide
YQLEKEPII

SEQ ID NO: 9383 - protein, 9 aa, synthetic construct
  REGION 1..9: note = Description of Artificial Sequence: Synthetic peptide
GQKAIGTVL

SEQ ID NO: 9384 - protein, 9 aa, synthetic construct
  REGION 1..9: note = Description of Artificial Sequence: Synthetic peptide
YQSNPPPSL

SEQ ID NO: 9385 - protein, 9 aa, synthetic construct
  REGION 1..9: note = Description of Artificial Sequence: Synthetic peptide
TQGVGHPQI

SEQ ID NO: 9386 - protein, 8 aa, synthetic construct
  REGION 1..8: note = Description of Artificial Sequence: Synthetic peptide
NQIIEQLI

SEQ ID NO: 9387 - protein, 9 aa, synthetic construct
  REGION 1..9: note = Description of Artificial Sequence: Synthetic peptide
SLYNTVVTL

SEQ ID NO: 9388 - protein, 9 aa, synthetic construct
  REGION 1..9: note = Description of Artificial Sequence: Synthetic peptide
SQATAGMNA

SEQ ID NO: 9389 - protein, 9 aa, synthetic construct
  REGION 1..9: note = Description of Artificial Sequence: Synthetic peptide
VVKIEPLGV

SEQ ID NO: 9390 - protein, 9 aa, synthetic construct
  REGION 1..9: note = Description of Artificial Sequence: Synthetic peptide
GLFNSTWNI

SEQ ID NO: 9391 - protein, 11 aa, synthetic construct
  REGION 1..11: note = Description of Artificial Sequence: Synthetic peptide
SQATAGMNAAI

SEQ ID NO: 9392 - protein, 9 aa, synthetic construct
  REGION 1..9: note = Description of Artificial Sequence: Synthetic peptide
SAVSLFNTI

SEQ ID NO: 9393 - protein, 9 aa, synthetic construct
  REGION 1..9: note = Description of Artificial Sequence: Synthetic peptide
SQVSQNYPI

SEQ ID NO: 9394 - protein, 9 aa, synthetic construct
  REGION 1..9: note = Description of Artificial Sequence: Synthetic peptide
GVGSTQISV

SEQ ID NO: 9395 - protein, 10 aa, synthetic construct
  REGION 1..10: note = Description of Artificial Sequence: Synthetic peptide
KQLAEAVQRI

SEQ ID NO: 9396 - protein, 8 aa, synthetic construct
  REGION 1..8: note = Description of Artificial Sequence: Synthetic peptide
GQETAYFI

SEQ ID NO: 9397 - protein, 10 aa, synthetic construct
  REGION 1..10: note = Description of Artificial Sequence: Synthetic peptide
SQATNANTAI

SEQ ID NO: 9398 - protein, 10 aa, synthetic construct
  REGION 1..10: note = Description of Artificial Sequence: Synthetic peptide
KVVQIEPLGV

SEQ ID NO: 9399 - protein, 9 aa, synthetic construct
  REGION 1..9: note = Description of Artificial Sequence: Synthetic peptide
NQKTELQAI

SEQ ID NO: 9400 - protein, 9 aa, synthetic construct
  REGION 1..9: note = Description of Artificial Sequence: Synthetic peptide
VVQIEPLGV

SEQ ID NO: 9401 - protein, 9 aa, synthetic construct
  REGION 1..9: note = Description of Artificial Sequence: Synthetic peptide
IIGQLQPAI

SEQ ID NO: 9402 - protein, 9 aa, synthetic construct
  REGION 1..9: note = Description of Artificial Sequence: Synthetic peptide
VQKIALEGI

SEQ ID NO: 9403 - protein, 8 aa, synthetic construct
  REGION 1..8: note = Description of Artificial Sequence: Synthetic peptide
SLLEVSQI

SEQ ID NO: 9404 - protein, 9 aa, synthetic construct
  REGION 1..9: note = Description of Artificial Sequence: Synthetic peptide
GSNFTSATV

SEQ ID NO: 9405 - protein, 9 aa, synthetic construct
  REGION 1..9: note = Description of Artificial Sequence: Synthetic peptide
ALQDSGLEV

SEQ ID NO: 9406 - protein, 9 aa, synthetic construct
  REGION 1..9: note = Description of Artificial Sequence: Synthetic peptide
AMSQATNSV

SEQ ID NO: 9407 - protein, 9 aa, synthetic construct
  REGION 1..9: note = Description of Artificial Sequence: Synthetic peptide
TRIGPGQAL

SEQ ID NO: 9408 - protein, 9 aa, synthetic construct
  REGION 1..9: note = Description of Artificial Sequence: Synthetic peptide
ERYLKDQQL

SEQ ID NO: 9409 - protein, 9 aa, synthetic construct
  REGION 1..9: note = Description of Artificial Sequence: Synthetic peptide
ERYALNPGL

SEQ ID NO: 9410 - protein, 9 aa, synthetic construct
  REGION 1..9: note = Description of Artificial Sequence: Synthetic peptide
ERFALNPGL

SEQ ID NO: 9411 - protein, 8 aa, synthetic construct
  REGION 1..8: note = Description of Artificial Sequence: Synthetic peptide
ERIISTYL

SEQ ID NO: 9412 - protein, 8 aa, synthetic construct
  REGION 1..8: note = Description of Artificial Sequence: Synthetic peptide
GQMVHQAL

SEQ ID NO: 9413 - protein, 9 aa, synthetic construct
  REGION 1..9: note = Description of Artificial Sequence: Synthetic peptide
ERYLKDQQL

SEQ ID NO: 9414 - protein, 9 aa, synthetic construct
  REGION 1..9: note = Description of Artificial Sequence: Synthetic peptide
TRIGPGQAL

SEQ ID NO: 9415 - protein, 8 aa, synthetic construct
  REGION 1..8: note = Description of Artificial Sequence: Synthetic peptide
GQMVHQAI

SEQ ID NO: 9416 - protein, 8 aa, synthetic construct
  REGION 1..8: note = Description of Artificial Sequence: Synthetic peptide
GQMVHHPL

SEQ ID NO: 9417 - protein, 8 aa, synthetic construct
  REGION 1..8: note = Description of Artificial Sequence: Synthetic peptide
IQKLVGKL

SEQ ID NO: 9418 - protein, 9 aa, synthetic construct
  REGION 1..9: note = Description of Artificial Sequence: Synthetic peptide
EVMVRSENL

SEQ ID NO: 9419 - protein, 9 aa, synthetic construct
  REGION 1..9: note = Description of Artificial Sequence: Synthetic peptide
VTKGLGISY

SEQ ID NO: 9420 - protein, 9 aa, synthetic construct
  REGION 1..9: note = Description of Artificial Sequence: Synthetic peptide
GQKAIGTVL

SEQ ID NO: 9421 - protein, 9 aa, synthetic construct
  REGION 1..9: note = Description of Artificial Sequence: Synthetic peptide
RQRPGTVSF

SEQ ID NO: 9422 - protein, 9 aa, synthetic construct
  REGION 1..9: note = Description of Artificial Sequence: Synthetic peptide
ITKGLGISY

SEQ ID NO: 9423 - protein, 9 aa, synthetic construct
  REGION 1..9: note = Description of Artificial Sequence: Synthetic peptide
RQGQGTVSF

SEQ ID NO: 9424 - protein, 10 aa, synthetic construct
  REGION 1..10: note = Description of Artificial Sequence: Synthetic peptide
AINSSQNETF

SEQ ID NO: 9425 - protein, 9 aa, synthetic construct
  REGION 1..9: note = Description of Artificial Sequence: Synthetic peptide
KQNPEIVIY

SEQ ID NO: 9426 - protein, 10 aa, synthetic construct
  REGION 1..10: note = Description of Artificial Sequence: Synthetic peptide
GINNSTNETF

SEQ ID NO: 9427 - protein, 8 aa, synthetic construct
  REGION 1..8: note = Description of Artificial Sequence: Synthetic peptide
GQFIYETY

SEQ ID NO: 9428 - protein, 8 aa, synthetic construct
  REGION 1..8: note = Description of Artificial Sequence: Synthetic peptide
GQMVHQAL

SEQ ID NO: 9429 - protein, 9 aa, synthetic construct
  REGION 1..9: note = Description of Artificial Sequence: Synthetic peptide
KQNPEMVIY

SEQ ID NO: 9430 - protein, 9 aa, synthetic construct
  REGION 1..9: note = Description of Artificial Sequence: Synthetic peptide
ATNSVTTAM

SEQ ID NO: 9431 - protein, 8 aa, synthetic construct
  REGION 1..8: note = Description of Artificial Sequence: Synthetic peptide
YQIYQEQY

SEQ ID NO: 9432 - protein, 10 aa, synthetic construct
  REGION 1..10: note = Description of Artificial Sequence: Synthetic peptide
KVNIVTDSQY

SEQ ID NO: 9433 - protein, 9 aa, synthetic construct
  REGION 1..9: note = Description of Artificial Sequence: Synthetic peptide
RVMETQRNY

SEQ ID NO: 9434 - protein, 11 aa, synthetic construct
  REGION 1..11: note = Description of Artificial Sequence: Synthetic peptide
IQKQEQGQWTY

SEQ ID NO: 9435 - protein, 9 aa, synthetic construct
  REGION 1..9: note = Description of Artificial Sequence: Synthetic peptide
TQACPKVSF

SEQ ID NO: 9436 - protein, 9 aa, synthetic construct
  REGION 1..9: note = Description of Artificial Sequence: Synthetic peptide
KQITKIQNF

SEQ ID NO: 9437 - protein, 9 aa, synthetic construct
  REGION 1..9: note = Description of Artificial Sequence: Synthetic peptide
VQKIATESI

SEQ ID NO: 9438 - protein, 8 aa, synthetic construct
  REGION 1..8: note = Description of Artificial Sequence: Synthetic peptide
GQHIYETY

SEQ ID NO: 9439 - protein, 9 aa, synthetic construct
  REGION 1..9: note = Description of Artificial Sequence: Synthetic peptide
AERQGTVSF

SEQ ID NO: 9440 - protein, 9 aa, synthetic construct
  REGION 1..9: note = Description of Artificial Sequence: Synthetic peptide
TQIGCTLNF

SEQ ID NO: 9441 - protein, 9 aa, synthetic construct
  REGION 1..9: note = Description of Artificial Sequence: Synthetic peptide
KQNPEMIIY

SEQ ID NO: 9442 - protein, 9 aa, synthetic construct
  REGION 1..9: note = Description of Artificial Sequence: Synthetic peptide
TVLDVGDAY

SEQ ID NO: 9443 - protein, 9 aa, synthetic construct
  REGION 1..9: note = Description of Artificial Sequence: Synthetic peptide
KQEQGQWTY

SEQ ID NO: 9444 - protein, 10 aa, synthetic construct
  REGION 1..10: note = Description of Artificial Sequence: Synthetic peptide
GIRIGPGQTF

SEQ ID NO: 9445 - protein, 11 aa, synthetic construct
  REGION 1..11: note = Description of Artificial Sequence: Synthetic peptide
GAINSSQNETF

SEQ ID NO: 9446 - protein, 10 aa, synthetic construct
  REGION 1..10: note = Description of Artificial Sequence: Synthetic peptide
SINLGPGQAF

SEQ ID NO: 9447 - protein, 10 aa, synthetic construct
  REGION 1..10: note = Description of Artificial Sequence: Synthetic peptide
ILKEPVHGVY

SEQ ID NO: 9448 - protein, 11 aa, synthetic construct
  REGION 1..11: note = Description of Artificial Sequence: Synthetic peptide
SQATNSVTTAM

SEQ ID NO: 9449 - protein, 11 aa, synthetic construct
  REGION 1..11: note = Description of Artificial Sequence: Synthetic peptide
KSINLGPGQAF

SEQ ID NO: 9450 - protein, 10 aa, synthetic construct
  REGION 1..10: note = Description of Artificial Sequence: Synthetic peptide
FLNKGLGISY

SEQ ID NO: 9451 - protein, 9 aa, synthetic construct
  REGION 1..9: note = Description of Artificial Sequence: Synthetic peptide
VQRISTESI

SEQ ID NO: 9452 - protein, 10 aa, synthetic construct
  REGION 1..10: note = Description of Artificial Sequence: Synthetic peptide
ILKEPVHGAY

SEQ ID NO: 9453 - protein, 9 aa, synthetic construct
  REGION 1..9: note = Description of Artificial Sequence: Synthetic peptide
IQKQEQGQW

SEQ ID NO: 9454 - protein, 9 aa, synthetic construct
  REGION 1..9: note = Description of Artificial Sequence: Synthetic peptide
KQIIKIQNF

SEQ ID NO: 9455 - protein, 8 aa, synthetic construct
  REGION 1..8: note = Description of Artificial Sequence: Synthetic peptide
GQHIYDTY

SEQ ID NO: 9456 - protein, 9 aa, synthetic construct
  REGION 1..9: note = Description of Artificial Sequence: Synthetic peptide
KQNPELIIY

SEQ ID NO: 9457 - protein, 8 aa, synthetic construct
  REGION 1..8: note = Description of Artificial Sequence: Synthetic peptide
AVHVASGY

SEQ ID NO: 9458 - protein, 9 aa, synthetic construct
  REGION 1..9: note = Description of Artificial Sequence: Synthetic peptide
GQGTVSFSF

SEQ ID NO: 9459 - protein, 11 aa, synthetic construct
  REGION 1..11: note = Description of Artificial Sequence: Synthetic peptide
IQKQGQDQWTY

SEQ ID NO: 9460 - protein, 9 aa, synthetic construct
  REGION 1..9: note = Description of Artificial Sequence: Synthetic peptide
SSSQVSQNY

SEQ ID NO: 9461 - protein, 9 aa, synthetic construct
  REGION 1..9: note = Description of Artificial Sequence: Synthetic peptide
FLGAAGSTM

SEQ ID NO: 9462 - protein, 8 aa, synthetic construct
  REGION 1..8: note = Description of Artificial Sequence: Synthetic peptide
GQMVHQAI

SEQ ID NO: 9463 - protein, 9 aa, synthetic construct
  REGION 1..9: note = Description of Artificial Sequence: Synthetic peptide
KQISKIQHF

SEQ ID NO: 9464 - protein, 11 aa, synthetic construct
  REGION 1..11: note = Description of Artificial Sequence: Synthetic peptide
HSIGERIISTY

SEQ ID NO: 9465 - protein, 10 aa, synthetic construct
  REGION 1..10: note = Description of Artificial Sequence: Synthetic peptide
FTKKGLGVSY

SEQ ID NO: 9466 - protein, 9 aa, synthetic construct
  REGION 1..9: note = Description of Artificial Sequence: Synthetic peptide
KAILGQVVY

SEQ ID NO: 9467 - protein, 8 aa, synthetic construct
  REGION 1..8: note = Description of Artificial Sequence: Synthetic peptide
GERIISTY

SEQ ID NO: 9468 - protein, 9 aa, synthetic construct
  REGION 1..9: note = Description of Artificial Sequence: Synthetic peptide
AGNLWVTVY

SEQ ID NO: 9469 - protein, 9 aa, synthetic construct
  REGION 1..9: note = Description of Artificial Sequence: Synthetic peptide
KQGQDQWTY

SEQ ID NO: 9470 - protein, 9 aa, synthetic construct
  REGION 1..9: note = Description of Artificial Sequence: Synthetic peptide
FLGTAGSTM

SEQ ID NO: 9471 - protein, 9 aa, synthetic construct
  REGION 1..9: note = Description of Artificial Sequence: Synthetic peptide
IQKQGQDQW

SEQ ID NO: 9472 - protein, 9 aa, synthetic construct
  REGION 1..9: note = Description of Artificial Sequence: Synthetic peptide
ARILAVESY

SEQ ID NO: 9473 - protein, 9 aa, synthetic construct
  REGION 1..9: note = Description of Artificial Sequence: Synthetic peptide
ALIEICSEL

SEQ ID NO: 9474 - protein, 9 aa, synthetic construct
  REGION 1..9: note = Description of Artificial Sequence: Synthetic peptide
VTGDIRKAY

SEQ ID NO: 9475 - protein, 8 aa, synthetic construct
  REGION 1..8: note = Description of Artificial Sequence: Synthetic peptide
GQAFYATY

SEQ ID NO: 9476 - protein, 8 aa, synthetic construct
  REGION 1..8: note = Description of Artificial Sequence: Synthetic peptide
IQNLVERL

SEQ ID NO: 9477 - protein, 10 aa, synthetic construct
  REGION 1..10: note = Description of Artificial Sequence: Synthetic peptide
GFLGTAGSTM

SEQ ID NO: 9478 - protein, 9 aa, synthetic construct
  REGION 1..9: note = Description of Artificial Sequence: Synthetic peptide
GIFPDWQNY

SEQ ID NO: 9479 - protein, 9 aa, synthetic construct
  REGION 1..9: note = Description of Artificial Sequence: Synthetic peptide
QVPERPVTY

SEQ ID NO: 9480 - protein, 11 aa, synthetic construct
  REGION 1..11: note = Description of Artificial Sequence: Synthetic peptide
HSIGERILSTY

SEQ ID NO: 9481 - protein, 9 aa, synthetic construct
  REGION 1..9: note = Description of Artificial Sequence: Synthetic peptide
YQSNPPPSL

SEQ ID NO: 9482 - protein, 9 aa, synthetic construct
  REGION 1..9: note = Description of Artificial Sequence: Synthetic peptide
DARLVVTTY

SEQ ID NO: 9483 - protein, 9 aa, synthetic construct
  REGION 1..9: note = Description of Artificial Sequence: Synthetic peptide
TVLDVGDAY

SEQ ID NO: 9484 - protein, 9 aa, synthetic construct
  REGION 1..9: note = Description of Artificial Sequence: Synthetic peptide
FLGAAGSTM

SEQ ID NO: 9485 - protein, 9 aa, synthetic construct
  REGION 1..9: note = Description of Artificial Sequence: Synthetic peptide
FLGTAGSTM

SEQ ID NO: 9486 - protein, 10 aa, synthetic construct
  REGION 1..10: note = Description of Artificial Sequence: Synthetic peptide
FLNKGLGISY

SEQ ID NO: 9487 - protein, 9 aa, synthetic construct
  REGION 1..9: note = Description of Artificial Sequence: Synthetic peptide
TQACPKVSF

SEQ ID NO: 9488 - protein, 9 aa, synthetic construct
  REGION 1..9: note = Description of Artificial Sequence: Synthetic peptide
TVGGHQAAM

SEQ ID NO: 9489 - protein, 9 aa, synthetic construct
  REGION 1..9: note = Description of Artificial Sequence: Synthetic peptide
DIVSPRCEY

SEQ ID NO: 9490 - protein, 9 aa, synthetic construct
  REGION 1..9: note = Description of Artificial Sequence: Synthetic peptide
DLVNVSENF

SEQ ID NO: 9491 - protein, 10 aa, synthetic construct
  REGION 1..10: note = Description of Artificial Sequence: Synthetic peptide
FVTKGLGISY

SEQ ID NO: 9492 - protein, 10 aa, synthetic construct
  REGION 1..10: note = Description of Artificial Sequence: Synthetic peptide
SINLGPGQAF

SEQ ID NO: 9493 - protein, 8 aa, synthetic construct
  REGION 1..8: note = Description of Artificial Sequence: Synthetic peptide
DNYTELVY

SEQ ID NO: 9494 - protein, 9 aa, synthetic construct
  REGION 1..9: note = Description of Artificial Sequence: Synthetic peptide
SASSLFDAI

SEQ ID NO: 9495 - protein, 8 aa, synthetic construct
  REGION 1..8: note = Description of Artificial Sequence: Synthetic peptide
DNYTGLIY

SEQ ID NO: 9496 - protein, 9 aa, synthetic construct
  REGION 1..9: note = Description of Artificial Sequence: Synthetic peptide
QVPERPVTY

SEQ ID NO: 9497 - protein, 10 aa, synthetic construct
  REGION 1..10: note = Description of Artificial Sequence: Synthetic peptide
EIAERILGTY

SEQ ID NO: 9498 - protein, 9 aa, synthetic construct
  REGION 1..9: note = Description of Artificial Sequence: Synthetic peptide
SAEPVPLQL

SEQ ID NO: 9499 - protein, 9 aa, synthetic construct
  REGION 1..9: note = Description of Artificial Sequence: Synthetic peptide
DIAGTTSTL

SEQ ID NO: 9500 - protein, 10 aa, synthetic construct
  REGION 1..10: note = Description of Artificial Sequence: Synthetic peptide
EVNIVTDSQY

SEQ ID NO: 9501 - protein, 9 aa, synthetic construct
  REGION 1..9: note = Description of Artificial Sequence: Synthetic peptide
RQRPGTVSF

SEQ ID NO: 9502 - protein, 9 aa, synthetic construct
  REGION 1..9: note = Description of Artificial Sequence: Synthetic peptide
TKKGLGVSY

SEQ ID NO: 9503 - protein, 9 aa, synthetic construct
  REGION 1..9: note = Description of Artificial Sequence: Synthetic peptide
RQRPGTVSF

SEQ ID NO: 9504 - protein, 11 aa, synthetic construct
  REGION 1..11: note = Description of Artificial Sequence: Synthetic peptide
AKVNIVTDSQY

SEQ ID NO: 9505 - protein, 8 aa, synthetic construct
  REGION 1..8: note = Description of Artificial Sequence: Synthetic peptide
TKGLGISY

SEQ ID NO: 9506 - protein, 9 aa, synthetic construct
  REGION 1..9: note = Description of Artificial Sequence: Synthetic peptide
GQKAIGTVL

SEQ ID NO: 9507 - protein, 8 aa, synthetic construct
  REGION 1..8: note = Description of Artificial Sequence: Synthetic peptide
KKGLGVSY

SEQ ID NO: 9508 - protein, 9 aa, synthetic construct
  REGION 1..9: note = Description of Artificial Sequence: Synthetic peptide
ITKGLGISY

SEQ ID NO: 9509 - protein, 9 aa, synthetic construct
  REGION 1..9: note = Description of Artificial Sequence: Synthetic peptide
ARILAVESY

SEQ ID NO: 9510 - protein, 9 aa, synthetic construct
  REGION 1..9: note = Description of Artificial Sequence: Synthetic peptide
VTKGLGISY

SEQ ID NO: 9511 - protein, 9 aa, synthetic construct
  REGION 1..9: note = Description of Artificial Sequence: Synthetic peptide
SKIGPENPY

SEQ ID NO: 9512 - protein, 9 aa, synthetic construct
  REGION 1..9: note = Description of Artificial Sequence: Synthetic peptide
RQGQGTVSF

SEQ ID NO: 9513 - protein, 9 aa, synthetic construct
  REGION 1..9: note = Description of Artificial Sequence: Synthetic peptide
KQNPEIVIY

SEQ ID NO: 9514 - protein, 8 aa, synthetic construct
  REGION 1..8: note = Description of Artificial Sequence: Synthetic peptide
YQIYQEQY

SEQ ID NO: 9515 - protein, 9 aa, synthetic construct
  REGION 1..9: note = Description of Artificial Sequence: Synthetic peptide
ARVLAVESY

SEQ ID NO: 9516 - protein, 9 aa, synthetic construct
  REGION 1..9: note = Description of Artificial Sequence: Synthetic peptide
AERQGTVSF

SEQ ID NO: 9517 - protein, 8 aa, synthetic construct
  REGION 1..8: note = Description of Artificial Sequence: Synthetic peptide
GQFIYETY

SEQ ID NO: 9518 - protein, 9 aa, synthetic construct
  REGION 1..9: note = Description of Artificial Sequence: Synthetic peptide
KQNPEMVIY

SEQ ID NO: 9519 - protein, 8 aa, synthetic construct
  REGION 1..8: note = Description of Artificial Sequence: Synthetic peptide
GQMVHQAL

SEQ ID NO: 9520 - protein, 8 aa, synthetic construct
  REGION 1..8: note = Description of Artificial Sequence: Synthetic peptide
HKAIGTVL

SEQ ID NO: 9521 - protein, 8 aa, synthetic construct
  REGION 1..8: note = Description of Artificial Sequence: Synthetic peptide
NKGLGISY

SEQ ID NO: 9522 - protein, 9 aa, synthetic construct
  REGION 1..9: note = Description of Artificial Sequence: Synthetic peptide
AKMKHPEYY

SEQ ID NO: 9523 - protein, 9 aa, synthetic construct
  REGION 1..9: note = Description of Artificial Sequence: Synthetic peptide
KQEQGQWTY

SEQ ID NO: 9524 - protein, 9 aa, synthetic construct
  REGION 1..9: note = Description of Artificial Sequence: Synthetic peptide
KQNPEMIIY

SEQ ID NO: 9525 - protein, 9 aa, synthetic construct
  REGION 1..9: note = Description of Artificial Sequence: Synthetic peptide
VKVIEEKAF

SEQ ID NO: 9526 - protein, 9 aa, synthetic construct
  REGION 1..9: note = Description of Artificial Sequence: Synthetic peptide
TQACPKVSF

SEQ ID NO: 9527 - protein, 9 aa, synthetic construct
  REGION 1..9: note = Description of Artificial Sequence: Synthetic peptide
QHSRIGITL

SEQ ID NO: 9528 - protein, 9 aa, synthetic construct
  REGION 1..9: note = Description of Artificial Sequence: Synthetic peptide
GHKAIGTVL

SEQ ID NO: 9529 - protein, 9 aa, synthetic construct
  REGION 1..9: note = Description of Artificial Sequence: Synthetic peptide
TRIGPGQAL

SEQ ID NO: 9530 - protein, 9 aa, synthetic construct
  REGION 1..9: note = Description of Artificial Sequence: Synthetic peptide
YQSNPPPSL

SEQ ID NO: 9531 - protein, 9 aa, synthetic construct
  REGION 1..9: note = Description of Artificial Sequence: Synthetic peptide
THLEGKVIL

SEQ ID NO: 9532 - protein, 9 aa, synthetic construct
  REGION 1..9: note = Description of Artificial Sequence: Synthetic peptide
THTNDVKQL

SEQ ID NO: 9533 - protein, 9 aa, synthetic construct
  REGION 1..9: note = Description of Artificial Sequence: Synthetic peptide
HQAISPRTL

SEQ ID NO: 9534 - protein, 9 aa, synthetic construct
  REGION 1..9: note = Description of Artificial Sequence: Synthetic peptide
EHLKTAVQM

SEQ ID NO: 9535 - protein, 9 aa, synthetic construct
  REGION 1..9: note = Description of Artificial Sequence: Synthetic peptide
HQALSPRTL

SEQ ID NO: 9536 - protein, 8 aa, synthetic construct
  REGION 1..8: note = Description of Artificial Sequence: Synthetic peptide
LHQVAQKL

SEQ ID NO: 9537 - protein, 9 aa, synthetic construct
  REGION 1..9: note = Description of Artificial Sequence: Synthetic peptide
GHQAAMQML

SEQ ID NO: 9538 - protein, 9 aa, synthetic construct
  REGION 1..9: note = Description of Artificial Sequence: Synthetic peptide
AHTNDVKQL

SEQ ID NO: 9539 - protein, 9 aa, synthetic construct
  REGION 1..9: note = Description of Artificial Sequence: Synthetic peptide
GQKAIGTVL

SEQ ID NO: 9540 - protein, 9 aa, synthetic construct
  REGION 1..9: note = Description of Artificial Sequence: Synthetic peptide
THLEGKGIL

SEQ ID NO: 9541 - protein, 9 aa, synthetic construct
  REGION 1..9: note = Description of Artificial Sequence: Synthetic peptide
MEDPERQVL

SEQ ID NO: 9542 - protein, 9 aa, synthetic construct
  REGION 1..9: note = Description of Artificial Sequence: Synthetic peptide
HHPLSPRTL

SEQ ID NO: 9543 - protein, 10 aa, synthetic construct
  REGION 1..10: note = Description of Artificial Sequence: Synthetic peptide
VHHPLSPRTL

SEQ ID NO: 9544 - protein, 9 aa, synthetic construct
  REGION 1..9: note = Description of Artificial Sequence: Synthetic peptide
IHSIGERIL

SEQ ID NO: 9545 - protein, 9 aa, synthetic construct
  REGION 1..9: note = Description of Artificial Sequence: Synthetic peptide
FQQGKAREL

SEQ ID NO: 9546 - protein, 10 aa, synthetic construct
  REGION 1..10: note = Description of Artificial Sequence: Synthetic peptide
SHNGRPGNFL

SEQ ID NO: 9547 - protein, 9 aa, synthetic construct
  REGION 1..9: note = Description of Artificial Sequence: Synthetic peptide
SQIYPGIKV

SEQ ID NO: 9548 - protein, 8 aa, synthetic construct
  REGION 1..8: note = Description of Artificial Sequence: Synthetic peptide
THLEGKVI

SEQ ID NO: 9549 - protein, 9 aa, synthetic construct
  REGION 1..9: note = Description of Artificial Sequence: Synthetic peptide
TVLDVGDAY

SEQ ID NO: 9550 - protein, 9 aa, synthetic construct
  REGION 1..9: note = Description of Artificial Sequence: Synthetic peptide
TINEEAAEW

SEQ ID NO: 9551 - protein, 9 aa, synthetic construct
  REGION 1..9: note = Description of Artificial Sequence: Synthetic peptide
IQKQEQGQW

SEQ ID NO: 9552 - protein, 8 aa, synthetic construct
  REGION 1..8: note = Description of Artificial Sequence: Synthetic peptide
NETPGIRY

SEQ ID NO: 9553 - protein, 8 aa, synthetic construct
  REGION 1..8: note = Description of Artificial Sequence: Synthetic peptide
GERIISTY

SEQ ID NO: 9554 - protein, 9 aa, synthetic construct
  REGION 1..9: note = Description of Artificial Sequence: Synthetic peptide
SEFNLPPVV

SEQ ID NO: 9555 - protein, 8 aa, synthetic construct
  REGION 1..8: note = Description of Artificial Sequence: Synthetic peptide
TEVIPLTA

SEQ ID NO: 9556 - protein, 11 aa, synthetic construct
  REGION 1..11: note = Description of Artificial Sequence: Synthetic peptide
LEVNIVTDSQY

SEQ ID NO: 9557 - protein, 8 aa, synthetic construct
  REGION 1..8: note = Description of Artificial Sequence: Synthetic peptide
SEEIKSLY

SEQ ID NO: 9558 - protein, 8 aa, synthetic construct
  REGION 1..8: note = Description of Artificial Sequence: Synthetic peptide
PEIVIYQY

SEQ ID NO: 9559 - protein, 9 aa, synthetic construct
  REGION 1..9: note = Description of Artificial Sequence: Synthetic peptide
DEVGFPVRP

SEQ ID NO: 9560 - protein, 8 aa, synthetic construct
  REGION 1..8: note = Description of Artificial Sequence: Synthetic peptide
LENVTENF

SEQ ID NO: 9561 - protein, 8 aa, synthetic construct
  REGION 1..8: note = Description of Artificial Sequence: Synthetic peptide
IEIIQRAF

SEQ ID NO: 9562 - protein, 8 aa, synthetic construct
  REGION 1..8: note = Description of Artificial Sequence: Synthetic peptide
PEMVIYQY

SEQ ID NO: 9563 - protein, 8 aa, synthetic construct
  REGION 1..8: note = Description of Artificial Sequence: Synthetic peptide
PEMIIYQY

SEQ ID NO: 9564 - protein, 8 aa, synthetic construct
  REGION 1..8: note = Description of Artificial Sequence: Synthetic peptide
DEELLQAV

SEQ ID NO: 9565 - protein, 8 aa, synthetic construct
  REGION 1..8: note = Description of Artificial Sequence: Synthetic peptide
DEDLLKAV

SEQ ID NO: 9566 - protein, 9 aa, synthetic construct
  REGION 1..9: note = Description of Artificial Sequence: Synthetic peptide
ARILAVESY

SEQ ID NO: 9567 - protein, 11 aa, synthetic construct
  REGION 1..11: note = Description of Artificial Sequence: Synthetic peptide
TRNSSQVSQNY

SEQ ID NO: 9568 - protein, 9 aa, synthetic construct
  REGION 1..9: note = Description of Artificial Sequence: Synthetic peptide
ARVLAVESY

SEQ ID NO: 9569 - protein, 9 aa, synthetic construct
  REGION 1..9: note = Description of Artificial Sequence: Synthetic peptide
ARVLAVERY

SEQ ID NO: 9570 - protein, 10 aa, synthetic construct
  REGION 1..10: note = Description of Artificial Sequence: Synthetic peptide
TRIGPGQALF

SEQ ID NO: 9571 - protein, 10 aa, synthetic construct
  REGION 1..10: note = Description of Artificial Sequence: Synthetic peptide
VRQGYSPLSF

SEQ ID NO: 9572 - protein, 9 aa, synthetic construct
  REGION 1..9: note = Description of Artificial Sequence: Synthetic peptide
ARILAVERY

SEQ ID NO: 9573 - protein, 9 aa, synthetic construct
  REGION 1..9: note = Description of Artificial Sequence: Synthetic peptide
TRIVGLLGH

SEQ ID NO: 9574 - protein, 10 aa, synthetic construct
  REGION 1..10: note = Description of Artificial Sequence: Synthetic peptide
FTAEVTGDIR

SEQ ID NO: 9575 - protein, 11 aa, synthetic construct
  REGION 1..11: note = Description of Artificial Sequence: Synthetic peptide
LIEESQIQQEK

SEQ ID NO: 9576 - protein, 10 aa, synthetic construct
  REGION 1..10: note = Description of Artificial Sequence: Synthetic peptide
ERQGQGTVSF

SEQ ID NO: 9577 - protein, 10 aa, synthetic construct
  REGION 1..10: note = Description of Artificial Sequence: Synthetic peptide
EIDNYTELVY

SEQ ID NO: 9578 - protein, 9 aa, synthetic construct
  REGION 1..9: note = Description of Artificial Sequence: Synthetic peptide
ALTALVTPR

SEQ ID NO: 9579 - protein, 9 aa, synthetic construct
  REGION 1..9: note = Description of Artificial Sequence: Synthetic peptide
SRIGPENPY

SEQ ID NO: 9580 - protein, 11 aa, synthetic construct
  REGION 1..11: note = Description of Artificial Sequence: Synthetic peptide
GINNSTNETFR

SEQ ID NO: 9581 - protein, 10 aa, synthetic construct
  REGION 1..10: note = Description of Artificial Sequence: Synthetic peptide
GNNSQVSQNY

SEQ ID NO: 9582 - protein, 11 aa, synthetic construct
  REGION 1..11: note = Description of Artificial Sequence: Synthetic peptide
KALTEVIPLTK

SEQ ID NO: 9583 - protein, 11 aa, synthetic construct
  REGION 1..11: note = Description of Artificial Sequence: Synthetic peptide
KEAELELAENR

SEQ ID NO: 9584 - protein, 11 aa, synthetic construct
  REGION 1..11: note = Description of Artificial Sequence: Synthetic peptide
QRISTESIVIW

SEQ ID NO: 9585 - protein, 9 aa, synthetic construct
  REGION 1..9: note = Description of Artificial Sequence: Synthetic peptide
ILGDIVSPR

SEQ ID NO: 9586 - protein, 9 aa, synthetic construct
  REGION 1..9: note = Description of Artificial Sequence: Synthetic peptide
ARLVVTTYW

SEQ ID NO: 9587 - protein, 9 aa, synthetic construct
  REGION 1..9: note = Description of Artificial Sequence: Synthetic peptide
SRIGITLQR

SEQ ID NO: 9588 - protein, 11 aa, synthetic construct
  REGION 1..11: note = Description of Artificial Sequence: Synthetic peptide
KALTEIIPLTK

SEQ ID NO: 9589 - protein, 10 aa, synthetic construct
  REGION 1..10: note = Description of Artificial Sequence: Synthetic peptide
EALDLSHFLK

SEQ ID NO: 9590 - protein, 11 aa, synthetic construct
  REGION 1..11: note = Description of Artificial Sequence: Synthetic peptide
TAIAVAEGTDR

SEQ ID NO: 9591 - protein, 10 aa, synthetic construct
  REGION 1..10: note = Description of Artificial Sequence: Synthetic peptide
IRIGPGQTFF

SEQ ID NO: 9592 - protein, 11 aa, synthetic construct
  REGION 1..11: note = Description of Artificial Sequence: Synthetic peptide
GFGEEITPSQK

SEQ ID NO: 9593 - protein, 11 aa, synthetic construct
  REGION 1..11: note = Description of Artificial Sequence: Synthetic peptide
LIEESQVQQEK

SEQ ID NO: 9594 - protein, 9 aa, synthetic construct
  REGION 1..9: note = Description of Artificial Sequence: Synthetic peptide
QAHQVPIPK

SEQ ID NO: 9595 - protein, 9 aa, synthetic construct
  REGION 1..9: note = Description of Artificial Sequence: Synthetic peptide
SRIGITLQR

SEQ ID NO: 9596 - protein, 9 aa, synthetic construct
  REGION 1..9: note = Description of Artificial Sequence: Synthetic peptide
SRIGIIRQR

SEQ ID NO: 9597 - protein, 9 aa, synthetic construct
  REGION 1..9: note = Description of Artificial Sequence: Synthetic peptide
SRIGITRQR

SEQ ID NO: 9598 - protein, 9 aa, synthetic construct
  REGION 1..9: note = Description of Artificial Sequence: Synthetic peptide
GRWPVKVVH

SEQ ID NO: 9599 - protein, 9 aa, synthetic construct
  REGION 1..9: note = Description of Artificial Sequence: Synthetic peptide
ARILAVESY

SEQ ID NO: 9600 - protein, 9 aa, synthetic construct
  REGION 1..9: note = Description of Artificial Sequence: Synthetic peptide
SRIGINRQR

SEQ ID NO: 9601 - protein, 9 aa, synthetic construct
  REGION 1..9: note = Description of Artificial Sequence: Synthetic peptide
ARVLAVERY

SEQ ID NO: 9602 - protein, 9 aa, synthetic construct
  REGION 1..9: note = Description of Artificial Sequence: Synthetic peptide
ARVLAVESY

SEQ ID NO: 9603 - protein, 9 aa, synthetic construct
  REGION 1..9: note = Description of Artificial Sequence: Synthetic peptide
SRSIIGQAH

SEQ ID NO: 9604 - protein, 9 aa, synthetic construct
  REGION 1..9: note = Description of Artificial Sequence: Synthetic peptide
CRIKQIIKM

SEQ ID NO: 9605 - protein, 10 aa, synthetic construct
  REGION 1..10: note = Description of Artificial Sequence: Synthetic peptide
TRIGPGQALF

SEQ ID NO: 9606 - protein, 9 aa, synthetic construct
  REGION 1..9: note = Description of Artificial Sequence: Synthetic peptide
ARILAVERY

SEQ ID NO: 9607 - protein, 11 aa, synthetic construct
  REGION 1..11: note = Description of Artificial Sequence: Synthetic peptide
TRNSSQVSQNY

SEQ ID NO: 9608 - protein, 9 aa, synthetic construct
  REGION 1..9: note = Description of Artificial Sequence: Synthetic peptide
GRAVLHIPR

SEQ ID NO: 9609 - protein, 9 aa, synthetic construct
  REGION 1..9: note = Description of Artificial Sequence: Synthetic peptide
TRIVGLLGH

SEQ ID NO: 9610 - protein, 9 aa, synthetic construct
  REGION 1..9: note = Description of Artificial Sequence: Synthetic peptide
SRIGPENPY

SEQ ID NO: 9611 - protein, 11 aa, synthetic construct
  REGION 1..11: note = Description of Artificial Sequence: Synthetic peptide
IPAETGQETAY

SEQ ID NO: 9612 - protein, 9 aa, synthetic construct
  REGION 1..9: note = Description of Artificial Sequence: Synthetic peptide
EPIVGAETF

SEQ ID NO: 9613 - protein, 9 aa, synthetic construct
  REGION 1..9: note = Description of Artificial Sequence: Synthetic peptide
EPIIGAETF

SEQ ID NO: 9614 - protein, 11 aa, synthetic construct
  REGION 1..11: note = Description of Artificial Sequence: Synthetic peptide
IPSETGQETAY

SEQ ID NO: 9615 - protein, 9 aa, synthetic construct
  REGION 1..9: note = Description of Artificial Sequence: Synthetic peptide
NPEMIIYQY

SEQ ID NO: 9616 - protein, 9 aa, synthetic construct
  REGION 1..9: note = Description of Artificial Sequence: Synthetic peptide
NPEMVIYQY

SEQ ID NO: 9617 - protein, 9 aa, synthetic construct
  REGION 1..9: note = Description of Artificial Sequence: Synthetic peptide
NPELIIYSY

SEQ ID NO: 9618 - protein, 9 aa, synthetic construct
  REGION 1..9: note = Description of Artificial Sequence: Synthetic peptide
NPEIVIYQY

SEQ ID NO: 9619 - protein, 10 aa, synthetic construct
  REGION 1..10: note = Description of Artificial Sequence: Synthetic peptide
TPIGLGQSLY

SEQ ID NO: 9620 - protein, 9 aa, synthetic construct
  REGION 1..9: note = Description of Artificial Sequence: Synthetic peptide
TPIGLGQSL

SEQ ID NO: 9621 - protein, 9 aa, synthetic construct
  REGION 1..9: note = Description of Artificial Sequence: Synthetic peptide
TVLDVGDAY

SEQ ID NO: 9622 - protein, 9 aa, synthetic construct
  REGION 1..9: note = Description of Artificial Sequence: Synthetic peptide
DPEITTHSF

SEQ ID NO: 9623 - protein, 8 aa, synthetic construct
  REGION 1..8: note = Description of Artificial Sequence: Synthetic peptide
TPGPGIRY

SEQ ID NO: 9624 - protein, 11 aa, synthetic construct
  REGION 1..11: note = Description of Artificial Sequence: Synthetic peptide
VPIDKKNNNSY

SEQ ID NO: 9625 - protein, 9 aa, synthetic construct
  REGION 1..9: note = Description of Artificial Sequence: Synthetic peptide
DARLVVTTY

SEQ ID NO: 9626 - protein, 9 aa, synthetic construct
  REGION 1..9: note = Description of Artificial Sequence: Synthetic peptide
PPVPVGEIY

SEQ ID NO: 9627 - protein, 10 aa, synthetic construct
  REGION 1..10: note = Description of Artificial Sequence: Synthetic peptide
VPLDEDFRKY

SEQ ID NO: 9628 - protein, 9 aa, synthetic construct
  REGION 1..9: note = Description of Artificial Sequence: Synthetic peptide
PPIPVGEIY

SEQ ID NO: 9629 - protein, 10 aa, synthetic construct
  REGION 1..10: note = Description of Artificial Sequence: Synthetic peptide
NPPVPVGEIY

SEQ ID NO: 9630 - protein, 8 aa, synthetic construct
  REGION 1..8: note = Description of Artificial Sequence: Synthetic peptide
TPGPGTRY

SEQ ID NO: 9631 - protein, 9 aa, synthetic construct
  REGION 1..9: note = Description of Artificial Sequence: Synthetic peptide
HPVQAGPVA

SEQ ID NO: 9632 - protein, 10 aa, synthetic construct
  REGION 1..10: note = Description of Artificial Sequence: Synthetic peptide
NPPIPVGEIY

SEQ ID NO: 9633 - protein, 9 aa, synthetic construct
  REGION 1..9: note = Description of Artificial Sequence: Synthetic peptide
SPAIFQSSM

SEQ ID NO: 9634 - protein, 9 aa, synthetic construct
  REGION 1..9: note = Description of Artificial Sequence: Synthetic peptide
EAVDLSHFL

SEQ ID NO: 9635 - protein, 8 aa, synthetic construct
  REGION 1..8: note = Description of Artificial Sequence: Synthetic peptide
VPERPVTY

SEQ ID NO: 9636 - protein, 9 aa, synthetic construct
  REGION 1..9: note = Description of Artificial Sequence: Synthetic peptide
IPLTEEAEL

SEQ ID NO: 9637 - protein, 9 aa, synthetic construct
  REGION 1..9: note = Description of Artificial Sequence: Synthetic peptide
DPNPQEIAL

SEQ ID NO: 9638 - protein, 8 aa, synthetic construct
  REGION 1..8: note = Description of Artificial Sequence: Synthetic peptide
NANTAIMM

SEQ ID NO: 9639 - protein, 9 aa, synthetic construct
  REGION 1..9: note = Description of Artificial Sequence: Synthetic peptide
SAEPVPLQL

SEQ ID NO: 9640 - protein, 9 aa, synthetic construct
  REGION 1..9: note = Description of Artificial Sequence: Synthetic peptide
IPLTKEAEL

SEQ ID NO: 9641 - protein, 9 aa, synthetic construct
  REGION 1..9: note = Description of Artificial Sequence: Synthetic peptide
FPISPIETV

SEQ ID NO: 9642 - protein, 9 aa, synthetic construct
  REGION 1..9: note = Description of Artificial Sequence: Synthetic peptide
DPDPQELVL

SEQ ID NO: 9643 - protein, 9 aa, synthetic construct
  REGION 1..9: note = Description of Artificial Sequence: Synthetic peptide
IPLTEEAEL

SEQ ID NO: 9644 - protein, 9 aa, synthetic construct
  REGION 1..9: note = Description of Artificial Sequence: Synthetic peptide
DPNPQEIAL

SEQ ID NO: 9645 - protein, 9 aa, synthetic construct
  REGION 1..9: note = Description of Artificial Sequence: Synthetic peptide
QPDKSESEL

SEQ ID NO: 9646 - protein, 9 aa, synthetic construct
  REGION 1..9: note = Description of Artificial Sequence: Synthetic peptide
IPLTKEAEL

SEQ ID NO: 9647 - protein, 8 aa, synthetic construct
  REGION 1..8: note = Description of Artificial Sequence: Synthetic peptide
TPDETITL

SEQ ID NO: 9648 - protein, 9 aa, synthetic construct
  REGION 1..9: note = Description of Artificial Sequence: Synthetic peptide
DPNPQEIKL

SEQ ID NO: 9649 - protein, 9 aa, synthetic construct
  REGION 1..9: note = Description of Artificial Sequence: Synthetic peptide
IPLTAEAEL

SEQ ID NO: 9650 - protein, 9 aa, synthetic construct
  REGION 1..9: note = Description of Artificial Sequence: Synthetic peptide
SAEPVPLQL

SEQ ID NO: 9651 - protein, 9 aa, synthetic construct
  REGION 1..9: note = Description of Artificial Sequence: Synthetic peptide
TPIGLGQSL

SEQ ID NO: 9652 - protein, 9 aa, synthetic construct
  REGION 1..9: note = Description of Artificial Sequence: Synthetic peptide
YSTQIDPGL

SEQ ID NO: 9653 - protein, 10 aa, synthetic construct
  REGION 1..10: note = Description of Artificial Sequence: Synthetic peptide
SPSSGGDPEI

SEQ ID NO: 9654 - protein, 9 aa, synthetic construct
  REGION 1..9: note = Description of Artificial Sequence: Synthetic peptide
MEDPERQVL

SEQ ID NO: 9655 - protein, 9 aa, synthetic construct
  REGION 1..9: note = Description of Artificial Sequence: Synthetic peptide
HPVQAGPVA

SEQ ID NO: 9656 - protein, 11 aa, synthetic construct
  REGION 1..11: note = Description of Artificial Sequence: Synthetic peptide
IPLTEEAELEL

SEQ ID NO: 9657 - protein, 9 aa, synthetic construct
  REGION 1..9: note = Description of Artificial Sequence: Synthetic peptide
FPQGKAGEL

SEQ ID NO: 9658 - protein, 9 aa, synthetic construct
  REGION 1..9: note = Description of Artificial Sequence: Synthetic peptide
DSDNTSYRL

SEQ ID NO: 9659 - protein, 9 aa, synthetic construct
  REGION 1..9: note = Description of Artificial Sequence: Synthetic peptide
DPNPQEMDL

SEQ ID NO: 9660 - protein, 9 aa, synthetic construct
  REGION 1..9: note = Description of Artificial Sequence: Synthetic peptide
EAVDLSHFL

SEQ ID NO: 9661 - protein, 9 aa, synthetic construct
  REGION 1..9: note = Description of Artificial Sequence: Synthetic peptide
FPISPIETV

SEQ ID NO: 9662 - protein, 9 aa, synthetic construct
  REGION 1..9: note = Description of Artificial Sequence: Synthetic peptide
TPIGLGQSL

SEQ ID NO: 9663 - protein, 9 aa, synthetic construct
  REGION 1..9: note = Description of Artificial Sequence: Synthetic peptide
IPLTEEAEL

SEQ ID NO: 9664 - protein, 9 aa, synthetic construct
  REGION 1..9: note = Description of Artificial Sequence: Synthetic peptide
DPNPQEIAL

SEQ ID NO: 9665 - protein, 9 aa, synthetic construct
  REGION 1..9: note = Description of Artificial Sequence: Synthetic peptide
HPVQAGPVA

SEQ ID NO: 9666 - protein, 9 aa, synthetic construct
  REGION 1..9: note = Description of Artificial Sequence: Synthetic peptide
IPLTKEAEL

SEQ ID NO: 9667 - protein, 9 aa, synthetic construct
  REGION 1..9: note = Description of Artificial Sequence: Synthetic peptide
IPLTAEAEL

SEQ ID NO: 9668 - protein, 11 aa, synthetic construct
  REGION 1..11: note = Description of Artificial Sequence: Synthetic peptide
IPLTEEAELEL

SEQ ID NO: 9669 - protein, 9 aa, synthetic construct
  REGION 1..9: note = Description of Artificial Sequence: Synthetic peptide
DPDPQELVL

SEQ ID NO: 9670 - protein, 9 aa, synthetic construct
  REGION 1..9: note = Description of Artificial Sequence: Synthetic peptide
FPISPIETV

SEQ ID NO: 9671 - protein, 9 aa, synthetic construct
  REGION 1..9: note = Description of Artificial Sequence: Synthetic peptide
DPNPQEIKL

SEQ ID NO: 9672 - protein, 9 aa, synthetic construct
  REGION 1..9: note = Description of Artificial Sequence: Synthetic peptide
FPQGKAGEL

SEQ ID NO: 9673 - protein, 9 aa, synthetic construct
  REGION 1..9: note = Description of Artificial Sequence: Synthetic peptide
HPVHAGPVA

SEQ ID NO: 9674 - protein, 9 aa, synthetic construct
  REGION 1..9: note = Description of Artificial Sequence: Synthetic peptide
SAEPVPLQL

SEQ ID NO: 9675 - protein, 9 aa, synthetic construct
  REGION 1..9: note = Description of Artificial Sequence: Synthetic peptide
YPSASLKSL

SEQ ID NO: 9676 - protein, 8 aa, synthetic construct
  REGION 1..8: note = Description of Artificial Sequence: Synthetic peptide
TPDETITL

SEQ ID NO: 9677 - protein, 9 aa, synthetic construct
  REGION 1..9: note = Description of Artificial Sequence: Synthetic peptide
EAVDLSHFL

SEQ ID NO: 9678 - protein, 9 aa, synthetic construct
  REGION 1..9: note = Description of Artificial Sequence: Synthetic peptide
YSTQIDPGL

SEQ ID NO: 9679 - protein, 9 aa, synthetic construct
  REGION 1..9: note = Description of Artificial Sequence: Synthetic peptide
TPQDLNTML

SEQ ID NO: 9680 - protein, 9 aa, synthetic construct
  REGION 1..9: note = Description of Artificial Sequence: Synthetic peptide
FPISPIATV

SEQ ID NO: 9681 - protein, 11 aa, synthetic construct
  REGION 1..11: note = Description of Artificial Sequence: Synthetic peptide
IPLTAEAELEL

SEQ ID NO: 9682 - protein, 10 aa, synthetic construct
  REGION 1..10: note = Description of Artificial Sequence: Synthetic peptide
VPTDPDPQEL

SEQ ID NO: 9683 - protein, 9 aa, synthetic construct
  REGION 1..9: note = Description of Artificial Sequence: Synthetic peptide
IVTDSQYAL

SEQ ID NO: 9684 - protein, 10 aa, synthetic construct
  REGION 1..10: note = Description of Artificial Sequence: Synthetic peptide
SPIETVPVKL

SEQ ID NO: 9685 - protein, 9 aa, synthetic construct
  REGION 1..9: note = Description of Artificial Sequence: Synthetic peptide
EPIVGAETF

SEQ ID NO: 9686 - protein, 10 aa, synthetic construct
  REGION 1..10: note = Description of Artificial Sequence: Synthetic peptide
NANPDCKTIL

SEQ ID NO: 9687 - protein, 9 aa, synthetic construct
  REGION 1..9: note = Description of Artificial Sequence: Synthetic peptide
TAGMNAAIM

SEQ ID NO: 9688 - protein, 9 aa, synthetic construct
  REGION 1..9: note = Description of Artificial Sequence: Synthetic peptide
EPIGLAPTA

SEQ ID NO: 9689 - protein, 9 aa, synthetic construct
  REGION 1..9: note = Description of Artificial Sequence: Synthetic peptide
HPVHAGPIA

SEQ ID NO: 9690 - protein, 9 aa, synthetic construct
  REGION 1..9: note = Description of Artificial Sequence: Synthetic peptide
EPIIGAETF

SEQ ID NO: 9691 - protein, 10 aa, synthetic construct
  REGION 1..10: note = Description of Artificial Sequence: Synthetic peptide
SPSSGGDPEI

SEQ ID NO: 9692 - protein, 11 aa, synthetic construct
  REGION 1..11: note = Description of Artificial Sequence: Synthetic peptide
TPLEITAIAAL

SEQ ID NO: 9693 - protein, 11 aa, synthetic construct
  REGION 1..11: note = Description of Artificial Sequence: Synthetic peptide
IPLTKEAELEL

SEQ ID NO: 9694 - protein, 8 aa, synthetic construct
  REGION 1..8: note = Description of Artificial Sequence: Synthetic peptide
NANTAIMM

SEQ ID NO: 9695 - protein, 9 aa, synthetic construct
  REGION 1..9: note = Description of Artificial Sequence: Synthetic peptide
QPDKSESEL

SEQ ID NO: 9696 - protein, 9 aa, synthetic construct
  REGION 1..9: note = Description of Artificial Sequence: Synthetic peptide
MEDPERQVL

SEQ ID NO: 9697 - protein, 9 aa, synthetic construct
  REGION 1..9: note = Description of Artificial Sequence: Synthetic peptide
SAVSLFNTI

SEQ ID NO: 9698 - protein, 11 aa, synthetic construct
  REGION 1..11: note = Description of Artificial Sequence: Synthetic peptide
IPAETGQETAY

SEQ ID NO: 9699 - protein, 11 aa, synthetic construct
  REGION 1..11: note = Description of Artificial Sequence: Synthetic peptide
IPSETGQETAY

SEQ ID NO: 9700 - protein, 9 aa, synthetic construct
  REGION 1..9: note = Description of Artificial Sequence: Synthetic peptide
EPIVGAETF

SEQ ID NO: 9701 - protein, 9 aa, synthetic construct
  REGION 1..9: note = Description of Artificial Sequence: Synthetic peptide
IPLTEEAEL

SEQ ID NO: 9702 - protein, 9 aa, synthetic construct
  REGION 1..9: note = Description of Artificial Sequence: Synthetic peptide
DPEITTHSF

SEQ ID NO: 9703 - protein, 9 aa, synthetic construct
  REGION 1..9: note = Description of Artificial Sequence: Synthetic peptide
EPIIGAETF

SEQ ID NO: 9704 - protein, 9 aa, synthetic construct
  REGION 1..9: note = Description of Artificial Sequence: Synthetic peptide
NPEIVIYQY

SEQ ID NO: 9705 - protein, 11 aa, synthetic construct
  REGION 1..11: note = Description of Artificial Sequence: Synthetic peptide
TPQVPERPVTY

SEQ ID NO: 9706 - protein, 9 aa, synthetic construct
  REGION 1..9: note = Description of Artificial Sequence: Synthetic peptide
NPEMVIYQY

SEQ ID NO: 9707 - protein, 9 aa, synthetic construct
  REGION 1..9: note = Description of Artificial Sequence: Synthetic peptide
DPDPQELVL

SEQ ID NO: 9708 - protein, 9 aa, synthetic construct
  REGION 1..9: note = Description of Artificial Sequence: Synthetic peptide
IPLTKEAEL

SEQ ID NO: 9709 - protein, 10 aa, synthetic construct
  REGION 1..10: note = Description of Artificial Sequence: Synthetic peptide
VPLDEDFRKY

SEQ ID NO: 9710 - protein, 9 aa, synthetic construct
  REGION 1..9: note = Description of Artificial Sequence: Synthetic peptide
NPELIIYSY

SEQ ID NO: 9711 - protein, 9 aa, synthetic construct
  REGION 1..9: note = Description of Artificial Sequence: Synthetic peptide
NPEMIIYQY

SEQ ID NO: 9712 - protein, 9 aa, synthetic construct
  REGION 1..9: note = Description of Artificial Sequence: Synthetic peptide
TVLDVGDAY

SEQ ID NO: 9713 - protein, 8 aa, synthetic construct
  REGION 1..8: note = Description of Artificial Sequence: Synthetic peptide
TPDETITL

SEQ ID NO: 9714 - protein, 10 aa, synthetic construct
  REGION 1..10: note = Description of Artificial Sequence: Synthetic peptide
NPPVPVGEIY

SEQ ID NO: 9715 - protein, 11 aa, synthetic construct
  REGION 1..11: note = Description of Artificial Sequence: Synthetic peptide
IPLTEEAELEL

SEQ ID NO: 9716 - protein, 10 aa, synthetic construct
  REGION 1..10: note = Description of Artificial Sequence: Synthetic peptide
NPPIPVGEIY

SEQ ID NO: 9717 - protein, 9 aa, synthetic construct
  REGION 1..9: note = Description of Artificial Sequence: Synthetic peptide
TPIGLGQSL

SEQ ID NO: 9718 - protein, 8 aa, synthetic construct
  REGION 1..8: note = Description of Artificial Sequence: Synthetic peptide
TPGPGIRY

SEQ ID NO: 9719 - protein, 9 aa, synthetic construct
  REGION 1..9: note = Description of Artificial Sequence: Synthetic peptide
DPNPQEIAL

SEQ ID NO: 9720 - protein, 9 aa, synthetic construct
  REGION 1..9: note = Description of Artificial Sequence: Synthetic peptide
IPLTEEAEL

SEQ ID NO: 9721 - protein, 9 aa, synthetic construct
  REGION 1..9: note = Description of Artificial Sequence: Synthetic peptide
DPDPQELVL

SEQ ID NO: 9722 - protein, 9 aa, synthetic construct
  REGION 1..9: note = Description of Artificial Sequence: Synthetic peptide
DPNPQEIAL

SEQ ID NO: 9723 - protein, 9 aa, synthetic construct
  REGION 1..9: note = Description of Artificial Sequence: Synthetic peptide
IPLTKEAEL

SEQ ID NO: 9724 - protein, 9 aa, synthetic construct
  REGION 1..9: note = Description of Artificial Sequence: Synthetic peptide
DPNPQEIKL

SEQ ID NO: 9725 - protein, 8 aa, synthetic construct
  REGION 1..8: note = Description of Artificial Sequence: Synthetic peptide
TPDETITL

SEQ ID NO: 9726 - protein, 9 aa, synthetic construct
  REGION 1..9: note = Description of Artificial Sequence: Synthetic peptide
QPDKSESEL

SEQ ID NO: 9727 - protein, 9 aa, synthetic construct
  REGION 1..9: note = Description of Artificial Sequence: Synthetic peptide
IPLTAEAEL

SEQ ID NO: 9728 - protein, 9 aa, synthetic construct
  REGION 1..9: note = Description of Artificial Sequence: Synthetic peptide
TPIGLGQSL

SEQ ID NO: 9729 - protein, 11 aa, synthetic construct
  REGION 1..11: note = Description of Artificial Sequence: Synthetic peptide
IPLTEEAELEL

SEQ ID NO: 9730 - protein, 9 aa, synthetic construct
  REGION 1..9: note = Description of Artificial Sequence: Synthetic peptide
SAEPVPLQL

SEQ ID NO: 9731 - protein, 10 aa, synthetic construct
  REGION 1..10: note = Description of Artificial Sequence: Synthetic peptide
SPSSGGDPEI

SEQ ID NO: 9732 - protein, 9 aa, synthetic construct
  REGION 1..9: note = Description of Artificial Sequence: Synthetic peptide
FPQGKAGEL

SEQ ID NO: 9733 - protein, 9 aa, synthetic construct
  REGION 1..9: note = Description of Artificial Sequence: Synthetic peptide
HPVQAGPVA

SEQ ID NO: 9734 - protein, 9 aa, synthetic construct
  REGION 1..9: note = Description of Artificial Sequence: Synthetic peptide
YSTQIDPGL

SEQ ID NO: 9735 - protein, 9 aa, synthetic construct
  REGION 1..9: note = Description of Artificial Sequence: Synthetic peptide
DPNPQEMDL

SEQ ID NO: 9736 - protein, 9 aa, synthetic construct
  REGION 1..9: note = Description of Artificial Sequence: Synthetic peptide
MEDPERQVL

SEQ ID NO: 9737 - protein, 11 aa, synthetic construct
  REGION 1..11: note = Description of Artificial Sequence: Synthetic peptide
IPLTAEAELEL

SEQ ID NO: 9738 - protein, 9 aa, synthetic construct
  REGION 1..9: note = Description of Artificial Sequence: Synthetic peptide
FPISPIETV

SEQ ID NO: 9739 - protein, 9 aa, synthetic construct
  REGION 1..9: note = Description of Artificial Sequence: Synthetic peptide
EAVDLSHFL

SEQ ID NO: 9740 - protein, 9 aa, synthetic construct
  REGION 1..9: note = Description of Artificial Sequence: Synthetic peptide
DSDNTSYRL

SEQ ID NO: 9741 - protein, 9 aa, synthetic construct
  REGION 1..9: note = Description of Artificial Sequence: Synthetic peptide
HPVHAGPVA

SEQ ID NO: 9742 - protein, 10 aa, synthetic construct
  REGION 1..10: note = Description of Artificial Sequence: Synthetic peptide
VPTDPDPQEL

SEQ ID NO: 9743 - protein, 9 aa, synthetic construct
  REGION 1..9: note = Description of Artificial Sequence: Synthetic peptide
DPEITTHSF

SEQ ID NO: 9744 - protein, 9 aa, synthetic construct
  REGION 1..9: note = Description of Artificial Sequence: Synthetic peptide
EPIVGAETF

SEQ ID NO: 9745 - protein, 9 aa, synthetic construct
  REGION 1..9: note = Description of Artificial Sequence: Synthetic peptide
RDLERHGAI

SEQ ID NO: 9746 - protein, 8 aa, synthetic construct
  REGION 1..8: note = Description of Artificial Sequence: Synthetic peptide
SDLQTTEL

SEQ ID NO: 9747 - protein, 8 aa, synthetic construct
  REGION 1..8: note = Description of Artificial Sequence: Synthetic peptide
SDNTSYRL

SEQ ID NO: 9748 - protein, 8 aa, synthetic construct
  REGION 1..8: note = Description of Artificial Sequence: Synthetic peptide
SEELKSLF

SEQ ID NO: 9749 - protein, 8 aa, synthetic construct
  REGION 1..8: note = Description of Artificial Sequence: Synthetic peptide
LDNVTENF

SEQ ID NO: 9750 - protein, 8 aa, synthetic construct
  REGION 1..8: note = Description of Artificial Sequence: Synthetic peptide
AEHLKTAV

SEQ ID NO: 9751 - protein, 8 aa, synthetic construct
  REGION 1..8: note = Description of Artificial Sequence: Synthetic peptide
YESPHPKI

SEQ ID NO: 9752 - protein, 9 aa, synthetic construct
  REGION 1..9: note = Description of Artificial Sequence: Synthetic peptide
KELYPSASL

SEQ ID NO: 9753 - protein, 9 aa, synthetic construct
  REGION 1..9: note = Description of Artificial Sequence: Synthetic peptide
AERQGTVSF

SEQ ID NO: 9754 - protein, 8 aa, synthetic construct
  REGION 1..8: note = Description of Artificial Sequence: Synthetic peptide
ADQLIHIY

SEQ ID NO: 9755 - protein, 8 aa, synthetic construct
  REGION 1..8: note = Description of Artificial Sequence: Synthetic peptide
KEATTTLF

SEQ ID NO: 9756 - protein, 8 aa, synthetic construct
  REGION 1..8: note = Description of Artificial Sequence: Synthetic peptide
LENVTENF

SEQ ID NO: 9757 - protein, 8 aa, synthetic construct
  REGION 1..8: note = Description of Artificial Sequence: Synthetic peptide
ADNLWVTV

SEQ ID NO: 9758 - protein, 9 aa, synthetic construct
  REGION 1..9: note = Description of Artificial Sequence: Synthetic peptide
QHSRIGITL

SEQ ID NO: 9759 - protein, 9 aa, synthetic construct
  REGION 1..9: note = Description of Artificial Sequence: Synthetic peptide
THTNDVKQL

SEQ ID NO: 9760 - protein, 9 aa, synthetic construct
  REGION 1..9: note = Description of Artificial Sequence: Synthetic peptide
AHLNESVKI

SEQ ID NO: 9761 - protein, 9 aa, synthetic construct
  REGION 1..9: note = Description of Artificial Sequence: Synthetic peptide
IHTDNGSNF

SEQ ID NO: 9762 - protein, 11 aa, synthetic construct
  REGION 1..11: note = Description of Artificial Sequence: Synthetic peptide
TQIDPGLADQL

SEQ ID NO: 9763 - protein, 9 aa, synthetic construct
  REGION 1..9: note = Description of Artificial Sequence: Synthetic peptide
VHTDNGSNF

SEQ ID NO: 9764 - protein, 11 aa, synthetic construct
  REGION 1..11: note = Description of Artificial Sequence: Synthetic peptide
TQVDPGLADQL

SEQ ID NO: 9765 - protein, 9 aa, synthetic construct
  REGION 1..9: note = Description of Artificial Sequence: Synthetic peptide
THLEGKVIL

SEQ ID NO: 9766 - protein, 9 aa, synthetic construct
  REGION 1..9: note = Description of Artificial Sequence: Synthetic peptide
YQSNPPPSL

SEQ ID NO: 9767 - protein, 9 aa, synthetic construct
  REGION 1..9: note = Description of Artificial Sequence: Synthetic peptide
TRIGPGQAL

SEQ ID NO: 9768 - protein, 10 aa, synthetic construct
  REGION 1..10: note = Description of Artificial Sequence: Synthetic peptide
TQISVESPAI

SEQ ID NO: 9769 - protein, 10 aa, synthetic construct
  REGION 1..10: note = Description of Artificial Sequence: Synthetic peptide
HHAPWNVDDI

SEQ ID NO: 9770 - protein, 9 aa, synthetic construct
  REGION 1..9: note = Description of Artificial Sequence: Synthetic peptide
TQDFWEVQL

SEQ ID NO: 9771 - protein, 9 aa, synthetic construct
  REGION 1..9: note = Description of Artificial Sequence: Synthetic peptide
VLDNVTENF

SEQ ID NO: 9772 - protein, 10 aa, synthetic construct
  REGION 1..10: note = Description of Artificial Sequence: Synthetic peptide
HHAPWDIDDL

SEQ ID NO: 9773 - protein, 9 aa, synthetic construct
  REGION 1..9: note = Description of Artificial Sequence: Synthetic peptide
MEDPERQVL

SEQ ID NO: 9774 - protein, 9 aa, synthetic construct
  REGION 1..9: note = Description of Artificial Sequence: Synthetic peptide
GHQAAMQML

SEQ ID NO: 9775 - protein, 9 aa, synthetic construct
  REGION 1..9: note = Description of Artificial Sequence: Synthetic peptide
TQGVGHPQI

SEQ ID NO: 9776 - protein, 10 aa, synthetic construct
  REGION 1..10: note = Description of Artificial Sequence: Synthetic peptide
ERQGQGTVSF

SEQ ID NO: 9777 - protein, 9 aa, synthetic construct
  REGION 1..9: note = Description of Artificial Sequence: Synthetic peptide
AHTNDVKQL

SEQ ID NO: 9778 - protein, 10 aa, synthetic construct
  REGION 1..10: note = Description of Artificial Sequence: Synthetic peptide
LQDSGAKVNI

SEQ ID NO: 9779 - protein, 9 aa, synthetic construct
  REGION 1..9: note = Description of Artificial Sequence: Synthetic peptide
EHLKTAVQM

SEQ ID NO: 9780 - protein, 9 aa, synthetic construct
  REGION 1..9: note = Description of Artificial Sequence: Synthetic peptide
QDSGLEVNI

SEQ ID NO: 9781 - protein, 9 aa, synthetic construct
  REGION 1..9: note = Description of Artificial Sequence: Synthetic peptide
TQGVGSHQI

SEQ ID NO: 9782 - protein, 10 aa, synthetic construct
  REGION 1..10: note = Description of Artificial Sequence: Synthetic peptide
TRIGPGQALF

SEQ ID NO: 9783 - protein, 9 aa, synthetic construct
  REGION 1..9: note = Description of Artificial Sequence: Synthetic peptide
TRIGPGQAL

SEQ ID NO: 9784 - protein, 9 aa, synthetic construct
  REGION 1..9: note = Description of Artificial Sequence: Synthetic peptide
YQSNPPPSL

SEQ ID NO: 9785 - protein, 9 aa, synthetic construct
  REGION 1..9: note = Description of Artificial Sequence: Synthetic peptide
THTNDVKQL

SEQ ID NO: 9786 - protein, 11 aa, synthetic construct
  REGION 1..11: note = Description of Artificial Sequence: Synthetic peptide
TQVDPGLADQL

SEQ ID NO: 9787 - protein, 11 aa, synthetic construct
  REGION 1..11: note = Description of Artificial Sequence: Synthetic peptide
VHAGPVAPGQL

SEQ ID NO: 9788 - protein, 11 aa, synthetic construct
  REGION 1..11: note = Description of Artificial Sequence: Synthetic peptide
TQIDPGLADQL

SEQ ID NO: 9789 - protein, 9 aa, synthetic construct
  REGION 1..9: note = Description of Artificial Sequence: Synthetic peptide
QHSRIGITL

SEQ ID NO: 9790 - protein, 10 aa, synthetic construct
  REGION 1..10: note = Description of Artificial Sequence: Synthetic peptide
ERQGQGTVSF

SEQ ID NO: 9791 - protein, 9 aa, synthetic construct
  REGION 1..9: note = Description of Artificial Sequence: Synthetic peptide
THLEGKVIL

SEQ ID NO: 9792 - protein, 9 aa, synthetic construct
  REGION 1..9: note = Description of Artificial Sequence: Synthetic peptide
EHLKTAVQM

SEQ ID NO: 9793 - protein, 11 aa, synthetic construct
  REGION 1..11: note = Description of Artificial Sequence: Synthetic peptide
VQAGPVAPGQM

SEQ ID NO: 9794 - protein, 9 aa, synthetic construct
  REGION 1..9: note = Description of Artificial Sequence: Synthetic peptide
TYQIYQEQY

SEQ ID NO: 9795 - protein, 9 aa, synthetic construct
  REGION 1..9: note = Description of Artificial Sequence: Synthetic peptide
SQATNSVTT

SEQ ID NO: 9796 - protein, 9 aa, synthetic construct
  REGION 1..9: note = Description of Artificial Sequence: Synthetic peptide
MEDPERQVL

SEQ ID NO: 9797 - protein, 9 aa, synthetic construct
  REGION 1..9: note = Description of Artificial Sequence: Synthetic peptide
GQKAIGTVL

SEQ ID NO: 9798 - protein, 9 aa, synthetic construct
  REGION 1..9: note = Description of Artificial Sequence: Synthetic peptide
IHTDNGSNF

SEQ ID NO: 9799 - protein, 11 aa, synthetic construct
  REGION 1..11: note = Description of Artificial Sequence: Synthetic peptide
SQATNSVTTAM

SEQ ID NO: 9800 - protein, 9 aa, synthetic construct
  REGION 1..9: note = Description of Artificial Sequence: Synthetic peptide
VHTDNGSNF

SEQ ID NO: 9801 - protein, 9 aa, synthetic construct
  REGION 1..9: note = Description of Artificial Sequence: Synthetic peptide
HQAISPRTL

SEQ ID NO: 9802 - protein, 9 aa, synthetic construct
  REGION 1..9: note = Description of Artificial Sequence: Synthetic peptide
ARILAVESY

SEQ ID NO: 9803 - protein, 10 aa, synthetic construct
  REGION 1..10: note = Description of Artificial Sequence: Synthetic peptide
SQYALGIIQA

SEQ ID NO: 9804 - protein, 8 aa, synthetic construct
  REGION 1..8: note = Description of Artificial Sequence: Synthetic peptide
WQRPVVTV

SEQ ID NO: 9805 - protein, 9 aa, synthetic construct
  REGION 1..9: note = Description of Artificial Sequence: Synthetic peptide
VQLGIPHPA

SEQ ID NO: 9806 - protein, 8 aa, synthetic construct
  REGION 1..8: note = Description of Artificial Sequence: Synthetic peptide
TEVIPLTA

SEQ ID NO: 9807 - protein, 9 aa, synthetic construct
  REGION 1..9: note = Description of Artificial Sequence: Synthetic peptide
SRPPAEPTA

SEQ ID NO: 9808 - protein, 11 aa, synthetic construct
  REGION 1..11: note = Description of Artificial Sequence: Synthetic peptide
THLEGKGILVA

SEQ ID NO: 9809 - protein, 9 aa, synthetic construct
  REGION 1..9: note = Description of Artificial Sequence: Synthetic peptide
DHSDIKVVP

SEQ ID NO: 9810 - protein, 8 aa, synthetic construct
  REGION 1..8: note = Description of Artificial Sequence: Synthetic peptide
DQIPIEIC

SEQ ID NO: 9811 - protein, 8 aa, synthetic construct
  REGION 1..8: note = Description of Artificial Sequence: Synthetic peptide
THGIKPVV

SEQ ID NO: 9812 - protein, 8 aa, synthetic construct
  REGION 1..8: note = Description of Artificial Sequence: Synthetic peptide
THGIRPVV

SEQ ID NO: 9813 - protein, 8 aa, synthetic construct
  REGION 1..8: note = Description of Artificial Sequence: Synthetic peptide
VHIPLGEA

SEQ ID NO: 9814 - protein, 9 aa, synthetic construct
  REGION 1..9: note = Description of Artificial Sequence: Synthetic peptide
SQATNVNAA

SEQ ID NO: 9815 - protein, 9 aa, synthetic construct
  REGION 1..9: note = Description of Artificial Sequence: Synthetic peptide
TPLEITAIA

SEQ ID NO: 9816 - protein, 8 aa, synthetic construct
  REGION 1..8: note = Description of Artificial Sequence: Synthetic peptide
DQIPLEIC

SEQ ID NO: 9817 - protein, 9 aa, synthetic construct
  REGION 1..9: note = Description of Artificial Sequence: Synthetic peptide
HQVSVEPPA

SEQ ID NO: 9818 - protein, 8 aa, synthetic construct
  REGION 1..8: note = Description of Artificial Sequence: Synthetic peptide
DHSDIKVV

SEQ ID NO: 9819 - protein, 8 aa, synthetic construct
  REGION 1..8: note = Description of Artificial Sequence: Synthetic peptide
DQILIEIC

SEQ ID NO: 9820 - protein, 9 aa, synthetic construct
  REGION 1..9: note = Description of Artificial Sequence: Synthetic peptide
TRIGPGQAL

SEQ ID NO: 9821 - protein, 8 aa, synthetic construct
  REGION 1..8: note = Description of Artificial Sequence: Synthetic peptide
HQISVESP

SEQ ID NO: 9822 - protein, 8 aa, synthetic construct
  REGION 1..8: note = Description of Artificial Sequence: Synthetic peptide
SQATNVNA

SEQ ID NO: 9823 - protein, 8 aa, synthetic construct
  REGION 1..8: note = Description of Artificial Sequence: Synthetic peptide
GKVILVAV

SEQ ID NO: 9824 - protein, 9 aa, synthetic construct
  REGION 1..9: note = Description of Artificial Sequence: Synthetic peptide
SRLAFEHKA

SEQ ID NO: 9825 - protein, 9 aa, synthetic construct
  REGION 1..9: note = Description of Artificial Sequence: Synthetic peptide
QQHLLQLTV

SEQ ID NO: 9826 - protein, 8 aa, synthetic construct
  REGION 1..8: note = Description of Artificial Sequence: Synthetic peptide
ERIKVAST

SEQ ID NO: 9827 - protein, 9 aa, synthetic construct
  REGION 1..9: note = Description of Artificial Sequence: Synthetic peptide
HQISVESPA

SEQ ID NO: 9828 - protein, 8 aa, synthetic construct
  REGION 1..8: note = Description of Artificial Sequence: Synthetic peptide
DRLHPVQA

SEQ ID NO: 9829 - protein, 9 aa, synthetic construct
  REGION 1..9: note = Description of Artificial Sequence: Synthetic peptide
EPIGLAPTA

SEQ ID NO: 9830 - protein, 10 aa, synthetic construct
  REGION 1..10: note = Description of Artificial Sequence: Synthetic peptide
NHPGSQPSTA

SEQ ID NO: 9831 - protein, 9 aa, synthetic construct
  REGION 1..9: note = Description of Artificial Sequence: Synthetic peptide
HPVQAGPVA

SEQ ID NO: 9832 - protein, 9 aa, synthetic construct
  REGION 1..9: note = Description of Artificial Sequence: Synthetic peptide
MEDPERQVL

SEQ ID NO: 9833 - protein, 9 aa, synthetic construct
  REGION 1..9: note = Description of Artificial Sequence: Synthetic peptide
REIDNYTEL

SEQ ID NO: 9834 - protein, 10 aa, synthetic construct
  REGION 1..10: note = Description of Artificial Sequence: Synthetic peptide
IEVKDTKEAL

SEQ ID NO: 9835 - protein, 9 aa, synthetic construct
  REGION 1..9: note = Description of Artificial Sequence: Synthetic peptide
FEEPVPLQL

SEQ ID NO: 9836 - protein, 9 aa, synthetic construct
  REGION 1..9: note = Description of Artificial Sequence: Synthetic peptide
MEDTEKEVL

SEQ ID NO: 9837 - protein, 9 aa, synthetic construct
  REGION 1..9: note = Description of Artificial Sequence: Synthetic peptide
MEDPEREVL

SEQ ID NO: 9838 - protein, 9 aa, synthetic construct
  REGION 1..9: note = Description of Artificial Sequence: Synthetic peptide
REIDNYTGL

SEQ ID NO: 9839 - protein, 10 aa, synthetic construct
  REGION 1..10: note = Description of Artificial Sequence: Synthetic peptide
AEGTDRAIEL

SEQ ID NO: 9840 - protein, 10 aa, synthetic construct
  REGION 1..10: note = Description of Artificial Sequence: Synthetic peptide
QELKNSAVSL

SEQ ID NO: 9841 - protein, 9 aa, synthetic construct
  REGION 1..9: note = Description of Artificial Sequence: Synthetic peptide
SEGATPQDL

SEQ ID NO: 9842 - protein, 11 aa, synthetic construct
  REGION 1..11: note = Description of Artificial Sequence: Synthetic peptide
SEVVSQIIEQL

SEQ ID NO: 9843 - protein, 8 aa, synthetic construct
  REGION 1..8: note = Description of Artificial Sequence: Synthetic peptide
IETVPVKL

SEQ ID NO: 9844 - protein, 10 aa, synthetic construct
  REGION 1..10: note = Description of Artificial Sequence: Synthetic peptide
QELKNSAISL

SEQ ID NO: 9845 - protein, 9 aa, synthetic construct
  REGION 1..9: note = Description of Artificial Sequence: Synthetic peptide
KELYPSASL

SEQ ID NO: 9846 - protein, 9 aa, synthetic construct
  REGION 1..9: note = Description of Artificial Sequence: Synthetic peptide
TEGETNSLL

SEQ ID NO: 9847 - protein, 9 aa, synthetic construct
  REGION 1..9: note = Description of Artificial Sequence: Synthetic peptide
SESEVVSQI

SEQ ID NO: 9848 - protein, 9 aa, synthetic construct
  REGION 1..9: note = Description of Artificial Sequence: Synthetic peptide
SEFNLPPVV

SEQ ID NO: 9849 - protein, 9 aa, synthetic construct
  REGION 1..9: note = Description of Artificial Sequence: Synthetic peptide
QELYPLTSL

SEQ ID NO: 9850 - protein, 9 aa, synthetic construct
  REGION 1..9: note = Description of Artificial Sequence: Synthetic peptide
KELYPLTSL

SEQ ID NO: 9851 - protein, 10 aa, synthetic construct
  REGION 1..10: note = Description of Artificial Sequence: Synthetic peptide
NESEGDKEEL

SEQ ID NO: 9852 - protein, 9 aa, synthetic construct
  REGION 1..9: note = Description of Artificial Sequence: Synthetic peptide
QEKNEQELL

SEQ ID NO: 9853 - protein, 10 aa, synthetic construct
  REGION 1..10: note = Description of Artificial Sequence: Synthetic peptide
IEAQQHLLQL

SEQ ID NO: 9854 - protein, 9 aa, synthetic construct
  REGION 1..9: note = Description of Artificial Sequence: Synthetic peptide
SESEIVNQI

SEQ ID NO: 9855 - protein, 9 aa, synthetic construct
  REGION 1..9: note = Description of Artificial Sequence: Synthetic peptide
KEIDNYTGV

SEQ ID NO: 9856 - protein, 9 aa, synthetic construct
  REGION 1..9: note = Description of Artificial Sequence: Synthetic peptide
YQSNPPPSL

SEQ ID NO: 9857 - protein, 10 aa, synthetic construct
  REGION 1..10: note = Description of Artificial Sequence: Synthetic peptide
AEHLKTAVQM

SEQ ID NO: 9858 - protein, 10 aa, synthetic construct
  REGION 1..10: note = Description of Artificial Sequence: Synthetic peptide
NESDGDREEL

SEQ ID NO: 9859 - protein, 9 aa, synthetic construct
  REGION 1..9: note = Description of Artificial Sequence: Synthetic peptide
AERQGTVSF

SEQ ID NO: 9860 - protein, 10 aa, synthetic construct
  REGION 1..10: note = Description of Artificial Sequence: Synthetic peptide
NESEGDREKL

SEQ ID NO: 9861 - protein, 10 aa, synthetic construct
  REGION 1..10: note = Description of Artificial Sequence: Synthetic peptide
QELRNSASSL

SEQ ID NO: 9862 - protein, 9 aa, synthetic construct
  REGION 1..9: note = Description of Artificial Sequence: Synthetic peptide
REDSDEDLL

SEQ ID NO: 9863 - protein, 8 aa, synthetic construct
  REGION 1..8: note = Description of Artificial Sequence: Synthetic peptide
IEAQQHLL

SEQ ID NO: 9864 - protein, 10 aa, synthetic construct
  REGION 1..10: note = Description of Artificial Sequence: Synthetic peptide
TETNNSTITI

SEQ ID NO: 9865 - protein, 10 aa, synthetic construct
  REGION 1..10: note = Description of Artificial Sequence: Synthetic peptide
VESYLKDQQL

SEQ ID NO: 9866 - protein, 11 aa, synthetic construct
  REGION 1..11: note = Description of Artificial Sequence: Synthetic peptide
QELKNSAINLL

SEQ ID NO: 9867 - protein, 8 aa, synthetic construct
  REGION 1..8: note = Description of Artificial Sequence: Synthetic peptide
TELQAINL

SEQ ID NO: 9868 - protein, 9 aa, synthetic construct
  REGION 1..9: note = Description of Artificial Sequence: Synthetic peptide
SEFNLPPVV

SEQ ID NO: 9869 - protein, 10 aa, synthetic construct
  REGION 1..10: note = Description of Artificial Sequence: Synthetic peptide
AEWDKTLQQV

SEQ ID NO: 9870 - protein, 9 aa, synthetic construct
  REGION 1..9: note = Description of Artificial Sequence: Synthetic peptide
MEDPERQVL

SEQ ID NO: 9871 - protein, 9 aa, synthetic construct
  REGION 1..9: note = Description of Artificial Sequence: Synthetic peptide
AERQGTVSF

SEQ ID NO: 9872 - protein, 9 aa, synthetic construct
  REGION 1..9: note = Description of Artificial Sequence: Synthetic peptide
NESVPINCI

SEQ ID NO: 9873 - protein, 11 aa, synthetic construct
  REGION 1..11: note = Description of Artificial Sequence: Synthetic peptide
AERQGQGTVSF

SEQ ID NO: 9874 - protein, 8 aa, synthetic construct
  REGION 1..8: note = Description of Artificial Sequence: Synthetic peptide
TDIQTKEL

SEQ ID NO: 9875 - protein, 10 aa, synthetic construct
  REGION 1..10: note = Description of Artificial Sequence: Synthetic peptide
AEHLKTAVQM

SEQ ID NO: 9876 - protein, 11 aa, synthetic construct
  REGION 1..11: note = Description of Artificial Sequence: Synthetic peptide
SEVVSQIIEQL

SEQ ID NO: 9877 - protein, 8 aa, synthetic construct
  REGION 1..8: note = Description of Artificial Sequence: Synthetic peptide
SDFNLPSV

SEQ ID NO: 9878 - protein, 9 aa, synthetic construct
  REGION 1..9: note = Description of Artificial Sequence: Synthetic peptide
QELYPLTSL

SEQ ID NO: 9879 - protein, 10 aa, synthetic construct
  REGION 1..10: note = Description of Artificial Sequence: Synthetic peptide
IEVKDTKEAL

SEQ ID NO: 9880 - protein, 10 aa, synthetic construct
  REGION 1..10: note = Description of Artificial Sequence: Synthetic peptide
AEGTDRAIEL

SEQ ID NO: 9881 - protein, 9 aa, synthetic construct
  REGION 1..9: note = Description of Artificial Sequence: Synthetic peptide
REIDNYTEL

SEQ ID NO: 9882 - protein, 8 aa, synthetic construct
  REGION 1..8: note = Description of Artificial Sequence: Synthetic peptide
SDLQTTEL

SEQ ID NO: 9883 - protein, 10 aa, synthetic construct
  REGION 1..10: note = Description of Artificial Sequence: Synthetic peptide
QELKNSAVSL

SEQ ID NO: 9884 - protein, 10 aa, synthetic construct
  REGION 1..10: note = Description of Artificial Sequence: Synthetic peptide
IEAQQHLLQL

SEQ ID NO: 9885 - protein, 10 aa, synthetic construct
  REGION 1..10: note = Description of Artificial Sequence: Synthetic peptide
SEFNLPPVVA

SEQ ID NO: 9886 - protein, 8 aa, synthetic construct
  REGION 1..8: note = Description of Artificial Sequence: Synthetic peptide
IETVPVKL

SEQ ID NO: 9887 - protein, 10 aa, synthetic construct
  REGION 1..10: note = Description of Artificial Sequence: Synthetic peptide
QELKNSAISL

SEQ ID NO: 9888 - protein, 9 aa, synthetic construct
  REGION 1..9: note = Description of Artificial Sequence: Synthetic peptide
SESEIVNQI

SEQ ID NO: 9889 - protein, 11 aa, synthetic construct
  REGION 1..11: note = Description of Artificial Sequence: Synthetic peptide
AEAMSQATNSV

SEQ ID NO: 9890 - protein, 8 aa, synthetic construct
  REGION 1..8: note = Description of Artificial Sequence: Synthetic peptide
YESPHPKI

SEQ ID NO: 9891 - protein, 9 aa, synthetic construct
  REGION 1..9: note = Description of Artificial Sequence: Synthetic peptide
KELYPLTSL

SEQ ID NO: 9892 - protein, 9 aa, synthetic construct
  REGION 1..9: note = Description of Artificial Sequence: Synthetic peptide
REIDNYTGL

SEQ ID NO: 9893 - protein, 9 aa, synthetic construct
  REGION 1..9: note = Description of Artificial Sequence: Synthetic peptide
FEEPVPLQL

SEQ ID NO: 9894 - protein, 9 aa, synthetic construct
  REGION 1..9: note = Description of Artificial Sequence: Synthetic peptide
SESEVVSQI

SEQ ID NO: 9895 - protein, 8 aa, synthetic construct
  REGION 1..8: note = Description of Artificial Sequence: Synthetic peptide
IEAQQHLL

SEQ ID NO: 9896 - protein, 8 aa, synthetic construct
  REGION 1..8: note = Description of Artificial Sequence: Synthetic peptide
TELQAINL

SEQ ID NO: 9897 - protein, 9 aa, synthetic construct
  REGION 1..9: note = Description of Artificial Sequence: Synthetic peptide
REIENYTGV

SEQ ID NO: 9898 - protein, 9 aa, synthetic construct
  REGION 1..9: note = Description of Artificial Sequence: Synthetic peptide
SDFNLPPVV

SEQ ID NO: 9899 - protein, 9 aa, synthetic construct
  REGION 1..9: note = Description of Artificial Sequence: Synthetic peptide
REFPSEQTP

SEQ ID NO: 9900 - protein, 8 aa, synthetic construct
  REGION 1..8: note = Description of Artificial Sequence: Synthetic peptide
AEKLGNLL

SEQ ID NO: 9901 - protein, 11 aa, synthetic construct
  REGION 1..11: note = Description of Artificial Sequence: Synthetic peptide
SELVNQIIEQL

SEQ ID NO: 9902 - protein, 9 aa, synthetic construct
  REGION 1..9: note = Description of Artificial Sequence: Synthetic peptide
KELYPSASL

SEQ ID NO: 9903 - protein, 9 aa, synthetic construct
  REGION 1..9: note = Description of Artificial Sequence: Synthetic peptide
SEGATPQDL

SEQ ID NO: 9904 - protein, 11 aa, synthetic construct
  REGION 1..11: note = Description of Artificial Sequence: Synthetic peptide
SELVSQIIEQL

SEQ ID NO: 9905 - protein, 9 aa, synthetic construct
  REGION 1..9: note = Description of Artificial Sequence: Synthetic peptide
KEIDNYTGV

SEQ ID NO: 9906 - protein, 9 aa, synthetic construct
  REGION 1..9: note = Description of Artificial Sequence: Synthetic peptide
YQSNPPPSL

SEQ ID NO: 9907 - protein, 9 aa, synthetic construct
  REGION 1..9: note = Description of Artificial Sequence: Synthetic peptide
LEKEPIVGA

SEQ ID NO: 9908 - protein, 9 aa, synthetic construct
  REGION 1..9: note = Description of Artificial Sequence: Synthetic peptide
AERQGQGTV

SEQ ID NO: 9909 - protein, 9 aa, synthetic construct
  REGION 1..9: note = Description of Artificial Sequence: Synthetic peptide
GERIISTYL

SEQ ID NO: 9910 - protein, 9 aa, synthetic construct
  REGION 1..9: note = Description of Artificial Sequence: Synthetic peptide
AEAVQRIST

SEQ ID NO: 9911 - protein, 9 aa, synthetic construct
  REGION 1..9: note = Description of Artificial Sequence: Synthetic peptide
MEDPEREVL

SEQ ID NO: 9912 - protein, 8 aa, synthetic construct
  REGION 1..8: note = Description of Artificial Sequence: Synthetic peptide
TEVIPLTA

SEQ ID NO: 9913 - protein, 9 aa, synthetic construct
  REGION 1..9: note = Description of Artificial Sequence: Synthetic peptide
SESELVNQI

SEQ ID NO: 9914 - protein, 9 aa, synthetic construct
  REGION 1..9: note = Description of Artificial Sequence: Synthetic peptide
REFPSEQTP

SEQ ID NO: 9915 - protein, 10 aa, synthetic construct
  REGION 1..10: note = Description of Artificial Sequence: Synthetic peptide
SEFNLPPVVA

SEQ ID NO: 9916 - protein, 9 aa, synthetic construct
  REGION 1..9: note = Description of Artificial Sequence: Synthetic peptide
LEKEPIVGA

SEQ ID NO: 9917 - protein, 9 aa, synthetic construct
  REGION 1..9: note = Description of Artificial Sequence: Synthetic peptide
SEFNLPPVV

SEQ ID NO: 9918 - protein, 9 aa, synthetic construct
  REGION 1..9: note = Description of Artificial Sequence: Synthetic peptide
LEKEPIIGA

SEQ ID NO: 9919 - protein, 10 aa, synthetic construct
  REGION 1..10: note = Description of Artificial Sequence: Synthetic peptide
RELPSEQTRA

SEQ ID NO: 9920 - protein, 11 aa, synthetic construct
  REGION 1..11: note = Description of Artificial Sequence: Synthetic peptide
AEWDKTLQQVA

SEQ ID NO: 9921 - protein, 9 aa, synthetic construct
  REGION 1..9: note = Description of Artificial Sequence: Synthetic peptide
AEAMSQATA

SEQ ID NO: 9922 - protein, 11 aa, synthetic construct
  REGION 1..11: note = Description of Artificial Sequence: Synthetic peptide
AEWDRLHPVQA

SEQ ID NO: 9923 - protein, 9 aa, synthetic construct
  REGION 1..9: note = Description of Artificial Sequence: Synthetic peptide
EEVGFPVTP

SEQ ID NO: 9924 - protein, 10 aa, synthetic construct
  REGION 1..10: note = Description of Artificial Sequence: Synthetic peptide
AEVTGDIRKA

SEQ ID NO: 9925 - protein, 10 aa, synthetic construct
  REGION 1..10: note = Description of Artificial Sequence: Synthetic peptide
AEWDKTLQQV

SEQ ID NO: 9926 - protein, 10 aa, synthetic construct
  REGION 1..10: note = Description of Artificial Sequence: Synthetic peptide
GELSPKQTRA

SEQ ID NO: 9927 - protein, 9 aa, synthetic construct
  REGION 1..9: note = Description of Artificial Sequence: Synthetic peptide
TETLLVQNA

SEQ ID NO: 9928 - protein, 8 aa, synthetic construct
  REGION 1..8: note = Description of Artificial Sequence: Synthetic peptide
TEVIPLTA

SEQ ID NO: 9929 - protein, 9 aa, synthetic construct
  REGION 1..9: note = Description of Artificial Sequence: Synthetic peptide
EEVGFPVRP

SEQ ID NO: 9930 - protein, 10 aa, synthetic construct
  REGION 1..10: note = Description of Artificial Sequence: Synthetic peptide
RELSSEQTRA

SEQ ID NO: 9931 - protein, 10 aa, synthetic construct
  REGION 1..10: note = Description of Artificial Sequence: Synthetic peptide
REFPSEQTPS

SEQ ID NO: 9932 - protein, 10 aa, synthetic construct
  REGION 1..10: note = Description of Artificial Sequence: Synthetic peptide
TEVIPLTAEA

SEQ ID NO: 9933 - protein, 10 aa, synthetic construct
  REGION 1..10: note = Description of Artificial Sequence: Synthetic peptide
SEVHIPLGEA

SEQ ID NO: 9934 - protein, 9 aa, synthetic construct
  REGION 1..9: note = Description of Artificial Sequence: Synthetic peptide
IEVKDTKEA

SEQ ID NO: 9935 - protein, 9 aa, synthetic construct
  REGION 1..9: note = Description of Artificial Sequence: Synthetic peptide
NESVKITCA

SEQ ID NO: 9936 - protein, 9 aa, synthetic construct
  REGION 1..9: note = Description of Artificial Sequence: Synthetic peptide
QEFGIPYNP

SEQ ID NO: 9937 - protein, 10 aa, synthetic construct
  REGION 1..10: note = Description of Artificial Sequence: Synthetic peptide
SDFNLPSVVA

SEQ ID NO: 9938 - protein, 10 aa, synthetic construct
  REGION 1..10: note = Description of Artificial Sequence: Synthetic peptide
TEIIPLTKEA

SEQ ID NO: 9939 - protein, 9 aa, synthetic construct
  REGION 1..9: note = Description of Artificial Sequence: Synthetic peptide
QEVGKAMYA

SEQ ID NO: 9940 - protein, 10 aa, synthetic construct
  REGION 1..10: note = Description of Artificial Sequence: Synthetic peptide
SDFNLPPVVA

SEQ ID NO: 9941 - protein, 8 aa, synthetic construct
  REGION 1..8: note = Description of Artificial Sequence: Synthetic peptide
SESAIRKA

SEQ ID NO: 9942 - protein, 9 aa, synthetic construct
  REGION 1..9: note = Description of Artificial Sequence: Synthetic peptide
REIENYTGV

SEQ ID NO: 9943 - protein, 9 aa, synthetic construct
  REGION 1..9: note = Description of Artificial Sequence: Synthetic peptide
AERQGTVSF

SEQ ID NO: 9944 - protein, 9 aa, synthetic construct
  REGION 1..9: note = Description of Artificial Sequence: Synthetic peptide
MEDPERQVL

SEQ ID NO: 9945 - protein, 8 aa, synthetic construct
  REGION 1..8: note = Description of Artificial Sequence: Synthetic peptide
AEKLGNLL

SEQ ID NO: 9946 - protein, 8 aa, synthetic construct
  REGION 1..8: note = Description of Artificial Sequence: Synthetic peptide
TDIQTKEL

SEQ ID NO: 9947 - protein, 11 aa, synthetic construct
  REGION 1..11: note = Description of Artificial Sequence: Synthetic peptide
AERQGQGTVSF

SEQ ID NO: 9948 - protein, 8 aa, synthetic construct
  REGION 1..8: note = Description of Artificial Sequence: Synthetic peptide
AEHLKTAV

SEQ ID NO: 9949 - protein, 9 aa, synthetic construct
  REGION 1..9: note = Description of Artificial Sequence: Synthetic peptide
MEDPEREVL

SEQ ID NO: 9950 - protein, 9 aa, synthetic construct
  REGION 1..9: note = Description of Artificial Sequence: Synthetic peptide
AEAVQRIST

SEQ ID NO: 9951 - protein, 8 aa, synthetic construct
  REGION 1..8: note = Description of Artificial Sequence: Synthetic peptide
SDLQTTEL

SEQ ID NO: 9952 - protein, 9 aa, synthetic construct
  REGION 1..9: note = Description of Artificial Sequence: Synthetic peptide
GERIISTYL

SEQ ID NO: 9953 - protein, 9 aa, synthetic construct
  REGION 1..9: note = Description of Artificial Sequence: Synthetic peptide
GEQDRGRSI

SEQ ID NO: 9954 - protein, 9 aa, synthetic construct
  REGION 1..9: note = Description of Artificial Sequence: Synthetic peptide
SESAIRKAI

SEQ ID NO: 9955 - protein, 9 aa, synthetic construct
  REGION 1..9: note = Description of Artificial Sequence: Synthetic peptide
AERQGQGTV

SEQ ID NO: 9956 - protein, 9 aa, synthetic construct
  REGION 1..9: note = Description of Artificial Sequence: Synthetic peptide
QEKNEQELL

SEQ ID NO: 9957 - protein, 10 aa, synthetic construct
  REGION 1..10: note = Description of Artificial Sequence: Synthetic peptide
AEGTDRAIEL

SEQ ID NO: 9958 - protein, 9 aa, synthetic construct
  REGION 1..9: note = Description of Artificial Sequence: Synthetic peptide
REIDNYTEL

SEQ ID NO: 9959 - protein, 9 aa, synthetic construct
  REGION 1..9: note = Description of Artificial Sequence: Synthetic peptide
SEFNLPPVV

SEQ ID NO: 9960 - protein, 9 aa, synthetic construct
  REGION 1..9: note = Description of Artificial Sequence: Synthetic peptide
QELYPLTSL

SEQ ID NO: 9961 - protein, 8 aa, synthetic construct
  REGION 1..8: note = Description of Artificial Sequence: Synthetic peptide
NELERFAL

SEQ ID NO: 9962 - protein, 8 aa, synthetic construct
  REGION 1..8: note = Description of Artificial Sequence: Synthetic peptide
IEAQQHLL

SEQ ID NO: 9963 - protein, 9 aa, synthetic construct
  REGION 1..9: note = Description of Artificial Sequence: Synthetic peptide
AERILGTYL

SEQ ID NO: 9964 - protein, 9 aa, synthetic construct
  REGION 1..9: note = Description of Artificial Sequence: Synthetic peptide
GERILSTYL

SEQ ID NO: 9965 - protein, 9 aa, synthetic construct
  REGION 1..9: note = Description of Artificial Sequence: Synthetic peptide
KEKGGLEGL

SEQ ID NO: 9966 - protein, 9 aa, synthetic construct
  REGION 1..9: note = Description of Artificial Sequence: Synthetic peptide
REIDNYTGL

SEQ ID NO: 9967 - protein, 9 aa, synthetic construct
  REGION 1..9: note = Description of Artificial Sequence: Synthetic peptide
NESVPINCI

SEQ ID NO: 9968 - protein, 9 aa, synthetic construct
  REGION 1..9: note = Description of Artificial Sequence: Synthetic peptide
LEKEPIIGA

SEQ ID NO: 9969 - protein, 9 aa, synthetic construct
  REGION 1..9: note = Description of Artificial Sequence: Synthetic peptide
LEKEPIVGA

SEQ ID NO: 9970 - protein, 10 aa, synthetic construct
  REGION 1..10: note = Description of Artificial Sequence: Synthetic peptide
AEHLKTAVQM

SEQ ID NO: 9971 - protein, 8 aa, synthetic construct
  REGION 1..8: note = Description of Artificial Sequence: Synthetic peptide
YESPHPKI

SEQ ID NO: 9972 - protein, 8 aa, synthetic construct
  REGION 1..8: note = Description of Artificial Sequence: Synthetic peptide
TERQANFL

SEQ ID NO: 9973 - protein, 9 aa, synthetic construct
  REGION 1..9: note = Description of Artificial Sequence: Synthetic peptide
KELYPLTSL

SEQ ID NO: 9974 - protein, 9 aa, synthetic construct
  REGION 1..9: note = Description of Artificial Sequence: Synthetic peptide
GEQGRGRSI

SEQ ID NO: 9975 - protein, 8 aa, synthetic construct
  REGION 1..8: note = Description of Artificial Sequence: Synthetic peptide
TELQAINL

SEQ ID NO: 9976 - protein, 8 aa, synthetic construct
  REGION 1..8: note = Description of Artificial Sequence: Synthetic peptide
GQMVHQAL

SEQ ID NO: 9977 - protein, 9 aa, synthetic construct
  REGION 1..9: note = Description of Artificial Sequence: Synthetic peptide
MEDTEKEVL

SEQ ID NO: 9978 - protein, 9 aa, synthetic construct
  REGION 1..9: note = Description of Artificial Sequence: Synthetic peptide
QEKNEKELL

SEQ ID NO: 9979 - protein, 8 aa, synthetic construct
  REGION 1..8: note = Description of Artificial Sequence: Synthetic peptide
GERIISTY

SEQ ID NO: 9980 - protein, 10 aa, synthetic construct
  REGION 1..10: note = Description of Artificial Sequence: Synthetic peptide
QELKNSAVSL

SEQ ID NO: 9981 - protein, 9 aa, synthetic construct
  REGION 1..9: note = Description of Artificial Sequence: Synthetic peptide
REIENYTGV

SEQ ID NO: 9982 - protein, 9 aa, synthetic construct
  REGION 1..9: note = Description of Artificial Sequence: Synthetic peptide
FEEPVPLQL

SEQ ID NO: 9983 - protein, 9 aa, synthetic construct
  REGION 1..9: note = Description of Artificial Sequence: Synthetic peptide
KELYPSASL

SEQ ID NO: 9984 - protein, 9 aa, synthetic construct
  REGION 1..9: note = Description of Artificial Sequence: Synthetic peptide
TEMEKEGKI

SEQ ID NO: 9985 - protein, 10 aa, synthetic construct
  REGION 1..10: note = Description of Artificial Sequence: Synthetic peptide
AEWDKTLQQV

SEQ ID NO: 9986 - protein, 8 aa, synthetic construct
  REGION 1..8: note = Description of Artificial Sequence: Synthetic peptide
RELERYAL

SEQ ID NO: 9987 - protein, 10 aa, synthetic construct
  REGION 1..10: note = Description of Artificial Sequence: Synthetic peptide
QELKNSAISL

SEQ ID NO: 9988 - protein, 8 aa, synthetic construct
  REGION 1..8: note = Description of Artificial Sequence: Synthetic peptide
SEVVSQII

SEQ ID NO: 9989 - protein, 11 aa, synthetic construct
  REGION 1..11: note = Description of Artificial Sequence: Synthetic peptide
AEQASQDVKNW

SEQ ID NO: 9990 - protein, 11 aa, synthetic construct
  REGION 1..11: note = Description of Artificial Sequence: Synthetic peptide
AEQATQEVKNW

SEQ ID NO: 9991 - protein, 11 aa, synthetic construct
  REGION 1..11: note = Description of Artificial Sequence: Synthetic peptide
AEVTGDIRKAY

SEQ ID NO: 9992 - protein, 9 aa, synthetic construct
  REGION 1..9: note = Description of Artificial Sequence: Synthetic peptide
EEINLPGKW

SEQ ID NO: 9993 - protein, 9 aa, synthetic construct
  REGION 1..9: note = Description of Artificial Sequence: Synthetic peptide
EEMNLPGKW

SEQ ID NO: 9994 - protein, 9 aa, synthetic construct
  REGION 1..9: note = Description of Artificial Sequence: Synthetic peptide
AERQGTVSF

SEQ ID NO: 9995 - protein, 11 aa, synthetic construct
  REGION 1..11: note = Description of Artificial Sequence: Synthetic peptide
AEIQKQGQDQW

SEQ ID NO: 9996 - protein, 9 aa, synthetic construct
  REGION 1..9: note = Description of Artificial Sequence: Synthetic peptide
SESAIRKAI

SEQ ID NO: 9997 - protein, 9 aa, synthetic construct
  REGION 1..9: note = Description of Artificial Sequence: Synthetic peptide
EEMSLPGKW

SEQ ID NO: 9998 - protein, 8 aa, synthetic construct
  REGION 1..8: note = Description of Artificial Sequence: Synthetic peptide
AEADRFDW

SEQ ID NO: 9999 - protein, 11 aa, synthetic construct
  REGION 1..11: note = Description of Artificial Sequence: Synthetic peptide
AERQGQGTVSF

SEQ ID NO: 10000 - protein, 9 aa, synthetic construct
  REGION 1..9: note = Description of Artificial Sequence: Synthetic peptide
NEIWQNMTW

SEQ ID NO: 10001 - protein, 9 aa, synthetic construct
  REGION 1..9: note = Description of Artificial Sequence: Synthetic peptide
SESEIVNQI

SEQ ID NO: 10002 - protein, 9 aa, synthetic construct
  REGION 1..9: note = Description of Artificial Sequence: Synthetic peptide
QELLKLDTW

SEQ ID NO: 10003 - protein, 11 aa, synthetic construct
  REGION 1..11: note = Description of Artificial Sequence: Synthetic peptide
AEIQKQEQGQW

SEQ ID NO: 10004 - protein, 9 aa, synthetic construct
  REGION 1..9: note = Description of Artificial Sequence: Synthetic peptide
YETEAHNIW

SEQ ID NO: 10005 - protein, 10 aa, synthetic construct
  REGION 1..10: note = Description of Artificial Sequence: Synthetic peptide
GEARLVVKTY

SEQ ID NO: 10006 - protein, 10 aa, synthetic construct
  REGION 1..10: note = Description of Artificial Sequence: Synthetic peptide
NETPGIRYQY

SEQ ID NO: 10007 - protein, 9 aa, synthetic construct
  REGION 1..9: note = Description of Artificial Sequence: Synthetic peptide
AETGQETAY

SEQ ID NO: 10008 - protein, 9 aa, synthetic construct
  REGION 1..9: note = Description of Artificial Sequence: Synthetic peptide
VEMGHDAPW

SEQ ID NO: 10009 - protein, 11 aa, synthetic construct
  REGION 1..11: note = Description of Artificial Sequence: Synthetic peptide
NEQELLKLDTW

SEQ ID NO: 10010 - protein, 9 aa, synthetic construct
  REGION 1..9: note = Description of Artificial Sequence: Synthetic peptide
DEIWNNMTW

SEQ ID NO: 10011 - protein, 9 aa, synthetic construct
  REGION 1..9: note = Description of Artificial Sequence: Synthetic peptide
MEDPERQVL

SEQ ID NO: 10012 - protein, 11 aa, synthetic construct
  REGION 1..11: note = Description of Artificial Sequence: Synthetic peptide
AEVTGDIRKAY

SEQ ID NO: 10013 - protein, 11 aa, synthetic construct
  REGION 1..11: note = Description of Artificial Sequence: Synthetic peptide
AEQASQDVKNW

SEQ ID NO: 10014 - protein, 9 aa, synthetic construct
  REGION 1..9: note = Description of Artificial Sequence: Synthetic peptide
EEINLPGKW

SEQ ID NO: 10015 - protein, 11 aa, synthetic construct
  REGION 1..11: note = Description of Artificial Sequence: Synthetic peptide
AEQATQEVKNW

SEQ ID NO: 10016 - protein, 11 aa, synthetic construct
  REGION 1..11: note = Description of Artificial Sequence: Synthetic peptide
AEIQKQGQDQW

SEQ ID NO: 10017 - protein, 9 aa, synthetic construct
  REGION 1..9: note = Description of Artificial Sequence: Synthetic peptide
EEMNLPGKW

SEQ ID NO: 10018 - protein, 8 aa, synthetic construct
  REGION 1..8: note = Description of Artificial Sequence: Synthetic peptide
AEADRFDW

SEQ ID NO: 10019 - protein, 9 aa, synthetic construct
  REGION 1..9: note = Description of Artificial Sequence: Synthetic peptide
SESAIRKAI

SEQ ID NO: 10020 - protein, 9 aa, synthetic construct
  REGION 1..9: note = Description of Artificial Sequence: Synthetic peptide
AERQGTVSF

SEQ ID NO: 10021 - protein, 9 aa, synthetic construct
  REGION 1..9: note = Description of Artificial Sequence: Synthetic peptide
SESEIVNQI

SEQ ID NO: 10022 - protein, 9 aa, synthetic construct
  REGION 1..9: note = Description of Artificial Sequence: Synthetic peptide
EEMSLPGKW

SEQ ID NO: 10023 - protein, 10 aa, synthetic construct
  REGION 1..10: note = Description of Artificial Sequence: Synthetic peptide
GEARLVVKTY

SEQ ID NO: 10024 - protein, 11 aa, synthetic construct
  REGION 1..11: note = Description of Artificial Sequence: Synthetic peptide
AEIQKQEQGQW

SEQ ID NO: 10025 - protein, 11 aa, synthetic construct
  REGION 1..11: note = Description of Artificial Sequence: Synthetic peptide
AEVQKQGDGQW

SEQ ID NO: 10026 - protein, 9 aa, synthetic construct
  REGION 1..9: note = Description of Artificial Sequence: Synthetic peptide
NEIWQNMTW

SEQ ID NO: 10027 - protein, 9 aa, synthetic construct
  REGION 1..9: note = Description of Artificial Sequence: Synthetic peptide
QELLKLDTW

SEQ ID NO: 10028 - protein, 10 aa, synthetic construct
  REGION 1..10: note = Description of Artificial Sequence: Synthetic peptide
NETPGIRYQY

SEQ ID NO: 10029 - protein, 11 aa, synthetic construct
  REGION 1..11: note = Description of Artificial Sequence: Synthetic peptide
LEVNIVTDSQY

SEQ ID NO: 10030 - protein, 9 aa, synthetic construct
  REGION 1..9: note = Description of Artificial Sequence: Synthetic peptide
SESEVVSQI

SEQ ID NO: 10031 - protein, 9 aa, synthetic construct
  REGION 1..9: note = Description of Artificial Sequence: Synthetic peptide
SESELVNQI

SEQ ID NO: 10032 - protein, 11 aa, synthetic construct
  REGION 1..11: note = Description of Artificial Sequence: Synthetic peptide
LEVNIITDSQY

SEQ ID NO: 10033 - protein, 11 aa, synthetic construct
  REGION 1..11: note = Description of Artificial Sequence: Synthetic peptide
REIDNYTELVY

SEQ ID NO: 10034 - protein, 9 aa, synthetic construct
  REGION 1..9: note = Description of Artificial Sequence: Synthetic peptide
MEDPERQVL

SEQ ID NO: 10035 - protein, 11 aa, synthetic construct
  REGION 1..11: note = Description of Artificial Sequence: Synthetic peptide
AERQGQGTVSF

SEQ ID NO: 10036 - protein, 11 aa, synthetic construct
  REGION 1..11: note = Description of Artificial Sequence: Synthetic peptide
NEQELLKLDTW

SEQ ID NO: 10037 - protein, 9 aa, synthetic construct
  REGION 1..9: note = Description of Artificial Sequence: Synthetic peptide
YETEAHNIW

SEQ ID NO: 10038 - protein, 11 aa, synthetic construct
  REGION 1..11: note = Description of Artificial Sequence: Synthetic peptide
KEIDNYTGVIY

SEQ ID NO: 10039 - protein, 9 aa, synthetic construct
  REGION 1..9: note = Description of Artificial Sequence: Synthetic peptide
DEIWNNMTW

SEQ ID NO: 10040 - protein, 11 aa, synthetic construct
  REGION 1..11: note = Description of Artificial Sequence: Synthetic peptide
AEIQKQGHGQW

SEQ ID NO: 10041 - protein, 9 aa, synthetic construct
  REGION 1..9: note = Description of Artificial Sequence: Synthetic peptide
AETGQETAY

SEQ ID NO: 10042 - protein, 11 aa, synthetic construct
  REGION 1..11: note = Description of Artificial Sequence: Synthetic peptide
MEDPERQVLKW

SEQ ID NO: 10043 - protein, 9 aa, synthetic construct
  REGION 1..9: note = Description of Artificial Sequence: Synthetic peptide
TEMEKEGKI

SEQ ID NO: 10044 - protein, 8 aa, synthetic construct
  REGION 1..8: note = Description of Artificial Sequence: Synthetic peptide
TEADPFDW

SEQ ID NO: 10045 - protein, 9 aa, synthetic construct
  REGION 1..9: note = Description of Artificial Sequence: Synthetic peptide
SESELVSQI

SEQ ID NO: 10046 - protein, 10 aa, synthetic construct
  REGION 1..10: note = Description of Artificial Sequence: Synthetic peptide
SETEADPFDW

SEQ ID NO: 10047 - protein, 10 aa, synthetic construct
  REGION 1..10: note = Description of Artificial Sequence: Synthetic peptide
EEHEKYHNNW

SEQ ID NO: 10048 - protein, 9 aa, synthetic construct
  REGION 1..9: note = Description of Artificial Sequence: Synthetic peptide
SEFNLPPVV

SEQ ID NO: 10049 - protein, 9 aa, synthetic construct
  REGION 1..9: note = Description of Artificial Sequence: Synthetic peptide
SETGQETAY

SEQ ID NO: 10050 - protein, 11 aa, synthetic construct
  REGION 1..11: note = Description of Artificial Sequence: Synthetic peptide
REIDNYTGLIY

SEQ ID NO: 10051 - protein, 10 aa, synthetic construct
  REGION 1..10: note = Description of Artificial Sequence: Synthetic peptide
AETGQETAYF

SEQ ID NO: 10052 - protein, 11 aa, synthetic construct
  REGION 1..11: note = Description of Artificial Sequence: Synthetic peptide
KEKGGLEGLVW

SEQ ID NO: 10053 - protein, 9 aa, synthetic construct
  REGION 1..9: note = Description of Artificial Sequence: Synthetic peptide
NESVPINCI

SEQ ID NO: 10054 - protein, 11 aa, synthetic construct
  REGION 1..11: note = Description of Artificial Sequence: Synthetic peptide
REIENYTGVIY

SEQ ID NO: 10055 - protein, 11 aa, synthetic construct
  REGION 1..11: note = Description of Artificial Sequence: Synthetic peptide
QELKNSAVSLF

SEQ ID NO: 10056 - protein, 8 aa, synthetic construct
  REGION 1..8: note = Description of Artificial Sequence: Synthetic peptide
NETPGIRY

SEQ ID NO: 10057 - protein, 11 aa, synthetic construct
  REGION 1..11: note = Description of Artificial Sequence: Synthetic peptide
MEDPEREVLVW

SEQ ID NO: 10058 - protein, 11 aa, synthetic construct
  REGION 1..11: note = Description of Artificial Sequence: Synthetic peptide
GEARLVVKTYW

SEQ ID NO: 10059 - protein, 9 aa, synthetic construct
  REGION 1..9: note = Description of Artificial Sequence: Synthetic peptide
AERQGTVSF

SEQ ID NO: 10060 - protein, 11 aa, synthetic construct
  REGION 1..11: note = Description of Artificial Sequence: Synthetic peptide
AERQGQGTVSF

SEQ ID NO: 10061 - protein, 11 aa, synthetic construct
  REGION 1..11: note = Description of Artificial Sequence: Synthetic peptide
AEIQKQGQDQW

SEQ ID NO: 10062 - protein, 11 aa, synthetic construct
  REGION 1..11: note = Description of Artificial Sequence: Synthetic peptide
AEQATQEVKNW

SEQ ID NO: 10063 - protein, 9 aa, synthetic construct
  REGION 1..9: note = Description of Artificial Sequence: Synthetic peptide
MEDPERQVL

SEQ ID NO: 10064 - protein, 9 aa, synthetic construct
  REGION 1..9: note = Description of Artificial Sequence: Synthetic peptide
NESVPINCI

SEQ ID NO: 10065 - protein, 10 aa, synthetic construct
  REGION 1..10: note = Description of Artificial Sequence: Synthetic peptide
EEIIIRSENL

SEQ ID NO: 10066 - protein, 11 aa, synthetic construct
  REGION 1..11: note = Description of Artificial Sequence: Synthetic peptide
AEQASQDVKNW

SEQ ID NO: 10067 - protein, 11 aa, synthetic construct
  REGION 1..11: note = Description of Artificial Sequence: Synthetic peptide
AEIQKQEQGQW

SEQ ID NO: 10068 - protein, 10 aa, synthetic construct
  REGION 1..10: note = Description of Artificial Sequence: Synthetic peptide
AETGQETAYF

SEQ ID NO: 10069 - protein, 9 aa, synthetic construct
  REGION 1..9: note = Description of Artificial Sequence: Synthetic peptide
EEINLPGKW

SEQ ID NO: 10070 - protein, 9 aa, synthetic construct
  REGION 1..9: note = Description of Artificial Sequence: Synthetic peptide
SESEIVNQI

SEQ ID NO: 10071 - protein, 10 aa, synthetic construct
  REGION 1..10: note = Description of Artificial Sequence: Synthetic peptide
EEVIIRSENL

SEQ ID NO: 10072 - protein, 10 aa, synthetic construct
  REGION 1..10: note = Description of Artificial Sequence: Synthetic peptide
SENLTNNAKI

SEQ ID NO: 10073 - protein, 9 aa, synthetic construct
  REGION 1..9: note = Description of Artificial Sequence: Synthetic peptide
EEMNLPGKW

SEQ ID NO: 10074 - protein, 10 aa, synthetic construct
  REGION 1..10: note = Description of Artificial Sequence: Synthetic peptide
QELKNSAVSL

SEQ ID NO: 10075 - protein, 10 aa, synthetic construct
  REGION 1..10: note = Description of Artificial Sequence: Synthetic peptide
KEPIIGAETF

SEQ ID NO: 10076 - protein, 10 aa, synthetic construct
  REGION 1..10: note = Description of Artificial Sequence: Synthetic peptide
SETGQETAYF

SEQ ID NO: 10077 - protein, 10 aa, synthetic construct
  REGION 1..10: note = Description of Artificial Sequence: Synthetic peptide
AEGTDRAIEL

SEQ ID NO: 10078 - protein, 9 aa, synthetic construct
  REGION 1..9: note = Description of Artificial Sequence: Synthetic peptide
SESEVVSQI

SEQ ID NO: 10079 - protein, 11 aa, synthetic construct
  REGION 1..11: note = Description of Artificial Sequence: Synthetic peptide
AELELAENREI

SEQ ID NO: 10080 - protein, 9 aa, synthetic construct
  REGION 1..9: note = Description of Artificial Sequence: Synthetic peptide
EELLQAVRL

SEQ ID NO: 10081 - protein, 9 aa, synthetic construct
  REGION 1..9: note = Description of Artificial Sequence: Synthetic peptide
REIDNYTGL

SEQ ID NO: 10082 - protein, 9 aa, synthetic construct
  REGION 1..9: note = Description of Artificial Sequence: Synthetic peptide
REIDNYTEL

SEQ ID NO: 10083 - protein, 10 aa, synthetic construct
  REGION 1..10: note = Description of Artificial Sequence: Synthetic peptide
KEPIVGAETF

SEQ ID NO: 10084 - protein, 11 aa, synthetic construct
  REGION 1..11: note = Description of Artificial Sequence: Synthetic peptide
QELKNSAINLL

SEQ ID NO: 10085 - protein, 11 aa, synthetic construct
  REGION 1..11: note = Description of Artificial Sequence: Synthetic peptide
AEVQKQGDGQW

SEQ ID NO: 10086 - protein, 11 aa, synthetic construct
  REGION 1..11: note = Description of Artificial Sequence: Synthetic peptide
AEAMSQATAGM

SEQ ID NO: 10087 - protein, 11 aa, synthetic construct
  REGION 1..11: note = Description of Artificial Sequence: Synthetic peptide
AELELAENKEI

SEQ ID NO: 10088 - protein, 10 aa, synthetic construct
  REGION 1..10: note = Description of Artificial Sequence: Synthetic peptide
EEVMVRSENL

SEQ ID NO: 10089 - protein, 10 aa, synthetic construct
  REGION 1..10: note = Description of Artificial Sequence: Synthetic peptide
AEHLKTAVQM

SEQ ID NO: 10090 - protein, 9 aa, synthetic construct
  REGION 1..9: note = Description of Artificial Sequence: Synthetic peptide
TEMEKEGKI

SEQ ID NO: 10091 - protein, 9 aa, synthetic construct
  REGION 1..9: note = Description of Artificial Sequence: Synthetic peptide
EEMSLPGKW

SEQ ID NO: 10092 - protein, 9 aa, synthetic construct
  REGION 1..9: note = Description of Artificial Sequence: Synthetic peptide
SESELVNQI

SEQ ID NO: 10093 - protein, 10 aa, synthetic construct
  REGION 1..10: note = Description of Artificial Sequence: Synthetic peptide
QELKNSAISL

SEQ ID NO: 10094 - protein, 10 aa, synthetic construct
  REGION 1..10: note = Description of Artificial Sequence: Synthetic peptide
AEGTDRIIEI

SEQ ID NO: 10095 - protein, 9 aa, synthetic construct
  REGION 1..9: note = Description of Artificial Sequence: Synthetic peptide
SESAIRKAI

SEQ ID NO: 10096 - protein, 10 aa, synthetic construct
  REGION 1..10: note = Description of Artificial Sequence: Synthetic peptide
EEIKSLYNTV

SEQ ID NO: 10097 - protein, 9 aa, synthetic construct
  REGION 1..9: note = Description of Artificial Sequence: Synthetic peptide
GEQDRGRSI

SEQ ID NO: 10098 - protein, 10 aa, synthetic construct
  REGION 1..10: note = Description of Artificial Sequence: Synthetic peptide
QELKNSAINL

SEQ ID NO: 10099 - protein, 9 aa, synthetic construct
  REGION 1..9: note = Description of Artificial Sequence: Synthetic peptide
QEEADEVGF

SEQ ID NO: 10100 - protein, 10 aa, synthetic construct
  REGION 1..10: note = Description of Artificial Sequence: Synthetic peptide
AEWDKTLQQV

SEQ ID NO: 10101 - protein, 11 aa, synthetic construct
  REGION 1..11: note = Description of Artificial Sequence: Synthetic peptide
QELKNSAVSLF

SEQ ID NO: 10102 - protein, 9 aa, synthetic construct
  REGION 1..9: note = Description of Artificial Sequence: Synthetic peptide
SEGATPQDL

SEQ ID NO: 10103 - protein, 11 aa, synthetic construct
  REGION 1..11: note = Description of Artificial Sequence: Synthetic peptide
AEIQKQGHGQW

SEQ ID NO: 10104 - protein, 11 aa, synthetic construct
  REGION 1..11: note = Description of Artificial Sequence: Synthetic peptide
SEVVSQIIEQL

SEQ ID NO: 10105 - protein, 11 aa, synthetic construct
  REGION 1..11: note = Description of Artificial Sequence: Synthetic peptide
SELVNQIIEQL

SEQ ID NO: 10106 - protein, 9 aa, synthetic construct
  REGION 1..9: note = Description of Artificial Sequence: Synthetic peptide
SESELVSQI

SEQ ID NO: 10107 - protein, 10 aa, synthetic construct
  REGION 1..10: note = Description of Artificial Sequence: Synthetic peptide
SESEIVNQII

SEQ ID NO: 10108 - protein, 9 aa, synthetic construct
  REGION 1..9: note = Description of Artificial Sequence: Synthetic peptide
QELYPLTSL

SEQ ID NO: 10109 - protein, 10 aa, synthetic construct
  REGION 1..10: note = Description of Artificial Sequence: Synthetic peptide
AEAMSQATNV

SEQ ID NO: 10110 - protein, 11 aa, synthetic construct
  REGION 1..11: note = Description of Artificial Sequence: Synthetic peptide
AEVTGDIRKAY

SEQ ID NO: 10111 - protein, 9 aa, synthetic construct
  REGION 1..9: note = Description of Artificial Sequence: Synthetic peptide
SEFNLPPVV

SEQ ID NO: 10112 - protein, 10 aa, synthetic construct
  REGION 1..10: note = Description of Artificial Sequence: Synthetic peptide
AEGTDRVIEI

SEQ ID NO: 10113 - protein, 9 aa, synthetic construct
  REGION 1..9: note = Description of Artificial Sequence: Synthetic peptide
AERILGTYL

SEQ ID NO: 10114 - protein, 9 aa, synthetic construct
  REGION 1..9: note = Description of Artificial Sequence: Synthetic peptide
QEESDEVGF

SEQ ID NO: 10115 - protein, 8 aa, synthetic construct
  REGION 1..8: note = Description of Artificial Sequence: Synthetic peptide
AEKLGNLL

SEQ ID NO: 10116 - protein, 10 aa, synthetic construct
  REGION 1..10: note = Description of Artificial Sequence: Synthetic peptide
QELRNSASSL

SEQ ID NO: 10117 - protein, 9 aa, synthetic construct
  REGION 1..9: note = Description of Artificial Sequence: Synthetic peptide
QEKNEQELL

SEQ ID NO: 10118 - protein, 10 aa, synthetic construct
  REGION 1..10: note = Description of Artificial Sequence: Synthetic peptide
TETNNSTITI

SEQ ID NO: 10119 - protein, 10 aa, synthetic construct
  REGION 1..10: note = Description of Artificial Sequence: Synthetic peptide
TELQKQITKI

SEQ ID NO: 10120 - protein, 11 aa, synthetic construct
  REGION 1..11: note = Description of Artificial Sequence: Synthetic peptide
QELRNSASSLF

SEQ ID NO: 10121 - protein, 11 aa, synthetic construct
  REGION 1..11: note = Description of Artificial Sequence: Synthetic peptide
SELVSQIIEQL

SEQ ID NO: 10122 - protein, 9 aa, synthetic construct
  REGION 1..9: note = Description of Artificial Sequence: Synthetic peptide
KEAVDLSHF

SEQ ID NO: 10123 - protein, 9 aa, synthetic construct
  REGION 1..9: note = Description of Artificial Sequence: Synthetic peptide
SELEKEGKI

SEQ ID NO: 10124 - protein, 11 aa, synthetic construct
  REGION 1..11: note = Description of Artificial Sequence: Synthetic peptide
AERQRPGTVSF

SEQ ID NO: 10125 - protein, 9 aa, synthetic construct
  REGION 1..9: note = Description of Artificial Sequence: Synthetic peptide
KELYPSASL

SEQ ID NO: 10126 - protein, 9 aa, synthetic construct
  REGION 1..9: note = Description of Artificial Sequence: Synthetic peptide
TEGETNSLL

SEQ ID NO: 10127 - protein, 10 aa, synthetic construct
  REGION 1..10: note = Description of Artificial Sequence: Synthetic peptide
VESKAEADRF

SEQ ID NO: 10128 - protein, 11 aa, synthetic construct
  REGION 1..11: note = Description of Artificial Sequence: Synthetic peptide
KETINEEAAEW

SEQ ID NO: 10129 - protein, 11 aa, synthetic construct
  REGION 1..11: note = Description of Artificial Sequence: Synthetic peptide
QELKNSAISLL

SEQ ID NO: 10130 - protein, 8 aa, synthetic construct
  REGION 1..8: note = Description of Artificial Sequence: Synthetic peptide
YESPHPKI

SEQ ID NO: 10131 - protein, 11 aa, synthetic construct
  REGION 1..11: note = Description of Artificial Sequence: Synthetic peptide
AEEVMVRSENL

SEQ ID NO: 10132 - protein, 11 aa, synthetic construct
  REGION 1..11: note = Description of Artificial Sequence: Synthetic peptide
LEVNIVTDSQY

SEQ ID NO: 10133 - protein, 10 aa, synthetic construct
  REGION 1..10: note = Description of Artificial Sequence: Synthetic peptide
SESEVVSQII

SEQ ID NO: 10134 - protein, 9 aa, synthetic construct
  REGION 1..9: note = Description of Artificial Sequence: Synthetic peptide
EELSTLVEM

SEQ ID NO: 10135 - protein, 9 aa, synthetic construct
  REGION 1..9: note = Description of Artificial Sequence: Synthetic peptide
VTKGLGISY

SEQ ID NO: 10136 - protein, 9 aa, synthetic construct
  REGION 1..9: note = Description of Artificial Sequence: Synthetic peptide
ITKGLGISY

SEQ ID NO: 10137 - protein, 9 aa, synthetic construct
  REGION 1..9: note = Description of Artificial Sequence: Synthetic peptide
ATNSVTTAM

SEQ ID NO: 10138 - protein, 10 aa, synthetic construct
  REGION 1..10: note = Description of Artificial Sequence: Synthetic peptide
ILKEPVHGAY

SEQ ID NO: 10139 - protein, 11 aa, synthetic construct
  REGION 1..11: note = Description of Artificial Sequence: Synthetic peptide
KSINLGPGQAF

SEQ ID NO: 10140 - protein, 10 aa, synthetic construct
  REGION 1..10: note = Description of Artificial Sequence: Synthetic peptide
ILKEPVHGVY

SEQ ID NO: 10141 - protein, 10 aa, synthetic construct
  REGION 1..10: note = Description of Artificial Sequence: Synthetic peptide
AINSSQNETF

SEQ ID NO: 10142 - protein, 10 aa, synthetic construct
  REGION 1..10: note = Description of Artificial Sequence: Synthetic peptide
SINLGPGQAF

SEQ ID NO: 10143 - protein, 9 aa, synthetic construct
  REGION 1..9: note = Description of Artificial Sequence: Synthetic peptide
QIKPPLPSV

SEQ ID NO: 10144 - protein, 9 aa, synthetic construct
  REGION 1..9: note = Description of Artificial Sequence: Synthetic peptide
RQRPGTVSF

SEQ ID NO: 10145 - protein, 9 aa, synthetic construct
  REGION 1..9: note = Description of Artificial Sequence: Synthetic peptide
FLGTAGSTM

SEQ ID NO: 10146 - protein, 10 aa, synthetic construct
  REGION 1..10: note = Description of Artificial Sequence: Synthetic peptide
FTKKGLGVSY

SEQ ID NO: 10147 - protein, 9 aa, synthetic construct
  REGION 1..9: note = Description of Artificial Sequence: Synthetic peptide
GQKAIGTVL

SEQ ID NO: 10148 - protein, 8 aa, synthetic construct
  REGION 1..8: note = Description of Artificial Sequence: Synthetic peptide
GQMVHQAL

SEQ ID NO: 10149 - protein, 9 aa, synthetic construct
  REGION 1..9: note = Description of Artificial Sequence: Synthetic peptide
YQSNPPPSL

SEQ ID NO: 10150 - protein, 8 aa, synthetic construct
  REGION 1..8: note = Description of Artificial Sequence: Synthetic peptide
HKAIGTVL

SEQ ID NO: 10151 - protein, 8 aa, synthetic construct
  REGION 1..8: note = Description of Artificial Sequence: Synthetic peptide
HQAAMQML

SEQ ID NO: 10152 - protein, 9 aa, synthetic construct
  REGION 1..9: note = Description of Artificial Sequence: Synthetic peptide
HQAISPRTL

SEQ ID NO: 10153 - protein, 9 aa, synthetic construct
  REGION 1..9: note = Description of Artificial Sequence: Synthetic peptide
KALGPGATL

SEQ ID NO: 10154 - protein, 9 aa, synthetic construct
  REGION 1..9: note = Description of Artificial Sequence: Synthetic peptide
TRIGPGQAL

SEQ ID NO: 10155 - protein, 9 aa, synthetic construct
  REGION 1..9: note = Description of Artificial Sequence: Synthetic peptide
IKPVVSTQL

SEQ ID NO: 10156 - protein, 8 aa, synthetic construct
  REGION 1..8: note = Description of Artificial Sequence: Synthetic peptide
AKNIIVQL

SEQ ID NO: 10157 - protein, 9 aa, synthetic construct
  REGION 1..9: note = Description of Artificial Sequence: Synthetic peptide
RAIEAQQHL

SEQ ID NO: 10158 - protein, 8 aa, synthetic construct
  REGION 1..8: note = Description of Artificial Sequence: Synthetic peptide
CQVKGEAL

SEQ ID NO: 10159 - protein, 10 aa, synthetic construct
  REGION 1..10: note = Description of Artificial Sequence: Synthetic peptide
SLFGNDPLSQ

SEQ ID NO: 10160 - protein, 8 aa, synthetic construct
  REGION 1..8: note = Description of Artificial Sequence: Synthetic peptide
KQLQARVL

SEQ ID NO: 10161 - protein, 10 aa, synthetic construct
  REGION 1..10: note = Description of Artificial Sequence: Synthetic peptide
GVVESMNNQL

SEQ ID NO: 10162 - protein, 9 aa, synthetic construct
  REGION 1..9: note = Description of Artificial Sequence: Synthetic peptide
SEFNLPPVV

SEQ ID NO: 10163 - protein, 10 aa, synthetic construct
  REGION 1..10: note = Description of Artificial Sequence: Synthetic peptide
AEWDKTLQQV

SEQ ID NO: 10164 - protein, 9 aa, synthetic construct
  REGION 1..9: note = Description of Artificial Sequence: Synthetic peptide
NESVPINCI

SEQ ID NO: 10165 - protein, 9 aa, synthetic construct
  REGION 1..9: note = Description of Artificial Sequence: Synthetic peptide
REIENYTGV

SEQ ID NO: 10166 - protein, 9 aa, synthetic construct
  REGION 1..9: note = Description of Artificial Sequence: Synthetic peptide
KEIDNYTGV

SEQ ID NO: 10167 - protein, 9 aa, synthetic construct
  REGION 1..9: note = Description of Artificial Sequence: Synthetic peptide
SESEIVNQI

SEQ ID NO: 10168 - protein, 8 aa, synthetic construct
  REGION 1..8: note = Description of Artificial Sequence: Synthetic peptide
YESPHPKI

SEQ ID NO: 10169 - protein, 9 aa, synthetic construct
  REGION 1..9: note = Description of Artificial Sequence: Synthetic peptide
SESEVVSQI

SEQ ID NO: 10170 - protein, 9 aa, synthetic construct
  REGION 1..9: note = Description of Artificial Sequence: Synthetic peptide
SESELVNQI

SEQ ID NO: 10171 - protein, 8 aa, synthetic construct
  REGION 1..8: note = Description of Artificial Sequence: Synthetic peptide
YETEAHNI

SEQ ID NO: 10172 - protein, 9 aa, synthetic construct
  REGION 1..9: note = Description of Artificial Sequence: Synthetic peptide
SESELVSQI

SEQ ID NO: 10173 - protein, 10 aa, synthetic construct
  REGION 1..10: note = Description of Artificial Sequence: Synthetic peptide
CEYPAGHNKV

SEQ ID NO: 10174 - protein, 9 aa, synthetic construct
  REGION 1..9: note = Description of Artificial Sequence: Synthetic peptide
TEMEKEGKI

SEQ ID NO: 10175 - protein, 10 aa, synthetic construct
  REGION 1..10: note = Description of Artificial Sequence: Synthetic peptide
AEIFGFGEEI

SEQ ID NO: 10176 - protein, 10 aa, synthetic construct
  REGION 1..10: note = Description of Artificial Sequence: Synthetic peptide
AEIFGLGEEI

SEQ ID NO: 10177 - protein, 10 aa, synthetic construct
  REGION 1..10: note = Description of Artificial Sequence: Synthetic peptide
KEIDNYTGVI

SEQ ID NO: 10178 - protein, 8 aa, synthetic construct
  REGION 1..8: note = Description of Artificial Sequence: Synthetic peptide
SEVVSQII

SEQ ID NO: 10179 - protein, 10 aa, synthetic construct
  REGION 1..10: note = Description of Artificial Sequence: Synthetic peptide
CEYQAGHNKV

SEQ ID NO: 10180 - protein, 10 aa, synthetic construct
  REGION 1..10: note = Description of Artificial Sequence: Synthetic peptide
REIENYTGVI

SEQ ID NO: 10181 - protein, 11 aa, synthetic construct
  REGION 1..11: note = Description of Artificial Sequence: Synthetic peptide
AEAMSQATNSV

SEQ ID NO: 10182 - protein, 10 aa, synthetic construct
  REGION 1..10: note = Description of Artificial Sequence: Synthetic peptide
EEIKSLYNTV

SEQ ID NO: 10183 - protein, 10 aa, synthetic construct
  REGION 1..10: note = Description of Artificial Sequence: Synthetic peptide
TETNNSTITI

SEQ ID NO: 10184 - protein, 10 aa, synthetic construct
  REGION 1..10: note = Description of Artificial Sequence: Synthetic peptide
EELKSLFNTV

SEQ ID NO: 10185 - protein, 9 aa, synthetic construct
  REGION 1..9: note = Description of Artificial Sequence: Synthetic peptide
AEVIPSETG

SEQ ID NO: 10186 - protein, 10 aa, synthetic construct
  REGION 1..10: note = Description of Artificial Sequence: Synthetic peptide
AEAMSQATNV

SEQ ID NO: 10187 - protein, 8 aa, synthetic construct
  REGION 1..8: note = Description of Artificial Sequence: Synthetic peptide
IENYTGVI

SEQ ID NO: 10188 - protein, 9 aa, synthetic construct
  REGION 1..9: note = Description of Artificial Sequence: Synthetic peptide
AERQGQGTV

SEQ ID NO: 10189 - protein, 9 aa, synthetic construct
  REGION 1..9: note = Description of Artificial Sequence: Synthetic peptide
QELYPLTSL

SEQ ID NO: 10190 - protein, 9 aa, synthetic construct
  REGION 1..9: note = Description of Artificial Sequence: Synthetic peptide
REIDNYTEL

SEQ ID NO: 10191 - protein, 8 aa, synthetic construct
  REGION 1..8: note = Description of Artificial Sequence: Synthetic peptide
SEIVNQII

SEQ ID NO: 10192 - protein, 11 aa, synthetic construct
  REGION 1..11: note = Description of Artificial Sequence: Synthetic peptide
AELELAENREI

SEQ ID NO: 10193 - protein, 8 aa, synthetic construct
  REGION 1..8: note = Description of Artificial Sequence: Synthetic peptide
SELVSQII

SEQ ID NO: 10194 - protein, 9 aa, synthetic construct
  REGION 1..9: note = Description of Artificial Sequence: Synthetic peptide
MEDPERQVL

SEQ ID NO: 10195 - protein, 9 aa, synthetic construct
  REGION 1..9: note = Description of Artificial Sequence: Synthetic peptide
REFPSEQTP

SEQ ID NO: 10196 - protein, 8 aa, synthetic construct
  REGION 1..8: note = Description of Artificial Sequence: Synthetic peptide
DEDLLKTI

SEQ ID NO: 10197 - protein, 8 aa, synthetic construct
  REGION 1..8: note = Description of Artificial Sequence: Synthetic peptide
AEQLWVTI

SEQ ID NO: 10198 - protein, 9 aa, synthetic construct
  REGION 1..9: note = Description of Artificial Sequence: Synthetic peptide
IEICGQKAI

SEQ ID NO: 10199 - protein, 9 aa, synthetic construct
  REGION 1..9: note = Description of Artificial Sequence: Synthetic peptide
FEEPVPLQL

SEQ ID NO: 10200 - protein, 9 aa, synthetic construct
  REGION 1..9: note = Description of Artificial Sequence: Synthetic peptide
REIDNYTGL

SEQ ID NO: 10201 - protein, 10 aa, synthetic construct
  REGION 1..10: note = Description of Artificial Sequence: Synthetic peptide
REIDNYTGLI

SEQ ID NO: 10202 - protein, 8 aa, synthetic construct
  REGION 1..8: note = Description of Artificial Sequence: Synthetic peptide
TETNNSTI

SEQ ID NO: 10203 - protein, 9 aa, synthetic construct
  REGION 1..9: note = Description of Artificial Sequence: Synthetic peptide
QEVGKAMYA

SEQ ID NO: 10204 - protein, 10 aa, synthetic construct
  REGION 1..10: note = Description of Artificial Sequence: Synthetic peptide
AESFGFGEEI

SEQ ID NO: 10205 - protein, 9 aa, synthetic construct
  REGION 1..9: note = Description of Artificial Sequence: Synthetic peptide
SELEKEGKI

SEQ ID NO: 10206 - protein, 10 aa, synthetic construct
  REGION 1..10: note = Description of Artificial Sequence: Synthetic peptide
TELQKQITKI

SEQ ID NO: 10207 - protein, 9 aa, synthetic construct
  REGION 1..9: note = Description of Artificial Sequence: Synthetic peptide
SESAIRKAI

SEQ ID NO: 10208 - protein, 9 aa, synthetic construct
  REGION 1..9: note = Description of Artificial Sequence: Synthetic peptide
AEAMSQATA

SEQ ID NO: 10209 - protein, 9 aa, synthetic construct
  REGION 1..9: note = Description of Artificial Sequence: Synthetic peptide
REFPSEQTP

SEQ ID NO: 10210 - protein, 9 aa, synthetic construct
  REGION 1..9: note = Description of Artificial Sequence: Synthetic peptide
IEVKDTKEA

SEQ ID NO: 10211 - protein, 9 aa, synthetic construct
  REGION 1..9: note = Description of Artificial Sequence: Synthetic peptide
LEKEPIVGA

SEQ ID NO: 10212 - protein, 10 aa, synthetic construct
  REGION 1..10: note = Description of Artificial Sequence: Synthetic peptide
SEFNLPPVVA

SEQ ID NO: 10213 - protein, 9 aa, synthetic construct
  REGION 1..9: note = Description of Artificial Sequence: Synthetic peptide
SEFNLPPVV

SEQ ID NO: 10214 - protein, 9 aa, synthetic construct
  REGION 1..9: note = Description of Artificial Sequence: Synthetic peptide
LEKEPIIGA

SEQ ID NO: 10215 - protein, 10 aa, synthetic construct
  REGION 1..10: note = Description of Artificial Sequence: Synthetic peptide
AEVTGDIRKA

SEQ ID NO: 10216 - protein, 9 aa, synthetic construct
  REGION 1..9: note = Description of Artificial Sequence: Synthetic peptide
AETFYVDGA

SEQ ID NO: 10217 - protein, 11 aa, synthetic construct
  REGION 1..11: note = Description of Artificial Sequence: Synthetic peptide
AEWDKTLQQVA

SEQ ID NO: 10218 - protein, 9 aa, synthetic construct
  REGION 1..9: note = Description of Artificial Sequence: Synthetic peptide
EEVGFPVTP

SEQ ID NO: 10219 - protein, 10 aa, synthetic construct
  REGION 1..10: note = Description of Artificial Sequence: Synthetic peptide
SEVHIPLGEA

SEQ ID NO: 10220 - protein, 10 aa, synthetic construct
  REGION 1..10: note = Description of Artificial Sequence: Synthetic peptide
TEIIPLTKEA

SEQ ID NO: 10221 - protein, 9 aa, synthetic construct
  REGION 1..9: note = Description of Artificial Sequence: Synthetic peptide
RVIEIIQRA

SEQ ID NO: 10222 - protein, 9 aa, synthetic construct
  REGION 1..9: note = Description of Artificial Sequence: Synthetic peptide
KVIGDIRQA

SEQ ID NO: 10223 - protein, 10 aa, synthetic construct
  REGION 1..10: note = Description of Artificial Sequence: Synthetic peptide
RELPSEQTRA

SEQ ID NO: 10224 - protein, 8 aa, synthetic construct
  REGION 1..8: note = Description of Artificial Sequence: Synthetic peptide
TEVIPLTA

SEQ ID NO: 10225 - protein, 9 aa, synthetic construct
  REGION 1..9: note = Description of Artificial Sequence: Synthetic peptide
VVAKEIVAC

SEQ ID NO: 10226 - protein, 9 aa, synthetic construct
  REGION 1..9: note = Description of Artificial Sequence: Synthetic peptide
VVSQIIEQL

SEQ ID NO: 10227 - protein, 9 aa, synthetic construct
  REGION 1..9: note = Description of Artificial Sequence: Synthetic peptide
QEVGKAMYA

SEQ ID NO: 10228 - protein, 10 aa, synthetic construct
  REGION 1..10: note = Description of Artificial Sequence: Synthetic peptide
TEVIPLTKEA

SEQ ID NO: 10229 - protein, 10 aa, synthetic construct
  REGION 1..10: note = Description of Artificial Sequence: Synthetic peptide
AEWDKTLQQV

SEQ ID NO: 10230 - protein, 9 aa, synthetic construct
  REGION 1..9: note = Description of Artificial Sequence: Synthetic peptide
TETLLVQNA

SEQ ID NO: 10231 - protein, 10 aa, synthetic construct
  REGION 1..10: note = Description of Artificial Sequence: Synthetic peptide
TEVIPLTAEA

SEQ ID NO: 10232 - protein, 9 aa, synthetic construct
  REGION 1..9: note = Description of Artificial Sequence: Synthetic peptide
LVSQIIEQL

SEQ ID NO: 10233 - protein, 10 aa, synthetic construct
  REGION 1..10: note = Description of Artificial Sequence: Synthetic peptide
AEAMSQATNA

SEQ ID NO: 10234 - protein, 10 aa, synthetic construct
  REGION 1..10: note = Description of Artificial Sequence: Synthetic peptide
AETFYVDGAA

SEQ ID NO: 10235 - protein, 9 aa, synthetic construct
  REGION 1..9: note = Description of Artificial Sequence: Synthetic peptide
ATLEEMMTA

SEQ ID NO: 10236 - protein, 9 aa, synthetic construct
  REGION 1..9: note = Description of Artificial Sequence: Synthetic peptide
REIENYTGV

SEQ ID NO: 10237 - protein, 9 aa, synthetic construct
  REGION 1..9: note = Description of Artificial Sequence: Synthetic peptide
AMFLGFLGA

SEQ ID NO: 10238 - protein, 9 aa, synthetic construct
  REGION 1..9: note = Description of Artificial Sequence: Synthetic peptide
CTTSVITQA

SEQ ID NO: 10239 - protein, 11 aa, synthetic construct
  REGION 1..11: note = Description of Artificial Sequence: Synthetic peptide
TQIDPGLADQL

SEQ ID NO: 10240 - protein, 9 aa, synthetic construct
  REGION 1..9: note = Description of Artificial Sequence: Synthetic peptide
ASVTLTVQA

SEQ ID NO: 10241 - protein, 10 aa, synthetic construct
  REGION 1..10: note = Description of Artificial Sequence: Synthetic peptide
REQAEHLKTA

SEQ ID NO: 10242 - protein, 9 aa, synthetic construct
  REGION 1..9: note = Description of Artificial Sequence: Synthetic peptide
LEGKGILVA

SEQ ID NO: 10243 - protein, 9 aa, synthetic construct
  REGION 1..9: note = Description of Artificial Sequence: Synthetic peptide
RIIEIIQRA

SEQ ID NO: 10244 - protein, 10 aa, synthetic construct
  REGION 1..10: note = Description of Artificial Sequence: Synthetic peptide
REFPSEQTPS

SEQ ID NO: 10245 - protein, 9 aa, synthetic construct
  REGION 1..9: note = Description of Artificial Sequence: Synthetic peptide
EEVGFPVRP

SEQ ID NO: 10246 - protein, 9 aa, synthetic construct
  REGION 1..9: note = Description of Artificial Sequence: Synthetic peptide
AVAEGTDRV

SEQ ID NO: 10247 - protein, 9 aa, synthetic construct
  REGION 1..9: note = Description of Artificial Sequence: Synthetic peptide
TEIIPLTKE

SEQ ID NO: 10248 - protein, 10 aa, synthetic construct
  REGION 1..10: note = Description of Artificial Sequence: Synthetic peptide
GELSPKQTRA

SEQ ID NO: 10249 - protein, 11 aa, synthetic construct
  REGION 1..11: note = Description of Artificial Sequence: Synthetic peptide
AEWDRLHPVQA

SEQ ID NO: 10250 - protein, 9 aa, synthetic construct
  REGION 1..9: note = Description of Artificial Sequence: Synthetic peptide
GETNSLLHP

SEQ ID NO: 10251 - protein, 9 aa, synthetic construct
  REGION 1..9: note = Description of Artificial Sequence: Synthetic peptide
KEIDNYTGV

SEQ ID NO: 10252 - protein, 8 aa, synthetic construct
  REGION 1..8: note = Description of Artificial Sequence: Synthetic peptide
TAFTISSI

SEQ ID NO: 10253 - protein, 9 aa, synthetic construct
  REGION 1..9: note = Description of Artificial Sequence: Synthetic peptide
FPISPIATV

SEQ ID NO: 10254 - protein, 9 aa, synthetic construct
  REGION 1..9: note = Description of Artificial Sequence: Synthetic peptide
FPISPIETV

SEQ ID NO: 10255 - protein, 8 aa, synthetic construct
  REGION 1..8: note = Description of Artificial Sequence: Synthetic peptide
VPNETITI

SEQ ID NO: 10256 - protein, 9 aa, synthetic construct
  REGION 1..9: note = Description of Artificial Sequence: Synthetic peptide
EAMSQATNV

SEQ ID NO: 10257 - protein, 9 aa, synthetic construct
  REGION 1..9: note = Description of Artificial Sequence: Synthetic peptide
SAVSLFNTI

SEQ ID NO: 10258 - protein, 8 aa, synthetic construct
  REGION 1..8: note = Description of Artificial Sequence: Synthetic peptide
TAIAALVI

SEQ ID NO: 10259 - protein, 8 aa, synthetic construct
  REGION 1..8: note = Description of Artificial Sequence: Synthetic peptide
VPMEPKEV

SEQ ID NO: 10260 - protein, 9 aa, synthetic construct
  REGION 1..9: note = Description of Artificial Sequence: Synthetic peptide
LPPIIAKEI

SEQ ID NO: 10261 - protein, 9 aa, synthetic construct
  REGION 1..9: note = Description of Artificial Sequence: Synthetic peptide
IAALVIASI

SEQ ID NO: 10262 - protein, 10 aa, synthetic construct
  REGION 1..10: note = Description of Artificial Sequence: Synthetic peptide
IPYNPQSQGV

SEQ ID NO: 10263 - protein, 8 aa, synthetic construct
  REGION 1..8: note = Description of Artificial Sequence: Synthetic peptide
TPLEITAI

SEQ ID NO: 10264 - protein, 9 aa, synthetic construct
  REGION 1..9: note = Description of Artificial Sequence: Synthetic peptide
LPSVVAKEI

SEQ ID NO: 10265 - protein, 8 aa, synthetic construct
  REGION 1..8: note = Description of Artificial Sequence: Synthetic peptide
VALVVALI

SEQ ID NO: 10266 - protein, 9 aa, synthetic construct
  REGION 1..9: note = Description of Artificial Sequence: Synthetic peptide
LPPVVAKEI

SEQ ID NO: 10267 - protein, 8 aa, synthetic construct
  REGION 1..8: note = Description of Artificial Sequence: Synthetic peptide
APPIAGLI

SEQ ID NO: 10268 - protein, 8 aa, synthetic construct
  REGION 1..8: note = Description of Artificial Sequence: Synthetic peptide
IAIAALVV

SEQ ID NO: 10269 - protein, 8 aa, synthetic construct
  REGION 1..8: note = Description of Artificial Sequence: Synthetic peptide
VPVDPKEV

SEQ ID NO: 10270 - protein, 9 aa, synthetic construct
  REGION 1..9: note = Description of Artificial Sequence: Synthetic peptide
TALIAPKQI

SEQ ID NO: 10271 - protein, 8 aa, synthetic construct
  REGION 1..8: note = Description of Artificial Sequence: Synthetic peptide
VPVDPQEV

SEQ ID NO: 10272 - protein, 9 aa, synthetic construct
  REGION 1..9: note = Description of Artificial Sequence: Synthetic peptide
NPPVPVGEI

SEQ ID NO: 10273 - protein, 9 aa, synthetic construct
  REGION 1..9: note = Description of Artificial Sequence: Synthetic peptide
IPLGDARLV

SEQ ID NO: 10274 - protein, 8 aa, synthetic construct
  REGION 1..8: note = Description of Artificial Sequence: Synthetic peptide
QPLEILAI

SEQ ID NO: 10275 - protein, 8 aa, synthetic construct
  REGION 1..8: note = Description of Artificial Sequence: Synthetic peptide
TAYFILKL

SEQ ID NO: 10276 - protein, 9 aa, synthetic construct
  REGION 1..9: note = Description of Artificial Sequence: Synthetic peptide
YAPPIAGLI

SEQ ID NO: 10277 - protein, 9 aa, synthetic construct
  REGION 1..9: note = Description of Artificial Sequence: Synthetic peptide
VGFPVTPQV

SEQ ID NO: 10278 - protein, 8 aa, synthetic construct
  REGION 1..8: note = Description of Artificial Sequence: Synthetic peptide
YATYATNI

SEQ ID NO: 10279 - protein, 8 aa, synthetic construct
  REGION 1..8: note = Description of Artificial Sequence: Synthetic peptide
YPAGHNKV

SEQ ID NO: 10280 - protein, 9 aa, synthetic construct
  REGION 1..9: note = Description of Artificial Sequence: Synthetic peptide
VALVAALII

SEQ ID NO: 10281 - protein, 9 aa, synthetic construct
  REGION 1..9: note = Description of Artificial Sequence: Synthetic peptide
NPPIPVGEI

SEQ ID NO: 10282 - protein, 11 aa, synthetic construct
  REGION 1..11: note = Description of Artificial Sequence: Synthetic peptide
IPYNPQSQGVV

SEQ ID NO: 10283 - protein, 8 aa, synthetic construct
  REGION 1..8: note = Description of Artificial Sequence: Synthetic peptide
IAALVVAI

SEQ ID NO: 10284 - protein, 8 aa, synthetic construct
  REGION 1..8: note = Description of Artificial Sequence: Synthetic peptide
SPVSILDI

SEQ ID NO: 10285 - protein, 8 aa, synthetic construct
  REGION 1..8: note = Description of Artificial Sequence: Synthetic peptide
VALVAALI

SEQ ID NO: 10286 - protein, 10 aa, synthetic construct
  REGION 1..10: note = Description of Artificial Sequence: Synthetic peptide
IPLGEARLVV

SEQ ID NO: 10287 - protein, 8 aa, synthetic construct
  REGION 1..8: note = Description of Artificial Sequence: Synthetic peptide
VSFNLPQI

SEQ ID NO: 10288 - protein, 9 aa, synthetic construct
  REGION 1..9: note = Description of Artificial Sequence: Synthetic peptide
HPVHAGPVA

SEQ ID NO: 10289 - protein, 9 aa, synthetic construct
  REGION 1..9: note = Description of Artificial Sequence: Synthetic peptide
HPVQAGPVA

SEQ ID NO: 10290 - protein, 9 aa, synthetic construct
  REGION 1..9: note = Description of Artificial Sequence: Synthetic peptide
FPISPIATV

SEQ ID NO: 10291 - protein, 9 aa, synthetic construct
  REGION 1..9: note = Description of Artificial Sequence: Synthetic peptide
FPISPIETV

SEQ ID NO: 10292 - protein, 9 aa, synthetic construct
  REGION 1..9: note = Description of Artificial Sequence: Synthetic peptide
EPIGLAPTA

SEQ ID NO: 10293 - protein, 9 aa, synthetic construct
  REGION 1..9: note = Description of Artificial Sequence: Synthetic peptide
HPVHAGPIA

SEQ ID NO: 10294 - protein, 10 aa, synthetic construct
  REGION 1..10: note = Description of Artificial Sequence: Synthetic peptide
TPLEITAIAA

SEQ ID NO: 10295 - protein, 9 aa, synthetic construct
  REGION 1..9: note = Description of Artificial Sequence: Synthetic peptide
TPLEITAIA

SEQ ID NO: 10296 - protein, 9 aa, synthetic construct
  REGION 1..9: note = Description of Artificial Sequence: Synthetic peptide
QPLGIIAIA

SEQ ID NO: 10297 - protein, 10 aa, synthetic construct
  REGION 1..10: note = Description of Artificial Sequence: Synthetic peptide
EPIGLAPTAA

SEQ ID NO: 10298 - protein, 11 aa, synthetic construct
  REGION 1..11: note = Description of Artificial Sequence: Synthetic peptide
LPSVVAKEIVA

SEQ ID NO: 10299 - protein, 10 aa, synthetic construct
  REGION 1..10: note = Description of Artificial Sequence: Synthetic peptide
QPLEILAIVA

SEQ ID NO: 10300 - protein, 9 aa, synthetic construct
  REGION 1..9: note = Description of Artificial Sequence: Synthetic peptide
EPIPIHYCA

SEQ ID NO: 10301 - protein, 9 aa, synthetic construct
  REGION 1..9: note = Description of Artificial Sequence: Synthetic peptide
HVASGYIEA

SEQ ID NO: 10302 - protein, 10 aa, synthetic construct
  REGION 1..10: note = Description of Artificial Sequence: Synthetic peptide
QPLGIIAIAA

SEQ ID NO: 10303 - protein, 9 aa, synthetic construct
  REGION 1..9: note = Description of Artificial Sequence: Synthetic peptide
NPYNTPIFA

SEQ ID NO: 10304 - protein, 9 aa, synthetic construct
  REGION 1..9: note = Description of Artificial Sequence: Synthetic peptide
HPGSQPSTA

SEQ ID NO: 10305 - protein, 10 aa, synthetic construct
  REGION 1..10: note = Description of Artificial Sequence: Synthetic peptide
EPLGVAPTRA

SEQ ID NO: 10306 - protein, 11 aa, synthetic construct
  REGION 1..11: note = Description of Artificial Sequence: Synthetic peptide
FPISPIATVPV

SEQ ID NO: 10307 - protein, 9 aa, synthetic construct
  REGION 1..9: note = Description of Artificial Sequence: Synthetic peptide
QPLEILAIV

SEQ ID NO: 10308 - protein, 10 aa, synthetic construct
  REGION 1..10: note = Description of Artificial Sequence: Synthetic peptide
FPSEQTPSRA

SEQ ID NO: 10309 - protein, 11 aa, synthetic construct
  REGION 1..11: note = Description of Artificial Sequence: Synthetic peptide
LPPVVAKEIVA

SEQ ID NO: 10310 - protein, 10 aa, synthetic construct
  REGION 1..10: note = Description of Artificial Sequence: Synthetic peptide
EPIGVAPTRA

SEQ ID NO: 10311 - protein, 9 aa, synthetic construct
  REGION 1..9: note = Description of Artificial Sequence: Synthetic peptide
YPLTSLKSL

SEQ ID NO: 10312 - protein, 9 aa, synthetic construct
  REGION 1..9: note = Description of Artificial Sequence: Synthetic peptide
DAKSFDTEA

SEQ ID NO: 10313 - protein, 8 aa, synthetic construct
  REGION 1..8: note = Description of Artificial Sequence: Synthetic peptide
TAFTIPST

SEQ ID NO: 10314 - protein, 11 aa, synthetic construct
  REGION 1..11: note = Description of Artificial Sequence: Synthetic peptide
FPISPIETVPV

SEQ ID NO: 10315 - protein, 9 aa, synthetic construct
  REGION 1..9: note = Description of Artificial Sequence: Synthetic peptide
FPDWHNYTP

SEQ ID NO: 10316 - protein, 11 aa, synthetic construct
  REGION 1..11: note = Description of Artificial Sequence: Synthetic peptide
MLNTVGGHQAA

SEQ ID NO: 10317 - protein, 9 aa, synthetic construct
  REGION 1..9: note = Description of Artificial Sequence: Synthetic peptide
EAMSQATNA

SEQ ID NO: 10318 - protein, 10 aa, synthetic construct
  REGION 1..10: note = Description of Artificial Sequence: Synthetic peptide
HPVHAGPIAP

SEQ ID NO: 10319 - protein, 9 aa, synthetic construct
  REGION 1..9: note = Description of Artificial Sequence: Synthetic peptide
EATTTLFCA

SEQ ID NO: 10320 - protein, 9 aa, synthetic construct
  REGION 1..9: note = Description of Artificial Sequence: Synthetic peptide
LAIVALVAA

SEQ ID NO: 10321 - protein, 10 aa, synthetic construct
  REGION 1..10: note = Description of Artificial Sequence: Synthetic peptide
IPIEICGQKA

SEQ ID NO: 10322 - protein, 8 aa, synthetic construct
  REGION 1..8: note = Description of Artificial Sequence: Synthetic peptide
LAFPQWKA

SEQ ID NO: 10323 - protein, 10 aa, synthetic construct
  REGION 1..10: note = Description of Artificial Sequence: Synthetic peptide
HPVHAGPVAP

SEQ ID NO: 10324 - protein, 9 aa, synthetic construct
  REGION 1..9: note = Description of Artificial Sequence: Synthetic peptide
EVIPLTAEA

SEQ ID NO: 10325 - protein, 9 aa, synthetic construct
  REGION 1..9: note = Description of Artificial Sequence: Synthetic peptide
YPSASLKSL

SEQ ID NO: 10326 - protein, 9 aa, synthetic construct
  REGION 1..9: note = Description of Artificial Sequence: Synthetic peptide
FPSEQTPSR

SEQ ID NO: 10327 - protein, 8 aa, synthetic construct
  REGION 1..8: note = Description of Artificial Sequence: Synthetic peptide
VPMEPKEV

SEQ ID NO: 10328 - protein, 9 aa, synthetic construct
  REGION 1..9: note = Description of Artificial Sequence: Synthetic peptide
HPVQAGPVA

SEQ ID NO: 10329 - protein, 9 aa, synthetic construct
  REGION 1..9: note = Description of Artificial Sequence: Synthetic peptide
HPVHAGPVA

SEQ ID NO: 10330 - protein, 9 aa, synthetic construct
  REGION 1..9: note = Description of Artificial Sequence: Synthetic peptide
EPIGLAPTA

SEQ ID NO: 10331 - protein, 9 aa, synthetic construct
  REGION 1..9: note = Description of Artificial Sequence: Synthetic peptide
IPKQPSSQP

SEQ ID NO: 10332 - protein, 9 aa, synthetic construct
  REGION 1..9: note = Description of Artificial Sequence: Synthetic peptide
VPKQPSSQP

SEQ ID NO: 10333 - protein, 9 aa, synthetic construct
  REGION 1..9: note = Description of Artificial Sequence: Synthetic peptide
HPVHAGPIA

SEQ ID NO: 10334 - protein, 9 aa, synthetic construct
  REGION 1..9: note = Description of Artificial Sequence: Synthetic peptide
FPISPIATV

SEQ ID NO: 10335 - protein, 10 aa, synthetic construct
  REGION 1..10: note = Description of Artificial Sequence: Synthetic peptide
TPLEITAIAA

SEQ ID NO: 10336 - protein, 9 aa, synthetic construct
  REGION 1..9: note = Description of Artificial Sequence: Synthetic peptide
FPISPIETV

SEQ ID NO: 10337 - protein, 9 aa, synthetic construct
  REGION 1..9: note = Description of Artificial Sequence: Synthetic peptide
RPEPTAPPA

SEQ ID NO: 10338 - protein, 9 aa, synthetic construct
  REGION 1..9: note = Description of Artificial Sequence: Synthetic peptide
QPLGIIAIA

SEQ ID NO: 10339 - protein, 9 aa, synthetic construct
  REGION 1..9: note = Description of Artificial Sequence: Synthetic peptide
TPLEITAIA

SEQ ID NO: 10340 - protein, 10 aa, synthetic construct
  REGION 1..10: note = Description of Artificial Sequence: Synthetic peptide
QPLGIIAIAA

SEQ ID NO: 10341 - protein, 10 aa, synthetic construct
  REGION 1..10: note = Description of Artificial Sequence: Synthetic peptide
RPYNNTRQST

SEQ ID NO: 10342 - protein, 9 aa, synthetic construct
  REGION 1..9: note = Description of Artificial Sequence: Synthetic peptide
HPVQAGPVA

SEQ ID NO: 10343 - protein, 9 aa, synthetic construct
  REGION 1..9: note = Description of Artificial Sequence: Synthetic peptide
HPVHAGPVA

SEQ ID NO: 10344 - protein, 10 aa, synthetic construct
  REGION 1..10: note = Description of Artificial Sequence: Synthetic peptide
TPLEITAIAA

SEQ ID NO: 10345 - protein, 9 aa, synthetic construct
  REGION 1..9: note = Description of Artificial Sequence: Synthetic peptide
EPIGLAPTA

SEQ ID NO: 10346 - protein, 10 aa, synthetic construct
  REGION 1..10: note = Description of Artificial Sequence: Synthetic peptide
QPLGIIAIAA

SEQ ID NO: 10347 - protein, 9 aa, synthetic construct
  REGION 1..9: note = Description of Artificial Sequence: Synthetic peptide
FPISPIATV

SEQ ID NO: 10348 - protein, 9 aa, synthetic construct
  REGION 1..9: note = Description of Artificial Sequence: Synthetic peptide
FPISPIETV

SEQ ID NO: 10349 - protein, 10 aa, synthetic construct
  REGION 1..10: note = Description of Artificial Sequence: Synthetic peptide
EPIGLAPTAA

SEQ ID NO: 10350 - protein, 9 aa, synthetic construct
  REGION 1..9: note = Description of Artificial Sequence: Synthetic peptide
HPVHAGPIA

SEQ ID NO: 10351 - protein, 10 aa, synthetic construct
  REGION 1..10: note = Description of Artificial Sequence: Synthetic peptide
QPLEILAIVA

SEQ ID NO: 10352 - protein, 9 aa, synthetic construct
  REGION 1..9: note = Description of Artificial Sequence: Synthetic peptide
TPLEITAIA

SEQ ID NO: 10353 - protein, 9 aa, synthetic construct
  REGION 1..9: note = Description of Artificial Sequence: Synthetic peptide
QPLGIIAIA

SEQ ID NO: 10354 - protein, 10 aa, synthetic construct
  REGION 1..10: note = Description of Artificial Sequence: Synthetic peptide
IPAETGQETA

SEQ ID NO: 10355 - protein, 9 aa, synthetic construct
  REGION 1..9: note = Description of Artificial Sequence: Synthetic peptide
NPYNTPIFA

SEQ ID NO: 10356 - protein, 10 aa, synthetic construct
  REGION 1..10: note = Description of Artificial Sequence: Synthetic peptide
NPNITNNSSA

SEQ ID NO: 10357 - protein, 11 aa, synthetic construct
  REGION 1..11: note = Description of Artificial Sequence: Synthetic peptide
LPSVVAKEIVA

SEQ ID NO: 10358 - protein, 9 aa, synthetic construct
  REGION 1..9: note = Description of Artificial Sequence: Synthetic peptide
RPEPTAPPA

SEQ ID NO: 10359 - protein, 9 aa, synthetic construct
  REGION 1..9: note = Description of Artificial Sequence: Synthetic peptide
TPIGLGQSL

SEQ ID NO: 10360 - protein, 9 aa, synthetic construct
  REGION 1..9: note = Description of Artificial Sequence: Synthetic peptide
HPGSQPSTA

SEQ ID NO: 10361 - protein, 10 aa, synthetic construct
  REGION 1..10: note = Description of Artificial Sequence: Synthetic peptide
IPIEICGQKA

SEQ ID NO: 10362 - protein, 10 aa, synthetic construct
  REGION 1..10: note = Description of Artificial Sequence: Synthetic peptide
IPSETGQETA

SEQ ID NO: 10363 - protein, 10 aa, synthetic construct
  REGION 1..10: note = Description of Artificial Sequence: Synthetic peptide
FPSEQTPSRA

SEQ ID NO: 10364 - protein, 10 aa, synthetic construct
  REGION 1..10: note = Description of Artificial Sequence: Synthetic peptide
IPYNPQSQGV

SEQ ID NO: 10365 - protein, 9 aa, synthetic construct
  REGION 1..9: note = Description of Artificial Sequence: Synthetic peptide
HPVHAGPVA

SEQ ID NO: 10366 - protein, 9 aa, synthetic construct
  REGION 1..9: note = Description of Artificial Sequence: Synthetic peptide
HPVQAGPVA

SEQ ID NO: 10367 - protein, 10 aa, synthetic construct
  REGION 1..10: note = Description of Artificial Sequence: Synthetic peptide
TPLEITAIAA

SEQ ID NO: 10368 - protein, 9 aa, synthetic construct
  REGION 1..9: note = Description of Artificial Sequence: Synthetic peptide
FPISPIETV

SEQ ID NO: 10369 - protein, 9 aa, synthetic construct
  REGION 1..9: note = Description of Artificial Sequence: Synthetic peptide
FPISPIATV

SEQ ID NO: 10370 - protein, 10 aa, synthetic construct
  REGION 1..10: note = Description of Artificial Sequence: Synthetic peptide
QPLGIIAIAA

SEQ ID NO: 10371 - protein, 9 aa, synthetic construct
  REGION 1..9: note = Description of Artificial Sequence: Synthetic peptide
EPIGLAPTA

SEQ ID NO: 10372 - protein, 9 aa, synthetic construct
  REGION 1..9: note = Description of Artificial Sequence: Synthetic peptide
HPVHAGPIA

SEQ ID NO: 10373 - protein, 10 aa, synthetic construct
  REGION 1..10: note = Description of Artificial Sequence: Synthetic peptide
IPYNPQSQGV

SEQ ID NO: 10374 - protein, 10 aa, synthetic construct
  REGION 1..10: note = Description of Artificial Sequence: Synthetic peptide
APAGFAILKC

SEQ ID NO: 10375 - protein, 10 aa, synthetic construct
  REGION 1..10: note = Description of Artificial Sequence: Synthetic peptide
EPIGLAPTAA

SEQ ID NO: 10376 - protein, 9 aa, synthetic construct
  REGION 1..9: note = Description of Artificial Sequence: Synthetic peptide
QPLGIIAIA

SEQ ID NO: 10377 - protein, 9 aa, synthetic construct
  REGION 1..9: note = Description of Artificial Sequence: Synthetic peptide
TPLEITAIA

SEQ ID NO: 10378 - protein, 11 aa, synthetic construct
  REGION 1..11: note = Description of Artificial Sequence: Synthetic peptide
LPSVVAKEIVA

SEQ ID NO: 10379 - protein, 10 aa, synthetic construct
  REGION 1..10: note = Description of Artificial Sequence: Synthetic peptide
QPLEILAIVA

SEQ ID NO: 10380 - protein, 10 aa, synthetic construct
  REGION 1..10: note = Description of Artificial Sequence: Synthetic peptide
IPAETGQETA

SEQ ID NO: 10381 - protein, 10 aa, synthetic construct
  REGION 1..10: note = Description of Artificial Sequence: Synthetic peptide
RPVVTVKIGG

SEQ ID NO: 10382 - protein, 9 aa, synthetic construct
  REGION 1..9: note = Description of Artificial Sequence: Synthetic peptide
RPEPTAPPA

SEQ ID NO: 10383 - protein, 10 aa, synthetic construct
  REGION 1..10: note = Description of Artificial Sequence: Synthetic peptide
SPEVIPMFSA

SEQ ID NO: 10384 - protein, 9 aa, synthetic construct
  REGION 1..9: note = Description of Artificial Sequence: Synthetic peptide
TPIGLGQSL

SEQ ID NO: 10385 - protein, 10 aa, synthetic construct
  REGION 1..10: note = Description of Artificial Sequence: Synthetic peptide
RPLVAIKIGG

SEQ ID NO: 10386 - protein, 10 aa, synthetic construct
  REGION 1..10: note = Description of Artificial Sequence: Synthetic peptide
IPIEICGQKA

SEQ ID NO: 10387 - protein, 10 aa, synthetic construct
  REGION 1..10: note = Description of Artificial Sequence: Synthetic peptide
FPSEQTPSRA

SEQ ID NO: 10388 - protein, 10 aa, synthetic construct
  REGION 1..10: note = Description of Artificial Sequence: Synthetic peptide
RPYNNTRQST

SEQ ID NO: 10389 - protein, 8 aa, synthetic construct
  REGION 1..8: note = Description of Artificial Sequence: Synthetic peptide
VPMEPKEV

SEQ ID NO: 10390 - protein, 10 aa, synthetic construct
  REGION 1..10: note = Description of Artificial Sequence: Synthetic peptide
VPNETITIPC

SEQ ID NO: 10391 - protein, 10 aa, synthetic construct
  REGION 1..10: note = Description of Artificial Sequence: Synthetic peptide
NPNITNNSSA

SEQ ID NO: 10392 - protein, 9 aa, synthetic construct
  REGION 1..9: note = Description of Artificial Sequence: Synthetic peptide
NPYNTPIFA

SEQ ID NO: 10393 - protein, 11 aa, synthetic construct
  REGION 1..11: note = Description of Artificial Sequence: Synthetic peptide
KSFDTEAHNIW

SEQ ID NO: 10394 - protein, 9 aa, synthetic construct
  REGION 1..9: note = Description of Artificial Sequence: Synthetic peptide
TTRLFNSTW

SEQ ID NO: 10395 - protein, 9 aa, synthetic construct
  REGION 1..9: note = Description of Artificial Sequence: Synthetic peptide
ITLPEKESW

SEQ ID NO: 10396 - protein, 11 aa, synthetic construct
  REGION 1..11: note = Description of Artificial Sequence: Synthetic peptide
KSYETEAHNIW

SEQ ID NO: 10397 - protein, 10 aa, synthetic construct
  REGION 1..10: note = Description of Artificial Sequence: Synthetic peptide
GTWDNGTWTW

SEQ ID NO: 10398 - protein, 11 aa, synthetic construct
  REGION 1..11: note = Description of Artificial Sequence: Synthetic peptide
KSYKTEAHNIW

SEQ ID NO: 10399 - protein, 9 aa, synthetic construct
  REGION 1..9: note = Description of Artificial Sequence: Synthetic peptide
TSLLFNTTW

SEQ ID NO: 10400 - protein, 9 aa, synthetic construct
  REGION 1..9: note = Description of Artificial Sequence: Synthetic peptide
FSFPQITLW

SEQ ID NO: 10401 - protein, 11 aa, synthetic construct
  REGION 1..11: note = Description of Artificial Sequence: Synthetic peptide
KAYKAEAHNIW

SEQ ID NO: 10402 - protein, 9 aa, synthetic construct
  REGION 1..9: note = Description of Artificial Sequence: Synthetic peptide
STLQEQIGW

SEQ ID NO: 10403 - protein, 9 aa, synthetic construct
  REGION 1..9: note = Description of Artificial Sequence: Synthetic peptide
ASILAIVVW

SEQ ID NO: 10404 - protein, 10 aa, synthetic construct
  REGION 1..10: note = Description of Artificial Sequence: Synthetic peptide
VTIYYGVPVW

SEQ ID NO: 10405 - protein, 10 aa, synthetic construct
  REGION 1..10: note = Description of Artificial Sequence: Synthetic peptide
TTNVPWNSSW

SEQ ID NO: 10406 - protein, 9 aa, synthetic construct
  REGION 1..9: note = Description of Artificial Sequence: Synthetic peptide
ITKGLGISY

SEQ ID NO: 10407 - protein, 9 aa, synthetic construct
  REGION 1..9: note = Description of Artificial Sequence: Synthetic peptide
RIKQIINMW

SEQ ID NO: 10408 - protein, 9 aa, synthetic construct
  REGION 1..9: note = Description of Artificial Sequence: Synthetic peptide
VTKGLGISY

SEQ ID NO: 10409 - protein, 11 aa, synthetic construct
  REGION 1..11: note = Description of Artificial Sequence: Synthetic peptide
QSIKLPEKESW

SEQ ID NO: 10410 - protein, 9 aa, synthetic construct
  REGION 1..9: note = Description of Artificial Sequence: Synthetic peptide
RSIRLVNGF

SEQ ID NO: 10411 - protein, 9 aa, synthetic construct
  REGION 1..9: note = Description of Artificial Sequence: Synthetic peptide
TSGLFNSTW

SEQ ID NO: 10412 - protein, 9 aa, synthetic construct
  REGION 1..9: note = Description of Artificial Sequence: Synthetic peptide
RSVRLLNGF

SEQ ID NO: 10413 - protein, 8 aa, synthetic construct
  REGION 1..8: note = Description of Artificial Sequence: Synthetic peptide
ISKKAQGW

SEQ ID NO: 10414 - protein, 11 aa, synthetic construct
  REGION 1..11: note = Description of Artificial Sequence: Synthetic peptide
TTSTLQEQIGW

SEQ ID NO: 10415 - protein, 11 aa, synthetic construct
  REGION 1..11: note = Description of Artificial Sequence: Synthetic peptide
VSFSFPQITLW

SEQ ID NO: 10416 - protein, 9 aa, synthetic construct
  REGION 1..9: note = Description of Artificial Sequence: Synthetic peptide
TQRNYQHLW

SEQ ID NO: 10417 - protein, 10 aa, synthetic construct
  REGION 1..10: note = Description of Artificial Sequence: Synthetic peptide
KIATESIVIW

SEQ ID NO: 10418 - protein, 11 aa, synthetic construct
  REGION 1..11: note = Description of Artificial Sequence: Synthetic peptide
KSINLGPGQAF

SEQ ID NO: 10419 - protein, 9 aa, synthetic construct
  REGION 1..9: note = Description of Artificial Sequence: Synthetic peptide
ISTESIVIW

SEQ ID NO: 10420 - protein, 10 aa, synthetic construct
  REGION 1..10: note = Description of Artificial Sequence: Synthetic peptide
NTSLLFNTTW

SEQ ID NO: 10421 - protein, 10 aa, synthetic construct
  REGION 1..10: note = Description of Artificial Sequence: Synthetic peptide
NTTRLFNSTW

SEQ ID NO: 10422 - protein, 10 aa, synthetic construct
  REGION 1..10: note = Description of Artificial Sequence: Synthetic peptide
VTVYYGVPVW

SEQ ID NO: 10423 - protein, 10 aa, synthetic construct
  REGION 1..10: note = Description of Artificial Sequence: Synthetic peptide
NTSGLFNSTW

SEQ ID NO: 10424 - protein, 11 aa, synthetic construct
  REGION 1..11: note = Description of Artificial Sequence: Synthetic peptide
KAFNPEVIPMF

SEQ ID NO: 10425 - protein, 9 aa, synthetic construct
  REGION 1..9: note = Description of Artificial Sequence: Synthetic peptide
KTEADPFDW

SEQ ID NO: 10426 - protein, 10 aa, synthetic construct
  REGION 1..10: note = Description of Artificial Sequence: Synthetic peptide
IQNLVERLNW

SEQ ID NO: 10427 - protein, 9 aa, synthetic construct
  REGION 1..9: note = Description of Artificial Sequence: Synthetic peptide
RVMGIERNY

SEQ ID NO: 10428 - protein, 9 aa, synthetic construct
  REGION 1..9: note = Description of Artificial Sequence: Synthetic peptide
RVMETQRNY

SEQ ID NO: 10429 - protein, 11 aa, synthetic construct
  REGION 1..11: note = Description of Artificial Sequence: Synthetic peptide
VSFNLPQITLW

SEQ ID NO: 10430 - protein, 9 aa, synthetic construct
  REGION 1..9: note = Description of Artificial Sequence: Synthetic peptide
IALEGIVIW

SEQ ID NO: 10431 - protein, 11 aa, synthetic construct
  REGION 1..11: note = Description of Artificial Sequence: Synthetic peptide
KSLFNTVATLY

SEQ ID NO: 10432 - protein, 10 aa, synthetic construct
  REGION 1..10: note = Description of Artificial Sequence: Synthetic peptide
KSFDTEAHNI

SEQ ID NO: 10433 - protein, 11 aa, synthetic construct
  REGION 1..11: note = Description of Artificial Sequence: Synthetic peptide
SVLSGGKLDEW

SEQ ID NO: 10434 - protein, 11 aa, synthetic construct
  REGION 1..11: note = Description of Artificial Sequence: Synthetic peptide
SVLSGGQLDAW

SEQ ID NO: 10435 - protein, 9 aa, synthetic construct
  REGION 1..9: note = Description of Artificial Sequence: Synthetic peptide
KTAVQMAVF

SEQ ID NO: 10436 - protein, 10 aa, synthetic construct
  REGION 1..10: note = Description of Artificial Sequence: Synthetic peptide
TSNLQEQIGW

SEQ ID NO: 10437 - protein, 9 aa, synthetic construct
  REGION 1..9: note = Description of Artificial Sequence: Synthetic peptide
WSKSSIVGW

SEQ ID NO: 10438 - protein, 10 aa, synthetic construct
  REGION 1..10: note = Description of Artificial Sequence: Synthetic peptide
RISTESIVIW

SEQ ID NO: 10439 - protein, 9 aa, synthetic construct
  REGION 1..9: note = Description of Artificial Sequence: Synthetic peptide
QASQDVKNW

SEQ ID NO: 10440 - protein, 10 aa, synthetic construct
  REGION 1..10: note = Description of Artificial Sequence: Synthetic peptide
ITSEPIPIHY

SEQ ID NO: 10441 - protein, 9 aa, synthetic construct
  REGION 1..9: note = Description of Artificial Sequence: Synthetic peptide
FSVPLDKEF

SEQ ID NO: 10442 - protein, 11 aa, synthetic construct
  REGION 1..11: note = Description of Artificial Sequence: Synthetic peptide
KSINLGPGQAF

SEQ ID NO: 10443 - protein, 9 aa, synthetic construct
  REGION 1..9: note = Description of Artificial Sequence: Synthetic peptide
STLQEQIGW

SEQ ID NO: 10444 - protein, 9 aa, synthetic construct
  REGION 1..9: note = Description of Artificial Sequence: Synthetic peptide
ITLPEKESW

SEQ ID NO: 10445 - protein, 9 aa, synthetic construct
  REGION 1..9: note = Description of Artificial Sequence: Synthetic peptide
TSGLFNSTW

SEQ ID NO: 10446 - protein, 9 aa, synthetic construct
  REGION 1..9: note = Description of Artificial Sequence: Synthetic peptide
SSSQVSQNY

SEQ ID NO: 10447 - protein, 9 aa, synthetic construct
  REGION 1..9: note = Description of Artificial Sequence: Synthetic peptide
GTEELRSLY

SEQ ID NO: 10448 - protein, 9 aa, synthetic construct
  REGION 1..9: note = Description of Artificial Sequence: Synthetic peptide
RAIEAQQHL

SEQ ID NO: 10449 - protein, 9 aa, synthetic construct
  REGION 1..9: note = Description of Artificial Sequence: Synthetic peptide
KALGPQATL

SEQ ID NO: 10450 - protein, 10 aa, synthetic construct
  REGION 1..10: note = Description of Artificial Sequence: Synthetic peptide
KSFDTEAHNI

SEQ ID NO: 10451 - protein, 9 aa, synthetic construct
  REGION 1..9: note = Description of Artificial Sequence: Synthetic peptide
NSSQVSQNY

SEQ ID NO: 10452 - protein, 9 aa, synthetic construct
  REGION 1..9: note = Description of Artificial Sequence: Synthetic peptide
SAVSLFNTI

SEQ ID NO: 10453 - protein, 9 aa, synthetic construct
  REGION 1..9: note = Description of Artificial Sequence: Synthetic peptide
TSEPIPIHY

SEQ ID NO: 10454 - protein, 9 aa, synthetic construct
  REGION 1..9: note = Description of Artificial Sequence: Synthetic peptide
GSEEIKSLY

SEQ ID NO: 10455 - protein, 11 aa, synthetic construct
  REGION 1..11: note = Description of Artificial Sequence: Synthetic peptide
GAINSSQNETF

SEQ ID NO: 10456 - protein, 9 aa, synthetic construct
  REGION 1..9: note = Description of Artificial Sequence: Synthetic peptide
ATNSVTTAM

SEQ ID NO: 10457 - protein, 9 aa, synthetic construct
  REGION 1..9: note = Description of Artificial Sequence: Synthetic peptide
VTKGLGISY

SEQ ID NO: 10458 - protein, 9 aa, synthetic construct
  REGION 1..9: note = Description of Artificial Sequence: Synthetic peptide
TSLLFNTTW

SEQ ID NO: 10459 - protein, 9 aa, synthetic construct
  REGION 1..9: note = Description of Artificial Sequence: Synthetic peptide
KTAVQMAVF

SEQ ID NO: 10460 - protein, 9 aa, synthetic construct
  REGION 1..9: note = Description of Artificial Sequence: Synthetic peptide
TSAVPNETI

SEQ ID NO: 10461 - protein, 9 aa, synthetic construct
  REGION 1..9: note = Description of Artificial Sequence: Synthetic peptide
AANNAACAW

SEQ ID NO: 10462 - protein, 10 aa, synthetic construct
  REGION 1..10: note = Description of Artificial Sequence: Synthetic peptide
RAIEAQQHLL

SEQ ID NO: 10463 - protein, 9 aa, synthetic construct
  REGION 1..9: note = Description of Artificial Sequence: Synthetic peptide
ITKGLGISY

SEQ ID NO: 10464 - protein, 8 aa, synthetic construct
  REGION 1..8: note = Description of Artificial Sequence: Synthetic peptide
GQGVSIEW

SEQ ID NO: 10465 - protein, 9 aa, synthetic construct
  REGION 1..9: note = Description of Artificial Sequence: Synthetic peptide
KALGPGATL

SEQ ID NO: 10466 - protein, 9 aa, synthetic construct
  REGION 1..9: note = Description of Artificial Sequence: Synthetic peptide
YSTQIDPGL

SEQ ID NO: 10467 - protein, 9 aa, synthetic construct
  REGION 1..9: note = Description of Artificial Sequence: Synthetic peptide
TINEEAAEW

SEQ ID NO: 10468 - protein, 8 aa, synthetic construct
  REGION 1..8: note = Description of Artificial Sequence: Synthetic peptide
NSPTSREL

SEQ ID NO: 10469 - protein, 9 aa, synthetic construct
  REGION 1..9: note = Description of Artificial Sequence: Synthetic peptide
YSPLSLQTL

SEQ ID NO: 10470 - protein, 8 aa, synthetic construct
  REGION 1..8: note = Description of Artificial Sequence: Synthetic peptide
NSPTSRDL

SEQ ID NO: 10471 - protein, 9 aa, synthetic construct
  REGION 1..9: note = Description of Artificial Sequence: Synthetic peptide
YSPVSILDI

SEQ ID NO: 10472 - protein, 9 aa, synthetic construct
  REGION 1..9: note = Description of Artificial Sequence: Synthetic peptide
AGPVAPGQL

SEQ ID NO: 10473 - protein, 9 aa, synthetic construct
  REGION 1..9: note = Description of Artificial Sequence: Synthetic peptide
FSVPLHEDF

SEQ ID NO: 10474 - protein, 9 aa, synthetic construct
  REGION 1..9: note = Description of Artificial Sequence: Synthetic peptide
VTKGLGISY

SEQ ID NO: 10475 - protein, 10 aa, synthetic construct
  REGION 1..10: note = Description of Artificial Sequence: Synthetic peptide
FTKKGLGVSY

SEQ ID NO: 10476 - protein, 9 aa, synthetic construct
  REGION 1..9: note = Description of Artificial Sequence: Synthetic peptide
ITKGLGISY

SEQ ID NO: 10477 - protein, 9 aa, synthetic construct
  REGION 1..9: note = Description of Artificial Sequence: Synthetic peptide
TSEPIPIHY

SEQ ID NO: 10478 - protein, 9 aa, synthetic construct
  REGION 1..9: note = Description of Artificial Sequence: Synthetic peptide
DARLVVTTY

SEQ ID NO: 10479 - protein, 9 aa, synthetic construct
  REGION 1..9: note = Description of Artificial Sequence: Synthetic peptide
VTKGLGISY

SEQ ID NO: 10480 - protein, 9 aa, synthetic construct
  REGION 1..9: note = Description of Artificial Sequence: Synthetic peptide
ITKGLGISY

SEQ ID NO: 10481 - protein, 9 aa, synthetic construct
  REGION 1..9: note = Description of Artificial Sequence: Synthetic peptide
GSEEIKSLY

SEQ ID NO: 10482 - protein, 9 aa, synthetic construct
  REGION 1..9: note = Description of Artificial Sequence: Synthetic peptide
GTEELRSLY

SEQ ID NO: 10483 - protein, 9 aa, synthetic construct
  REGION 1..9: note = Description of Artificial Sequence: Synthetic peptide
LADQLIHMY

SEQ ID NO: 10484 - protein, 8 aa, synthetic construct
  REGION 1..8: note = Description of Artificial Sequence: Synthetic peptide
VLDVGDAY

SEQ ID NO: 10485 - protein, 9 aa, synthetic construct
  REGION 1..9: note = Description of Artificial Sequence: Synthetic peptide
KALGPGATL

SEQ ID NO: 10486 - protein, 9 aa, synthetic construct
  REGION 1..9: note = Description of Artificial Sequence: Synthetic peptide
RAIEAQQHL

SEQ ID NO: 10487 - protein, 9 aa, synthetic construct
  REGION 1..9: note = Description of Artificial Sequence: Synthetic peptide
AALDLSHFL

SEQ ID NO: 10488 - protein, 9 aa, synthetic construct
  REGION 1..9: note = Description of Artificial Sequence: Synthetic peptide
VAIKIGGQL

SEQ ID NO: 10489 - protein, 9 aa, synthetic construct
  REGION 1..9: note = Description of Artificial Sequence: Synthetic peptide
YQSNPPPSL

SEQ ID NO: 10490 - protein, 9 aa, synthetic construct
  REGION 1..9: note = Description of Artificial Sequence: Synthetic peptide
VSVEPPAIL

SEQ ID NO: 10491 - protein, 9 aa, synthetic construct
  REGION 1..9: note = Description of Artificial Sequence: Synthetic peptide
ISVESPAVL

SEQ ID NO: 10492 - protein, 9 aa, synthetic construct
  REGION 1..9: note = Description of Artificial Sequence: Synthetic peptide
VAIKIGGQL

SEQ ID NO: 10493 - protein, 9 aa, synthetic construct
  REGION 1..9: note = Description of Artificial Sequence: Synthetic peptide
RAIEAQQHL

SEQ ID NO: 10494 - protein, 9 aa, synthetic construct
  REGION 1..9: note = Description of Artificial Sequence: Synthetic peptide
KALGPGATL

SEQ ID NO: 10495 - protein, 9 aa, synthetic construct
  REGION 1..9: note = Description of Artificial Sequence: Synthetic peptide
AALDLSHFL

SEQ ID NO: 10496 - protein, 9 aa, synthetic construct
  REGION 1..9: note = Description of Artificial Sequence: Synthetic peptide
YQSNPPPSL

SEQ ID NO: 10497 - protein, 9 aa, synthetic construct
  REGION 1..9: note = Description of Artificial Sequence: Synthetic peptide
FQQGKAREL

SEQ ID NO: 10498 - protein, 9 aa, synthetic construct
  REGION 1..9: note = Description of Artificial Sequence: Synthetic peptide
VSVEPPAIL

SEQ ID NO: 10499 - protein, 8 aa, synthetic construct
  REGION 1..8: note = Description of Artificial Sequence: Synthetic peptide
HSRIGITL

SEQ ID NO: 10500 - protein, 9 aa, synthetic construct
  REGION 1..9: note = Description of Artificial Sequence: Synthetic peptide
ATDIQTKEL

SEQ ID NO: 10501 - protein, 9 aa, synthetic construct
  REGION 1..9: note = Description of Artificial Sequence: Synthetic peptide
ISVESPAVL

SEQ ID NO: 10502 - protein, 9 aa, synthetic construct
  REGION 1..9: note = Description of Artificial Sequence: Synthetic peptide
SAEPVPLQL

SEQ ID NO: 10503 - protein, 9 aa, synthetic construct
  REGION 1..9: note = Description of Artificial Sequence: Synthetic peptide
LFDAIAIAV

SEQ ID NO: 10504 - protein, 9 aa, synthetic construct
  REGION 1..9: note = Description of Artificial Sequence: Synthetic peptide
QYDQIPIEI

SEQ ID NO: 10505 - protein, 9 aa, synthetic construct
  REGION 1..9: note = Description of Artificial Sequence: Synthetic peptide
QYDQILIEI

SEQ ID NO: 10506 - protein, 9 aa, synthetic construct
  REGION 1..9: note = Description of Artificial Sequence: Synthetic peptide
ASDLQTTEL

SEQ ID NO: 10507 - protein, 9 aa, synthetic construct
  REGION 1..9: note = Description of Artificial Sequence: Synthetic peptide
VLDNVTENF

SEQ ID NO: 10508 - protein, 8 aa, synthetic construct
  REGION 1..8: note = Description of Artificial Sequence: Synthetic peptide
HTDNGSNF

SEQ ID NO: 10509 - protein, 9 aa, synthetic construct
  REGION 1..9: note = Description of Artificial Sequence: Synthetic peptide
SAEPVPLQL

SEQ ID NO: 10510 - protein, 8 aa, synthetic construct
  REGION 1..8: note = Description of Artificial Sequence: Synthetic peptide
AVDLSHFL

SEQ ID NO: 10511 - protein, 9 aa, synthetic construct
  REGION 1..9: note = Description of Artificial Sequence: Synthetic peptide
IQDNSEIKV

SEQ ID NO: 10512 - protein, 9 aa, synthetic construct
  REGION 1..9: note = Description of Artificial Sequence: Synthetic peptide
VLDVGDAYF

SEQ ID NO: 10513 - protein, 10 aa, synthetic construct
  REGION 1..10: note = Description of Artificial Sequence: Synthetic peptide
TADTGSSSQV

SEQ ID NO: 10514 - protein, 9 aa, synthetic construct
  REGION 1..9: note = Description of Artificial Sequence: Synthetic peptide
IQDNSDIKV

SEQ ID NO: 10515 - protein, 9 aa, synthetic construct
  REGION 1..9: note = Description of Artificial Sequence: Synthetic peptide
QRPLVTIKI

SEQ ID NO: 10516 - protein, 9 aa, synthetic construct
  REGION 1..9: note = Description of Artificial Sequence: Synthetic peptide
QRPVVTVKI

SEQ ID NO: 10517 - protein, 9 aa, synthetic construct
  REGION 1..9: note = Description of Artificial Sequence: Synthetic peptide
LRPGGSKKY

SEQ ID NO: 10518 - protein, 9 aa, synthetic construct
  REGION 1..9: note = Description of Artificial Sequence: Synthetic peptide
QRPLVAIKI

SEQ ID NO: 10519 - protein, 8 aa, synthetic construct
  REGION 1..8: note = Description of Artificial Sequence: Synthetic peptide
NANTAIMM

SEQ ID NO: 10520 - protein, 9 aa, synthetic construct
  REGION 1..9: note = Description of Artificial Sequence: Synthetic peptide
DARLVVTTY

SEQ ID NO: 10521 - protein, 9 aa, synthetic construct
  REGION 1..9: note = Description of Artificial Sequence: Synthetic peptide
SASSLFDAI

SEQ ID NO: 10522 - protein, 9 aa, synthetic construct
  REGION 1..9: note = Description of Artificial Sequence: Synthetic peptide
SAVSLFNTI

SEQ ID NO: 10523 - protein, 9 aa, synthetic construct
  REGION 1..9: note = Description of Artificial Sequence: Synthetic peptide
SAEPVPLQL

SEQ ID NO: 10524 - protein, 9 aa, synthetic construct
  REGION 1..9: note = Description of Artificial Sequence: Synthetic peptide
DIVSPRCEY

SEQ ID NO: 10525 - protein, 9 aa, synthetic construct
  REGION 1..9: note = Description of Artificial Sequence: Synthetic peptide
FLGAAGSTM

SEQ ID NO: 10526 - protein, 9 aa, synthetic construct
  REGION 1..9: note = Description of Artificial Sequence: Synthetic peptide
TVLDVGDAY

SEQ ID NO: 10527 - protein, 9 aa, synthetic construct
  REGION 1..9: note = Description of Artificial Sequence: Synthetic peptide
AALDLSHFL

SEQ ID NO: 10528 - protein, 9 aa, synthetic construct
  REGION 1..9: note = Description of Artificial Sequence: Synthetic peptide
IITDSQYAL

SEQ ID NO: 10529 - protein, 9 aa, synthetic construct
  REGION 1..9: note = Description of Artificial Sequence: Synthetic peptide
IVTDSQYAL

SEQ ID NO: 10530 - protein, 9 aa, synthetic construct
  REGION 1..9: note = Description of Artificial Sequence: Synthetic peptide
VVESMNREL

SEQ ID NO: 10531 - protein, 11 aa, synthetic construct
  REGION 1..11: note = Description of Artificial Sequence: Synthetic peptide
VAEGTDRAIEL

SEQ ID NO: 10532 - protein, 9 aa, synthetic construct
  REGION 1..9: note = Description of Artificial Sequence: Synthetic peptide
VTLNCSDEL

SEQ ID NO: 10533 - protein, 10 aa, synthetic construct
  REGION 1..10: note = Description of Artificial Sequence: Synthetic peptide
EVNIITDSQY

SEQ ID NO: 10534 - protein, 9 aa, synthetic construct
  REGION 1..9: note = Description of Artificial Sequence: Synthetic peptide
ASDLQTTEL

SEQ ID NO: 10535 - protein, 8 aa, synthetic construct
  REGION 1..8: note = Description of Artificial Sequence: Synthetic peptide
AVDLSHFL

SEQ ID NO: 10536 - protein, 9 aa, synthetic construct
  REGION 1..9: note = Description of Artificial Sequence: Synthetic peptide
ATDIQTKEL

SEQ ID NO: 10537 - protein, 9 aa, synthetic construct
  REGION 1..9: note = Description of Artificial Sequence: Synthetic peptide
IIDIIASDL

SEQ ID NO: 10538 - protein, 8 aa, synthetic construct
  REGION 1..8: note = Description of Artificial Sequence: Synthetic peptide
ALDLSHFL

SEQ ID NO: 10539 - protein, 9 aa, synthetic construct
  REGION 1..9: note = Description of Artificial Sequence: Synthetic peptide
VLDNVTENF

SEQ ID NO: 10540 - protein, 9 aa, synthetic construct
  REGION 1..9: note = Description of Artificial Sequence: Synthetic peptide
VAEKLGNLL

SEQ ID NO: 10541 - protein, 9 aa, synthetic construct
  REGION 1..9: note = Description of Artificial Sequence: Synthetic peptide
GIDNSSNRL

SEQ ID NO: 10542 - protein, 10 aa, synthetic construct
  REGION 1..10: note = Description of Artificial Sequence: Synthetic peptide
TADTGSSSQV

SEQ ID NO: 10543 - protein, 10 aa, synthetic construct
  REGION 1..10: note = Description of Artificial Sequence: Synthetic peptide
AADTGDNKQV

SEQ ID NO: 10544 - protein, 9 aa, synthetic construct
  REGION 1..9: note = Description of Artificial Sequence: Synthetic peptide
TQDFWEVQL

SEQ ID NO: 10545 - protein, 9 aa, synthetic construct
  REGION 1..9: note = Description of Artificial Sequence: Synthetic peptide
SAEPVPLQL

SEQ ID NO: 10546 - protein, 8 aa, synthetic construct
  REGION 1..8: note = Description of Artificial Sequence: Synthetic peptide
GQMVHQAL

SEQ ID NO: 10547 - protein, 9 aa, synthetic construct
  REGION 1..9: note = Description of Artificial Sequence: Synthetic peptide
GQKAIGTVL

SEQ ID NO: 10548 - protein, 9 aa, synthetic construct
  REGION 1..9: note = Description of Artificial Sequence: Synthetic peptide
YQSNPPPSL

SEQ ID NO: 10549 - protein, 9 aa, synthetic construct
  REGION 1..9: note = Description of Artificial Sequence: Synthetic peptide
NAKNIIVQL

SEQ ID NO: 10550 - protein, 9 aa, synthetic construct
  REGION 1..9: note = Description of Artificial Sequence: Synthetic peptide
VTKGLGISY

SEQ ID NO: 10551 - protein, 10 aa, synthetic construct
  REGION 1..10: note = Description of Artificial Sequence: Synthetic peptide
VSFEPIPIHY

SEQ ID NO: 10552 - protein, 9 aa, synthetic construct
  REGION 1..9: note = Description of Artificial Sequence: Synthetic peptide
SAVSLFNTI

SEQ ID NO: 10553 - protein, 9 aa, synthetic construct
  REGION 1..9: note = Description of Artificial Sequence: Synthetic peptide
ITKGLGISY

SEQ ID NO: 10554 - protein, 9 aa, synthetic construct
  REGION 1..9: note = Description of Artificial Sequence: Synthetic peptide
NAKNIIAHL

SEQ ID NO: 10555 - protein, 9 aa, synthetic construct
  REGION 1..9: note = Description of Artificial Sequence: Synthetic peptide
VAALIIAIV

SEQ ID NO: 10556 - protein, 9 aa, synthetic construct
  REGION 1..9: note = Description of Artificial Sequence: Synthetic peptide
IYQEQYKNL

SEQ ID NO: 10557 - protein, 9 aa, synthetic construct
  REGION 1..9: note = Description of Artificial Sequence: Synthetic peptide
IYQEPFKNL

SEQ ID NO: 10558 - protein, 9 aa, synthetic construct
  REGION 1..9: note = Description of Artificial Sequence: Synthetic peptide
TYQIYQEQY

SEQ ID NO: 10559 - protein, 8 aa, synthetic construct
  REGION 1..8: note = Description of Artificial Sequence: Synthetic peptide
SFNVTTVL

SEQ ID NO: 10560 - protein, 10 aa, synthetic construct
  REGION 1..10: note = Description of Artificial Sequence: Synthetic peptide
AFQQGKAREL

SEQ ID NO: 10561 - protein, 10 aa, synthetic construct
  REGION 1..10: note = Description of Artificial Sequence: Synthetic peptide
GFLGTAGSTM

SEQ ID NO: 10562 - protein, 9 aa, synthetic construct
  REGION 1..9: note = Description of Artificial Sequence: Synthetic peptide
LYNTVVTLY

SEQ ID NO: 10563 - protein, 9 aa, synthetic construct
  REGION 1..9: note = Description of Artificial Sequence: Synthetic peptide
LYNTVATLY

SEQ ID NO: 10564 - protein, 8 aa, synthetic construct
  REGION 1..8: note = Description of Artificial Sequence: Synthetic peptide
LYNTVATL

SEQ ID NO: 10565 - protein, 9 aa, synthetic construct
  REGION 1..9: note = Description of Artificial Sequence: Synthetic peptide
IFRPGGGDM

SEQ ID NO: 10566 - protein, 10 aa, synthetic construct
  REGION 1..10: note = Description of Artificial Sequence: Synthetic peptide
AFPQGKAGEL

SEQ ID NO: 10567 - protein, 8 aa, synthetic construct
  REGION 1..8: note = Description of Artificial Sequence: Synthetic peptide
LYNTVVTL

SEQ ID NO: 10568 - protein, 9 aa, synthetic construct
  REGION 1..9: note = Description of Artificial Sequence: Synthetic peptide
TYQIYQEPF

SEQ ID NO: 10569 - protein, 10 aa, synthetic construct
  REGION 1..10: note = Description of Artificial Sequence: Synthetic peptide
GFLGAAGSTM

SEQ ID NO: 10570 - protein, 9 aa, synthetic construct
  REGION 1..9: note = Description of Artificial Sequence: Synthetic peptide
AFEHKARSL

SEQ ID NO: 10571 - protein, 8 aa, synthetic construct
  REGION 1..8: note = Description of Artificial Sequence: Synthetic peptide
SFNTTTIL

SEQ ID NO: 10572 - protein, 9 aa, synthetic construct
  REGION 1..9: note = Description of Artificial Sequence: Synthetic peptide
LFNTVATLY

SEQ ID NO: 10573 - protein, 9 aa, synthetic construct
  REGION 1..9: note = Description of Artificial Sequence: Synthetic peptide
KYHSNWRAM

SEQ ID NO: 10574 - protein, 8 aa, synthetic construct
  REGION 1..8: note = Description of Artificial Sequence: Synthetic peptide
NYPIVQNL

SEQ ID NO: 10575 - protein, 9 aa, synthetic construct
  REGION 1..9: note = Description of Artificial Sequence: Synthetic peptide
TYQIYQEQY

SEQ ID NO: 10576 - protein, 9 aa, synthetic construct
  REGION 1..9: note = Description of Artificial Sequence: Synthetic peptide
IYQEQYKNL

SEQ ID NO: 10577 - protein, 8 aa, synthetic construct
  REGION 1..8: note = Description of Artificial Sequence: Synthetic peptide
LYNTVATL

SEQ ID NO: 10578 - protein, 9 aa, synthetic construct
  REGION 1..9: note = Description of Artificial Sequence: Synthetic peptide
IYQEPFKNL

SEQ ID NO: 10579 - protein, 10 aa, synthetic construct
  REGION 1..10: note = Description of Artificial Sequence: Synthetic peptide
GFLGTAGSTM

SEQ ID NO: 10580 - protein, 10 aa, synthetic construct
  REGION 1..10: note = Description of Artificial Sequence: Synthetic peptide
GFLGAAGSTM

SEQ ID NO: 10581 - protein, 8 aa, synthetic construct
  REGION 1..8: note = Description of Artificial Sequence: Synthetic peptide
SFNVTTVL

SEQ ID NO: 10582 - protein, 8 aa, synthetic construct
  REGION 1..8: note = Description of Artificial Sequence: Synthetic peptide
LYNTVVTL

SEQ ID NO: 10583 - protein, 9 aa, synthetic construct
  REGION 1..9: note = Description of Artificial Sequence: Synthetic peptide
MYAPPIEGF

SEQ ID NO: 10584 - protein, 9 aa, synthetic construct
  REGION 1..9: note = Description of Artificial Sequence: Synthetic peptide
TYQIYQEPF

SEQ ID NO: 10585 - protein, 9 aa, synthetic construct
  REGION 1..9: note = Description of Artificial Sequence: Synthetic peptide
LYNTVATLY

SEQ ID NO: 10586 - protein, 8 aa, synthetic construct
  REGION 1..8: note = Description of Artificial Sequence: Synthetic peptide
TYSVAEQL

SEQ ID NO: 10587 - protein, 9 aa, synthetic construct
  REGION 1..9: note = Description of Artificial Sequence: Synthetic peptide
LYNTVVTLY

SEQ ID NO: 10588 - protein, 9 aa, synthetic construct
  REGION 1..9: note = Description of Artificial Sequence: Synthetic peptide
TSNITGLLL

SEQ ID NO: 10589 - protein, 9 aa, synthetic construct
  REGION 1..9: note = Description of Artificial Sequence: Synthetic peptide
SSNITGLLL

SEQ ID NO: 10590 - protein, 9 aa, synthetic construct
  REGION 1..9: note = Description of Artificial Sequence: Synthetic peptide
GAASVTLTV

SEQ ID NO: 10591 - protein, 9 aa, synthetic construct
  REGION 1..9: note = Description of Artificial Sequence: Synthetic peptide
ANSPTSREL

SEQ ID NO: 10592 - protein, 9 aa, synthetic construct
  REGION 1..9: note = Description of Artificial Sequence: Synthetic peptide
SATQWNKTL

SEQ ID NO: 10593 - protein, 9 aa, synthetic construct
  REGION 1..9: note = Description of Artificial Sequence: Synthetic peptide
VTGDIRKAY

SEQ ID NO: 10594 - protein, 8 aa, synthetic construct
  REGION 1..8: note = Description of Artificial Sequence: Synthetic peptide
VASTKEAL

SEQ ID NO: 10595 - protein, 9 aa, synthetic construct
  REGION 1..9: note = Description of Artificial Sequence: Synthetic peptide
VSSGIRKVL

SEQ ID NO: 10596 - protein, 9 aa, synthetic construct
  REGION 1..9: note = Description of Artificial Sequence: Synthetic peptide
SATQWNKTL

SEQ ID NO: 10597 - protein, 9 aa, synthetic construct
  REGION 1..9: note = Description of Artificial Sequence: Synthetic peptide
QTTELQKQI

SEQ ID NO: 10598 - protein, 9 aa, synthetic construct
  REGION 1..9: note = Description of Artificial Sequence: Synthetic peptide
NAKNIIVQL

SEQ ID NO: 10599 - protein, 9 aa, synthetic construct
  REGION 1..9: note = Description of Artificial Sequence: Synthetic peptide
ANSPTSREL

SEQ ID NO: 10600 - protein, 10 aa, synthetic construct
  REGION 1..10: note = Description of Artificial Sequence: Synthetic peptide
IATDIQTKEL

SEQ ID NO: 10601 - protein, 9 aa, synthetic construct
  REGION 1..9: note = Description of Artificial Sequence: Synthetic peptide
SAVSLFNTI

SEQ ID NO: 10602 - protein, 9 aa, synthetic construct
  REGION 1..9: note = Description of Artificial Sequence: Synthetic peptide
RAIEAQQHL

SEQ ID NO: 10603 - protein, 9 aa, synthetic construct
  REGION 1..9: note = Description of Artificial Sequence: Synthetic peptide
ARILAVESY

SEQ ID NO: 10604 - protein, 9 aa, synthetic construct
  REGION 1..9: note = Description of Artificial Sequence: Synthetic peptide
ARVLAVESY

SEQ ID NO: 10605 - protein, 9 aa, synthetic construct
  REGION 1..9: note = Description of Artificial Sequence: Synthetic peptide
GAASVTLTV

SEQ ID NO: 10606 - protein, 11 aa, synthetic construct
  REGION 1..11: note = Description of Artificial Sequence: Synthetic peptide
AEQASQDVKNW

SEQ ID NO: 10607 - protein, 9 aa, synthetic construct
  REGION 1..9: note = Description of Artificial Sequence: Synthetic peptide
SAVSLFNTI

SEQ ID NO: 10608 - protein, 9 aa, synthetic construct
  REGION 1..9: note = Description of Artificial Sequence: Synthetic peptide
SASSLFDAI

SEQ ID NO: 10609 - protein, 11 aa, synthetic construct
  REGION 1..11: note = Description of Artificial Sequence: Synthetic peptide
AEIQKQGQDQW

SEQ ID NO: 10610 - protein, 9 aa, synthetic construct
  REGION 1..9: note = Description of Artificial Sequence: Synthetic peptide
YETEAHNIW

SEQ ID NO: 10611 - protein, 10 aa, synthetic construct
  REGION 1..10: note = Description of Artificial Sequence: Synthetic peptide
ERQGQGTVSF

SEQ ID NO: 10612 - protein, 9 aa, synthetic construct
  REGION 1..9: note = Description of Artificial Sequence: Synthetic peptide
EEINLPGKW

SEQ ID NO: 10613 - protein, 11 aa, synthetic construct
  REGION 1..11: note = Description of Artificial Sequence: Synthetic peptide
AEVTGDIRKAY

SEQ ID NO: 10614 - protein, 9 aa, synthetic construct
  REGION 1..9: note = Description of Artificial Sequence: Synthetic peptide
TRIGPGQAL

SEQ ID NO: 10615 - protein, 9 aa, synthetic construct
  REGION 1..9: note = Description of Artificial Sequence: Synthetic peptide
EEMNLPGKW

SEQ ID NO: 10616 - protein, 9 aa, synthetic construct
  REGION 1..9: note = Description of Artificial Sequence: Synthetic peptide
IAARIVELL

SEQ ID NO: 10617 - protein, 8 aa, synthetic construct
  REGION 1..8: note = Description of Artificial Sequence: Synthetic peptide
IAARIVEL

SEQ ID NO: 10618 - protein, 9 aa, synthetic construct
  REGION 1..9: note = Description of Artificial Sequence: Synthetic peptide
IAVRIVELL

SEQ ID NO: 10619 - protein, 9 aa, synthetic construct
  REGION 1..9: note = Description of Artificial Sequence: Synthetic peptide
SAEPVPLQL

SEQ ID NO: 10620 - protein, 9 aa, synthetic construct
  REGION 1..9: note = Description of Artificial Sequence: Synthetic peptide
YATNIIGNI

SEQ ID NO: 10621 - protein, 9 aa, synthetic construct
  REGION 1..9: note = Description of Artificial Sequence: Synthetic peptide
AALDLSHFL

SEQ ID NO: 10622 - protein, 9 aa, synthetic construct
  REGION 1..9: note = Description of Artificial Sequence: Synthetic peptide
LIAARIVEL

SEQ ID NO: 10623 - protein, 9 aa, synthetic construct
  REGION 1..9: note = Description of Artificial Sequence: Synthetic peptide
IAARIVDLL

SEQ ID NO: 10624 - protein, 10 aa, synthetic construct
  REGION 1..10: note = Description of Artificial Sequence: Synthetic peptide
RAIGLGALFL

SEQ ID NO: 10625 - protein, 8 aa, synthetic construct
  REGION 1..8: note = Description of Artificial Sequence: Synthetic peptide
IATVPVKL

SEQ ID NO: 10626 - protein, 9 aa, synthetic construct
  REGION 1..9: note = Description of Artificial Sequence: Synthetic peptide
MIIGGLIGL

SEQ ID NO: 10627 - protein, 10 aa, synthetic construct
  REGION 1..10: note = Description of Artificial Sequence: Synthetic peptide
AADKGVSQNY

SEQ ID NO: 10628 - protein, 10 aa, synthetic construct
  REGION 1..10: note = Description of Artificial Sequence: Synthetic peptide
DTELLKAVKY

SEQ ID NO: 10629 - protein, 9 aa, synthetic construct
  REGION 1..9: note = Description of Artificial Sequence: Synthetic peptide
GSEELKSLY

SEQ ID NO: 10630 - protein, 9 aa, synthetic construct
  REGION 1..9: note = Description of Artificial Sequence: Synthetic peptide
GSEELRSLY

SEQ ID NO: 10631 - protein, 9 aa, synthetic construct
  REGION 1..9: note = Description of Artificial Sequence: Synthetic peptide
PTDPNPQEV

SEQ ID NO: 10632 - protein, 8 aa, synthetic construct
  REGION 1..8: note = Description of Artificial Sequence: Synthetic peptide
VLDVGDAY

SEQ ID NO: 10633 - protein, 10 aa, synthetic construct
  REGION 1..10: note = Description of Artificial Sequence: Synthetic peptide
VTVLDVGDAY

SEQ ID NO: 10634 - protein, 9 aa, synthetic construct
  REGION 1..9: note = Description of Artificial Sequence: Synthetic peptide
RTPPTPPAA

SEQ ID NO: 10635 - protein, 9 aa, synthetic construct
  REGION 1..9: note = Description of Artificial Sequence: Synthetic peptide
ILAEAMSQA

SEQ ID NO: 10636 - protein, 10 aa, synthetic construct
  REGION 1..10: note = Description of Artificial Sequence: Synthetic peptide
KVVEIEPLGV

SEQ ID NO: 10637 - protein, 10 aa, synthetic construct
  REGION 1..10: note = Description of Artificial Sequence: Synthetic peptide
FVPKQPISQA

SEQ ID NO: 10638 - protein, 9 aa, synthetic construct
  REGION 1..9: note = Description of Artificial Sequence: Synthetic peptide
IIAQIQPSI

SEQ ID NO: 10639 - protein, 9 aa, synthetic construct
  REGION 1..9: note = Description of Artificial Sequence: Synthetic peptide
ALGEVGPFI

SEQ ID NO: 10640 - protein, 10 aa, synthetic construct
  REGION 1..10: note = Description of Artificial Sequence: Synthetic peptide
ILEELKNEAV

SEQ ID NO: 10641 - protein, 9 aa, synthetic construct
  REGION 1..9: note = Description of Artificial Sequence: Synthetic peptide
SLAEGEIVI

SEQ ID NO: 10642 - protein, 9 aa, synthetic construct
  REGION 1..9: note = Description of Artificial Sequence: Synthetic peptide
TLSDQSSTL

SEQ ID NO: 10643 - protein, 10 aa, synthetic construct
  REGION 1..10: note = Description of Artificial Sequence: Synthetic peptide
SLPKQPLSQA

SEQ ID NO: 10644 - protein, 9 aa, synthetic construct
  REGION 1..9: note = Description of Artificial Sequence: Synthetic peptide
ILREPVHGV

SEQ ID NO: 10645 - protein, 10 aa, synthetic construct
  REGION 1..10: note = Description of Artificial Sequence: Synthetic peptide
KLVPVDPDEV

SEQ ID NO: 10646 - protein, 10 aa, synthetic construct
  REGION 1..10: note = Description of Artificial Sequence: Synthetic peptide
KLVPVDPEEV

SEQ ID NO: 10647 - protein, 9 aa, synthetic construct
  REGION 1..9: note = Description of Artificial Sequence: Synthetic peptide
YTAFTIPSV

SEQ ID NO: 10648 - protein, 9 aa, synthetic construct
  REGION 1..9: note = Description of Artificial Sequence: Synthetic peptide
GLADQLIHI

SEQ ID NO: 10649 - protein, 9 aa, synthetic construct
  REGION 1..9: note = Description of Artificial Sequence: Synthetic peptide
ALTDIVPLT

SEQ ID NO: 10650 - protein, 9 aa, synthetic construct
  REGION 1..9: note = Description of Artificial Sequence: Synthetic peptide
AVLSIVNRV

SEQ ID NO: 10651 - protein, 9 aa, synthetic construct
  REGION 1..9: note = Description of Artificial Sequence: Synthetic peptide
VLAEAMSQA

SEQ ID NO: 10652 - protein, 9 aa, synthetic construct
  REGION 1..9: note = Description of Artificial Sequence: Synthetic peptide
ILKEPVHGV

SEQ ID NO: 10653 - protein, 9 aa, synthetic construct
  REGION 1..9: note = Description of Artificial Sequence: Synthetic peptide
QLTEAVQKI

SEQ ID NO: 10654 - protein, 9 aa, synthetic construct
  REGION 1..9: note = Description of Artificial Sequence: Synthetic peptide
IVTDSQYAL

SEQ ID NO: 10655 - protein, 9 aa, synthetic construct
  REGION 1..9: note = Description of Artificial Sequence: Synthetic peptide
ILAEAMSQA

SEQ ID NO: 10656 - protein, 9 aa, synthetic construct
  REGION 1..9: note = Description of Artificial Sequence: Synthetic peptide
ILREPVHGV

SEQ ID NO: 10657 - protein, 10 aa, synthetic construct
  REGION 1..10: note = Description of Artificial Sequence: Synthetic peptide
KVVEIEPLGV

SEQ ID NO: 10658 - protein, 9 aa, synthetic construct
  REGION 1..9: note = Description of Artificial Sequence: Synthetic peptide
FISGDINNL

SEQ ID NO: 10659 - protein, 9 aa, synthetic construct
  REGION 1..9: note = Description of Artificial Sequence: Synthetic peptide
TLKEDPEAI

SEQ ID NO: 10660 - protein, 9 aa, synthetic construct
  REGION 1..9: note = Description of Artificial Sequence: Synthetic peptide
SISERILVA

SEQ ID NO: 10661 - protein, 9 aa, synthetic construct
  REGION 1..9: note = Description of Artificial Sequence: Synthetic peptide
TLSDQSSTL

SEQ ID NO: 10662 - protein, 9 aa, synthetic construct
  REGION 1..9: note = Description of Artificial Sequence: Synthetic peptide
GLYPPLASL

SEQ ID NO: 10663 - protein, 10 aa, synthetic construct
  REGION 1..10: note = Description of Artificial Sequence: Synthetic peptide
ALTDIVPLTA

SEQ ID NO: 10664 - protein, 9 aa, synthetic construct
  REGION 1..9: note = Description of Artificial Sequence: Synthetic peptide
ELYPPLASL

SEQ ID NO: 10665 - protein, 9 aa, synthetic construct
  REGION 1..9: note = Description of Artificial Sequence: Synthetic peptide
AIIGDIRKA

SEQ ID NO: 10666 - protein, 9 aa, synthetic construct
  REGION 1..9: note = Description of Artificial Sequence: Synthetic peptide
KTKPPLPSV

SEQ ID NO: 10667 - protein, 10 aa, synthetic construct
  REGION 1..10: note = Description of Artificial Sequence: Synthetic peptide
ALSDRILSSC

SEQ ID NO: 10668 - protein, 10 aa, synthetic construct
  REGION 1..10: note = Description of Artificial Sequence: Synthetic peptide
GMIGLRIVFA

SEQ ID NO: 10669 - protein, 9 aa, synthetic construct
  REGION 1..9: note = Description of Artificial Sequence: Synthetic peptide
FIPGDINNL

SEQ ID NO: 10670 - protein, 9 aa, synthetic construct
  REGION 1..9: note = Description of Artificial Sequence: Synthetic peptide
SLFNTVAVL

SEQ ID NO: 10671 - protein, 10 aa, synthetic construct
  REGION 1..10: note = Description of Artificial Sequence: Synthetic peptide
FVPKQPISQA

SEQ ID NO: 10672 - protein, 10 aa, synthetic construct
  REGION 1..10: note = Description of Artificial Sequence: Synthetic peptide
ALTDMVPLTA

SEQ ID NO: 10673 - protein, 10 aa, synthetic construct
  REGION 1..10: note = Description of Artificial Sequence: Synthetic peptide
SLPKQPLSQA

SEQ ID NO: 10674 - protein, 9 aa, synthetic construct
  REGION 1..9: note = Description of Artificial Sequence: Synthetic peptide
LLAIGIAAL

SEQ ID NO: 10675 - protein, 9 aa, synthetic construct
  REGION 1..9: note = Description of Artificial Sequence: Synthetic peptide
ELTDAVQKV

SEQ ID NO: 10676 - protein, 10 aa, synthetic construct
  REGION 1..10: note = Description of Artificial Sequence: Synthetic peptide
HLRDFILIAA

SEQ ID NO: 10677 - protein, 9 aa, synthetic construct
  REGION 1..9: note = Description of Artificial Sequence: Synthetic peptide
ALFLRFLGA

SEQ ID NO: 10678 - protein, 9 aa, synthetic construct
  REGION 1..9: note = Description of Artificial Sequence: Synthetic peptide
SLSPRTLNA

SEQ ID NO: 10679 - protein, 9 aa, synthetic construct
  REGION 1..9: note = Description of Artificial Sequence: Synthetic peptide
TVLSIVNRV

SEQ ID NO: 10680 - protein, 9 aa, synthetic construct
  REGION 1..9: note = Description of Artificial Sequence: Synthetic peptide
LLNATAIAV

SEQ ID NO: 10681 - protein, 10 aa, synthetic construct
  REGION 1..10: note = Description of Artificial Sequence: Synthetic peptide
YLKDQQLLGL

SEQ ID NO: 10682 - protein, 9 aa, synthetic construct
  REGION 1..9: note = Description of Artificial Sequence: Synthetic peptide
ELRSLFNTV

SEQ ID NO: 10683 - protein, 9 aa, synthetic construct
  REGION 1..9: note = Description of Artificial Sequence: Synthetic peptide
ILKEPVHGA

SEQ ID NO: 10684 - protein, 9 aa, synthetic construct
  REGION 1..9: note = Description of Artificial Sequence: Synthetic peptide
GLADQLIHI

SEQ ID NO: 10685 - protein, 9 aa, synthetic construct
  REGION 1..9: note = Description of Artificial Sequence: Synthetic peptide
SLYNTIAVL

SEQ ID NO: 10686 - protein, 9 aa, synthetic construct
  REGION 1..9: note = Description of Artificial Sequence: Synthetic peptide
AVLSIVNRV

SEQ ID NO: 10687 - protein, 8 aa, synthetic construct
  REGION 1..8: note = Description of Artificial Sequence: Synthetic peptide
VLSIVNRV

SEQ ID NO: 10688 - protein, 9 aa, synthetic construct
  REGION 1..9: note = Description of Artificial Sequence: Synthetic peptide
ALFLGFLGA

SEQ ID NO: 10689 - protein, 10 aa, synthetic construct
  REGION 1..10: note = Description of Artificial Sequence: Synthetic peptide
ALFLGFLGAA

SEQ ID NO: 10690 - protein, 9 aa, synthetic construct
  REGION 1..9: note = Description of Artificial Sequence: Synthetic peptide
VLAEAMSQA

SEQ ID NO: 10691 - protein, 9 aa, synthetic construct
  REGION 1..9: note = Description of Artificial Sequence: Synthetic peptide
GAASLTLTV

SEQ ID NO: 10692 - protein, 9 aa, synthetic construct
  REGION 1..9: note = Description of Artificial Sequence: Synthetic peptide
GAASITLTV

SEQ ID NO: 10693 - protein, 10 aa, synthetic construct
  REGION 1..10: note = Description of Artificial Sequence: Synthetic peptide
GLIGLRIVFA

SEQ ID NO: 10694 - protein, 11 aa, synthetic construct
  REGION 1..11: note = Description of Artificial Sequence: Synthetic peptide
FLKEKGGLEGL

SEQ ID NO: 10695 - protein, 9 aa, synthetic construct
  REGION 1..9: note = Description of Artificial Sequence: Synthetic peptide
QLQARVLAV

SEQ ID NO: 10696 - protein, 9 aa, synthetic construct
  REGION 1..9: note = Description of Artificial Sequence: Synthetic peptide
ILKEPVHGV

SEQ ID NO: 10697 - protein, 9 aa, synthetic construct
  REGION 1..9: note = Description of Artificial Sequence: Synthetic peptide
ELKSLFNTV

SEQ ID NO: 10698 - protein, 9 aa, synthetic construct
  REGION 1..9: note = Description of Artificial Sequence: Synthetic peptide
QLTEAVQKI

SEQ ID NO: 10699 - protein, 10 aa, synthetic construct
  REGION 1..10: note = Description of Artificial Sequence: Synthetic peptide
YLKDQQLLGI

SEQ ID NO: 10700 - protein, 9 aa, synthetic construct
  REGION 1..9: note = Description of Artificial Sequence: Synthetic peptide
ELKKIIGQV

SEQ ID NO: 10701 - protein, 9 aa, synthetic construct
  REGION 1..9: note = Description of Artificial Sequence: Synthetic peptide
FISGDINNL

SEQ ID NO: 10702 - protein, 9 aa, synthetic construct
  REGION 1..9: note = Description of Artificial Sequence: Synthetic peptide
GLYPPLASL

SEQ ID NO: 10703 - protein, 9 aa, synthetic construct
  REGION 1..9: note = Description of Artificial Sequence: Synthetic peptide
ILREPVHGV

SEQ ID NO: 10704 - protein, 9 aa, synthetic construct
  REGION 1..9: note = Description of Artificial Sequence: Synthetic peptide
KLSALFYRL

SEQ ID NO: 10705 - protein, 11 aa, synthetic construct
  REGION 1..11: note = Description of Artificial Sequence: Synthetic peptide
GLLPGEREWHL

SEQ ID NO: 10706 - protein, 9 aa, synthetic construct
  REGION 1..9: note = Description of Artificial Sequence: Synthetic peptide
SLFNTVAVL

SEQ ID NO: 10707 - protein, 9 aa, synthetic construct
  REGION 1..9: note = Description of Artificial Sequence: Synthetic peptide
IVNKIIEKL

SEQ ID NO: 10708 - protein, 9 aa, synthetic construct
  REGION 1..9: note = Description of Artificial Sequence: Synthetic peptide
AIIKILQQL

SEQ ID NO: 10709 - protein, 9 aa, synthetic construct
  REGION 1..9: note = Description of Artificial Sequence: Synthetic peptide
IITIVVWTI

SEQ ID NO: 10710 - protein, 9 aa, synthetic construct
  REGION 1..9: note = Description of Artificial Sequence: Synthetic peptide
SIVAFIIAL

SEQ ID NO: 10711 - protein, 10 aa, synthetic construct
  REGION 1..10: note = Description of Artificial Sequence: Synthetic peptide
KVVEIEPLGV

SEQ ID NO: 10712 - protein, 9 aa, synthetic construct
  REGION 1..9: note = Description of Artificial Sequence: Synthetic peptide
LLAIGIAAL

SEQ ID NO: 10713 - protein, 9 aa, synthetic construct
  REGION 1..9: note = Description of Artificial Sequence: Synthetic peptide
RVNALFYKL

SEQ ID NO: 10714 - protein, 9 aa, synthetic construct
  REGION 1..9: note = Description of Artificial Sequence: Synthetic peptide
NYSNIIYKL

SEQ ID NO: 10715 - protein, 9 aa, synthetic construct
  REGION 1..9: note = Description of Artificial Sequence: Synthetic peptide
ETLKYLWNL

SEQ ID NO: 10716 - protein, 10 aa, synthetic construct
  REGION 1..10: note = Description of Artificial Sequence: Synthetic peptide
YLLAIGIAAL

SEQ ID NO: 10717 - protein, 9 aa, synthetic construct
  REGION 1..9: note = Description of Artificial Sequence: Synthetic peptide
LVWDDLRNL

SEQ ID NO: 10718 - protein, 11 aa, synthetic construct
  REGION 1..11: note = Description of Artificial Sequence: Synthetic peptide
ALFYKLDIVQI

SEQ ID NO: 10719 - protein, 9 aa, synthetic construct
  REGION 1..9: note = Description of Artificial Sequence: Synthetic peptide
ALFNKTIKF

SEQ ID NO: 10720 - protein, 10 aa, synthetic construct
  REGION 1..10: note = Description of Artificial Sequence: Synthetic peptide
KLDEWEKIQL

SEQ ID NO: 10721 - protein, 9 aa, synthetic construct
  REGION 1..9: note = Description of Artificial Sequence: Synthetic peptide
GIAALIVAL

SEQ ID NO: 10722 - protein, 9 aa, synthetic construct
  REGION 1..9: note = Description of Artificial Sequence: Synthetic peptide
KVHALFYKL

SEQ ID NO: 10723 - protein, 9 aa, synthetic construct
  REGION 1..9: note = Description of Artificial Sequence: Synthetic peptide
IIAQIQPSI

SEQ ID NO: 10724 - protein, 10 aa, synthetic construct
  REGION 1..10: note = Description of Artificial Sequence: Synthetic peptide
KQYDNILIEI

SEQ ID NO: 10725 - protein, 9 aa, synthetic construct
  REGION 1..9: note = Description of Artificial Sequence: Synthetic peptide
FIPGDINNL

SEQ ID NO: 10726 - protein, 9 aa, synthetic construct
  REGION 1..9: note = Description of Artificial Sequence: Synthetic peptide
ALGEVGPFI

SEQ ID NO: 10727 - protein, 9 aa, synthetic construct
  REGION 1..9: note = Description of Artificial Sequence: Synthetic peptide
YTAFTIPSL

SEQ ID NO: 10728 - protein, 9 aa, synthetic construct
  REGION 1..9: note = Description of Artificial Sequence: Synthetic peptide
FIIALIIAI

SEQ ID NO: 10729 - protein, 10 aa, synthetic construct
  REGION 1..10: note = Description of Artificial Sequence: Synthetic peptide
NLLAIGIAAL

SEQ ID NO: 10730 - protein, 9 aa, synthetic construct
  REGION 1..9: note = Description of Artificial Sequence: Synthetic peptide
SLNNETPGI

SEQ ID NO: 10731 - protein, 9 aa, synthetic construct
  REGION 1..9: note = Description of Artificial Sequence: Synthetic peptide
TIVAFIVAL

SEQ ID NO: 10732 - protein, 11 aa, synthetic construct
  REGION 1..11: note = Description of Artificial Sequence: Synthetic peptide
NLSDNAKTIIV

SEQ ID NO: 10733 - protein, 10 aa, synthetic construct
  REGION 1..10: note = Description of Artificial Sequence: Synthetic peptide
ALVWDDLRNL

SEQ ID NO: 10734 - protein, 9 aa, synthetic construct
  REGION 1..9: note = Description of Artificial Sequence: Synthetic peptide
YVLSIVAFI

SEQ ID NO: 10735 - protein, 9 aa, synthetic construct
  REGION 1..9: note = Description of Artificial Sequence: Synthetic peptide
ELYPPLASL

SEQ ID NO: 10736 - protein, 10 aa, synthetic construct
  REGION 1..10: note = Description of Artificial Sequence: Synthetic peptide
KQYDHILIEI

SEQ ID NO: 10737 - protein, 9 aa, synthetic construct
  REGION 1..9: note = Description of Artificial Sequence: Synthetic peptide
FLHGIGQYI

SEQ ID NO: 10738 - protein, 9 aa, synthetic construct
  REGION 1..9: note = Description of Artificial Sequence: Synthetic peptide
LTLGWCFKL

SEQ ID NO: 10739 - protein, 10 aa, synthetic construct
  REGION 1..10: note = Description of Artificial Sequence: Synthetic peptide
SLVWDDLRNL

SEQ ID NO: 10740 - protein, 9 aa, synthetic construct
  REGION 1..9: note = Description of Artificial Sequence: Synthetic peptide
NTVAVLYYV

SEQ ID NO: 10741 - protein, 10 aa, synthetic construct
  REGION 1..10: note = Description of Artificial Sequence: Synthetic peptide
ALAWDDLRNL

SEQ ID NO: 10742 - protein, 9 aa, synthetic construct
  REGION 1..9: note = Description of Artificial Sequence: Synthetic peptide
IVTDSQYVL

SEQ ID NO: 10743 - protein, 9 aa, synthetic construct
  REGION 1..9: note = Description of Artificial Sequence: Synthetic peptide
AVAEWTDRV

SEQ ID NO: 10744 - protein, 9 aa, synthetic construct
  REGION 1..9: note = Description of Artificial Sequence: Synthetic peptide
NTIAVLYYV

SEQ ID NO: 10745 - protein, 9 aa, synthetic construct
  REGION 1..9: note = Description of Artificial Sequence: Synthetic peptide
TVLSIVNRV

SEQ ID NO: 10746 - protein, 9 aa, synthetic construct
  REGION 1..9: note = Description of Artificial Sequence: Synthetic peptide
LLNATAIAV

SEQ ID NO: 10747 - protein, 10 aa, synthetic construct
  REGION 1..10: note = Description of Artificial Sequence: Synthetic peptide
YLKDQQLLGL

SEQ ID NO: 10748 - protein, 9 aa, synthetic construct
  REGION 1..9: note = Description of Artificial Sequence: Synthetic peptide
LLNTTAIVV

SEQ ID NO: 10749 - protein, 9 aa, synthetic construct
  REGION 1..9: note = Description of Artificial Sequence: Synthetic peptide
GLADQLIHI

SEQ ID NO: 10750 - protein, 9 aa, synthetic construct
  REGION 1..9: note = Description of Artificial Sequence: Synthetic peptide
SLYNTIAVL

SEQ ID NO: 10751 - protein, 9 aa, synthetic construct
  REGION 1..9: note = Description of Artificial Sequence: Synthetic peptide
ALTDIVPLT

SEQ ID NO: 10752 - protein, 9 aa, synthetic construct
  REGION 1..9: note = Description of Artificial Sequence: Synthetic peptide
AVLSIVNRV

SEQ ID NO: 10753 - protein, 9 aa, synthetic construct
  REGION 1..9: note = Description of Artificial Sequence: Synthetic peptide
HLEGKIILV

SEQ ID NO: 10754 - protein, 9 aa, synthetic construct
  REGION 1..9: note = Description of Artificial Sequence: Synthetic peptide
IVNQIIEQL

SEQ ID NO: 10755 - protein, 9 aa, synthetic construct
  REGION 1..9: note = Description of Artificial Sequence: Synthetic peptide
ALFYRLDIV

SEQ ID NO: 10756 - protein, 9 aa, synthetic construct
  REGION 1..9: note = Description of Artificial Sequence: Synthetic peptide
AIIRILQQL

SEQ ID NO: 10757 - protein, 10 aa, synthetic construct
  REGION 1..10: note = Description of Artificial Sequence: Synthetic peptide
TLWQRPLVTI

SEQ ID NO: 10758 - protein, 9 aa, synthetic construct
  REGION 1..9: note = Description of Artificial Sequence: Synthetic peptide
LVNQIIEQL

SEQ ID NO: 10759 - protein, 11 aa, synthetic construct
  REGION 1..11: note = Description of Artificial Sequence: Synthetic peptide
FLKEKGGLEGL

SEQ ID NO: 10760 - protein, 9 aa, synthetic construct
  REGION 1..9: note = Description of Artificial Sequence: Synthetic peptide
LLQLTVWGI

SEQ ID NO: 10761 - protein, 9 aa, synthetic construct
  REGION 1..9: note = Description of Artificial Sequence: Synthetic peptide
HLEGKVILV

SEQ ID NO: 10762 - protein, 9 aa, synthetic construct
  REGION 1..9: note = Description of Artificial Sequence: Synthetic peptide
ILKEPVHGV

SEQ ID NO: 10763 - protein, 9 aa, synthetic construct
  REGION 1..9: note = Description of Artificial Sequence: Synthetic peptide
TLNAWVKVI

SEQ ID NO: 10764 - protein, 9 aa, synthetic construct
  REGION 1..9: note = Description of Artificial Sequence: Synthetic peptide
IIAIVVWTI

SEQ ID NO: 10765 - protein, 9 aa, synthetic construct
  REGION 1..9: note = Description of Artificial Sequence: Synthetic peptide
IVTDSQYAL

SEQ ID NO: 10766 - protein, 11 aa, synthetic construct
  REGION 1..11: note = Description of Artificial Sequence: Synthetic peptide
VQLGIPHPAGL

SEQ ID NO: 10767 - protein, 10 aa, synthetic construct
  REGION 1..10: note = Description of Artificial Sequence: Synthetic peptide
RTQDFWEVQL

SEQ ID NO: 10768 - protein, 9 aa, synthetic construct
  REGION 1..9: note = Description of Artificial Sequence: Synthetic peptide
KLTPLCVTL

SEQ ID NO: 10769 - protein, 9 aa, synthetic construct
  REGION 1..9: note = Description of Artificial Sequence: Synthetic peptide
FISGDINNL

SEQ ID NO: 10770 - protein, 9 aa, synthetic construct
  REGION 1..9: note = Description of Artificial Sequence: Synthetic peptide
WTVDDIQKL

SEQ ID NO: 10771 - protein, 9 aa, synthetic construct
  REGION 1..9: note = Description of Artificial Sequence: Synthetic peptide
FIPGDINNL

SEQ ID NO: 10772 - protein, 9 aa, synthetic construct
  REGION 1..9: note = Description of Artificial Sequence: Synthetic peptide
FIPGDVNNL

SEQ ID NO: 10773 - protein, 9 aa, synthetic construct
  REGION 1..9: note = Description of Artificial Sequence: Synthetic peptide
RVIEALQRA

SEQ ID NO: 10774 - protein, 9 aa, synthetic construct
  REGION 1..9: note = Description of Artificial Sequence: Synthetic peptide
AIIGDIRKA

SEQ ID NO: 10775 - protein, 10 aa, synthetic construct
  REGION 1..10: note = Description of Artificial Sequence: Synthetic peptide
SQISGESHTV

SEQ ID NO: 10776 - protein, 10 aa, synthetic construct
  REGION 1..10: note = Description of Artificial Sequence: Synthetic peptide
FVPKQPISQA

SEQ ID NO: 10777 - protein, 9 aa, synthetic construct
  REGION 1..9: note = Description of Artificial Sequence: Synthetic peptide
RVIEVLQRA

SEQ ID NO: 10778 - protein, 9 aa, synthetic construct
  REGION 1..9: note = Description of Artificial Sequence: Synthetic peptide
VVAEGTDRV

SEQ ID NO: 10779 - protein, 9 aa, synthetic construct
  REGION 1..9: note = Description of Artificial Sequence: Synthetic peptide
VVAEGTDRI

SEQ ID NO: 10780 - protein, 10 aa, synthetic construct
  REGION 1..10: note = Description of Artificial Sequence: Synthetic peptide
SQISGESHAV

SEQ ID NO: 10781 - protein, 9 aa, synthetic construct
  REGION 1..9: note = Description of Artificial Sequence: Synthetic peptide
ILAEAMSQA

SEQ ID NO: 10782 - protein, 9 aa, synthetic construct
  REGION 1..9: note = Description of Artificial Sequence: Synthetic peptide
GQYPPLASL

SEQ ID NO: 10783 - protein, 9 aa, synthetic construct
  REGION 1..9: note = Description of Artificial Sequence: Synthetic peptide
SQANTTIMM

SEQ ID NO: 10784 - protein, 9 aa, synthetic construct
  REGION 1..9: note = Description of Artificial Sequence: Synthetic peptide
AEWDRLHPA

SEQ ID NO: 10785 - protein, 9 aa, synthetic construct
  REGION 1..9: note = Description of Artificial Sequence: Synthetic peptide
YTSPIAGNI

SEQ ID NO: 10786 - protein, 9 aa, synthetic construct
  REGION 1..9: note = Description of Artificial Sequence: Synthetic peptide
TLSDQSSTL

SEQ ID NO: 10787 - protein, 11 aa, synthetic construct
  REGION 1..11: note = Description of Artificial Sequence: Synthetic peptide
SQISGESHAVL

SEQ ID NO: 10788 - protein, 10 aa, synthetic construct
  REGION 1..10: note = Description of Artificial Sequence: Synthetic peptide
KVVEIEPLGV

SEQ ID NO: 10789 - protein, 9 aa, synthetic construct
  REGION 1..9: note = Description of Artificial Sequence: Synthetic peptide
RIIEVLQRA

SEQ ID NO: 10790 - protein, 9 aa, synthetic construct
  REGION 1..9: note = Description of Artificial Sequence: Synthetic peptide
DTIAINDTL

SEQ ID NO: 10791 - protein, 9 aa, synthetic construct
  REGION 1..9: note = Description of Artificial Sequence: Synthetic peptide
EQVDRLVSA

SEQ ID NO: 10792 - protein, 9 aa, synthetic construct
  REGION 1..9: note = Description of Artificial Sequence: Synthetic peptide
IIAQIQPSI

SEQ ID NO: 10793 - protein, 9 aa, synthetic construct
  REGION 1..9: note = Description of Artificial Sequence: Synthetic peptide
AIIKILQQL

SEQ ID NO: 10794 - protein, 9 aa, synthetic construct
  REGION 1..9: note = Description of Artificial Sequence: Synthetic peptide
LETEPIVGA

SEQ ID NO: 10795 - protein, 11 aa, synthetic construct
  REGION 1..11: note = Description of Artificial Sequence: Synthetic peptide
SQISGESHTVL

SEQ ID NO: 10796 - protein, 11 aa, synthetic construct
  REGION 1..11: note = Description of Artificial Sequence: Synthetic peptide
GSFISGDINNL

SEQ ID NO: 10797 - protein, 11 aa, synthetic construct
  REGION 1..11: note = Description of Artificial Sequence: Synthetic peptide
TQIDPDLADQL

SEQ ID NO: 10798 - protein, 10 aa, synthetic construct
  REGION 1..10: note = Description of Artificial Sequence: Synthetic peptide
GEIIGDIRKA

SEQ ID NO: 10799 - protein, 9 aa, synthetic construct
  REGION 1..9: note = Description of Artificial Sequence: Synthetic peptide
AVAEWTDRV

SEQ ID NO: 10800 - protein, 9 aa, synthetic construct
  REGION 1..9: note = Description of Artificial Sequence: Synthetic peptide
GAVDLSHFL

SEQ ID NO: 10801 - protein, 9 aa, synthetic construct
  REGION 1..9: note = Description of Artificial Sequence: Synthetic peptide
TVLSIVNRV

SEQ ID NO: 10802 - protein, 11 aa, synthetic construct
  REGION 1..11: note = Description of Artificial Sequence: Synthetic peptide
TQIDPGLADQL

SEQ ID NO: 10803 - protein, 9 aa, synthetic construct
  REGION 1..9: note = Description of Artificial Sequence: Synthetic peptide
VVIQDNSEI

SEQ ID NO: 10804 - protein, 11 aa, synthetic construct
  REGION 1..11: note = Description of Artificial Sequence: Synthetic peptide
VVIQDNSEIKV

SEQ ID NO: 10805 - protein, 9 aa, synthetic construct
  REGION 1..9: note = Description of Artificial Sequence: Synthetic peptide
AAVDLSHFL

SEQ ID NO: 10806 - protein, 9 aa, synthetic construct
  REGION 1..9: note = Description of Artificial Sequence: Synthetic peptide
AVLSIVNRV

SEQ ID NO: 10807 - protein, 9 aa, synthetic construct
  REGION 1..9: note = Description of Artificial Sequence: Synthetic peptide
IEIKDTKEA

SEQ ID NO: 10808 - protein, 9 aa, synthetic construct
  REGION 1..9: note = Description of Artificial Sequence: Synthetic peptide
VLAEAMSQA

SEQ ID NO: 10809 - protein, 9 aa, synthetic construct
  REGION 1..9: note = Description of Artificial Sequence: Synthetic peptide
IVNQIIEQL

SEQ ID NO: 10810 - protein, 9 aa, synthetic construct
  REGION 1..9: note = Description of Artificial Sequence: Synthetic peptide
GAASITLTV

SEQ ID NO: 10811 - protein, 9 aa, synthetic construct
  REGION 1..9: note = Description of Artificial Sequence: Synthetic peptide
ASITLTVQA

SEQ ID NO: 10812 - protein, 9 aa, synthetic construct
  REGION 1..9: note = Description of Artificial Sequence: Synthetic peptide
LVNQIIEQL

SEQ ID NO: 10813 - protein, 9 aa, synthetic construct
  REGION 1..9: note = Description of Artificial Sequence: Synthetic peptide
ATLEEMMTA

SEQ ID NO: 10814 - protein, 9 aa, synthetic construct
  REGION 1..9: note = Description of Artificial Sequence: Synthetic peptide
IEVKDTKEA

SEQ ID NO: 10815 - protein, 9 aa, synthetic construct
  REGION 1..9: note = Description of Artificial Sequence: Synthetic peptide
FTSAAVKAA

SEQ ID NO: 10816 - protein, 9 aa, synthetic construct
  REGION 1..9: note = Description of Artificial Sequence: Synthetic peptide
RAIEAQQHL

SEQ ID NO: 10817 - protein, 9 aa, synthetic construct
  REGION 1..9: note = Description of Artificial Sequence: Synthetic peptide
SQIYPGIKV

SEQ ID NO: 10818 - protein, 9 aa, synthetic construct
  REGION 1..9: note = Description of Artificial Sequence: Synthetic peptide
ILKEPVHGV

SEQ ID NO: 10819 - protein, 9 aa, synthetic construct
  REGION 1..9: note = Description of Artificial Sequence: Synthetic peptide
QLTEAVQKI

SEQ ID NO: 10820 - protein, 9 aa, synthetic construct
  REGION 1..9: note = Description of Artificial Sequence: Synthetic peptide
WTVNDIQKL

SEQ ID NO: 10821 - protein, 9 aa, synthetic construct
  REGION 1..9: note = Description of Artificial Sequence: Synthetic peptide
IVTDSQYAL

SEQ ID NO: 10822 - protein, 10 aa, synthetic construct
  REGION 1..10: note = Description of Artificial Sequence: Synthetic peptide
SQYALGIIQA

SEQ ID NO: 10823 - protein, 10 aa, synthetic construct
  REGION 1..10: note = Description of Artificial Sequence: Synthetic peptide
KVVEIEPLGV

SEQ ID NO: 10824 - protein, 9 aa, synthetic construct
  REGION 1..9: note = Description of Artificial Sequence: Synthetic peptide
FISGDINNL

SEQ ID NO: 10825 - protein, 9 aa, synthetic construct
  REGION 1..9: note = Description of Artificial Sequence: Synthetic peptide
RVIEALQRA

SEQ ID NO: 10826 - protein, 9 aa, synthetic construct
  REGION 1..9: note = Description of Artificial Sequence: Synthetic peptide
RVIEVLQRA

SEQ ID NO: 10827 - protein, 9 aa, synthetic construct
  REGION 1..9: note = Description of Artificial Sequence: Synthetic peptide
GQYPPLASL

SEQ ID NO: 10828 - protein, 9 aa, synthetic construct
  REGION 1..9: note = Description of Artificial Sequence: Synthetic peptide
IQDNSEIKI

SEQ ID NO: 10829 - protein, 9 aa, synthetic construct
  REGION 1..9: note = Description of Artificial Sequence: Synthetic peptide
AIIGDIRKA

SEQ ID NO: 10830 - protein, 9 aa, synthetic construct
  REGION 1..9: note = Description of Artificial Sequence: Synthetic peptide
FIPGDINNL

SEQ ID NO: 10831 - protein, 10 aa, synthetic construct
  REGION 1..10: note = Description of Artificial Sequence: Synthetic peptide
SQISGESHTV

SEQ ID NO: 10832 - protein, 9 aa, synthetic construct
  REGION 1..9: note = Description of Artificial Sequence: Synthetic peptide
WTVDDIQKL

SEQ ID NO: 10833 - protein, 9 aa, synthetic construct
  REGION 1..9: note = Description of Artificial Sequence: Synthetic peptide
RTPPTPPAA

SEQ ID NO: 10834 - protein, 9 aa, synthetic construct
  REGION 1..9: note = Description of Artificial Sequence: Synthetic peptide
VVAEGTDRV

SEQ ID NO: 10835 - protein, 9 aa, synthetic construct
  REGION 1..9: note = Description of Artificial Sequence: Synthetic peptide
EQVDRLVSA

SEQ ID NO: 10836 - protein, 9 aa, synthetic construct
  REGION 1..9: note = Description of Artificial Sequence: Synthetic peptide
ILAEAMSQA

SEQ ID NO: 10837 - protein, 9 aa, synthetic construct
  REGION 1..9: note = Description of Artificial Sequence: Synthetic peptide
YQLETEPIV

SEQ ID NO: 10838 - protein, 9 aa, synthetic construct
  REGION 1..9: note = Description of Artificial Sequence: Synthetic peptide
FIPGDVNNL

SEQ ID NO: 10839 - protein, 10 aa, synthetic construct
  REGION 1..10: note = Description of Artificial Sequence: Synthetic peptide
FVPKQPISQA

SEQ ID NO: 10840 - protein, 9 aa, synthetic construct
  REGION 1..9: note = Description of Artificial Sequence: Synthetic peptide
GVTDTKEAL

SEQ ID NO: 10841 - protein, 9 aa, synthetic construct
  REGION 1..9: note = Description of Artificial Sequence: Synthetic peptide
AIIKILQQL

SEQ ID NO: 10842 - protein, 9 aa, synthetic construct
  REGION 1..9: note = Description of Artificial Sequence: Synthetic peptide
ASDFNIPAV

SEQ ID NO: 10843 - protein, 9 aa, synthetic construct
  REGION 1..9: note = Description of Artificial Sequence: Synthetic peptide
IIAQIQPSI

SEQ ID NO: 10844 - protein, 9 aa, synthetic construct
  REGION 1..9: note = Description of Artificial Sequence: Synthetic peptide
DQITIDICG

SEQ ID NO: 10845 - protein, 9 aa, synthetic construct
  REGION 1..9: note = Description of Artificial Sequence: Synthetic peptide
KQMAVDDCV

SEQ ID NO: 10846 - protein, 9 aa, synthetic construct
  REGION 1..9: note = Description of Artificial Sequence: Synthetic peptide
ELTDAVQKV

SEQ ID NO: 10847 - protein, 11 aa, synthetic construct
  REGION 1..11: note = Description of Artificial Sequence: Synthetic peptide
TQIDPDLADQL

SEQ ID NO: 10848 - protein, 9 aa, synthetic construct
  REGION 1..9: note = Description of Artificial Sequence: Synthetic peptide
IVTDSQYVL

SEQ ID NO: 10849 - protein, 9 aa, synthetic construct
  REGION 1..9: note = Description of Artificial Sequence: Synthetic peptide
AVAEWTDRV

SEQ ID NO: 10850 - protein, 9 aa, synthetic construct
  REGION 1..9: note = Description of Artificial Sequence: Synthetic peptide
RTPPAAEGV

SEQ ID NO: 10851 - protein, 9 aa, synthetic construct
  REGION 1..9: note = Description of Artificial Sequence: Synthetic peptide
GAVDLSHFL

SEQ ID NO: 10852 - protein, 9 aa, synthetic construct
  REGION 1..9: note = Description of Artificial Sequence: Synthetic peptide
TVLSIVNRV

SEQ ID NO: 10853 - protein, 10 aa, synthetic construct
  REGION 1..10: note = Description of Artificial Sequence: Synthetic peptide
GVVESINKEL

SEQ ID NO: 10854 - protein, 9 aa, synthetic construct
  REGION 1..9: note = Description of Artificial Sequence: Synthetic peptide
IQDNSEIKV

SEQ ID NO: 10855 - protein, 11 aa, synthetic construct
  REGION 1..11: note = Description of Artificial Sequence: Synthetic peptide
VVIQDNSEIKV

SEQ ID NO: 10856 - protein, 11 aa, synthetic construct
  REGION 1..11: note = Description of Artificial Sequence: Synthetic peptide
TQIDPGLADQL

SEQ ID NO: 10857 - protein, 9 aa, synthetic construct
  REGION 1..9: note = Description of Artificial Sequence: Synthetic peptide
VVIQDNSEI

SEQ ID NO: 10858 - protein, 9 aa, synthetic construct
  REGION 1..9: note = Description of Artificial Sequence: Synthetic peptide
AAVDLSHFL

SEQ ID NO: 10859 - protein, 9 aa, synthetic construct
  REGION 1..9: note = Description of Artificial Sequence: Synthetic peptide
AVLSIVNRV

SEQ ID NO: 10860 - protein, 9 aa, synthetic construct
  REGION 1..9: note = Description of Artificial Sequence: Synthetic peptide
VLAEAMSQA

SEQ ID NO: 10861 - protein, 9 aa, synthetic construct
  REGION 1..9: note = Description of Artificial Sequence: Synthetic peptide
IVNQIIEQL

SEQ ID NO: 10862 - protein, 9 aa, synthetic construct
  REGION 1..9: note = Description of Artificial Sequence: Synthetic peptide
GAASITLTV

SEQ ID NO: 10863 - protein, 9 aa, synthetic construct
  REGION 1..9: note = Description of Artificial Sequence: Synthetic peptide
SQIYPGIKV

SEQ ID NO: 10864 - protein, 9 aa, synthetic construct
  REGION 1..9: note = Description of Artificial Sequence: Synthetic peptide
QLTEAVQKI

SEQ ID NO: 10865 - protein, 9 aa, synthetic construct
  REGION 1..9: note = Description of Artificial Sequence: Synthetic peptide
IVTDSQYAL

SEQ ID NO: 10866 - protein, 9 aa, synthetic construct
  REGION 1..9: note = Description of Artificial Sequence: Synthetic peptide
GGIGGFIKV

SEQ ID NO: 10867 - protein, 10 aa, synthetic construct
  REGION 1..10: note = Description of Artificial Sequence: Synthetic peptide
TVLDVGDAYF

SEQ ID NO: 10868 - protein, 9 aa, synthetic construct
  REGION 1..9: note = Description of Artificial Sequence: Synthetic peptide
FIPGDVNNL

SEQ ID NO: 10869 - protein, 9 aa, synthetic construct
  REGION 1..9: note = Description of Artificial Sequence: Synthetic peptide
TLDRVKAEL

SEQ ID NO: 10870 - protein, 9 aa, synthetic construct
  REGION 1..9: note = Description of Artificial Sequence: Synthetic peptide
FIPGDINNL

SEQ ID NO: 10871 - protein, 9 aa, synthetic construct
  REGION 1..9: note = Description of Artificial Sequence: Synthetic peptide
TVDDIQKLV

SEQ ID NO: 10872 - protein, 9 aa, synthetic construct
  REGION 1..9: note = Description of Artificial Sequence: Synthetic peptide
GTDRIIEVL

SEQ ID NO: 10873 - protein, 9 aa, synthetic construct
  REGION 1..9: note = Description of Artificial Sequence: Synthetic peptide
GTDRVIEAL

SEQ ID NO: 10874 - protein, 9 aa, synthetic construct
  REGION 1..9: note = Description of Artificial Sequence: Synthetic peptide
YVDRFFKVL

SEQ ID NO: 10875 - protein, 9 aa, synthetic construct
  REGION 1..9: note = Description of Artificial Sequence: Synthetic peptide
ILREPVHGV

SEQ ID NO: 10876 - protein, 9 aa, synthetic construct
  REGION 1..9: note = Description of Artificial Sequence: Synthetic peptide
FISGDINNL

SEQ ID NO: 10877 - protein, 10 aa, synthetic construct
  REGION 1..10: note = Description of Artificial Sequence: Synthetic peptide
KVVEIEPLGV

SEQ ID NO: 10878 - protein, 9 aa, synthetic construct
  REGION 1..9: note = Description of Artificial Sequence: Synthetic peptide
YVDRFFKAL

SEQ ID NO: 10879 - protein, 9 aa, synthetic construct
  REGION 1..9: note = Description of Artificial Sequence: Synthetic peptide
GTDRVIEVL

SEQ ID NO: 10880 - protein, 9 aa, synthetic construct
  REGION 1..9: note = Description of Artificial Sequence: Synthetic peptide
TVLSIVNRV

SEQ ID NO: 10881 - protein, 9 aa, synthetic construct
  REGION 1..9: note = Description of Artificial Sequence: Synthetic peptide
AADNLWVTV

SEQ ID NO: 10882 - protein, 9 aa, synthetic construct
  REGION 1..9: note = Description of Artificial Sequence: Synthetic peptide
AVLSIVNRV

SEQ ID NO: 10883 - protein, 9 aa, synthetic construct
  REGION 1..9: note = Description of Artificial Sequence: Synthetic peptide
HLEGKIILV

SEQ ID NO: 10884 - protein, 9 aa, synthetic construct
  REGION 1..9: note = Description of Artificial Sequence: Synthetic peptide
YVDRFFKTL

SEQ ID NO: 10885 - protein, 9 aa, synthetic construct
  REGION 1..9: note = Description of Artificial Sequence: Synthetic peptide
HLEGKVILV

SEQ ID NO: 10886 - protein, 9 aa, synthetic construct
  REGION 1..9: note = Description of Artificial Sequence: Synthetic peptide
ILKEPVHGV

SEQ ID NO: 10887 - protein, 9 aa, synthetic construct
  REGION 1..9: note = Description of Artificial Sequence: Synthetic peptide
FSPEVIPMF

SEQ ID NO: 10888 - protein, 9 aa, synthetic construct
  REGION 1..9: note = Description of Artificial Sequence: Synthetic peptide
FISGDINNL

SEQ ID NO: 10889 - protein, 10 aa, synthetic construct
  REGION 1..10: note = Description of Artificial Sequence: Synthetic peptide
KVVEIEPLGV

SEQ ID NO: 10890 - protein, 9 aa, synthetic construct
  REGION 1..9: note = Description of Artificial Sequence: Synthetic peptide
RVIEALQRA

SEQ ID NO: 10891 - protein, 9 aa, synthetic construct
  REGION 1..9: note = Description of Artificial Sequence: Synthetic peptide
AIIGDIRKA

SEQ ID NO: 10892 - protein, 9 aa, synthetic construct
  REGION 1..9: note = Description of Artificial Sequence: Synthetic peptide
IVNKIIEKL

SEQ ID NO: 10893 - protein, 10 aa, synthetic construct
  REGION 1..10: note = Description of Artificial Sequence: Synthetic peptide
FVPKQPISQA

SEQ ID NO: 10894 - protein, 9 aa, synthetic construct
  REGION 1..9: note = Description of Artificial Sequence: Synthetic peptide
RVIEVLQRA

SEQ ID NO: 10895 - protein, 9 aa, synthetic construct
  REGION 1..9: note = Description of Artificial Sequence: Synthetic peptide
AIIKILQQL

SEQ ID NO: 10896 - protein, 9 aa, synthetic construct
  REGION 1..9: note = Description of Artificial Sequence: Synthetic peptide
FIPGDINNL

SEQ ID NO: 10897 - protein, 9 aa, synthetic construct
  REGION 1..9: note = Description of Artificial Sequence: Synthetic peptide
WTVDDIQKL

SEQ ID NO: 10898 - protein, 9 aa, synthetic construct
  REGION 1..9: note = Description of Artificial Sequence: Synthetic peptide
FIPGDVNNL

SEQ ID NO: 10899 - protein, 9 aa, synthetic construct
  REGION 1..9: note = Description of Artificial Sequence: Synthetic peptide
KTKPPLPSV

SEQ ID NO: 10900 - protein, 9 aa, synthetic construct
  REGION 1..9: note = Description of Artificial Sequence: Synthetic peptide
RIIEVLQRA

SEQ ID NO: 10901 - protein, 9 aa, synthetic construct
  REGION 1..9: note = Description of Artificial Sequence: Synthetic peptide
ILAEAMSQA

SEQ ID NO: 10902 - protein, 11 aa, synthetic construct
  REGION 1..11: note = Description of Artificial Sequence: Synthetic peptide
GSFISGDINNL

SEQ ID NO: 10903 - protein, 10 aa, synthetic construct
  REGION 1..10: note = Description of Artificial Sequence: Synthetic peptide
SQISGESHTV

SEQ ID NO: 10904 - protein, 10 aa, synthetic construct
  REGION 1..10: note = Description of Artificial Sequence: Synthetic peptide
AVFLGFLSAA

SEQ ID NO: 10905 - protein, 10 aa, synthetic construct
  REGION 1..10: note = Description of Artificial Sequence: Synthetic peptide
SQISGESHAV

SEQ ID NO: 10906 - protein, 9 aa, synthetic construct
  REGION 1..9: note = Description of Artificial Sequence: Synthetic peptide
GQYPPLASL

SEQ ID NO: 10907 - protein, 9 aa, synthetic construct
  REGION 1..9: note = Description of Artificial Sequence: Synthetic peptide
AEWDRLHPA

SEQ ID NO: 10908 - protein, 9 aa, synthetic construct
  REGION 1..9: note = Description of Artificial Sequence: Synthetic peptide
VEIEPLGVA

SEQ ID NO: 10909 - protein, 9 aa, synthetic construct
  REGION 1..9: note = Description of Artificial Sequence: Synthetic peptide
LETEPIVGA

SEQ ID NO: 10910 - protein, 10 aa, synthetic construct
  REGION 1..10: note = Description of Artificial Sequence: Synthetic peptide
KIIGQIRDQA

SEQ ID NO: 10911 - protein, 10 aa, synthetic construct
  REGION 1..10: note = Description of Artificial Sequence: Synthetic peptide
KQYDNILIEI

SEQ ID NO: 10912 - protein, 10 aa, synthetic construct
  REGION 1..10: note = Description of Artificial Sequence: Synthetic peptide
KIIGQLQPSL

SEQ ID NO: 10913 - protein, 11 aa, synthetic construct
  REGION 1..11: note = Description of Artificial Sequence: Synthetic peptide
SQISGESHAVL

SEQ ID NO: 10914 - protein, 9 aa, synthetic construct
  REGION 1..9: note = Description of Artificial Sequence: Synthetic peptide
GTDRIIEVL

SEQ ID NO: 10915 - protein, 9 aa, synthetic construct
  REGION 1..9: note = Description of Artificial Sequence: Synthetic peptide
IIAQIQPSI

SEQ ID NO: 10916 - protein, 9 aa, synthetic construct
  REGION 1..9: note = Description of Artificial Sequence: Synthetic peptide
KVVSLTETT

SEQ ID NO: 10917 - protein, 9 aa, synthetic construct
  REGION 1..9: note = Description of Artificial Sequence: Synthetic peptide
EIIGDIRKA

SEQ ID NO: 10918 - protein, 9 aa, synthetic construct
  REGION 1..9: note = Description of Artificial Sequence: Synthetic peptide
RTPPAAEGV

SEQ ID NO: 10919 - protein, 11 aa, synthetic construct
  REGION 1..11: note = Description of Artificial Sequence: Synthetic peptide
RTPPAAEGVGA

SEQ ID NO: 10920 - protein, 10 aa, synthetic construct
  REGION 1..10: note = Description of Artificial Sequence: Synthetic peptide
GVVESINKEL

SEQ ID NO: 10921 - protein, 9 aa, synthetic construct
  REGION 1..9: note = Description of Artificial Sequence: Synthetic peptide
TVLSIVNRV

SEQ ID NO: 10922 - protein, 9 aa, synthetic construct
  REGION 1..9: note = Description of Artificial Sequence: Synthetic peptide
IEIKDTKEA

SEQ ID NO: 10923 - protein, 9 aa, synthetic construct
  REGION 1..9: note = Description of Artificial Sequence: Synthetic peptide
AVLSIVNRV

SEQ ID NO: 10924 - protein, 9 aa, synthetic construct
  REGION 1..9: note = Description of Artificial Sequence: Synthetic peptide
VLAEAMSQA

SEQ ID NO: 10925 - protein, 10 aa, synthetic construct
  REGION 1..10: note = Description of Artificial Sequence: Synthetic peptide
RVLAEAMSQA

SEQ ID NO: 10926 - protein, 9 aa, synthetic construct
  REGION 1..9: note = Description of Artificial Sequence: Synthetic peptide
IVQQQNNLL

SEQ ID NO: 10927 - protein, 9 aa, synthetic construct
  REGION 1..9: note = Description of Artificial Sequence: Synthetic peptide
IVNQIIEQL

SEQ ID NO: 10928 - protein, 9 aa, synthetic construct
  REGION 1..9: note = Description of Artificial Sequence: Synthetic peptide
AIIRILQQL

SEQ ID NO: 10929 - protein, 9 aa, synthetic construct
  REGION 1..9: note = Description of Artificial Sequence: Synthetic peptide
IEVKDTKEA

SEQ ID NO: 10930 - protein, 9 aa, synthetic construct
  REGION 1..9: note = Description of Artificial Sequence: Synthetic peptide
ILKEPVHGV

SEQ ID NO: 10931 - protein, 9 aa, synthetic construct
  REGION 1..9: note = Description of Artificial Sequence: Synthetic peptide
WTVNDIQKL

SEQ ID NO: 10932 - protein, 10 aa, synthetic construct
  REGION 1..10: note = Description of Artificial Sequence: Synthetic peptide
ATNTAIMMQK

SEQ ID NO: 10933 - protein, 10 aa, synthetic construct
  REGION 1..10: note = Description of Artificial Sequence: Synthetic peptide
ATNAAIMMQK

SEQ ID NO: 10934 - protein, 9 aa, synthetic construct
  REGION 1..9: note = Description of Artificial Sequence: Synthetic peptide
QIYPGIKIK

SEQ ID NO: 10935 - protein, 11 aa, synthetic construct
  REGION 1..11: note = Description of Artificial Sequence: Synthetic peptide
SQANTTIMMQK

SEQ ID NO: 10936 - protein, 11 aa, synthetic construct
  REGION 1..11: note = Description of Artificial Sequence: Synthetic peptide
SQANSAIMMQK

SEQ ID NO: 10937 - protein, 9 aa, synthetic construct
  REGION 1..9: note = Description of Artificial Sequence: Synthetic peptide
SNYSNIIYK

SEQ ID NO: 10938 - protein, 9 aa, synthetic construct
  REGION 1..9: note = Description of Artificial Sequence: Synthetic peptide
ALTALVSPK

SEQ ID NO: 10939 - protein, 10 aa, synthetic construct
  REGION 1..10: note = Description of Artificial Sequence: Synthetic peptide
GTNFTSATVK

SEQ ID NO: 10940 - protein, 10 aa, synthetic construct
  REGION 1..10: note = Description of Artificial Sequence: Synthetic peptide
QANSAIMMQK

SEQ ID NO: 10941 - protein, 10 aa, synthetic construct
  REGION 1..10: note = Description of Artificial Sequence: Synthetic peptide
QANTTIMMQK

SEQ ID NO: 10942 - protein, 9 aa, synthetic construct
  REGION 1..9: note = Description of Artificial Sequence: Synthetic peptide
KILDPFRAK

SEQ ID NO: 10943 - protein, 11 aa, synthetic construct
  REGION 1..11: note = Description of Artificial Sequence: Synthetic peptide
KTKPPLPSVQK

SEQ ID NO: 10944 - protein, 10 aa, synthetic construct
  REGION 1..10: note = Description of Artificial Sequence: Synthetic peptide
GQYPPLASLK

SEQ ID NO: 10945 - protein, 9 aa, synthetic construct
  REGION 1..9: note = Description of Artificial Sequence: Synthetic peptide
KIIEKLIQK

SEQ ID NO: 10946 - protein, 9 aa, synthetic construct
  REGION 1..9: note = Description of Artificial Sequence: Synthetic peptide
ILTETTNQK

SEQ ID NO: 10947 - protein, 9 aa, synthetic construct
  REGION 1..9: note = Description of Artificial Sequence: Synthetic peptide
ANSAIMMQK

SEQ ID NO: 10948 - protein, 10 aa, synthetic construct
  REGION 1..10: note = Description of Artificial Sequence: Synthetic peptide
GSYFPNATIK

SEQ ID NO: 10949 - protein, 10 aa, synthetic construct
  REGION 1..10: note = Description of Artificial Sequence: Synthetic peptide
KTKPPLPSVK

SEQ ID NO: 10950 - protein, 9 aa, synthetic construct
  REGION 1..9: note = Description of Artificial Sequence: Synthetic peptide
ALFNKTIKF

SEQ ID NO: 10951 - protein, 10 aa, synthetic construct
  REGION 1..10: note = Description of Artificial Sequence: Synthetic peptide
GLYPPLASLK

SEQ ID NO: 10952 - protein, 11 aa, synthetic construct
  REGION 1..11: note = Description of Artificial Sequence: Synthetic peptide
AVILTETTNQK

SEQ ID NO: 10953 - protein, 10 aa, synthetic construct
  REGION 1..10: note = Description of Artificial Sequence: Synthetic peptide
VILTETTNQK

SEQ ID NO: 10954 - protein, 9 aa, synthetic construct
  REGION 1..9: note = Description of Artificial Sequence: Synthetic peptide
AIFQYSMTK

SEQ ID NO: 10955 - protein, 9 aa, synthetic construct
  REGION 1..9: note = Description of Artificial Sequence: Synthetic peptide
RLYERIRER

SEQ ID NO: 10956 - protein, 9 aa, synthetic construct
  REGION 1..9: note = Description of Artificial Sequence: Synthetic peptide
STIKQACPK

SEQ ID NO: 10957 - protein, 9 aa, synthetic construct
  REGION 1..9: note = Description of Artificial Sequence: Synthetic peptide
ATKGLGISY

SEQ ID NO: 10958 - protein, 11 aa, synthetic construct
  REGION 1..11: note = Description of Artificial Sequence: Synthetic peptide
KTKPPLPSVKK

SEQ ID NO: 10959 - protein, 9 aa, synthetic construct
  REGION 1..9: note = Description of Artificial Sequence: Synthetic peptide
KILEPFRMK

SEQ ID NO: 10960 - protein, 10 aa, synthetic construct
  REGION 1..10: note = Description of Artificial Sequence: Synthetic peptide
TLSDQSSTLK

SEQ ID NO: 10961 - protein, 9 aa, synthetic construct
  REGION 1..9: note = Description of Artificial Sequence: Synthetic peptide
AVLYYVHQK

SEQ ID NO: 10962 - protein, 9 aa, synthetic construct
  REGION 1..9: note = Description of Artificial Sequence: Synthetic peptide
QIIEQLIQK

SEQ ID NO: 10963 - protein, 9 aa, synthetic construct
  REGION 1..9: note = Description of Artificial Sequence: Synthetic peptide
KILEPFRAK

SEQ ID NO: 10964 - protein, 9 aa, synthetic construct
  REGION 1..9: note = Description of Artificial Sequence: Synthetic peptide
ALTALIAPK

SEQ ID NO: 10965 - protein, 9 aa, synthetic construct
  REGION 1..9: note = Description of Artificial Sequence: Synthetic peptide
QIYPGIKVK

SEQ ID NO: 10966 - protein, 9 aa, synthetic construct
  REGION 1..9: note = Description of Artificial Sequence: Synthetic peptide
QIYPGIKVR

SEQ ID NO: 10967 - protein, 9 aa, synthetic construct
  REGION 1..9: note = Description of Artificial Sequence: Synthetic peptide
AIFQSSMTK

SEQ ID NO: 10968 - protein, 10 aa, synthetic construct
  REGION 1..10: note = Description of Artificial Sequence: Synthetic peptide
TVYYGVPVWK

SEQ ID NO: 10969 - protein, 11 aa, synthetic construct
  REGION 1..11: note = Description of Artificial Sequence: Synthetic peptide
TVNDIQKLVGK

SEQ ID NO: 10970 - protein, 10 aa, synthetic construct
  REGION 1..10: note = Description of Artificial Sequence: Synthetic peptide
ATNTAIMMQK

SEQ ID NO: 10971 - protein, 10 aa, synthetic construct
  REGION 1..10: note = Description of Artificial Sequence: Synthetic peptide
ATNAAIMMQK

SEQ ID NO: 10972 - protein, 11 aa, synthetic construct
  REGION 1..11: note = Description of Artificial Sequence: Synthetic peptide
SQANTTIMMQK

SEQ ID NO: 10973 - protein, 10 aa, synthetic construct
  REGION 1..10: note = Description of Artificial Sequence: Synthetic peptide
TVQPIQLPNK

SEQ ID NO: 10974 - protein, 10 aa, synthetic construct
  REGION 1..10: note = Description of Artificial Sequence: Synthetic peptide
GTNFTSATVK

SEQ ID NO: 10975 - protein, 11 aa, synthetic construct
  REGION 1..11: note = Description of Artificial Sequence: Synthetic peptide
AVILTETTNQK

SEQ ID NO: 10976 - protein, 10 aa, synthetic construct
  REGION 1..10: note = Description of Artificial Sequence: Synthetic peptide
QANSAIMMQK

SEQ ID NO: 10977 - protein, 11 aa, synthetic construct
  REGION 1..11: note = Description of Artificial Sequence: Synthetic peptide
AVSLTETTNQK

SEQ ID NO: 10978 - protein, 11 aa, synthetic construct
  REGION 1..11: note = Description of Artificial Sequence: Synthetic peptide
TVDDIQKLVGK

SEQ ID NO: 10979 - protein, 10 aa, synthetic construct
  REGION 1..10: note = Description of Artificial Sequence: Synthetic peptide
QANTTIMMQK

SEQ ID NO: 10980 - protein, 9 aa, synthetic construct
  REGION 1..9: note = Description of Artificial Sequence: Synthetic peptide
ALTALVSPK

SEQ ID NO: 10981 - protein, 11 aa, synthetic construct
  REGION 1..11: note = Description of Artificial Sequence: Synthetic peptide
SQANSAIMMQK

SEQ ID NO: 10982 - protein, 11 aa, synthetic construct
  REGION 1..11: note = Description of Artificial Sequence: Synthetic peptide
ATGDIIGDIKK

SEQ ID NO: 10983 - protein, 9 aa, synthetic construct
  REGION 1..9: note = Description of Artificial Sequence: Synthetic peptide
ILTETTNQK

SEQ ID NO: 10984 - protein, 10 aa, synthetic construct
  REGION 1..10: note = Description of Artificial Sequence: Synthetic peptide
VILTETTNQK

SEQ ID NO: 10985 - protein, 9 aa, synthetic construct
  REGION 1..9: note = Description of Artificial Sequence: Synthetic peptide
QIHQDPVPK

SEQ ID NO: 10986 - protein, 10 aa, synthetic construct
  REGION 1..10: note = Description of Artificial Sequence: Synthetic peptide
TVQPIQLPDK

SEQ ID NO: 10987 - protein, 9 aa, synthetic construct
  REGION 1..9: note = Description of Artificial Sequence: Synthetic peptide
ANSAIMMQK

SEQ ID NO: 10988 - protein, 10 aa, synthetic construct
  REGION 1..10: note = Description of Artificial Sequence: Synthetic peptide
TLSDQSSTLK

SEQ ID NO: 10989 - protein, 10 aa, synthetic construct
  REGION 1..10: note = Description of Artificial Sequence: Synthetic peptide
ATGDIIGDIK

SEQ ID NO: 10990 - protein, 11 aa, synthetic construct
  REGION 1..11: note = Description of Artificial Sequence: Synthetic peptide
KTQQAAAAADK

SEQ ID NO: 10991 - protein, 11 aa, synthetic construct
  REGION 1..11: note = Description of Artificial Sequence: Synthetic peptide
KTKPPLPSVQK

SEQ ID NO: 10992 - protein, 9 aa, synthetic construct
  REGION 1..9: note = Description of Artificial Sequence: Synthetic peptide
STIKQACPK

SEQ ID NO: 10993 - protein, 10 aa, synthetic construct
  REGION 1..10: note = Description of Artificial Sequence: Synthetic peptide
GSYFPNATIK

SEQ ID NO: 10994 - protein, 10 aa, synthetic construct
  REGION 1..10: note = Description of Artificial Sequence: Synthetic peptide
GSQPTTPCTK

SEQ ID NO: 10995 - protein, 9 aa, synthetic construct
  REGION 1..9: note = Description of Artificial Sequence: Synthetic peptide
LTALIAPEK

SEQ ID NO: 10996 - protein, 9 aa, synthetic construct
  REGION 1..9: note = Description of Artificial Sequence: Synthetic peptide
QIYPGIKIK

SEQ ID NO: 10997 - protein, 9 aa, synthetic construct
  REGION 1..9: note = Description of Artificial Sequence: Synthetic peptide
SNYSNIIYK

SEQ ID NO: 10998 - protein, 11 aa, synthetic construct
  REGION 1..11: note = Description of Artificial Sequence: Synthetic peptide
ATGAIIGDIRK

SEQ ID NO: 10999 - protein, 8 aa, synthetic construct
  REGION 1..8: note = Description of Artificial Sequence: Synthetic peptide
IVNKIIEK

SEQ ID NO: 11000 - protein, 10 aa, synthetic construct
  REGION 1..10: note = Description of Artificial Sequence: Synthetic peptide
GLYPPLASLK

SEQ ID NO: 11001 - protein, 9 aa, synthetic construct
  REGION 1..9: note = Description of Artificial Sequence: Synthetic peptide
AIFQYSMTK

SEQ ID NO: 11002 - protein, 9 aa, synthetic construct
  REGION 1..9: note = Description of Artificial Sequence: Synthetic peptide
KSESEIVNK

SEQ ID NO: 11003 - protein, 10 aa, synthetic construct
  REGION 1..10: note = Description of Artificial Sequence: Synthetic peptide
GQYPPLASLK

SEQ ID NO: 11004 - protein, 11 aa, synthetic construct
  REGION 1..11: note = Description of Artificial Sequence: Synthetic peptide
VVSLTETTNQK

SEQ ID NO: 11005 - protein, 11 aa, synthetic construct
  REGION 1..11: note = Description of Artificial Sequence: Synthetic peptide
ATGEIIGDIRK

SEQ ID NO: 11006 - protein, 9 aa, synthetic construct
  REGION 1..9: note = Description of Artificial Sequence: Synthetic peptide
AVLYYVHQK

SEQ ID NO: 11007 - protein, 10 aa, synthetic construct
  REGION 1..10: note = Description of Artificial Sequence: Synthetic peptide
VVESINKELK

SEQ ID NO: 11008 - protein, 9 aa, synthetic construct
  REGION 1..9: note = Description of Artificial Sequence: Synthetic peptide
QIIEQLIQK

SEQ ID NO: 11009 - protein, 10 aa, synthetic construct
  REGION 1..10: note = Description of Artificial Sequence: Synthetic peptide
SLQTGSEELK

SEQ ID NO: 11010 - protein, 10 aa, synthetic construct
  REGION 1..10: note = Description of Artificial Sequence: Synthetic peptide
GSNFTSSAVK

SEQ ID NO: 11011 - protein, 11 aa, synthetic construct
  REGION 1..11: note = Description of Artificial Sequence: Synthetic peptide
QSQGVVESINK

SEQ ID NO: 11012 - protein, 10 aa, synthetic construct
  REGION 1..10: note = Description of Artificial Sequence: Synthetic peptide
TVQPIQLPEK

SEQ ID NO: 11013 - protein, 11 aa, synthetic construct
  REGION 1..11: note = Description of Artificial Sequence: Synthetic peptide
YVDGASNRETK

SEQ ID NO: 11014 - protein, 9 aa, synthetic construct
  REGION 1..9: note = Description of Artificial Sequence: Synthetic peptide
ALTALIAPK

SEQ ID NO: 11015 - protein, 9 aa, synthetic construct
  REGION 1..9: note = Description of Artificial Sequence: Synthetic peptide
QIYPGIKVK

SEQ ID NO: 11016 - protein, 9 aa, synthetic construct
  REGION 1..9: note = Description of Artificial Sequence: Synthetic peptide
STITQACPK

SEQ ID NO: 11017 - protein, 10 aa, synthetic construct
  REGION 1..10: note = Description of Artificial Sequence: Synthetic peptide
GSNFTSAAVK

SEQ ID NO: 11018 - protein, 10 aa, synthetic construct
  REGION 1..10: note = Description of Artificial Sequence: Synthetic peptide
SILDIKQGPK

SEQ ID NO: 11019 - protein, 9 aa, synthetic construct
  REGION 1..9: note = Description of Artificial Sequence: Synthetic peptide
AVDLSHFLK

SEQ ID NO: 11020 - protein, 9 aa, synthetic construct
  REGION 1..9: note = Description of Artificial Sequence: Synthetic peptide
KQLTEAVQK

SEQ ID NO: 11021 - protein, 11 aa, synthetic construct
  REGION 1..11: note = Description of Artificial Sequence: Synthetic peptide
TVNDIQKLVGK

SEQ ID NO: 11022 - protein, 9 aa, synthetic construct
  REGION 1..9: note = Description of Artificial Sequence: Synthetic peptide
AIFQSSMTK

SEQ ID NO: 11023 - protein, 11 aa, synthetic construct
  REGION 1..11: note = Description of Artificial Sequence: Synthetic peptide
QSQGVVESMNK

SEQ ID NO: 11024 - protein, 9 aa, synthetic construct
  REGION 1..9: note = Description of Artificial Sequence: Synthetic peptide
IIATDIQTK

SEQ ID NO: 11025 - protein, 11 aa, synthetic construct
  REGION 1..11: note = Description of Artificial Sequence: Synthetic peptide
ATDIQTKELQK

SEQ ID NO: 11026 - protein, 10 aa, synthetic construct
  REGION 1..10: note = Description of Artificial Sequence: Synthetic peptide
VVESMNKELK

SEQ ID NO: 11027 - protein, 10 aa, synthetic construct
  REGION 1..10: note = Description of Artificial Sequence: Synthetic peptide
ATNTAIMMQK

SEQ ID NO: 11028 - protein, 10 aa, synthetic construct
  REGION 1..10: note = Description of Artificial Sequence: Synthetic peptide
ATNAAIMMQK

SEQ ID NO: 11029 - protein, 11 aa, synthetic construct
  REGION 1..11: note = Description of Artificial Sequence: Synthetic peptide
SQANTTIMMQK

SEQ ID NO: 11030 - protein, 11 aa, synthetic construct
  REGION 1..11: note = Description of Artificial Sequence: Synthetic peptide
SQANSAIMMQK

SEQ ID NO: 11031 - protein, 11 aa, synthetic construct
  REGION 1..11: note = Description of Artificial Sequence: Synthetic peptide
AVILTETTNQK

SEQ ID NO: 11032 - protein, 11 aa, synthetic construct
  REGION 1..11: note = Description of Artificial Sequence: Synthetic peptide
ATGDIIGDIKK

SEQ ID NO: 11033 - protein, 10 aa, synthetic construct
  REGION 1..10: note = Description of Artificial Sequence: Synthetic peptide
GTNFTSATVK

SEQ ID NO: 11034 - protein, 10 aa, synthetic construct
  REGION 1..10: note = Description of Artificial Sequence: Synthetic peptide
QANSAIMMQK

SEQ ID NO: 11035 - protein, 10 aa, synthetic construct
  REGION 1..10: note = Description of Artificial Sequence: Synthetic peptide
ATGDIIGDIK

SEQ ID NO: 11036 - protein, 9 aa, synthetic construct
  REGION 1..9: note = Description of Artificial Sequence: Synthetic peptide
SNYSNIIYK

SEQ ID NO: 11037 - protein, 11 aa, synthetic construct
  REGION 1..11: note = Description of Artificial Sequence: Synthetic peptide
ATGAIIGDIRK

SEQ ID NO: 11038 - protein, 11 aa, synthetic construct
  REGION 1..11: note = Description of Artificial Sequence: Synthetic peptide
AVSLTETTNQK

SEQ ID NO: 11039 - protein, 9 aa, synthetic construct
  REGION 1..9: note = Description of Artificial Sequence: Synthetic peptide
STIKQACPK

SEQ ID NO: 11040 - protein, 10 aa, synthetic construct
  REGION 1..10: note = Description of Artificial Sequence: Synthetic peptide
TVQPIQLPNK

SEQ ID NO: 11041 - protein, 10 aa, synthetic construct
  REGION 1..10: note = Description of Artificial Sequence: Synthetic peptide
GSYFPNATIK

SEQ ID NO: 11042 - protein, 10 aa, synthetic construct
  REGION 1..10: note = Description of Artificial Sequence: Synthetic peptide
STITGLLLTR

SEQ ID NO: 11043 - protein, 10 aa, synthetic construct
  REGION 1..10: note = Description of Artificial Sequence: Synthetic peptide
QANTTIMMQK

SEQ ID NO: 11044 - protein, 11 aa, synthetic construct
  REGION 1..11: note = Description of Artificial Sequence: Synthetic peptide
TVDDIQKLVGK

SEQ ID NO: 11045 - protein, 9 aa, synthetic construct
  REGION 1..9: note = Description of Artificial Sequence: Synthetic peptide
KIIEKLIQK

SEQ ID NO: 11046 - protein, 9 aa, synthetic construct
  REGION 1..9: note = Description of Artificial Sequence: Synthetic peptide
ANSAIMMQK

SEQ ID NO: 11047 - protein, 9 aa, synthetic construct
  REGION 1..9: note = Description of Artificial Sequence: Synthetic peptide
QIYPGIKIK

SEQ ID NO: 11048 - protein, 9 aa, synthetic construct
  REGION 1..9: note = Description of Artificial Sequence: Synthetic peptide
LTALIAPEK

SEQ ID NO: 11049 - protein, 10 aa, synthetic construct
  REGION 1..10: note = Description of Artificial Sequence: Synthetic peptide
GQYPPLASLK

SEQ ID NO: 11050 - protein, 9 aa, synthetic construct
  REGION 1..9: note = Description of Artificial Sequence: Synthetic peptide
ALTALVSPK

SEQ ID NO: 11051 - protein, 9 aa, synthetic construct
  REGION 1..9: note = Description of Artificial Sequence: Synthetic peptide
KTIYMLIEK

SEQ ID NO: 11052 - protein, 9 aa, synthetic construct
  REGION 1..9: note = Description of Artificial Sequence: Synthetic peptide
ASDAKSYEK

SEQ ID NO: 11053 - protein, 9 aa, synthetic construct
  REGION 1..9: note = Description of Artificial Sequence: Synthetic peptide
LTALIAPKK

SEQ ID NO: 11054 - protein, 10 aa, synthetic construct
  REGION 1..10: note = Description of Artificial Sequence: Synthetic peptide
VILTETTNQK

SEQ ID NO: 11055 - protein, 10 aa, synthetic construct
  REGION 1..10: note = Description of Artificial Sequence: Synthetic peptide
SQIHQDPVPK

SEQ ID NO: 11056 - protein, 9 aa, synthetic construct
  REGION 1..9: note = Description of Artificial Sequence: Synthetic peptide
ATKGLGISY

SEQ ID NO: 11057 - protein, 11 aa, synthetic construct
  REGION 1..11: note = Description of Artificial Sequence: Synthetic peptide
TTGEIIGDIRK

SEQ ID NO: 11058 - protein, 9 aa, synthetic construct
  REGION 1..9: note = Description of Artificial Sequence: Synthetic peptide
AIFQYSMTK

SEQ ID NO: 11059 - protein, 9 aa, synthetic construct
  REGION 1..9: note = Description of Artificial Sequence: Synthetic peptide
AVLYYVHQR

SEQ ID NO: 11060 - protein, 9 aa, synthetic construct
  REGION 1..9: note = Description of Artificial Sequence: Synthetic peptide
QIHQDPVPK

SEQ ID NO: 11061 - protein, 9 aa, synthetic construct
  REGION 1..9: note = Description of Artificial Sequence: Synthetic peptide
QVHQNSLPK

SEQ ID NO: 11062 - protein, 11 aa, synthetic construct
  REGION 1..11: note = Description of Artificial Sequence: Synthetic peptide
ATGEIIGDIRK

SEQ ID NO: 11063 - protein, 11 aa, synthetic construct
  REGION 1..11: note = Description of Artificial Sequence: Synthetic peptide
VVSLTETTNQK

SEQ ID NO: 11064 - protein, 9 aa, synthetic construct
  REGION 1..9: note = Description of Artificial Sequence: Synthetic peptide
AVLYYVHQK

SEQ ID NO: 11065 - protein, 9 aa, synthetic construct
  REGION 1..9: note = Description of Artificial Sequence: Synthetic peptide
AVLYFVHQK

SEQ ID NO: 11066 - protein, 10 aa, synthetic construct
  REGION 1..10: note = Description of Artificial Sequence: Synthetic peptide
GAVDLSHFLK

SEQ ID NO: 11067 - protein, 9 aa, synthetic construct
  REGION 1..9: note = Description of Artificial Sequence: Synthetic peptide
QIIEQLIQK

SEQ ID NO: 11068 - protein, 10 aa, synthetic construct
  REGION 1..10: note = Description of Artificial Sequence: Synthetic peptide
GSNFTSSAVK

SEQ ID NO: 11069 - protein, 10 aa, synthetic construct
  REGION 1..10: note = Description of Artificial Sequence: Synthetic peptide
TVQPIQLPEK

SEQ ID NO: 11070 - protein, 11 aa, synthetic construct
  REGION 1..11: note = Description of Artificial Sequence: Synthetic peptide
YVDGASNRETK

SEQ ID NO: 11071 - protein, 8 aa, synthetic construct
  REGION 1..8: note = Description of Artificial Sequence: Synthetic peptide
NTTIMMQK

SEQ ID NO: 11072 - protein, 9 aa, synthetic construct
  REGION 1..9: note = Description of Artificial Sequence: Synthetic peptide
ALTALIAPK

SEQ ID NO: 11073 - protein, 9 aa, synthetic construct
  REGION 1..9: note = Description of Artificial Sequence: Synthetic peptide
QIYPGIKVK

SEQ ID NO: 11074 - protein, 10 aa, synthetic construct
  REGION 1..10: note = Description of Artificial Sequence: Synthetic peptide
AAVDLSHFLK

SEQ ID NO: 11075 - protein, 10 aa, synthetic construct
  REGION 1..10: note = Description of Artificial Sequence: Synthetic peptide
SQIYPGIKVK

SEQ ID NO: 11076 - protein, 9 aa, synthetic construct
  REGION 1..9: note = Description of Artificial Sequence: Synthetic peptide
STITQACPK

SEQ ID NO: 11077 - protein, 9 aa, synthetic construct
  REGION 1..9: note = Description of Artificial Sequence: Synthetic peptide
APAGYAILK

SEQ ID NO: 11078 - protein, 8 aa, synthetic construct
  REGION 1..8: note = Description of Artificial Sequence: Synthetic peptide
PAGYAILK

SEQ ID NO: 11079 - protein, 10 aa, synthetic construct
  REGION 1..10: note = Description of Artificial Sequence: Synthetic peptide
GSNFTSAAVK

SEQ ID NO: 11080 - protein, 9 aa, synthetic construct
  REGION 1..9: note = Description of Artificial Sequence: Synthetic peptide
QIIEQLIKK

SEQ ID NO: 11081 - protein, 9 aa, synthetic construct
  REGION 1..9: note = Description of Artificial Sequence: Synthetic peptide
QIYPGIKVR

SEQ ID NO: 11082 - protein, 10 aa, synthetic construct
  REGION 1..10: note = Description of Artificial Sequence: Synthetic peptide
SILDIKQGPK

SEQ ID NO: 11083 - protein, 9 aa, synthetic construct
  REGION 1..9: note = Description of Artificial Sequence: Synthetic peptide
AVDLSHFLK

SEQ ID NO: 11084 - protein, 11 aa, synthetic construct
  REGION 1..11: note = Description of Artificial Sequence: Synthetic peptide
TVNDIQKLVGK

SEQ ID NO: 11085 - protein, 11 aa, synthetic construct
  REGION 1..11: note = Description of Artificial Sequence: Synthetic peptide
ATDIQTKELQK

SEQ ID NO: 11086 - protein, 9 aa, synthetic construct
  REGION 1..9: note = Description of Artificial Sequence: Synthetic peptide
AIFQSSMTK

SEQ ID NO: 11087 - protein, 11 aa, synthetic construct
  REGION 1..11: note = Description of Artificial Sequence: Synthetic peptide
GVVESMNKELK

SEQ ID NO: 11088 - protein, 9 aa, synthetic construct
  REGION 1..9: note = Description of Artificial Sequence: Synthetic peptide
NYSNIIYKL

SEQ ID NO: 11089 - protein, 10 aa, synthetic construct
  REGION 1..10: note = Description of Artificial Sequence: Synthetic peptide
SYFPNATIKF

SEQ ID NO: 11090 - protein, 9 aa, synthetic construct
  REGION 1..9: note = Description of Artificial Sequence: Synthetic peptide
NYSNTIYRL

SEQ ID NO: 11091 - protein, 9 aa, synthetic construct
  REGION 1..9: note = Description of Artificial Sequence: Synthetic peptide
KYLGNLTQY

SEQ ID NO: 11092 - protein, 9 aa, synthetic construct
  REGION 1..9: note = Description of Artificial Sequence: Synthetic peptide
IYQNPFKNL

SEQ ID NO: 11093 - protein, 9 aa, synthetic construct
  REGION 1..9: note = Description of Artificial Sequence: Synthetic peptide
KYLGNIIQY

SEQ ID NO: 11094 - protein, 10 aa, synthetic construct
  REGION 1..10: note = Description of Artificial Sequence: Synthetic peptide
KYLGNLTQYW

SEQ ID NO: 11095 - protein, 10 aa, synthetic construct
  REGION 1..10: note = Description of Artificial Sequence: Synthetic peptide
KYLGNIIQYW

SEQ ID NO: 11096 - protein, 9 aa, synthetic construct
  REGION 1..9: note = Description of Artificial Sequence: Synthetic peptide
YFPNATIKF

SEQ ID NO: 11097 - protein, 10 aa, synthetic construct
  REGION 1..10: note = Description of Artificial Sequence: Synthetic peptide
SFISGDINNL

SEQ ID NO: 11098 - protein, 10 aa, synthetic construct
  REGION 1..10: note = Description of Artificial Sequence: Synthetic peptide
VFLKNVTENF

SEQ ID NO: 11099 - protein, 9 aa, synthetic construct
  REGION 1..9: note = Description of Artificial Sequence: Synthetic peptide
KYLGNLTRY

SEQ ID NO: 11100 - protein, 9 aa, synthetic construct
  REGION 1..9: note = Description of Artificial Sequence: Synthetic peptide
FYKLDIVQI

SEQ ID NO: 11101 - protein, 9 aa, synthetic construct
  REGION 1..9: note = Description of Artificial Sequence: Synthetic peptide
AENLWVTVY

SEQ ID NO: 11102 - protein, 9 aa, synthetic construct
  REGION 1..9: note = Description of Artificial Sequence: Synthetic peptide
IYQEPFKNL

SEQ ID NO: 11103 - protein, 9 aa, synthetic construct
  REGION 1..9: note = Description of Artificial Sequence: Synthetic peptide
RYLKDQQLL

SEQ ID NO: 11104 - protein, 9 aa, synthetic construct
  REGION 1..9: note = Description of Artificial Sequence: Synthetic peptide
NYSNIIYKL

SEQ ID NO: 11105 - protein, 10 aa, synthetic construct
  REGION 1..10: note = Description of Artificial Sequence: Synthetic peptide
SYFPNATIKF

SEQ ID NO: 11106 - protein, 9 aa, synthetic construct
  REGION 1..9: note = Description of Artificial Sequence: Synthetic peptide
IYQNPFKNL

SEQ ID NO: 11107 - protein, 9 aa, synthetic construct
  REGION 1..9: note = Description of Artificial Sequence: Synthetic peptide
NYSNTIYRL

SEQ ID NO: 11108 - protein, 9 aa, synthetic construct
  REGION 1..9: note = Description of Artificial Sequence: Synthetic peptide
YFPNATIKF

SEQ ID NO: 11109 - protein, 10 aa, synthetic construct
  REGION 1..10: note = Description of Artificial Sequence: Synthetic peptide
SFISGDINNL

SEQ ID NO: 11110 - protein, 9 aa, synthetic construct
  REGION 1..9: note = Description of Artificial Sequence: Synthetic peptide
TYQIYQNPF

SEQ ID NO: 11111 - protein, 9 aa, synthetic construct
  REGION 1..9: note = Description of Artificial Sequence: Synthetic peptide
KYLGNLTQY

SEQ ID NO: 11112 - protein, 9 aa, synthetic construct
  REGION 1..9: note = Description of Artificial Sequence: Synthetic peptide
FYKLDIVQI

SEQ ID NO: 11113 - protein, 9 aa, synthetic construct
  REGION 1..9: note = Description of Artificial Sequence: Synthetic peptide
IYNTYGDTW

SEQ ID NO: 11114 - protein, 9 aa, synthetic construct
  REGION 1..9: note = Description of Artificial Sequence: Synthetic peptide
IYQEPFKNL

SEQ ID NO: 11115 - protein, 9 aa, synthetic construct
  REGION 1..9: note = Description of Artificial Sequence: Synthetic peptide
RYLKDQQLL

SEQ ID NO: 11116 - protein, 9 aa, synthetic construct
  REGION 1..9: note = Description of Artificial Sequence: Synthetic peptide
YYDPSKDLI

SEQ ID NO: 11117 - protein, 10 aa, synthetic construct
  REGION 1..10: note = Description of Artificial Sequence: Synthetic peptide
ETAELVITTY

SEQ ID NO: 11118 - protein, 9 aa, synthetic construct
  REGION 1..9: note = Description of Artificial Sequence: Synthetic peptide
EVKLVITTY

SEQ ID NO: 11119 - protein, 9 aa, synthetic construct
  REGION 1..9: note = Description of Artificial Sequence: Synthetic peptide
ATAIAVAEW

SEQ ID NO: 11120 - protein, 9 aa, synthetic construct
  REGION 1..9: note = Description of Artificial Sequence: Synthetic peptide
ELYPPLASL

SEQ ID NO: 11121 - protein, 11 aa, synthetic construct
  REGION 1..11: note = Description of Artificial Sequence: Synthetic peptide
ELAALGEMGSF

SEQ ID NO: 11122 - protein, 10 aa, synthetic construct
  REGION 1..10: note = Description of Artificial Sequence: Synthetic peptide
EQASQDVKGW

SEQ ID NO: 11123 - protein, 10 aa, synthetic construct
  REGION 1..10: note = Description of Artificial Sequence: Synthetic peptide
EVSNYSKEIY

SEQ ID NO: 11124 - protein, 9 aa, synthetic construct
  REGION 1..9: note = Description of Artificial Sequence: Synthetic peptide
TTKGLGISY

SEQ ID NO: 11125 - protein, 9 aa, synthetic construct
  REGION 1..9: note = Description of Artificial Sequence: Synthetic peptide
EAKLVVTTY

SEQ ID NO: 11126 - protein, 10 aa, synthetic construct
  REGION 1..10: note = Description of Artificial Sequence: Synthetic peptide
EQATQEVKGW

SEQ ID NO: 11127 - protein, 10 aa, synthetic construct
  REGION 1..10: note = Description of Artificial Sequence: Synthetic peptide
EIQKQGQGQW

SEQ ID NO: 11128 - protein, 9 aa, synthetic construct
  REGION 1..9: note = Description of Artificial Sequence: Synthetic peptide
EVIPMFSAL

SEQ ID NO: 11129 - protein, 10 aa, synthetic construct
  REGION 1..10: note = Description of Artificial Sequence: Synthetic peptide
DTINEEAAEW

SEQ ID NO: 11130 - protein, 9 aa, synthetic construct
  REGION 1..9: note = Description of Artificial Sequence: Synthetic peptide
DIAGTTSTL

SEQ ID NO: 11131 - protein, 9 aa, synthetic construct
  REGION 1..9: note = Description of Artificial Sequence: Synthetic peptide
NVTENFNMW

SEQ ID NO: 11132 - protein, 10 aa, synthetic construct
  REGION 1..10: note = Description of Artificial Sequence: Synthetic peptide
EVNIVTDSQY

SEQ ID NO: 11133 - protein, 10 aa, synthetic construct
  REGION 1..10: note = Description of Artificial Sequence: Synthetic peptide
ETAELVITTY

SEQ ID NO: 11134 - protein, 9 aa, synthetic construct
  REGION 1..9: note = Description of Artificial Sequence: Synthetic peptide
EVKLVITTY

SEQ ID NO: 11135 - protein, 10 aa, synthetic construct
  REGION 1..10: note = Description of Artificial Sequence: Synthetic peptide
DIIGDIKKAY

SEQ ID NO: 11136 - protein, 10 aa, synthetic construct
  REGION 1..10: note = Description of Artificial Sequence: Synthetic peptide
ETFRPGGGNM

SEQ ID NO: 11137 - protein, 10 aa, synthetic construct
  REGION 1..10: note = Description of Artificial Sequence: Synthetic peptide
ETFRPEGGNM

SEQ ID NO: 11138 - protein, 10 aa, synthetic construct
  REGION 1..10: note = Description of Artificial Sequence: Synthetic peptide
EVSNYSKEIY

SEQ ID NO: 11139 - protein, 9 aa, synthetic construct
  REGION 1..9: note = Description of Artificial Sequence: Synthetic peptide
EAKLVVTTY

SEQ ID NO: 11140 - protein, 9 aa, synthetic construct
  REGION 1..9: note = Description of Artificial Sequence: Synthetic peptide
TTKGLGISY

SEQ ID NO: 11141 - protein, 11 aa, synthetic construct
  REGION 1..11: note = Description of Artificial Sequence: Synthetic peptide
ELAALGEMGSF

SEQ ID NO: 11142 - protein, 9 aa, synthetic construct
  REGION 1..9: note = Description of Artificial Sequence: Synthetic peptide
DTKFNDTGF

SEQ ID NO: 11143 - protein, 10 aa, synthetic construct
  REGION 1..10: note = Description of Artificial Sequence: Synthetic peptide
EINNYSNTIY

SEQ ID NO: 11144 - protein, 9 aa, synthetic construct
  REGION 1..9: note = Description of Artificial Sequence: Synthetic peptide
ATKGLGISY

SEQ ID NO: 11145 - protein, 9 aa, synthetic construct
  REGION 1..9: note = Description of Artificial Sequence: Synthetic peptide
DTIAINDTL

SEQ ID NO: 11146 - protein, 9 aa, synthetic construct
  REGION 1..9: note = Description of Artificial Sequence: Synthetic peptide
EIIGDIRKA

SEQ ID NO: 11147 - protein, 9 aa, synthetic construct
  REGION 1..9: note = Description of Artificial Sequence: Synthetic peptide
ETPGVRYQY

SEQ ID NO: 11148 - protein, 11 aa, synthetic construct
  REGION 1..11: note = Description of Artificial Sequence: Synthetic peptide
QTGSEELRSLY

SEQ ID NO: 11149 - protein, 9 aa, synthetic construct
  REGION 1..9: note = Description of Artificial Sequence: Synthetic peptide
ETKKGKAGY

SEQ ID NO: 11150 - protein, 9 aa, synthetic construct
  REGION 1..9: note = Description of Artificial Sequence: Synthetic peptide
EVIPMFSAL

SEQ ID NO: 11151 - protein, 10 aa, synthetic construct
  REGION 1..10: note = Description of Artificial Sequence: Synthetic peptide
ETFRPGGGDM

SEQ ID NO: 11152 - protein, 10 aa, synthetic construct
  REGION 1..10: note = Description of Artificial Sequence: Synthetic peptide
EVNIVTDSQY

SEQ ID NO: 11153 - protein, 9 aa, synthetic construct
  REGION 1..9: note = Description of Artificial Sequence: Synthetic peptide
ETPGIRYQY

SEQ ID NO: 11154 - protein, 10 aa, synthetic construct
  REGION 1..10: note = Description of Artificial Sequence: Synthetic peptide
EVIPAETGQE

SEQ ID NO: 11155 - protein, 9 aa, synthetic construct
  REGION 1..9: note = Description of Artificial Sequence: Synthetic peptide
EVIPAETGQ

SEQ ID NO: 11156 - protein, 10 aa, synthetic construct
  REGION 1..10: note = Description of Artificial Sequence: Synthetic peptide
ETAELVITTY

SEQ ID NO: 11157 - protein, 9 aa, synthetic construct
  REGION 1..9: note = Description of Artificial Sequence: Synthetic peptide
EVKLVITTY

SEQ ID NO: 11158 - protein, 11 aa, synthetic construct
  REGION 1..11: note = Description of Artificial Sequence: Synthetic peptide
ELAALGEMGSF

SEQ ID NO: 11159 - protein, 10 aa, synthetic construct
  REGION 1..10: note = Description of Artificial Sequence: Synthetic peptide
ETFRPGGGNM

SEQ ID NO: 11160 - protein, 9 aa, synthetic construct
  REGION 1..9: note = Description of Artificial Sequence: Synthetic peptide
EAKLVVTTY

SEQ ID NO: 11161 - protein, 10 aa, synthetic construct
  REGION 1..10: note = Description of Artificial Sequence: Synthetic peptide
DIIGDIKKAY

SEQ ID NO: 11162 - protein, 9 aa, synthetic construct
  REGION 1..9: note = Description of Artificial Sequence: Synthetic peptide
ELTDAVQKV

SEQ ID NO: 11163 - protein, 9 aa, synthetic construct
  REGION 1..9: note = Description of Artificial Sequence: Synthetic peptide
FISGDINNL

SEQ ID NO: 11164 - protein, 9 aa, synthetic construct
  REGION 1..9: note = Description of Artificial Sequence: Synthetic peptide
DTKFNDTGF

SEQ ID NO: 11165 - protein, 10 aa, synthetic construct
  REGION 1..10: note = Description of Artificial Sequence: Synthetic peptide
ETFRPEGGNM

SEQ ID NO: 11166 - protein, 9 aa, synthetic construct
  REGION 1..9: note = Description of Artificial Sequence: Synthetic peptide
EVIPMFSAL

SEQ ID NO: 11167 - protein, 9 aa, synthetic construct
  REGION 1..9: note = Description of Artificial Sequence: Synthetic peptide
DIAGTTSTL

SEQ ID NO: 11168 - protein, 10 aa, synthetic construct
  REGION 1..10: note = Description of Artificial Sequence: Synthetic peptide
EVNIVTDSQY

SEQ ID NO: 11169 - protein, 10 aa, synthetic construct
  REGION 1..10: note = Description of Artificial Sequence: Synthetic peptide
DIISTDIQTR

SEQ ID NO: 11170 - protein, 9 aa, synthetic construct
  REGION 1..9: note = Description of Artificial Sequence: Synthetic peptide
DIIGDIKKA

SEQ ID NO: 11171 - protein, 9 aa, synthetic construct
  REGION 1..9: note = Description of Artificial Sequence: Synthetic peptide
EVKLVITTY

SEQ ID NO: 11172 - protein, 10 aa, synthetic construct
  REGION 1..10: note = Description of Artificial Sequence: Synthetic peptide
STITGLLLTR

SEQ ID NO: 11173 - protein, 9 aa, synthetic construct
  REGION 1..9: note = Description of Artificial Sequence: Synthetic peptide
MVHQPISPR

SEQ ID NO: 11174 - protein, 10 aa, synthetic construct
  REGION 1..10: note = Description of Artificial Sequence: Synthetic peptide
ETFRPGGGNM

SEQ ID NO: 11175 - protein, 10 aa, synthetic construct
  REGION 1..10: note = Description of Artificial Sequence: Synthetic peptide
MAVDDCVAGR

SEQ ID NO: 11176 - protein, 10 aa, synthetic construct
  REGION 1..10: note = Description of Artificial Sequence: Synthetic peptide
DIIGDIKKAY

SEQ ID NO: 11177 - protein, 10 aa, synthetic construct
  REGION 1..10: note = Description of Artificial Sequence: Synthetic peptide
ETAELVITTY

SEQ ID NO: 11178 - protein, 10 aa, synthetic construct
  REGION 1..10: note = Description of Artificial Sequence: Synthetic peptide
EVVLENVTER

SEQ ID NO: 11179 - protein, 9 aa, synthetic construct
  REGION 1..9: note = Description of Artificial Sequence: Synthetic peptide
ELYPPLASL

SEQ ID NO: 11180 - protein, 9 aa, synthetic construct
  REGION 1..9: note = Description of Artificial Sequence: Synthetic peptide
ESVQINCTR

SEQ ID NO: 11181 - protein, 9 aa, synthetic construct
  REGION 1..9: note = Description of Artificial Sequence: Synthetic peptide
EIVNKIIEK

SEQ ID NO: 11182 - protein, 10 aa, synthetic construct
  REGION 1..10: note = Description of Artificial Sequence: Synthetic peptide
FVPKQPISQA

SEQ ID NO: 11183 - protein, 11 aa, synthetic construct
  REGION 1..11: note = Description of Artificial Sequence: Synthetic peptide
TAAEGVGAVSR

SEQ ID NO: 11184 - protein, 10 aa, synthetic construct
  REGION 1..10: note = Description of Artificial Sequence: Synthetic peptide
DIIATDIQTR

SEQ ID NO: 11185 - protein, 9 aa, synthetic construct
  REGION 1..9: note = Description of Artificial Sequence: Synthetic peptide
EIIGDIRKA

SEQ ID NO: 11186 - protein, 11 aa, synthetic construct
  REGION 1..11: note = Description of Artificial Sequence: Synthetic peptide
ETFYVDGASNR

SEQ ID NO: 11187 - protein, 9 aa, synthetic construct
  REGION 1..9: note = Description of Artificial Sequence: Synthetic peptide
EVIPMFSAL

SEQ ID NO: 11188 - protein, 9 aa, synthetic construct
  REGION 1..9: note = Description of Artificial Sequence: Synthetic peptide
MVHQAISPR

SEQ ID NO: 11189 - protein, 9 aa, synthetic construct
  REGION 1..9: note = Description of Artificial Sequence: Synthetic peptide
DIAGTTSTL

SEQ ID NO: 11190 - protein, 9 aa, synthetic construct
  REGION 1..9: note = Description of Artificial Sequence: Synthetic peptide
LFNTVAVLY

SEQ ID NO: 11191 - protein, 11 aa, synthetic construct
  REGION 1..11: note = Description of Artificial Sequence: Synthetic peptide
AAADKGVSQNY

SEQ ID NO: 11192 - protein, 9 aa, synthetic construct
  REGION 1..9: note = Description of Artificial Sequence: Synthetic peptide
ATKGLGISY

SEQ ID NO: 11193 - protein, 9 aa, synthetic construct
  REGION 1..9: note = Description of Artificial Sequence: Synthetic peptide
TTKGLGISY

SEQ ID NO: 11194 - protein, 9 aa, synthetic construct
  REGION 1..9: note = Description of Artificial Sequence: Synthetic peptide
LYNTIAVLY

SEQ ID NO: 11195 - protein, 9 aa, synthetic construct
  REGION 1..9: note = Description of Artificial Sequence: Synthetic peptide
TVLDVGDAY

SEQ ID NO: 11196 - protein, 9 aa, synthetic construct
  REGION 1..9: note = Description of Artificial Sequence: Synthetic peptide
LFNTVAVLY

SEQ ID NO: 11197 - protein, 10 aa, synthetic construct
  REGION 1..10: note = Description of Artificial Sequence: Synthetic peptide
LFNTVAVLYY

SEQ ID NO: 11198 - protein, 9 aa, synthetic construct
  REGION 1..9: note = Description of Artificial Sequence: Synthetic peptide
HLGPGQAFY

SEQ ID NO: 11199 - protein, 9 aa, synthetic construct
  REGION 1..9: note = Description of Artificial Sequence: Synthetic peptide
GLFNESEKY

SEQ ID NO: 11200 - protein, 9 aa, synthetic construct
  REGION 1..9: note = Description of Artificial Sequence: Synthetic peptide
HLGPGQTFY

SEQ ID NO: 11201 - protein, 9 aa, synthetic construct
  REGION 1..9: note = Description of Artificial Sequence: Synthetic peptide
FNTVAVLYY

SEQ ID NO: 11202 - protein, 10 aa, synthetic construct
  REGION 1..10: note = Description of Artificial Sequence: Synthetic peptide
VSWDPIPIHY

SEQ ID NO: 11203 - protein, 9 aa, synthetic construct
  REGION 1..9: note = Description of Artificial Sequence: Synthetic peptide
ATKGLGISY

SEQ ID NO: 11204 - protein, 9 aa, synthetic construct
  REGION 1..9: note = Description of Artificial Sequence: Synthetic peptide
YNTIAVLYY

SEQ ID NO: 11205 - protein, 9 aa, synthetic construct
  REGION 1..9: note = Description of Artificial Sequence: Synthetic peptide
LYNTIAVLY

SEQ ID NO: 11206 - protein, 9 aa, synthetic construct
  REGION 1..9: note = Description of Artificial Sequence: Synthetic peptide
VWTIVYIEY

SEQ ID NO: 11207 - protein, 9 aa, synthetic construct
  REGION 1..9: note = Description of Artificial Sequence: Synthetic peptide
VWTIVFIEY

SEQ ID NO: 11208 - protein, 9 aa, synthetic construct
  REGION 1..9: note = Description of Artificial Sequence: Synthetic peptide
GFFPDWQNY

SEQ ID NO: 11209 - protein, 9 aa, synthetic construct
  REGION 1..9: note = Description of Artificial Sequence: Synthetic peptide
GYFPDWQNY

SEQ ID NO: 11210 - protein, 9 aa, synthetic construct
  REGION 1..9: note = Description of Artificial Sequence: Synthetic peptide
TVLDVGDAY

SEQ ID NO: 11211 - protein, 9 aa, synthetic construct
  REGION 1..9: note = Description of Artificial Sequence: Synthetic peptide
TEAVQKISL

SEQ ID NO: 11212 - protein, 9 aa, synthetic construct
  REGION 1..9: note = Description of Artificial Sequence: Synthetic peptide
KTKPPLPSV

SEQ ID NO: 11213 - protein, 10 aa, synthetic construct
  REGION 1..10: note = Description of Artificial Sequence: Synthetic peptide
GELYPPLASL

SEQ ID NO: 11214 - protein, 8 aa, synthetic construct
  REGION 1..8: note = Description of Artificial Sequence: Synthetic peptide
SDFNIPAV

SEQ ID NO: 11215 - protein, 9 aa, synthetic construct
  REGION 1..9: note = Description of Artificial Sequence: Synthetic peptide
KAKPPLPSV

SEQ ID NO: 11216 - protein, 9 aa, synthetic construct
  REGION 1..9: note = Description of Artificial Sequence: Synthetic peptide
TEAVQKIAL

SEQ ID NO: 11217 - protein, 9 aa, synthetic construct
  REGION 1..9: note = Description of Artificial Sequence: Synthetic peptide
ATKGLGISY

SEQ ID NO: 11218 - protein, 9 aa, synthetic construct
  REGION 1..9: note = Description of Artificial Sequence: Synthetic peptide
TTKGLGISY

SEQ ID NO: 11219 - protein, 9 aa, synthetic construct
  REGION 1..9: note = Description of Artificial Sequence: Synthetic peptide
KGSPAIFQY

SEQ ID NO: 11220 - protein, 11 aa, synthetic construct
  REGION 1..11: note = Description of Artificial Sequence: Synthetic peptide
ATAEKGVSQNY

SEQ ID NO: 11221 - protein, 11 aa, synthetic construct
  REGION 1..11: note = Description of Artificial Sequence: Synthetic peptide
AAADKGVSQNY

SEQ ID NO: 11222 - protein, 11 aa, synthetic construct
  REGION 1..11: note = Description of Artificial Sequence: Synthetic peptide
QTGSEELKSLY

SEQ ID NO: 11223 - protein, 9 aa, synthetic construct
  REGION 1..9: note = Description of Artificial Sequence: Synthetic peptide
AIMMQKSNY

SEQ ID NO: 11224 - protein, 9 aa, synthetic construct
  REGION 1..9: note = Description of Artificial Sequence: Synthetic peptide
IGQYIYNTY

SEQ ID NO: 11225 - protein, 10 aa, synthetic construct
  REGION 1..10: note = Description of Artificial Sequence: Synthetic peptide
ISNNNSREEY

SEQ ID NO: 11226 - protein, 9 aa, synthetic construct
  REGION 1..9: note = Description of Artificial Sequence: Synthetic peptide
GLFNESEKY

SEQ ID NO: 11227 - protein, 9 aa, synthetic construct
  REGION 1..9: note = Description of Artificial Sequence: Synthetic peptide
KYLGNLTQY

SEQ ID NO: 11228 - protein, 11 aa, synthetic construct
  REGION 1..11: note = Description of Artificial Sequence: Synthetic peptide
STNNETPGVRY

SEQ ID NO: 11229 - protein, 11 aa, synthetic construct
  REGION 1..11: note = Description of Artificial Sequence: Synthetic peptide
QTGSEELRSLY

SEQ ID NO: 11230 - protein, 11 aa, synthetic construct
  REGION 1..11: note = Description of Artificial Sequence: Synthetic peptide
SVNNETPGIRY

SEQ ID NO: 11231 - protein, 10 aa, synthetic construct
  REGION 1..10: note = Description of Artificial Sequence: Synthetic peptide
ILKEPVHGAY

SEQ ID NO: 11232 - protein, 10 aa, synthetic construct
  REGION 1..10: note = Description of Artificial Sequence: Synthetic peptide
GLADQLIHIY

SEQ ID NO: 11233 - protein, 10 aa, synthetic construct
  REGION 1..10: note = Description of Artificial Sequence: Synthetic peptide
ILKEPVHGVY

SEQ ID NO: 11234 - protein, 9 aa, synthetic construct
  REGION 1..9: note = Description of Artificial Sequence: Synthetic peptide
KAQEEHEKY

SEQ ID NO: 11235 - protein, 9 aa, synthetic construct
  REGION 1..9: note = Description of Artificial Sequence: Synthetic peptide
TVLDVGDAY

SEQ ID NO: 11236 - protein, 9 aa, synthetic construct
  REGION 1..9: note = Description of Artificial Sequence: Synthetic peptide
ATKGLGISY

SEQ ID NO: 11237 - protein, 9 aa, synthetic construct
  REGION 1..9: note = Description of Artificial Sequence: Synthetic peptide
KGSPAIFQY

SEQ ID NO: 11238 - protein, 9 aa, synthetic construct
  REGION 1..9: note = Description of Artificial Sequence: Synthetic peptide
TTKGLGISY

SEQ ID NO: 11239 - protein, 11 aa, synthetic construct
  REGION 1..11: note = Description of Artificial Sequence: Synthetic peptide
ATAEKGVSQNY

SEQ ID NO: 11240 - protein, 9 aa, synthetic construct
  REGION 1..9: note = Description of Artificial Sequence: Synthetic peptide
RIGPGQSFY

SEQ ID NO: 11241 - protein, 9 aa, synthetic construct
  REGION 1..9: note = Description of Artificial Sequence: Synthetic peptide
GLFNESEKY

SEQ ID NO: 11242 - protein, 11 aa, synthetic construct
  REGION 1..11: note = Description of Artificial Sequence: Synthetic peptide
AAADKGVSQNY

SEQ ID NO: 11243 - protein, 9 aa, synthetic construct
  REGION 1..9: note = Description of Artificial Sequence: Synthetic peptide
AVRAIKILY

SEQ ID NO: 11244 - protein, 9 aa, synthetic construct
  REGION 1..9: note = Description of Artificial Sequence: Synthetic peptide
KQGDGQWTY

SEQ ID NO: 11245 - protein, 11 aa, synthetic construct
  REGION 1..11: note = Description of Artificial Sequence: Synthetic peptide
QTGSEELKSLY

SEQ ID NO: 11246 - protein, 9 aa, synthetic construct
  REGION 1..9: note = Description of Artificial Sequence: Synthetic peptide
KQGQGQWTY

SEQ ID NO: 11247 - protein, 9 aa, synthetic construct
  REGION 1..9: note = Description of Artificial Sequence: Synthetic peptide
AVLYYVHQR

SEQ ID NO: 11248 - protein, 11 aa, synthetic construct
  REGION 1..11: note = Description of Artificial Sequence: Synthetic peptide
ATKGLGISYGR

SEQ ID NO: 11249 - protein, 11 aa, synthetic construct
  REGION 1..11: note = Description of Artificial Sequence: Synthetic peptide
KGRPGNFIQNR

SEQ ID NO: 11250 - protein, 11 aa, synthetic construct
  REGION 1..11: note = Description of Artificial Sequence: Synthetic peptide
TTKGLGISYGR

SEQ ID NO: 11251 - protein, 10 aa, synthetic construct
  REGION 1..10: note = Description of Artificial Sequence: Synthetic peptide
AVRAVLNIPR

SEQ ID NO: 11252 - protein, 10 aa, synthetic construct
  REGION 1..10: note = Description of Artificial Sequence: Synthetic peptide
AGRAVLNVPR

SEQ ID NO: 11253 - protein, 9 aa, synthetic construct
  REGION 1..9: note = Description of Artificial Sequence: Synthetic peptide
ATKGLGISY

SEQ ID NO: 11254 - protein, 11 aa, synthetic construct
  REGION 1..11: note = Description of Artificial Sequence: Synthetic peptide
KTKPPLPSVQK

SEQ ID NO: 11255 - protein, 10 aa, synthetic construct
  REGION 1..10: note = Description of Artificial Sequence: Synthetic peptide
STITGLLLTR

SEQ ID NO: 11256 - protein, 9 aa, synthetic construct
  REGION 1..9: note = Description of Artificial Sequence: Synthetic peptide
MVHQPISPR

SEQ ID NO: 11257 - protein, 9 aa, synthetic construct
  REGION 1..9: note = Description of Artificial Sequence: Synthetic peptide
VGWPAVGER

SEQ ID NO: 11258 - protein, 9 aa, synthetic construct
  REGION 1..9: note = Description of Artificial Sequence: Synthetic peptide
VVLENVTER

SEQ ID NO: 11259 - protein, 10 aa, synthetic construct
  REGION 1..10: note = Description of Artificial Sequence: Synthetic peptide
AGRAVLNIPR

SEQ ID NO: 11260 - protein, 11 aa, synthetic construct
  REGION 1..11: note = Description of Artificial Sequence: Synthetic peptide
KTKTQVQEKLR

SEQ ID NO: 11261 - protein, 11 aa, synthetic construct
  REGION 1..11: note = Description of Artificial Sequence: Synthetic peptide
VGPTPVNIVGR

SEQ ID NO: 11262 - protein, 9 aa, synthetic construct
  REGION 1..9: note = Description of Artificial Sequence: Synthetic peptide
MYSAPIAGR

SEQ ID NO: 11263 - protein, 11 aa, synthetic construct
  REGION 1..11: note = Description of Artificial Sequence: Synthetic peptide
IVFTVLSIVNR

SEQ ID NO: 11264 - protein, 11 aa, synthetic construct
  REGION 1..11: note = Description of Artificial Sequence: Synthetic peptide
KGRPGNFLQNR

SEQ ID NO: 11265 - protein, 9 aa, synthetic construct
  REGION 1..9: note = Description of Artificial Sequence: Synthetic peptide
VGWPAVRER

SEQ ID NO: 11266 - protein, 8 aa, synthetic construct
  REGION 1..8: note = Description of Artificial Sequence: Synthetic peptide
AVLSIVNR

SEQ ID NO: 11267 - protein, 9 aa, synthetic construct
  REGION 1..9: note = Description of Artificial Sequence: Synthetic peptide
VGWPAIRER

SEQ ID NO: 11268 - protein, 9 aa, synthetic construct
  REGION 1..9: note = Description of Artificial Sequence: Synthetic peptide
QIYPGIKVR

SEQ ID NO: 11269 - protein, 11 aa, synthetic construct
  REGION 1..11: note = Description of Artificial Sequence: Synthetic peptide
KGRPGNFLQSR

SEQ ID NO: 11270 - protein, 11 aa, synthetic construct
  REGION 1..11: note = Description of Artificial Sequence: Synthetic peptide
TVNDIQKLVGK

SEQ ID NO: 11271 - protein, 9 aa, synthetic construct
  REGION 1..9: note = Description of Artificial Sequence: Synthetic peptide
KGLGISYGR

SEQ ID NO: 11272 - protein, 11 aa, synthetic construct
  REGION 1..11: note = Description of Artificial Sequence: Synthetic peptide
VGPTPVNIIGR

SEQ ID NO: 11273 - protein, 9 aa, synthetic construct
  REGION 1..9: note = Description of Artificial Sequence: Synthetic peptide
ATKGLGISY

SEQ ID NO: 11274 - protein, 9 aa, synthetic construct
  REGION 1..9: note = Description of Artificial Sequence: Synthetic peptide
TTKGLGISY

SEQ ID NO: 11275 - protein, 9 aa, synthetic construct
  REGION 1..9: note = Description of Artificial Sequence: Synthetic peptide
ATAIAVAEW

SEQ ID NO: 11276 - protein, 11 aa, synthetic construct
  REGION 1..11: note = Description of Artificial Sequence: Synthetic peptide
DTFYVDGASNR

SEQ ID NO: 11277 - protein, 9 aa, synthetic construct
  REGION 1..9: note = Description of Artificial Sequence: Synthetic peptide
NNYSNTIYR

SEQ ID NO: 11278 - protein, 9 aa, synthetic construct
  REGION 1..9: note = Description of Artificial Sequence: Synthetic peptide
MYSAPIAGR

SEQ ID NO: 11279 - protein, 10 aa, synthetic construct
  REGION 1..10: note = Description of Artificial Sequence: Synthetic peptide
DNSEIKIVPR

SEQ ID NO: 11280 - protein, 11 aa, synthetic construct
  REGION 1..11: note = Description of Artificial Sequence: Synthetic peptide
EINNYSNTIYR

SEQ ID NO: 11281 - protein, 9 aa, synthetic construct
  REGION 1..9: note = Description of Artificial Sequence: Synthetic peptide
MVHQPISPR

SEQ ID NO: 11282 - protein, 11 aa, synthetic construct
  REGION 1..11: note = Description of Artificial Sequence: Synthetic peptide
DIKELTDAVQK

SEQ ID NO: 11283 - protein, 10 aa, synthetic construct
  REGION 1..10: note = Description of Artificial Sequence: Synthetic peptide
DIISTDIQTR

SEQ ID NO: 11284 - protein, 9 aa, synthetic construct
  REGION 1..9: note = Description of Artificial Sequence: Synthetic peptide
DTNRTETFR

SEQ ID NO: 11285 - protein, 9 aa, synthetic construct
  REGION 1..9: note = Description of Artificial Sequence: Synthetic peptide
SYRHHFQSR

SEQ ID NO: 11286 - protein, 9 aa, synthetic construct
  REGION 1..9: note = Description of Artificial Sequence: Synthetic peptide
VVLENVTER

SEQ ID NO: 11287 - protein, 9 aa, synthetic construct
  REGION 1..9: note = Description of Artificial Sequence: Synthetic peptide
ESVQINCTR

SEQ ID NO: 11288 - protein, 11 aa, synthetic construct
  REGION 1..11: note = Description of Artificial Sequence: Synthetic peptide
EVSNYSKEIYR

SEQ ID NO: 11289 - protein, 10 aa, synthetic construct
  REGION 1..10: note = Description of Artificial Sequence: Synthetic peptide
EARKFPSETR

SEQ ID NO: 11290 - protein, 11 aa, synthetic construct
  REGION 1..11: note = Description of Artificial Sequence: Synthetic peptide
EARKFSSEQAR

SEQ ID NO: 11291 - protein, 10 aa, synthetic construct
  REGION 1..10: note = Description of Artificial Sequence: Synthetic peptide
DIIATDIQTR

SEQ ID NO: 11292 - protein, 11 aa, synthetic construct
  REGION 1..11: note = Description of Artificial Sequence: Synthetic peptide
ENLAFQQGEAR

SEQ ID NO: 11293 - protein, 11 aa, synthetic construct
  REGION 1..11: note = Description of Artificial Sequence: Synthetic peptide
EPLGVAPTKAR

SEQ ID NO: 11294 - protein, 10 aa, synthetic construct
  REGION 1..10: note = Description of Artificial Sequence: Synthetic peptide
DNSEIKVVPR

SEQ ID NO: 11295 - protein, 11 aa, synthetic construct
  REGION 1..11: note = Description of Artificial Sequence: Synthetic peptide
TDMEKEGKISR

SEQ ID NO: 11296 - protein, 11 aa, synthetic construct
  REGION 1..11: note = Description of Artificial Sequence: Synthetic peptide
ETFYVDGASNR

SEQ ID NO: 11297 - protein, 9 aa, synthetic construct
  REGION 1..9: note = Description of Artificial Sequence: Synthetic peptide
DAWEKIRLR

SEQ ID NO: 11298 - protein, 9 aa, synthetic construct
  REGION 1..9: note = Description of Artificial Sequence: Synthetic peptide
QARVLAVER

SEQ ID NO: 11299 - protein, 11 aa, synthetic construct
  REGION 1..11: note = Description of Artificial Sequence: Synthetic peptide
DVKQLTEAVQK

SEQ ID NO: 11300 - protein, 9 aa, synthetic construct
  REGION 1..9: note = Description of Artificial Sequence: Synthetic peptide
MVHQAISPR

SEQ ID NO: 11301 - protein, 9 aa, synthetic construct
  REGION 1..9: note = Description of Artificial Sequence: Synthetic peptide
MVHQPISPR

SEQ ID NO: 11302 - protein, 9 aa, synthetic construct
  REGION 1..9: note = Description of Artificial Sequence: Synthetic peptide
MYSAPIAGR

SEQ ID NO: 11303 - protein, 9 aa, synthetic construct
  REGION 1..9: note = Description of Artificial Sequence: Synthetic peptide
ESVQINCTR

SEQ ID NO: 11304 - protein, 11 aa, synthetic construct
  REGION 1..11: note = Description of Artificial Sequence: Synthetic peptide
EINNYSNTIYR

SEQ ID NO: 11305 - protein, 11 aa, synthetic construct
  REGION 1..11: note = Description of Artificial Sequence: Synthetic peptide
DTFYVDGASNR

SEQ ID NO: 11306 - protein, 9 aa, synthetic construct
  REGION 1..9: note = Description of Artificial Sequence: Synthetic peptide
NNYSNTIYR

SEQ ID NO: 11307 - protein, 9 aa, synthetic construct
  REGION 1..9: note = Description of Artificial Sequence: Synthetic peptide
EYKKLVRQR

SEQ ID NO: 11308 - protein, 11 aa, synthetic construct
  REGION 1..11: note = Description of Artificial Sequence: Synthetic peptide
EVSNYSKEIYR

SEQ ID NO: 11309 - protein, 9 aa, synthetic construct
  REGION 1..9: note = Description of Artificial Sequence: Synthetic peptide
MVHQSLSPR

SEQ ID NO: 11310 - protein, 9 aa, synthetic construct
  REGION 1..9: note = Description of Artificial Sequence: Synthetic peptide
EFDSRLALR

SEQ ID NO: 11311 - protein, 10 aa, synthetic construct
  REGION 1..10: note = Description of Artificial Sequence: Synthetic peptide
EARKFPSETR

SEQ ID NO: 11312 - protein, 9 aa, synthetic construct
  REGION 1..9: note = Description of Artificial Sequence: Synthetic peptide
NSEIKIVPR

SEQ ID NO: 11313 - protein, 10 aa, synthetic construct
  REGION 1..10: note = Description of Artificial Sequence: Synthetic peptide
DNSEIKIVPR

SEQ ID NO: 11314 - protein, 11 aa, synthetic construct
  REGION 1..11: note = Description of Artificial Sequence: Synthetic peptide
TTKGLGISYGR

SEQ ID NO: 11315 - protein, 10 aa, synthetic construct
  REGION 1..10: note = Description of Artificial Sequence: Synthetic peptide
DIISTDIQTR

SEQ ID NO: 11316 - protein, 9 aa, synthetic construct
  REGION 1..9: note = Description of Artificial Sequence: Synthetic peptide
EYKKLLRQR

SEQ ID NO: 11317 - protein, 11 aa, synthetic construct
  REGION 1..11: note = Description of Artificial Sequence: Synthetic peptide
ELTDAVQKVAR

SEQ ID NO: 11318 - protein, 9 aa, synthetic construct
  REGION 1..9: note = Description of Artificial Sequence: Synthetic peptide
EIVNKIIEK

SEQ ID NO: 11319 - protein, 10 aa, synthetic construct
  REGION 1..10: note = Description of Artificial Sequence: Synthetic peptide
ETFRPGGGNM

SEQ ID NO: 11320 - protein, 10 aa, synthetic construct
  REGION 1..10: note = Description of Artificial Sequence: Synthetic peptide
VPKQPISQAR

SEQ ID NO: 11321 - protein, 9 aa, synthetic construct
  REGION 1..9: note = Description of Artificial Sequence: Synthetic peptide
VVLENVTER

SEQ ID NO: 11322 - protein, 9 aa, synthetic construct
  REGION 1..9: note = Description of Artificial Sequence: Synthetic peptide
SYRHHFQSR

SEQ ID NO: 11323 - protein, 9 aa, synthetic construct
  REGION 1..9: note = Description of Artificial Sequence: Synthetic peptide
SNYSKEIYR

SEQ ID NO: 11324 - protein, 11 aa, synthetic construct
  REGION 1..11: note = Description of Artificial Sequence: Synthetic peptide
EARKFSSEQAR

SEQ ID NO: 11325 - protein, 9 aa, synthetic construct
  REGION 1..9: note = Description of Artificial Sequence: Synthetic peptide
EFDSRLAFR

SEQ ID NO: 11326 - protein, 9 aa, synthetic construct
  REGION 1..9: note = Description of Artificial Sequence: Synthetic peptide
AVLYYVHQR

SEQ ID NO: 11327 - protein, 10 aa, synthetic construct
  REGION 1..10: note = Description of Artificial Sequence: Synthetic peptide
LPKQPLSQAR

SEQ ID NO: 11328 - protein, 9 aa, synthetic construct
  REGION 1..9: note = Description of Artificial Sequence: Synthetic peptide
DTNRTETFR

SEQ ID NO: 11329 - protein, 11 aa, synthetic construct
  REGION 1..11: note = Description of Artificial Sequence: Synthetic peptide
TAAEGVGAVSR

SEQ ID NO: 11330 - protein, 10 aa, synthetic construct
  REGION 1..10: note = Description of Artificial Sequence: Synthetic peptide
STITGLLLTR

SEQ ID NO: 11331 - protein, 11 aa, synthetic construct
  REGION 1..11: note = Description of Artificial Sequence: Synthetic peptide
EIKDTKEALEK

SEQ ID NO: 11332 - protein, 11 aa, synthetic construct
  REGION 1..11: note = Description of Artificial Sequence: Synthetic peptide
EPLGVAPTKAR

SEQ ID NO: 11333 - protein, 10 aa, synthetic construct
  REGION 1..10: note = Description of Artificial Sequence: Synthetic peptide
DIIATDIQTR

SEQ ID NO: 11334 - protein, 9 aa, synthetic construct
  REGION 1..9: note = Description of Artificial Sequence: Synthetic peptide
FTVLSIVNR

SEQ ID NO: 11335 - protein, 8 aa, synthetic construct
  REGION 1..8: note = Description of Artificial Sequence: Synthetic peptide
TVLSIVNR

SEQ ID NO: 11336 - protein, 10 aa, synthetic construct
  REGION 1..10: note = Description of Artificial Sequence: Synthetic peptide
DNSEIKVVPR

SEQ ID NO: 11337 - protein, 9 aa, synthetic construct
  REGION 1..9: note = Description of Artificial Sequence: Synthetic peptide
NSEIKVVPR

SEQ ID NO: 11338 - protein, 11 aa, synthetic construct
  REGION 1..11: note = Description of Artificial Sequence: Synthetic peptide
EVKDTKEALEK

SEQ ID NO: 11339 - protein, 11 aa, synthetic construct
  REGION 1..11: note = Description of Artificial Sequence: Synthetic peptide
ETFYVDGASNR

SEQ ID NO: 11340 - protein, 9 aa, synthetic construct
  REGION 1..9: note = Description of Artificial Sequence: Synthetic peptide
FYVDGASNR

SEQ ID NO: 11341 - protein, 9 aa, synthetic construct
  REGION 1..9: note = Description of Artificial Sequence: Synthetic peptide
QIYPGIKVR

SEQ ID NO: 11342 - protein, 9 aa, synthetic construct
  REGION 1..9: note = Description of Artificial Sequence: Synthetic peptide
FNLPPIVAK

SEQ ID NO: 11343 - protein, 9 aa, synthetic construct
  REGION 1..9: note = Description of Artificial Sequence: Synthetic peptide
QARVLAVER

SEQ ID NO: 11344 - protein, 9 aa, synthetic construct
  REGION 1..9: note = Description of Artificial Sequence: Synthetic peptide
MVHQAISPR

SEQ ID NO: 11345 - protein, 11 aa, synthetic construct
  REGION 1..11: note = Description of Artificial Sequence: Synthetic peptide
TVNDIQKLVGK

SEQ ID NO: 11346 - protein, 10 aa, synthetic construct
  REGION 1..10: note = Description of Artificial Sequence: Synthetic peptide
ELKKIIGQVR

SEQ ID NO: 11347 - protein, 11 aa, synthetic construct
  REGION 1..11: note = Description of Artificial Sequence: Synthetic peptide
DTFYVDGASNR

SEQ ID NO: 11348 - protein, 10 aa, synthetic construct
  REGION 1..10: note = Description of Artificial Sequence: Synthetic peptide
DIISTDIQTR

SEQ ID NO: 11349 - protein, 11 aa, synthetic construct
  REGION 1..11: note = Description of Artificial Sequence: Synthetic peptide
TAAEGVGAVSR

SEQ ID NO: 11350 - protein, 9 aa, synthetic construct
  REGION 1..9: note = Description of Artificial Sequence: Synthetic peptide
ESVQINCTR

SEQ ID NO: 11351 - protein, 11 aa, synthetic construct
  REGION 1..11: note = Description of Artificial Sequence: Synthetic peptide
ETFRPGGGNMK

SEQ ID NO: 11352 - protein, 10 aa, synthetic construct
  REGION 1..10: note = Description of Artificial Sequence: Synthetic peptide
DTIAINDTLK

SEQ ID NO: 11353 - protein, 11 aa, synthetic construct
  REGION 1..11: note = Description of Artificial Sequence: Synthetic peptide
SSSGGDLEITR

SEQ ID NO: 11354 - protein, 9 aa, synthetic construct
  REGION 1..9: note = Description of Artificial Sequence: Synthetic peptide
EIVNKIIEK

SEQ ID NO: 11355 - protein, 10 aa, synthetic construct
  REGION 1..10: note = Description of Artificial Sequence: Synthetic peptide
STITGLLLTR

SEQ ID NO: 11356 - protein, 11 aa, synthetic construct
  REGION 1..11: note = Description of Artificial Sequence: Synthetic peptide
EINNYSNTIYR

SEQ ID NO: 11357 - protein, 11 aa, synthetic construct
  REGION 1..11: note = Description of Artificial Sequence: Synthetic peptide
EVSNYSKEIYR

SEQ ID NO: 11358 - protein, 10 aa, synthetic construct
  REGION 1..10: note = Description of Artificial Sequence: Synthetic peptide
EVVLENVTER

SEQ ID NO: 11359 - protein, 10 aa, synthetic construct
  REGION 1..10: note = Description of Artificial Sequence: Synthetic peptide
MAVDDCVAGR

SEQ ID NO: 11360 - protein, 10 aa, synthetic construct
  REGION 1..10: note = Description of Artificial Sequence: Synthetic peptide
DNSEIKIVPR

SEQ ID NO: 11361 - protein, 11 aa, synthetic construct
  REGION 1..11: note = Description of Artificial Sequence: Synthetic peptide
TTGEIIGDIRK

SEQ ID NO: 11362 - protein, 11 aa, synthetic construct
  REGION 1..11: note = Description of Artificial Sequence: Synthetic peptide
ETFRPGGGDMK

SEQ ID NO: 11363 - protein, 11 aa, synthetic construct
  REGION 1..11: note = Description of Artificial Sequence: Synthetic peptide
ETFRPEGGNMK

SEQ ID NO: 11364 - protein, 11 aa, synthetic construct
  REGION 1..11: note = Description of Artificial Sequence: Synthetic peptide
DIEPISNNNSR

SEQ ID NO: 11365 - protein, 9 aa, synthetic construct
  REGION 1..9: note = Description of Artificial Sequence: Synthetic peptide
NSEIKIVPR

SEQ ID NO: 11366 - protein, 10 aa, synthetic construct
  REGION 1..10: note = Description of Artificial Sequence: Synthetic peptide
ETAELVITTY

SEQ ID NO: 11367 - protein, 10 aa, synthetic construct
  REGION 1..10: note = Description of Artificial Sequence: Synthetic peptide
NPISEAGAER

SEQ ID NO: 11368 - protein, 11 aa, synthetic construct
  REGION 1..11: note = Description of Artificial Sequence: Synthetic peptide
EIEPLGVAPTR

SEQ ID NO: 11369 - protein, 9 aa, synthetic construct
  REGION 1..9: note = Description of Artificial Sequence: Synthetic peptide
TNAAIMMQK

SEQ ID NO: 11370 - protein, 10 aa, synthetic construct
  REGION 1..10: note = Description of Artificial Sequence: Synthetic peptide
ATNAAIMMQK

SEQ ID NO: 11371 - protein, 10 aa, synthetic construct
  REGION 1..10: note = Description of Artificial Sequence: Synthetic peptide
ATNTAIMMQK

SEQ ID NO: 11372 - protein, 10 aa, synthetic construct
  REGION 1..10: note = Description of Artificial Sequence: Synthetic peptide
QANSAIMMQK

SEQ ID NO: 11373 - protein, 9 aa, synthetic construct
  REGION 1..9: note = Description of Artificial Sequence: Synthetic peptide
MVHQPISPR

SEQ ID NO: 11374 - protein, 11 aa, synthetic construct
  REGION 1..11: note = Description of Artificial Sequence: Synthetic peptide
AVILTETTNQK

SEQ ID NO: 11375 - protein, 11 aa, synthetic construct
  REGION 1..11: note = Description of Artificial Sequence: Synthetic peptide
SQANTTIMMQK

SEQ ID NO: 11376 - protein, 11 aa, synthetic construct
  REGION 1..11: note = Description of Artificial Sequence: Synthetic peptide
DIKELTDAVQK

SEQ ID NO: 11377 - protein, 10 aa, synthetic construct
  REGION 1..10: note = Description of Artificial Sequence: Synthetic peptide
AAEGVGAVSR

SEQ ID NO: 11378 - protein, 11 aa, synthetic construct
  REGION 1..11: note = Description of Artificial Sequence: Synthetic peptide
ATGDIIGDIKK

SEQ ID NO: 11379 - protein, 9 aa, synthetic construct
  REGION 1..9: note = Description of Artificial Sequence: Synthetic peptide
NNYSNTIYR

SEQ ID NO: 11380 - protein, 11 aa, synthetic construct
  REGION 1..11: note = Description of Artificial Sequence: Synthetic peptide
VGPTPVNIVGR

SEQ ID NO: 11381 - protein, 11 aa, synthetic construct
  REGION 1..11: note = Description of Artificial Sequence: Synthetic peptide
EISNYSNIIYK

SEQ ID NO: 11382 - protein, 11 aa, synthetic construct
  REGION 1..11: note = Description of Artificial Sequence: Synthetic peptide
ELTDAVQKVAR

SEQ ID NO: 11383 - protein, 11 aa, synthetic construct
  REGION 1..11: note = Description of Artificial Sequence: Synthetic peptide
TVDDIQKLVGK

SEQ ID NO: 11384 - protein, 9 aa, synthetic construct
  REGION 1..9: note = Description of Artificial Sequence: Synthetic peptide
TITGLLLTR

SEQ ID NO: 11385 - protein, 10 aa, synthetic construct
  REGION 1..10: note = Description of Artificial Sequence: Synthetic peptide
QANTTIMMQK

SEQ ID NO: 11386 - protein, 10 aa, synthetic construct
  REGION 1..10: note = Description of Artificial Sequence: Synthetic peptide
ETFRPGGGNM

SEQ ID NO: 11387 - protein, 11 aa, synthetic construct
  REGION 1..11: note = Description of Artificial Sequence: Synthetic peptide
DTLSDQSSTLK

SEQ ID NO: 11388 - protein, 9 aa, synthetic construct
  REGION 1..9: note = Description of Artificial Sequence: Synthetic peptide
QVTKIQNFR

SEQ ID NO: 11389 - protein, 9 aa, synthetic construct
  REGION 1..9: note = Description of Artificial Sequence: Synthetic peptide
MYSAPIAGR

SEQ ID NO: 11390 - protein, 11 aa, synthetic construct
  REGION 1..11: note = Description of Artificial Sequence: Synthetic peptide
EIEPLGVAPTK

SEQ ID NO: 11391 - protein, 9 aa, synthetic construct
  REGION 1..9: note = Description of Artificial Sequence: Synthetic peptide
VVLENVTER

SEQ ID NO: 11392 - protein, 10 aa, synthetic construct
  REGION 1..10: note = Description of Artificial Sequence: Synthetic peptide
SSGGDLEITR

SEQ ID NO: 11393 - protein, 10 aa, synthetic construct
  REGION 1..10: note = Description of Artificial Sequence: Synthetic peptide
DIIATDIQTR

SEQ ID NO: 11394 - protein, 9 aa, synthetic construct
  REGION 1..9: note = Description of Artificial Sequence: Synthetic peptide
IIATDIQTR

SEQ ID NO: 11395 - protein, 10 aa, synthetic construct
  REGION 1..10: note = Description of Artificial Sequence: Synthetic peptide
TTGEIIGDIR

SEQ ID NO: 11396 - protein, 9 aa, synthetic construct
  REGION 1..9: note = Description of Artificial Sequence: Synthetic peptide
FTVLSIVNR

SEQ ID NO: 11397 - protein, 10 aa, synthetic construct
  REGION 1..10: note = Description of Artificial Sequence: Synthetic peptide
DNSEIKVVPR

SEQ ID NO: 11398 - protein, 9 aa, synthetic construct
  REGION 1..9: note = Description of Artificial Sequence: Synthetic peptide
NSEIKVVPR

SEQ ID NO: 11399 - protein, 9 aa, synthetic construct
  REGION 1..9: note = Description of Artificial Sequence: Synthetic peptide
FAVLSIVNR

SEQ ID NO: 11400 - protein, 11 aa, synthetic construct
  REGION 1..11: note = Description of Artificial Sequence: Synthetic peptide
ETFYVDGASNR

SEQ ID NO: 11401 - protein, 10 aa, synthetic construct
  REGION 1..10: note = Description of Artificial Sequence: Synthetic peptide
ASITLTVQAR

SEQ ID NO: 11402 - protein, 10 aa, synthetic construct
  REGION 1..10: note = Description of Artificial Sequence: Synthetic peptide
ATGEIIGDIR

SEQ ID NO: 11403 - protein, 9 aa, synthetic construct
  REGION 1..9: note = Description of Artificial Sequence: Synthetic peptide
EPLGVAPTR

SEQ ID NO: 11404 - protein, 9 aa, synthetic construct
  REGION 1..9: note = Description of Artificial Sequence: Synthetic peptide
NITGLLLTR

SEQ ID NO: 11405 - protein, 11 aa, synthetic construct
  REGION 1..11: note = Description of Artificial Sequence: Synthetic peptide
DVKQLTEAVQK

SEQ ID NO: 11406 - protein, 9 aa, synthetic construct
  REGION 1..9: note = Description of Artificial Sequence: Synthetic peptide
MVHQAISPR

SEQ ID NO: 11407 - protein, 11 aa, synthetic construct
  REGION 1..11: note = Description of Artificial Sequence: Synthetic peptide
TVNDIQKLVGK

SEQ ID NO: 11408 - protein, 10 aa, synthetic construct
  REGION 1..10: note = Description of Artificial Sequence: Synthetic peptide
EVNIVTDSQY

SEQ ID NO: 11409 - protein, 10 aa, synthetic construct
  REGION 1..10: note = Description of Artificial Sequence: Synthetic peptide
DIIATDIQTK

SEQ ID NO: 11410 - protein, 11 aa, synthetic construct
  REGION 1..11: note = Description of Artificial Sequence: Synthetic peptide
VGPTPVNIIGR

SEQ ID NO: 11411 - protein, 9 aa, synthetic construct
  REGION 1..9: note = Description of Artificial Sequence: Synthetic peptide
NTVAVLYYV

SEQ ID NO: 11412 - protein, 9 aa, synthetic construct
  REGION 1..9: note = Description of Artificial Sequence: Synthetic peptide
ELTDAVQKV

SEQ ID NO: 11413 - protein, 9 aa, synthetic construct
  REGION 1..9: note = Description of Artificial Sequence: Synthetic peptide
DTIAINDTL

SEQ ID NO: 11414 - protein, 9 aa, synthetic construct
  REGION 1..9: note = Description of Artificial Sequence: Synthetic peptide
NTVAVLYCV

SEQ ID NO: 11415 - protein, 9 aa, synthetic construct
  REGION 1..9: note = Description of Artificial Sequence: Synthetic peptide
YTSPIAGNI

SEQ ID NO: 11416 - protein, 9 aa, synthetic construct
  REGION 1..9: note = Description of Artificial Sequence: Synthetic peptide
YAAPIAGNI

SEQ ID NO: 11417 - protein, 9 aa, synthetic construct
  REGION 1..9: note = Description of Artificial Sequence: Synthetic peptide
DASTITQAC

SEQ ID NO: 11418 - protein, 9 aa, synthetic construct
  REGION 1..9: note = Description of Artificial Sequence: Synthetic peptide
ESFGFKEEI

SEQ ID NO: 11419 - protein, 9 aa, synthetic construct
  REGION 1..9: note = Description of Artificial Sequence: Synthetic peptide
ESFGFREEI

SEQ ID NO: 11420 - protein, 9 aa, synthetic construct
  REGION 1..9: note = Description of Artificial Sequence: Synthetic peptide
FISGDINNL

SEQ ID NO: 11421 - protein, 9 aa, synthetic construct
  REGION 1..9: note = Description of Artificial Sequence: Synthetic peptide
YSAPIAGRI

SEQ ID NO: 11422 - protein, 9 aa, synthetic construct
  REGION 1..9: note = Description of Artificial Sequence: Synthetic peptide
EVSNYSKEI

SEQ ID NO: 11423 - protein, 10 aa, synthetic construct
  REGION 1..10: note = Description of Artificial Sequence: Synthetic peptide
ETFRPGGGNM

SEQ ID NO: 11424 - protein, 10 aa, synthetic construct
  REGION 1..10: note = Description of Artificial Sequence: Synthetic peptide
KVVEIEPLGV

SEQ ID NO: 11425 - protein, 9 aa, synthetic construct
  REGION 1..9: note = Description of Artificial Sequence: Synthetic peptide
EVHIPLEEV

SEQ ID NO: 11426 - protein, 9 aa, synthetic construct
  REGION 1..9: note = Description of Artificial Sequence: Synthetic peptide
MTSNPPVPV

SEQ ID NO: 11427 - protein, 9 aa, synthetic construct
  REGION 1..9: note = Description of Artificial Sequence: Synthetic peptide
ETLKYLWNL

SEQ ID NO: 11428 - protein, 9 aa, synthetic construct
  REGION 1..9: note = Description of Artificial Sequence: Synthetic peptide
YTAFTIPSL

SEQ ID NO: 11429 - protein, 11 aa, synthetic construct
  REGION 1..11: note = Description of Artificial Sequence: Synthetic peptide
YTSPIAGNITC

SEQ ID NO: 11430 - protein, 9 aa, synthetic construct
  REGION 1..9: note = Description of Artificial Sequence: Synthetic peptide
ELYPPLASL

SEQ ID NO: 11431 - protein, 9 aa, synthetic construct
  REGION 1..9: note = Description of Artificial Sequence: Synthetic peptide
IVAFIIALI

SEQ ID NO: 11432 - protein, 11 aa, synthetic construct
  REGION 1..11: note = Description of Artificial Sequence: Synthetic peptide
EVSNYSKEIYR

SEQ ID NO: 11433 - protein, 9 aa, synthetic construct
  REGION 1..9: note = Description of Artificial Sequence: Synthetic peptide
WTVDDIQKL

SEQ ID NO: 11434 - protein, 9 aa, synthetic construct
  REGION 1..9: note = Description of Artificial Sequence: Synthetic peptide
ETAELVITT

SEQ ID NO: 11435 - protein, 9 aa, synthetic construct
  REGION 1..9: note = Description of Artificial Sequence: Synthetic peptide
YVLSIVAFI

SEQ ID NO: 11436 - protein, 10 aa, synthetic construct
  REGION 1..10: note = Description of Artificial Sequence: Synthetic peptide
EVGPFIPGDI

SEQ ID NO: 11437 - protein, 11 aa, synthetic construct
  REGION 1..11: note = Description of Artificial Sequence: Synthetic peptide
EVNIVTDSQYV

SEQ ID NO: 11438 - protein, 9 aa, synthetic construct
  REGION 1..9: note = Description of Artificial Sequence: Synthetic peptide
NTIAVLYYV

SEQ ID NO: 11439 - protein, 9 aa, synthetic construct
  REGION 1..9: note = Description of Artificial Sequence: Synthetic peptide
DTAYFILKL

SEQ ID NO: 11440 - protein, 9 aa, synthetic construct
  REGION 1..9: note = Description of Artificial Sequence: Synthetic peptide
NTIAVLYFV

SEQ ID NO: 11441 - protein, 9 aa, synthetic construct
  REGION 1..9: note = Description of Artificial Sequence: Synthetic peptide
AVAEWTDRV

SEQ ID NO: 11442 - protein, 9 aa, synthetic construct
  REGION 1..9: note = Description of Artificial Sequence: Synthetic peptide
TVLSIVNRV

SEQ ID NO: 11443 - protein, 9 aa, synthetic construct
  REGION 1..9: note = Description of Artificial Sequence: Synthetic peptide
YTAFTIPSV

SEQ ID NO: 11444 - protein, 9 aa, synthetic construct
  REGION 1..9: note = Description of Artificial Sequence: Synthetic peptide
TTGEIIGDI

SEQ ID NO: 11445 - protein, 9 aa, synthetic construct
  REGION 1..9: note = Description of Artificial Sequence: Synthetic peptide
ETTNQKAEL

SEQ ID NO: 11446 - protein, 9 aa, synthetic construct
  REGION 1..9: note = Description of Artificial Sequence: Synthetic peptide
MTGNPPVPV

SEQ ID NO: 11447 - protein, 9 aa, synthetic construct
  REGION 1..9: note = Description of Artificial Sequence: Synthetic peptide
AAVDLSHFL

SEQ ID NO: 11448 - protein, 9 aa, synthetic construct
  REGION 1..9: note = Description of Artificial Sequence: Synthetic peptide
AVLSIVNRV

SEQ ID NO: 11449 - protein, 11 aa, synthetic construct
  REGION 1..11: note = Description of Artificial Sequence: Synthetic peptide
ETFYVDGASNR

SEQ ID NO: 11450 - protein, 10 aa, synthetic construct
  REGION 1..10: note = Description of Artificial Sequence: Synthetic peptide
EIVNQIIEQL

SEQ ID NO: 11451 - protein, 9 aa, synthetic construct
  REGION 1..9: note = Description of Artificial Sequence: Synthetic peptide
IVNQIIEQL

SEQ ID NO: 11452 - protein, 9 aa, synthetic construct
  REGION 1..9: note = Description of Artificial Sequence: Synthetic peptide
NTSTITQAC

SEQ ID NO: 11453 - protein, 9 aa, synthetic construct
  REGION 1..9: note = Description of Artificial Sequence: Synthetic peptide
GAASITLTV

SEQ ID NO: 11454 - protein, 9 aa, synthetic construct
  REGION 1..9: note = Description of Artificial Sequence: Synthetic peptide
ETAYFILKL

SEQ ID NO: 11455 - protein, 9 aa, synthetic construct
  REGION 1..9: note = Description of Artificial Sequence: Synthetic peptide
LVNQIIEQL

SEQ ID NO: 11456 - protein, 9 aa, synthetic construct
  REGION 1..9: note = Description of Artificial Sequence: Synthetic peptide
QNYPIVQNL

SEQ ID NO: 11457 - protein, 9 aa, synthetic construct
  REGION 1..9: note = Description of Artificial Sequence: Synthetic peptide
EVIPMFSAL

SEQ ID NO: 11458 - protein, 9 aa, synthetic construct
  REGION 1..9: note = Description of Artificial Sequence: Synthetic peptide
TTSTLQEQI

SEQ ID NO: 11459 - protein, 9 aa, synthetic construct
  REGION 1..9: note = Description of Artificial Sequence: Synthetic peptide
DVKQLTEAV

SEQ ID NO: 11460 - protein, 9 aa, synthetic construct
  REGION 1..9: note = Description of Artificial Sequence: Synthetic peptide
ETAYFLLKL

SEQ ID NO: 11461 - protein, 9 aa, synthetic construct
  REGION 1..9: note = Description of Artificial Sequence: Synthetic peptide
TVNDIQKLV

SEQ ID NO: 11462 - protein, 9 aa, synthetic construct
  REGION 1..9: note = Description of Artificial Sequence: Synthetic peptide
SPASRELQV

SEQ ID NO: 11463 - protein, 9 aa, synthetic construct
  REGION 1..9: note = Description of Artificial Sequence: Synthetic peptide
VPNNGTITL

SEQ ID NO: 11464 - protein, 10 aa, synthetic construct
  REGION 1..10: note = Description of Artificial Sequence: Synthetic peptide
RPRTPQSSQI

SEQ ID NO: 11465 - protein, 9 aa, synthetic construct
  REGION 1..9: note = Description of Artificial Sequence: Synthetic peptide
APIAGRINC

SEQ ID NO: 11466 - protein, 9 aa, synthetic construct
  REGION 1..9: note = Description of Artificial Sequence: Synthetic peptide
HPAHAGPIL

SEQ ID NO: 11467 - protein, 9 aa, synthetic construct
  REGION 1..9: note = Description of Artificial Sequence: Synthetic peptide
VPKQPISQA

SEQ ID NO: 11468 - protein, 9 aa, synthetic construct
  REGION 1..9: note = Description of Artificial Sequence: Synthetic peptide
APIAGNITC

SEQ ID NO: 11469 - protein, 9 aa, synthetic construct
  REGION 1..9: note = Description of Artificial Sequence: Synthetic peptide
SPASGELRV

SEQ ID NO: 11470 - protein, 9 aa, synthetic construct
  REGION 1..9: note = Description of Artificial Sequence: Synthetic peptide
AVSPASREL

SEQ ID NO: 11471 - protein, 9 aa, synthetic construct
  REGION 1..9: note = Description of Artificial Sequence: Synthetic peptide
SPIAGNITC

SEQ ID NO: 11472 - protein, 9 aa, synthetic construct
  REGION 1..9: note = Description of Artificial Sequence: Synthetic peptide
APEKTKPPL

SEQ ID NO: 11473 - protein, 8 aa, synthetic construct
  REGION 1..8: note = Description of Artificial Sequence: Synthetic peptide
TIRVGGQL

SEQ ID NO: 11474 - protein, 10 aa, synthetic construct
  REGION 1..10: note = Description of Artificial Sequence: Synthetic peptide
SIRIGPGQSF

SEQ ID NO: 11475 - protein, 9 aa, synthetic construct
  REGION 1..9: note = Description of Artificial Sequence: Synthetic peptide
SPTSRELRV

SEQ ID NO: 11476 - protein, 9 aa, synthetic construct
  REGION 1..9: note = Description of Artificial Sequence: Synthetic peptide
SPAIFQCSM

SEQ ID NO: 11477 - protein, 9 aa, synthetic construct
  REGION 1..9: note = Description of Artificial Sequence: Synthetic peptide
TEAVQKIAL

SEQ ID NO: 11478 - protein, 10 aa, synthetic construct
  REGION 1..10: note = Description of Artificial Sequence: Synthetic peptide
RPNNNTRKSI

SEQ ID NO: 11479 - protein, 8 aa, synthetic construct
  REGION 1..8: note = Description of Artificial Sequence: Synthetic peptide
RPVVSTQL

SEQ ID NO: 11480 - protein, 9 aa, synthetic construct
  REGION 1..9: note = Description of Artificial Sequence: Synthetic peptide
GPSHKARVL

SEQ ID NO: 11481 - protein, 10 aa, synthetic construct
  REGION 1..10: note = Description of Artificial Sequence: Synthetic peptide
RPAEPVPLQL

SEQ ID NO: 11482 - protein, 8 aa, synthetic construct
  REGION 1..8: note = Description of Artificial Sequence: Synthetic peptide
KPVVSTQL

SEQ ID NO: 11483 - protein, 9 aa, synthetic construct
  REGION 1..9: note = Description of Artificial Sequence: Synthetic peptide
TPQDLNTML

SEQ ID NO: 11484 - protein, 9 aa, synthetic construct
  REGION 1..9: note = Description of Artificial Sequence: Synthetic peptide
SPAIFQSSM

SEQ ID NO: 11485 - protein, 10 aa, synthetic construct
  REGION 1..10: note = Description of Artificial Sequence: Synthetic peptide
SPIETVPVKL

SEQ ID NO: 11486 - protein, 8 aa, synthetic construct
  REGION 1..8: note = Description of Artificial Sequence: Synthetic peptide
EAVQKISL

SEQ ID NO: 11487 - protein, 9 aa, synthetic construct
  REGION 1..9: note = Description of Artificial Sequence: Synthetic peptide
KGKQKVVSL

SEQ ID NO: 11488 - protein, 8 aa, synthetic construct
  REGION 1..8: note = Description of Artificial Sequence: Synthetic peptide
YVHQKVEV

SEQ ID NO: 11489 - protein, 9 aa, synthetic construct
  REGION 1..9: note = Description of Artificial Sequence: Synthetic peptide
DKQLKVHAL

SEQ ID NO: 11490 - protein, 8 aa, synthetic construct
  REGION 1..8: note = Description of Artificial Sequence: Synthetic peptide
DPVPKQPL

SEQ ID NO: 11491 - protein, 8 aa, synthetic construct
  REGION 1..8: note = Description of Artificial Sequence: Synthetic peptide
GQMVHQSL

SEQ ID NO: 11492 - protein, 9 aa, synthetic construct
  REGION 1..9: note = Description of Artificial Sequence: Synthetic peptide
YPGIKVKQL

SEQ ID NO: 11493 - protein, 9 aa, synthetic construct
  REGION 1..9: note = Description of Artificial Sequence: Synthetic peptide
ELKNSAISL

SEQ ID NO: 11494 - protein, 8 aa, synthetic construct
  REGION 1..8: note = Description of Artificial Sequence: Synthetic peptide
EAVQKIAL

SEQ ID NO: 11495 - protein, 9 aa, synthetic construct
  REGION 1..9: note = Description of Artificial Sequence: Synthetic peptide
ELKSLFNTV

SEQ ID NO: 11496 - protein, 9 aa, synthetic construct
  REGION 1..9: note = Description of Artificial Sequence: Synthetic peptide
DVKQLTEAV

SEQ ID NO: 11497 - protein, 8 aa, synthetic construct
  REGION 1..8: note = Description of Artificial Sequence: Synthetic peptide
HLKTAVQM

SEQ ID NO: 11498 - protein, 11 aa, synthetic construct
  REGION 1..11: note = Description of Artificial Sequence: Synthetic peptide
GQSNNSDSETF

SEQ ID NO: 11499 - protein, 9 aa, synthetic construct
  REGION 1..9: note = Description of Artificial Sequence: Synthetic peptide
IQDNSEIKI

SEQ ID NO: 11500 - protein, 9 aa, synthetic construct
  REGION 1..9: note = Description of Artificial Sequence: Synthetic peptide
GLNSTNETF

SEQ ID NO: 11501 - protein, 10 aa, synthetic construct
  REGION 1..10: note = Description of Artificial Sequence: Synthetic peptide
GQIRDQAEHL

SEQ ID NO: 11502 - protein, 9 aa, synthetic construct
  REGION 1..9: note = Description of Artificial Sequence: Synthetic peptide
AQEEDEVGF

SEQ ID NO: 11503 - protein, 9 aa, synthetic construct
  REGION 1..9: note = Description of Artificial Sequence: Synthetic peptide
KQMAVDDCV

SEQ ID NO: 11504 - protein, 10 aa, synthetic construct
  REGION 1..10: note = Description of Artificial Sequence: Synthetic peptide
SQISGESHTV

SEQ ID NO: 11505 - protein, 9 aa, synthetic construct
  REGION 1..9: note = Description of Artificial Sequence: Synthetic peptide
RQGAERALL

SEQ ID NO: 11506 - protein, 10 aa, synthetic construct
  REGION 1..10: note = Description of Artificial Sequence: Synthetic peptide
HQDPVPKQPL

SEQ ID NO: 11507 - protein, 9 aa, synthetic construct
  REGION 1..9: note = Description of Artificial Sequence: Synthetic peptide
IQLPDKDSW

SEQ ID NO: 11508 - protein, 9 aa, synthetic construct
  REGION 1..9: note = Description of Artificial Sequence: Synthetic peptide
GQYPPLASL

SEQ ID NO: 11509 - protein, 9 aa, synthetic construct
  REGION 1..9: note = Description of Artificial Sequence: Synthetic peptide
SQIYPGIKI

SEQ ID NO: 11510 - protein, 9 aa, synthetic construct
  REGION 1..9: note = Description of Artificial Sequence: Synthetic peptide
GVTDTKEAL

SEQ ID NO: 11511 - protein, 11 aa, synthetic construct
  REGION 1..11: note = Description of Artificial Sequence: Synthetic peptide
TQIDPDLADQL

SEQ ID NO: 11512 - protein, 9 aa, synthetic construct
  REGION 1..9: note = Description of Artificial Sequence: Synthetic peptide
AQEDEEVGF

SEQ ID NO: 11513 - protein, 11 aa, synthetic construct
  REGION 1..11: note = Description of Artificial Sequence: Synthetic peptide
TQIDPGLADQL

SEQ ID NO: 11514 - protein, 9 aa, synthetic construct
  REGION 1..9: note = Description of Artificial Sequence: Synthetic peptide
AQEEEEVGF

SEQ ID NO: 11515 - protein, 10 aa, synthetic construct
  REGION 1..10: note = Description of Artificial Sequence: Synthetic peptide
KQLTEAVQKI

SEQ ID NO: 11516 - protein, 10 aa, synthetic construct
  REGION 1..10: note = Description of Artificial Sequence: Synthetic peptide
GQVRDQAEHL

SEQ ID NO: 11517 - protein, 9 aa, synthetic construct
  REGION 1..9: note = Description of Artificial Sequence: Synthetic peptide
SQIYPGIKI

SEQ ID NO: 11518 - protein, 9 aa, synthetic construct
  REGION 1..9: note = Description of Artificial Sequence: Synthetic peptide
IIAQIQPSI

SEQ ID NO: 11519 - protein, 9 aa, synthetic construct
  REGION 1..9: note = Description of Artificial Sequence: Synthetic peptide
GQYPPLASL

SEQ ID NO: 11520 - protein, 9 aa, synthetic construct
  REGION 1..9: note = Description of Artificial Sequence: Synthetic peptide
QQNNLLQAI

SEQ ID NO: 11521 - protein, 9 aa, synthetic construct
  REGION 1..9: note = Description of Artificial Sequence: Synthetic peptide
SQANTTIMM

SEQ ID NO: 11522 - protein, 9 aa, synthetic construct
  REGION 1..9: note = Description of Artificial Sequence: Synthetic peptide
YQLETEPII

SEQ ID NO: 11523 - protein, 9 aa, synthetic construct
  REGION 1..9: note = Description of Artificial Sequence: Synthetic peptide
ALGEVGPFI

SEQ ID NO: 11524 - protein, 8 aa, synthetic construct
  REGION 1..8: note = Description of Artificial Sequence: Synthetic peptide
GQMVHQSL

SEQ ID NO: 11525 - protein, 9 aa, synthetic construct
  REGION 1..9: note = Description of Artificial Sequence: Synthetic peptide
VQKISLESI

SEQ ID NO: 11526 - protein, 9 aa, synthetic construct
  REGION 1..9: note = Description of Artificial Sequence: Synthetic peptide
KQMAVDDCV

SEQ ID NO: 11527 - protein, 10 aa, synthetic construct
  REGION 1..10: note = Description of Artificial Sequence: Synthetic peptide
KQYDSILIEI

SEQ ID NO: 11528 - protein, 10 aa, synthetic construct
  REGION 1..10: note = Description of Artificial Sequence: Synthetic peptide
SQISGESHTV

SEQ ID NO: 11529 - protein, 9 aa, synthetic construct
  REGION 1..9: note = Description of Artificial Sequence: Synthetic peptide
YQLETEPIV

SEQ ID NO: 11530 - protein, 10 aa, synthetic construct
  REGION 1..10: note = Description of Artificial Sequence: Synthetic peptide
KVVEIEPLGV

SEQ ID NO: 11531 - protein, 10 aa, synthetic construct
  REGION 1..10: note = Description of Artificial Sequence: Synthetic peptide
KQYDNILIEI

SEQ ID NO: 11532 - protein, 9 aa, synthetic construct
  REGION 1..9: note = Description of Artificial Sequence: Synthetic peptide
AMSQANTTI

SEQ ID NO: 11533 - protein, 9 aa, synthetic construct
  REGION 1..9: note = Description of Artificial Sequence: Synthetic peptide
SQANSAIMM

SEQ ID NO: 11534 - protein, 9 aa, synthetic construct
  REGION 1..9: note = Description of Artificial Sequence: Synthetic peptide
ELTDAVQKV

SEQ ID NO: 11535 - protein, 10 aa, synthetic construct
  REGION 1..10: note = Description of Artificial Sequence: Synthetic peptide
KQYDHILIEI

SEQ ID NO: 11536 - protein, 10 aa, synthetic construct
  REGION 1..10: note = Description of Artificial Sequence: Synthetic peptide
ALTDMVPLTA

SEQ ID NO: 11537 - protein, 8 aa, synthetic construct
  REGION 1..8: note = Description of Artificial Sequence: Synthetic peptide
SQATNTAI

SEQ ID NO: 11538 - protein, 8 aa, synthetic construct
  REGION 1..8: note = Description of Artificial Sequence: Synthetic peptide
GQDTAYFI

SEQ ID NO: 11539 - protein, 9 aa, synthetic construct
  REGION 1..9: note = Description of Artificial Sequence: Synthetic peptide
GQGQWTYQI

SEQ ID NO: 11540 - protein, 9 aa, synthetic construct
  REGION 1..9: note = Description of Artificial Sequence: Synthetic peptide
GQLQPSLQT

SEQ ID NO: 11541 - protein, 9 aa, synthetic construct
  REGION 1..9: note = Description of Artificial Sequence: Synthetic peptide
TVLSIVNRV

SEQ ID NO: 11542 - protein, 8 aa, synthetic construct
  REGION 1..8: note = Description of Artificial Sequence: Synthetic peptide
SQGVVESI

SEQ ID NO: 11543 - protein, 9 aa, synthetic construct
  REGION 1..9: note = Description of Artificial Sequence: Synthetic peptide
QQHMLQLTV

SEQ ID NO: 11544 - protein, 9 aa, synthetic construct
  REGION 1..9: note = Description of Artificial Sequence: Synthetic peptide
VQKIALESI

SEQ ID NO: 11545 - protein, 8 aa, synthetic construct
  REGION 1..8: note = Description of Artificial Sequence: Synthetic peptide
GQMVHQPI

SEQ ID NO: 11546 - protein, 9 aa, synthetic construct
  REGION 1..9: note = Description of Artificial Sequence: Synthetic peptide
NQKAELQAI

SEQ ID NO: 11547 - protein, 9 aa, synthetic construct
  REGION 1..9: note = Description of Artificial Sequence: Synthetic peptide
AVLSIVNRV

SEQ ID NO: 11548 - protein, 9 aa, synthetic construct
  REGION 1..9: note = Description of Artificial Sequence: Synthetic peptide
GAASLTLTV

SEQ ID NO: 11549 - protein, 9 aa, synthetic construct
  REGION 1..9: note = Description of Artificial Sequence: Synthetic peptide
GAASITLTV

SEQ ID NO: 11550 - protein, 8 aa, synthetic construct
  REGION 1..8: note = Description of Artificial Sequence: Synthetic peptide
GQETAYFI

SEQ ID NO: 11551 - protein, 9 aa, synthetic construct
  REGION 1..9: note = Description of Artificial Sequence: Synthetic peptide
QQHLLQLTV

SEQ ID NO: 11552 - protein, 8 aa, synthetic construct
  REGION 1..8: note = Description of Artificial Sequence: Synthetic peptide
NQIIEQLI

SEQ ID NO: 11553 - protein, 9 aa, synthetic construct
  REGION 1..9: note = Description of Artificial Sequence: Synthetic peptide
SQIYPGIKV

SEQ ID NO: 11554 - protein, 9 aa, synthetic construct
  REGION 1..9: note = Description of Artificial Sequence: Synthetic peptide
QLTEAVQKI

SEQ ID NO: 11555 - protein, 8 aa, synthetic construct
  REGION 1..8: note = Description of Artificial Sequence: Synthetic peptide
GQMVHQAI

SEQ ID NO: 11556 - protein, 10 aa, synthetic construct
  REGION 1..10: note = Description of Artificial Sequence: Synthetic peptide
KQLTEAVQKI

SEQ ID NO: 11557 - protein, 9 aa, synthetic construct
  REGION 1..9: note = Description of Artificial Sequence: Synthetic peptide
GQVDCSPGI

SEQ ID NO: 11558 - protein, 8 aa, synthetic construct
  REGION 1..8: note = Description of Artificial Sequence: Synthetic peptide
DRILSSCL

SEQ ID NO: 11559 - protein, 8 aa, synthetic construct
  REGION 1..8: note = Description of Artificial Sequence: Synthetic peptide
HRAIGTVL

SEQ ID NO: 11560 - protein, 8 aa, synthetic construct
  REGION 1..8: note = Description of Artificial Sequence: Synthetic peptide
DRLVSAGI

SEQ ID NO: 11561 - protein, 8 aa, synthetic construct
  REGION 1..8: note = Description of Artificial Sequence: Synthetic peptide
ERILSSCL

SEQ ID NO: 11562 - protein, 9 aa, synthetic construct
  REGION 1..9: note = Description of Artificial Sequence: Synthetic peptide
ERYLKDQQL

SEQ ID NO: 11563 - protein, 8 aa, synthetic construct
  REGION 1..8: note = Description of Artificial Sequence: Synthetic peptide
GQMVHQSL

SEQ ID NO: 11564 - protein, 8 aa, synthetic construct
  REGION 1..8: note = Description of Artificial Sequence: Synthetic peptide
DRILSSCL

SEQ ID NO: 11565 - protein, 8 aa, synthetic construct
  REGION 1..8: note = Description of Artificial Sequence: Synthetic peptide
HRAIGTVL

SEQ ID NO: 11566 - protein, 8 aa, synthetic construct
  REGION 1..8: note = Description of Artificial Sequence: Synthetic peptide
QRAVRAVL

SEQ ID NO: 11567 - protein, 9 aa, synthetic construct
  REGION 1..9: note = Description of Artificial Sequence: Synthetic peptide
TEAVQKISL

SEQ ID NO: 11568 - protein, 9 aa, synthetic construct
  REGION 1..9: note = Description of Artificial Sequence: Synthetic peptide
EQVDRLVSA

SEQ ID NO: 11569 - protein, 8 aa, synthetic construct
  REGION 1..8: note = Description of Artificial Sequence: Synthetic peptide
DRLVSAGI

SEQ ID NO: 11570 - protein, 8 aa, synthetic construct
  REGION 1..8: note = Description of Artificial Sequence: Synthetic peptide
LQAIHLAL

SEQ ID NO: 11571 - protein, 9 aa, synthetic construct
  REGION 1..9: note = Description of Artificial Sequence: Synthetic peptide
TEAVQKIAL

SEQ ID NO: 11572 - protein, 8 aa, synthetic construct
  REGION 1..8: note = Description of Artificial Sequence: Synthetic peptide
GQMVHQAI

SEQ ID NO: 11573 - protein, 9 aa, synthetic construct
  REGION 1..9: note = Description of Artificial Sequence: Synthetic peptide
ERYLKDQQL

SEQ ID NO: 11574 - protein, 8 aa, synthetic construct
  REGION 1..8: note = Description of Artificial Sequence: Synthetic peptide
IQKLVGKL

SEQ ID NO: 11575 - protein, 9 aa, synthetic construct
  REGION 1..9: note = Description of Artificial Sequence: Synthetic peptide
ATKGLGISY

SEQ ID NO: 11576 - protein, 9 aa, synthetic construct
  REGION 1..9: note = Description of Artificial Sequence: Synthetic peptide
GQYPPLASL

SEQ ID NO: 11577 - protein, 9 aa, synthetic construct
  REGION 1..9: note = Description of Artificial Sequence: Synthetic peptide
GLFNESEKY

SEQ ID NO: 11578 - protein, 9 aa, synthetic construct
  REGION 1..9: note = Description of Artificial Sequence: Synthetic peptide
GLNSTNETF

SEQ ID NO: 11579 - protein, 9 aa, synthetic construct
  REGION 1..9: note = Description of Artificial Sequence: Synthetic peptide
TTKGLGISY

SEQ ID NO: 11580 - protein, 9 aa, synthetic construct
  REGION 1..9: note = Description of Artificial Sequence: Synthetic peptide
AIMMQKSNY

SEQ ID NO: 11581 - protein, 8 aa, synthetic construct
  REGION 1..8: note = Description of Artificial Sequence: Synthetic peptide
GQMVHQSL

SEQ ID NO: 11582 - protein, 9 aa, synthetic construct
  REGION 1..9: note = Description of Artificial Sequence: Synthetic peptide
SQANTTIMM

SEQ ID NO: 11583 - protein, 11 aa, synthetic construct
  REGION 1..11: note = Description of Artificial Sequence: Synthetic peptide
VQINKDDNRTY

SEQ ID NO: 11584 - protein, 9 aa, synthetic construct
  REGION 1..9: note = Description of Artificial Sequence: Synthetic peptide
RIGPGQSFY

SEQ ID NO: 11585 - protein, 9 aa, synthetic construct
  REGION 1..9: note = Description of Artificial Sequence: Synthetic peptide
TQWNNTLEY

SEQ ID NO: 11586 - protein, 9 aa, synthetic construct
  REGION 1..9: note = Description of Artificial Sequence: Synthetic peptide
AIMMQKSNF

SEQ ID NO: 11587 - protein, 10 aa, synthetic construct
  REGION 1..10: note = Description of Artificial Sequence: Synthetic peptide
GIHLGPGQTF

SEQ ID NO: 11588 - protein, 9 aa, synthetic construct
  REGION 1..9: note = Description of Artificial Sequence: Synthetic peptide
SQANSAIMM

SEQ ID NO: 11589 - protein, 11 aa, synthetic construct
  REGION 1..11: note = Description of Artificial Sequence: Synthetic peptide
IQKQGDGQWTY

SEQ ID NO: 11590 - protein, 11 aa, synthetic construct
  REGION 1..11: note = Description of Artificial Sequence: Synthetic peptide
GQSNNSDSETF

SEQ ID NO: 11591 - protein, 9 aa, synthetic construct
  REGION 1..9: note = Description of Artificial Sequence: Synthetic peptide
KQGDGQWTY

SEQ ID NO: 11592 - protein, 9 aa, synthetic construct
  REGION 1..9: note = Description of Artificial Sequence: Synthetic peptide
HLGPGQTFY

SEQ ID NO: 11593 - protein, 9 aa, synthetic construct
  REGION 1..9: note = Description of Artificial Sequence: Synthetic peptide
FLSAAGSTM

SEQ ID NO: 11594 - protein, 8 aa, synthetic construct
  REGION 1..8: note = Description of Artificial Sequence: Synthetic peptide
AVHVASEY

SEQ ID NO: 11595 - protein, 9 aa, synthetic construct
  REGION 1..9: note = Description of Artificial Sequence: Synthetic peptide
IGNNNSSEY

SEQ ID NO: 11596 - protein, 9 aa, synthetic construct
  REGION 1..9: note = Description of Artificial Sequence: Synthetic peptide
SQATNTAIM

SEQ ID NO: 11597 - protein, 9 aa, synthetic construct
  REGION 1..9: note = Description of Artificial Sequence: Synthetic peptide
EVKLVITTY

SEQ ID NO: 11598 - protein, 10 aa, synthetic construct
  REGION 1..10: note = Description of Artificial Sequence: Synthetic peptide
ISNNNSREEY

SEQ ID NO: 11599 - protein, 9 aa, synthetic construct
  REGION 1..9: note = Description of Artificial Sequence: Synthetic peptide
VAVHVASEY

SEQ ID NO: 11600 - protein, 9 aa, synthetic construct
  REGION 1..9: note = Description of Artificial Sequence: Synthetic peptide
HLGPGQAFY

SEQ ID NO: 11601 - protein, 9 aa, synthetic construct
  REGION 1..9: note = Description of Artificial Sequence: Synthetic peptide
VSNYSKEIY

SEQ ID NO: 11602 - protein, 9 aa, synthetic construct
  REGION 1..9: note = Description of Artificial Sequence: Synthetic peptide
AEKGVSQNY

SEQ ID NO: 11603 - protein, 8 aa, synthetic construct
  REGION 1..8: note = Description of Artificial Sequence: Synthetic peptide
AQYWSQEL

SEQ ID NO: 11604 - protein, 9 aa, synthetic construct
  REGION 1..9: note = Description of Artificial Sequence: Synthetic peptide
IIGDIKKAY

SEQ ID NO: 11605 - protein, 9 aa, synthetic construct
  REGION 1..9: note = Description of Artificial Sequence: Synthetic peptide
WQGVGQAMY

SEQ ID NO: 11606 - protein, 11 aa, synthetic construct
  REGION 1..11: note = Description of Artificial Sequence: Synthetic peptide
AAADKGVSQNY

SEQ ID NO: 11607 - protein, 9 aa, synthetic construct
  REGION 1..9: note = Description of Artificial Sequence: Synthetic peptide
KQVTKIQNF

SEQ ID NO: 11608 - protein, 9 aa, synthetic construct
  REGION 1..9: note = Description of Artificial Sequence: Synthetic peptide
ISNYSKTIY

SEQ ID NO: 11609 - protein, 11 aa, synthetic construct
  REGION 1..11: note = Description of Artificial Sequence: Synthetic peptide
SQISGESHTVL

SEQ ID NO: 11610 - protein, 10 aa, synthetic construct
  REGION 1..10: note = Description of Artificial Sequence: Synthetic peptide
SIHLGPGQAF

SEQ ID NO: 11611 - protein, 8 aa, synthetic construct
  REGION 1..8: note = Description of Artificial Sequence: Synthetic peptide
AELVITTY

SEQ ID NO: 11612 - protein, 10 aa, synthetic construct
  REGION 1..10: note = Description of Artificial Sequence: Synthetic peptide
MQWEKEISNY

SEQ ID NO: 11613 - protein, 10 aa, synthetic construct
  REGION 1..10: note = Description of Artificial Sequence: Synthetic peptide
QINKDDNRTY

SEQ ID NO: 11614 - protein, 9 aa, synthetic construct
  REGION 1..9: note = Description of Artificial Sequence: Synthetic peptide
FLKNVTENF

SEQ ID NO: 11615 - protein, 9 aa, synthetic construct
  REGION 1..9: note = Description of Artificial Sequence: Synthetic peptide
AVSPASREL

SEQ ID NO: 11616 - protein, 9 aa, synthetic construct
  REGION 1..9: note = Description of Artificial Sequence: Synthetic peptide
ALFNKTIKF

SEQ ID NO: 11617 - protein, 9 aa, synthetic construct
  REGION 1..9: note = Description of Artificial Sequence: Synthetic peptide
IRIGPGQSF

SEQ ID NO: 11618 - protein, 10 aa, synthetic construct
  REGION 1..10: note = Description of Artificial Sequence: Synthetic peptide
SIRIGPGQSF

SEQ ID NO: 11619 - protein, 8 aa, synthetic construct
  REGION 1..8: note = Description of Artificial Sequence: Synthetic peptide
GQHIYNTY

SEQ ID NO: 11620 - protein, 9 aa, synthetic construct
  REGION 1..9: note = Description of Artificial Sequence: Synthetic peptide
KQGQGQWTY

SEQ ID NO: 11621 - protein, 11 aa, synthetic construct
  REGION 1..11: note = Description of Artificial Sequence: Synthetic peptide
IQKQGQGQWTY

SEQ ID NO: 11622 - protein, 10 aa, synthetic construct
  REGION 1..10: note = Description of Artificial Sequence: Synthetic peptide
ILKEPVHGAY

SEQ ID NO: 11623 - protein, 8 aa, synthetic construct
  REGION 1..8: note = Description of Artificial Sequence: Synthetic peptide
GQYIYNTY

SEQ ID NO: 11624 - protein, 9 aa, synthetic construct
  REGION 1..9: note = Description of Artificial Sequence: Synthetic peptide
IQKQGQGQW

SEQ ID NO: 11625 - protein, 9 aa, synthetic construct
  REGION 1..9: note = Description of Artificial Sequence: Synthetic peptide
KQITKIQNF

SEQ ID NO: 11626 - protein, 9 aa, synthetic construct
  REGION 1..9: note = Description of Artificial Sequence: Synthetic peptide
IQQEFGIPY

SEQ ID NO: 11627 - protein, 9 aa, synthetic construct
  REGION 1..9: note = Description of Artificial Sequence: Synthetic peptide
TQIGCTLNF

SEQ ID NO: 11628 - protein, 9 aa, synthetic construct
  REGION 1..9: note = Description of Artificial Sequence: Synthetic peptide
KQIIKIQNF

SEQ ID NO: 11629 - protein, 10 aa, synthetic construct
  REGION 1..10: note = Description of Artificial Sequence: Synthetic peptide
ILKEPVHGVY

SEQ ID NO: 11630 - protein, 8 aa, synthetic construct
  REGION 1..8: note = Description of Artificial Sequence: Synthetic peptide
GQMVHQAI

SEQ ID NO: 11631 - protein, 9 aa, synthetic construct
  REGION 1..9: note = Description of Artificial Sequence: Synthetic peptide
TVLDVGDAY

SEQ ID NO: 11632 - protein, 8 aa, synthetic construct
  REGION 1..8: note = Description of Artificial Sequence: Synthetic peptide
AVHVASGY

SEQ ID NO: 11633 - protein, 9 aa, synthetic construct
  REGION 1..9: note = Description of Artificial Sequence: Synthetic peptide
FLGAAGSTM

SEQ ID NO: 11634 - protein, 9 aa, synthetic construct
  REGION 1..9: note = Description of Artificial Sequence: Synthetic peptide
FLSAAGSTM

SEQ ID NO: 11635 - protein, 9 aa, synthetic construct
  REGION 1..9: note = Description of Artificial Sequence: Synthetic peptide
EVKLVITTY

SEQ ID NO: 11636 - protein, 9 aa, synthetic construct
  REGION 1..9: note = Description of Artificial Sequence: Synthetic peptide
HLGPGQTFY

SEQ ID NO: 11637 - protein, 9 aa, synthetic construct
  REGION 1..9: note = Description of Artificial Sequence: Synthetic peptide
TQWNNTLEY

SEQ ID NO: 11638 - protein, 9 aa, synthetic construct
  REGION 1..9: note = Description of Artificial Sequence: Synthetic peptide
TTKGLGISY

SEQ ID NO: 11639 - protein, 8 aa, synthetic construct
  REGION 1..8: note = Description of Artificial Sequence: Synthetic peptide
DQLIHIYY

SEQ ID NO: 11640 - protein, 9 aa, synthetic construct
  REGION 1..9: note = Description of Artificial Sequence: Synthetic peptide
GLFNESEKY

SEQ ID NO: 11641 - protein, 9 aa, synthetic construct
  REGION 1..9: note = Description of Artificial Sequence: Synthetic peptide
HLGPGQAFY

SEQ ID NO: 11642 - protein, 9 aa, synthetic construct
  REGION 1..9: note = Description of Artificial Sequence: Synthetic peptide
EAKLVVTTY

SEQ ID NO: 11643 - protein, 9 aa, synthetic construct
  REGION 1..9: note = Description of Artificial Sequence: Synthetic peptide
ELYPPLASL

SEQ ID NO: 11644 - protein, 9 aa, synthetic construct
  REGION 1..9: note = Description of Artificial Sequence: Synthetic peptide
SQANTTIMM

SEQ ID NO: 11645 - protein, 9 aa, synthetic construct
  REGION 1..9: note = Description of Artificial Sequence: Synthetic peptide
SQATNTAIM

SEQ ID NO: 11646 - protein, 9 aa, synthetic construct
  REGION 1..9: note = Description of Artificial Sequence: Synthetic peptide
NATTTNDTL

SEQ ID NO: 11647 - protein, 9 aa, synthetic construct
  REGION 1..9: note = Description of Artificial Sequence: Synthetic peptide
FISGDINNL

SEQ ID NO: 11648 - protein, 11 aa, synthetic construct
  REGION 1..11: note = Description of Artificial Sequence: Synthetic peptide
VPIGNNNSSEY

SEQ ID NO: 11649 - protein, 10 aa, synthetic construct
  REGION 1..10: note = Description of Artificial Sequence: Synthetic peptide
EINNYSNTIY

SEQ ID NO: 11650 - protein, 10 aa, synthetic construct
  REGION 1..10: note = Description of Artificial Sequence: Synthetic peptide
NMWQGVGQAM

SEQ ID NO: 11651 - protein, 9 aa, synthetic construct
  REGION 1..9: note = Description of Artificial Sequence: Synthetic peptide
FPNNTAIKF

SEQ ID NO: 11652 - protein, 9 aa, synthetic construct
  REGION 1..9: note = Description of Artificial Sequence: Synthetic peptide
SQANSAIMM

SEQ ID NO: 11653 - protein, 8 aa, synthetic construct
  REGION 1..8: note = Description of Artificial Sequence: Synthetic peptide
HLGPGQTF

SEQ ID NO: 11654 - protein, 9 aa, synthetic construct
  REGION 1..9: note = Description of Artificial Sequence: Synthetic peptide
GQYPPLASL

SEQ ID NO: 11655 - protein, 8 aa, synthetic construct
  REGION 1..8: note = Description of Artificial Sequence: Synthetic peptide
HLGPGQAF

SEQ ID NO: 11656 - protein, 8 aa, synthetic construct
  REGION 1..8: note = Description of Artificial Sequence: Synthetic peptide
TAFTIPSL

SEQ ID NO: 11657 - protein, 9 aa, synthetic construct
  REGION 1..9: note = Description of Artificial Sequence: Synthetic peptide
GLNSTNETF

SEQ ID NO: 11658 - protein, 10 aa, synthetic construct
  REGION 1..10: note = Description of Artificial Sequence: Synthetic peptide
SIHLGPGQAF

SEQ ID NO: 11659 - protein, 8 aa, synthetic construct
  REGION 1..8: note = Description of Artificial Sequence: Synthetic peptide
YLGNLTQY

SEQ ID NO: 11660 - protein, 9 aa, synthetic construct
  REGION 1..9: note = Description of Artificial Sequence: Synthetic peptide
TLSDQSSTL

SEQ ID NO: 11661 - protein, 9 aa, synthetic construct
  REGION 1..9: note = Description of Artificial Sequence: Synthetic peptide
FLKNVTENF

SEQ ID NO: 11662 - protein, 10 aa, synthetic construct
  REGION 1..10: note = Description of Artificial Sequence: Synthetic peptide
SIRIGPGQSF

SEQ ID NO: 11663 - protein, 9 aa, synthetic construct
  REGION 1..9: note = Description of Artificial Sequence: Synthetic peptide
IRIGPGQSF

SEQ ID NO: 11664 - protein, 8 aa, synthetic construct
  REGION 1..8: note = Description of Artificial Sequence: Synthetic peptide
GQYIYNTY

SEQ ID NO: 11665 - protein, 9 aa, synthetic construct
  REGION 1..9: note = Description of Artificial Sequence: Synthetic peptide
AAVDLSHFL

SEQ ID NO: 11666 - protein, 9 aa, synthetic construct
  REGION 1..9: note = Description of Artificial Sequence: Synthetic peptide
TVGGHQAAM

SEQ ID NO: 11667 - protein, 9 aa, synthetic construct
  REGION 1..9: note = Description of Artificial Sequence: Synthetic peptide
DIAGTTSTL

SEQ ID NO: 11668 - protein, 9 aa, synthetic construct
  REGION 1..9: note = Description of Artificial Sequence: Synthetic peptide
TVLDVGDAY

SEQ ID NO: 11669 - protein, 9 aa, synthetic construct
  REGION 1..9: note = Description of Artificial Sequence: Synthetic peptide
FLGAAGSTM

SEQ ID NO: 11670 - protein, 10 aa, synthetic construct
  REGION 1..10: note = Description of Artificial Sequence: Synthetic peptide
EVNIVTDSQY

SEQ ID NO: 11671 - protein, 8 aa, synthetic construct
  REGION 1..8: note = Description of Artificial Sequence: Synthetic peptide
AKLVVTTY

SEQ ID NO: 11672 - protein, 8 aa, synthetic construct
  REGION 1..8: note = Description of Artificial Sequence: Synthetic peptide
VKLVITTY

SEQ ID NO: 11673 - protein, 9 aa, synthetic construct
  REGION 1..9: note = Description of Artificial Sequence: Synthetic peptide
AKNPDIVIY

SEQ ID NO: 11674 - protein, 9 aa, synthetic construct
  REGION 1..9: note = Description of Artificial Sequence: Synthetic peptide
QKAELQAIY

SEQ ID NO: 11675 - protein, 9 aa, synthetic construct
  REGION 1..9: note = Description of Artificial Sequence: Synthetic peptide
GQYPPLASL

SEQ ID NO: 11676 - protein, 8 aa, synthetic construct
  REGION 1..8: note = Description of Artificial Sequence: Synthetic peptide
GQMVHQSL

SEQ ID NO: 11677 - protein, 9 aa, synthetic construct
  REGION 1..9: note = Description of Artificial Sequence: Synthetic peptide
ATKGLGISY

SEQ ID NO: 11678 - protein, 9 aa, synthetic construct
  REGION 1..9: note = Description of Artificial Sequence: Synthetic peptide
GLFNESEKY

SEQ ID NO: 11679 - protein, 9 aa, synthetic construct
  REGION 1..9: note = Description of Artificial Sequence: Synthetic peptide
TQWNNTLEY

SEQ ID NO: 11680 - protein, 10 aa, synthetic construct
  REGION 1..10: note = Description of Artificial Sequence: Synthetic peptide
LKYLGNLTQY

SEQ ID NO: 11681 - protein, 9 aa, synthetic construct
  REGION 1..9: note = Description of Artificial Sequence: Synthetic peptide
TTKGLGISY

SEQ ID NO: 11682 - protein, 8 aa, synthetic construct
  REGION 1..8: note = Description of Artificial Sequence: Synthetic peptide
VKAKLGSY

SEQ ID NO: 11683 - protein, 9 aa, synthetic construct
  REGION 1..9: note = Description of Artificial Sequence: Synthetic peptide
MKNPDIVIY

SEQ ID NO: 11684 - protein, 9 aa, synthetic construct
  REGION 1..9: note = Description of Artificial Sequence: Synthetic peptide
GLNSTNETF

SEQ ID NO: 11685 - protein, 9 aa, synthetic construct
  REGION 1..9: note = Description of Artificial Sequence: Synthetic peptide
IRIGPGQSF

SEQ ID NO: 11686 - protein, 8 aa, synthetic construct
  REGION 1..8: note = Description of Artificial Sequence: Synthetic peptide
GQHIYNTY

SEQ ID NO: 11687 - protein, 9 aa, synthetic construct
  REGION 1..9: note = Description of Artificial Sequence: Synthetic peptide
KQGQGQWTY

SEQ ID NO: 11688 - protein, 8 aa, synthetic construct
  REGION 1..8: note = Description of Artificial Sequence: Synthetic peptide
GQYIYNTY

SEQ ID NO: 11689 - protein, 8 aa, synthetic construct
  REGION 1..8: note = Description of Artificial Sequence: Synthetic peptide
HKAIGTVL

SEQ ID NO: 11690 - protein, 9 aa, synthetic construct
  REGION 1..9: note = Description of Artificial Sequence: Synthetic peptide
KQITKIQNF

SEQ ID NO: 11691 - protein, 8 aa, synthetic construct
  REGION 1..8: note = Description of Artificial Sequence: Synthetic peptide
TKGLGISY

SEQ ID NO: 11692 - protein, 9 aa, synthetic construct
  REGION 1..9: note = Description of Artificial Sequence: Synthetic peptide
SKIGPENPY

SEQ ID NO: 11693 - protein, 9 aa, synthetic construct
  REGION 1..9: note = Description of Artificial Sequence: Synthetic peptide
VKVIEEKAF

SEQ ID NO: 11694 - protein, 9 aa, synthetic construct
  REGION 1..9: note = Description of Artificial Sequence: Synthetic peptide
SHFPNNTAI

SEQ ID NO: 11695 - protein, 9 aa, synthetic construct
  REGION 1..9: note = Description of Artificial Sequence: Synthetic peptide
GQYPPLASL

SEQ ID NO: 11696 - protein, 10 aa, synthetic construct
  REGION 1..10: note = Description of Artificial Sequence: Synthetic peptide
VHQPISPRTL

SEQ ID NO: 11697 - protein, 9 aa, synthetic construct
  REGION 1..9: note = Description of Artificial Sequence: Synthetic peptide
GHRAIGTVL

SEQ ID NO: 11698 - protein, 10 aa, synthetic construct
  REGION 1..10: note = Description of Artificial Sequence: Synthetic peptide
HQDPVPKQPL

SEQ ID NO: 11699 - protein, 9 aa, synthetic construct
  REGION 1..9: note = Description of Artificial Sequence: Synthetic peptide
AHTNDIKEL

SEQ ID NO: 11700 - protein, 9 aa, synthetic construct
  REGION 1..9: note = Description of Artificial Sequence: Synthetic peptide
FQQGEARKL

SEQ ID NO: 11701 - protein, 11 aa, synthetic construct
  REGION 1..11: note = Description of Artificial Sequence: Synthetic peptide
IHQDPVPKQPL

SEQ ID NO: 11702 - protein, 9 aa, synthetic construct
  REGION 1..9: note = Description of Artificial Sequence: Synthetic peptide
HPAHAGPIL

SEQ ID NO: 11703 - protein, 9 aa, synthetic construct
  REGION 1..9: note = Description of Artificial Sequence: Synthetic peptide
IHLGPGQAF

SEQ ID NO: 11704 - protein, 8 aa, synthetic construct
  REGION 1..8: note = Description of Artificial Sequence: Synthetic peptide
HRAIGTVL

SEQ ID NO: 11705 - protein, 9 aa, synthetic construct
  REGION 1..9: note = Description of Artificial Sequence: Synthetic peptide
IHTDNGTNF

SEQ ID NO: 11706 - protein, 9 aa, synthetic construct
  REGION 1..9: note = Description of Artificial Sequence: Synthetic peptide
HRTPQSSQI

SEQ ID NO: 11707 - protein, 11 aa, synthetic construct
  REGION 1..11: note = Description of Artificial Sequence: Synthetic peptide
SQISGESHAVL

SEQ ID NO: 11708 - protein, 9 aa, synthetic construct
  REGION 1..9: note = Description of Artificial Sequence: Synthetic peptide
SQATNTAIM

SEQ ID NO: 11709 - protein, 9 aa, synthetic construct
  REGION 1..9: note = Description of Artificial Sequence: Synthetic peptide
IHLGPGQTF

SEQ ID NO: 11710 - protein, 10 aa, synthetic construct
  REGION 1..10: note = Description of Artificial Sequence: Synthetic peptide
VHIPLETAEL

SEQ ID NO: 11711 - protein, 8 aa, synthetic construct
  REGION 1..8: note = Description of Artificial Sequence: Synthetic peptide
MHTDIISL

SEQ ID NO: 11712 - protein, 9 aa, synthetic construct
  REGION 1..9: note = Description of Artificial Sequence: Synthetic peptide
HQSLSPRTL

SEQ ID NO: 11713 - protein, 9 aa, synthetic construct
  REGION 1..9: note = Description of Artificial Sequence: Synthetic peptide
IRIGPGQSF

SEQ ID NO: 11714 - protein, 9 aa, synthetic construct
  REGION 1..9: note = Description of Artificial Sequence: Synthetic peptide
THLEGKIIL

SEQ ID NO: 11715 - protein, 9 aa, synthetic construct
  REGION 1..9: note = Description of Artificial Sequence: Synthetic peptide
GHKAIGTVL

SEQ ID NO: 11716 - protein, 9 aa, synthetic construct
  REGION 1..9: note = Description of Artificial Sequence: Synthetic peptide
THLEGKVIL

SEQ ID NO: 11717 - protein, 8 aa, synthetic construct
  REGION 1..8: note = Description of Artificial Sequence: Synthetic peptide
THLEGKVI

SEQ ID NO: 11718 - protein, 9 aa, synthetic construct
  REGION 1..9: note = Description of Artificial Sequence: Synthetic peptide
AHTNDVKQL

SEQ ID NO: 11719 - protein, 9 aa, synthetic construct
  REGION 1..9: note = Description of Artificial Sequence: Synthetic peptide
SQIYPGIKV

SEQ ID NO: 11720 - protein, 9 aa, synthetic construct
  REGION 1..9: note = Description of Artificial Sequence: Synthetic peptide
HQAISPRTL

SEQ ID NO: 11721 - protein, 9 aa, synthetic construct
  REGION 1..9: note = Description of Artificial Sequence: Synthetic peptide
EHLKTAVQM

SEQ ID NO: 11722 - protein, 9 aa, synthetic construct
  REGION 1..9: note = Description of Artificial Sequence: Synthetic peptide
GHQAAMQML

SEQ ID NO: 11723 - protein, 9 aa, synthetic construct
  REGION 1..9: note = Description of Artificial Sequence: Synthetic peptide
FLSAAGSTM

SEQ ID NO: 11724 - protein, 9 aa, synthetic construct
  REGION 1..9: note = Description of Artificial Sequence: Synthetic peptide
TVLDVGDAY

SEQ ID NO: 11725 - protein, 9 aa, synthetic construct
  REGION 1..9: note = Description of Artificial Sequence: Synthetic peptide
TINEEAAEW

SEQ ID NO: 11726 - protein, 8 aa, synthetic construct
  REGION 1..8: note = Description of Artificial Sequence: Synthetic peptide
AELVITTY

SEQ ID NO: 11727 - protein, 8 aa, synthetic construct
  REGION 1..8: note = Description of Artificial Sequence: Synthetic peptide
DEWEKIQL

SEQ ID NO: 11728 - protein, 8 aa, synthetic construct
  REGION 1..8: note = Description of Artificial Sequence: Synthetic peptide
NESNIETF

SEQ ID NO: 11729 - protein, 10 aa, synthetic construct
  REGION 1..10: note = Description of Artificial Sequence: Synthetic peptide
EEVKLVITTY

SEQ ID NO: 11730 - protein, 9 aa, synthetic construct
  REGION 1..9: note = Description of Artificial Sequence: Synthetic peptide
DELFNDTKF

SEQ ID NO: 11731 - protein, 8 aa, synthetic construct
  REGION 1..8: note = Description of Artificial Sequence: Synthetic peptide
LEITMHSF

SEQ ID NO: 11732 - protein, 10 aa, synthetic construct
  REGION 1..10: note = Description of Artificial Sequence: Synthetic peptide
EEAELVITTY

SEQ ID NO: 11733 - protein, 8 aa, synthetic construct
  REGION 1..8: note = Description of Artificial Sequence: Synthetic peptide
LENVTERF

SEQ ID NO: 11734 - protein, 8 aa, synthetic construct
  REGION 1..8: note = Description of Artificial Sequence: Synthetic peptide
DEELLRAV

SEQ ID NO: 11735 - protein, 8 aa, synthetic construct
  REGION 1..8: note = Description of Artificial Sequence: Synthetic peptide
SEELKSLY

SEQ ID NO: 11736 - protein, 9 aa, synthetic construct
  REGION 1..9: note = Description of Artificial Sequence: Synthetic peptide
TELLKAVKY

SEQ ID NO: 11737 - protein, 9 aa, synthetic construct
  REGION 1..9: note = Description of Artificial Sequence: Synthetic peptide
TEAVQKISL

SEQ ID NO: 11738 - protein, 8 aa, synthetic construct
  REGION 1..8: note = Description of Artificial Sequence: Synthetic peptide
NETPGVRY

SEQ ID NO: 11739 - protein, 9 aa, synthetic construct
  REGION 1..9: note = Description of Artificial Sequence: Synthetic peptide
TEAVQKIAL

SEQ ID NO: 11740 - protein, 11 aa, synthetic construct
  REGION 1..11: note = Description of Artificial Sequence: Synthetic peptide
SEVNIVTDSQY

SEQ ID NO: 11741 - protein, 9 aa, synthetic construct
  REGION 1..9: note = Description of Artificial Sequence: Synthetic peptide
DEVGFPVRP

SEQ ID NO: 11742 - protein, 8 aa, synthetic construct
  REGION 1..8: note = Description of Artificial Sequence: Synthetic peptide
NETPGIRY

SEQ ID NO: 11743 - protein, 10 aa, synthetic construct
  REGION 1..10: note = Description of Artificial Sequence: Synthetic peptide
IRIGPGQSFY

SEQ ID NO: 11744 - protein, 11 aa, synthetic construct
  REGION 1..11: note = Description of Artificial Sequence: Synthetic peptide
SQANTTIMMQK

SEQ ID NO: 11745 - protein, 10 aa, synthetic construct
  REGION 1..10: note = Description of Artificial Sequence: Synthetic peptide
TRANNPDLAW

SEQ ID NO: 11746 - protein, 9 aa, synthetic construct
  REGION 1..9: note = Description of Artificial Sequence: Synthetic peptide
GRAVLNVPR

SEQ ID NO: 11747 - protein, 10 aa, synthetic construct
  REGION 1..10: note = Description of Artificial Sequence: Synthetic peptide
TRTTNPDLAW

SEQ ID NO: 11748 - protein, 9 aa, synthetic construct
  REGION 1..9: note = Description of Artificial Sequence: Synthetic peptide
ALTALVSPK

SEQ ID NO: 11749 - protein, 9 aa, synthetic construct
  REGION 1..9: note = Description of Artificial Sequence: Synthetic peptide
DRIIEVLQR

SEQ ID NO: 11750 - protein, 9 aa, synthetic construct
  REGION 1..9: note = Description of Artificial Sequence: Synthetic peptide
IRIGPGQSF

SEQ ID NO: 11751 - protein, 10 aa, synthetic construct
  REGION 1..10: note = Description of Artificial Sequence: Synthetic peptide
GAVDLSHFLK

SEQ ID NO: 11752 - protein, 11 aa, synthetic construct
  REGION 1..11: note = Description of Artificial Sequence: Synthetic peptide
KGGLEGLIYSK

SEQ ID NO: 11753 - protein, 10 aa, synthetic construct
  REGION 1..10: note = Description of Artificial Sequence: Synthetic peptide
GGLEGLIYSK

SEQ ID NO: 11754 - protein, 11 aa, synthetic construct
  REGION 1..11: note = Description of Artificial Sequence: Synthetic peptide
YATGEIIGDIR

SEQ ID NO: 11755 - protein, 9 aa, synthetic construct
  REGION 1..9: note = Description of Artificial Sequence: Synthetic peptide
SRIGPENPY

SEQ ID NO: 11756 - protein, 9 aa, synthetic construct
  REGION 1..9: note = Description of Artificial Sequence: Synthetic peptide
ARVLAVERY

SEQ ID NO: 11757 - protein, 9 aa, synthetic construct
  REGION 1..9: note = Description of Artificial Sequence: Synthetic peptide
SRIGIVPQR

SEQ ID NO: 11758 - protein, 9 aa, synthetic construct
  REGION 1..9: note = Description of Artificial Sequence: Synthetic peptide
GRAVLNVPR

SEQ ID NO: 11759 - protein, 10 aa, synthetic construct
  REGION 1..10: note = Description of Artificial Sequence: Synthetic peptide
KRFNGTGPCK

SEQ ID NO: 11760 - protein, 9 aa, synthetic construct
  REGION 1..9: note = Description of Artificial Sequence: Synthetic peptide
YRTQIDPGL

SEQ ID NO: 11761 - protein, 9 aa, synthetic construct
  REGION 1..9: note = Description of Artificial Sequence: Synthetic peptide
GRAVLNIPR

SEQ ID NO: 11762 - protein, 9 aa, synthetic construct
  REGION 1..9: note = Description of Artificial Sequence: Synthetic peptide
ERFAVDPGL

SEQ ID NO: 11763 - protein, 10 aa, synthetic construct
  REGION 1..10: note = Description of Artificial Sequence: Synthetic peptide
IRIGPGQSFY

SEQ ID NO: 11764 - protein, 9 aa, synthetic construct
  REGION 1..9: note = Description of Artificial Sequence: Synthetic peptide
ERFAIDPGL

SEQ ID NO: 11765 - protein, 9 aa, synthetic construct
  REGION 1..9: note = Description of Artificial Sequence: Synthetic peptide
IRIGPGQSF

SEQ ID NO: 11766 - protein, 9 aa, synthetic construct
  REGION 1..9: note = Description of Artificial Sequence: Synthetic peptide
GRAILNIPR

SEQ ID NO: 11767 - protein, 9 aa, synthetic construct
  REGION 1..9: note = Description of Artificial Sequence: Synthetic peptide
CRIKQIVNM

SEQ ID NO: 11768 - protein, 9 aa, synthetic construct
  REGION 1..9: note = Description of Artificial Sequence: Synthetic peptide
SRIGITRQR

SEQ ID NO: 11769 - protein, 9 aa, synthetic construct
  REGION 1..9: note = Description of Artificial Sequence: Synthetic peptide
SRIGIIRQR

SEQ ID NO: 11770 - protein, 9 aa, synthetic construct
  REGION 1..9: note = Description of Artificial Sequence: Synthetic peptide
SRIGPENPY

SEQ ID NO: 11771 - protein, 9 aa, synthetic construct
  REGION 1..9: note = Description of Artificial Sequence: Synthetic peptide
ARVLAVERY

SEQ ID NO: 11772 - protein, 11 aa, synthetic construct
  REGION 1..11: note = Description of Artificial Sequence: Synthetic peptide
VPIGNNNSSEY

SEQ ID NO: 11773 - protein, 9 aa, synthetic construct
  REGION 1..9: note = Description of Artificial Sequence: Synthetic peptide
FPNNTAIKF

SEQ ID NO: 11774 - protein, 9 aa, synthetic construct
  REGION 1..9: note = Description of Artificial Sequence: Synthetic peptide
EPIAGADTF

SEQ ID NO: 11775 - protein, 11 aa, synthetic construct
  REGION 1..11: note = Description of Artificial Sequence: Synthetic peptide
IPAETGQDTAY

SEQ ID NO: 11776 - protein, 9 aa, synthetic construct
  REGION 1..9: note = Description of Artificial Sequence: Synthetic peptide
TAELVITTY

SEQ ID NO: 11777 - protein, 11 aa, synthetic construct
  REGION 1..11: note = Description of Artificial Sequence: Synthetic peptide
IPINNSSSSDY

SEQ ID NO: 11778 - protein, 10 aa, synthetic construct
  REGION 1..10: note = Description of Artificial Sequence: Synthetic peptide
TAEKGVSQNY

SEQ ID NO: 11779 - protein, 9 aa, synthetic construct
  REGION 1..9: note = Description of Artificial Sequence: Synthetic peptide
EAELVITTY

SEQ ID NO: 11780 - protein, 9 aa, synthetic construct
  REGION 1..9: note = Description of Artificial Sequence: Synthetic peptide
VPNNGTITL

SEQ ID NO: 11781 - protein, 9 aa, synthetic construct
  REGION 1..9: note = Description of Artificial Sequence: Synthetic peptide
HPAHAGPIL

SEQ ID NO: 11782 - protein, 9 aa, synthetic construct
  REGION 1..9: note = Description of Artificial Sequence: Synthetic peptide
QAIEAQQHM

SEQ ID NO: 11783 - protein, 11 aa, synthetic construct
  REGION 1..11: note = Description of Artificial Sequence: Synthetic peptide
VPTDPNPQEVF

SEQ ID NO: 11784 - protein, 9 aa, synthetic construct
  REGION 1..9: note = Description of Artificial Sequence: Synthetic peptide
EAKLVVTTY

SEQ ID NO: 11785 - protein, 9 aa, synthetic construct
  REGION 1..9: note = Description of Artificial Sequence: Synthetic peptide
VAVHVASEY

SEQ ID NO: 11786 - protein, 9 aa, synthetic construct
  REGION 1..9: note = Description of Artificial Sequence: Synthetic peptide
SPAIFQYSM

SEQ ID NO: 11787 - protein, 9 aa, synthetic construct
  REGION 1..9: note = Description of Artificial Sequence: Synthetic peptide
PPVPVGEMY

SEQ ID NO: 11788 - protein, 9 aa, synthetic construct
  REGION 1..9: note = Description of Artificial Sequence: Synthetic peptide
DPNPQEVAL

SEQ ID NO: 11789 - protein, 9 aa, synthetic construct
  REGION 1..9: note = Description of Artificial Sequence: Synthetic peptide
NPIAGNITC

SEQ ID NO: 11790 - protein, 10 aa, synthetic construct
  REGION 1..10: note = Description of Artificial Sequence: Synthetic peptide
FATKGLGISY

SEQ ID NO: 11791 - protein, 9 aa, synthetic construct
  REGION 1..9: note = Description of Artificial Sequence: Synthetic peptide
TPTDLNTML

SEQ ID NO: 11792 - protein, 8 aa, synthetic construct
  REGION 1..8: note = Description of Artificial Sequence: Synthetic peptide
FPNATIKF

SEQ ID NO: 11793 - protein, 9 aa, synthetic construct
  REGION 1..9: note = Description of Artificial Sequence: Synthetic peptide
QATNAAIMM

SEQ ID NO: 11794 - protein, 9 aa, synthetic construct
  REGION 1..9: note = Description of Artificial Sequence: Synthetic peptide
EVKLVITTY

SEQ ID NO: 11795 - protein, 9 aa, synthetic construct
  REGION 1..9: note = Description of Artificial Sequence: Synthetic peptide
QATNTAIMM

SEQ ID NO: 11796 - protein, 9 aa, synthetic construct
  REGION 1..9: note = Description of Artificial Sequence: Synthetic peptide
FPVSPIETV

SEQ ID NO: 11797 - protein, 10 aa, synthetic construct
  REGION 1..10: note = Description of Artificial Sequence: Synthetic peptide
EPIAGADTFY

SEQ ID NO: 11798 - protein, 9 aa, synthetic construct
  REGION 1..9: note = Description of Artificial Sequence: Synthetic peptide
VPLTTEAEL

SEQ ID NO: 11799 - protein, 9 aa, synthetic construct
  REGION 1..9: note = Description of Artificial Sequence: Synthetic peptide
DPNPQEVVL

SEQ ID NO: 11800 - protein, 9 aa, synthetic construct
  REGION 1..9: note = Description of Artificial Sequence: Synthetic peptide
PPVPVGDIY

SEQ ID NO: 11801 - protein, 10 aa, synthetic construct
  REGION 1..10: note = Description of Artificial Sequence: Synthetic peptide
NPPVPVGDIY

SEQ ID NO: 11802 - protein, 9 aa, synthetic construct
  REGION 1..9: note = Description of Artificial Sequence: Synthetic peptide
VPLTEEAEL

SEQ ID NO: 11803 - protein, 9 aa, synthetic construct
  REGION 1..9: note = Description of Artificial Sequence: Synthetic peptide
EPIIGAETF

SEQ ID NO: 11804 - protein, 9 aa, synthetic construct
  REGION 1..9: note = Description of Artificial Sequence: Synthetic peptide
NPDIVIYQY

SEQ ID NO: 11805 - protein, 9 aa, synthetic construct
  REGION 1..9: note = Description of Artificial Sequence: Synthetic peptide
EPIAGAETF

SEQ ID NO: 11806 - protein, 10 aa, synthetic construct
  REGION 1..10: note = Description of Artificial Sequence: Synthetic peptide
EPIAGAETFY

SEQ ID NO: 11807 - protein, 9 aa, synthetic construct
  REGION 1..9: note = Description of Artificial Sequence: Synthetic peptide
EPIVGAETF

SEQ ID NO: 11808 - protein, 8 aa, synthetic construct
  REGION 1..8: note = Description of Artificial Sequence: Synthetic peptide
TPGPGIRY

SEQ ID NO: 11809 - protein, 11 aa, synthetic construct
  REGION 1..11: note = Description of Artificial Sequence: Synthetic peptide
IPAETGQETAY

SEQ ID NO: 11810 - protein, 9 aa, synthetic construct
  REGION 1..9: note = Description of Artificial Sequence: Synthetic peptide
TVLDVGDAY

SEQ ID NO: 11811 - protein, 9 aa, synthetic construct
  REGION 1..9: note = Description of Artificial Sequence: Synthetic peptide
SPAIFQSSM

SEQ ID NO: 11812 - protein, 9 aa, synthetic construct
  REGION 1..9: note = Description of Artificial Sequence: Synthetic peptide
FPISPIETV

SEQ ID NO: 11813 - protein, 9 aa, synthetic construct
  REGION 1..9: note = Description of Artificial Sequence: Synthetic peptide
DPNPQEVAL

SEQ ID NO: 11814 - protein, 9 aa, synthetic construct
  REGION 1..9: note = Description of Artificial Sequence: Synthetic peptide
HPAHAGPIL

SEQ ID NO: 11815 - protein, 9 aa, synthetic construct
  REGION 1..9: note = Description of Artificial Sequence: Synthetic peptide
VPLTTEAEL

SEQ ID NO: 11816 - protein, 9 aa, synthetic construct
  REGION 1..9: note = Description of Artificial Sequence: Synthetic peptide
EPIAGADTF

SEQ ID NO: 11817 - protein, 9 aa, synthetic construct
  REGION 1..9: note = Description of Artificial Sequence: Synthetic peptide
SPASGELRV

SEQ ID NO: 11818 - protein, 8 aa, synthetic construct
  REGION 1..8: note = Description of Artificial Sequence: Synthetic peptide
IPLEEVKL

SEQ ID NO: 11819 - protein, 9 aa, synthetic construct
  REGION 1..9: note = Description of Artificial Sequence: Synthetic peptide
TPTDLNTML

SEQ ID NO: 11820 - protein, 8 aa, synthetic construct
  REGION 1..8: note = Description of Artificial Sequence: Synthetic peptide
IPLEEAEL

SEQ ID NO: 11821 - protein, 9 aa, synthetic construct
  REGION 1..9: note = Description of Artificial Sequence: Synthetic peptide
NATTTNDTL

SEQ ID NO: 11822 - protein, 9 aa, synthetic construct
  REGION 1..9: note = Description of Artificial Sequence: Synthetic peptide
DPNPQEVFL

SEQ ID NO: 11823 - protein, 8 aa, synthetic construct
  REGION 1..8: note = Description of Artificial Sequence: Synthetic peptide
YVGSDLEL

SEQ ID NO: 11824 - protein, 8 aa, synthetic construct
  REGION 1..8: note = Description of Artificial Sequence: Synthetic peptide
IPLEEAKL

SEQ ID NO: 11825 - protein, 9 aa, synthetic construct
  REGION 1..9: note = Description of Artificial Sequence: Synthetic peptide
DTIAINDTL

SEQ ID NO: 11826 - protein, 9 aa, synthetic construct
  REGION 1..9: note = Description of Artificial Sequence: Synthetic peptide
FPVSPIETV

SEQ ID NO: 11827 - protein, 9 aa, synthetic construct
  REGION 1..9: note = Description of Artificial Sequence: Synthetic peptide
IVTDSQYVL

SEQ ID NO: 11828 - protein, 9 aa, synthetic construct
  REGION 1..9: note = Description of Artificial Sequence: Synthetic peptide
DPNPQEVVL

SEQ ID NO: 11829 - protein, 9 aa, synthetic construct
  REGION 1..9: note = Description of Artificial Sequence: Synthetic peptide
VPLTAEAEL

SEQ ID NO: 11830 - protein, 9 aa, synthetic construct
  REGION 1..9: note = Description of Artificial Sequence: Synthetic peptide
VPLTEEAEL

SEQ ID NO: 11831 - protein, 9 aa, synthetic construct
  REGION 1..9: note = Description of Artificial Sequence: Synthetic peptide
EPIAGAETF

SEQ ID NO: 11832 - protein, 9 aa, synthetic construct
  REGION 1..9: note = Description of Artificial Sequence: Synthetic peptide
QPDKSESEL

SEQ ID NO: 11833 - protein, 9 aa, synthetic construct
  REGION 1..9: note = Description of Artificial Sequence: Synthetic peptide
FPISPIETV

SEQ ID NO: 11834 - protein, 9 aa, synthetic construct
  REGION 1..9: note = Description of Artificial Sequence: Synthetic peptide
HPAHAGPIL

SEQ ID NO: 11835 - protein, 9 aa, synthetic construct
  REGION 1..9: note = Description of Artificial Sequence: Synthetic peptide
DPNPQEVAL

SEQ ID NO: 11836 - protein, 9 aa, synthetic construct
  REGION 1..9: note = Description of Artificial Sequence: Synthetic peptide
TPTDLNTML

SEQ ID NO: 11837 - protein, 9 aa, synthetic construct
  REGION 1..9: note = Description of Artificial Sequence: Synthetic peptide
VPNNGTITL

SEQ ID NO: 11838 - protein, 9 aa, synthetic construct
  REGION 1..9: note = Description of Artificial Sequence: Synthetic peptide
VPLTTEAEL

SEQ ID NO: 11839 - protein, 9 aa, synthetic construct
  REGION 1..9: note = Description of Artificial Sequence: Synthetic peptide
FPNNTAIKF

SEQ ID NO: 11840 - protein, 9 aa, synthetic construct
  REGION 1..9: note = Description of Artificial Sequence: Synthetic peptide
NPIAGNITC

SEQ ID NO: 11841 - protein, 9 aa, synthetic construct
  REGION 1..9: note = Description of Artificial Sequence: Synthetic peptide
FPVSPIETV

SEQ ID NO: 11842 - protein, 9 aa, synthetic construct
  REGION 1..9: note = Description of Artificial Sequence: Synthetic peptide
EPIAGADTF

SEQ ID NO: 11843 - protein, 9 aa, synthetic construct
  REGION 1..9: note = Description of Artificial Sequence: Synthetic peptide
FISGDINNL

SEQ ID NO: 11844 - protein, 9 aa, synthetic construct
  REGION 1..9: note = Description of Artificial Sequence: Synthetic peptide
SPIAGNITC

SEQ ID NO: 11845 - protein, 11 aa, synthetic construct
  REGION 1..11: note = Description of Artificial Sequence: Synthetic peptide
VPLTTEAELEL

SEQ ID NO: 11846 - protein, 9 aa, synthetic construct
  REGION 1..9: note = Description of Artificial Sequence: Synthetic peptide
NATTTNDTL

SEQ ID NO: 11847 - protein, 9 aa, synthetic construct
  REGION 1..9: note = Description of Artificial Sequence: Synthetic peptide
QATNTAIMM

SEQ ID NO: 11848 - protein, 9 aa, synthetic construct
  REGION 1..9: note = Description of Artificial Sequence: Synthetic peptide
QAIEAQQHM

SEQ ID NO: 11849 - protein, 11 aa, synthetic construct
  REGION 1..11: note = Description of Artificial Sequence: Synthetic peptide
VPTDPNPQEVF

SEQ ID NO: 11850 - protein, 9 aa, synthetic construct
  REGION 1..9: note = Description of Artificial Sequence: Synthetic peptide
DPNPQEVFL

SEQ ID NO: 11851 - protein, 8 aa, synthetic construct
  REGION 1..8: note = Description of Artificial Sequence: Synthetic peptide
IPGDVNNL

SEQ ID NO: 11852 - protein, 9 aa, synthetic construct
  REGION 1..9: note = Description of Artificial Sequence: Synthetic peptide
QATNAAIMM

SEQ ID NO: 11853 - protein, 8 aa, synthetic construct
  REGION 1..8: note = Description of Artificial Sequence: Synthetic peptide
IPGDINNL

SEQ ID NO: 11854 - protein, 8 aa, synthetic construct
  REGION 1..8: note = Description of Artificial Sequence: Synthetic peptide
IPLEEAEL

SEQ ID NO: 11855 - protein, 9 aa, synthetic construct
  REGION 1..9: note = Description of Artificial Sequence: Synthetic peptide
VPLTAEANL

SEQ ID NO: 11856 - protein, 8 aa, synthetic construct
  REGION 1..8: note = Description of Artificial Sequence: Synthetic peptide
YVGSDLEL

SEQ ID NO: 11857 - protein, 9 aa, synthetic construct
  REGION 1..9: note = Description of Artificial Sequence: Synthetic peptide
DTIAINDTL

SEQ ID NO: 11858 - protein, 9 aa, synthetic construct
  REGION 1..9: note = Description of Artificial Sequence: Synthetic peptide
HPTQAGPIP

SEQ ID NO: 11859 - protein, 9 aa, synthetic construct
  REGION 1..9: note = Description of Artificial Sequence: Synthetic peptide
APIAGNITC

SEQ ID NO: 11860 - protein, 10 aa, synthetic construct
  REGION 1..10: note = Description of Artificial Sequence: Synthetic peptide
NANPDCKIIL

SEQ ID NO: 11861 - protein, 8 aa, synthetic construct
  REGION 1..8: note = Description of Artificial Sequence: Synthetic peptide
NPIPEQPL

SEQ ID NO: 11862 - protein, 10 aa, synthetic construct
  REGION 1..10: note = Description of Artificial Sequence: Synthetic peptide
QAIEAQQHML

SEQ ID NO: 11863 - protein, 9 aa, synthetic construct
  REGION 1..9: note = Description of Artificial Sequence: Synthetic peptide
IVTDSQYVL

SEQ ID NO: 11864 - protein, 9 aa, synthetic construct
  REGION 1..9: note = Description of Artificial Sequence: Synthetic peptide
DPNPQEVVL

SEQ ID NO: 11865 - protein, 9 aa, synthetic construct
  REGION 1..9: note = Description of Artificial Sequence: Synthetic peptide
VPLTAEAEL

SEQ ID NO: 11866 - protein, 11 aa, synthetic construct
  REGION 1..11: note = Description of Artificial Sequence: Synthetic peptide
VPLTAEAELEL

SEQ ID NO: 11867 - protein, 9 aa, synthetic construct
  REGION 1..9: note = Description of Artificial Sequence: Synthetic peptide
VPLTEEAEL

SEQ ID NO: 11868 - protein, 11 aa, synthetic construct
  REGION 1..11: note = Description of Artificial Sequence: Synthetic peptide
VPLTEEAELEL

SEQ ID NO: 11869 - protein, 9 aa, synthetic construct
  REGION 1..9: note = Description of Artificial Sequence: Synthetic peptide
EPIIGAETF

SEQ ID NO: 11870 - protein, 9 aa, synthetic construct
  REGION 1..9: note = Description of Artificial Sequence: Synthetic peptide
EPIAGAETF

SEQ ID NO: 11871 - protein, 9 aa, synthetic construct
  REGION 1..9: note = Description of Artificial Sequence: Synthetic peptide
EPIVGAETF

SEQ ID NO: 11872 - protein, 9 aa, synthetic construct
  REGION 1..9: note = Description of Artificial Sequence: Synthetic peptide
QPDKSESEL

SEQ ID NO: 11873 - protein, 9 aa, synthetic construct
  REGION 1..9: note = Description of Artificial Sequence: Synthetic peptide
TPQDLNTML

SEQ ID NO: 11874 - protein, 10 aa, synthetic construct
  REGION 1..10: note = Description of Artificial Sequence: Synthetic peptide
NANPDCKTIL

SEQ ID NO: 11875 - protein, 9 aa, synthetic construct
  REGION 1..9: note = Description of Artificial Sequence: Synthetic peptide
FPISPIETV

SEQ ID NO: 11876 - protein, 9 aa, synthetic construct
  REGION 1..9: note = Description of Artificial Sequence: Synthetic peptide
IVTDSQYAL

SEQ ID NO: 11877 - protein, 10 aa, synthetic construct
  REGION 1..10: note = Description of Artificial Sequence: Synthetic peptide
SPIETVPVKL

SEQ ID NO: 11878 - protein, 11 aa, synthetic construct
  REGION 1..11: note = Description of Artificial Sequence: Synthetic peptide
IPAETGQDTAY

SEQ ID NO: 11879 - protein, 9 aa, synthetic construct
  REGION 1..9: note = Description of Artificial Sequence: Synthetic peptide
EPIAGADTF

SEQ ID NO: 11880 - protein, 9 aa, synthetic construct
  REGION 1..9: note = Description of Artificial Sequence: Synthetic peptide
TAELVITTY

SEQ ID NO: 11881 - protein, 11 aa, synthetic construct
  REGION 1..11: note = Description of Artificial Sequence: Synthetic peptide
VPIGNNNSSEY

SEQ ID NO: 11882 - protein, 9 aa, synthetic construct
  REGION 1..9: note = Description of Artificial Sequence: Synthetic peptide
FPNNTAIKF

SEQ ID NO: 11883 - protein, 9 aa, synthetic construct
  REGION 1..9: note = Description of Artificial Sequence: Synthetic peptide
EAELVITTY

SEQ ID NO: 11884 - protein, 11 aa, synthetic construct
  REGION 1..11: note = Description of Artificial Sequence: Synthetic peptide
VPTDPNPQEVF

SEQ ID NO: 11885 - protein, 10 aa, synthetic construct
  REGION 1..10: note = Description of Artificial Sequence: Synthetic peptide
TAEKGVSQNY

SEQ ID NO: 11886 - protein, 9 aa, synthetic construct
  REGION 1..9: note = Description of Artificial Sequence: Synthetic peptide
DPNPQEVAL

SEQ ID NO: 11887 - protein, 9 aa, synthetic construct
  REGION 1..9: note = Description of Artificial Sequence: Synthetic peptide
VPLTTEAEL

SEQ ID NO: 11888 - protein, 9 aa, synthetic construct
  REGION 1..9: note = Description of Artificial Sequence: Synthetic peptide
HPAHAGPIL

SEQ ID NO: 11889 - protein, 9 aa, synthetic construct
  REGION 1..9: note = Description of Artificial Sequence: Synthetic peptide
DPNPQEVVL

SEQ ID NO: 11890 - protein, 9 aa, synthetic construct
  REGION 1..9: note = Description of Artificial Sequence: Synthetic peptide
VPLTEEAEL

SEQ ID NO: 11891 - protein, 10 aa, synthetic construct
  REGION 1..10: note = Description of Artificial Sequence: Synthetic peptide
NPPVPVGDIY

SEQ ID NO: 11892 - protein, 9 aa, synthetic construct
  REGION 1..9: note = Description of Artificial Sequence: Synthetic peptide
PPVPVGDIY

SEQ ID NO: 11893 - protein, 9 aa, synthetic construct
  REGION 1..9: note = Description of Artificial Sequence: Synthetic peptide
EPIIGAETF

SEQ ID NO: 11894 - protein, 9 aa, synthetic construct
  REGION 1..9: note = Description of Artificial Sequence: Synthetic peptide
NPDIVIYQY

SEQ ID NO: 11895 - protein, 9 aa, synthetic construct
  REGION 1..9: note = Description of Artificial Sequence: Synthetic peptide
EPIAGAETF

SEQ ID NO: 11896 - protein, 9 aa, synthetic construct
  REGION 1..9: note = Description of Artificial Sequence: Synthetic peptide
EPIVGAETF

SEQ ID NO: 11897 - protein, 8 aa, synthetic construct
  REGION 1..8: note = Description of Artificial Sequence: Synthetic peptide
TPGPGIRY

SEQ ID NO: 11898 - protein, 11 aa, synthetic construct
  REGION 1..11: note = Description of Artificial Sequence: Synthetic peptide
IPAETGQETAY

SEQ ID NO: 11899 - protein, 9 aa, synthetic construct
  REGION 1..9: note = Description of Artificial Sequence: Synthetic peptide
TVLDVGDAY

SEQ ID NO: 11900 - protein, 9 aa, synthetic construct
  REGION 1..9: note = Description of Artificial Sequence: Synthetic peptide
DPNPQEVAL

SEQ ID NO: 11901 - protein, 9 aa, synthetic construct
  REGION 1..9: note = Description of Artificial Sequence: Synthetic peptide
HPAHAGPIL

SEQ ID NO: 11902 - protein, 9 aa, synthetic construct
  REGION 1..9: note = Description of Artificial Sequence: Synthetic peptide
VPLTTEAEL

SEQ ID NO: 11903 - protein, 9 aa, synthetic construct
  REGION 1..9: note = Description of Artificial Sequence: Synthetic peptide
EPIAGADTF

SEQ ID NO: 11904 - protein, 8 aa, synthetic construct
  REGION 1..8: note = Description of Artificial Sequence: Synthetic peptide
IPLEEVKL

SEQ ID NO: 11905 - protein, 9 aa, synthetic construct
  REGION 1..9: note = Description of Artificial Sequence: Synthetic peptide
DPNPQEVFL

SEQ ID NO: 11906 - protein, 9 aa, synthetic construct
  REGION 1..9: note = Description of Artificial Sequence: Synthetic peptide
SPASGELRV

SEQ ID NO: 11907 - protein, 9 aa, synthetic construct
  REGION 1..9: note = Description of Artificial Sequence: Synthetic peptide
SPIAGNITC

SEQ ID NO: 11908 - protein, 8 aa, synthetic construct
  REGION 1..8: note = Description of Artificial Sequence: Synthetic peptide
IPLEEAEL

SEQ ID NO: 11909 - protein, 9 aa, synthetic construct
  REGION 1..9: note = Description of Artificial Sequence: Synthetic peptide
DTIAINDTL

SEQ ID NO: 11910 - protein, 9 aa, synthetic construct
  REGION 1..9: note = Description of Artificial Sequence: Synthetic peptide
TPTDLNTML

SEQ ID NO: 11911 - protein, 8 aa, synthetic construct
  REGION 1..8: note = Description of Artificial Sequence: Synthetic peptide
YVGSDLEL

SEQ ID NO: 11912 - protein, 11 aa, synthetic construct
  REGION 1..11: note = Description of Artificial Sequence: Synthetic peptide
VPTDPNPQEVF

SEQ ID NO: 11913 - protein, 11 aa, synthetic construct
  REGION 1..11: note = Description of Artificial Sequence: Synthetic peptide
VPLTTEAELEL

SEQ ID NO: 11914 - protein, 8 aa, synthetic construct
  REGION 1..8: note = Description of Artificial Sequence: Synthetic peptide
IPLEEAKL

SEQ ID NO: 11915 - protein, 9 aa, synthetic construct
  REGION 1..9: note = Description of Artificial Sequence: Synthetic peptide
FPVSPIETV

SEQ ID NO: 11916 - protein, 9 aa, synthetic construct
  REGION 1..9: note = Description of Artificial Sequence: Synthetic peptide
VPNNGTITL

SEQ ID NO: 11917 - protein, 9 aa, synthetic construct
  REGION 1..9: note = Description of Artificial Sequence: Synthetic peptide
MDDEDREVL

SEQ ID NO: 11918 - protein, 9 aa, synthetic construct
  REGION 1..9: note = Description of Artificial Sequence: Synthetic peptide
NATTTNDTL

SEQ ID NO: 11919 - protein, 9 aa, synthetic construct
  REGION 1..9: note = Description of Artificial Sequence: Synthetic peptide
FISGDINNL

SEQ ID NO: 11920 - protein, 9 aa, synthetic construct
  REGION 1..9: note = Description of Artificial Sequence: Synthetic peptide
NPIAGNITC

SEQ ID NO: 11921 - protein, 9 aa, synthetic construct
  REGION 1..9: note = Description of Artificial Sequence: Synthetic peptide
IVTDSQYVL

SEQ ID NO: 11922 - protein, 9 aa, synthetic construct
  REGION 1..9: note = Description of Artificial Sequence: Synthetic peptide
DPNPQEVVL

SEQ ID NO: 11923 - protein, 9 aa, synthetic construct
  REGION 1..9: note = Description of Artificial Sequence: Synthetic peptide
VPLTAEAEL

SEQ ID NO: 11924 - protein, 9 aa, synthetic construct
  REGION 1..9: note = Description of Artificial Sequence: Synthetic peptide
VPLTEEAEL

SEQ ID NO: 11925 - protein, 11 aa, synthetic construct
  REGION 1..11: note = Description of Artificial Sequence: Synthetic peptide
VPLTEEAELEL

SEQ ID NO: 11926 - protein, 8 aa, synthetic construct
  REGION 1..8: note = Description of Artificial Sequence: Synthetic peptide
DPDLADQL

SEQ ID NO: 11927 - protein, 9 aa, synthetic construct
  REGION 1..9: note = Description of Artificial Sequence: Synthetic peptide
EPIAGAETF

SEQ ID NO: 11928 - protein, 9 aa, synthetic construct
  REGION 1..9: note = Description of Artificial Sequence: Synthetic peptide
EPIVGAETF

SEQ ID NO: 11929 - protein, 9 aa, synthetic construct
  REGION 1..9: note = Description of Artificial Sequence: Synthetic peptide
QPDKSESEL

SEQ ID NO: 11930 - protein, 9 aa, synthetic construct
  REGION 1..9: note = Description of Artificial Sequence: Synthetic peptide
FPISPIETV

SEQ ID NO: 11931 - protein, 8 aa, synthetic construct
  REGION 1..8: note = Description of Artificial Sequence: Synthetic peptide
NESNIETF

SEQ ID NO: 11932 - protein, 9 aa, synthetic construct
  REGION 1..9: note = Description of Artificial Sequence: Synthetic peptide
NDTNRTETF

SEQ ID NO: 11933 - protein, 8 aa, synthetic construct
  REGION 1..8: note = Description of Artificial Sequence: Synthetic peptide
AELQAIHL

SEQ ID NO: 11934 - protein, 9 aa, synthetic construct
  REGION 1..9: note = Description of Artificial Sequence: Synthetic peptide
QDPVPKQPL

SEQ ID NO: 11935 - protein, 8 aa, synthetic construct
  REGION 1..8: note = Description of Artificial Sequence: Synthetic peptide
SDFNIPAV

SEQ ID NO: 11936 - protein, 8 aa, synthetic construct
  REGION 1..8: note = Description of Artificial Sequence: Synthetic peptide
SDLLAITI

SEQ ID NO: 11937 - protein, 8 aa, synthetic construct
  REGION 1..8: note = Description of Artificial Sequence: Synthetic peptide
TDIQTREL

SEQ ID NO: 11938 - protein, 8 aa, synthetic construct
  REGION 1..8: note = Description of Artificial Sequence: Synthetic peptide
AELQAIQL

SEQ ID NO: 11939 - protein, 8 aa, synthetic construct
  REGION 1..8: note = Description of Artificial Sequence: Synthetic peptide
ADQLIHIY

SEQ ID NO: 11940 - protein, 8 aa, synthetic construct
  REGION 1..8: note = Description of Artificial Sequence: Synthetic peptide
ADNLWVTV

SEQ ID NO: 11941 - protein, 8 aa, synthetic construct
  REGION 1..8: note = Description of Artificial Sequence: Synthetic peptide
SEELKSLF

SEQ ID NO: 11942 - protein, 8 aa, synthetic construct
  REGION 1..8: note = Description of Artificial Sequence: Synthetic peptide
KEATTTLF

SEQ ID NO: 11943 - protein, 9 aa, synthetic construct
  REGION 1..9: note = Description of Artificial Sequence: Synthetic peptide
TEAVQKIAL

SEQ ID NO: 11944 - protein, 8 aa, synthetic construct
  REGION 1..8: note = Description of Artificial Sequence: Synthetic peptide
AEHLKTAV

SEQ ID NO: 11945 - protein, 9 aa, synthetic construct
  REGION 1..9: note = Description of Artificial Sequence: Synthetic peptide
VHLNESVQI

SEQ ID NO: 11946 - protein, 9 aa, synthetic construct
  REGION 1..9: note = Description of Artificial Sequence: Synthetic peptide
IHTDNGTNF

SEQ ID NO: 11947 - protein, 9 aa, synthetic construct
  REGION 1..9: note = Description of Artificial Sequence: Synthetic peptide
SHFPNNTAI

SEQ ID NO: 11948 - protein, 9 aa, synthetic construct
  REGION 1..9: note = Description of Artificial Sequence: Synthetic peptide
IQDNSEIKI

SEQ ID NO: 11949 - protein, 9 aa, synthetic construct
  REGION 1..9: note = Description of Artificial Sequence: Synthetic peptide
IHLGPGQTF

SEQ ID NO: 11950 - protein, 10 aa, synthetic construct
  REGION 1..10: note = Description of Artificial Sequence: Synthetic peptide
HQDPVPKQPL

SEQ ID NO: 11951 - protein, 9 aa, synthetic construct
  REGION 1..9: note = Description of Artificial Sequence: Synthetic peptide
FISGDINNL

SEQ ID NO: 11952 - protein, 9 aa, synthetic construct
  REGION 1..9: note = Description of Artificial Sequence: Synthetic peptide
SHDEIWNNM

SEQ ID NO: 11953 - protein, 9 aa, synthetic construct
  REGION 1..9: note = Description of Artificial Sequence: Synthetic peptide
IHLGPGQAF

SEQ ID NO: 11954 - protein, 10 aa, synthetic construct
  REGION 1..10: note = Description of Artificial Sequence: Synthetic peptide
VHIPLEEVKL

SEQ ID NO: 11955 - protein, 10 aa, synthetic construct
  REGION 1..10: note = Description of Artificial Sequence: Synthetic peptide
VHIPLETAEL

SEQ ID NO: 11956 - protein, 10 aa, synthetic construct
  REGION 1..10: note = Description of Artificial Sequence: Synthetic peptide
AHCNVSGTQW

SEQ ID NO: 11957 - protein, 9 aa, synthetic construct
  REGION 1..9: note = Description of Artificial Sequence: Synthetic peptide
AHTNDIKEL

SEQ ID NO: 11958 - protein, 10 aa, synthetic construct
  REGION 1..10: note = Description of Artificial Sequence: Synthetic peptide
VHIPLEEAEL

SEQ ID NO: 11959 - protein, 10 aa, synthetic construct
  REGION 1..10: note = Description of Artificial Sequence: Synthetic peptide
VHIPLEEAKL

SEQ ID NO: 11960 - protein, 9 aa, synthetic construct
  REGION 1..9: note = Description of Artificial Sequence: Synthetic peptide
TLSDQSSTL

SEQ ID NO: 11961 - protein, 9 aa, synthetic construct
  REGION 1..9: note = Description of Artificial Sequence: Synthetic peptide
IRIGPGQSF

SEQ ID NO: 11962 - protein, 11 aa, synthetic construct
  REGION 1..11: note = Description of Artificial Sequence: Synthetic peptide
TQIDPDLADQL

SEQ ID NO: 11963 - protein, 11 aa, synthetic construct
  REGION 1..11: note = Description of Artificial Sequence: Synthetic peptide
TQIDPGLADQL

SEQ ID NO: 11964 - protein, 9 aa, synthetic construct
  REGION 1..9: note = Description of Artificial Sequence: Synthetic peptide
THLEGKIIL

SEQ ID NO: 11965 - protein, 9 aa, synthetic construct
  REGION 1..9: note = Description of Artificial Sequence: Synthetic peptide
IHTDNGSNF

SEQ ID NO: 11966 - protein, 9 aa, synthetic construct
  REGION 1..9: note = Description of Artificial Sequence: Synthetic peptide
THLEGKVIL

SEQ ID NO: 11967 - protein, 9 aa, synthetic construct
  REGION 1..9: note = Description of Artificial Sequence: Synthetic peptide
AHTNDVKQL

SEQ ID NO: 11968 - protein, 9 aa, synthetic construct
  REGION 1..9: note = Description of Artificial Sequence: Synthetic peptide
TQDFWEVQL

SEQ ID NO: 11969 - protein, 9 aa, synthetic construct
  REGION 1..9: note = Description of Artificial Sequence: Synthetic peptide
GHQAAMQML

SEQ ID NO: 11970 - protein, 9 aa, synthetic construct
  REGION 1..9: note = Description of Artificial Sequence: Synthetic peptide
EHLKTAVQM

SEQ ID NO: 11971 - protein, 9 aa, synthetic construct
  REGION 1..9: note = Description of Artificial Sequence: Synthetic peptide
SHFPNNTAI

SEQ ID NO: 11972 - protein, 9 aa, synthetic construct
  REGION 1..9: note = Description of Artificial Sequence: Synthetic peptide
SQANTTIMM

SEQ ID NO: 11973 - protein, 9 aa, synthetic construct
  REGION 1..9: note = Description of Artificial Sequence: Synthetic peptide
IHTDNGTNF

SEQ ID NO: 11974 - protein, 9 aa, synthetic construct
  REGION 1..9: note = Description of Artificial Sequence: Synthetic peptide
YRTQIDPDL

SEQ ID NO: 11975 - protein, 9 aa, synthetic construct
  REGION 1..9: note = Description of Artificial Sequence: Synthetic peptide
FISGDINNL

SEQ ID NO: 11976 - protein, 9 aa, synthetic construct
  REGION 1..9: note = Description of Artificial Sequence: Synthetic peptide
TLSDQSSTL

SEQ ID NO: 11977 - protein, 9 aa, synthetic construct
  REGION 1..9: note = Description of Artificial Sequence: Synthetic peptide
YRTQIDPGL

SEQ ID NO: 11978 - protein, 10 aa, synthetic construct
  REGION 1..10: note = Description of Artificial Sequence: Synthetic peptide
HQDPVPKQPL

SEQ ID NO: 11979 - protein, 9 aa, synthetic construct
  REGION 1..9: note = Description of Artificial Sequence: Synthetic peptide
SQATNTAIM

SEQ ID NO: 11980 - protein, 9 aa, synthetic construct
  REGION 1..9: note = Description of Artificial Sequence: Synthetic peptide
GQYPPLASL

SEQ ID NO: 11981 - protein, 9 aa, synthetic construct
  REGION 1..9: note = Description of Artificial Sequence: Synthetic peptide
SQANSAIMM

SEQ ID NO: 11982 - protein, 9 aa, synthetic construct
  REGION 1..9: note = Description of Artificial Sequence: Synthetic peptide
VHLNESVQI

SEQ ID NO: 11983 - protein, 8 aa, synthetic construct
  REGION 1..8: note = Description of Artificial Sequence: Synthetic peptide
TRANNPDL

SEQ ID NO: 11984 - protein, 9 aa, synthetic construct
  REGION 1..9: note = Description of Artificial Sequence: Synthetic peptide
FLSAAGSTM

SEQ ID NO: 11985 - protein, 11 aa, synthetic construct
  REGION 1..11: note = Description of Artificial Sequence: Synthetic peptide
TQIDPDLADQL

SEQ ID NO: 11986 - protein, 9 aa, synthetic construct
  REGION 1..9: note = Description of Artificial Sequence: Synthetic peptide
IRIGPGQSF

SEQ ID NO: 11987 - protein, 8 aa, synthetic construct
  REGION 1..8: note = Description of Artificial Sequence: Synthetic peptide
MHTDIISL

SEQ ID NO: 11988 - protein, 11 aa, synthetic construct
  REGION 1..11: note = Description of Artificial Sequence: Synthetic peptide
TQIDPGLADQL

SEQ ID NO: 11989 - protein, 9 aa, synthetic construct
  REGION 1..9: note = Description of Artificial Sequence: Synthetic peptide
IHTDNGSNF

SEQ ID NO: 11990 - protein, 9 aa, synthetic construct
  REGION 1..9: note = Description of Artificial Sequence: Synthetic peptide
THLEGKVIL

SEQ ID NO: 11991 - protein, 9 aa, synthetic construct
  REGION 1..9: note = Description of Artificial Sequence: Synthetic peptide
HQAISPRTL

SEQ ID NO: 11992 - protein, 9 aa, synthetic construct
  REGION 1..9: note = Description of Artificial Sequence: Synthetic peptide
EHLKTAVQM

SEQ ID NO: 11993 - protein, 9 aa, synthetic construct
  REGION 1..9: note = Description of Artificial Sequence: Synthetic peptide
MRRPPPAAA

SEQ ID NO: 11994 - protein, 8 aa, synthetic construct
  REGION 1..8: note = Description of Artificial Sequence: Synthetic peptide
SHFPNNTA

SEQ ID NO: 11995 - protein, 9 aa, synthetic construct
  REGION 1..9: note = Description of Artificial Sequence: Synthetic peptide
EQVDRLVSA

SEQ ID NO: 11996 - protein, 9 aa, synthetic construct
  REGION 1..9: note = Description of Artificial Sequence: Synthetic peptide
ERMRQTPTA

SEQ ID NO: 11997 - protein, 9 aa, synthetic construct
  REGION 1..9: note = Description of Artificial Sequence: Synthetic peptide
SHFPNNTAI

SEQ ID NO: 11998 - protein, 8 aa, synthetic construct
  REGION 1..8: note = Description of Artificial Sequence: Synthetic peptide
DHILIEIC

SEQ ID NO: 11999 - protein, 8 aa, synthetic construct
  REGION 1..8: note = Description of Artificial Sequence: Synthetic peptide
VHIPLETA

SEQ ID NO: 12000 - protein, 8 aa, synthetic construct
  REGION 1..8: note = Description of Artificial Sequence: Synthetic peptide
VHIPLEEA

SEQ ID NO: 12001 - protein, 8 aa, synthetic construct
  REGION 1..8: note = Description of Artificial Sequence: Synthetic peptide
VHIPLEEV

SEQ ID NO: 12002 - protein, 9 aa, synthetic construct
  REGION 1..9: note = Description of Artificial Sequence: Synthetic peptide
DMVPLTAEA

SEQ ID NO: 12003 - protein, 8 aa, synthetic construct
  REGION 1..8: note = Description of Artificial Sequence: Synthetic peptide
MRRPPPAA

SEQ ID NO: 12004 - protein, 8 aa, synthetic construct
  REGION 1..8: note = Description of Artificial Sequence: Synthetic peptide
TDIVPLTA

SEQ ID NO: 12005 - protein, 9 aa, synthetic construct
  REGION 1..9: note = Description of Artificial Sequence: Synthetic peptide
RRTPPTPPA

SEQ ID NO: 12006 - protein, 8 aa, synthetic construct
  REGION 1..8: note = Description of Artificial Sequence: Synthetic peptide
DQITIDIC

SEQ ID NO: 12007 - protein, 9 aa, synthetic construct
  REGION 1..9: note = Description of Artificial Sequence: Synthetic peptide
NLLAIGIAA

SEQ ID NO: 12008 - protein, 8 aa, synthetic construct
  REGION 1..8: note = Description of Artificial Sequence: Synthetic peptide
HHTVLESG

SEQ ID NO: 12009 - protein, 10 aa, synthetic construct
  REGION 1..10: note = Description of Artificial Sequence: Synthetic peptide
SQYVLGIIQA

SEQ ID NO: 12010 - protein, 8 aa, synthetic construct
  REGION 1..8: note = Description of Artificial Sequence: Synthetic peptide
MHTDIISL

SEQ ID NO: 12011 - protein, 9 aa, synthetic construct
  REGION 1..9: note = Description of Artificial Sequence: Synthetic peptide
YQLETEPIA

SEQ ID NO: 12012 - protein, 9 aa, synthetic construct
  REGION 1..9: note = Description of Artificial Sequence: Synthetic peptide
EQVDKLVSA

SEQ ID NO: 12013 - protein, 8 aa, synthetic construct
  REGION 1..8: note = Description of Artificial Sequence: Synthetic peptide
TAFTIPSV

SEQ ID NO: 12014 - protein, 8 aa, synthetic construct
  REGION 1..8: note = Description of Artificial Sequence: Synthetic peptide
QHMLQLTV

SEQ ID NO: 12015 - protein, 9 aa, synthetic construct
  REGION 1..9: note = Description of Artificial Sequence: Synthetic peptide
QQHLLQLTV

SEQ ID NO: 12016 - protein, 8 aa, synthetic construct
  REGION 1..8: note = Description of Artificial Sequence: Synthetic peptide
THGIRPVV

SEQ ID NO: 12017 - protein, 8 aa, synthetic construct
  REGION 1..8: note = Description of Artificial Sequence: Synthetic peptide
GKVILVAV

SEQ ID NO: 12018 - protein, 8 aa, synthetic construct
  REGION 1..8: note = Description of Artificial Sequence: Synthetic peptide
THGIKPVV

SEQ ID NO: 12019 - protein, 10 aa, synthetic construct
  REGION 1..10: note = Description of Artificial Sequence: Synthetic peptide
SQYALGIIQA

SEQ ID NO: 12020 - protein, 9 aa, synthetic construct
  REGION 1..9: note = Description of Artificial Sequence: Synthetic peptide
VQLGIPHPA

SEQ ID NO: 12021 - protein, 9 aa, synthetic construct
  REGION 1..9: note = Description of Artificial Sequence: Synthetic peptide
TEAVQKISL

SEQ ID NO: 12022 - protein, 9 aa, synthetic construct
  REGION 1..9: note = Description of Artificial Sequence: Synthetic peptide
SEEPVPLQL

SEQ ID NO: 12023 - protein, 10 aa, synthetic construct
  REGION 1..10: note = Description of Artificial Sequence: Synthetic peptide
TETTNQKAEL

SEQ ID NO: 12024 - protein, 9 aa, synthetic construct
  REGION 1..9: note = Description of Artificial Sequence: Synthetic peptide
MEDEDKEVL

SEQ ID NO: 12025 - protein, 10 aa, synthetic construct
  REGION 1..10: note = Description of Artificial Sequence: Synthetic peptide
VEVKDTKEAL

SEQ ID NO: 12026 - protein, 9 aa, synthetic construct
  REGION 1..9: note = Description of Artificial Sequence: Synthetic peptide
SEGATPTDL

SEQ ID NO: 12027 - protein, 10 aa, synthetic construct
  REGION 1..10: note = Description of Artificial Sequence: Synthetic peptide
AEEGVGSSQI

SEQ ID NO: 12028 - protein, 9 aa, synthetic construct
  REGION 1..9: note = Description of Artificial Sequence: Synthetic peptide
LEEPVPLQL

SEQ ID NO: 12029 - protein, 10 aa, synthetic construct
  REGION 1..10: note = Description of Artificial Sequence: Synthetic peptide
GELYPPLASL

SEQ ID NO: 12030 - protein, 9 aa, synthetic construct
  REGION 1..9: note = Description of Artificial Sequence: Synthetic peptide
SEYIEAEVI

SEQ ID NO: 12031 - protein, 10 aa, synthetic construct
  REGION 1..10: note = Description of Artificial Sequence: Synthetic peptide
TEEGVGSPQI

SEQ ID NO: 12032 - protein, 9 aa, synthetic construct
  REGION 1..9: note = Description of Artificial Sequence: Synthetic peptide
KEEGQYPPL

SEQ ID NO: 12033 - protein, 8 aa, synthetic construct
  REGION 1..8: note = Description of Artificial Sequence: Synthetic peptide
AELQAIHL

SEQ ID NO: 12034 - protein, 10 aa, synthetic construct
  REGION 1..10: note = Description of Artificial Sequence: Synthetic peptide
KELTDAVQKV

SEQ ID NO: 12035 - protein, 10 aa, synthetic construct
  REGION 1..10: note = Description of Artificial Sequence: Synthetic peptide
KEINNYSNTI

SEQ ID NO: 12036 - protein, 11 aa, synthetic construct
  REGION 1..11: note = Description of Artificial Sequence: Synthetic peptide
AEGTDRIIEVL

SEQ ID NO: 12037 - protein, 9 aa, synthetic construct
  REGION 1..9: note = Description of Artificial Sequence: Synthetic peptide
SESEIVNKI

SEQ ID NO: 12038 - protein, 11 aa, synthetic construct
  REGION 1..11: note = Description of Artificial Sequence: Synthetic peptide
SEGDAEELAAL

SEQ ID NO: 12039 - protein, 11 aa, synthetic construct
  REGION 1..11: note = Description of Artificial Sequence: Synthetic peptide
AEGTDRVIEAL

SEQ ID NO: 12040 - protein, 11 aa, synthetic construct
  REGION 1..11: note = Description of Artificial Sequence: Synthetic peptide
AEGTDRVIEVL

SEQ ID NO: 12041 - protein, 9 aa, synthetic construct
  REGION 1..9: note = Description of Artificial Sequence: Synthetic peptide
MEDEDREVL

SEQ ID NO: 12042 - protein, 8 aa, synthetic construct
  REGION 1..8: note = Description of Artificial Sequence: Synthetic peptide
AELQAIQL

SEQ ID NO: 12043 - protein, 10 aa, synthetic construct
  REGION 1..10: note = Description of Artificial Sequence: Synthetic peptide
IEAQQHMLQL

SEQ ID NO: 12044 - protein, 9 aa, synthetic construct
  REGION 1..9: note = Description of Artificial Sequence: Synthetic peptide
WENDMVEQM

SEQ ID NO: 12045 - protein, 10 aa, synthetic construct
  REGION 1..10: note = Description of Artificial Sequence: Synthetic peptide
QELKNSAISL

SEQ ID NO: 12046 - protein, 8 aa, synthetic construct
  REGION 1..8: note = Description of Artificial Sequence: Synthetic peptide
IEAQQHML

SEQ ID NO: 12047 - protein, 10 aa, synthetic construct
  REGION 1..10: note = Description of Artificial Sequence: Synthetic peptide
IEIKDTKEAL

SEQ ID NO: 12048 - protein, 9 aa, synthetic construct
  REGION 1..9: note = Description of Artificial Sequence: Synthetic peptide
QEKNEQELL

SEQ ID NO: 12049 - protein, 9 aa, synthetic construct
  REGION 1..9: note = Description of Artificial Sequence: Synthetic peptide
TEAVQKIAL

SEQ ID NO: 12050 - protein, 11 aa, synthetic construct
  REGION 1..11: note = Description of Artificial Sequence: Synthetic peptide
SEIVNQIIEQL

SEQ ID NO: 12051 - protein, 9 aa, synthetic construct
  REGION 1..9: note = Description of Artificial Sequence: Synthetic peptide
SESEIVNQI

SEQ ID NO: 12052 - protein, 10 aa, synthetic construct
  REGION 1..10: note = Description of Artificial Sequence: Synthetic peptide
IEAQQHLLQL

SEQ ID NO: 12053 - protein, 10 aa, synthetic construct
  REGION 1..10: note = Description of Artificial Sequence: Synthetic peptide
IEVKDTKEAL

SEQ ID NO: 12054 - protein, 9 aa, synthetic construct
  REGION 1..9: note = Description of Artificial Sequence: Synthetic peptide
SEGATPQDL

SEQ ID NO: 12055 - protein, 8 aa, synthetic construct
  REGION 1..8: note = Description of Artificial Sequence: Synthetic peptide
IETVPVKL

SEQ ID NO: 12056 - protein, 10 aa, synthetic construct
  REGION 1..10: note = Description of Artificial Sequence: Synthetic peptide
AEHLKTAVQM

SEQ ID NO: 12057 - protein, 8 aa, synthetic construct
  REGION 1..8: note = Description of Artificial Sequence: Synthetic peptide
IEAQQHLL

SEQ ID NO: 12058 - protein, 9 aa, synthetic construct
  REGION 1..9: note = Description of Artificial Sequence: Synthetic peptide
TEAVQKISL

SEQ ID NO: 12059 - protein, 8 aa, synthetic construct
  REGION 1..8: note = Description of Artificial Sequence: Synthetic peptide
SDFNIPAV

SEQ ID NO: 12060 - protein, 10 aa, synthetic construct
  REGION 1..10: note = Description of Artificial Sequence: Synthetic peptide
GELYPPLASL

SEQ ID NO: 12061 - protein, 11 aa, synthetic construct
  REGION 1..11: note = Description of Artificial Sequence: Synthetic peptide
AEGTDRVIEAL

SEQ ID NO: 12062 - protein, 10 aa, synthetic construct
  REGION 1..10: note = Description of Artificial Sequence: Synthetic peptide
TETTNQKAEL

SEQ ID NO: 12063 - protein, 11 aa, synthetic construct
  REGION 1..11: note = Description of Artificial Sequence: Synthetic peptide
AEGTDRIIEVL

SEQ ID NO: 12064 - protein, 8 aa, synthetic construct
  REGION 1..8: note = Description of Artificial Sequence: Synthetic peptide
AELQAIHL

SEQ ID NO: 12065 - protein, 10 aa, synthetic construct
  REGION 1..10: note = Description of Artificial Sequence: Synthetic peptide
GEIVIRSQNI

SEQ ID NO: 12066 - protein, 10 aa, synthetic construct
  REGION 1..10: note = Description of Artificial Sequence: Synthetic peptide
VEVKDTKEAL

SEQ ID NO: 12067 - protein, 10 aa, synthetic construct
  REGION 1..10: note = Description of Artificial Sequence: Synthetic peptide
KELTDAVQKV

SEQ ID NO: 12068 - protein, 9 aa, synthetic construct
  REGION 1..9: note = Description of Artificial Sequence: Synthetic peptide
SEEPVPLQL

SEQ ID NO: 12069 - protein, 9 aa, synthetic construct
  REGION 1..9: note = Description of Artificial Sequence: Synthetic peptide
NEGVGNPQI

SEQ ID NO: 12070 - protein, 9 aa, synthetic construct
  REGION 1..9: note = Description of Artificial Sequence: Synthetic peptide
SESEIVNKI

SEQ ID NO: 12071 - protein, 8 aa, synthetic construct
  REGION 1..8: note = Description of Artificial Sequence: Synthetic peptide
TDRVIEAL

SEQ ID NO: 12072 - protein, 9 aa, synthetic construct
  REGION 1..9: note = Description of Artificial Sequence: Synthetic peptide
SEGATPTDL

SEQ ID NO: 12073 - protein, 9 aa, synthetic construct
  REGION 1..9: note = Description of Artificial Sequence: Synthetic peptide
SDFNIPAVV

SEQ ID NO: 12074 - protein, 9 aa, synthetic construct
  REGION 1..9: note = Description of Artificial Sequence: Synthetic peptide
SEYIEAEVI

SEQ ID NO: 12075 - protein, 11 aa, synthetic construct
  REGION 1..11: note = Description of Artificial Sequence: Synthetic peptide
SEIVNKIIEKL

SEQ ID NO: 12076 - protein, 8 aa, synthetic construct
  REGION 1..8: note = Description of Artificial Sequence: Synthetic peptide
DEWEKIQL

SEQ ID NO: 12077 - protein, 8 aa, synthetic construct
  REGION 1..8: note = Description of Artificial Sequence: Synthetic peptide
TAFTIPSL

SEQ ID NO: 12078 - protein, 8 aa, synthetic construct
  REGION 1..8: note = Description of Artificial Sequence: Synthetic peptide
LEYVKAEL

SEQ ID NO: 12079 - protein, 9 aa, synthetic construct
  REGION 1..9: note = Description of Artificial Sequence: Synthetic peptide
GQYPPLASL

SEQ ID NO: 12080 - protein, 10 aa, synthetic construct
  REGION 1..10: note = Description of Artificial Sequence: Synthetic peptide
KEINNYSNTI

SEQ ID NO: 12081 - protein, 11 aa, synthetic construct
  REGION 1..11: note = Description of Artificial Sequence: Synthetic peptide
AEAMSQANTTI

SEQ ID NO: 12082 - protein, 9 aa, synthetic construct
  REGION 1..9: note = Description of Artificial Sequence: Synthetic peptide
MEDEDKEVL

SEQ ID NO: 12083 - protein, 8 aa, synthetic construct
  REGION 1..8: note = Description of Artificial Sequence: Synthetic peptide
AELQAIYL

SEQ ID NO: 12084 - protein, 9 aa, synthetic construct
  REGION 1..9: note = Description of Artificial Sequence: Synthetic peptide
LETEPIVGA

SEQ ID NO: 12085 - protein, 11 aa, synthetic construct
  REGION 1..11: note = Description of Artificial Sequence: Synthetic peptide
AEAMSQATNTA

SEQ ID NO: 12086 - protein, 8 aa, synthetic construct
  REGION 1..8: note = Description of Artificial Sequence: Synthetic peptide
TDIQTREL

SEQ ID NO: 12087 - protein, 10 aa, synthetic construct
  REGION 1..10: note = Description of Artificial Sequence: Synthetic peptide
GEIIGDIRKA

SEQ ID NO: 12088 - protein, 11 aa, synthetic construct
  REGION 1..11: note = Description of Artificial Sequence: Synthetic peptide
AEGTDRVIEVL

SEQ ID NO: 12089 - protein, 8 aa, synthetic construct
  REGION 1..8: note = Description of Artificial Sequence: Synthetic peptide
TDRVIEVL

SEQ ID NO: 12090 - protein, 8 aa, synthetic construct
  REGION 1..8: note = Description of Artificial Sequence: Synthetic peptide
AELQAIQL

SEQ ID NO: 12091 - protein, 10 aa, synthetic construct
  REGION 1..10: note = Description of Artificial Sequence: Synthetic peptide
IEAQQHMLQL

SEQ ID NO: 12092 - protein, 9 aa, synthetic construct
  REGION 1..9: note = Description of Artificial Sequence: Synthetic peptide
WENDMVEQM

SEQ ID NO: 12093 - protein, 9 aa, synthetic construct
  REGION 1..9: note = Description of Artificial Sequence: Synthetic peptide
MEDEDREVL

SEQ ID NO: 12094 - protein, 10 aa, synthetic construct
  REGION 1..10: note = Description of Artificial Sequence: Synthetic peptide
AELQAIQLAL

SEQ ID NO: 12095 - protein, 10 aa, synthetic construct
  REGION 1..10: note = Description of Artificial Sequence: Synthetic peptide
QELKNSAISL

SEQ ID NO: 12096 - protein, 8 aa, synthetic construct
  REGION 1..8: note = Description of Artificial Sequence: Synthetic peptide
IEAQQHML

SEQ ID NO: 12097 - protein, 10 aa, synthetic construct
  REGION 1..10: note = Description of Artificial Sequence: Synthetic peptide
IEIKDTKEAL

SEQ ID NO: 12098 - protein, 9 aa, synthetic construct
  REGION 1..9: note = Description of Artificial Sequence: Synthetic peptide
TEAVQKIAL

SEQ ID NO: 12099 - protein, 11 aa, synthetic construct
  REGION 1..11: note = Description of Artificial Sequence: Synthetic peptide
SEIVNQIIEQL

SEQ ID NO: 12100 - protein, 9 aa, synthetic construct
  REGION 1..9: note = Description of Artificial Sequence: Synthetic peptide
SESEIVNQI

SEQ ID NO: 12101 - protein, 10 aa, synthetic construct
  REGION 1..10: note = Description of Artificial Sequence: Synthetic peptide
IEAQQHLLQL

SEQ ID NO: 12102 - protein, 9 aa, synthetic construct
  REGION 1..9: note = Description of Artificial Sequence: Synthetic peptide
SDFNLPPVV

SEQ ID NO: 12103 - protein, 11 aa, synthetic construct
  REGION 1..11: note = Description of Artificial Sequence: Synthetic peptide
SELVNQIIEQL

SEQ ID NO: 12104 - protein, 10 aa, synthetic construct
  REGION 1..10: note = Description of Artificial Sequence: Synthetic peptide
IEVKDTKEAL

SEQ ID NO: 12105 - protein, 8 aa, synthetic construct
  REGION 1..8: note = Description of Artificial Sequence: Synthetic peptide
TDIQTKEL

SEQ ID NO: 12106 - protein, 10 aa, synthetic construct
  REGION 1..10: note = Description of Artificial Sequence: Synthetic peptide
AEHLKTAVQM

SEQ ID NO: 12107 - protein, 8 aa, synthetic construct
  REGION 1..8: note = Description of Artificial Sequence: Synthetic peptide
IETVPVKL

SEQ ID NO: 12108 - protein, 8 aa, synthetic construct
  REGION 1..8: note = Description of Artificial Sequence: Synthetic peptide
IEAQQHLL

SEQ ID NO: 12109 - protein, 9 aa, synthetic construct
  REGION 1..9: note = Description of Artificial Sequence: Synthetic peptide
SEGATPQDL

SEQ ID NO: 12110 - protein, 9 aa, synthetic construct
  REGION 1..9: note = Description of Artificial Sequence: Synthetic peptide
SESELVNQI

SEQ ID NO: 12111 - protein, 9 aa, synthetic construct
  REGION 1..9: note = Description of Artificial Sequence: Synthetic peptide
LETEPIVGA

SEQ ID NO: 12112 - protein, 9 aa, synthetic construct
  REGION 1..9: note = Description of Artificial Sequence: Synthetic peptide
LETEPIIGA

SEQ ID NO: 12113 - protein, 10 aa, synthetic construct
  REGION 1..10: note = Description of Artificial Sequence: Synthetic peptide
VEIEPLGVAP

SEQ ID NO: 12114 - protein, 9 aa, synthetic construct
  REGION 1..9: note = Description of Artificial Sequence: Synthetic peptide
AELQAIHLA

SEQ ID NO: 12115 - protein, 11 aa, synthetic construct
  REGION 1..11: note = Description of Artificial Sequence: Synthetic peptide
AEWDRLHPTQA

SEQ ID NO: 12116 - protein, 10 aa, synthetic construct
  REGION 1..10: note = Description of Artificial Sequence: Synthetic peptide
SEVHIPLETA

SEQ ID NO: 12117 - protein, 9 aa, synthetic construct
  REGION 1..9: note = Description of Artificial Sequence: Synthetic peptide
AEWDRLHPA

SEQ ID NO: 12118 - protein, 8 aa, synthetic construct
  REGION 1..8: note = Description of Artificial Sequence: Synthetic peptide
SDFNIPAV

SEQ ID NO: 12119 - protein, 11 aa, synthetic construct
  REGION 1..11: note = Description of Artificial Sequence: Synthetic peptide
AEAMSQATNAA

SEQ ID NO: 12120 - protein, 9 aa, synthetic construct
  REGION 1..9: note = Description of Artificial Sequence: Synthetic peptide
VEIEPLGVA

SEQ ID NO: 12121 - protein, 10 aa, synthetic construct
  REGION 1..10: note = Description of Artificial Sequence: Synthetic peptide
SDFNIPAVVA

SEQ ID NO: 12122 - protein, 10 aa, synthetic construct
  REGION 1..10: note = Description of Artificial Sequence: Synthetic peptide
AEWTDRVIEA

SEQ ID NO: 12123 - protein, 11 aa, synthetic construct
  REGION 1..11: note = Description of Artificial Sequence: Synthetic peptide
KELTDAVQKVA

SEQ ID NO: 12124 - protein, 11 aa, synthetic construct
  REGION 1..11: note = Description of Artificial Sequence: Synthetic peptide
AEAMSQATNTA

SEQ ID NO: 12125 - protein, 9 aa, synthetic construct
  REGION 1..9: note = Description of Artificial Sequence: Synthetic peptide
VEVKDTKEA

SEQ ID NO: 12126 - protein, 10 aa, synthetic construct
  REGION 1..10: note = Description of Artificial Sequence: Synthetic peptide
SEVHIPLEEA

SEQ ID NO: 12127 - protein, 10 aa, synthetic construct
  REGION 1..10: note = Description of Artificial Sequence: Synthetic peptide
GEIIGDIRKA

SEQ ID NO: 12128 - protein, 8 aa, synthetic construct
  REGION 1..8: note = Description of Artificial Sequence: Synthetic peptide
RDFILIAA

SEQ ID NO: 12129 - protein, 9 aa, synthetic construct
  REGION 1..9: note = Description of Artificial Sequence: Synthetic peptide
LETEPIAGA

SEQ ID NO: 12130 - protein, 9 aa, synthetic construct
  REGION 1..9: note = Description of Artificial Sequence: Synthetic peptide
AELQAIQLA

SEQ ID NO: 12131 - protein, 9 aa, synthetic construct
  REGION 1..9: note = Description of Artificial Sequence: Synthetic peptide
IEIKDTKEA

SEQ ID NO: 12132 - protein, 8 aa, synthetic construct
  REGION 1..8: note = Description of Artificial Sequence: Synthetic peptide
SESAIRKA

SEQ ID NO: 12133 - protein, 10 aa, synthetic construct
  REGION 1..10: note = Description of Artificial Sequence: Synthetic peptide
SDFNLPPVVA

SEQ ID NO: 12134 - protein, 9 aa, synthetic construct
  REGION 1..9: note = Description of Artificial Sequence: Synthetic peptide
IEVKDTKEA

SEQ ID NO: 12135 - protein, 9 aa, synthetic construct
  REGION 1..9: note = Description of Artificial Sequence: Synthetic peptide
EEVGFPVRP

SEQ ID NO: 12136 - protein, 9 aa, synthetic construct
  REGION 1..9: note = Description of Artificial Sequence: Synthetic peptide
QEFGIPYNP

SEQ ID NO: 12137 - protein, 9 aa, synthetic construct
  REGION 1..9: note = Description of Artificial Sequence: Synthetic peptide
TEAVQKISL

SEQ ID NO: 12138 - protein, 8 aa, synthetic construct
  REGION 1..8: note = Description of Artificial Sequence: Synthetic peptide
TDRVIEAL

SEQ ID NO: 12139 - protein, 8 aa, synthetic construct
  REGION 1..8: note = Description of Artificial Sequence: Synthetic peptide
AELQAIHL

SEQ ID NO: 12140 - protein, 9 aa, synthetic construct
  REGION 1..9: note = Description of Artificial Sequence: Synthetic peptide
GEQDRNRSV

SEQ ID NO: 12141 - protein, 9 aa, synthetic construct
  REGION 1..9: note = Description of Artificial Sequence: Synthetic peptide
SERILSSCL

SEQ ID NO: 12142 - protein, 8 aa, synthetic construct
  REGION 1..8: note = Description of Artificial Sequence: Synthetic peptide
TDRIIEVL

SEQ ID NO: 12143 - protein, 9 aa, synthetic construct
  REGION 1..9: note = Description of Artificial Sequence: Synthetic peptide
QERNEQELL

SEQ ID NO: 12144 - protein, 9 aa, synthetic construct
  REGION 1..9: note = Description of Artificial Sequence: Synthetic peptide
SEEPVPLQL

SEQ ID NO: 12145 - protein, 9 aa, synthetic construct
  REGION 1..9: note = Description of Artificial Sequence: Synthetic peptide
MEDEDKEVL

SEQ ID NO: 12146 - protein, 9 aa, synthetic construct
  REGION 1..9: note = Description of Artificial Sequence: Synthetic peptide
SERILVACL

SEQ ID NO: 12147 - protein, 8 aa, synthetic construct
  REGION 1..8: note = Description of Artificial Sequence: Synthetic peptide
LEYVKAEL

SEQ ID NO: 12148 - protein, 10 aa, synthetic construct
  REGION 1..10: note = Description of Artificial Sequence: Synthetic peptide
GELYPPLASL

SEQ ID NO: 12149 - protein, 10 aa, synthetic construct
  REGION 1..10: note = Description of Artificial Sequence: Synthetic peptide
TETTNQKAEL

SEQ ID NO: 12150 - protein, 8 aa, synthetic construct
  REGION 1..8: note = Description of Artificial Sequence: Synthetic peptide
GQMVHQSL

SEQ ID NO: 12151 - protein, 8 aa, synthetic construct
  REGION 1..8: note = Description of Artificial Sequence: Synthetic peptide
DEWEKIQL

SEQ ID NO: 12152 - protein, 8 aa, synthetic construct
  REGION 1..8: note = Description of Artificial Sequence: Synthetic peptide
SDFNIPAV

SEQ ID NO: 12153 - protein, 8 aa, synthetic construct
  REGION 1..8: note = Description of Artificial Sequence: Synthetic peptide
SERILVAC

SEQ ID NO: 12154 - protein, 8 aa, synthetic construct
  REGION 1..8: note = Description of Artificial Sequence: Synthetic peptide
AELQAIYL

SEQ ID NO: 12155 - protein, 8 aa, synthetic construct
  REGION 1..8: note = Description of Artificial Sequence: Synthetic peptide
AELVITTY

SEQ ID NO: 12156 - protein, 9 aa, synthetic construct
  REGION 1..9: note = Description of Artificial Sequence: Synthetic peptide
SEGATPTDL

SEQ ID NO: 12157 - protein, 9 aa, synthetic construct
  REGION 1..9: note = Description of Artificial Sequence: Synthetic peptide
SEYIEAEVI

SEQ ID NO: 12158 - protein, 9 aa, synthetic construct
  REGION 1..9: note = Description of Artificial Sequence: Synthetic peptide
AEKGVSQNY

SEQ ID NO: 12159 - protein, 9 aa, synthetic construct
  REGION 1..9: note = Description of Artificial Sequence: Synthetic peptide
SESEIVNKI

SEQ ID NO: 12160 - protein, 8 aa, synthetic construct
  REGION 1..8: note = Description of Artificial Sequence: Synthetic peptide
TDIQTREL

SEQ ID NO: 12161 - protein, 8 aa, synthetic construct
  REGION 1..8: note = Description of Artificial Sequence: Synthetic peptide
TDRVIEVL

SEQ ID NO: 12162 - protein, 8 aa, synthetic construct
  REGION 1..8: note = Description of Artificial Sequence: Synthetic peptide
AELQAIQL

SEQ ID NO: 12163 - protein, 9 aa, synthetic construct
  REGION 1..9: note = Description of Artificial Sequence: Synthetic peptide
MEDEDREVL

SEQ ID NO: 12164 - protein, 10 aa, synthetic construct
  REGION 1..10: note = Description of Artificial Sequence: Synthetic peptide
QELKNSAISL

SEQ ID NO: 12165 - protein, 8 aa, synthetic construct
  REGION 1..8: note = Description of Artificial Sequence: Synthetic peptide
IEAQQHML

SEQ ID NO: 12166 - protein, 10 aa, synthetic construct
  REGION 1..10: note = Description of Artificial Sequence: Synthetic peptide
IEIKDTKEAL

SEQ ID NO: 12167 - protein, 9 aa, synthetic construct
  REGION 1..9: note = Description of Artificial Sequence: Synthetic peptide
SESAIRKAI

SEQ ID NO: 12168 - protein, 9 aa, synthetic construct
  REGION 1..9: note = Description of Artificial Sequence: Synthetic peptide
QEKNEQELL

SEQ ID NO: 12169 - protein, 9 aa, synthetic construct
  REGION 1..9: note = Description of Artificial Sequence: Synthetic peptide
TEAVQKIAL

SEQ ID NO: 12170 - protein, 9 aa, synthetic construct
  REGION 1..9: note = Description of Artificial Sequence: Synthetic peptide
KEKGGLEGL

SEQ ID NO: 12171 - protein, 8 aa, synthetic construct
  REGION 1..8: note = Description of Artificial Sequence: Synthetic peptide
TDIQTKEL

SEQ ID NO: 12172 - protein, 8 aa, synthetic construct
  REGION 1..8: note = Description of Artificial Sequence: Synthetic peptide
AEHLKTAV

SEQ ID NO: 12173 - protein, 8 aa, synthetic construct
  REGION 1..8: note = Description of Artificial Sequence: Synthetic peptide
IEAQQHLL

SEQ ID NO: 12174 - protein, 10 aa, synthetic construct
  REGION 1..10: note = Description of Artificial Sequence: Synthetic peptide
AEHLKTAVQM

SEQ ID NO: 12175 - protein, 8 aa, synthetic construct
  REGION 1..8: note = Description of Artificial Sequence: Synthetic peptide
TERQANFL

SEQ ID NO: 12176 - protein, 11 aa, synthetic construct
  REGION 1..11: note = Description of Artificial Sequence: Synthetic peptide
AEQASQDVKGW

SEQ ID NO: 12177 - protein, 9 aa, synthetic construct
  REGION 1..9: note = Description of Artificial Sequence: Synthetic peptide
AEKGVSQNY

SEQ ID NO: 12178 - protein, 9 aa, synthetic construct
  REGION 1..9: note = Description of Artificial Sequence: Synthetic peptide
AELVITTYW

SEQ ID NO: 12179 - protein, 10 aa, synthetic construct
  REGION 1..10: note = Description of Artificial Sequence: Synthetic peptide
EEVKLVITTY

SEQ ID NO: 12180 - protein, 9 aa, synthetic construct
  REGION 1..9: note = Description of Artificial Sequence: Synthetic peptide
EEIWGNMTW

SEQ ID NO: 12181 - protein, 10 aa, synthetic construct
  REGION 1..10: note = Description of Artificial Sequence: Synthetic peptide
EEAELVITTY

SEQ ID NO: 12182 - protein, 9 aa, synthetic construct
  REGION 1..9: note = Description of Artificial Sequence: Synthetic peptide
SESEIVNKI

SEQ ID NO: 12183 - protein, 10 aa, synthetic construct
  REGION 1..10: note = Description of Artificial Sequence: Synthetic peptide
EEAKLVVTTY

SEQ ID NO: 12184 - protein, 11 aa, synthetic construct
  REGION 1..11: note = Description of Artificial Sequence: Synthetic peptide
EEAELVITTYW

SEQ ID NO: 12185 - protein, 9 aa, synthetic construct
  REGION 1..9: note = Description of Artificial Sequence: Synthetic peptide
EEIWNNMTW

SEQ ID NO: 12186 - protein, 8 aa, synthetic construct
  REGION 1..8: note = Description of Artificial Sequence: Synthetic peptide
CEINGTQW

SEQ ID NO: 12187 - protein, 11 aa, synthetic construct
  REGION 1..11: note = Description of Artificial Sequence: Synthetic peptide
EESGAIQNCSF

SEQ ID NO: 12188 - protein, 11 aa, synthetic construct
  REGION 1..11: note = Description of Artificial Sequence: Synthetic peptide
AELQKQGQGQW

SEQ ID NO: 12189 - protein, 11 aa, synthetic construct
  REGION 1..11: note = Description of Artificial Sequence: Synthetic peptide
EEAKLVVTTYW

SEQ ID NO: 12190 - protein, 11 aa, synthetic construct
  REGION 1..11: note = Description of Artificial Sequence: Synthetic peptide
AEQATQEVKGW

SEQ ID NO: 12191 - protein, 9 aa, synthetic construct
  REGION 1..9: note = Description of Artificial Sequence: Synthetic peptide
QELLALDKW

SEQ ID NO: 12192 - protein, 11 aa, synthetic construct
  REGION 1..11: note = Description of Artificial Sequence: Synthetic peptide
NEQELLALDKW

SEQ ID NO: 12193 - protein, 10 aa, synthetic construct
  REGION 1..10: note = Description of Artificial Sequence: Synthetic peptide
NETPGVRYQY

SEQ ID NO: 12194 - protein, 11 aa, synthetic construct
  REGION 1..11: note = Description of Artificial Sequence: Synthetic peptide
AEQASQEVKNW

SEQ ID NO: 12195 - protein, 9 aa, synthetic construct
  REGION 1..9: note = Description of Artificial Sequence: Synthetic peptide
AENLWVTVY

SEQ ID NO: 12196 - protein, 11 aa, synthetic construct
  REGION 1..11: note = Description of Artificial Sequence: Synthetic peptide
AEIQKQGQGQW

SEQ ID NO: 12197 - protein, 9 aa, synthetic construct
  REGION 1..9: note = Description of Artificial Sequence: Synthetic peptide
SESAIRKAI

SEQ ID NO: 12198 - protein, 9 aa, synthetic construct
  REGION 1..9: note = Description of Artificial Sequence: Synthetic peptide
DEIWNNMTW

SEQ ID NO: 12199 - protein, 11 aa, synthetic construct
  REGION 1..11: note = Description of Artificial Sequence: Synthetic peptide
SEVNIVTDSQY

SEQ ID NO: 12200 - protein, 9 aa, synthetic construct
  REGION 1..9: note = Description of Artificial Sequence: Synthetic peptide
SESEIVNQI

SEQ ID NO: 12201 - protein, 10 aa, synthetic construct
  REGION 1..10: note = Description of Artificial Sequence: Synthetic peptide
NETPGIRYQY

SEQ ID NO: 12202 - protein, 9 aa, synthetic construct
  REGION 1..9: note = Description of Artificial Sequence: Synthetic peptide
AETGQETAY

SEQ ID NO: 12203 - protein, 11 aa, synthetic construct
  REGION 1..11: note = Description of Artificial Sequence: Synthetic peptide
AEQASQDVKGW

SEQ ID NO: 12204 - protein, 10 aa, synthetic construct
  REGION 1..10: note = Description of Artificial Sequence: Synthetic peptide
EEVKLVITTY

SEQ ID NO: 12205 - protein, 9 aa, synthetic construct
  REGION 1..9: note = Description of Artificial Sequence: Synthetic peptide
SESEIVNKI

SEQ ID NO: 12206 - protein, 10 aa, synthetic construct
  REGION 1..10: note = Description of Artificial Sequence: Synthetic peptide
EEAKLVVTTY

SEQ ID NO: 12207 - protein, 10 aa, synthetic construct
  REGION 1..10: note = Description of Artificial Sequence: Synthetic peptide
EEAELVITTY

SEQ ID NO: 12208 - protein, 9 aa, synthetic construct
  REGION 1..9: note = Description of Artificial Sequence: Synthetic peptide
AEKGVSQNY

SEQ ID NO: 12209 - protein, 9 aa, synthetic construct
  REGION 1..9: note = Description of Artificial Sequence: Synthetic peptide
EEIWGNMTW

SEQ ID NO: 12210 - protein, 9 aa, synthetic construct
  REGION 1..9: note = Description of Artificial Sequence: Synthetic peptide
AELVITTYW

SEQ ID NO: 12211 - protein, 11 aa, synthetic construct
  REGION 1..11: note = Description of Artificial Sequence: Synthetic peptide
EEAELVITTYW

SEQ ID NO: 12212 - protein, 11 aa, synthetic construct
  REGION 1..11: note = Description of Artificial Sequence: Synthetic peptide
AEIQKQGDGQW

SEQ ID NO: 12213 - protein, 11 aa, synthetic construct
  REGION 1..11: note = Description of Artificial Sequence: Synthetic peptide
AELQKQGQGQW

SEQ ID NO: 12214 - protein, 11 aa, synthetic construct
  REGION 1..11: note = Description of Artificial Sequence: Synthetic peptide
EEAKLVVTTYW

SEQ ID NO: 12215 - protein, 9 aa, synthetic construct
  REGION 1..9: note = Description of Artificial Sequence: Synthetic peptide
EEIWNNMTW

SEQ ID NO: 12216 - protein, 11 aa, synthetic construct
  REGION 1..11: note = Description of Artificial Sequence: Synthetic peptide
EEVKLVITTYW

SEQ ID NO: 12217 - protein, 10 aa, synthetic construct
  REGION 1..10: note = Description of Artificial Sequence: Synthetic peptide
MEWEKEVSNY

SEQ ID NO: 12218 - protein, 8 aa, synthetic construct
  REGION 1..8: note = Description of Artificial Sequence: Synthetic peptide
CEINGTQW

SEQ ID NO: 12219 - protein, 9 aa, synthetic construct
  REGION 1..9: note = Description of Artificial Sequence: Synthetic peptide
EEGVGSPQI

SEQ ID NO: 12220 - protein, 9 aa, synthetic construct
  REGION 1..9: note = Description of Artificial Sequence: Synthetic peptide
SEEPVPLQL

SEQ ID NO: 12221 - protein, 9 aa, synthetic construct
  REGION 1..9: note = Description of Artificial Sequence: Synthetic peptide
QELLKAVRY

SEQ ID NO: 12222 - protein, 10 aa, synthetic construct
  REGION 1..10: note = Description of Artificial Sequence: Synthetic peptide
MEWEKEISNY

SEQ ID NO: 12223 - protein, 8 aa, synthetic construct
  REGION 1..8: note = Description of Artificial Sequence: Synthetic peptide
AELVITTY

SEQ ID NO: 12224 - protein, 11 aa, synthetic construct
  REGION 1..11: note = Description of Artificial Sequence: Synthetic peptide
EESGAIQNCSF

SEQ ID NO: 12225 - protein, 10 aa, synthetic construct
  REGION 1..10: note = Description of Artificial Sequence: Synthetic peptide
TEPIIGAETF

SEQ ID NO: 12226 - protein, 9 aa, synthetic construct
  REGION 1..9: note = Description of Artificial Sequence: Synthetic peptide
TEAVQKISL

SEQ ID NO: 12227 - protein, 9 aa, synthetic construct
  REGION 1..9: note = Description of Artificial Sequence: Synthetic peptide
AEGEIVIRS

SEQ ID NO: 12228 - protein, 9 aa, synthetic construct
  REGION 1..9: note = Description of Artificial Sequence: Synthetic peptide
TELLKAVKY

SEQ ID NO: 12229 - protein, 11 aa, synthetic construct
  REGION 1..11: note = Description of Artificial Sequence: Synthetic peptide
MEDEDREVLRW

SEQ ID NO: 12230 - protein, 9 aa, synthetic construct
  REGION 1..9: note = Description of Artificial Sequence: Synthetic peptide
DEDREVLRW

SEQ ID NO: 12231 - protein, 9 aa, synthetic construct
  REGION 1..9: note = Description of Artificial Sequence: Synthetic peptide
DEDKEVLKW

SEQ ID NO: 12232 - protein, 10 aa, synthetic construct
  REGION 1..10: note = Description of Artificial Sequence: Synthetic peptide
AETGQDTAYF

SEQ ID NO: 12233 - protein, 11 aa, synthetic construct
  REGION 1..11: note = Description of Artificial Sequence: Synthetic peptide
AEQATQEVKGW

SEQ ID NO: 12234 - protein, 9 aa, synthetic construct
  REGION 1..9: note = Description of Artificial Sequence: Synthetic peptide
QELLALDKW

SEQ ID NO: 12235 - protein, 11 aa, synthetic construct
  REGION 1..11: note = Description of Artificial Sequence: Synthetic peptide
NEQELLALDKW

SEQ ID NO: 12236 - protein, 10 aa, synthetic construct
  REGION 1..10: note = Description of Artificial Sequence: Synthetic peptide
NETPGVRYQY

SEQ ID NO: 12237 - protein, 8 aa, synthetic construct
  REGION 1..8: note = Description of Artificial Sequence: Synthetic peptide
NETPGVRY

SEQ ID NO: 12238 - protein, 11 aa, synthetic construct
  REGION 1..11: note = Description of Artificial Sequence: Synthetic peptide
AEQASQEVKNW

SEQ ID NO: 12239 - protein, 9 aa, synthetic construct
  REGION 1..9: note = Description of Artificial Sequence: Synthetic peptide
QELLELDKW

SEQ ID NO: 12240 - protein, 9 aa, synthetic construct
  REGION 1..9: note = Description of Artificial Sequence: Synthetic peptide
DEDREVLKW

SEQ ID NO: 12241 - protein, 11 aa, synthetic construct
  REGION 1..11: note = Description of Artificial Sequence: Synthetic peptide
MEDEDREVLKW

SEQ ID NO: 12242 - protein, 9 aa, synthetic construct
  REGION 1..9: note = Description of Artificial Sequence: Synthetic peptide
YEKEVHNVW

SEQ ID NO: 12243 - protein, 9 aa, synthetic construct
  REGION 1..9: note = Description of Artificial Sequence: Synthetic peptide
AENLWVTVY

SEQ ID NO: 12244 - protein, 11 aa, synthetic construct
  REGION 1..11: note = Description of Artificial Sequence: Synthetic peptide
AEIQKQGQGQW

SEQ ID NO: 12245 - protein, 9 aa, synthetic construct
  REGION 1..9: note = Description of Artificial Sequence: Synthetic peptide
SESAIRKAI

SEQ ID NO: 12246 - protein, 9 aa, synthetic construct
  REGION 1..9: note = Description of Artificial Sequence: Synthetic peptide
DEIWNNMTW

SEQ ID NO: 12247 - protein, 11 aa, synthetic construct
  REGION 1..11: note = Description of Artificial Sequence: Synthetic peptide
SEVNIVTDSQY

SEQ ID NO: 12248 - protein, 9 aa, synthetic construct
  REGION 1..9: note = Description of Artificial Sequence: Synthetic peptide
SESEIVNQI

SEQ ID NO: 12249 - protein, 10 aa, synthetic construct
  REGION 1..10: note = Description of Artificial Sequence: Synthetic peptide
EEHEKYHNNW

SEQ ID NO: 12250 - protein, 10 aa, synthetic construct
  REGION 1..10: note = Description of Artificial Sequence: Synthetic peptide
NETPGIRYQY

SEQ ID NO: 12251 - protein, 9 aa, synthetic construct
  REGION 1..9: note = Description of Artificial Sequence: Synthetic peptide
SESELVNQI

SEQ ID NO: 12252 - protein, 9 aa, synthetic construct
  REGION 1..9: note = Description of Artificial Sequence: Synthetic peptide
AETGQETAY

SEQ ID NO: 12253 - protein, 10 aa, synthetic construct
  REGION 1..10: note = Description of Artificial Sequence: Synthetic peptide
AETGQETAYF

SEQ ID NO: 12254 - protein, 8 aa, synthetic construct
  REGION 1..8: note = Description of Artificial Sequence: Synthetic peptide
NETPGIRY

SEQ ID NO: 12255 - protein, 11 aa, synthetic construct
  REGION 1..11: note = Description of Artificial Sequence: Synthetic peptide
EESGAIQNCSF

SEQ ID NO: 12256 - protein, 11 aa, synthetic construct
  REGION 1..11: note = Description of Artificial Sequence: Synthetic peptide
AEQASQDVKGW

SEQ ID NO: 12257 - protein, 9 aa, synthetic construct
  REGION 1..9: note = Description of Artificial Sequence: Synthetic peptide
TEAVQKISL

SEQ ID NO: 12258 - protein, 9 aa, synthetic construct
  REGION 1..9: note = Description of Artificial Sequence: Synthetic peptide
SESEIVNKI

SEQ ID NO: 12259 - protein, 10 aa, synthetic construct
  REGION 1..10: note = Description of Artificial Sequence: Synthetic peptide
AEEGVGSSQI

SEQ ID NO: 12260 - protein, 11 aa, synthetic construct
  REGION 1..11: note = Description of Artificial Sequence: Synthetic peptide
EEPGAIQNCSF

SEQ ID NO: 12261 - protein, 10 aa, synthetic construct
  REGION 1..10: note = Description of Artificial Sequence: Synthetic peptide
GEIVIRSQNI

SEQ ID NO: 12262 - protein, 11 aa, synthetic construct
  REGION 1..11: note = Description of Artificial Sequence: Synthetic peptide
AEAMSQANTTI

SEQ ID NO: 12263 - protein, 10 aa, synthetic construct
  REGION 1..10: note = Description of Artificial Sequence: Synthetic peptide
TETTNQKAEL

SEQ ID NO: 12264 - protein, 9 aa, synthetic construct
  REGION 1..9: note = Description of Artificial Sequence: Synthetic peptide
NEGVGNPQI

SEQ ID NO: 12265 - protein, 10 aa, synthetic construct
  REGION 1..10: note = Description of Artificial Sequence: Synthetic peptide
AETGQDTAYF

SEQ ID NO: 12266 - protein, 9 aa, synthetic construct
  REGION 1..9: note = Description of Artificial Sequence: Synthetic peptide
EEGVGSPQI

SEQ ID NO: 12267 - protein, 10 aa, synthetic construct
  REGION 1..10: note = Description of Artificial Sequence: Synthetic peptide
KEINNYSNTI

SEQ ID NO: 12268 - protein, 11 aa, synthetic construct
  REGION 1..11: note = Description of Artificial Sequence: Synthetic peptide
AEIQKQGDGQW

SEQ ID NO: 12269 - protein, 10 aa, synthetic construct
  REGION 1..10: note = Description of Artificial Sequence: Synthetic peptide
TEPIIGAETF

SEQ ID NO: 12270 - protein, 10 aa, synthetic construct
  REGION 1..10: note = Description of Artificial Sequence: Synthetic peptide
TEPIVGAETF

SEQ ID NO: 12271 - protein, 11 aa, synthetic construct
  REGION 1..11: note = Description of Artificial Sequence: Synthetic peptide
AELQKQGQGQW

SEQ ID NO: 12272 - protein, 9 aa, synthetic construct
  REGION 1..9: note = Description of Artificial Sequence: Synthetic peptide
SEEPVPLQL

SEQ ID NO: 12273 - protein, 9 aa, synthetic construct
  REGION 1..9: note = Description of Artificial Sequence: Synthetic peptide
AEKGVSQNY

SEQ ID NO: 12274 - protein, 10 aa, synthetic construct
  REGION 1..10: note = Description of Artificial Sequence: Synthetic peptide
TEEGVGSPQI

SEQ ID NO: 12275 - protein, 10 aa, synthetic construct
  REGION 1..10: note = Description of Artificial Sequence: Synthetic peptide
TEPIAGADTF

SEQ ID NO: 12276 - protein, 8 aa, synthetic construct
  REGION 1..8: note = Description of Artificial Sequence: Synthetic peptide
AELQAIHL

SEQ ID NO: 12277 - protein, 11 aa, synthetic construct
  REGION 1..11: note = Description of Artificial Sequence: Synthetic peptide
SEIVNKIIEKL

SEQ ID NO: 12278 - protein, 11 aa, synthetic construct
  REGION 1..11: note = Description of Artificial Sequence: Synthetic peptide
EEDIIIRSQNI

SEQ ID NO: 12279 - protein, 10 aa, synthetic construct
  REGION 1..10: note = Description of Artificial Sequence: Synthetic peptide
GELYPPLASL

SEQ ID NO: 12280 - protein, 9 aa, synthetic construct
  REGION 1..9: note = Description of Artificial Sequence: Synthetic peptide
DELFNDTKF

SEQ ID NO: 12281 - protein, 11 aa, synthetic construct
  REGION 1..11: note = Description of Artificial Sequence: Synthetic peptide
AEGTDRIIEVL

SEQ ID NO: 12282 - protein, 9 aa, synthetic construct
  REGION 1..9: note = Description of Artificial Sequence: Synthetic peptide
SEGATPTDL

SEQ ID NO: 12283 - protein, 11 aa, synthetic construct
  REGION 1..11: note = Description of Artificial Sequence: Synthetic peptide
AEGTDRVIEAL

SEQ ID NO: 12284 - protein, 8 aa, synthetic construct
  REGION 1..8: note = Description of Artificial Sequence: Synthetic peptide
CEINGTQW

SEQ ID NO: 12285 - protein, 11 aa, synthetic construct
  REGION 1..11: note = Description of Artificial Sequence: Synthetic peptide
QELKNSAISLF

SEQ ID NO: 12286 - protein, 9 aa, synthetic construct
  REGION 1..9: note = Description of Artificial Sequence: Synthetic peptide
EELAALGKM

SEQ ID NO: 12287 - protein, 11 aa, synthetic construct
  REGION 1..11: note = Description of Artificial Sequence: Synthetic peptide
QEVALNVTENF

SEQ ID NO: 12288 - protein, 8 aa, synthetic construct
  REGION 1..8: note = Description of Artificial Sequence: Synthetic peptide
AELQAIYL

SEQ ID NO: 12289 - protein, 10 aa, synthetic construct
  REGION 1..10: note = Description of Artificial Sequence: Synthetic peptide
EEVKLVITTY

SEQ ID NO: 12290 - protein, 10 aa, synthetic construct
  REGION 1..10: note = Description of Artificial Sequence: Synthetic peptide
AELQAIHLAL

SEQ ID NO: 12291 - protein, 9 aa, synthetic construct
  REGION 1..9: note = Description of Artificial Sequence: Synthetic peptide
MEMEKEGKI

SEQ ID NO: 12292 - protein, 11 aa, synthetic construct
  REGION 1..11: note = Description of Artificial Sequence: Synthetic peptide
AEAMSQANSAI

SEQ ID NO: 12293 - protein, 10 aa, synthetic construct
  REGION 1..10: note = Description of Artificial Sequence: Synthetic peptide
KELTDAVQKV

SEQ ID NO: 12294 - protein, 9 aa, synthetic construct
  REGION 1..9: note = Description of Artificial Sequence: Synthetic peptide
EEGVGSSQI

SEQ ID NO: 12295 - protein, 10 aa, synthetic construct
  REGION 1..10: note = Description of Artificial Sequence: Synthetic peptide
IEQLIQKEKI

SEQ ID NO: 12296 - protein, 10 aa, synthetic construct
  REGION 1..10: note = Description of Artificial Sequence: Synthetic peptide
EEAKLVVTTY

SEQ ID NO: 12297 - protein, 8 aa, synthetic construct
  REGION 1..8: note = Description of Artificial Sequence: Synthetic peptide
NESNIETF

SEQ ID NO: 12298 - protein, 10 aa, synthetic construct
  REGION 1..10: note = Description of Artificial Sequence: Synthetic peptide
KEISNYSKTI

SEQ ID NO: 12299 - protein, 9 aa, synthetic construct
  REGION 1..9: note = Description of Artificial Sequence: Synthetic peptide
SEYIEAEVI

SEQ ID NO: 12300 - protein, 11 aa, synthetic construct
  REGION 1..11: note = Description of Artificial Sequence: Synthetic peptide
EEGQYPPLASL

SEQ ID NO: 12301 - protein, 11 aa, synthetic construct
  REGION 1..11: note = Description of Artificial Sequence: Synthetic peptide
AEQATQEVKGW

SEQ ID NO: 12302 - protein, 10 aa, synthetic construct
  REGION 1..10: note = Description of Artificial Sequence: Synthetic peptide
EELKSLYNTI

SEQ ID NO: 12303 - protein, 10 aa, synthetic construct
  REGION 1..10: note = Description of Artificial Sequence: Synthetic peptide
TEPIAGAETF

SEQ ID NO: 12304 - protein, 11 aa, synthetic construct
  REGION 1..11: note = Description of Artificial Sequence: Synthetic peptide
AEGVGAVSQDL

SEQ ID NO: 12305 - protein, 11 aa, synthetic construct
  REGION 1..11: note = Description of Artificial Sequence: Synthetic peptide
AEQASQEVKNW

SEQ ID NO: 12306 - protein, 11 aa, synthetic construct
  REGION 1..11: note = Description of Artificial Sequence: Synthetic peptide
AEGTDRVIEVL

SEQ ID NO: 12307 - protein, 8 aa, synthetic construct
  REGION 1..8: note = Description of Artificial Sequence: Synthetic peptide
AELQAIQL

SEQ ID NO: 12308 - protein, 10 aa, synthetic construct
  REGION 1..10: note = Description of Artificial Sequence: Synthetic peptide
AELQAIQLAL

SEQ ID NO: 12309 - protein, 9 aa, synthetic construct
  REGION 1..9: note = Description of Artificial Sequence: Synthetic peptide
WENDMVEQM

SEQ ID NO: 12310 - protein, 10 aa, synthetic construct
  REGION 1..10: note = Description of Artificial Sequence: Synthetic peptide
QELKNSAISL

SEQ ID NO: 12311 - protein, 11 aa, synthetic construct
  REGION 1..11: note = Description of Artificial Sequence: Synthetic peptide
QELKNSAISLL

SEQ ID NO: 12312 - protein, 11 aa, synthetic construct
  REGION 1..11: note = Description of Artificial Sequence: Synthetic peptide
AEIQKQGQGQW

SEQ ID NO: 12313 - protein, 10 aa, synthetic construct
  REGION 1..10: note = Description of Artificial Sequence: Synthetic peptide
EELRSLYNTI

SEQ ID NO: 12314 - protein, 10 aa, synthetic construct
  REGION 1..10: note = Description of Artificial Sequence: Synthetic peptide
IEIKDTKEAL

SEQ ID NO: 12315 - protein, 9 aa, synthetic construct
  REGION 1..9: note = Description of Artificial Sequence: Synthetic peptide
SESAIRKAI

SEQ ID NO: 12316 - protein, 9 aa, synthetic construct
  REGION 1..9: note = Description of Artificial Sequence: Synthetic peptide
QEKNEQELL

SEQ ID NO: 12317 - protein, 9 aa, synthetic construct
  REGION 1..9: note = Description of Artificial Sequence: Synthetic peptide
TEAVQKIAL

SEQ ID NO: 12318 - protein, 11 aa, synthetic construct
  REGION 1..11: note = Description of Artificial Sequence: Synthetic peptide
SEIVNQIIEQL

SEQ ID NO: 12319 - protein, 11 aa, synthetic construct
  REGION 1..11: note = Description of Artificial Sequence: Synthetic peptide
SEVNIVTDSQY

SEQ ID NO: 12320 - protein, 9 aa, synthetic construct
  REGION 1..9: note = Description of Artificial Sequence: Synthetic peptide
SESEIVNQI

SEQ ID NO: 12321 - protein, 10 aa, synthetic construct
  REGION 1..10: note = Description of Artificial Sequence: Synthetic peptide
SESEIVNQII

SEQ ID NO: 12322 - protein, 11 aa, synthetic construct
  REGION 1..11: note = Description of Artificial Sequence: Synthetic peptide
SELVNQIIEQL

SEQ ID NO: 12323 - protein, 11 aa, synthetic construct
  REGION 1..11: note = Description of Artificial Sequence: Synthetic peptide
AELELAENREI

SEQ ID NO: 12324 - protein, 10 aa, synthetic construct
  REGION 1..10: note = Description of Artificial Sequence: Synthetic peptide
AETGQETAYF

SEQ ID NO: 12325 - protein, 10 aa, synthetic construct
  REGION 1..10: note = Description of Artificial Sequence: Synthetic peptide
AEHLKTAVQM

SEQ ID NO: 12326 - protein, 9 aa, synthetic construct
  REGION 1..9: note = Description of Artificial Sequence: Synthetic peptide
SESELVNQI

SEQ ID NO: 12327 - protein, 9 aa, synthetic construct
  REGION 1..9: note = Description of Artificial Sequence: Synthetic peptide
SEGATPQDL

SEQ ID NO: 12328 - protein, 9 aa, synthetic construct
  REGION 1..9: note = Description of Artificial Sequence: Synthetic peptide
ATKGLGISY

SEQ ID NO: 12329 - protein, 9 aa, synthetic construct
  REGION 1..9: note = Description of Artificial Sequence: Synthetic peptide
TTKGLGISY

SEQ ID NO: 12330 - protein, 9 aa, synthetic construct
  REGION 1..9: note = Description of Artificial Sequence: Synthetic peptide
VAVHVASEY

SEQ ID NO: 12331 - protein, 9 aa, synthetic construct
  REGION 1..9: note = Description of Artificial Sequence: Synthetic peptide
IGNNNSSEY

SEQ ID NO: 12332 - protein, 9 aa, synthetic construct
  REGION 1..9: note = Description of Artificial Sequence: Synthetic peptide
FLKNVTENF

SEQ ID NO: 12333 - protein, 8 aa, synthetic construct
  REGION 1..8: note = Description of Artificial Sequence: Synthetic peptide
AVHVASEY

SEQ ID NO: 12334 - protein, 10 aa, synthetic construct
  REGION 1..10: note = Description of Artificial Sequence: Synthetic peptide
SIHLGPGQAF

SEQ ID NO: 12335 - protein, 9 aa, synthetic construct
  REGION 1..9: note = Description of Artificial Sequence: Synthetic peptide
RAVAIGAVF

SEQ ID NO: 12336 - protein, 10 aa, synthetic construct
  REGION 1..10: note = Description of Artificial Sequence: Synthetic peptide
SIRIGPGQSF

SEQ ID NO: 12337 - protein, 9 aa, synthetic construct
  REGION 1..9: note = Description of Artificial Sequence: Synthetic peptide
KAKPPLPSV

SEQ ID NO: 12338 - protein, 10 aa, synthetic construct
  REGION 1..10: note = Description of Artificial Sequence: Synthetic peptide
ILKEPVHGAY

SEQ ID NO: 12339 - protein, 10 aa, synthetic construct
  REGION 1..10: note = Description of Artificial Sequence: Synthetic peptide
ILKEPVHGVY

SEQ ID NO: 12340 - protein, 9 aa, synthetic construct
  REGION 1..9: note = Description of Artificial Sequence: Synthetic peptide
GQYPPLASL

SEQ ID NO: 12341 - protein, 8 aa, synthetic construct
  REGION 1..8: note = Description of Artificial Sequence: Synthetic peptide
GQMVHQSL

SEQ ID NO: 12342 - protein, 11 aa, synthetic construct
  REGION 1..11: note = Description of Artificial Sequence: Synthetic peptide
GSFISGDINNL

SEQ ID NO: 12343 - protein, 9 aa, synthetic construct
  REGION 1..9: note = Description of Artificial Sequence: Synthetic peptide
TKTQVQEKL

SEQ ID NO: 12344 - protein, 10 aa, synthetic construct
  REGION 1..10: note = Description of Artificial Sequence: Synthetic peptide
HQDPVPKQPL

SEQ ID NO: 12345 - protein, 11 aa, synthetic construct
  REGION 1..11: note = Description of Artificial Sequence: Synthetic peptide
SQISGESHAVL

SEQ ID NO: 12346 - protein, 8 aa, synthetic construct
  REGION 1..8: note = Description of Artificial Sequence: Synthetic peptide
GKQKVVSL

SEQ ID NO: 12347 - protein, 9 aa, synthetic construct
  REGION 1..9: note = Description of Artificial Sequence: Synthetic peptide
GLYPPLASL

SEQ ID NO: 12348 - protein, 11 aa, synthetic construct
  REGION 1..11: note = Description of Artificial Sequence: Synthetic peptide
SQISGESHTVL

SEQ ID NO: 12349 - protein, 9 aa, synthetic construct
  REGION 1..9: note = Description of Artificial Sequence: Synthetic peptide
KALGTGATL

SEQ ID NO: 12350 - protein, 8 aa, synthetic construct
  REGION 1..8: note = Description of Artificial Sequence: Synthetic peptide
AQYWSQEL

SEQ ID NO: 12351 - protein, 9 aa, synthetic construct
  REGION 1..9: note = Description of Artificial Sequence: Synthetic peptide
FISGDINNL

SEQ ID NO: 12352 - protein, 11 aa, synthetic construct
  REGION 1..11: note = Description of Artificial Sequence: Synthetic peptide
TQIDPDLADQL

SEQ ID NO: 12353 - protein, 9 aa, synthetic construct
  REGION 1..9: note = Description of Artificial Sequence: Synthetic peptide
KALGPGATL

SEQ ID NO: 12354 - protein, 8 aa, synthetic construct
  REGION 1..8: note = Description of Artificial Sequence: Synthetic peptide
HKAIGTVL

SEQ ID NO: 12355 - protein, 9 aa, synthetic construct
  REGION 1..9: note = Description of Artificial Sequence: Synthetic peptide
IKPVVSTQL

SEQ ID NO: 12356 - protein, 9 aa, synthetic construct
  REGION 1..9: note = Description of Artificial Sequence: Synthetic peptide
RAIEAQQHL

SEQ ID NO: 12357 - protein, 9 aa, synthetic construct
  REGION 1..9: note = Description of Artificial Sequence: Synthetic peptide
HQAISPRTL

SEQ ID NO: 12358 - protein, 8 aa, synthetic construct
  REGION 1..8: note = Description of Artificial Sequence: Synthetic peptide
HQAAMQML

SEQ ID NO: 12359 - protein, 8 aa, synthetic construct
  REGION 1..8: note = Description of Artificial Sequence: Synthetic peptide
KQLQARVL

SEQ ID NO: 12360 - protein, 9 aa, synthetic construct
  REGION 1..9: note = Description of Artificial Sequence: Synthetic peptide
SEYIEAEVI

SEQ ID NO: 12361 - protein, 9 aa, synthetic construct
  REGION 1..9: note = Description of Artificial Sequence: Synthetic peptide
SESEIVNKI

SEQ ID NO: 12362 - protein, 10 aa, synthetic construct
  REGION 1..10: note = Description of Artificial Sequence: Synthetic peptide
AEEGVGSSQI

SEQ ID NO: 12363 - protein, 10 aa, synthetic construct
  REGION 1..10: note = Description of Artificial Sequence: Synthetic peptide
KEINNYSNTI

SEQ ID NO: 12364 - protein, 10 aa, synthetic construct
  REGION 1..10: note = Description of Artificial Sequence: Synthetic peptide
GEIVIRSQNI

SEQ ID NO: 12365 - protein, 8 aa, synthetic construct
  REGION 1..8: note = Description of Artificial Sequence: Synthetic peptide
VEIEPLGV

SEQ ID NO: 12366 - protein, 10 aa, synthetic construct
  REGION 1..10: note = Description of Artificial Sequence: Synthetic peptide
KELTDAVQKV

SEQ ID NO: 12367 - protein, 11 aa, synthetic construct
  REGION 1..11: note = Description of Artificial Sequence: Synthetic peptide
AEAMSQANTTI

SEQ ID NO: 12368 - protein, 9 aa, synthetic construct
  REGION 1..9: note = Description of Artificial Sequence: Synthetic peptide
NEGVGNPQI

SEQ ID NO: 12369 - protein, 10 aa, synthetic construct
  REGION 1..10: note = Description of Artificial Sequence: Synthetic peptide
TEEGVGSPQI

SEQ ID NO: 12370 - protein, 9 aa, synthetic construct
  REGION 1..9: note = Description of Artificial Sequence: Synthetic peptide
EEGVGSPQI

SEQ ID NO: 12371 - protein, 9 aa, synthetic construct
  REGION 1..9: note = Description of Artificial Sequence: Synthetic peptide
MEMEKEGKI

SEQ ID NO: 12372 - protein, 9 aa, synthetic construct
  REGION 1..9: note = Description of Artificial Sequence: Synthetic peptide
KEISNYSNI

SEQ ID NO: 12373 - protein, 11 aa, synthetic construct
  REGION 1..11: note = Description of Artificial Sequence: Synthetic peptide
SEELRSLFNTV

SEQ ID NO: 12374 - protein, 8 aa, synthetic construct
  REGION 1..8: note = Description of Artificial Sequence: Synthetic peptide
SEYIEAEV

SEQ ID NO: 12375 - protein, 8 aa, synthetic construct
  REGION 1..8: note = Description of Artificial Sequence: Synthetic peptide
YEKEAHNV

SEQ ID NO: 12376 - protein, 8 aa, synthetic construct
  REGION 1..8: note = Description of Artificial Sequence: Synthetic peptide
YEREVHNV

SEQ ID NO: 12377 - protein, 10 aa, synthetic construct
  REGION 1..10: note = Description of Artificial Sequence: Synthetic peptide
KEISNYSNII

SEQ ID NO: 12378 - protein, 9 aa, synthetic construct
  REGION 1..9: note = Description of Artificial Sequence: Synthetic peptide
AEGRGTGTV

SEQ ID NO: 12379 - protein, 9 aa, synthetic construct
  REGION 1..9: note = Description of Artificial Sequence: Synthetic peptide
TEAVQKISL

SEQ ID NO: 12380 - protein, 8 aa, synthetic construct
  REGION 1..8: note = Description of Artificial Sequence: Synthetic peptide
YEREAHNV

SEQ ID NO: 12381 - protein, 10 aa, synthetic construct
  REGION 1..10: note = Description of Artificial Sequence: Synthetic peptide
KELQKQVTKI

SEQ ID NO: 12382 - protein, 9 aa, synthetic construct
  REGION 1..9: note = Description of Artificial Sequence: Synthetic peptide
LEMEKEGKI

SEQ ID NO: 12383 - protein, 9 aa, synthetic construct
  REGION 1..9: note = Description of Artificial Sequence: Synthetic peptide
MENRWQVTI

SEQ ID NO: 12384 - protein, 9 aa, synthetic construct
  REGION 1..9: note = Description of Artificial Sequence: Synthetic peptide
VEQMHTDII

SEQ ID NO: 12385 - protein, 10 aa, synthetic construct
  REGION 1..10: note = Description of Artificial Sequence: Synthetic peptide
GEIIGDIRKA

SEQ ID NO: 12386 - protein, 10 aa, synthetic construct
  REGION 1..10: note = Description of Artificial Sequence: Synthetic peptide
EELRSLFNTV

SEQ ID NO: 12387 - protein, 8 aa, synthetic construct
  REGION 1..8: note = Description of Artificial Sequence: Synthetic peptide
YEKEVHNV

SEQ ID NO: 12388 - protein, 8 aa, synthetic construct
  REGION 1..8: note = Description of Artificial Sequence: Synthetic peptide
AENLWVTV

SEQ ID NO: 12389 - protein, 9 aa, synthetic construct
  REGION 1..9: note = Description of Artificial Sequence: Synthetic peptide
SESAIRKAI

SEQ ID NO: 12390 - protein, 9 aa, synthetic construct
  REGION 1..9: note = Description of Artificial Sequence: Synthetic peptide
TEAVQKIAL

SEQ ID NO: 12391 - protein, 9 aa, synthetic construct
  REGION 1..9: note = Description of Artificial Sequence: Synthetic peptide
SESEIVNQI

SEQ ID NO: 12392 - protein, 8 aa, synthetic construct
  REGION 1..8: note = Description of Artificial Sequence: Synthetic peptide
SEIVNQII

SEQ ID NO: 12393 - protein, 10 aa, synthetic construct
  REGION 1..10: note = Description of Artificial Sequence: Synthetic peptide
EELKSLFNTV

SEQ ID NO: 12394 - protein, 11 aa, synthetic construct
  REGION 1..11: note = Description of Artificial Sequence: Synthetic peptide
AELELAENREI

SEQ ID NO: 12395 - protein, 9 aa, synthetic construct
  REGION 1..9: note = Description of Artificial Sequence: Synthetic peptide
SESELVNQI

SEQ ID NO: 12396 - protein, 9 aa, synthetic construct
  REGION 1..9: note = Description of Artificial Sequence: Synthetic peptide
VEIEPLGVA

SEQ ID NO: 12397 - protein, 9 aa, synthetic construct
  REGION 1..9: note = Description of Artificial Sequence: Synthetic peptide
LETEPIVGA

SEQ ID NO: 12398 - protein, 9 aa, synthetic construct
  REGION 1..9: note = Description of Artificial Sequence: Synthetic peptide
LETEPIIGA

SEQ ID NO: 12399 - protein, 9 aa, synthetic construct
  REGION 1..9: note = Description of Artificial Sequence: Synthetic peptide
AEWDRLHPA

SEQ ID NO: 12400 - protein, 9 aa, synthetic construct
  REGION 1..9: note = Description of Artificial Sequence: Synthetic peptide
FISGDINNL

SEQ ID NO: 12401 - protein, 9 aa, synthetic construct
  REGION 1..9: note = Description of Artificial Sequence: Synthetic peptide
AIIGDIRKA

SEQ ID NO: 12402 - protein, 11 aa, synthetic construct
  REGION 1..11: note = Description of Artificial Sequence: Synthetic peptide
AEAMSQATNAA

SEQ ID NO: 12403 - protein, 9 aa, synthetic construct
  REGION 1..9: note = Description of Artificial Sequence: Synthetic peptide
VEVKDTKEA

SEQ ID NO: 12404 - protein, 10 aa, synthetic construct
  REGION 1..10: note = Description of Artificial Sequence: Synthetic peptide
AEWTDRVIEA

SEQ ID NO: 12405 - protein, 10 aa, synthetic construct
  REGION 1..10: note = Description of Artificial Sequence: Synthetic peptide
VEIEPLGVAP

SEQ ID NO: 12406 - protein, 9 aa, synthetic construct
  REGION 1..9: note = Description of Artificial Sequence: Synthetic peptide
FIPGDINNL

SEQ ID NO: 12407 - protein, 11 aa, synthetic construct
  REGION 1..11: note = Description of Artificial Sequence: Synthetic peptide
AEAMSQATNTA

SEQ ID NO: 12408 - protein, 10 aa, synthetic construct
  REGION 1..10: note = Description of Artificial Sequence: Synthetic peptide
SEVHIPLETA

SEQ ID NO: 12409 - protein, 9 aa, synthetic construct
  REGION 1..9: note = Description of Artificial Sequence: Synthetic peptide
AVFLGFLSA

SEQ ID NO: 12410 - protein, 9 aa, synthetic construct
  REGION 1..9: note = Description of Artificial Sequence: Synthetic peptide
GEMGSFISG

SEQ ID NO: 12411 - protein, 9 aa, synthetic construct
  REGION 1..9: note = Description of Artificial Sequence: Synthetic peptide
EQVDRLVSA

SEQ ID NO: 12412 - protein, 10 aa, synthetic construct
  REGION 1..10: note = Description of Artificial Sequence: Synthetic peptide
QEVGRAMYAA

SEQ ID NO: 12413 - protein, 10 aa, synthetic construct
  REGION 1..10: note = Description of Artificial Sequence: Synthetic peptide
AEAMSQANSA

SEQ ID NO: 12414 - protein, 9 aa, synthetic construct
  REGION 1..9: note = Description of Artificial Sequence: Synthetic peptide
RVIEALQRA

SEQ ID NO: 12415 - protein, 9 aa, synthetic construct
  REGION 1..9: note = Description of Artificial Sequence: Synthetic peptide
RVIEVLQRA

SEQ ID NO: 12416 - protein, 10 aa, synthetic construct
  REGION 1..10: note = Description of Artificial Sequence: Synthetic peptide
SEVHIPLEEA

SEQ ID NO: 12417 - protein, 9 aa, synthetic construct
  REGION 1..9: note = Description of Artificial Sequence: Synthetic peptide
AELQAIHLA

SEQ ID NO: 12418 - protein, 10 aa, synthetic construct
  REGION 1..10: note = Description of Artificial Sequence: Synthetic peptide
AVFLGFLSAA

SEQ ID NO: 12419 - protein, 9 aa, synthetic construct
  REGION 1..9: note = Description of Artificial Sequence: Synthetic peptide
VVAEGTDRV

SEQ ID NO: 12420 - protein, 8 aa, synthetic construct
  REGION 1..8: note = Description of Artificial Sequence: Synthetic peptide
SERILVAC

SEQ ID NO: 12421 - protein, 10 aa, synthetic construct
  REGION 1..10: note = Description of Artificial Sequence: Synthetic peptide
AEGTDRVIEA

SEQ ID NO: 12422 - protein, 9 aa, synthetic construct
  REGION 1..9: note = Description of Artificial Sequence: Synthetic peptide
FIPGDVNNL

SEQ ID NO: 12423 - protein, 9 aa, synthetic construct
  REGION 1..9: note = Description of Artificial Sequence: Synthetic peptide
VVAEGTDRI

SEQ ID NO: 12424 - protein, 10 aa, synthetic construct
  REGION 1..10: note = Description of Artificial Sequence: Synthetic peptide
GEIIGDIRKA

SEQ ID NO: 12425 - protein, 11 aa, synthetic construct
  REGION 1..11: note = Description of Artificial Sequence: Synthetic peptide
TQIDPDLADQL

SEQ ID NO: 12426 - protein, 9 aa, synthetic construct
  REGION 1..9: note = Description of Artificial Sequence: Synthetic peptide
LETEPIAGA

SEQ ID NO: 12427 - protein, 9 aa, synthetic construct
  REGION 1..9: note = Description of Artificial Sequence: Synthetic peptide
AVAEWTDRV

SEQ ID NO: 12428 - protein, 9 aa, synthetic construct
  REGION 1..9: note = Description of Artificial Sequence: Synthetic peptide
QEVGRAMYA

SEQ ID NO: 12429 - protein, 9 aa, synthetic construct
  REGION 1..9: note = Description of Artificial Sequence: Synthetic peptide
AELQAIQLA

SEQ ID NO: 12430 - protein, 10 aa, synthetic construct
  REGION 1..10: note = Description of Artificial Sequence: Synthetic peptide
AEAMSQATNA

SEQ ID NO: 12431 - protein, 11 aa, synthetic construct
  REGION 1..11: note = Description of Artificial Sequence: Synthetic peptide
TQIDPGLADQL

SEQ ID NO: 12432 - protein, 9 aa, synthetic construct
  REGION 1..9: note = Description of Artificial Sequence: Synthetic peptide
IEIKDTKEA

SEQ ID NO: 12433 - protein, 9 aa, synthetic construct
  REGION 1..9: note = Description of Artificial Sequence: Synthetic peptide
ALFLGFLGA

SEQ ID NO: 12434 - protein, 9 aa, synthetic construct
  REGION 1..9: note = Description of Artificial Sequence: Synthetic peptide
ASITLTVQA

SEQ ID NO: 12435 - protein, 9 aa, synthetic construct
  REGION 1..9: note = Description of Artificial Sequence: Synthetic peptide
IEVKDTKEA

SEQ ID NO: 12436 - protein, 9 aa, synthetic construct
  REGION 1..9: note = Description of Artificial Sequence: Synthetic peptide
ATLEEMMTA

SEQ ID NO: 12437 - protein, 9 aa, synthetic construct
  REGION 1..9: note = Description of Artificial Sequence: Synthetic peptide
AETFYVDGA

SEQ ID NO: 12438 - protein, 9 aa, synthetic construct
  REGION 1..9: note = Description of Artificial Sequence: Synthetic peptide
EEVGFPVRP

SEQ ID NO: 12439 - protein, 9 aa, synthetic construct
  REGION 1..9: note = Description of Artificial Sequence: Synthetic peptide
FPVSPIETV

SEQ ID NO: 12440 - protein, 9 aa, synthetic construct
  REGION 1..9: note = Description of Artificial Sequence: Synthetic peptide
VPSLSFPQI

SEQ ID NO: 12441 - protein, 8 aa, synthetic construct
  REGION 1..8: note = Description of Artificial Sequence: Synthetic peptide
TAFTIPSL

SEQ ID NO: 12442 - protein, 9 aa, synthetic construct
  REGION 1..9: note = Description of Artificial Sequence: Synthetic peptide
IPAVVAKEI

SEQ ID NO: 12443 - protein, 8 aa, synthetic construct
  REGION 1..8: note = Description of Artificial Sequence: Synthetic peptide
SAPIAGRI

SEQ ID NO: 12444 - protein, 9 aa, synthetic construct
  REGION 1..9: note = Description of Artificial Sequence: Synthetic peptide
YAAPIAGNI

SEQ ID NO: 12445 - protein, 9 aa, synthetic construct
  REGION 1..9: note = Description of Artificial Sequence: Synthetic peptide
DSSLALRHI

SEQ ID NO: 12446 - protein, 9 aa, synthetic construct
  REGION 1..9: note = Description of Artificial Sequence: Synthetic peptide
SPLSFQTHI

SEQ ID NO: 12447 - protein, 8 aa, synthetic construct
  REGION 1..8: note = Description of Artificial Sequence: Synthetic peptide
IAQIQPSI

SEQ ID NO: 12448 - protein, 10 aa, synthetic construct
  REGION 1..10: note = Description of Artificial Sequence: Synthetic peptide
IPLETAELVI

SEQ ID NO: 12449 - protein, 9 aa, synthetic construct
  REGION 1..9: note = Description of Artificial Sequence: Synthetic peptide
DAKSYEKEV

SEQ ID NO: 12450 - protein, 9 aa, synthetic construct
  REGION 1..9: note = Description of Artificial Sequence: Synthetic peptide
DAKGYEREV

SEQ ID NO: 12451 - protein, 10 aa, synthetic construct
  REGION 1..10: note = Description of Artificial Sequence: Synthetic peptide
IPLEEAKLVV

SEQ ID NO: 12452 - protein, 9 aa, synthetic construct
  REGION 1..9: note = Description of Artificial Sequence: Synthetic peptide
YANPIAGNI

SEQ ID NO: 12453 - protein, 9 aa, synthetic construct
  REGION 1..9: note = Description of Artificial Sequence: Synthetic peptide
SPLSLQTLI

SEQ ID NO: 12454 - protein, 9 aa, synthetic construct
  REGION 1..9: note = Description of Artificial Sequence: Synthetic peptide
VPNNGTITL

SEQ ID NO: 12455 - protein, 9 aa, synthetic construct
  REGION 1..9: note = Description of Artificial Sequence: Synthetic peptide
SPASGELRV

SEQ ID NO: 12456 - protein, 8 aa, synthetic construct
  REGION 1..8: note = Description of Artificial Sequence: Synthetic peptide
VPVEPEEV

SEQ ID NO: 12457 - protein, 8 aa, synthetic construct
  REGION 1..8: note = Description of Artificial Sequence: Synthetic peptide
TAFTIPSV

SEQ ID NO: 12458 - protein, 8 aa, synthetic construct
  REGION 1..8: note = Description of Artificial Sequence: Synthetic peptide
VAFIVALI

SEQ ID NO: 12459 - protein, 8 aa, synthetic construct
  REGION 1..8: note = Description of Artificial Sequence: Synthetic peptide
DSWTVNDI

SEQ ID NO: 12460 - protein, 8 aa, synthetic construct
  REGION 1..8: note = Description of Artificial Sequence: Synthetic peptide
NPYNTPVF

SEQ ID NO: 12461 - protein, 8 aa, synthetic construct
  REGION 1..8: note = Description of Artificial Sequence: Synthetic peptide
TAYFILKL

SEQ ID NO: 12462 - protein, 9 aa, synthetic construct
  REGION 1..9: note = Description of Artificial Sequence: Synthetic peptide
LPPIVAKEI

SEQ ID NO: 12463 - protein, 8 aa, synthetic construct
  REGION 1..8: note = Description of Artificial Sequence: Synthetic peptide
SPVSILDI

SEQ ID NO: 12464 - protein, 9 aa, synthetic construct
  REGION 1..9: note = Description of Artificial Sequence: Synthetic peptide
LPPVVAKEI

SEQ ID NO: 12465 - protein, 9 aa, synthetic construct
  REGION 1..9: note = Description of Artificial Sequence: Synthetic peptide
FPISPIETV

SEQ ID NO: 12466 - protein, 10 aa, synthetic construct
  REGION 1..10: note = Description of Artificial Sequence: Synthetic peptide
IPYNPQSQGV

SEQ ID NO: 12467 - protein, 11 aa, synthetic construct
  REGION 1..11: note = Description of Artificial Sequence: Synthetic peptide
IPYNPQSQGVV

SEQ ID NO: 12468 - protein, 9 aa, synthetic construct
  REGION 1..9: note = Description of Artificial Sequence: Synthetic peptide
FPVSPIETV

SEQ ID NO: 12469 - protein, 9 aa, synthetic construct
  REGION 1..9: note = Description of Artificial Sequence: Synthetic peptide
LPKQPLSQA

SEQ ID NO: 12470 - protein, 9 aa, synthetic construct
  REGION 1..9: note = Description of Artificial Sequence: Synthetic peptide
VPKQPISQA

SEQ ID NO: 12471 - protein, 11 aa, synthetic construct
  REGION 1..11: note = Description of Artificial Sequence: Synthetic peptide
IPAVVAKEIVA

SEQ ID NO: 12472 - protein, 9 aa, synthetic construct
  REGION 1..9: note = Description of Artificial Sequence: Synthetic peptide
NPIAGNITC

SEQ ID NO: 12473 - protein, 10 aa, synthetic construct
  REGION 1..10: note = Description of Artificial Sequence: Synthetic peptide
YPSPDGTRQA

SEQ ID NO: 12474 - protein, 9 aa, synthetic construct
  REGION 1..9: note = Description of Artificial Sequence: Synthetic peptide
FPVRPQVPV

SEQ ID NO: 12475 - protein, 9 aa, synthetic construct
  REGION 1..9: note = Description of Artificial Sequence: Synthetic peptide
SPIAGNITC

SEQ ID NO: 12476 - protein, 9 aa, synthetic construct
  REGION 1..9: note = Description of Artificial Sequence: Synthetic peptide
APIAGNITC

SEQ ID NO: 12477 - protein, 9 aa, synthetic construct
  REGION 1..9: note = Description of Artificial Sequence: Synthetic peptide
AVFLGFLSA

SEQ ID NO: 12478 - protein, 9 aa, synthetic construct
  REGION 1..9: note = Description of Artificial Sequence: Synthetic peptide
EAMSQANSA

SEQ ID NO: 12479 - protein, 9 aa, synthetic construct
  REGION 1..9: note = Description of Artificial Sequence: Synthetic peptide
FPNNTAIKF

SEQ ID NO: 12480 - protein, 9 aa, synthetic construct
  REGION 1..9: note = Description of Artificial Sequence: Synthetic peptide
HPVHAGPAP

SEQ ID NO: 12481 - protein, 9 aa, synthetic construct
  REGION 1..9: note = Description of Artificial Sequence: Synthetic peptide
MASDFNIPA

SEQ ID NO: 12482 - protein, 11 aa, synthetic construct
  REGION 1..11: note = Description of Artificial Sequence: Synthetic peptide
NPIPEQPLSQA

SEQ ID NO: 12483 - protein, 9 aa, synthetic construct
  REGION 1..9: note = Description of Artificial Sequence: Synthetic peptide
HVASGYLEA

SEQ ID NO: 12484 - protein, 9 aa, synthetic construct
  REGION 1..9: note = Description of Artificial Sequence: Synthetic peptide
MRRPPPAAA

SEQ ID NO: 12485 - protein, 11 aa, synthetic construct
  REGION 1..11: note = Description of Artificial Sequence: Synthetic peptide
VPTDPNPQEVA

SEQ ID NO: 12486 - protein, 9 aa, synthetic construct
  REGION 1..9: note = Description of Artificial Sequence: Synthetic peptide
HVASEYIEA

SEQ ID NO: 12487 - protein, 9 aa, synthetic construct
  REGION 1..9: note = Description of Artificial Sequence: Synthetic peptide
FPRPWLHSL

SEQ ID NO: 12488 - protein, 8 aa, synthetic construct
  REGION 1..8: note = Description of Artificial Sequence: Synthetic peptide
FPNATIKF

SEQ ID NO: 12489 - protein, 9 aa, synthetic construct
  REGION 1..9: note = Description of Artificial Sequence: Synthetic peptide
EVHIPLETA

SEQ ID NO: 12490 - protein, 10 aa, synthetic construct
  REGION 1..10: note = Description of Artificial Sequence: Synthetic peptide
IPLEEAKLVV

SEQ ID NO: 12491 - protein, 8 aa, synthetic construct
  REGION 1..8: note = Description of Artificial Sequence: Synthetic peptide
TAFTIPSV

SEQ ID NO: 12492 - protein, 10 aa, synthetic construct
  REGION 1..10: note = Description of Artificial Sequence: Synthetic peptide
YPKPEGTRQA

SEQ ID NO: 12493 - protein, 9 aa, synthetic construct
  REGION 1..9: note = Description of Artificial Sequence: Synthetic peptide
DPIPIHYCA

SEQ ID NO: 12494 - protein, 9 aa, synthetic construct
  REGION 1..9: note = Description of Artificial Sequence: Synthetic peptide
EAMSQATNA

SEQ ID NO: 12495 - protein, 9 aa, synthetic construct
  REGION 1..9: note = Description of Artificial Sequence: Synthetic peptide
HPVHAGPIP

SEQ ID NO: 12496 - protein, 10 aa, synthetic construct
  REGION 1..10: note = Description of Artificial Sequence: Synthetic peptide
HPVHAGPIPP

SEQ ID NO: 12497 - protein, 10 aa, synthetic construct
  REGION 1..10: note = Description of Artificial Sequence: Synthetic peptide
EPLGVAPTKA

SEQ ID NO: 12498 - protein, 8 aa, synthetic construct
  REGION 1..8: note = Description of Artificial Sequence: Synthetic peptide
FPSEQTRA

SEQ ID NO: 12499 - protein, 9 aa, synthetic construct
  REGION 1..9: note = Description of Artificial Sequence: Synthetic peptide
EATTTLFCA

SEQ ID NO: 12500 - protein, 9 aa, synthetic construct
  REGION 1..9: note = Description of Artificial Sequence: Synthetic peptide
EANTTLFCA

SEQ ID NO: 12501 - protein, 9 aa, synthetic construct
  REGION 1..9: note = Description of Artificial Sequence: Synthetic peptide
NPYNTPVFA

SEQ ID NO: 12502 - protein, 9 aa, synthetic construct
  REGION 1..9: note = Description of Artificial Sequence: Synthetic peptide
NPYNTPIFA

SEQ ID NO: 12503 - protein, 11 aa, synthetic construct
  REGION 1..11: note = Description of Artificial Sequence: Synthetic peptide
LPPVVAKEIVA

SEQ ID NO: 12504 - protein, 11 aa, synthetic construct
  REGION 1..11: note = Description of Artificial Sequence: Synthetic peptide
MLNTVGGHQAA

SEQ ID NO: 12505 - protein, 9 aa, synthetic construct
  REGION 1..9: note = Description of Artificial Sequence: Synthetic peptide
FPISPIETV

SEQ ID NO: 12506 - protein, 9 aa, synthetic construct
  REGION 1..9: note = Description of Artificial Sequence: Synthetic peptide
HVASGYIEA

SEQ ID NO: 12507 - protein, 11 aa, synthetic construct
  REGION 1..11: note = Description of Artificial Sequence: Synthetic peptide
FPISPIETVPV

SEQ ID NO: 12508 - protein, 9 aa, synthetic construct
  REGION 1..9: note = Description of Artificial Sequence: Synthetic peptide
VPKQPISQA

SEQ ID NO: 12509 - protein, 9 aa, synthetic construct
  REGION 1..9: note = Description of Artificial Sequence: Synthetic peptide
LPKQPLSQA

SEQ ID NO: 12510 - protein, 9 aa, synthetic construct
  REGION 1..9: note = Description of Artificial Sequence: Synthetic peptide
APIAGNITC

SEQ ID NO: 12511 - protein, 9 aa, synthetic construct
  REGION 1..9: note = Description of Artificial Sequence: Synthetic peptide
VPKQPLSQP

SEQ ID NO: 12512 - protein, 10 aa, synthetic construct
  REGION 1..10: note = Description of Artificial Sequence: Synthetic peptide
YPSPDGTRQA

SEQ ID NO: 12513 - protein, 9 aa, synthetic construct
  REGION 1..9: note = Description of Artificial Sequence: Synthetic peptide
APIAGRINC

SEQ ID NO: 12514 - protein, 9 aa, synthetic construct
  REGION 1..9: note = Description of Artificial Sequence: Synthetic peptide
FPVSPIETV

SEQ ID NO: 12515 - protein, 9 aa, synthetic construct
  REGION 1..9: note = Description of Artificial Sequence: Synthetic peptide
SPIAGNITC

SEQ ID NO: 12516 - protein, 9 aa, synthetic construct
  REGION 1..9: note = Description of Artificial Sequence: Synthetic peptide
NPIAGNITC

SEQ ID NO: 12517 - protein, 10 aa, synthetic construct
  REGION 1..10: note = Description of Artificial Sequence: Synthetic peptide
YPKPEGTRQA

SEQ ID NO: 12518 - protein, 9 aa, synthetic construct
  REGION 1..9: note = Description of Artificial Sequence: Synthetic peptide
KAKPPLPSV

SEQ ID NO: 12519 - protein, 9 aa, synthetic construct
  REGION 1..9: note = Description of Artificial Sequence: Synthetic peptide
RPEPTAPPA

SEQ ID NO: 12520 - protein, 9 aa, synthetic construct
  REGION 1..9: note = Description of Artificial Sequence: Synthetic peptide
FPISPIETV

SEQ ID NO: 12521 - protein, 9 aa, synthetic construct
  REGION 1..9: note = Description of Artificial Sequence: Synthetic peptide
VPKQPISQA

SEQ ID NO: 12522 - protein, 9 aa, synthetic construct
  REGION 1..9: note = Description of Artificial Sequence: Synthetic peptide
APIAGNITC

SEQ ID NO: 12523 - protein, 9 aa, synthetic construct
  REGION 1..9: note = Description of Artificial Sequence: Synthetic peptide
SPIAGNITC

SEQ ID NO: 12524 - protein, 9 aa, synthetic construct
  REGION 1..9: note = Description of Artificial Sequence: Synthetic peptide
LPKQPLSQA

SEQ ID NO: 12525 - protein, 9 aa, synthetic construct
  REGION 1..9: note = Description of Artificial Sequence: Synthetic peptide
FPVSPIETV

SEQ ID NO: 12526 - protein, 11 aa, synthetic construct
  REGION 1..11: note = Description of Artificial Sequence: Synthetic peptide
IPAVVAKEIVA

SEQ ID NO: 12527 - protein, 9 aa, synthetic construct
  REGION 1..9: note = Description of Artificial Sequence: Synthetic peptide
NPIAGNITC

SEQ ID NO: 12528 - protein, 10 aa, synthetic construct
  REGION 1..10: note = Description of Artificial Sequence: Synthetic peptide
YPSPDGTRQA

SEQ ID NO: 12529 - protein, 11 aa, synthetic construct
  REGION 1..11: note = Description of Artificial Sequence: Synthetic peptide
NPIPEQPLSQA

SEQ ID NO: 12530 - protein, 9 aa, synthetic construct
  REGION 1..9: note = Description of Artificial Sequence: Synthetic peptide
APIAGRINC

SEQ ID NO: 12531 - protein, 9 aa, synthetic construct
  REGION 1..9: note = Description of Artificial Sequence: Synthetic peptide
AVFLGFLSA

SEQ ID NO: 12532 - protein, 11 aa, synthetic construct
  REGION 1..11: note = Description of Artificial Sequence: Synthetic peptide
VPTDPNPQEVA

SEQ ID NO: 12533 - protein, 9 aa, synthetic construct
  REGION 1..9: note = Description of Artificial Sequence: Synthetic peptide
IPEQPLSQA

SEQ ID NO: 12534 - protein, 11 aa, synthetic construct
  REGION 1..11: note = Description of Artificial Sequence: Synthetic peptide
SPLSLQTLIPA

SEQ ID NO: 12535 - protein, 10 aa, synthetic construct
  REGION 1..10: note = Description of Artificial Sequence: Synthetic peptide
TPTAAEGVGA

SEQ ID NO: 12536 - protein, 10 aa, synthetic construct
  REGION 1..10: note = Description of Artificial Sequence: Synthetic peptide
YPKPEGTRQA

SEQ ID NO: 12537 - protein, 10 aa, synthetic construct
  REGION 1..10: note = Description of Artificial Sequence: Synthetic peptide
EPLGVAPTKA

SEQ ID NO: 12538 - protein, 9 aa, synthetic construct
  REGION 1..9: note = Description of Artificial Sequence: Synthetic peptide
NPYNTPVFA

SEQ ID NO: 12539 - protein, 9 aa, synthetic construct
  REGION 1..9: note = Description of Artificial Sequence: Synthetic peptide
NPYNTPIFA

SEQ ID NO: 12540 - protein, 9 aa, synthetic construct
  REGION 1..9: note = Description of Artificial Sequence: Synthetic peptide
RPEPTAPPA

SEQ ID NO: 12541 - protein, 9 aa, synthetic construct
  REGION 1..9: note = Description of Artificial Sequence: Synthetic peptide
FPISPIETV

SEQ ID NO: 12542 - protein, 10 aa, synthetic construct
  REGION 1..10: note = Description of Artificial Sequence: Synthetic peptide
IPAETGQETA

SEQ ID NO: 12543 - protein, 10 aa, synthetic construct
  REGION 1..10: note = Description of Artificial Sequence: Synthetic peptide
IPYNPQSQGV

SEQ ID NO: 12544 - protein, 9 aa, synthetic construct
  REGION 1..9: note = Description of Artificial Sequence: Synthetic peptide
VPKQPISQA

SEQ ID NO: 12545 - protein, 9 aa, synthetic construct
  REGION 1..9: note = Description of Artificial Sequence: Synthetic peptide
APIAGNITC

SEQ ID NO: 12546 - protein, 9 aa, synthetic construct
  REGION 1..9: note = Description of Artificial Sequence: Synthetic peptide
SPIAGNITC

SEQ ID NO: 12547 - protein, 9 aa, synthetic construct
  REGION 1..9: note = Description of Artificial Sequence: Synthetic peptide
LPKQPLSQA

SEQ ID NO: 12548 - protein, 9 aa, synthetic construct
  REGION 1..9: note = Description of Artificial Sequence: Synthetic peptide
FPVSPIETV

SEQ ID NO: 12549 - protein, 9 aa, synthetic construct
  REGION 1..9: note = Description of Artificial Sequence: Synthetic peptide
APIAGRINC

SEQ ID NO: 12550 - protein, 9 aa, synthetic construct
  REGION 1..9: note = Description of Artificial Sequence: Synthetic peptide
NPIAGNITC

SEQ ID NO: 12551 - protein, 11 aa, synthetic construct
  REGION 1..11: note = Description of Artificial Sequence: Synthetic peptide
IPAVVAKEIVA

SEQ ID NO: 12552 - protein, 10 aa, synthetic construct
  REGION 1..10: note = Description of Artificial Sequence: Synthetic peptide
YPSPDGTRQA

SEQ ID NO: 12553 - protein, 9 aa, synthetic construct
  REGION 1..9: note = Description of Artificial Sequence: Synthetic peptide
AVFLGFLSA

SEQ ID NO: 12554 - protein, 9 aa, synthetic construct
  REGION 1..9: note = Description of Artificial Sequence: Synthetic peptide
SPASRELQV

SEQ ID NO: 12555 - protein, 11 aa, synthetic construct
  REGION 1..11: note = Description of Artificial Sequence: Synthetic peptide
VPTDPNPQEVA

SEQ ID NO: 12556 - protein, 9 aa, synthetic construct
  REGION 1..9: note = Description of Artificial Sequence: Synthetic peptide
SPASGELRV

SEQ ID NO: 12557 - protein, 10 aa, synthetic construct
  REGION 1..10: note = Description of Artificial Sequence: Synthetic peptide
YPKPEGTRQA

SEQ ID NO: 12558 - protein, 9 aa, synthetic construct
  REGION 1..9: note = Description of Artificial Sequence: Synthetic peptide
NPYPKPEGT

SEQ ID NO: 12559 - protein, 10 aa, synthetic construct
  REGION 1..10: note = Description of Artificial Sequence: Synthetic peptide
APAGYAILKC

SEQ ID NO: 12560 - protein, 10 aa, synthetic construct
  REGION 1..10: note = Description of Artificial Sequence: Synthetic peptide
SPEVIPMFSA

SEQ ID NO: 12561 - protein, 9 aa, synthetic construct
  REGION 1..9: note = Description of Artificial Sequence: Synthetic peptide
RPEPTAPPA

SEQ ID NO: 12562 - protein, 9 aa, synthetic construct
  REGION 1..9: note = Description of Artificial Sequence: Synthetic peptide
NPYNTPIFA

SEQ ID NO: 12563 - protein, 9 aa, synthetic construct
  REGION 1..9: note = Description of Artificial Sequence: Synthetic peptide
FPISPIETV

SEQ ID NO: 12564 - protein, 10 aa, synthetic construct
  REGION 1..10: note = Description of Artificial Sequence: Synthetic peptide
IPYNPQSQGV

SEQ ID NO: 12565 - protein, 10 aa, synthetic construct
  REGION 1..10: note = Description of Artificial Sequence: Synthetic peptide
IPAETGQETA

SEQ ID NO: 12566 - protein, 9 aa, synthetic construct
  REGION 1..9: note = Description of Artificial Sequence: Synthetic peptide
ATAIAVAEW

SEQ ID NO: 12567 - protein, 9 aa, synthetic construct
  REGION 1..9: note = Description of Artificial Sequence: Synthetic peptide
LSLPQITFW

SEQ ID NO: 12568 - protein, 10 aa, synthetic construct
  REGION 1..10: note = Description of Artificial Sequence: Synthetic peptide
TTNVPWNTSW

SEQ ID NO: 12569 - protein, 11 aa, synthetic construct
  REGION 1..11: note = Description of Artificial Sequence: Synthetic peptide
KSYEKEVHNVW

SEQ ID NO: 12570 - protein, 11 aa, synthetic construct
  REGION 1..11: note = Description of Artificial Sequence: Synthetic peptide
KAYEREAHNVW

SEQ ID NO: 12571 - protein, 11 aa, synthetic construct
  REGION 1..11: note = Description of Artificial Sequence: Synthetic peptide
RTVDRGLTRGW

SEQ ID NO: 12572 - protein, 9 aa, synthetic construct
  REGION 1..9: note = Description of Artificial Sequence: Synthetic peptide
STLQEQIQW

SEQ ID NO: 12573 - protein, 11 aa, synthetic construct
  REGION 1..11: note = Description of Artificial Sequence: Synthetic peptide
KSYEKEAHNVW

SEQ ID NO: 12574 - protein, 11 aa, synthetic construct
  REGION 1..11: note = Description of Artificial Sequence: Synthetic peptide
KSIRIGPGQSF

SEQ ID NO: 12575 - protein, 9 aa, synthetic construct
  REGION 1..9: note = Description of Artificial Sequence: Synthetic peptide
RIKQFVNMW

SEQ ID NO: 12576 - protein, 10 aa, synthetic construct
  REGION 1..10: note = Description of Artificial Sequence: Synthetic peptide
ISLGPGRVFY

SEQ ID NO: 12577 - protein, 9 aa, synthetic construct
  REGION 1..9: note = Description of Artificial Sequence: Synthetic peptide
ISLESIVIW

SEQ ID NO: 12578 - protein, 10 aa, synthetic construct
  REGION 1..10: note = Description of Artificial Sequence: Synthetic peptide
KYLGNLTQYW

SEQ ID NO: 12579 - protein, 9 aa, synthetic construct
  REGION 1..9: note = Description of Artificial Sequence: Synthetic peptide
KGSPAIFQY

SEQ ID NO: 12580 - protein, 9 aa, synthetic construct
  REGION 1..9: note = Description of Artificial Sequence: Synthetic peptide
RSVRLVTGF

SEQ ID NO: 12581 - protein, 11 aa, synthetic construct
  REGION 1..11: note = Description of Artificial Sequence: Synthetic peptide
TTSTLQEQIQW

SEQ ID NO: 12582 - protein, 9 aa, synthetic construct
  REGION 1..9: note = Description of Artificial Sequence: Synthetic peptide
ATKGLGISY

SEQ ID NO: 12583 - protein, 10 aa, synthetic construct
  REGION 1..10: note = Description of Artificial Sequence: Synthetic peptide
KYLGNLTRYW

SEQ ID NO: 12584 - protein, 9 aa, synthetic construct
  REGION 1..9: note = Description of Artificial Sequence: Synthetic peptide
GLLPGEREW

SEQ ID NO: 12585 - protein, 10 aa, synthetic construct
  REGION 1..10: note = Description of Artificial Sequence: Synthetic peptide
KYLGNIIQYW

SEQ ID NO: 12586 - protein, 9 aa, synthetic construct
  REGION 1..9: note = Description of Artificial Sequence: Synthetic peptide
RSVRLVNGF

SEQ ID NO: 12587 - protein, 9 aa, synthetic construct
  REGION 1..9: note = Description of Artificial Sequence: Synthetic peptide
TTKGLGISY

SEQ ID NO: 12588 - protein, 11 aa, synthetic construct
  REGION 1..11: note = Description of Artificial Sequence: Synthetic peptide
KSIHLGPGQAF

SEQ ID NO: 12589 - protein, 9 aa, synthetic construct
  REGION 1..9: note = Description of Artificial Sequence: Synthetic peptide
KTKPPLPSV

SEQ ID NO: 12590 - protein, 11 aa, synthetic construct
  REGION 1..11: note = Description of Artificial Sequence: Synthetic peptide
KSLFNTVAVLY

SEQ ID NO: 12591 - protein, 11 aa, synthetic construct
  REGION 1..11: note = Description of Artificial Sequence: Synthetic peptide
RSLFNTVAVLY

SEQ ID NO: 12592 - protein, 10 aa, synthetic construct
  REGION 1..10: note = Description of Artificial Sequence: Synthetic peptide
KSLFGNDPSQ

SEQ ID NO: 12593 - protein, 9 aa, synthetic construct
  REGION 1..9: note = Description of Artificial Sequence: Synthetic peptide
ISLGPGRVF

SEQ ID NO: 12594 - protein, 9 aa, synthetic construct
  REGION 1..9: note = Description of Artificial Sequence: Synthetic peptide
RVRGMQRNW

SEQ ID NO: 12595 - protein, 9 aa, synthetic construct
  REGION 1..9: note = Description of Artificial Sequence: Synthetic peptide
LSFPQITLW

SEQ ID NO: 12596 - protein, 11 aa, synthetic construct
  REGION 1..11: note = Description of Artificial Sequence: Synthetic peptide
KSLYNTIAVLY

SEQ ID NO: 12597 - protein, 9 aa, synthetic construct
  REGION 1..9: note = Description of Artificial Sequence: Synthetic peptide
RIKQIVNMW

SEQ ID NO: 12598 - protein, 9 aa, synthetic construct
  REGION 1..9: note = Description of Artificial Sequence: Synthetic peptide
RAVGIGALF

SEQ ID NO: 12599 - protein, 10 aa, synthetic construct
  REGION 1..10: note = Description of Artificial Sequence: Synthetic peptide
VTIYYGVPVW

SEQ ID NO: 12600 - protein, 10 aa, synthetic construct
  REGION 1..10: note = Description of Artificial Sequence: Synthetic peptide
TTNVPWNSSW

SEQ ID NO: 12601 - protein, 9 aa, synthetic construct
  REGION 1..9: note = Description of Artificial Sequence: Synthetic peptide
FSVPLDKEF

SEQ ID NO: 12602 - protein, 11 aa, synthetic construct
  REGION 1..11: note = Description of Artificial Sequence: Synthetic peptide
SVLSGGKLDAW

SEQ ID NO: 12603 - protein, 9 aa, synthetic construct
  REGION 1..9: note = Description of Artificial Sequence: Synthetic peptide
KIKQIINMW

SEQ ID NO: 12604 - protein, 9 aa, synthetic construct
  REGION 1..9: note = Description of Artificial Sequence: Synthetic peptide
WSKSSIVGW

SEQ ID NO: 12605 - protein, 10 aa, synthetic construct
  REGION 1..10: note = Description of Artificial Sequence: Synthetic peptide
VTVYYGVPVW

SEQ ID NO: 12606 - protein, 9 aa, synthetic construct
  REGION 1..9: note = Description of Artificial Sequence: Synthetic peptide
KTAVQMAVF

SEQ ID NO: 12607 - protein, 9 aa, synthetic construct
  REGION 1..9: note = Description of Artificial Sequence: Synthetic peptide
ATAIAVAEW

SEQ ID NO: 12608 - protein, 11 aa, synthetic construct
  REGION 1..11: note = Description of Artificial Sequence: Synthetic peptide
KSIRIGPGQSF

SEQ ID NO: 12609 - protein, 9 aa, synthetic construct
  REGION 1..9: note = Description of Artificial Sequence: Synthetic peptide
STLQEQIQW

SEQ ID NO: 12610 - protein, 10 aa, synthetic construct
  REGION 1..10: note = Description of Artificial Sequence: Synthetic peptide
TAATNPDLAW

SEQ ID NO: 12611 - protein, 9 aa, synthetic construct
  REGION 1..9: note = Description of Artificial Sequence: Synthetic peptide
RAVAIGAVF

SEQ ID NO: 12612 - protein, 11 aa, synthetic construct
  REGION 1..11: note = Description of Artificial Sequence: Synthetic peptide
KTIHTDNGTNF

SEQ ID NO: 12613 - protein, 10 aa, synthetic construct
  REGION 1..10: note = Description of Artificial Sequence: Synthetic peptide
TAEKGVSQNY

SEQ ID NO: 12614 - protein, 9 aa, synthetic construct
  REGION 1..9: note = Description of Artificial Sequence: Synthetic peptide
KGSPAIFQY

SEQ ID NO: 12615 - protein, 10 aa, synthetic construct
  REGION 1..10: note = Description of Artificial Sequence: Synthetic peptide
AADKGVSQNY

SEQ ID NO: 12616 - protein, 8 aa, synthetic construct
  REGION 1..8: note = Description of Artificial Sequence: Synthetic peptide
TAIAVAEW

SEQ ID NO: 12617 - protein, 11 aa, synthetic construct
  REGION 1..11: note = Description of Artificial Sequence: Synthetic peptide
KSIHLGPGQAF

SEQ ID NO: 12618 - protein, 9 aa, synthetic construct
  REGION 1..9: note = Description of Artificial Sequence: Synthetic peptide
KTKPPLPSV

SEQ ID NO: 12619 - protein, 9 aa, synthetic construct
  REGION 1..9: note = Description of Artificial Sequence: Synthetic peptide
VAVHVASEY

SEQ ID NO: 12620 - protein, 9 aa, synthetic construct
  REGION 1..9: note = Description of Artificial Sequence: Synthetic peptide
AATNPDLAW

SEQ ID NO: 12621 - protein, 9 aa, synthetic construct
  REGION 1..9: note = Description of Artificial Sequence: Synthetic peptide
GSEELKSLY

SEQ ID NO: 12622 - protein, 9 aa, synthetic construct
  REGION 1..9: note = Description of Artificial Sequence: Synthetic peptide
RSVRLVNGF

SEQ ID NO: 12623 - protein, 9 aa, synthetic construct
  REGION 1..9: note = Description of Artificial Sequence: Synthetic peptide
RSVRLVTGF

SEQ ID NO: 12624 - protein, 9 aa, synthetic construct
  REGION 1..9: note = Description of Artificial Sequence: Synthetic peptide
RAVGIGALF

SEQ ID NO: 12625 - protein, 9 aa, synthetic construct
  REGION 1..9: note = Description of Artificial Sequence: Synthetic peptide
KALGPGATL

SEQ ID NO: 12626 - protein, 9 aa, synthetic construct
  REGION 1..9: note = Description of Artificial Sequence: Synthetic peptide
AAVDLSHFL

SEQ ID NO: 12627 - protein, 9 aa, synthetic construct
  REGION 1..9: note = Description of Artificial Sequence: Synthetic peptide
KAAVDLSHF

SEQ ID NO: 12628 - protein, 8 aa, synthetic construct
  REGION 1..8: note = Description of Artificial Sequence: Synthetic peptide
GQGVSIEW

SEQ ID NO: 12629 - protein, 9 aa, synthetic construct
  REGION 1..9: note = Description of Artificial Sequence: Synthetic peptide
RAIEAQQHL

SEQ ID NO: 12630 - protein, 10 aa, synthetic construct
  REGION 1..10: note = Description of Artificial Sequence: Synthetic peptide
RAIEAQQHLL

SEQ ID NO: 12631 - protein, 9 aa, synthetic construct
  REGION 1..9: note = Description of Artificial Sequence: Synthetic peptide
KTAVQMAVF

SEQ ID NO: 12632 - protein, 9 aa, synthetic construct
  REGION 1..9: note = Description of Artificial Sequence: Synthetic peptide
TINEEAAEW

SEQ ID NO: 12633 - protein, 9 aa, synthetic construct
  REGION 1..9: note = Description of Artificial Sequence: Synthetic peptide
FIPGDVNNL

SEQ ID NO: 12634 - protein, 9 aa, synthetic construct
  REGION 1..9: note = Description of Artificial Sequence: Synthetic peptide
FIPGDINNL

SEQ ID NO: 12635 - protein, 8 aa, synthetic construct
  REGION 1..8: note = Description of Artificial Sequence: Synthetic peptide
VSPASREL

SEQ ID NO: 12636 - protein, 9 aa, synthetic construct
  REGION 1..9: note = Description of Artificial Sequence: Synthetic peptide
HIPLETAEL

SEQ ID NO: 12637 - protein, 8 aa, synthetic construct
  REGION 1..8: note = Description of Artificial Sequence: Synthetic peptide
NSPASGEL

SEQ ID NO: 12638 - protein, 9 aa, synthetic construct
  REGION 1..9: note = Description of Artificial Sequence: Synthetic peptide
YSPVGILDI

SEQ ID NO: 12639 - protein, 9 aa, synthetic construct
  REGION 1..9: note = Description of Artificial Sequence: Synthetic peptide
FISGDINNL

SEQ ID NO: 12640 - protein, 9 aa, synthetic construct
  REGION 1..9: note = Description of Artificial Sequence: Synthetic peptide
YFPNATIKF

SEQ ID NO: 12641 - protein, 10 aa, synthetic construct
  REGION 1..10: note = Description of Artificial Sequence: Synthetic peptide
TVPNNGTITL

SEQ ID NO: 12642 - protein, 9 aa, synthetic construct
  REGION 1..9: note = Description of Artificial Sequence: Synthetic peptide
YSPLSLQTL

SEQ ID NO: 12643 - protein, 9 aa, synthetic construct
  REGION 1..9: note = Description of Artificial Sequence: Synthetic peptide
YSPVSILDI

SEQ ID NO: 12644 - protein, 8 aa, synthetic construct
  REGION 1..8: note = Description of Artificial Sequence: Synthetic peptide
NSPTSREL

SEQ ID NO: 12645 - protein, 9 aa, synthetic construct
  REGION 1..9: note = Description of Artificial Sequence: Synthetic peptide
VAVHVASEY

SEQ ID NO: 12646 - protein, 9 aa, synthetic construct
  REGION 1..9: note = Description of Artificial Sequence: Synthetic peptide
FISGDINNL

SEQ ID NO: 12647 - protein, 9 aa, synthetic construct
  REGION 1..9: note = Description of Artificial Sequence: Synthetic peptide
AAVDLSHFL

SEQ ID NO: 12648 - protein, 10 aa, synthetic construct
  REGION 1..10: note = Description of Artificial Sequence: Synthetic peptide
TAEKGVSQNY

SEQ ID NO: 12649 - protein, 10 aa, synthetic construct
  REGION 1..10: note = Description of Artificial Sequence: Synthetic peptide
AADKGVSQNY

SEQ ID NO: 12650 - protein, 9 aa, synthetic construct
  REGION 1..9: note = Description of Artificial Sequence: Synthetic peptide
TTKGLGISY

SEQ ID NO: 12651 - protein, 9 aa, synthetic construct
  REGION 1..9: note = Description of Artificial Sequence: Synthetic peptide
ATKGLGISY

SEQ ID NO: 12652 - protein, 8 aa, synthetic construct
  REGION 1..8: note = Description of Artificial Sequence: Synthetic peptide
AELVITTY

SEQ ID NO: 12653 - protein, 9 aa, synthetic construct
  REGION 1..9: note = Description of Artificial Sequence: Synthetic peptide
GSEELKSLY

SEQ ID NO: 12654 - protein, 9 aa, synthetic construct
  REGION 1..9: note = Description of Artificial Sequence: Synthetic peptide
TAELVITTY

SEQ ID NO: 12655 - protein, 9 aa, synthetic construct
  REGION 1..9: note = Description of Artificial Sequence: Synthetic peptide
EAKLVVTTY

SEQ ID NO: 12656 - protein, 9 aa, synthetic construct
  REGION 1..9: note = Description of Artificial Sequence: Synthetic peptide
EAELVITTY

SEQ ID NO: 12657 - protein, 8 aa, synthetic construct
  REGION 1..8: note = Description of Artificial Sequence: Synthetic peptide
VLDVGDAY

SEQ ID NO: 12658 - protein, 9 aa, synthetic construct
  REGION 1..9: note = Description of Artificial Sequence: Synthetic peptide
FISGDINNL

SEQ ID NO: 12659 - protein, 10 aa, synthetic construct
  REGION 1..10: note = Description of Artificial Sequence: Synthetic peptide
FAIDPGLLET

SEQ ID NO: 12660 - protein, 9 aa, synthetic construct
  REGION 1..9: note = Description of Artificial Sequence: Synthetic peptide
LALDKWASL

SEQ ID NO: 12661 - protein, 9 aa, synthetic construct
  REGION 1..9: note = Description of Artificial Sequence: Synthetic peptide
KALGPGATL

SEQ ID NO: 12662 - protein, 9 aa, synthetic construct
  REGION 1..9: note = Description of Artificial Sequence: Synthetic peptide
AAVDLSHFL

SEQ ID NO: 12663 - protein, 9 aa, synthetic construct
  REGION 1..9: note = Description of Artificial Sequence: Synthetic peptide
RAIEAQQHL

SEQ ID NO: 12664 - protein, 9 aa, synthetic construct
  REGION 1..9: note = Description of Artificial Sequence: Synthetic peptide
FISGDINNL

SEQ ID NO: 12665 - protein, 9 aa, synthetic construct
  REGION 1..9: note = Description of Artificial Sequence: Synthetic peptide
AVSPASREL

SEQ ID NO: 12666 - protein, 10 aa, synthetic construct
  REGION 1..10: note = Description of Artificial Sequence: Synthetic peptide
FAIDPGLLET

SEQ ID NO: 12667 - protein, 9 aa, synthetic construct
  REGION 1..9: note = Description of Artificial Sequence: Synthetic peptide
FIPGDINNL

SEQ ID NO: 12668 - protein, 9 aa, synthetic construct
  REGION 1..9: note = Description of Artificial Sequence: Synthetic peptide
KALGTGATL

SEQ ID NO: 12669 - protein, 9 aa, synthetic construct
  REGION 1..9: note = Description of Artificial Sequence: Synthetic peptide
FIPGDVNNL

SEQ ID NO: 12670 - protein, 9 aa, synthetic construct
  REGION 1..9: note = Description of Artificial Sequence: Synthetic peptide
ISMEPRTVL

SEQ ID NO: 12671 - protein, 9 aa, synthetic construct
  REGION 1..9: note = Description of Artificial Sequence: Synthetic peptide
GAVDLSHFL

SEQ ID NO: 12672 - protein, 9 aa, synthetic construct
  REGION 1..9: note = Description of Artificial Sequence: Synthetic peptide
KALGPGATL

SEQ ID NO: 12673 - protein, 9 aa, synthetic construct
  REGION 1..9: note = Description of Artificial Sequence: Synthetic peptide
AAVDLSHFL

SEQ ID NO: 12674 - protein, 9 aa, synthetic construct
  REGION 1..9: note = Description of Artificial Sequence: Synthetic peptide
YVDRFFKTL

SEQ ID NO: 12675 - protein, 9 aa, synthetic construct
  REGION 1..9: note = Description of Artificial Sequence: Synthetic peptide
RAIEAQQHL

SEQ ID NO: 12676 - protein, 9 aa, synthetic construct
  REGION 1..9: note = Description of Artificial Sequence: Synthetic peptide
ATDIQTKEL

SEQ ID NO: 12677 - protein, 9 aa, synthetic construct
  REGION 1..9: note = Description of Artificial Sequence: Synthetic peptide
QYDNILIEI

SEQ ID NO: 12678 - protein, 8 aa, synthetic construct
  REGION 1..8: note = Description of Artificial Sequence: Synthetic peptide
HTDNGTNF

SEQ ID NO: 12679 - protein, 9 aa, synthetic construct
  REGION 1..9: note = Description of Artificial Sequence: Synthetic peptide
QYDSILIEI

SEQ ID NO: 12680 - protein, 9 aa, synthetic construct
  REGION 1..9: note = Description of Artificial Sequence: Synthetic peptide
QYDHILIEI

SEQ ID NO: 12681 - protein, 8 aa, synthetic construct
  REGION 1..8: note = Description of Artificial Sequence: Synthetic peptide
HTDNGTNF

SEQ ID NO: 12682 - protein, 8 aa, synthetic construct
  REGION 1..8: note = Description of Artificial Sequence: Synthetic peptide
TVDDIQKL

SEQ ID NO: 12683 - protein, 9 aa, synthetic construct
  REGION 1..9: note = Description of Artificial Sequence: Synthetic peptide
STDIQTREL

SEQ ID NO: 12684 - protein, 8 aa, synthetic construct
  REGION 1..8: note = Description of Artificial Sequence: Synthetic peptide
LSDQSSTL

SEQ ID NO: 12685 - protein, 9 aa, synthetic construct
  REGION 1..9: note = Description of Artificial Sequence: Synthetic peptide
ISDNAKTII

SEQ ID NO: 12686 - protein, 9 aa, synthetic construct
  REGION 1..9: note = Description of Artificial Sequence: Synthetic peptide
IQDNSEIKI

SEQ ID NO: 12687 - protein, 9 aa, synthetic construct
  REGION 1..9: note = Description of Artificial Sequence: Synthetic peptide
ATDIQTREL

SEQ ID NO: 12688 - protein, 9 aa, synthetic construct
  REGION 1..9: note = Description of Artificial Sequence: Synthetic peptide
KAELQAIQL

SEQ ID NO: 12689 - protein, 9 aa, synthetic construct
  REGION 1..9: note = Description of Artificial Sequence: Synthetic peptide
IQDNSEIKV

SEQ ID NO: 12690 - protein, 8 aa, synthetic construct
  REGION 1..8: note = Description of Artificial Sequence: Synthetic peptide
AVDLSHFL

SEQ ID NO: 12691 - protein, 8 aa, synthetic construct
  REGION 1..8: note = Description of Artificial Sequence: Synthetic peptide
HTDNGSNF

SEQ ID NO: 12692 - protein, 9 aa, synthetic construct
  REGION 1..9: note = Description of Artificial Sequence: Synthetic peptide
VLDVGDAYF

SEQ ID NO: 12693 - protein, 9 aa, synthetic construct
  REGION 1..9: note = Description of Artificial Sequence: Synthetic peptide
IRAISERIL

SEQ ID NO: 12694 - protein, 9 aa, synthetic construct
  REGION 1..9: note = Description of Artificial Sequence: Synthetic peptide
QRPLVTIRV

SEQ ID NO: 12695 - protein, 9 aa, synthetic construct
  REGION 1..9: note = Description of Artificial Sequence: Synthetic peptide
IRSISERIL

SEQ ID NO: 12696 - protein, 8 aa, synthetic construct
  REGION 1..8: note = Description of Artificial Sequence: Synthetic peptide
YKGPRRFI

SEQ ID NO: 12697 - protein, 9 aa, synthetic construct
  REGION 1..9: note = Description of Artificial Sequence: Synthetic peptide
QRPLVTIKI

SEQ ID NO: 12698 - protein, 9 aa, synthetic construct
  REGION 1..9: note = Description of Artificial Sequence: Synthetic peptide
TRNPDIVIY

SEQ ID NO: 12699 - protein, 9 aa, synthetic construct
  REGION 1..9: note = Description of Artificial Sequence: Synthetic peptide
NATTTNDTL

SEQ ID NO: 12700 - protein, 9 aa, synthetic construct
  REGION 1..9: note = Description of Artificial Sequence: Synthetic peptide
FISGDINNL

SEQ ID NO: 12701 - protein, 9 aa, synthetic construct
  REGION 1..9: note = Description of Artificial Sequence: Synthetic peptide
FLSAAGSTM

SEQ ID NO: 12702 - protein, 9 aa, synthetic construct
  REGION 1..9: note = Description of Artificial Sequence: Synthetic peptide
EVKLVITTY

SEQ ID NO: 12703 - protein, 9 aa, synthetic construct
  REGION 1..9: note = Description of Artificial Sequence: Synthetic peptide
HLGPGQTFY

SEQ ID NO: 12704 - protein, 9 aa, synthetic construct
  REGION 1..9: note = Description of Artificial Sequence: Synthetic peptide
HLGPGQAFY

SEQ ID NO: 12705 - protein, 9 aa, synthetic construct
  REGION 1..9: note = Description of Artificial Sequence: Synthetic peptide
FPNNTAIKF

SEQ ID NO: 12706 - protein, 9 aa, synthetic construct
  REGION 1..9: note = Description of Artificial Sequence: Synthetic peptide
HCNVSGTQW

SEQ ID NO: 12707 - protein, 9 aa, synthetic construct
  REGION 1..9: note = Description of Artificial Sequence: Synthetic peptide
TQWNNTLEY

SEQ ID NO: 12708 - protein, 9 aa, synthetic construct
  REGION 1..9: note = Description of Artificial Sequence: Synthetic peptide
EAKLVVTTY

SEQ ID NO: 12709 - protein, 9 aa, synthetic construct
  REGION 1..9: note = Description of Artificial Sequence: Synthetic peptide
GLFNESEKY

SEQ ID NO: 12710 - protein, 9 aa, synthetic construct
  REGION 1..9: note = Description of Artificial Sequence: Synthetic peptide
FIPGDINNL

SEQ ID NO: 12711 - protein, 9 aa, synthetic construct
  REGION 1..9: note = Description of Artificial Sequence: Synthetic peptide
SQANTTIMM

SEQ ID NO: 12712 - protein, 9 aa, synthetic construct
  REGION 1..9: note = Description of Artificial Sequence: Synthetic peptide
TTKGLGISY

SEQ ID NO: 12713 - protein, 9 aa, synthetic construct
  REGION 1..9: note = Description of Artificial Sequence: Synthetic peptide
TLSDQSSTL

SEQ ID NO: 12714 - protein, 9 aa, synthetic construct
  REGION 1..9: note = Description of Artificial Sequence: Synthetic peptide
HCNISGTQW

SEQ ID NO: 12715 - protein, 9 aa, synthetic construct
  REGION 1..9: note = Description of Artificial Sequence: Synthetic peptide
FIPGDVNNL

SEQ ID NO: 12716 - protein, 11 aa, synthetic construct
  REGION 1..11: note = Description of Artificial Sequence: Synthetic peptide
TQIDPDLADQL

SEQ ID NO: 12717 - protein, 9 aa, synthetic construct
  REGION 1..9: note = Description of Artificial Sequence: Synthetic peptide
GAVDLSHFL

SEQ ID NO: 12718 - protein, 9 aa, synthetic construct
  REGION 1..9: note = Description of Artificial Sequence: Synthetic peptide
AAVDLSHFL

SEQ ID NO: 12719 - protein, 9 aa, synthetic construct
  REGION 1..9: note = Description of Artificial Sequence: Synthetic peptide
FLGAAGSTM

SEQ ID NO: 12720 - protein, 9 aa, synthetic construct
  REGION 1..9: note = Description of Artificial Sequence: Synthetic peptide
TVLDVGDAY

SEQ ID NO: 12721 - protein, 9 aa, synthetic construct
  REGION 1..9: note = Description of Artificial Sequence: Synthetic peptide
IVTDSQYAL

SEQ ID NO: 12722 - protein, 8 aa, synthetic construct
  REGION 1..8: note = Description of Artificial Sequence: Synthetic peptide
LSDQSSTL

SEQ ID NO: 12723 - protein, 9 aa, synthetic construct
  REGION 1..9: note = Description of Artificial Sequence: Synthetic peptide
STDIQTREL

SEQ ID NO: 12724 - protein, 9 aa, synthetic construct
  REGION 1..9: note = Description of Artificial Sequence: Synthetic peptide
GTDRVIEAL

SEQ ID NO: 12725 - protein, 8 aa, synthetic construct
  REGION 1..8: note = Description of Artificial Sequence: Synthetic peptide
VTDTKEAL

SEQ ID NO: 12726 - protein, 9 aa, synthetic construct
  REGION 1..9: note = Description of Artificial Sequence: Synthetic peptide
WTDRVIEAL

SEQ ID NO: 12727 - protein, 8 aa, synthetic construct
  REGION 1..8: note = Description of Artificial Sequence: Synthetic peptide
TVDDIQKL

SEQ ID NO: 12728 - protein, 9 aa, synthetic construct
  REGION 1..9: note = Description of Artificial Sequence: Synthetic peptide
IIDIISTDI

SEQ ID NO: 12729 - protein, 9 aa, synthetic construct
  REGION 1..9: note = Description of Artificial Sequence: Synthetic peptide
AADDLWVTI

SEQ ID NO: 12730 - protein, 8 aa, synthetic construct
  REGION 1..8: note = Description of Artificial Sequence: Synthetic peptide
HTDNGTNF

SEQ ID NO: 12731 - protein, 10 aa, synthetic construct
  REGION 1..10: note = Description of Artificial Sequence: Synthetic peptide
HQDPVPKQPL

SEQ ID NO: 12732 - protein, 9 aa, synthetic construct
  REGION 1..9: note = Description of Artificial Sequence: Synthetic peptide
ISDNAKTII

SEQ ID NO: 12733 - protein, 9 aa, synthetic construct
  REGION 1..9: note = Description of Artificial Sequence: Synthetic peptide
FISGDINNL

SEQ ID NO: 12734 - protein, 9 aa, synthetic construct
  REGION 1..9: note = Description of Artificial Sequence: Synthetic peptide
ATDIQTREL

SEQ ID NO: 12735 - protein, 9 aa, synthetic construct
  REGION 1..9: note = Description of Artificial Sequence: Synthetic peptide
GTDRVIEVL

SEQ ID NO: 12736 - protein, 9 aa, synthetic construct
  REGION 1..9: note = Description of Artificial Sequence: Synthetic peptide
KAELQAIQL

SEQ ID NO: 12737 - protein, 8 aa, synthetic construct
  REGION 1..8: note = Description of Artificial Sequence: Synthetic peptide
AVDLSHFL

SEQ ID NO: 12738 - protein, 9 aa, synthetic construct
  REGION 1..9: note = Description of Artificial Sequence: Synthetic peptide
ATDIQTKEL

SEQ ID NO: 12739 - protein, 9 aa, synthetic construct
  REGION 1..9: note = Description of Artificial Sequence: Synthetic peptide
TQDFWEVQL

SEQ ID NO: 12740 - protein, 9 aa, synthetic construct
  REGION 1..9: note = Description of Artificial Sequence: Synthetic peptide
GQYPPLASL

SEQ ID NO: 12741 - protein, 8 aa, synthetic construct
  REGION 1..8: note = Description of Artificial Sequence: Synthetic peptide
GQMVHQSL

SEQ ID NO: 12742 - protein, 9 aa, synthetic construct
  REGION 1..9: note = Description of Artificial Sequence: Synthetic peptide
KALGTGATL

SEQ ID NO: 12743 - protein, 9 aa, synthetic construct
  REGION 1..9: note = Description of Artificial Sequence: Synthetic peptide
YAAPIAGNI

SEQ ID NO: 12744 - protein, 9 aa, synthetic construct
  REGION 1..9: note = Description of Artificial Sequence: Synthetic peptide
ATKGLGISY

SEQ ID NO: 12745 - protein, 9 aa, synthetic construct
  REGION 1..9: note = Description of Artificial Sequence: Synthetic peptide
NAKTIIVHL

SEQ ID NO: 12746 - protein, 9 aa, synthetic construct
  REGION 1..9: note = Description of Artificial Sequence: Synthetic peptide
KAKPPLPSV

SEQ ID NO: 12747 - protein, 9 aa, synthetic construct
  REGION 1..9: note = Description of Artificial Sequence: Synthetic peptide
AAVDLSHFL

SEQ ID NO: 12748 - protein, 9 aa, synthetic construct
  REGION 1..9: note = Description of Artificial Sequence: Synthetic peptide
GAASITLTV

SEQ ID NO: 12749 - protein, 9 aa, synthetic construct
  REGION 1..9: note = Description of Artificial Sequence: Synthetic peptide
YFPNATIKF

SEQ ID NO: 12750 - protein, 9 aa, synthetic construct
  REGION 1..9: note = Description of Artificial Sequence: Synthetic peptide
IYQNPFKNL

SEQ ID NO: 12751 - protein, 10 aa, synthetic construct
  REGION 1..10: note = Description of Artificial Sequence: Synthetic peptide
SFISGDINNL

SEQ ID NO: 12752 - protein, 9 aa, synthetic construct
  REGION 1..9: note = Description of Artificial Sequence: Synthetic peptide
TYQIYREPF

SEQ ID NO: 12753 - protein, 9 aa, synthetic construct
  REGION 1..9: note = Description of Artificial Sequence: Synthetic peptide
KYLGNIIQY

SEQ ID NO: 12754 - protein, 9 aa, synthetic construct
  REGION 1..9: note = Description of Artificial Sequence: Synthetic peptide
TYQIYQNPF

SEQ ID NO: 12755 - protein, 9 aa, synthetic construct
  REGION 1..9: note = Description of Artificial Sequence: Synthetic peptide
KYLGNLTQY

SEQ ID NO: 12756 - protein, 10 aa, synthetic construct
  REGION 1..10: note = Description of Artificial Sequence: Synthetic peptide
SYFPNATIKF

SEQ ID NO: 12757 - protein, 10 aa, synthetic construct
  REGION 1..10: note = Description of Artificial Sequence: Synthetic peptide
IYPGIKVRPL

SEQ ID NO: 12758 - protein, 9 aa, synthetic construct
  REGION 1..9: note = Description of Artificial Sequence: Synthetic peptide
LYNTIAVLY

SEQ ID NO: 12759 - protein, 8 aa, synthetic construct
  REGION 1..8: note = Description of Artificial Sequence: Synthetic peptide
NYPIVQNL

SEQ ID NO: 12760 - protein, 8 aa, synthetic construct
  REGION 1..8: note = Description of Artificial Sequence: Synthetic peptide
VYHTQGYF

SEQ ID NO: 12761 - protein, 9 aa, synthetic construct
  REGION 1..9: note = Description of Artificial Sequence: Synthetic peptide
IYQEPFKNL

SEQ ID NO: 12762 - protein, 9 aa, synthetic construct
  REGION 1..9: note = Description of Artificial Sequence: Synthetic peptide
TYQIYQEPF

SEQ ID NO: 12763 - protein, 10 aa, synthetic construct
  REGION 1..10: note = Description of Artificial Sequence: Synthetic peptide
GFLGAAGSTM

SEQ ID NO: 12764 - protein, 9 aa, synthetic construct
  REGION 1..9: note = Description of Artificial Sequence: Synthetic peptide
KYLGNLTQY

SEQ ID NO: 12765 - protein, 9 aa, synthetic construct
  REGION 1..9: note = Description of Artificial Sequence: Synthetic peptide
IYQNPFKNL

SEQ ID NO: 12766 - protein, 9 aa, synthetic construct
  REGION 1..9: note = Description of Artificial Sequence: Synthetic peptide
KYLGNIIQY

SEQ ID NO: 12767 - protein, 9 aa, synthetic construct
  REGION 1..9: note = Description of Artificial Sequence: Synthetic peptide
TYQIYQNPF

SEQ ID NO: 12768 - protein, 9 aa, synthetic construct
  REGION 1..9: note = Description of Artificial Sequence: Synthetic peptide
YFPNATIKF

SEQ ID NO: 12769 - protein, 8 aa, synthetic construct
  REGION 1..8: note = Description of Artificial Sequence: Synthetic peptide
LYNTIAVL

SEQ ID NO: 12770 - protein, 9 aa, synthetic construct
  REGION 1..9: note = Description of Artificial Sequence: Synthetic peptide
IYQEPFKNL

SEQ ID NO: 12771 - protein, 10 aa, synthetic construct
  REGION 1..10: note = Description of Artificial Sequence: Synthetic peptide
GFLGAAGSTM

SEQ ID NO: 12772 - protein, 9 aa, synthetic construct
  REGION 1..9: note = Description of Artificial Sequence: Synthetic peptide
TYQIYQEPF

SEQ ID NO: 12773 - protein, 9 aa, synthetic construct
  REGION 1..9: note = Description of Artificial Sequence: Synthetic peptide
YSNTIYRLI

SEQ ID NO: 12774 - protein, 9 aa, synthetic construct
  REGION 1..9: note = Description of Artificial Sequence: Synthetic peptide
RSISERILV

SEQ ID NO: 12775 - protein, 9 aa, synthetic construct
  REGION 1..9: note = Description of Artificial Sequence: Synthetic peptide
NSNITGLLL

SEQ ID NO: 12776 - protein, 10 aa, synthetic construct
  REGION 1..10: note = Description of Artificial Sequence: Synthetic peptide
KVVEIEPLGV

SEQ ID NO: 12777 - protein, 9 aa, synthetic construct
  REGION 1..9: note = Description of Artificial Sequence: Synthetic peptide
GAASITLTV

SEQ ID NO: 12778 - protein, 9 aa, synthetic construct
  REGION 1..9: note = Description of Artificial Sequence: Synthetic peptide
ANSPTSREL

SEQ ID NO: 12779 - protein, 9 aa, synthetic construct
  REGION 1..9: note = Description of Artificial Sequence: Synthetic peptide
KGSPAIFQY

SEQ ID NO: 12780 - protein, 10 aa, synthetic construct
  REGION 1..10: note = Description of Artificial Sequence: Synthetic peptide
FATKGLGISY

SEQ ID NO: 12781 - protein, 9 aa, synthetic construct
  REGION 1..9: note = Description of Artificial Sequence: Synthetic peptide
IARERHPEY

SEQ ID NO: 12782 - protein, 9 aa, synthetic construct
  REGION 1..9: note = Description of Artificial Sequence: Synthetic peptide
AAVDLSHFL

SEQ ID NO: 12783 - protein, 9 aa, synthetic construct
  REGION 1..9: note = Description of Artificial Sequence: Synthetic peptide
KGSPAIFQY

SEQ ID NO: 12784 - protein, 9 aa, synthetic construct
  REGION 1..9: note = Description of Artificial Sequence: Synthetic peptide
VAVHVASEY

SEQ ID NO: 12785 - protein, 9 aa, synthetic construct
  REGION 1..9: note = Description of Artificial Sequence: Synthetic peptide
AVSPASREL

SEQ ID NO: 12786 - protein, 9 aa, synthetic construct
  REGION 1..9: note = Description of Artificial Sequence: Synthetic peptide
SASAIRKAI

SEQ ID NO: 12787 - protein, 10 aa, synthetic construct
  REGION 1..10: note = Description of Artificial Sequence: Synthetic peptide
IATDIQTREL

SEQ ID NO: 12788 - protein, 9 aa, synthetic construct
  REGION 1..9: note = Description of Artificial Sequence: Synthetic peptide
KAKPPLPSV

SEQ ID NO: 12789 - protein, 9 aa, synthetic construct
  REGION 1..9: note = Description of Artificial Sequence: Synthetic peptide
AAVDLSHFL

SEQ ID NO: 12790 - protein, 9 aa, synthetic construct
  REGION 1..9: note = Description of Artificial Sequence: Synthetic peptide
RAIEAQQHL

SEQ ID NO: 12791 - protein, 9 aa, synthetic construct
  REGION 1..9: note = Description of Artificial Sequence: Synthetic peptide
ANSPTSREL

SEQ ID NO: 12792 - protein, 10 aa, synthetic construct
  REGION 1..10: note = Description of Artificial Sequence: Synthetic peptide
IATDIQTKEL

SEQ ID NO: 12793 - protein, 11 aa, synthetic construct
  REGION 1..11: note = Description of Artificial Sequence: Synthetic peptide
AEQASQDVKGW

SEQ ID NO: 12794 - protein, 9 aa, synthetic construct
  REGION 1..9: note = Description of Artificial Sequence: Synthetic peptide
VAVHVASEY

SEQ ID NO: 12795 - protein, 9 aa, synthetic construct
  REGION 1..9: note = Description of Artificial Sequence: Synthetic peptide
AEKGVSQNY

SEQ ID NO: 12796 - protein, 9 aa, synthetic construct
  REGION 1..9: note = Description of Artificial Sequence: Synthetic peptide
YAAPIAGNI

SEQ ID NO: 12797 - protein, 9 aa, synthetic construct
  REGION 1..9: note = Description of Artificial Sequence: Synthetic peptide
IRIGPGQSF

SEQ ID NO: 12798 - protein, 11 aa, synthetic construct
  REGION 1..11: note = Description of Artificial Sequence: Synthetic peptide
AEQATQEVKGW

SEQ ID NO: 12799 - protein, 11 aa, synthetic construct
  REGION 1..11: note = Description of Artificial Sequence: Synthetic peptide
AEQASQEVKNW

SEQ ID NO: 12800 - protein, 9 aa, synthetic construct
  REGION 1..9: note = Description of Artificial Sequence: Synthetic peptide
AAVDLSHFL

SEQ ID NO: 12801 - protein, 11 aa, synthetic construct
  REGION 1..11: note = Description of Artificial Sequence: Synthetic peptide
AEIQKQGQGQW

SEQ ID NO: 12802 - protein, 9 aa, synthetic construct
  REGION 1..9: note = Description of Artificial Sequence: Synthetic peptide
GAASITLTV

SEQ ID NO: 12803 - protein, 11 aa, synthetic construct
  REGION 1..11: note = Description of Artificial Sequence: Synthetic peptide
SEVNIVTDSQY

SEQ ID NO: 12804 - protein, 9 aa, synthetic construct
  REGION 1..9: note = Description of Artificial Sequence: Synthetic peptide
FISGDINNL

SEQ ID NO: 12805 - protein, 9 aa, synthetic construct
  REGION 1..9: note = Description of Artificial Sequence: Synthetic peptide
FIPGDVNNL

SEQ ID NO: 12806 - protein, 9 aa, synthetic construct
  REGION 1..9: note = Description of Artificial Sequence: Synthetic peptide
FIPGDINNL

SEQ ID NO: 12807 - protein, 8 aa, synthetic construct
  REGION 1..8: note = Description of Artificial Sequence: Synthetic peptide
VAIGAVFL

SEQ ID NO: 12808 - protein, 10 aa, synthetic construct
  REGION 1..10: note = Description of Artificial Sequence: Synthetic peptide
RAVAIGAVFL

SEQ ID NO: 12809 - protein, 9 aa, synthetic construct
  REGION 1..9: note = Description of Artificial Sequence: Synthetic peptide
GAVDLSHFL

SEQ ID NO: 12810 - protein, 9 aa, synthetic construct
  REGION 1..9: note = Description of Artificial Sequence: Synthetic peptide
AAVDLSHFL

SEQ ID NO: 12811 - protein, 10 aa, synthetic construct
  REGION 1..10: note = Description of Artificial Sequence: Synthetic peptide
AADKGVSQNY

SEQ ID NO: 12812 - protein, 9 aa, synthetic construct
  REGION 1..9: note = Description of Artificial Sequence: Synthetic peptide
ISERILTTY

SEQ ID NO: 12813 - protein, 9 aa, synthetic construct
  REGION 1..9: note = Description of Artificial Sequence: Synthetic peptide
GSEEIKSLY

SEQ ID NO: 12814 - protein, 9 aa, synthetic construct
  REGION 1..9: note = Description of Artificial Sequence: Synthetic peptide
GSEELKSLY

SEQ ID NO: 12815 - protein, 9 aa, synthetic construct
  REGION 1..9: note = Description of Artificial Sequence: Synthetic peptide
LADQLIHKY

SEQ ID NO: 12816 - protein, 8 aa, synthetic construct
  REGION 1..8: note = Description of Artificial Sequence: Synthetic peptide
VLDVGDAY

SEQ ID NO: 12817 - protein, 10 aa, synthetic construct
  REGION 1..10: note = Description of Artificial Sequence: Synthetic peptide
ATDDLWVTVY

SEQ ID NO: 12818 - protein, 9 aa, synthetic construct
  REGION 1..9: note = Description of Artificial Sequence: Synthetic peptide
SFDPIPIHY

SEQ ID NO: 12819 - protein, 10 aa, synthetic construct
  REGION 1..10: note = Description of Artificial Sequence: Synthetic peptide
VTVLDVGDAY

SEQ ID NO: 12820 - protein, 10 aa, synthetic construct
  REGION 1..10: note = Description of Artificial Sequence: Synthetic peptide
FTSKGLGISY

SEQ ID NO: 12821 - protein, 9 aa, synthetic construct
  REGION 1..9: note = Description of Artificial Sequence: Synthetic peptide
QLTEVVQKV

SEQ ID NO: 12822 - protein, 9 aa, synthetic construct
  REGION 1..9: note = Description of Artificial Sequence: Synthetic peptide
ILAEAMSQV

SEQ ID NO: 12823 - protein, 9 aa, synthetic construct
  REGION 1..9: note = Description of Artificial Sequence: Synthetic peptide
QLTEVVQKI

SEQ ID NO: 12824 - protein, 9 aa, synthetic construct
  REGION 1..9: note = Description of Artificial Sequence: Synthetic peptide
GLADQLIHL

SEQ ID NO: 12825 - protein, 9 aa, synthetic construct
  REGION 1..9: note = Description of Artificial Sequence: Synthetic peptide
AVLSVVNRV

SEQ ID NO: 12826 - protein, 10 aa, synthetic construct
  REGION 1..10: note = Description of Artificial Sequence: Synthetic peptide
ALTDVVPLTV

SEQ ID NO: 12827 - protein, 9 aa, synthetic construct
  REGION 1..9: note = Description of Artificial Sequence: Synthetic peptide
ILKEPVHGV

SEQ ID NO: 12828 - protein, 9 aa, synthetic construct
  REGION 1..9: note = Description of Artificial Sequence: Synthetic peptide
SLLETTEGC

SEQ ID NO: 12829 - protein, 9 aa, synthetic construct
  REGION 1..9: note = Description of Artificial Sequence: Synthetic peptide
AVLAVINRV

SEQ ID NO: 12830 - protein, 9 aa, synthetic construct
  REGION 1..9: note = Description of Artificial Sequence: Synthetic peptide
GLCTNVSTV

SEQ ID NO: 12831 - protein, 9 aa, synthetic construct
  REGION 1..9: note = Description of Artificial Sequence: Synthetic peptide
LLDRTAIAV

SEQ ID NO: 12832 - protein, 9 aa, synthetic construct
  REGION 1..9: note = Description of Artificial Sequence: Synthetic peptide
ALGEVGPLI

SEQ ID NO: 12833 - protein, 9 aa, synthetic construct
  REGION 1..9: note = Description of Artificial Sequence: Synthetic peptide
SLYNAVVVL

SEQ ID NO: 12834 - protein, 9 aa, synthetic construct
  REGION 1..9: note = Description of Artificial Sequence: Synthetic peptide
GLYPPLTSL

SEQ ID NO: 12835 - protein, 9 aa, synthetic construct
  REGION 1..9: note = Description of Artificial Sequence: Synthetic peptide
IIKEPVHGV

SEQ ID NO: 12836 - protein, 9 aa, synthetic construct
  REGION 1..9: note = Description of Artificial Sequence: Synthetic peptide
ALGEVGPFI

SEQ ID NO: 12837 - protein, 9 aa, synthetic construct
  REGION 1..9: note = Description of Artificial Sequence: Synthetic peptide
GLLETTEGC

SEQ ID NO: 12838 - protein, 9 aa, synthetic construct
  REGION 1..9: note = Description of Artificial Sequence: Synthetic peptide
ALTEICTEM

SEQ ID NO: 12839 - protein, 9 aa, synthetic construct
  REGION 1..9: note = Description of Artificial Sequence: Synthetic peptide
ILAEAMSKA

SEQ ID NO: 12840 - protein, 9 aa, synthetic construct
  REGION 1..9: note = Description of Artificial Sequence: Synthetic peptide
ALTDVVPLT

SEQ ID NO: 12841 - protein, 9 aa, synthetic construct
  REGION 1..9: note = Description of Artificial Sequence: Synthetic peptide
FIPGNINNL

SEQ ID NO: 12842 - protein, 10 aa, synthetic construct
  REGION 1..10: note = Description of Artificial Sequence: Synthetic peptide
ALTDVVPLTA

SEQ ID NO: 12843 - protein, 9 aa, synthetic construct
  REGION 1..9: note = Description of Artificial Sequence: Synthetic peptide
AVLSIINRV

SEQ ID NO: 12844 - protein, 10 aa, synthetic construct
  REGION 1..10: note = Description of Artificial Sequence: Synthetic peptide
SLLDRTAIAV

SEQ ID NO: 12845 - protein, 9 aa, synthetic construct
  REGION 1..9: note = Description of Artificial Sequence: Synthetic peptide
SLFNTIVVL

SEQ ID NO: 12846 - protein, 9 aa, synthetic construct
  REGION 1..9: note = Description of Artificial Sequence: Synthetic peptide
YQLETEPIL

SEQ ID NO: 12847 - protein, 9 aa, synthetic construct
  REGION 1..9: note = Description of Artificial Sequence: Synthetic peptide
IQDNNEIKV

SEQ ID NO: 12848 - protein, 9 aa, synthetic construct
  REGION 1..9: note = Description of Artificial Sequence: Synthetic peptide
IVTDSQYAL

SEQ ID NO: 12849 - protein, 10 aa, synthetic construct
  REGION 1..10: note = Description of Artificial Sequence: Synthetic peptide
KLVPVDPEEV

SEQ ID NO: 12850 - protein, 9 aa, synthetic construct
  REGION 1..9: note = Description of Artificial Sequence: Synthetic peptide
SLAEKNIII

SEQ ID NO: 12851 - protein, 9 aa, synthetic construct
  REGION 1..9: note = Description of Artificial Sequence: Synthetic peptide
ILAEAMSQV

SEQ ID NO: 12852 - protein, 9 aa, synthetic construct
  REGION 1..9: note = Description of Artificial Sequence: Synthetic peptide
ILKEPVHGV

SEQ ID NO: 12853 - protein, 9 aa, synthetic construct
  REGION 1..9: note = Description of Artificial Sequence: Synthetic peptide
QLTEVVQKV

SEQ ID NO: 12854 - protein, 9 aa, synthetic construct
  REGION 1..9: note = Description of Artificial Sequence: Synthetic peptide
FIPGNINNL

SEQ ID NO: 12855 - protein, 9 aa, synthetic construct
  REGION 1..9: note = Description of Artificial Sequence: Synthetic peptide
IIKEPVHGV

SEQ ID NO: 12856 - protein, 9 aa, synthetic construct
  REGION 1..9: note = Description of Artificial Sequence: Synthetic peptide
ILAEAMSKA

SEQ ID NO: 12857 - protein, 9 aa, synthetic construct
  REGION 1..9: note = Description of Artificial Sequence: Synthetic peptide
VVKIEPLGV

SEQ ID NO: 12858 - protein, 10 aa, synthetic construct
  REGION 1..10: note = Description of Artificial Sequence: Synthetic peptide
ALTDVVPLTV

SEQ ID NO: 12859 - protein, 9 aa, synthetic construct
  REGION 1..9: note = Description of Artificial Sequence: Synthetic peptide
QLTEVVQKI

SEQ ID NO: 12860 - protein, 9 aa, synthetic construct
  REGION 1..9: note = Description of Artificial Sequence: Synthetic peptide
GLCTNVSTV

SEQ ID NO: 12861 - protein, 9 aa, synthetic construct
  REGION 1..9: note = Description of Artificial Sequence: Synthetic peptide
GLYPPLTSL

SEQ ID NO: 12862 - protein, 9 aa, synthetic construct
  REGION 1..9: note = Description of Artificial Sequence: Synthetic peptide
VVRIEPVGV

SEQ ID NO: 12863 - protein, 9 aa, synthetic construct
  REGION 1..9: note = Description of Artificial Sequence: Synthetic peptide
QLQARILAV

SEQ ID NO: 12864 - protein, 9 aa, synthetic construct
  REGION 1..9: note = Description of Artificial Sequence: Synthetic peptide
KVKPPLPSV

SEQ ID NO: 12865 - protein, 10 aa, synthetic construct
  REGION 1..10: note = Description of Artificial Sequence: Synthetic peptide
YLKDQQLLGI

SEQ ID NO: 12866 - protein, 9 aa, synthetic construct
  REGION 1..9: note = Description of Artificial Sequence: Synthetic peptide
KIKPPLPSV

SEQ ID NO: 12867 - protein, 8 aa, synthetic construct
  REGION 1..8: note = Description of Artificial Sequence: Synthetic peptide
VLAVINRV

SEQ ID NO: 12868 - protein, 9 aa, synthetic construct
  REGION 1..9: note = Description of Artificial Sequence: Synthetic peptide
AVLSVVNRV

SEQ ID NO: 12869 - protein, 9 aa, synthetic construct
  REGION 1..9: note = Description of Artificial Sequence: Synthetic peptide
ALFYKLDVV

SEQ ID NO: 12870 - protein, 10 aa, synthetic construct
  REGION 1..10: note = Description of Artificial Sequence: Synthetic peptide
TLWNATLNRV

SEQ ID NO: 12871 - protein, 8 aa, synthetic construct
  REGION 1..8: note = Description of Artificial Sequence: Synthetic peptide
VLSVVNRV

SEQ ID NO: 12872 - protein, 9 aa, synthetic construct
  REGION 1..9: note = Description of Artificial Sequence: Synthetic peptide
AAAPGVGAV

SEQ ID NO: 12873 - protein, 11 aa, synthetic construct
  REGION 1..11: note = Description of Artificial Sequence: Synthetic peptide
FLKEKGGLEGL

SEQ ID NO: 12874 - protein, 10 aa, synthetic construct
  REGION 1..10: note = Description of Artificial Sequence: Synthetic peptide
ALTDVVPLTA

SEQ ID NO: 12875 - protein, 9 aa, synthetic construct
  REGION 1..9: note = Description of Artificial Sequence: Synthetic peptide
GAASITLTV

SEQ ID NO: 12876 - protein, 9 aa, synthetic construct
  REGION 1..9: note = Description of Artificial Sequence: Synthetic peptide
ALNPGLLET

SEQ ID NO: 12877 - protein, 11 aa, synthetic construct
  REGION 1..11: note = Description of Artificial Sequence: Synthetic peptide
FLKEKGGLDGL

SEQ ID NO: 12878 - protein, 9 aa, synthetic construct
  REGION 1..9: note = Description of Artificial Sequence: Synthetic peptide
TLWQRPLVA

SEQ ID NO: 12879 - protein, 9 aa, synthetic construct
  REGION 1..9: note = Description of Artificial Sequence: Synthetic peptide
TLNRVAAEV

SEQ ID NO: 12880 - protein, 9 aa, synthetic construct
  REGION 1..9: note = Description of Artificial Sequence: Synthetic peptide
GLADQLIHL

SEQ ID NO: 12881 - protein, 9 aa, synthetic construct
  REGION 1..9: note = Description of Artificial Sequence: Synthetic peptide
ALSPRTLNA

SEQ ID NO: 12882 - protein, 10 aa, synthetic construct
  REGION 1..10: note = Description of Artificial Sequence: Synthetic peptide
SLFDTIAIAV

SEQ ID NO: 12883 - protein, 9 aa, synthetic construct
  REGION 1..9: note = Description of Artificial Sequence: Synthetic peptide
TLNFPISSI

SEQ ID NO: 12884 - protein, 9 aa, synthetic construct
  REGION 1..9: note = Description of Artificial Sequence: Synthetic peptide
GLCRNVSTV

SEQ ID NO: 12885 - protein, 10 aa, synthetic construct
  REGION 1..10: note = Description of Artificial Sequence: Synthetic peptide
SLLDRTAIAV

SEQ ID NO: 12886 - protein, 9 aa, synthetic construct
  REGION 1..9: note = Description of Artificial Sequence: Synthetic peptide
ELKKIIGQV

SEQ ID NO: 12887 - protein, 9 aa, synthetic construct
  REGION 1..9: note = Description of Artificial Sequence: Synthetic peptide
AVLSIINRV

SEQ ID NO: 12888 - protein, 8 aa, synthetic construct
  REGION 1..8: note = Description of Artificial Sequence: Synthetic peptide
VLSIINRV

SEQ ID NO: 12889 - protein, 10 aa, synthetic construct
  REGION 1..10: note = Description of Artificial Sequence: Synthetic peptide
TLWNKTLEGV

SEQ ID NO: 12890 - protein, 9 aa, synthetic construct
  REGION 1..9: note = Description of Artificial Sequence: Synthetic peptide
TMIRILQQL

SEQ ID NO: 12891 - protein, 9 aa, synthetic construct
  REGION 1..9: note = Description of Artificial Sequence: Synthetic peptide
VAAEGVGKV

SEQ ID NO: 12892 - protein, 9 aa, synthetic construct
  REGION 1..9: note = Description of Artificial Sequence: Synthetic peptide
ALLTAVRTI

SEQ ID NO: 12893 - protein, 10 aa, synthetic construct
  REGION 1..10: note = Description of Artificial Sequence: Synthetic peptide
AMSQVTATSV

SEQ ID NO: 12894 - protein, 9 aa, synthetic construct
  REGION 1..9: note = Description of Artificial Sequence: Synthetic peptide
FIPGDINNL

SEQ ID NO: 12895 - protein, 10 aa, synthetic construct
  REGION 1..10: note = Description of Artificial Sequence: Synthetic peptide
KVVKIEPLGV

SEQ ID NO: 12896 - protein, 9 aa, synthetic construct
  REGION 1..9: note = Description of Artificial Sequence: Synthetic peptide
LLSCNTSTV

SEQ ID NO: 12897 - protein, 11 aa, synthetic construct
  REGION 1..11: note = Description of Artificial Sequence: Synthetic peptide
GLFIPGNINNL

SEQ ID NO: 12898 - protein, 9 aa, synthetic construct
  REGION 1..9: note = Description of Artificial Sequence: Synthetic peptide
AVLAVINRV

SEQ ID NO: 12899 - protein, 9 aa, synthetic construct
  REGION 1..9: note = Description of Artificial Sequence: Synthetic peptide
SLYNAVVVL

SEQ ID NO: 12900 - protein, 10 aa, synthetic construct
  REGION 1..10: note = Description of Artificial Sequence: Synthetic peptide
GLIGLRIVFA

SEQ ID NO: 12901 - protein, 9 aa, synthetic construct
  REGION 1..9: note = Description of Artificial Sequence: Synthetic peptide
RAAEGVGKV

SEQ ID NO: 12902 - protein, 9 aa, synthetic construct
  REGION 1..9: note = Description of Artificial Sequence: Synthetic peptide
SLYNTVAVL

SEQ ID NO: 12903 - protein, 9 aa, synthetic construct
  REGION 1..9: note = Description of Artificial Sequence: Synthetic peptide
TVLSIINRV

SEQ ID NO: 12904 - protein, 9 aa, synthetic construct
  REGION 1..9: note = Description of Artificial Sequence: Synthetic peptide
YAAPIAGQI

SEQ ID NO: 12905 - protein, 9 aa, synthetic construct
  REGION 1..9: note = Description of Artificial Sequence: Synthetic peptide
SLSPRTLNA

SEQ ID NO: 12906 - protein, 9 aa, synthetic construct
  REGION 1..9: note = Description of Artificial Sequence: Synthetic peptide
LLAVGISAL

SEQ ID NO: 12907 - protein, 9 aa, synthetic construct
  REGION 1..9: note = Description of Artificial Sequence: Synthetic peptide
SLAEKNIII

SEQ ID NO: 12908 - protein, 10 aa, synthetic construct
  REGION 1..10: note = Description of Artificial Sequence: Synthetic peptide
TLWNETLKNV

SEQ ID NO: 12909 - protein, 10 aa, synthetic construct
  REGION 1..10: note = Description of Artificial Sequence: Synthetic peptide
RLYERIIERA

SEQ ID NO: 12910 - protein, 10 aa, synthetic construct
  REGION 1..10: note = Description of Artificial Sequence: Synthetic peptide
HLRDFILIAA

SEQ ID NO: 12911 - protein, 9 aa, synthetic construct
  REGION 1..9: note = Description of Artificial Sequence: Synthetic peptide
SLFNTIVVL

SEQ ID NO: 12912 - protein, 10 aa, synthetic construct
  REGION 1..10: note = Description of Artificial Sequence: Synthetic peptide
KLVSTGIRKV

SEQ ID NO: 12913 - protein, 9 aa, synthetic construct
  REGION 1..9: note = Description of Artificial Sequence: Synthetic peptide
QLTEVVQKV

SEQ ID NO: 12914 - protein, 9 aa, synthetic construct
  REGION 1..9: note = Description of Artificial Sequence: Synthetic peptide
GLADQLIHL

SEQ ID NO: 12915 - protein, 9 aa, synthetic construct
  REGION 1..9: note = Description of Artificial Sequence: Synthetic peptide
FIPGNINNL

SEQ ID NO: 12916 - protein, 9 aa, synthetic construct
  REGION 1..9: note = Description of Artificial Sequence: Synthetic peptide
AVLSIINRV

SEQ ID NO: 12917 - protein, 9 aa, synthetic construct
  REGION 1..9: note = Description of Artificial Sequence: Synthetic peptide
SITNWLWYI

SEQ ID NO: 12918 - protein, 9 aa, synthetic construct
  REGION 1..9: note = Description of Artificial Sequence: Synthetic peptide
TVLSIINRV

SEQ ID NO: 12919 - protein, 9 aa, synthetic construct
  REGION 1..9: note = Description of Artificial Sequence: Synthetic peptide
SLFNTIVVL

SEQ ID NO: 12920 - protein, 9 aa, synthetic construct
  REGION 1..9: note = Description of Artificial Sequence: Synthetic peptide
AVLSVVNRV

SEQ ID NO: 12921 - protein, 9 aa, synthetic construct
  REGION 1..9: note = Description of Artificial Sequence: Synthetic peptide
AVLAVINRV

SEQ ID NO: 12922 - protein, 9 aa, synthetic construct
  REGION 1..9: note = Description of Artificial Sequence: Synthetic peptide
QLTEVVQKI

SEQ ID NO: 12923 - protein, 9 aa, synthetic construct
  REGION 1..9: note = Description of Artificial Sequence: Synthetic peptide
ILKEPVHGV

SEQ ID NO: 12924 - protein, 9 aa, synthetic construct
  REGION 1..9: note = Description of Artificial Sequence: Synthetic peptide
EVLKYLWNL

SEQ ID NO: 12925 - protein, 9 aa, synthetic construct
  REGION 1..9: note = Description of Artificial Sequence: Synthetic peptide
TITNWLWYI

SEQ ID NO: 12926 - protein, 9 aa, synthetic construct
  REGION 1..9: note = Description of Artificial Sequence: Synthetic peptide
GLYPPLTSL

SEQ ID NO: 12927 - protein, 9 aa, synthetic construct
  REGION 1..9: note = Description of Artificial Sequence: Synthetic peptide
ILAIIVWTI

SEQ ID NO: 12928 - protein, 10 aa, synthetic construct
  REGION 1..10: note = Description of Artificial Sequence: Synthetic peptide
ALTDVVPLTV

SEQ ID NO: 12929 - protein, 9 aa, synthetic construct
  REGION 1..9: note = Description of Artificial Sequence: Synthetic peptide
IVNQIIEQL

SEQ ID NO: 12930 - protein, 9 aa, synthetic construct
  REGION 1..9: note = Description of Artificial Sequence: Synthetic peptide
SLYNAVVVL

SEQ ID NO: 12931 - protein, 10 aa, synthetic construct
  REGION 1..10: note = Description of Artificial Sequence: Synthetic peptide
SLLDRTAIAV

SEQ ID NO: 12932 - protein, 9 aa, synthetic construct
  REGION 1..9: note = Description of Artificial Sequence: Synthetic peptide
ALLTAVRTI

SEQ ID NO: 12933 - protein, 9 aa, synthetic construct
  REGION 1..9: note = Description of Artificial Sequence: Synthetic peptide
TLNAWVKVI

SEQ ID NO: 12934 - protein, 11 aa, synthetic construct
  REGION 1..11: note = Description of Artificial Sequence: Synthetic peptide
GLFIPGNINNL

SEQ ID NO: 12935 - protein, 9 aa, synthetic construct
  REGION 1..9: note = Description of Artificial Sequence: Synthetic peptide
KQQALFYRL

SEQ ID NO: 12936 - protein, 10 aa, synthetic construct
  REGION 1..10: note = Description of Artificial Sequence: Synthetic peptide
TLWQRPLVTI

SEQ ID NO: 12937 - protein, 9 aa, synthetic construct
  REGION 1..9: note = Description of Artificial Sequence: Synthetic peptide
IIKEPVHGV

SEQ ID NO: 12938 - protein, 9 aa, synthetic construct
  REGION 1..9: note = Description of Artificial Sequence: Synthetic peptide
FQLPPLERL

SEQ ID NO: 12939 - protein, 9 aa, synthetic construct
  REGION 1..9: note = Description of Artificial Sequence: Synthetic peptide
LVNQIIEQL

SEQ ID NO: 12940 - protein, 10 aa, synthetic construct
  REGION 1..10: note = Description of Artificial Sequence: Synthetic peptide
SLFDTIAIAV

SEQ ID NO: 12941 - protein, 9 aa, synthetic construct
  REGION 1..9: note = Description of Artificial Sequence: Synthetic peptide
AIVAYIVAI

SEQ ID NO: 12942 - protein, 9 aa, synthetic construct
  REGION 1..9: note = Description of Artificial Sequence: Synthetic peptide
KIKPPLPSV

SEQ ID NO: 12943 - protein, 9 aa, synthetic construct
  REGION 1..9: note = Description of Artificial Sequence: Synthetic peptide
ILAEAMSQV

SEQ ID NO: 12944 - protein, 9 aa, synthetic construct
  REGION 1..9: note = Description of Artificial Sequence: Synthetic peptide
ALFYKLDVV

SEQ ID NO: 12945 - protein, 9 aa, synthetic construct
  REGION 1..9: note = Description of Artificial Sequence: Synthetic peptide
SLYNTVAVL

SEQ ID NO: 12946 - protein, 10 aa, synthetic construct
  REGION 1..10: note = Description of Artificial Sequence: Synthetic peptide
TLWNATLNRV

SEQ ID NO: 12947 - protein, 9 aa, synthetic construct
  REGION 1..9: note = Description of Artificial Sequence: Synthetic peptide
HLEGKIILV

SEQ ID NO: 12948 - protein, 9 aa, synthetic construct
  REGION 1..9: note = Description of Artificial Sequence: Synthetic peptide
IITIIVWTI

SEQ ID NO: 12949 - protein, 9 aa, synthetic construct
  REGION 1..9: note = Description of Artificial Sequence: Synthetic peptide
LQLPLLEKL

SEQ ID NO: 12950 - protein, 9 aa, synthetic construct
  REGION 1..9: note = Description of Artificial Sequence: Synthetic peptide
QLQARILAV

SEQ ID NO: 12951 - protein, 10 aa, synthetic construct
  REGION 1..10: note = Description of Artificial Sequence: Synthetic peptide
NLAQYWGQEL

SEQ ID NO: 12952 - protein, 9 aa, synthetic construct
  REGION 1..9: note = Description of Artificial Sequence: Synthetic peptide
ALGEVGPLI

SEQ ID NO: 12953 - protein, 9 aa, synthetic construct
  REGION 1..9: note = Description of Artificial Sequence: Synthetic peptide
RLYERIIER

SEQ ID NO: 12954 - protein, 9 aa, synthetic construct
  REGION 1..9: note = Description of Artificial Sequence: Synthetic peptide
SITRWLWYI

SEQ ID NO: 12955 - protein, 9 aa, synthetic construct
  REGION 1..9: note = Description of Artificial Sequence: Synthetic peptide
ALTDVVPLT

SEQ ID NO: 12956 - protein, 9 aa, synthetic construct
  REGION 1..9: note = Description of Artificial Sequence: Synthetic peptide
VIWGKIPKF

SEQ ID NO: 12957 - protein, 9 aa, synthetic construct
  REGION 1..9: note = Description of Artificial Sequence: Synthetic peptide
AALDLSHFL

SEQ ID NO: 12958 - protein, 9 aa, synthetic construct
  REGION 1..9: note = Description of Artificial Sequence: Synthetic peptide
KVKPPLPSV

SEQ ID NO: 12959 - protein, 10 aa, synthetic construct
  REGION 1..10: note = Description of Artificial Sequence: Synthetic peptide
TLWQRPLVAI

SEQ ID NO: 12960 - protein, 9 aa, synthetic construct
  REGION 1..9: note = Description of Artificial Sequence: Synthetic peptide
GVQAIIRTL

SEQ ID NO: 12961 - protein, 9 aa, synthetic construct
  REGION 1..9: note = Description of Artificial Sequence: Synthetic peptide
TLNRVAAEV

SEQ ID NO: 12962 - protein, 11 aa, synthetic construct
  REGION 1..11: note = Description of Artificial Sequence: Synthetic peptide
VLFQLPPLERL

SEQ ID NO: 12963 - protein, 9 aa, synthetic construct
  REGION 1..9: note = Description of Artificial Sequence: Synthetic peptide
LLNTTAIVV

SEQ ID NO: 12964 - protein, 9 aa, synthetic construct
  REGION 1..9: note = Description of Artificial Sequence: Synthetic peptide
TMIRILQQL

SEQ ID NO: 12965 - protein, 9 aa, synthetic construct
  REGION 1..9: note = Description of Artificial Sequence: Synthetic peptide
MIIGSLIGL

SEQ ID NO: 12966 - protein, 9 aa, synthetic construct
  REGION 1..9: note = Description of Artificial Sequence: Synthetic peptide
VIWGKVPKF

SEQ ID NO: 12967 - protein, 9 aa, synthetic construct
  REGION 1..9: note = Description of Artificial Sequence: Synthetic peptide
IVTDSQYAL

SEQ ID NO: 12968 - protein, 9 aa, synthetic construct
  REGION 1..9: note = Description of Artificial Sequence: Synthetic peptide
FIPGDINNL

SEQ ID NO: 12969 - protein, 11 aa, synthetic construct
  REGION 1..11: note = Description of Artificial Sequence: Synthetic peptide
FLKEKGGLEGL

SEQ ID NO: 12970 - protein, 10 aa, synthetic construct
  REGION 1..10: note = Description of Artificial Sequence: Synthetic peptide
TLWNKTLEGV

SEQ ID NO: 12971 - protein, 9 aa, synthetic construct
  REGION 1..9: note = Description of Artificial Sequence: Synthetic peptide
ALGEVGPFI

SEQ ID NO: 12972 - protein, 9 aa, synthetic construct
  REGION 1..9: note = Description of Artificial Sequence: Synthetic peptide
GISALIVAL

SEQ ID NO: 12973 - protein, 9 aa, synthetic construct
  REGION 1..9: note = Description of Artificial Sequence: Synthetic peptide
ALNPGLLET

SEQ ID NO: 12974 - protein, 9 aa, synthetic construct
  REGION 1..9: note = Description of Artificial Sequence: Synthetic peptide
VIVAFIVAL

SEQ ID NO: 12975 - protein, 8 aa, synthetic construct
  REGION 1..8: note = Description of Artificial Sequence: Synthetic peptide
YTGTIYKL

SEQ ID NO: 12976 - protein, 9 aa, synthetic construct
  REGION 1..9: note = Description of Artificial Sequence: Synthetic peptide
LLQLTVWGI

SEQ ID NO: 12977 - protein, 9 aa, synthetic construct
  REGION 1..9: note = Description of Artificial Sequence: Synthetic peptide
LLDRTAIAV

SEQ ID NO: 12978 - protein, 9 aa, synthetic construct
  REGION 1..9: note = Description of Artificial Sequence: Synthetic peptide
TLQEQIAWM

SEQ ID NO: 12979 - protein, 9 aa, synthetic construct
  REGION 1..9: note = Description of Artificial Sequence: Synthetic peptide
AIIRILQQL

SEQ ID NO: 12980 - protein, 11 aa, synthetic construct
  REGION 1..11: note = Description of Artificial Sequence: Synthetic peptide
VQLGIPHPAGL

SEQ ID NO: 12981 - protein, 10 aa, synthetic construct
  REGION 1..10: note = Description of Artificial Sequence: Synthetic peptide
RTQDFWEVQL

SEQ ID NO: 12982 - protein, 9 aa, synthetic construct
  REGION 1..9: note = Description of Artificial Sequence: Synthetic peptide
YQLETEPIL

SEQ ID NO: 12983 - protein, 10 aa, synthetic construct
  REGION 1..10: note = Description of Artificial Sequence: Synthetic peptide
KLDDLEKIRL

SEQ ID NO: 12984 - protein, 10 aa, synthetic construct
  REGION 1..10: note = Description of Artificial Sequence: Synthetic peptide
RLQEPVRLQL

SEQ ID NO: 12985 - protein, 10 aa, synthetic construct
  REGION 1..10: note = Description of Artificial Sequence: Synthetic peptide
TLWQRPVVTI

SEQ ID NO: 12986 - protein, 9 aa, synthetic construct
  REGION 1..9: note = Description of Artificial Sequence: Synthetic peptide
YQSNPYPKL

SEQ ID NO: 12987 - protein, 9 aa, synthetic construct
  REGION 1..9: note = Description of Artificial Sequence: Synthetic peptide
TLQEQITWM

SEQ ID NO: 12988 - protein, 8 aa, synthetic construct
  REGION 1..8: note = Description of Artificial Sequence: Synthetic peptide
KILEPFRV

SEQ ID NO: 12989 - protein, 9 aa, synthetic construct
  REGION 1..9: note = Description of Artificial Sequence: Synthetic peptide
TINGTLWNA

SEQ ID NO: 12990 - protein, 9 aa, synthetic construct
  REGION 1..9: note = Description of Artificial Sequence: Synthetic peptide
IIVWTIVYL

SEQ ID NO: 12991 - protein, 9 aa, synthetic construct
  REGION 1..9: note = Description of Artificial Sequence: Synthetic peptide
LLAVGISAL

SEQ ID NO: 12992 - protein, 9 aa, synthetic construct
  REGION 1..9: note = Description of Artificial Sequence: Synthetic peptide
LTLGWCFKL

SEQ ID NO: 12993 - protein, 9 aa, synthetic construct
  REGION 1..9: note = Description of Artificial Sequence: Synthetic peptide
KLTPLCVTL

SEQ ID NO: 12994 - protein, 9 aa, synthetic construct
  REGION 1..9: note = Description of Artificial Sequence: Synthetic peptide
NTVAVLYYV

SEQ ID NO: 12995 - protein, 9 aa, synthetic construct
  REGION 1..9: note = Description of Artificial Sequence: Synthetic peptide
FIPGNINNL

SEQ ID NO: 12996 - protein, 9 aa, synthetic construct
  REGION 1..9: note = Description of Artificial Sequence: Synthetic peptide
QLTEVVQKV

SEQ ID NO: 12997 - protein, 9 aa, synthetic construct
  REGION 1..9: note = Description of Artificial Sequence: Synthetic peptide
FIPGDINNL

SEQ ID NO: 12998 - protein, 9 aa, synthetic construct
  REGION 1..9: note = Description of Artificial Sequence: Synthetic peptide
QLTEVVQKI

SEQ ID NO: 12999 - protein, 9 aa, synthetic construct
  REGION 1..9: note = Description of Artificial Sequence: Synthetic peptide
VVIQDNNEI

SEQ ID NO: 13000 - protein, 9 aa, synthetic construct
  REGION 1..9: note = Description of Artificial Sequence: Synthetic peptide
RVIEILQRA

SEQ ID NO: 13001 - protein, 9 aa, synthetic construct
  REGION 1..9: note = Description of Artificial Sequence: Synthetic peptide
AAVDLSHFL

SEQ ID NO: 13002 - protein, 9 aa, synthetic construct
  REGION 1..9: note = Description of Artificial Sequence: Synthetic peptide
ILAEAMSKA

SEQ ID NO: 13003 - protein, 9 aa, synthetic construct
  REGION 1..9: note = Description of Artificial Sequence: Synthetic peptide
VVAEGTDRV

SEQ ID NO: 13004 - protein, 9 aa, synthetic construct
  REGION 1..9: note = Description of Artificial Sequence: Synthetic peptide
ILAEAMSQV

SEQ ID NO: 13005 - protein, 9 aa, synthetic construct
  REGION 1..9: note = Description of Artificial Sequence: Synthetic peptide
AVLSVVNRV

SEQ ID NO: 13006 - protein, 9 aa, synthetic construct
  REGION 1..9: note = Description of Artificial Sequence: Synthetic peptide
TVLSIINRV

SEQ ID NO: 13007 - protein, 9 aa, synthetic construct
  REGION 1..9: note = Description of Artificial Sequence: Synthetic peptide
AVAEGTDRI

SEQ ID NO: 13008 - protein, 9 aa, synthetic construct
  REGION 1..9: note = Description of Artificial Sequence: Synthetic peptide
AAITLTAQA

SEQ ID NO: 13009 - protein, 9 aa, synthetic construct
  REGION 1..9: note = Description of Artificial Sequence: Synthetic peptide
KAIEAQQHL

SEQ ID NO: 13010 - protein, 9 aa, synthetic construct
  REGION 1..9: note = Description of Artificial Sequence: Synthetic peptide
VVAEGTDRI

SEQ ID NO: 13011 - protein, 9 aa, synthetic construct
  REGION 1..9: note = Description of Artificial Sequence: Synthetic peptide
GAVDLSHFL

SEQ ID NO: 13012 - protein, 9 aa, synthetic construct
  REGION 1..9: note = Description of Artificial Sequence: Synthetic peptide
IVNQIIEQL

SEQ ID NO: 13013 - protein, 9 aa, synthetic construct
  REGION 1..9: note = Description of Artificial Sequence: Synthetic peptide
AVLAVINRV

SEQ ID NO: 13014 - protein, 9 aa, synthetic construct
  REGION 1..9: note = Description of Artificial Sequence: Synthetic peptide
AVLSIINRV

SEQ ID NO: 13015 - protein, 9 aa, synthetic construct
  REGION 1..9: note = Description of Artificial Sequence: Synthetic peptide
LIPGDINNL

SEQ ID NO: 13016 - protein, 9 aa, synthetic construct
  REGION 1..9: note = Description of Artificial Sequence: Synthetic peptide
VQFNESVKI

SEQ ID NO: 13017 - protein, 11 aa, synthetic construct
  REGION 1..11: note = Description of Artificial Sequence: Synthetic peptide
TQVDPDLADQL

SEQ ID NO: 13018 - protein, 11 aa, synthetic construct
  REGION 1..11: note = Description of Artificial Sequence: Synthetic peptide
TQVDPGLADQL

SEQ ID NO: 13019 - protein, 9 aa, synthetic construct
  REGION 1..9: note = Description of Artificial Sequence: Synthetic peptide
AEAMSQVTA

SEQ ID NO: 13020 - protein, 9 aa, synthetic construct
  REGION 1..9: note = Description of Artificial Sequence: Synthetic peptide
EQAPPLVSL

SEQ ID NO: 13021 - protein, 9 aa, synthetic construct
  REGION 1..9: note = Description of Artificial Sequence: Synthetic peptide
SAISLFDTI

SEQ ID NO: 13022 - protein, 9 aa, synthetic construct
  REGION 1..9: note = Description of Artificial Sequence: Synthetic peptide
WTVNDIQKL

SEQ ID NO: 13023 - protein, 9 aa, synthetic construct
  REGION 1..9: note = Description of Artificial Sequence: Synthetic peptide
ATLEEMMTA

SEQ ID NO: 13024 - protein, 9 aa, synthetic construct
  REGION 1..9: note = Description of Artificial Sequence: Synthetic peptide
GAASITLTV

SEQ ID NO: 13025 - protein, 9 aa, synthetic construct
  REGION 1..9: note = Description of Artificial Sequence: Synthetic peptide
IVTDSQYAL

SEQ ID NO: 13026 - protein, 10 aa, synthetic construct
  REGION 1..10: note = Description of Artificial Sequence: Synthetic peptide
KAYDPEVHNV

SEQ ID NO: 13027 - protein, 9 aa, synthetic construct
  REGION 1..9: note = Description of Artificial Sequence: Synthetic peptide
SEIHQNPVP

SEQ ID NO: 13028 - protein, 9 aa, synthetic construct
  REGION 1..9: note = Description of Artificial Sequence: Synthetic peptide
IIKEPVHGV

SEQ ID NO: 13029 - protein, 9 aa, synthetic construct
  REGION 1..9: note = Description of Artificial Sequence: Synthetic peptide
EQVPPLISL

SEQ ID NO: 13030 - protein, 9 aa, synthetic construct
  REGION 1..9: note = Description of Artificial Sequence: Synthetic peptide
SQVTATSVL

SEQ ID NO: 13031 - protein, 9 aa, synthetic construct
  REGION 1..9: note = Description of Artificial Sequence: Synthetic peptide
AIVAYIVAI

SEQ ID NO: 13032 - protein, 9 aa, synthetic construct
  REGION 1..9: note = Description of Artificial Sequence: Synthetic peptide
LVNQIIEQL

SEQ ID NO: 13033 - protein, 9 aa, synthetic construct
  REGION 1..9: note = Description of Artificial Sequence: Synthetic peptide
FTSAVVKAA

SEQ ID NO: 13034 - protein, 9 aa, synthetic construct
  REGION 1..9: note = Description of Artificial Sequence: Synthetic peptide
ASITLTVQA

SEQ ID NO: 13035 - protein, 10 aa, synthetic construct
  REGION 1..10: note = Description of Artificial Sequence: Synthetic peptide
SQYALGIIQA

SEQ ID NO: 13036 - protein, 9 aa, synthetic construct
  REGION 1..9: note = Description of Artificial Sequence: Synthetic peptide
RIIEVLQRA

SEQ ID NO: 13037 - protein, 9 aa, synthetic construct
  REGION 1..9: note = Description of Artificial Sequence: Synthetic peptide
SQVTSTSIL

SEQ ID NO: 13038 - protein, 9 aa, synthetic construct
  REGION 1..9: note = Description of Artificial Sequence: Synthetic peptide
TTALFNTTL

SEQ ID NO: 13039 - protein, 9 aa, synthetic construct
  REGION 1..9: note = Description of Artificial Sequence: Synthetic peptide
TIYRLIEEA

SEQ ID NO: 13040 - protein, 9 aa, synthetic construct
  REGION 1..9: note = Description of Artificial Sequence: Synthetic peptide
RIIEILQRA

SEQ ID NO: 13041 - protein, 9 aa, synthetic construct
  REGION 1..9: note = Description of Artificial Sequence: Synthetic peptide
YAAPIAGQI

SEQ ID NO: 13042 - protein, 9 aa, synthetic construct
  REGION 1..9: note = Description of Artificial Sequence: Synthetic peptide
MVVGGLIGL

SEQ ID NO: 13043 - protein, 11 aa, synthetic construct
  REGION 1..11: note = Description of Artificial Sequence: Synthetic peptide
VVIQDNNEIKV

SEQ ID NO: 13044 - protein, 9 aa, synthetic construct
  REGION 1..9: note = Description of Artificial Sequence: Synthetic peptide
RVAAEVKNL

SEQ ID NO: 13045 - protein, 9 aa, synthetic construct
  REGION 1..9: note = Description of Artificial Sequence: Synthetic peptide
YQSNPYPKL

SEQ ID NO: 13046 - protein, 10 aa, synthetic construct
  REGION 1..10: note = Description of Artificial Sequence: Synthetic peptide
GEIIGDIRKA

SEQ ID NO: 13047 - protein, 9 aa, synthetic construct
  REGION 1..9: note = Description of Artificial Sequence: Synthetic peptide
TTSNLQEQI

SEQ ID NO: 13048 - protein, 9 aa, synthetic construct
  REGION 1..9: note = Description of Artificial Sequence: Synthetic peptide
FTSTVVKAA

SEQ ID NO: 13049 - protein, 9 aa, synthetic construct
  REGION 1..9: note = Description of Artificial Sequence: Synthetic peptide
TETLLVQNA

SEQ ID NO: 13050 - protein, 9 aa, synthetic construct
  REGION 1..9: note = Description of Artificial Sequence: Synthetic peptide
MIIGSLIGL

SEQ ID NO: 13051 - protein, 10 aa, synthetic construct
  REGION 1..10: note = Description of Artificial Sequence: Synthetic peptide
GVAKEVQSHL

SEQ ID NO: 13052 - protein, 9 aa, synthetic construct
  REGION 1..9: note = Description of Artificial Sequence: Synthetic peptide
TIYRLIESA

SEQ ID NO: 13053 - protein, 9 aa, synthetic construct
  REGION 1..9: note = Description of Artificial Sequence: Synthetic peptide
KVKPPLPSV

SEQ ID NO: 13054 - protein, 9 aa, synthetic construct
  REGION 1..9: note = Description of Artificial Sequence: Synthetic peptide
ILKEPVHGV

SEQ ID NO: 13055 - protein, 11 aa, synthetic construct
  REGION 1..11: note = Description of Artificial Sequence: Synthetic peptide
EVIPAETGQEA

SEQ ID NO: 13056 - protein, 9 aa, synthetic construct
  REGION 1..9: note = Description of Artificial Sequence: Synthetic peptide
TVLGDIRKA

SEQ ID NO: 13057 - protein, 9 aa, synthetic construct
  REGION 1..9: note = Description of Artificial Sequence: Synthetic peptide
QLTEVVQKV

SEQ ID NO: 13058 - protein, 9 aa, synthetic construct
  REGION 1..9: note = Description of Artificial Sequence: Synthetic peptide
AVLAVINRV

SEQ ID NO: 13059 - protein, 9 aa, synthetic construct
  REGION 1..9: note = Description of Artificial Sequence: Synthetic peptide
AVLSVVNRV

SEQ ID NO: 13060 - protein, 9 aa, synthetic construct
  REGION 1..9: note = Description of Artificial Sequence: Synthetic peptide
QLTEVVQKI

SEQ ID NO: 13061 - protein, 9 aa, synthetic construct
  REGION 1..9: note = Description of Artificial Sequence: Synthetic peptide
IQDNNEIKV

SEQ ID NO: 13062 - protein, 9 aa, synthetic construct
  REGION 1..9: note = Description of Artificial Sequence: Synthetic peptide
IVTDSQYAL

SEQ ID NO: 13063 - protein, 9 aa, synthetic construct
  REGION 1..9: note = Description of Artificial Sequence: Synthetic peptide
AVLSIINRV

SEQ ID NO: 13064 - protein, 9 aa, synthetic construct
  REGION 1..9: note = Description of Artificial Sequence: Synthetic peptide
FIPGNINNL

SEQ ID NO: 13065 - protein, 9 aa, synthetic construct
  REGION 1..9: note = Description of Artificial Sequence: Synthetic peptide
VVIQDNNEI

SEQ ID NO: 13066 - protein, 9 aa, synthetic construct
  REGION 1..9: note = Description of Artificial Sequence: Synthetic peptide
SAISLFDTI

SEQ ID NO: 13067 - protein, 9 aa, synthetic construct
  REGION 1..9: note = Description of Artificial Sequence: Synthetic peptide
AAVDLSHFL

SEQ ID NO: 13068 - protein, 9 aa, synthetic construct
  REGION 1..9: note = Description of Artificial Sequence: Synthetic peptide
MVVGGLIGL

SEQ ID NO: 13069 - protein, 9 aa, synthetic construct
  REGION 1..9: note = Description of Artificial Sequence: Synthetic peptide
RVIEILQRA

SEQ ID NO: 13070 - protein, 9 aa, synthetic construct
  REGION 1..9: note = Description of Artificial Sequence: Synthetic peptide
AIVAYIVAI

SEQ ID NO: 13071 - protein, 9 aa, synthetic construct
  REGION 1..9: note = Description of Artificial Sequence: Synthetic peptide
TVTQACPKV

SEQ ID NO: 13072 - protein, 9 aa, synthetic construct
  REGION 1..9: note = Description of Artificial Sequence: Synthetic peptide
ILAEAMSQV

SEQ ID NO: 13073 - protein, 11 aa, synthetic construct
  REGION 1..11: note = Description of Artificial Sequence: Synthetic peptide
VVIQDNNEIKV

SEQ ID NO: 13074 - protein, 11 aa, synthetic construct
  REGION 1..11: note = Description of Artificial Sequence: Synthetic peptide
TQVDPGLADQL

SEQ ID NO: 13075 - protein, 9 aa, synthetic construct
  REGION 1..9: note = Description of Artificial Sequence: Synthetic peptide
GGIGGFIKV

SEQ ID NO: 13076 - protein, 9 aa, synthetic construct
  REGION 1..9: note = Description of Artificial Sequence: Synthetic peptide
YQLETEPIL

SEQ ID NO: 13077 - protein, 9 aa, synthetic construct
  REGION 1..9: note = Description of Artificial Sequence: Synthetic peptide
TVLSIINRV

SEQ ID NO: 13078 - protein, 9 aa, synthetic construct
  REGION 1..9: note = Description of Artificial Sequence: Synthetic peptide
FIPGDINNL

SEQ ID NO: 13079 - protein, 9 aa, synthetic construct
  REGION 1..9: note = Description of Artificial Sequence: Synthetic peptide
KAIEAQQHL

SEQ ID NO: 13080 - protein, 10 aa, synthetic construct
  REGION 1..10: note = Description of Artificial Sequence: Synthetic peptide
TVLDVGDAYF

SEQ ID NO: 13081 - protein, 9 aa, synthetic construct
  REGION 1..9: note = Description of Artificial Sequence: Synthetic peptide
GAVDLSHFL

SEQ ID NO: 13082 - protein, 9 aa, synthetic construct
  REGION 1..9: note = Description of Artificial Sequence: Synthetic peptide
VVAEGTDRV

SEQ ID NO: 13083 - protein, 11 aa, synthetic construct
  REGION 1..11: note = Description of Artificial Sequence: Synthetic peptide
TQVDPDLADQL

SEQ ID NO: 13084 - protein, 9 aa, synthetic construct
  REGION 1..9: note = Description of Artificial Sequence: Synthetic peptide
MIIGSLIGL

SEQ ID NO: 13085 - protein, 9 aa, synthetic construct
  REGION 1..9: note = Description of Artificial Sequence: Synthetic peptide
EQVPPLISL

SEQ ID NO: 13086 - protein, 10 aa, synthetic construct
  REGION 1..10: note = Description of Artificial Sequence: Synthetic peptide
KVVKIEPLGV

SEQ ID NO: 13087 - protein, 9 aa, synthetic construct
  REGION 1..9: note = Description of Artificial Sequence: Synthetic peptide
VQFNESVKI

SEQ ID NO: 13088 - protein, 9 aa, synthetic construct
  REGION 1..9: note = Description of Artificial Sequence: Synthetic peptide
GAASITLTV

SEQ ID NO: 13089 - protein, 9 aa, synthetic construct
  REGION 1..9: note = Description of Artificial Sequence: Synthetic peptide
EQAPPLVSL

SEQ ID NO: 13090 - protein, 9 aa, synthetic construct
  REGION 1..9: note = Description of Artificial Sequence: Synthetic peptide
KVKPPLPSV

SEQ ID NO: 13091 - protein, 9 aa, synthetic construct
  REGION 1..9: note = Description of Artificial Sequence: Synthetic peptide
SQIYPGIRV

SEQ ID NO: 13092 - protein, 9 aa, synthetic construct
  REGION 1..9: note = Description of Artificial Sequence: Synthetic peptide
IVNQIIEQL

SEQ ID NO: 13093 - protein, 9 aa, synthetic construct
  REGION 1..9: note = Description of Artificial Sequence: Synthetic peptide
AAAPGVGAV

SEQ ID NO: 13094 - protein, 9 aa, synthetic construct
  REGION 1..9: note = Description of Artificial Sequence: Synthetic peptide
YQSNPYPKL

SEQ ID NO: 13095 - protein, 9 aa, synthetic construct
  REGION 1..9: note = Description of Artificial Sequence: Synthetic peptide
AVAEGTDRI

SEQ ID NO: 13096 - protein, 9 aa, synthetic construct
  REGION 1..9: note = Description of Artificial Sequence: Synthetic peptide
DQVPIEICG

SEQ ID NO: 13097 - protein, 9 aa, synthetic construct
  REGION 1..9: note = Description of Artificial Sequence: Synthetic peptide
GLYPPLTSL

SEQ ID NO: 13098 - protein, 9 aa, synthetic construct
  REGION 1..9: note = Description of Artificial Sequence: Synthetic peptide
AALDLSHFL

SEQ ID NO: 13099 - protein, 9 aa, synthetic construct
  REGION 1..9: note = Description of Artificial Sequence: Synthetic peptide
FLDNVTENF

SEQ ID NO: 13100 - protein, 9 aa, synthetic construct
  REGION 1..9: note = Description of Artificial Sequence: Synthetic peptide
FIPGNINNL

SEQ ID NO: 13101 - protein, 9 aa, synthetic construct
  REGION 1..9: note = Description of Artificial Sequence: Synthetic peptide
YVDRFFKTL

SEQ ID NO: 13102 - protein, 9 aa, synthetic construct
  REGION 1..9: note = Description of Artificial Sequence: Synthetic peptide
QLTEVVQKV

SEQ ID NO: 13103 - protein, 10 aa, synthetic construct
  REGION 1..10: note = Description of Artificial Sequence: Synthetic peptide
KLDDLEKIRL

SEQ ID NO: 13104 - protein, 9 aa, synthetic construct
  REGION 1..9: note = Description of Artificial Sequence: Synthetic peptide
FIPGDINNL

SEQ ID NO: 13105 - protein, 9 aa, synthetic construct
  REGION 1..9: note = Description of Artificial Sequence: Synthetic peptide
AVLSVVNRV

SEQ ID NO: 13106 - protein, 9 aa, synthetic construct
  REGION 1..9: note = Description of Artificial Sequence: Synthetic peptide
AVLAVINRV

SEQ ID NO: 13107 - protein, 9 aa, synthetic construct
  REGION 1..9: note = Description of Artificial Sequence: Synthetic peptide
ATDDLWVTV

SEQ ID NO: 13108 - protein, 9 aa, synthetic construct
  REGION 1..9: note = Description of Artificial Sequence: Synthetic peptide
GTDRIIEVL

SEQ ID NO: 13109 - protein, 9 aa, synthetic construct
  REGION 1..9: note = Description of Artificial Sequence: Synthetic peptide
LLDRTAIAV

SEQ ID NO: 13110 - protein, 9 aa, synthetic construct
  REGION 1..9: note = Description of Artificial Sequence: Synthetic peptide
AVLSIINRV

SEQ ID NO: 13111 - protein, 9 aa, synthetic construct
  REGION 1..9: note = Description of Artificial Sequence: Synthetic peptide
QLTEVVQKI

SEQ ID NO: 13112 - protein, 9 aa, synthetic construct
  REGION 1..9: note = Description of Artificial Sequence: Synthetic peptide
AYDPEVHNV

SEQ ID NO: 13113 - protein, 9 aa, synthetic construct
  REGION 1..9: note = Description of Artificial Sequence: Synthetic peptide
LIPGDINNL

SEQ ID NO: 13114 - protein, 9 aa, synthetic construct
  REGION 1..9: note = Description of Artificial Sequence: Synthetic peptide
AADKLWVTV

SEQ ID NO: 13115 - protein, 9 aa, synthetic construct
  REGION 1..9: note = Description of Artificial Sequence: Synthetic peptide
ILKEPVHGV

SEQ ID NO: 13116 - protein, 9 aa, synthetic construct
  REGION 1..9: note = Description of Artificial Sequence: Synthetic peptide
FLPLTWDDL

SEQ ID NO: 13117 - protein, 9 aa, synthetic construct
  REGION 1..9: note = Description of Artificial Sequence: Synthetic peptide
TVLSIINRV

SEQ ID NO: 13118 - protein, 9 aa, synthetic construct
  REGION 1..9: note = Description of Artificial Sequence: Synthetic peptide
ILAEAMSQV

SEQ ID NO: 13119 - protein, 9 aa, synthetic construct
  REGION 1..9: note = Description of Artificial Sequence: Synthetic peptide
FSPEVIPMF

SEQ ID NO: 13120 - protein, 9 aa, synthetic construct
  REGION 1..9: note = Description of Artificial Sequence: Synthetic peptide
GTDRVIEIL

SEQ ID NO: 13121 - protein, 9 aa, synthetic construct
  REGION 1..9: note = Description of Artificial Sequence: Synthetic peptide
SLDFPQITL

SEQ ID NO: 13122 - protein, 9 aa, synthetic construct
  REGION 1..9: note = Description of Artificial Sequence: Synthetic peptide
HLEGKIILV

SEQ ID NO: 13123 - protein, 9 aa, synthetic construct
  REGION 1..9: note = Description of Artificial Sequence: Synthetic peptide
YTDTIYRLI

SEQ ID NO: 13124 - protein, 9 aa, synthetic construct
  REGION 1..9: note = Description of Artificial Sequence: Synthetic peptide
IIKEPVHGV

SEQ ID NO: 13125 - protein, 9 aa, synthetic construct
  REGION 1..9: note = Description of Artificial Sequence: Synthetic peptide
AADNLWVTV

SEQ ID NO: 13126 - protein, 10 aa, synthetic construct
  REGION 1..10: note = Description of Artificial Sequence: Synthetic peptide
KVVRIEPVGV

SEQ ID NO: 13127 - protein, 9 aa, synthetic construct
  REGION 1..9: note = Description of Artificial Sequence: Synthetic peptide
FIPGNINNL

SEQ ID NO: 13128 - protein, 9 aa, synthetic construct
  REGION 1..9: note = Description of Artificial Sequence: Synthetic peptide
QLTEVVQKV

SEQ ID NO: 13129 - protein, 9 aa, synthetic construct
  REGION 1..9: note = Description of Artificial Sequence: Synthetic peptide
RVAAEVKNL

SEQ ID NO: 13130 - protein, 9 aa, synthetic construct
  REGION 1..9: note = Description of Artificial Sequence: Synthetic peptide
KVKPPLPSV

SEQ ID NO: 13131 - protein, 9 aa, synthetic construct
  REGION 1..9: note = Description of Artificial Sequence: Synthetic peptide
ILAEAMSKA

SEQ ID NO: 13132 - protein, 9 aa, synthetic construct
  REGION 1..9: note = Description of Artificial Sequence: Synthetic peptide
RVIEILQRA

SEQ ID NO: 13133 - protein, 10 aa, synthetic construct
  REGION 1..10: note = Description of Artificial Sequence: Synthetic peptide
KIIGQLQSSL

SEQ ID NO: 13134 - protein, 10 aa, synthetic construct
  REGION 1..10: note = Description of Artificial Sequence: Synthetic peptide
KVVKIEPLGV

SEQ ID NO: 13135 - protein, 9 aa, synthetic construct
  REGION 1..9: note = Description of Artificial Sequence: Synthetic peptide
AVLSIINRV

SEQ ID NO: 13136 - protein, 9 aa, synthetic construct
  REGION 1..9: note = Description of Artificial Sequence: Synthetic peptide
IIKEPVHGV

SEQ ID NO: 13137 - protein, 9 aa, synthetic construct
  REGION 1..9: note = Description of Artificial Sequence: Synthetic peptide
AVLSVVNRV

SEQ ID NO: 13138 - protein, 9 aa, synthetic construct
  REGION 1..9: note = Description of Artificial Sequence: Synthetic peptide
FIPGDINNL

SEQ ID NO: 13139 - protein, 9 aa, synthetic construct
  REGION 1..9: note = Description of Artificial Sequence: Synthetic peptide
IVNQIIEQL

SEQ ID NO: 13140 - protein, 9 aa, synthetic construct
  REGION 1..9: note = Description of Artificial Sequence: Synthetic peptide
AIIRTLQQL

SEQ ID NO: 13141 - protein, 9 aa, synthetic construct
  REGION 1..9: note = Description of Artificial Sequence: Synthetic peptide
VVIQDNNEI

SEQ ID NO: 13142 - protein, 9 aa, synthetic construct
  REGION 1..9: note = Description of Artificial Sequence: Synthetic peptide
KAIEAQQHL

SEQ ID NO: 13143 - protein, 9 aa, synthetic construct
  REGION 1..9: note = Description of Artificial Sequence: Synthetic peptide
KVVSLTETT

SEQ ID NO: 13144 - protein, 9 aa, synthetic construct
  REGION 1..9: note = Description of Artificial Sequence: Synthetic peptide
TIYRLIEEA

SEQ ID NO: 13145 - protein, 9 aa, synthetic construct
  REGION 1..9: note = Description of Artificial Sequence: Synthetic peptide
RIIEVLQRA

SEQ ID NO: 13146 - protein, 9 aa, synthetic construct
  REGION 1..9: note = Description of Artificial Sequence: Synthetic peptide
WTVNDIQKL

SEQ ID NO: 13147 - protein, 9 aa, synthetic construct
  REGION 1..9: note = Description of Artificial Sequence: Synthetic peptide
AEAMSQVTA

SEQ ID NO: 13148 - protein, 9 aa, synthetic construct
  REGION 1..9: note = Description of Artificial Sequence: Synthetic peptide
KVVPLTETT

SEQ ID NO: 13149 - protein, 9 aa, synthetic construct
  REGION 1..9: note = Description of Artificial Sequence: Synthetic peptide
ILAEAMSQV

SEQ ID NO: 13150 - protein, 9 aa, synthetic construct
  REGION 1..9: note = Description of Artificial Sequence: Synthetic peptide
QLTEVVQKI

SEQ ID NO: 13151 - protein, 10 aa, synthetic construct
  REGION 1..10: note = Description of Artificial Sequence: Synthetic peptide
GVAKEVQSHL

SEQ ID NO: 13152 - protein, 9 aa, synthetic construct
  REGION 1..9: note = Description of Artificial Sequence: Synthetic peptide
AIIRILQQL

SEQ ID NO: 13153 - protein, 9 aa, synthetic construct
  REGION 1..9: note = Description of Artificial Sequence: Synthetic peptide
TIYRLIESA

SEQ ID NO: 13154 - protein, 9 aa, synthetic construct
  REGION 1..9: note = Description of Artificial Sequence: Synthetic peptide
TVLSIINRV

SEQ ID NO: 13155 - protein, 9 aa, synthetic construct
  REGION 1..9: note = Description of Artificial Sequence: Synthetic peptide
AVLAVINRV

SEQ ID NO: 13156 - protein, 9 aa, synthetic construct
  REGION 1..9: note = Description of Artificial Sequence: Synthetic peptide
RIIEILQRA

SEQ ID NO: 13157 - protein, 10 aa, synthetic construct
  REGION 1..10: note = Description of Artificial Sequence: Synthetic peptide
KAYDPEVHNV

SEQ ID NO: 13158 - protein, 10 aa, synthetic construct
  REGION 1..10: note = Description of Artificial Sequence: Synthetic peptide
AVVIQDNNEI

SEQ ID NO: 13159 - protein, 10 aa, synthetic construct
  REGION 1..10: note = Description of Artificial Sequence: Synthetic peptide
KQLTEVVQKV

SEQ ID NO: 13160 - protein, 9 aa, synthetic construct
  REGION 1..9: note = Description of Artificial Sequence: Synthetic peptide
KIKPPLPSV

SEQ ID NO: 13161 - protein, 9 aa, synthetic construct
  REGION 1..9: note = Description of Artificial Sequence: Synthetic peptide
LIPGDINNL

SEQ ID NO: 13162 - protein, 9 aa, synthetic construct
  REGION 1..9: note = Description of Artificial Sequence: Synthetic peptide
MVVGGLIGL

SEQ ID NO: 13163 - protein, 10 aa, synthetic construct
  REGION 1..10: note = Description of Artificial Sequence: Synthetic peptide
KIIGQIRDQA

SEQ ID NO: 13164 - protein, 9 aa, synthetic construct
  REGION 1..9: note = Description of Artificial Sequence: Synthetic peptide
IVQQQNNLL

SEQ ID NO: 13165 - protein, 11 aa, synthetic construct
  REGION 1..11: note = Description of Artificial Sequence: Synthetic peptide
ALFNATNMTNA

SEQ ID NO: 13166 - protein, 9 aa, synthetic construct
  REGION 1..9: note = Description of Artificial Sequence: Synthetic peptide
TIYKLIENA

SEQ ID NO: 13167 - protein, 10 aa, synthetic construct
  REGION 1..10: note = Description of Artificial Sequence: Synthetic peptide
KIIGQLQPSL

SEQ ID NO: 13168 - protein, 9 aa, synthetic construct
  REGION 1..9: note = Description of Artificial Sequence: Synthetic peptide
ILKEPVHGV

SEQ ID NO: 13169 - protein, 10 aa, synthetic construct
  REGION 1..10: note = Description of Artificial Sequence: Synthetic peptide
GTVLGDIRKA

SEQ ID NO: 13170 - protein, 10 aa, synthetic construct
  REGION 1..10: note = Description of Artificial Sequence: Synthetic peptide
KAIEAQQHLL

SEQ ID NO: 13171 - protein, 9 aa, synthetic construct
  REGION 1..9: note = Description of Artificial Sequence: Synthetic peptide
FTSAVVKAA

SEQ ID NO: 13172 - protein, 9 aa, synthetic construct
  REGION 1..9: note = Description of Artificial Sequence: Synthetic peptide
EIIGDIRKA

SEQ ID NO: 13173 - protein, 9 aa, synthetic construct
  REGION 1..9: note = Description of Artificial Sequence: Synthetic peptide
FTSTVVKAA

SEQ ID NO: 13174 - protein, 9 aa, synthetic construct
  REGION 1..9: note = Description of Artificial Sequence: Synthetic peptide
AIVAYIVAI

SEQ ID NO: 13175 - protein, 9 aa, synthetic construct
  REGION 1..9: note = Description of Artificial Sequence: Synthetic peptide
GTDRIIEVL

SEQ ID NO: 13176 - protein, 9 aa, synthetic construct
  REGION 1..9: note = Description of Artificial Sequence: Synthetic peptide
MIIGSLIGL

SEQ ID NO: 13177 - protein, 9 aa, synthetic construct
  REGION 1..9: note = Description of Artificial Sequence: Synthetic peptide
VVKIEPLGV

SEQ ID NO: 13178 - protein, 9 aa, synthetic construct
  REGION 1..9: note = Description of Artificial Sequence: Synthetic peptide
TMIRILQQL

SEQ ID NO: 13179 - protein, 11 aa, synthetic construct
  REGION 1..11: note = Description of Artificial Sequence: Synthetic peptide
ATADKGVSKGV

SEQ ID NO: 13180 - protein, 10 aa, synthetic construct
  REGION 1..10: note = Description of Artificial Sequence: Synthetic peptide
ATSTAIMMQK

SEQ ID NO: 13181 - protein, 9 aa, synthetic construct
  REGION 1..9: note = Description of Artificial Sequence: Synthetic peptide
QIYPGIRVK

SEQ ID NO: 13182 - protein, 10 aa, synthetic construct
  REGION 1..10: note = Description of Artificial Sequence: Synthetic peptide
ATGAAIMMQK

SEQ ID NO: 13183 - protein, 9 aa, synthetic construct
  REGION 1..9: note = Description of Artificial Sequence: Synthetic peptide
QIYPGIRIK

SEQ ID NO: 13184 - protein, 10 aa, synthetic construct
  REGION 1..10: note = Description of Artificial Sequence: Synthetic peptide
VTSTSILMQK

SEQ ID NO: 13185 - protein, 10 aa, synthetic construct
  REGION 1..10: note = Description of Artificial Sequence: Synthetic peptide
VTATSVLMQK

SEQ ID NO: 13186 - protein, 10 aa, synthetic construct
  REGION 1..10: note = Description of Artificial Sequence: Synthetic peptide
AMYAPPIAGK

SEQ ID NO: 13187 - protein, 11 aa, synthetic construct
  REGION 1..11: note = Description of Artificial Sequence: Synthetic peptide
QVTSTSILMQK

SEQ ID NO: 13188 - protein, 10 aa, synthetic construct
  REGION 1..10: note = Description of Artificial Sequence: Synthetic peptide
IVQQQSNLLK

SEQ ID NO: 13189 - protein, 11 aa, synthetic construct
  REGION 1..11: note = Description of Artificial Sequence: Synthetic peptide
QVTATSVLMQK

SEQ ID NO: 13190 - protein, 10 aa, synthetic construct
  REGION 1..10: note = Description of Artificial Sequence: Synthetic peptide
GLYPPLTSLK

SEQ ID NO: 13191 - protein, 9 aa, synthetic construct
  REGION 1..9: note = Description of Artificial Sequence: Synthetic peptide
ALTALVTPK

SEQ ID NO: 13192 - protein, 9 aa, synthetic construct
  REGION 1..9: note = Description of Artificial Sequence: Synthetic peptide
RLYERIIER

SEQ ID NO: 13193 - protein, 9 aa, synthetic construct
  REGION 1..9: note = Description of Artificial Sequence: Synthetic peptide
AIFQSSMTK

SEQ ID NO: 13194 - protein, 9 aa, synthetic construct
  REGION 1..9: note = Description of Artificial Sequence: Synthetic peptide
ALTALITPK

SEQ ID NO: 13195 - protein, 9 aa, synthetic construct
  REGION 1..9: note = Description of Artificial Sequence: Synthetic peptide
TSTSILMQK

SEQ ID NO: 13196 - protein, 9 aa, synthetic construct
  REGION 1..9: note = Description of Artificial Sequence: Synthetic peptide
SNYTGTIYK

SEQ ID NO: 13197 - protein, 10 aa, synthetic construct
  REGION 1..10: note = Description of Artificial Sequence: Synthetic peptide
IVQQQNNLLK

SEQ ID NO: 13198 - protein, 9 aa, synthetic construct
  REGION 1..9: note = Description of Artificial Sequence: Synthetic peptide
TATSVLMQK

SEQ ID NO: 13199 - protein, 10 aa, synthetic construct
  REGION 1..10: note = Description of Artificial Sequence: Synthetic peptide
SVLMQKSNFK

SEQ ID NO: 13200 - protein, 8 aa, synthetic construct
  REGION 1..8: note = Description of Artificial Sequence: Synthetic peptide
STAIMMQK

SEQ ID NO: 13201 - protein, 9 aa, synthetic construct
  REGION 1..9: note = Description of Artificial Sequence: Synthetic peptide
GLADQLIHK

SEQ ID NO: 13202 - protein, 11 aa, synthetic construct
  REGION 1..11: note = Description of Artificial Sequence: Synthetic peptide
KVKPPLPSVKK

SEQ ID NO: 13203 - protein, 9 aa, synthetic construct
  REGION 1..9: note = Description of Artificial Sequence: Synthetic peptide
TSTAIMMQK

SEQ ID NO: 13204 - protein, 8 aa, synthetic construct
  REGION 1..8: note = Description of Artificial Sequence: Synthetic peptide
ATSVLMQK

SEQ ID NO: 13205 - protein, 9 aa, synthetic construct
  REGION 1..9: note = Description of Artificial Sequence: Synthetic peptide
AIRNAILGH

SEQ ID NO: 13206 - protein, 9 aa, synthetic construct
  REGION 1..9: note = Description of Artificial Sequence: Synthetic peptide
KLVSTGIRK

SEQ ID NO: 13207 - protein, 10 aa, synthetic construct
  REGION 1..10: note = Description of Artificial Sequence: Synthetic peptide
KVKPPLPSVK

SEQ ID NO: 13208 - protein, 9 aa, synthetic construct
  REGION 1..9: note = Description of Artificial Sequence: Synthetic peptide
LLNGSLAEK

SEQ ID NO: 13209 - protein, 10 aa, synthetic construct
  REGION 1..10: note = Description of Artificial Sequence: Synthetic peptide
KTFNGTGLCR

SEQ ID NO: 13210 - protein, 9 aa, synthetic construct
  REGION 1..9: note = Description of Artificial Sequence: Synthetic peptide
ATADKGVSK

SEQ ID NO: 13211 - protein, 9 aa, synthetic construct
  REGION 1..9: note = Description of Artificial Sequence: Synthetic peptide
KILEPFRAK

SEQ ID NO: 13212 - protein, 9 aa, synthetic construct
  REGION 1..9: note = Description of Artificial Sequence: Synthetic peptide
QIIEQLIQK

SEQ ID NO: 13213 - protein, 10 aa, synthetic construct
  REGION 1..10: note = Description of Artificial Sequence: Synthetic peptide
ALNPGLLETK

SEQ ID NO: 13214 - protein, 10 aa, synthetic construct
  REGION 1..10: note = Description of Artificial Sequence: Synthetic peptide
TVYYGVPVWK

SEQ ID NO: 13215 - protein, 9 aa, synthetic construct
  REGION 1..9: note = Description of Artificial Sequence: Synthetic peptide
RLYERIRER

SEQ ID NO: 13216 - protein, 11 aa, synthetic construct
  REGION 1..11: note = Description of Artificial Sequence: Synthetic peptide
TVNDIQKLVGK

SEQ ID NO: 13217 - protein, 9 aa, synthetic construct
  REGION 1..9: note = Description of Artificial Sequence: Synthetic peptide
KILEPFRVK

SEQ ID NO: 13218 - protein, 9 aa, synthetic construct
  REGION 1..9: note = Description of Artificial Sequence: Synthetic peptide
RILAEAMSK

SEQ ID NO: 13219 - protein, 8 aa, synthetic construct
  REGION 1..8: note = Description of Artificial Sequence: Synthetic peptide
ILAEAMSK

SEQ ID NO: 13220 - protein, 9 aa, synthetic construct
  REGION 1..9: note = Description of Artificial Sequence: Synthetic peptide
TGAAIMMQK

SEQ ID NO: 13221 - protein, 9 aa, synthetic construct
  REGION 1..9: note = Description of Artificial Sequence: Synthetic peptide
TINGTLWNK

SEQ ID NO: 13222 - protein, 9 aa, synthetic construct
  REGION 1..9: note = Description of Artificial Sequence: Synthetic peptide
KIHQDPVPK

SEQ ID NO: 13223 - protein, 9 aa, synthetic construct
  REGION 1..9: note = Description of Artificial Sequence: Synthetic peptide
SITGLILTR

SEQ ID NO: 13224 - protein, 9 aa, synthetic construct
  REGION 1..9: note = Description of Artificial Sequence: Synthetic peptide
AVLYYVHQK

SEQ ID NO: 13225 - protein, 10 aa, synthetic construct
  REGION 1..10: note = Description of Artificial Sequence: Synthetic peptide
ATSTAIMMQK

SEQ ID NO: 13226 - protein, 10 aa, synthetic construct
  REGION 1..10: note = Description of Artificial Sequence: Synthetic peptide
ATGAAIMMQK

SEQ ID NO: 13227 - protein, 11 aa, synthetic construct
  REGION 1..11: note = Description of Artificial Sequence: Synthetic peptide
QVTSTSILMQK

SEQ ID NO: 13228 - protein, 10 aa, synthetic construct
  REGION 1..10: note = Description of Artificial Sequence: Synthetic peptide
IVQQQSNLLK

SEQ ID NO: 13229 - protein, 11 aa, synthetic construct
  REGION 1..11: note = Description of Artificial Sequence: Synthetic peptide
TVNDIQKLVGK

SEQ ID NO: 13230 - protein, 10 aa, synthetic construct
  REGION 1..10: note = Description of Artificial Sequence: Synthetic peptide
IVQQQNNLLK

SEQ ID NO: 13231 - protein, 10 aa, synthetic construct
  REGION 1..10: note = Description of Artificial Sequence: Synthetic peptide
TVQAIQLPNK

SEQ ID NO: 13232 - protein, 11 aa, synthetic construct
  REGION 1..11: note = Description of Artificial Sequence: Synthetic peptide
QVTATSVLMQK

SEQ ID NO: 13233 - protein, 10 aa, synthetic construct
  REGION 1..10: note = Description of Artificial Sequence: Synthetic peptide
VTSTSILMQK

SEQ ID NO: 13234 - protein, 11 aa, synthetic construct
  REGION 1..11: note = Description of Artificial Sequence: Synthetic peptide
RIEPVGVAPTK

SEQ ID NO: 13235 - protein, 9 aa, synthetic construct
  REGION 1..9: note = Description of Artificial Sequence: Synthetic peptide
TINGTLWNK

SEQ ID NO: 13236 - protein, 10 aa, synthetic construct
  REGION 1..10: note = Description of Artificial Sequence: Synthetic peptide
VTATSVLMQK

SEQ ID NO: 13237 - protein, 9 aa, synthetic construct
  REGION 1..9: note = Description of Artificial Sequence: Synthetic peptide
QIYPGIRVK

SEQ ID NO: 13238 - protein, 10 aa, synthetic construct
  REGION 1..10: note = Description of Artificial Sequence: Synthetic peptide
TVQPIQLPEK

SEQ ID NO: 13239 - protein, 10 aa, synthetic construct
  REGION 1..10: note = Description of Artificial Sequence: Synthetic peptide
ALNPGLLETK

SEQ ID NO: 13240 - protein, 9 aa, synthetic construct
  REGION 1..9: note = Description of Artificial Sequence: Synthetic peptide
ALTALVTPK

SEQ ID NO: 13241 - protein, 9 aa, synthetic construct
  REGION 1..9: note = Description of Artificial Sequence: Synthetic peptide
TATSVLMQK

SEQ ID NO: 13242 - protein, 9 aa, synthetic construct
  REGION 1..9: note = Description of Artificial Sequence: Synthetic peptide
ALTALITPK

SEQ ID NO: 13243 - protein, 9 aa, synthetic construct
  REGION 1..9: note = Description of Artificial Sequence: Synthetic peptide
TSTSILMQK

SEQ ID NO: 13244 - protein, 10 aa, synthetic construct
  REGION 1..10: note = Description of Artificial Sequence: Synthetic peptide
GSNFTSAVVK

SEQ ID NO: 13245 - protein, 10 aa, synthetic construct
  REGION 1..10: note = Description of Artificial Sequence: Synthetic peptide
TVQAIQLPDK

SEQ ID NO: 13246 - protein, 9 aa, synthetic construct
  REGION 1..9: note = Description of Artificial Sequence: Synthetic peptide
LLNGSLAEK

SEQ ID NO: 13247 - protein, 10 aa, synthetic construct
  REGION 1..10: note = Description of Artificial Sequence: Synthetic peptide
AMYAPPIAGK

SEQ ID NO: 13248 - protein, 9 aa, synthetic construct
  REGION 1..9: note = Description of Artificial Sequence: Synthetic peptide
AIFQSSMTK

SEQ ID NO: 13249 - protein, 11 aa, synthetic construct
  REGION 1..11: note = Description of Artificial Sequence: Synthetic peptide
KIEPLGVAPTK

SEQ ID NO: 13250 - protein, 11 aa, synthetic construct
  REGION 1..11: note = Description of Artificial Sequence: Synthetic peptide
VVSLTETTNQK

SEQ ID NO: 13251 - protein, 9 aa, synthetic construct
  REGION 1..9: note = Description of Artificial Sequence: Synthetic peptide
AVDLSHFLK

SEQ ID NO: 13252 - protein, 9 aa, synthetic construct
  REGION 1..9: note = Description of Artificial Sequence: Synthetic peptide
QIIEQLIQK

SEQ ID NO: 13253 - protein, 9 aa, synthetic construct
  REGION 1..9: note = Description of Artificial Sequence: Synthetic peptide
ATADKGVSK

SEQ ID NO: 13254 - protein, 9 aa, synthetic construct
  REGION 1..9: note = Description of Artificial Sequence: Synthetic peptide
KIHQDPVPK

SEQ ID NO: 13255 - protein, 8 aa, synthetic construct
  REGION 1..8: note = Description of Artificial Sequence: Synthetic peptide
ILAEAMSK

SEQ ID NO: 13256 - protein, 11 aa, synthetic construct
  REGION 1..11: note = Description of Artificial Sequence: Synthetic peptide
ATGEIIGDIRK

SEQ ID NO: 13257 - protein, 11 aa, synthetic construct
  REGION 1..11: note = Description of Artificial Sequence: Synthetic peptide
ATGTVLGDIRK

SEQ ID NO: 13258 - protein, 9 aa, synthetic construct
  REGION 1..9: note = Description of Artificial Sequence: Synthetic peptide
AVLYYVHQK

SEQ ID NO: 13259 - protein, 11 aa, synthetic construct
  REGION 1..11: note = Description of Artificial Sequence: Synthetic peptide
ATGEIIGDTRK

SEQ ID NO: 13260 - protein, 10 aa, synthetic construct
  REGION 1..10: note = Description of Artificial Sequence: Synthetic peptide
SLQTGSEELK

SEQ ID NO: 13261 - protein, 9 aa, synthetic construct
  REGION 1..9: note = Description of Artificial Sequence: Synthetic peptide
APAGFAILK

SEQ ID NO: 13262 - protein, 9 aa, synthetic construct
  REGION 1..9: note = Description of Artificial Sequence: Synthetic peptide
QIYPGIRIK

SEQ ID NO: 13263 - protein, 11 aa, synthetic construct
  REGION 1..11: note = Description of Artificial Sequence: Synthetic peptide
TMSDINGTSLK

SEQ ID NO: 13264 - protein, 10 aa, synthetic construct
  REGION 1..10: note = Description of Artificial Sequence: Synthetic peptide
GSNFTSTVVK

SEQ ID NO: 13265 - protein, 9 aa, synthetic construct
  REGION 1..9: note = Description of Artificial Sequence: Synthetic peptide
KQLTEVVQK

SEQ ID NO: 13266 - protein, 11 aa, synthetic construct
  REGION 1..11: note = Description of Artificial Sequence: Synthetic peptide
QSQGVVESMNK

SEQ ID NO: 13267 - protein, 9 aa, synthetic construct
  REGION 1..9: note = Description of Artificial Sequence: Synthetic peptide
SNFTSAVVK

SEQ ID NO: 13268 - protein, 10 aa, synthetic construct
  REGION 1..10: note = Description of Artificial Sequence: Synthetic peptide
GLYPPLTSLK

SEQ ID NO: 13269 - protein, 9 aa, synthetic construct
  REGION 1..9: note = Description of Artificial Sequence: Synthetic peptide
RILAEAMSK

SEQ ID NO: 13270 - protein, 9 aa, synthetic construct
  REGION 1..9: note = Description of Artificial Sequence: Synthetic peptide
MYAPPIAGK

SEQ ID NO: 13271 - protein, 8 aa, synthetic construct
  REGION 1..8: note = Description of Artificial Sequence: Synthetic peptide
ATSVLMQK

SEQ ID NO: 13272 - protein, 9 aa, synthetic construct
  REGION 1..9: note = Description of Artificial Sequence: Synthetic peptide
ASDAKAYEK

SEQ ID NO: 13273 - protein, 10 aa, synthetic construct
  REGION 1..10: note = Description of Artificial Sequence: Synthetic peptide
SIETVPVKLK

SEQ ID NO: 13274 - protein, 10 aa, synthetic construct
  REGION 1..10: note = Description of Artificial Sequence: Synthetic peptide
AQEDIIIRSK

SEQ ID NO: 13275 - protein, 9 aa, synthetic construct
  REGION 1..9: note = Description of Artificial Sequence: Synthetic peptide
SNYTGTIYK

SEQ ID NO: 13276 - protein, 8 aa, synthetic construct
  REGION 1..8: note = Description of Artificial Sequence: Synthetic peptide
STAIMMQK

SEQ ID NO: 13277 - protein, 9 aa, synthetic construct
  REGION 1..9: note = Description of Artificial Sequence: Synthetic peptide
IIATDIQTK

SEQ ID NO: 13278 - protein, 10 aa, synthetic construct
  REGION 1..10: note = Description of Artificial Sequence: Synthetic peptide
ATNMTNAMNR

SEQ ID NO: 13279 - protein, 9 aa, synthetic construct
  REGION 1..9: note = Description of Artificial Sequence: Synthetic peptide
TSTAIMMQK

SEQ ID NO: 13280 - protein, 9 aa, synthetic construct
  REGION 1..9: note = Description of Artificial Sequence: Synthetic peptide
VQQQNNLLK

SEQ ID NO: 13281 - protein, 10 aa, synthetic construct
  REGION 1..10: note = Description of Artificial Sequence: Synthetic peptide
ATESIVIWGK

SEQ ID NO: 13282 - protein, 10 aa, synthetic construct
  REGION 1..10: note = Description of Artificial Sequence: Synthetic peptide
TLNRVAAEVK

SEQ ID NO: 13283 - protein, 9 aa, synthetic construct
  REGION 1..9: note = Description of Artificial Sequence: Synthetic peptide
GLADQLIHK

SEQ ID NO: 13284 - protein, 11 aa, synthetic construct
  REGION 1..11: note = Description of Artificial Sequence: Synthetic peptide
ATDIQTKELQK

SEQ ID NO: 13285 - protein, 10 aa, synthetic construct
  REGION 1..10: note = Description of Artificial Sequence: Synthetic peptide
SILDIKQGPK

SEQ ID NO: 13286 - protein, 11 aa, synthetic construct
  REGION 1..11: note = Description of Artificial Sequence: Synthetic peptide
ASQIYPGIRVK

SEQ ID NO: 13287 - protein, 9 aa, synthetic construct
  REGION 1..9: note = Description of Artificial Sequence: Synthetic peptide
VQQQSNLLK

SEQ ID NO: 13288 - protein, 10 aa, synthetic construct
  REGION 1..10: note = Description of Artificial Sequence: Synthetic peptide
VVESMNKELK

SEQ ID NO: 13289 - protein, 9 aa, synthetic construct
  REGION 1..9: note = Description of Artificial Sequence: Synthetic peptide
SNFTSTVVK

SEQ ID NO: 13290 - protein, 9 aa, synthetic construct
  REGION 1..9: note = Description of Artificial Sequence: Synthetic peptide
KLVSTGIRK

SEQ ID NO: 13291 - protein, 10 aa, synthetic construct
  REGION 1..10: note = Description of Artificial Sequence: Synthetic peptide
ATSTAIMMQK

SEQ ID NO: 13292 - protein, 10 aa, synthetic construct
  REGION 1..10: note = Description of Artificial Sequence: Synthetic peptide
ATGAAIMMQK

SEQ ID NO: 13293 - protein, 10 aa, synthetic construct
  REGION 1..10: note = Description of Artificial Sequence: Synthetic peptide
VTSTSILMQK

SEQ ID NO: 13294 - protein, 11 aa, synthetic construct
  REGION 1..11: note = Description of Artificial Sequence: Synthetic peptide
ATGTVLGDIRK

SEQ ID NO: 13295 - protein, 10 aa, synthetic construct
  REGION 1..10: note = Description of Artificial Sequence: Synthetic peptide
VTATSVLMQK

SEQ ID NO: 13296 - protein, 9 aa, synthetic construct
  REGION 1..9: note = Description of Artificial Sequence: Synthetic peptide
TSTSILMQK

SEQ ID NO: 13297 - protein, 9 aa, synthetic construct
  REGION 1..9: note = Description of Artificial Sequence: Synthetic peptide
QIYPGIRVK

SEQ ID NO: 13298 - protein, 9 aa, synthetic construct
  REGION 1..9: note = Description of Artificial Sequence: Synthetic peptide
TATSVLMQK

SEQ ID NO: 13299 - protein, 10 aa, synthetic construct
  REGION 1..10: note = Description of Artificial Sequence: Synthetic peptide
IVQQQNNLLK

SEQ ID NO: 13300 - protein, 11 aa, synthetic construct
  REGION 1..11: note = Description of Artificial Sequence: Synthetic peptide
ATGEIIGDIRK

SEQ ID NO: 13301 - protein, 11 aa, synthetic construct
  REGION 1..11: note = Description of Artificial Sequence: Synthetic peptide
QVTSTSILMQK

SEQ ID NO: 13302 - protein, 10 aa, synthetic construct
  REGION 1..10: note = Description of Artificial Sequence: Synthetic peptide
IVQQQSNLLK

SEQ ID NO: 13303 - protein, 10 aa, synthetic construct
  REGION 1..10: note = Description of Artificial Sequence: Synthetic peptide
ATNMTNAMNR

SEQ ID NO: 13304 - protein, 10 aa, synthetic construct
  REGION 1..10: note = Description of Artificial Sequence: Synthetic peptide
GSNFTSAVVK

SEQ ID NO: 13305 - protein, 9 aa, synthetic construct
  REGION 1..9: note = Description of Artificial Sequence: Synthetic peptide
QIIEQLIQK

SEQ ID NO: 13306 - protein, 10 aa, synthetic construct
  REGION 1..10: note = Description of Artificial Sequence: Synthetic peptide
TVQAIQLPNK

SEQ ID NO: 13307 - protein, 9 aa, synthetic construct
  REGION 1..9: note = Description of Artificial Sequence: Synthetic peptide
TSTAIMMQK

SEQ ID NO: 13308 - protein, 9 aa, synthetic construct
  REGION 1..9: note = Description of Artificial Sequence: Synthetic peptide
ATADKGVSK

SEQ ID NO: 13309 - protein, 8 aa, synthetic construct
  REGION 1..8: note = Description of Artificial Sequence: Synthetic peptide
ATSVLMQK

SEQ ID NO: 13310 - protein, 11 aa, synthetic construct
  REGION 1..11: note = Description of Artificial Sequence: Synthetic peptide
QVTATSVLMQK

SEQ ID NO: 13311 - protein, 10 aa, synthetic construct
  REGION 1..10: note = Description of Artificial Sequence: Synthetic peptide
GSNFTSTVVK

SEQ ID NO: 13312 - protein, 9 aa, synthetic construct
  REGION 1..9: note = Description of Artificial Sequence: Synthetic peptide
SNYTGTIYK

SEQ ID NO: 13313 - protein, 8 aa, synthetic construct
  REGION 1..8: note = Description of Artificial Sequence: Synthetic peptide
STAIMMQK

SEQ ID NO: 13314 - protein, 11 aa, synthetic construct
  REGION 1..11: note = Description of Artificial Sequence: Synthetic peptide
TVNDIQKLVGK

SEQ ID NO: 13315 - protein, 9 aa, synthetic construct
  REGION 1..9: note = Description of Artificial Sequence: Synthetic peptide
SSIETVPVK

SEQ ID NO: 13316 - protein, 10 aa, synthetic construct
  REGION 1..10: note = Description of Artificial Sequence: Synthetic peptide
CTINGTLWNK

SEQ ID NO: 13317 - protein, 9 aa, synthetic construct
  REGION 1..9: note = Description of Artificial Sequence: Synthetic peptide
APAGFAILK

SEQ ID NO: 13318 - protein, 9 aa, synthetic construct
  REGION 1..9: note = Description of Artificial Sequence: Synthetic peptide
AVLYYVHQK

SEQ ID NO: 13319 - protein, 9 aa, synthetic construct
  REGION 1..9: note = Description of Artificial Sequence: Synthetic peptide
AVDLSHFLK

SEQ ID NO: 13320 - protein, 8 aa, synthetic construct
  REGION 1..8: note = Description of Artificial Sequence: Synthetic peptide
STSILMQK

SEQ ID NO: 13321 - protein, 10 aa, synthetic construct
  REGION 1..10: note = Description of Artificial Sequence: Synthetic peptide
TVQPIQLPEK

SEQ ID NO: 13322 - protein, 9 aa, synthetic construct
  REGION 1..9: note = Description of Artificial Sequence: Synthetic peptide
SITGLILTR

SEQ ID NO: 13323 - protein, 9 aa, synthetic construct
  REGION 1..9: note = Description of Artificial Sequence: Synthetic peptide
STLTQACPK

SEQ ID NO: 13324 - protein, 11 aa, synthetic construct
  REGION 1..11: note = Description of Artificial Sequence: Synthetic peptide
ATGEIIGDTRK

SEQ ID NO: 13325 - protein, 9 aa, synthetic construct
  REGION 1..9: note = Description of Artificial Sequence: Synthetic peptide
QIYPGIRIK

SEQ ID NO: 13326 - protein, 9 aa, synthetic construct
  REGION 1..9: note = Description of Artificial Sequence: Synthetic peptide
ASDAKAYEK

SEQ ID NO: 13327 - protein, 9 aa, synthetic construct
  REGION 1..9: note = Description of Artificial Sequence: Synthetic peptide
SNFTSTVVK

SEQ ID NO: 13328 - protein, 9 aa, synthetic construct
  REGION 1..9: note = Description of Artificial Sequence: Synthetic peptide
TGAAIMMQK

SEQ ID NO: 13329 - protein, 9 aa, synthetic construct
  REGION 1..9: note = Description of Artificial Sequence: Synthetic peptide
STVTQACPK

SEQ ID NO: 13330 - protein, 10 aa, synthetic construct
  REGION 1..10: note = Description of Artificial Sequence: Synthetic peptide
KTFNGTGLCR

SEQ ID NO: 13331 - protein, 10 aa, synthetic construct
  REGION 1..10: note = Description of Artificial Sequence: Synthetic peptide
AQEDIIIRSK

SEQ ID NO: 13332 - protein, 9 aa, synthetic construct
  REGION 1..9: note = Description of Artificial Sequence: Synthetic peptide
TINGTLWNK

SEQ ID NO: 13333 - protein, 10 aa, synthetic construct
  REGION 1..10: note = Description of Artificial Sequence: Synthetic peptide
ATGEIIGDTR

SEQ ID NO: 13334 - protein, 9 aa, synthetic construct
  REGION 1..9: note = Description of Artificial Sequence: Synthetic peptide
ALTALITPK

SEQ ID NO: 13335 - protein, 10 aa, synthetic construct
  REGION 1..10: note = Description of Artificial Sequence: Synthetic peptide
AAVDLSHFLK

SEQ ID NO: 13336 - protein, 9 aa, synthetic construct
  REGION 1..9: note = Description of Artificial Sequence: Synthetic peptide
APAGYAILK

SEQ ID NO: 13337 - protein, 10 aa, synthetic construct
  REGION 1..10: note = Description of Artificial Sequence: Synthetic peptide
SVLMQKSNFK

SEQ ID NO: 13338 - protein, 11 aa, synthetic construct
  REGION 1..11: note = Description of Artificial Sequence: Synthetic peptide
ATDIQTKELQK

SEQ ID NO: 13339 - protein, 9 aa, synthetic construct
  REGION 1..9: note = Description of Artificial Sequence: Synthetic peptide
VQQQNNLLK

SEQ ID NO: 13340 - protein, 9 aa, synthetic construct
  REGION 1..9: note = Description of Artificial Sequence: Synthetic peptide
SNFTSAVVK

SEQ ID NO: 13341 - protein, 9 aa, synthetic construct
  REGION 1..9: note = Description of Artificial Sequence: Synthetic peptide
AIFQSSMTK

SEQ ID NO: 13342 - protein, 9 aa, synthetic construct
  REGION 1..9: note = Description of Artificial Sequence: Synthetic peptide
ALTALVTPK

SEQ ID NO: 13343 - protein, 10 aa, synthetic construct
  REGION 1..10: note = Description of Artificial Sequence: Synthetic peptide
ATESIVIWGK

SEQ ID NO: 13344 - protein, 8 aa, synthetic construct
  REGION 1..8: note = Description of Artificial Sequence: Synthetic peptide
HDIVPIEK

SEQ ID NO: 13345 - protein, 10 aa, synthetic construct
  REGION 1..10: note = Description of Artificial Sequence: Synthetic peptide
AMYAPPIAGK

SEQ ID NO: 13346 - protein, 10 aa, synthetic construct
  REGION 1..10: note = Description of Artificial Sequence: Synthetic peptide
ASMTLTVQAR

SEQ ID NO: 13347 - protein, 10 aa, synthetic construct
  REGION 1..10: note = Description of Artificial Sequence: Synthetic peptide
SSITGLILTR

SEQ ID NO: 13348 - protein, 9 aa, synthetic construct
  REGION 1..9: note = Description of Artificial Sequence: Synthetic peptide
GTVLGDIRK

SEQ ID NO: 13349 - protein, 11 aa, synthetic construct
  REGION 1..11: note = Description of Artificial Sequence: Synthetic peptide
VVPLTETTNQK

SEQ ID NO: 13350 - protein, 11 aa, synthetic construct
  REGION 1..11: note = Description of Artificial Sequence: Synthetic peptide
SSLQTGSEELK

SEQ ID NO: 13351 - protein, 9 aa, synthetic construct
  REGION 1..9: note = Description of Artificial Sequence: Synthetic peptide
KQLTEVVQK

SEQ ID NO: 13352 - protein, 11 aa, synthetic construct
  REGION 1..11: note = Description of Artificial Sequence: Synthetic peptide
VVSLTETTNQK

SEQ ID NO: 13353 - protein, 9 aa, synthetic construct
  REGION 1..9: note = Description of Artificial Sequence: Synthetic peptide
VQQQSNLLK

SEQ ID NO: 13354 - protein, 10 aa, synthetic construct
  REGION 1..10: note = Description of Artificial Sequence: Synthetic peptide
AALDLSHFLK

SEQ ID NO: 13355 - protein, 10 aa, synthetic construct
  REGION 1..10: note = Description of Artificial Sequence: Synthetic peptide
ATEGIVIWGK

SEQ ID NO: 13356 - protein, 10 aa, synthetic construct
  REGION 1..10: note = Description of Artificial Sequence: Synthetic peptide
GAVDLSHFLK

SEQ ID NO: 13357 - protein, 8 aa, synthetic construct
  REGION 1..8: note = Description of Artificial Sequence: Synthetic peptide
PAGYAILK

SEQ ID NO: 13358 - protein, 9 aa, synthetic construct
  REGION 1..9: note = Description of Artificial Sequence: Synthetic peptide
GVQAIIRTL

SEQ ID NO: 13359 - protein, 10 aa, synthetic construct
  REGION 1..10: note = Description of Artificial Sequence: Synthetic peptide
TVQAIQLPDK

SEQ ID NO: 13360 - protein, 9 aa, synthetic construct
  REGION 1..9: note = Description of Artificial Sequence: Synthetic peptide
SSEVHIPLK

SEQ ID NO: 13361 - protein, 9 aa, synthetic construct
  REGION 1..9: note = Description of Artificial Sequence: Synthetic peptide
KSSIVGWPK

SEQ ID NO: 13362 - protein, 11 aa, synthetic construct
  REGION 1..11: note = Description of Artificial Sequence: Synthetic peptide
GVVESMNKELK

SEQ ID NO: 13363 - protein, 11 aa, synthetic construct
  REGION 1..11: note = Description of Artificial Sequence: Synthetic peptide
RIEPVGVAPTK

SEQ ID NO: 13364 - protein, 10 aa, synthetic construct
  REGION 1..10: note = Description of Artificial Sequence: Synthetic peptide
STMGAAAITL

SEQ ID NO: 13365 - protein, 10 aa, synthetic construct
  REGION 1..10: note = Description of Artificial Sequence: Synthetic peptide
SQIYPGIRVK

SEQ ID NO: 13366 - protein, 9 aa, synthetic construct
  REGION 1..9: note = Description of Artificial Sequence: Synthetic peptide
AQYWGQELK

SEQ ID NO: 13367 - protein, 10 aa, synthetic construct
  REGION 1..10: note = Description of Artificial Sequence: Synthetic peptide
ISNYTGTIYK

SEQ ID NO: 13368 - protein, 10 aa, synthetic construct
  REGION 1..10: note = Description of Artificial Sequence: Synthetic peptide
SILDIKQGPK

SEQ ID NO: 13369 - protein, 9 aa, synthetic construct
  REGION 1..9: note = Description of Artificial Sequence: Synthetic peptide
CTRPTNITR

SEQ ID NO: 13370 - protein, 9 aa, synthetic construct
  REGION 1..9: note = Description of Artificial Sequence: Synthetic peptide
QVPPLISLK

SEQ ID NO: 13371 - protein, 9 aa, synthetic construct
  REGION 1..9: note = Description of Artificial Sequence: Synthetic peptide
NYTGTIYKL

SEQ ID NO: 13372 - protein, 9 aa, synthetic construct
  REGION 1..9: note = Description of Artificial Sequence: Synthetic peptide
NYTDTIYRL

SEQ ID NO: 13373 - protein, 9 aa, synthetic construct
  REGION 1..9: note = Description of Artificial Sequence: Synthetic peptide
VYIEYKKQL

SEQ ID NO: 13374 - protein, 10 aa, synthetic construct
  REGION 1..10: note = Description of Artificial Sequence: Synthetic peptide
IFLDNVTENF

SEQ ID NO: 13375 - protein, 9 aa, synthetic construct
  REGION 1..9: note = Description of Artificial Sequence: Synthetic peptide
NYTKTIYSL

SEQ ID NO: 13376 - protein, 9 aa, synthetic construct
  REGION 1..9: note = Description of Artificial Sequence: Synthetic peptide
VYIEYKKLL

SEQ ID NO: 13377 - protein, 9 aa, synthetic construct
  REGION 1..9: note = Description of Artificial Sequence: Synthetic peptide
KYLGNLAQY

SEQ ID NO: 13378 - protein, 9 aa, synthetic construct
  REGION 1..9: note = Description of Artificial Sequence: Synthetic peptide
VYLEYKKLL

SEQ ID NO: 13379 - protein, 9 aa, synthetic construct
  REGION 1..9: note = Description of Artificial Sequence: Synthetic peptide
YYVHQKIQI

SEQ ID NO: 13380 - protein, 9 aa, synthetic construct
  REGION 1..9: note = Description of Artificial Sequence: Synthetic peptide
RYLKDQQLL

SEQ ID NO: 13381 - protein, 9 aa, synthetic construct
  REGION 1..9: note = Description of Artificial Sequence: Synthetic peptide
TLIKIATEF

SEQ ID NO: 13382 - protein, 10 aa, synthetic construct
  REGION 1..10: note = Description of Artificial Sequence: Synthetic peptide
LFIPGNINNL

SEQ ID NO: 13383 - protein, 10 aa, synthetic construct
  REGION 1..10: note = Description of Artificial Sequence: Synthetic peptide
KYLWNLTQHW

SEQ ID NO: 13384 - protein, 10 aa, synthetic construct
  REGION 1..10: note = Description of Artificial Sequence: Synthetic peptide
AYDPEVHNVW

SEQ ID NO: 13385 - protein, 9 aa, synthetic construct
  REGION 1..9: note = Description of Artificial Sequence: Synthetic peptide
IYQEPYKNL

SEQ ID NO: 13386 - protein, 9 aa, synthetic construct
  REGION 1..9: note = Description of Artificial Sequence: Synthetic peptide
NYTDTIYRL

SEQ ID NO: 13387 - protein, 9 aa, synthetic construct
  REGION 1..9: note = Description of Artificial Sequence: Synthetic peptide
NYTGTIYKL

SEQ ID NO: 13388 - protein, 9 aa, synthetic construct
  REGION 1..9: note = Description of Artificial Sequence: Synthetic peptide
FYKLDVVQI

SEQ ID NO: 13389 - protein, 9 aa, synthetic construct
  REGION 1..9: note = Description of Artificial Sequence: Synthetic peptide
VYIEYKKQL

SEQ ID NO: 13390 - protein, 9 aa, synthetic construct
  REGION 1..9: note = Description of Artificial Sequence: Synthetic peptide
NYTKTIYSL

SEQ ID NO: 13391 - protein, 9 aa, synthetic construct
  REGION 1..9: note = Description of Artificial Sequence: Synthetic peptide
RYLKDQQLL

SEQ ID NO: 13392 - protein, 9 aa, synthetic construct
  REGION 1..9: note = Description of Artificial Sequence: Synthetic peptide
FIPGNINNL

SEQ ID NO: 13393 - protein, 9 aa, synthetic construct
  REGION 1..9: note = Description of Artificial Sequence: Synthetic peptide
IYQEPYKNL

SEQ ID NO: 13394 - protein, 9 aa, synthetic construct
  REGION 1..9: note = Description of Artificial Sequence: Synthetic peptide
IYNTYGDTW

SEQ ID NO: 13395 - protein, 9 aa, synthetic construct
  REGION 1..9: note = Description of Artificial Sequence: Synthetic peptide
VYIEYKKLL

SEQ ID NO: 13396 - protein, 10 aa, synthetic construct
  REGION 1..10: note = Description of Artificial Sequence: Synthetic peptide
AYDPEVHNVW

SEQ ID NO: 13397 - protein, 9 aa, synthetic construct
  REGION 1..9: note = Description of Artificial Sequence: Synthetic peptide
YYDPSKDLI

SEQ ID NO: 13398 - protein, 10 aa, synthetic construct
  REGION 1..10: note = Description of Artificial Sequence: Synthetic peptide
EISERILTTY

SEQ ID NO: 13399 - protein, 10 aa, synthetic construct
  REGION 1..10: note = Description of Artificial Sequence: Synthetic peptide
DTINEEAAEW

SEQ ID NO: 13400 - protein, 10 aa, synthetic construct
  REGION 1..10: note = Description of Artificial Sequence: Synthetic peptide
EVVDPKIDPW

SEQ ID NO: 13401 - protein, 9 aa, synthetic construct
  REGION 1..9: note = Description of Artificial Sequence: Synthetic peptide
EVIPMFSAL

SEQ ID NO: 13402 - protein, 10 aa, synthetic construct
  REGION 1..10: note = Description of Artificial Sequence: Synthetic peptide
EVVDPNLDPW

SEQ ID NO: 13403 - protein, 10 aa, synthetic construct
  REGION 1..10: note = Description of Artificial Sequence: Synthetic peptide
EIIGDIRKAY

SEQ ID NO: 13404 - protein, 10 aa, synthetic construct
  REGION 1..10: note = Description of Artificial Sequence: Synthetic peptide
EVQKQGHDQW

SEQ ID NO: 13405 - protein, 10 aa, synthetic construct
  REGION 1..10: note = Description of Artificial Sequence: Synthetic peptide
EQATQEVKGW

SEQ ID NO: 13406 - protein, 10 aa, synthetic construct
  REGION 1..10: note = Description of Artificial Sequence: Synthetic peptide
EQASQEVKGW

SEQ ID NO: 13407 - protein, 9 aa, synthetic construct
  REGION 1..9: note = Description of Artificial Sequence: Synthetic peptide
EMYPPLTSL

SEQ ID NO: 13408 - protein, 9 aa, synthetic construct
  REGION 1..9: note = Description of Artificial Sequence: Synthetic peptide
DIAGTTSTL

SEQ ID NO: 13409 - protein, 9 aa, synthetic construct
  REGION 1..9: note = Description of Artificial Sequence: Synthetic peptide
NVTENFNMW

SEQ ID NO: 13410 - protein, 9 aa, synthetic construct
  REGION 1..9: note = Description of Artificial Sequence: Synthetic peptide
EVHNVWATY

SEQ ID NO: 13411 - protein, 9 aa, synthetic construct
  REGION 1..9: note = Description of Artificial Sequence: Synthetic peptide
EQAPPLVSL

SEQ ID NO: 13412 - protein, 9 aa, synthetic construct
  REGION 1..9: note = Description of Artificial Sequence: Synthetic peptide
DSKLVIVSY

SEQ ID NO: 13413 - protein, 10 aa, synthetic construct
  REGION 1..10: note = Description of Artificial Sequence: Synthetic peptide
EISNYTGTIY

SEQ ID NO: 13414 - protein, 10 aa, synthetic construct
  REGION 1..10: note = Description of Artificial Sequence: Synthetic peptide
EVNIVTDSQY

SEQ ID NO: 13415 - protein, 10 aa, synthetic construct
  REGION 1..10: note = Description of Artificial Sequence: Synthetic peptide
EISERILTTY

SEQ ID NO: 13416 - protein, 10 aa, synthetic construct
  REGION 1..10: note = Description of Artificial Sequence: Synthetic peptide
EVNIVTDSQY

SEQ ID NO: 13417 - protein, 9 aa, synthetic construct
  REGION 1..9: note = Description of Artificial Sequence: Synthetic peptide
ETKIGKAGY

SEQ ID NO: 13418 - protein, 9 aa, synthetic construct
  REGION 1..9: note = Description of Artificial Sequence: Synthetic peptide
EVIPMFSAL

SEQ ID NO: 13419 - protein, 10 aa, synthetic construct
  REGION 1..10: note = Description of Artificial Sequence: Synthetic peptide
EIIGDIRKAY

SEQ ID NO: 13420 - protein, 9 aa, synthetic construct
  REGION 1..9: note = Description of Artificial Sequence: Synthetic peptide
EVHNVWATY

SEQ ID NO: 13421 - protein, 9 aa, synthetic construct
  REGION 1..9: note = Description of Artificial Sequence: Synthetic peptide
ETKLGKAGY

SEQ ID NO: 13422 - protein, 9 aa, synthetic construct
  REGION 1..9: note = Description of Artificial Sequence: Synthetic peptide
ETPGIRYQY

SEQ ID NO: 13423 - protein, 9 aa, synthetic construct
  REGION 1..9: note = Description of Artificial Sequence: Synthetic peptide
FIPGNINNL

SEQ ID NO: 13424 - protein, 11 aa, synthetic construct
  REGION 1..11: note = Description of Artificial Sequence: Synthetic peptide
EIIKEPVHGVY

SEQ ID NO: 13425 - protein, 10 aa, synthetic construct
  REGION 1..10: note = Description of Artificial Sequence: Synthetic peptide
EISNYTGTIY

SEQ ID NO: 13426 - protein, 10 aa, synthetic construct
  REGION 1..10: note = Description of Artificial Sequence: Synthetic peptide
EVIPAETGQE

SEQ ID NO: 13427 - protein, 9 aa, synthetic construct
  REGION 1..9: note = Description of Artificial Sequence: Synthetic peptide
YTPGPGTRY

SEQ ID NO: 13428 - protein, 9 aa, synthetic construct
  REGION 1..9: note = Description of Artificial Sequence: Synthetic peptide
EIIGDIRKA

SEQ ID NO: 13429 - protein, 9 aa, synthetic construct
  REGION 1..9: note = Description of Artificial Sequence: Synthetic peptide
EVSQNYPIV

SEQ ID NO: 13430 - protein, 9 aa, synthetic construct
  REGION 1..9: note = Description of Artificial Sequence: Synthetic peptide
EVIPAETGQ

SEQ ID NO: 13431 - protein, 9 aa, synthetic construct
  REGION 1..9: note = Description of Artificial Sequence: Synthetic peptide
NTKNIIVQF

SEQ ID NO: 13432 - protein, 9 aa, synthetic construct
  REGION 1..9: note = Description of Artificial Sequence: Synthetic peptide
DQYNKTVGF

SEQ ID NO: 13433 - protein, 10 aa, synthetic construct
  REGION 1..10: note = Description of Artificial Sequence: Synthetic peptide
FTSKGLGISY

SEQ ID NO: 13434 - protein, 10 aa, synthetic construct
  REGION 1..10: note = Description of Artificial Sequence: Synthetic peptide
EISERILTTY

SEQ ID NO: 13435 - protein, 9 aa, synthetic construct
  REGION 1..9: note = Description of Artificial Sequence: Synthetic peptide
EVIPMFSAL

SEQ ID NO: 13436 - protein, 9 aa, synthetic construct
  REGION 1..9: note = Description of Artificial Sequence: Synthetic peptide
FIPGNINNL

SEQ ID NO: 13437 - protein, 9 aa, synthetic construct
  REGION 1..9: note = Description of Artificial Sequence: Synthetic peptide
NTKNIIVQF

SEQ ID NO: 13438 - protein, 9 aa, synthetic construct
  REGION 1..9: note = Description of Artificial Sequence: Synthetic peptide
DIAGTTSNL

SEQ ID NO: 13439 - protein, 10 aa, synthetic construct
  REGION 1..10: note = Description of Artificial Sequence: Synthetic peptide
EVNIVTDSQY

SEQ ID NO: 13440 - protein, 9 aa, synthetic construct
  REGION 1..9: note = Description of Artificial Sequence: Synthetic peptide
DIAGTTSTL

SEQ ID NO: 13441 - protein, 9 aa, synthetic construct
  REGION 1..9: note = Description of Artificial Sequence: Synthetic peptide
NTKTIIVQF

SEQ ID NO: 13442 - protein, 9 aa, synthetic construct
  REGION 1..9: note = Description of Artificial Sequence: Synthetic peptide
EQAPPLVSL

SEQ ID NO: 13443 - protein, 9 aa, synthetic construct
  REGION 1..9: note = Description of Artificial Sequence: Synthetic peptide
DQYNKTVGF

SEQ ID NO: 13444 - protein, 9 aa, synthetic construct
  REGION 1..9: note = Description of Artificial Sequence: Synthetic peptide
EVHNVWATY

SEQ ID NO: 13445 - protein, 9 aa, synthetic construct
  REGION 1..9: note = Description of Artificial Sequence: Synthetic peptide
EMYPPLTSL

SEQ ID NO: 13446 - protein, 10 aa, synthetic construct
  REGION 1..10: note = Description of Artificial Sequence: Synthetic peptide
EVVDPKIDPW

SEQ ID NO: 13447 - protein, 9 aa, synthetic construct
  REGION 1..9: note = Description of Artificial Sequence: Synthetic peptide
EVIPMFSAL

SEQ ID NO: 13448 - protein, 9 aa, synthetic construct
  REGION 1..9: note = Description of Artificial Sequence: Synthetic peptide
EIIGDIRKA

SEQ ID NO: 13449 - protein, 9 aa, synthetic construct
  REGION 1..9: note = Description of Artificial Sequence: Synthetic peptide
EIIGDTRKA

SEQ ID NO: 13450 - protein, 10 aa, synthetic construct
  REGION 1..10: note = Description of Artificial Sequence: Synthetic peptide
EIIGDIRKAY

SEQ ID NO: 13451 - protein, 9 aa, synthetic construct
  REGION 1..9: note = Description of Artificial Sequence: Synthetic peptide
FIPGNINNL

SEQ ID NO: 13452 - protein, 9 aa, synthetic construct
  REGION 1..9: note = Description of Artificial Sequence: Synthetic peptide
EVHNVWATY

SEQ ID NO: 13453 - protein, 9 aa, synthetic construct
  REGION 1..9: note = Description of Artificial Sequence: Synthetic peptide
DIAGTTSNL

SEQ ID NO: 13454 - protein, 11 aa, synthetic construct
  REGION 1..11: note = Description of Artificial Sequence: Synthetic peptide
ETFYVDGAASR

SEQ ID NO: 13455 - protein, 10 aa, synthetic construct
  REGION 1..10: note = Description of Artificial Sequence: Synthetic peptide
EVTTHSFNCR

SEQ ID NO: 13456 - protein, 9 aa, synthetic construct
  REGION 1..9: note = Description of Artificial Sequence: Synthetic peptide
MVHQAISPR

SEQ ID NO: 13457 - protein, 10 aa, synthetic construct
  REGION 1..10: note = Description of Artificial Sequence: Synthetic peptide
EIIKEPVHGV

SEQ ID NO: 13458 - protein, 10 aa, synthetic construct
  REGION 1..10: note = Description of Artificial Sequence: Synthetic peptide
EISERILTTY

SEQ ID NO: 13459 - protein, 9 aa, synthetic construct
  REGION 1..9: note = Description of Artificial Sequence: Synthetic peptide
DIAGTTSTL

SEQ ID NO: 13460 - protein, 9 aa, synthetic construct
  REGION 1..9: note = Description of Artificial Sequence: Synthetic peptide
SITGLILTR

SEQ ID NO: 13461 - protein, 9 aa, synthetic construct
  REGION 1..9: note = Description of Artificial Sequence: Synthetic peptide
EMYPPLTSL

SEQ ID NO: 13462 - protein, 9 aa, synthetic construct
  REGION 1..9: note = Description of Artificial Sequence: Synthetic peptide
EIHNVWATY

SEQ ID NO: 13463 - protein, 9 aa, synthetic construct
  REGION 1..9: note = Description of Artificial Sequence: Synthetic peptide
EVHQDPVSK

SEQ ID NO: 13464 - protein, 9 aa, synthetic construct
  REGION 1..9: note = Description of Artificial Sequence: Synthetic peptide
MVHQALSPR

SEQ ID NO: 13465 - protein, 9 aa, synthetic construct
  REGION 1..9: note = Description of Artificial Sequence: Synthetic peptide
TVLDVGDAY

SEQ ID NO: 13466 - protein, 9 aa, synthetic construct
  REGION 1..9: note = Description of Artificial Sequence: Synthetic peptide
SFDPIPIHY

SEQ ID NO: 13467 - protein, 9 aa, synthetic construct
  REGION 1..9: note = Description of Artificial Sequence: Synthetic peptide
LYNTVAVLY

SEQ ID NO: 13468 - protein, 11 aa, synthetic construct
  REGION 1..11: note = Description of Artificial Sequence: Synthetic peptide
AAADKGVSQNY

SEQ ID NO: 13469 - protein, 9 aa, synthetic construct
  REGION 1..9: note = Description of Artificial Sequence: Synthetic peptide
YNAVVVLYY

SEQ ID NO: 13470 - protein, 9 aa, synthetic construct
  REGION 1..9: note = Description of Artificial Sequence: Synthetic peptide
LYNAVVVLY

SEQ ID NO: 13471 - protein, 9 aa, synthetic construct
  REGION 1..9: note = Description of Artificial Sequence: Synthetic peptide
SFDPIPIYY

SEQ ID NO: 13472 - protein, 10 aa, synthetic construct
  REGION 1..10: note = Description of Artificial Sequence: Synthetic peptide
VSFDPIPIYY

SEQ ID NO: 13473 - protein, 9 aa, synthetic construct
  REGION 1..9: note = Description of Artificial Sequence: Synthetic peptide
LFNTIVVLY

SEQ ID NO: 13474 - protein, 10 aa, synthetic construct
  REGION 1..10: note = Description of Artificial Sequence: Synthetic peptide
VSFDPIPIHY

SEQ ID NO: 13475 - protein, 9 aa, synthetic construct
  REGION 1..9: note = Description of Artificial Sequence: Synthetic peptide
VWTIVYLEY

SEQ ID NO: 13476 - protein, 9 aa, synthetic construct
  REGION 1..9: note = Description of Artificial Sequence: Synthetic peptide
LYNTVAVLY

SEQ ID NO: 13477 - protein, 9 aa, synthetic construct
  REGION 1..9: note = Description of Artificial Sequence: Synthetic peptide
SFDPIPIHY

SEQ ID NO: 13478 - protein, 9 aa, synthetic construct
  REGION 1..9: note = Description of Artificial Sequence: Synthetic peptide
FNTIVVLYY

SEQ ID NO: 13479 - protein, 9 aa, synthetic construct
  REGION 1..9: note = Description of Artificial Sequence: Synthetic peptide
SFDPIPIYY

SEQ ID NO: 13480 - protein, 9 aa, synthetic construct
  REGION 1..9: note = Description of Artificial Sequence: Synthetic peptide
GYFPDWQNY

SEQ ID NO: 13481 - protein, 9 aa, synthetic construct
  REGION 1..9: note = Description of Artificial Sequence: Synthetic peptide
YNAVVVLYY

SEQ ID NO: 13482 - protein, 9 aa, synthetic construct
  REGION 1..9: note = Description of Artificial Sequence: Synthetic peptide
LFNTIVVLY

SEQ ID NO: 13483 - protein, 10 aa, synthetic construct
  REGION 1..10: note = Description of Artificial Sequence: Synthetic peptide
VSFDPIPIYY

SEQ ID NO: 13484 - protein, 9 aa, synthetic construct
  REGION 1..9: note = Description of Artificial Sequence: Synthetic peptide
LYNAVVVLY

SEQ ID NO: 13485 - protein, 10 aa, synthetic construct
  REGION 1..10: note = Description of Artificial Sequence: Synthetic peptide
VSFDPIPIHY

SEQ ID NO: 13486 - protein, 9 aa, synthetic construct
  REGION 1..9: note = Description of Artificial Sequence: Synthetic peptide
YNTVAVLYY

SEQ ID NO: 13487 - protein, 9 aa, synthetic construct
  REGION 1..9: note = Description of Artificial Sequence: Synthetic peptide
VWTIVYIEY

SEQ ID NO: 13488 - protein, 10 aa, synthetic construct
  REGION 1..10: note = Description of Artificial Sequence: Synthetic peptide
LYNTVAVLYY

SEQ ID NO: 13489 - protein, 10 aa, synthetic construct
  REGION 1..10: note = Description of Artificial Sequence: Synthetic peptide
GVSKGVSQNY

SEQ ID NO: 13490 - protein, 11 aa, synthetic construct
  REGION 1..11: note = Description of Artificial Sequence: Synthetic peptide
GLADQLIHLHY

SEQ ID NO: 13491 - protein, 10 aa, synthetic construct
  REGION 1..10: note = Description of Artificial Sequence: Synthetic peptide
LFNTIVVLYY

SEQ ID NO: 13492 - protein, 9 aa, synthetic construct
  REGION 1..9: note = Description of Artificial Sequence: Synthetic peptide
TVLDVGDAY

SEQ ID NO: 13493 - protein, 10 aa, synthetic construct
  REGION 1..10: note = Description of Artificial Sequence: Synthetic peptide
FTSKGLGISY

SEQ ID NO: 13494 - protein, 9 aa, synthetic construct
  REGION 1..9: note = Description of Artificial Sequence: Synthetic peptide
KVKPPLPSV

SEQ ID NO: 13495 - protein, 10 aa, synthetic construct
  REGION 1..10: note = Description of Artificial Sequence: Synthetic peptide
KEMYPPLTSL

SEQ ID NO: 13496 - protein, 10 aa, synthetic construct
  REGION 1..10: note = Description of Artificial Sequence: Synthetic peptide
KEQVPPLISL

SEQ ID NO: 13497 - protein, 10 aa, synthetic construct
  REGION 1..10: note = Description of Artificial Sequence: Synthetic peptide
EEQAPPLVSL

SEQ ID NO: 13498 - protein, 9 aa, synthetic construct
  REGION 1..9: note = Description of Artificial Sequence: Synthetic peptide
VVRIEPVGV

SEQ ID NO: 13499 - protein, 9 aa, synthetic construct
  REGION 1..9: note = Description of Artificial Sequence: Synthetic peptide
KIKPPLPSV

SEQ ID NO: 13500 - protein, 9 aa, synthetic construct
  REGION 1..9: note = Description of Artificial Sequence: Synthetic peptide
SESAIRNAI

SEQ ID NO: 13501 - protein, 10 aa, synthetic construct
  REGION 1..10: note = Description of Artificial Sequence: Synthetic peptide
TEKGVGSPQI

SEQ ID NO: 13502 - protein, 9 aa, synthetic construct
  REGION 1..9: note = Description of Artificial Sequence: Synthetic peptide
VSKGVSQNY

SEQ ID NO: 13503 - protein, 10 aa, synthetic construct
  REGION 1..10: note = Description of Artificial Sequence: Synthetic peptide
VQINNSNTSY

SEQ ID NO: 13504 - protein, 9 aa, synthetic construct
  REGION 1..9: note = Description of Artificial Sequence: Synthetic peptide
TSKGLGISY

SEQ ID NO: 13505 - protein, 10 aa, synthetic construct
  REGION 1..10: note = Description of Artificial Sequence: Synthetic peptide
GVSKGVSQNY

SEQ ID NO: 13506 - protein, 11 aa, synthetic construct
  REGION 1..11: note = Description of Artificial Sequence: Synthetic peptide
AAADKGVSQNY

SEQ ID NO: 13507 - protein, 11 aa, synthetic construct
  REGION 1..11: note = Description of Artificial Sequence: Synthetic peptide
QTGSEELKSLY

SEQ ID NO: 13508 - protein, 11 aa, synthetic construct
  REGION 1..11: note = Description of Artificial Sequence: Synthetic peptide
KAADKEVSQNY

SEQ ID NO: 13509 - protein, 11 aa, synthetic construct
  REGION 1..11: note = Description of Artificial Sequence: Synthetic peptide
QTGSEEIKSLY

SEQ ID NO: 13510 - protein, 11 aa, synthetic construct
  REGION 1..11: note = Description of Artificial Sequence: Synthetic peptide
VVQINNSNTSY

SEQ ID NO: 13511 - protein, 9 aa, synthetic construct
  REGION 1..9: note = Description of Artificial Sequence: Synthetic peptide
TVLDVGDAY

SEQ ID NO: 13512 - protein, 9 aa, synthetic construct
  REGION 1..9: note = Description of Artificial Sequence: Synthetic peptide
KLQEEQDKY

SEQ ID NO: 13513 - protein, 10 aa, synthetic construct
  REGION 1..10: note = Description of Artificial Sequence: Synthetic peptide
GLADQLIHKY

SEQ ID NO: 13514 - protein, 9 aa, synthetic construct
  REGION 1..9: note = Description of Artificial Sequence: Synthetic peptide
QINNSNTSY

SEQ ID NO: 13515 - protein, 10 aa, synthetic construct
  REGION 1..10: note = Description of Artificial Sequence: Synthetic peptide
ILKEPVHGVY

SEQ ID NO: 13516 - protein, 9 aa, synthetic construct
  REGION 1..9: note = Description of Artificial Sequence: Synthetic peptide
KYLGNLAQY

SEQ ID NO: 13517 - protein, 10 aa, synthetic construct
  REGION 1..10: note = Description of Artificial Sequence: Synthetic peptide
IIKEPVHGVY

SEQ ID NO: 13518 - protein, 9 aa, synthetic construct
  REGION 1..9: note = Description of Artificial Sequence: Synthetic peptide
KAQEEHEKY

SEQ ID NO: 13519 - protein, 10 aa, synthetic construct
  REGION 1..10: note = Description of Artificial Sequence: Synthetic peptide
FTSKGLGISY

SEQ ID NO: 13520 - protein, 9 aa, synthetic construct
  REGION 1..9: note = Description of Artificial Sequence: Synthetic peptide
VSKGVSQNY

SEQ ID NO: 13521 - protein, 10 aa, synthetic construct
  REGION 1..10: note = Description of Artificial Sequence: Synthetic peptide
GVSKGVSQNY

SEQ ID NO: 13522 - protein, 10 aa, synthetic construct
  REGION 1..10: note = Description of Artificial Sequence: Synthetic peptide
KIATEFKDQY

SEQ ID NO: 13523 - protein, 9 aa, synthetic construct
  REGION 1..9: note = Description of Artificial Sequence: Synthetic peptide
TSKGLGISY

SEQ ID NO: 13524 - protein, 11 aa, synthetic construct
  REGION 1..11: note = Description of Artificial Sequence: Synthetic peptide
QTGSEEIKSLY

SEQ ID NO: 13525 - protein, 11 aa, synthetic construct
  REGION 1..11: note = Description of Artificial Sequence: Synthetic peptide
KAADKEVSQNY

SEQ ID NO: 13526 - protein, 10 aa, synthetic construct
  REGION 1..10: note = Description of Artificial Sequence: Synthetic peptide
GLADQLIHKY

SEQ ID NO: 13527 - protein, 10 aa, synthetic construct
  REGION 1..10: note = Description of Artificial Sequence: Synthetic peptide
FTSKGLGISY

SEQ ID NO: 13528 - protein, 11 aa, synthetic construct
  REGION 1..11: note = Description of Artificial Sequence: Synthetic peptide
AAADKGVSQNY

SEQ ID NO: 13529 - protein, 9 aa, synthetic construct
  REGION 1..9: note = Description of Artificial Sequence: Synthetic peptide
VVNRVRQGY

SEQ ID NO: 13530 - protein, 11 aa, synthetic construct
  REGION 1..11: note = Description of Artificial Sequence: Synthetic peptide
QTGSEELKSLY

SEQ ID NO: 13531 - protein, 9 aa, synthetic construct
  REGION 1..9: note = Description of Artificial Sequence: Synthetic peptide
CTRPTNITR

SEQ ID NO: 13532 - protein, 10 aa, synthetic construct
  REGION 1..10: note = Description of Artificial Sequence: Synthetic peptide
ATNMTNAMNR

SEQ ID NO: 13533 - protein, 11 aa, synthetic construct
  REGION 1..11: note = Description of Artificial Sequence: Synthetic peptide
RGRPGNFLQNR

SEQ ID NO: 13534 - protein, 9 aa, synthetic construct
  REGION 1..9: note = Description of Artificial Sequence: Synthetic peptide
RLYERIIER

SEQ ID NO: 13535 - protein, 11 aa, synthetic construct
  REGION 1..11: note = Description of Artificial Sequence: Synthetic peptide
KGRPGNFLQNR

SEQ ID NO: 13536 - protein, 9 aa, synthetic construct
  REGION 1..9: note = Description of Artificial Sequence: Synthetic peptide
KTIIVQFNR

SEQ ID NO: 13537 - protein, 9 aa, synthetic construct
  REGION 1..9: note = Description of Artificial Sequence: Synthetic peptide
KQIVNVWQR

SEQ ID NO: 13538 - protein, 11 aa, synthetic construct
  REGION 1..11: note = Description of Artificial Sequence: Synthetic peptide
TSKGLGISYGR

SEQ ID NO: 13539 - protein, 9 aa, synthetic construct
  REGION 1..9: note = Description of Artificial Sequence: Synthetic peptide
KQIVNMWQR

SEQ ID NO: 13540 - protein, 9 aa, synthetic construct
  REGION 1..9: note = Description of Artificial Sequence: Synthetic peptide
RQIHQISER

SEQ ID NO: 13541 - protein, 10 aa, synthetic construct
  REGION 1..10: note = Description of Artificial Sequence: Synthetic peptide
KIKPPLPSVR

SEQ ID NO: 13542 - protein, 10 aa, synthetic construct
  REGION 1..10: note = Description of Artificial Sequence: Synthetic peptide
KTFNGTGLCR

SEQ ID NO: 13543 - protein, 11 aa, synthetic construct
  REGION 1..11: note = Description of Artificial Sequence: Synthetic peptide
GSKANNTDILR

SEQ ID NO: 13544 - protein, 11 aa, synthetic construct
  REGION 1..11: note = Description of Artificial Sequence: Synthetic peptide
TVNDIQKLVGK

SEQ ID NO: 13545 - protein, 9 aa, synthetic construct
  REGION 1..9: note = Description of Artificial Sequence: Synthetic peptide
KGLGISYGR

SEQ ID NO: 13546 - protein, 11 aa, synthetic construct
  REGION 1..11: note = Description of Artificial Sequence: Synthetic peptide
VGNPQISGESR

SEQ ID NO: 13547 - protein, 9 aa, synthetic construct
  REGION 1..9: note = Description of Artificial Sequence: Synthetic peptide
RQIVNMWQR

SEQ ID NO: 13548 - protein, 9 aa, synthetic construct
  REGION 1..9: note = Description of Artificial Sequence: Synthetic peptide
VVLYYVHQR

SEQ ID NO: 13549 - protein, 10 aa, synthetic construct
  REGION 1..10: note = Description of Artificial Sequence: Synthetic peptide
GGLDGLIYSR

SEQ ID NO: 13550 - protein, 10 aa, synthetic construct
  REGION 1..10: note = Description of Artificial Sequence: Synthetic peptide
VSKQPLSQTR

SEQ ID NO: 13551 - protein, 11 aa, synthetic construct
  REGION 1..11: note = Description of Artificial Sequence: Synthetic peptide
KGRPGNFIQSR

SEQ ID NO: 13552 - protein, 9 aa, synthetic construct
  REGION 1..9: note = Description of Artificial Sequence: Synthetic peptide
VGWPKVRER

SEQ ID NO: 13553 - protein, 9 aa, synthetic construct
  REGION 1..9: note = Description of Artificial Sequence: Synthetic peptide
RQFVNMWQR

SEQ ID NO: 13554 - protein, 9 aa, synthetic construct
  REGION 1..9: note = Description of Artificial Sequence: Synthetic peptide
SITGLILTR

SEQ ID NO: 13555 - protein, 9 aa, synthetic construct
  REGION 1..9: note = Description of Artificial Sequence: Synthetic peptide
VGWPAIRER

SEQ ID NO: 13556 - protein, 11 aa, synthetic construct
  REGION 1..11: note = Description of Artificial Sequence: Synthetic peptide
VGPTPVNIIGR

SEQ ID NO: 13557 - protein, 10 aa, synthetic construct
  REGION 1..10: note = Description of Artificial Sequence: Synthetic peptide
AGRAVLNIPR

SEQ ID NO: 13558 - protein, 9 aa, synthetic construct
  REGION 1..9: note = Description of Artificial Sequence: Synthetic peptide
VGWPNVRER

SEQ ID NO: 13559 - protein, 9 aa, synthetic construct
  REGION 1..9: note = Description of Artificial Sequence: Synthetic peptide
VVNRVRQGY

SEQ ID NO: 13560 - protein, 9 aa, synthetic construct
  REGION 1..9: note = Description of Artificial Sequence: Synthetic peptide
IQLPNKSSW

SEQ ID NO: 13561 - protein, 9 aa, synthetic construct
  REGION 1..9: note = Description of Artificial Sequence: Synthetic peptide
VINRVRQGY

SEQ ID NO: 13562 - protein, 9 aa, synthetic construct
  REGION 1..9: note = Description of Artificial Sequence: Synthetic peptide
IQLPDKSSW

SEQ ID NO: 13563 - protein, 9 aa, synthetic construct
  REGION 1..9: note = Description of Artificial Sequence: Synthetic peptide
VSKGVSQNY

SEQ ID NO: 13564 - protein, 10 aa, synthetic construct
  REGION 1..10: note = Description of Artificial Sequence: Synthetic peptide
AVINRVRQGY

SEQ ID NO: 13565 - protein, 10 aa, synthetic construct
  REGION 1..10: note = Description of Artificial Sequence: Synthetic peptide
SVVNRVRQGY

SEQ ID NO: 13566 - protein, 9 aa, synthetic construct
  REGION 1..9: note = Description of Artificial Sequence: Synthetic peptide
KQISKIQNF

SEQ ID NO: 13567 - protein, 9 aa, synthetic construct
  REGION 1..9: note = Description of Artificial Sequence: Synthetic peptide
IINRVRQGY

SEQ ID NO: 13568 - protein, 9 aa, synthetic construct
  REGION 1..9: note = Description of Artificial Sequence: Synthetic peptide
DNYTDTIYR

SEQ ID NO: 13569 - protein, 10 aa, synthetic construct
  REGION 1..10: note = Description of Artificial Sequence: Synthetic peptide
DNNEIKVVPR

SEQ ID NO: 13570 - protein, 11 aa, synthetic construct
  REGION 1..11: note = Description of Artificial Sequence: Synthetic peptide
ETFYVDGAANR

SEQ ID NO: 13571 - protein, 10 aa, synthetic construct
  REGION 1..10: note = Description of Artificial Sequence: Synthetic peptide
DNNEIKVIPR

SEQ ID NO: 13572 - protein, 9 aa, synthetic construct
  REGION 1..9: note = Description of Artificial Sequence: Synthetic peptide
DILSNNHTR

SEQ ID NO: 13573 - protein, 11 aa, synthetic construct
  REGION 1..11: note = Description of Artificial Sequence: Synthetic peptide
ETFYVDGAASR

SEQ ID NO: 13574 - protein, 9 aa, synthetic construct
  REGION 1..9: note = Description of Artificial Sequence: Synthetic peptide
TNMTNAMNR

SEQ ID NO: 13575 - protein, 11 aa, synthetic construct
  REGION 1..11: note = Description of Artificial Sequence: Synthetic peptide
DNSLPEAGAER

SEQ ID NO: 13576 - protein, 11 aa, synthetic construct
  REGION 1..11: note = Description of Artificial Sequence: Synthetic peptide
DVKQLTEVVQK

SEQ ID NO: 13577 - protein, 10 aa, synthetic construct
  REGION 1..10: note = Description of Artificial Sequence: Synthetic peptide
DLADQLIHLR

SEQ ID NO: 13578 - protein, 11 aa, synthetic construct
  REGION 1..11: note = Description of Artificial Sequence: Synthetic peptide
ENLAFQQGEAR

SEQ ID NO: 13579 - protein, 9 aa, synthetic construct
  REGION 1..9: note = Description of Artificial Sequence: Synthetic peptide
DAWEKIRLR

SEQ ID NO: 13580 - protein, 11 aa, synthetic construct
  REGION 1..11: note = Description of Artificial Sequence: Synthetic peptide
EARKFSSEQTR

SEQ ID NO: 13581 - protein, 9 aa, synthetic construct
  REGION 1..9: note = Description of Artificial Sequence: Synthetic peptide
MYAPPIAGK

SEQ ID NO: 13582 - protein, 9 aa, synthetic construct
  REGION 1..9: note = Description of Artificial Sequence: Synthetic peptide
NNEIKVVPR

SEQ ID NO: 13583 - protein, 9 aa, synthetic construct
  REGION 1..9: note = Description of Artificial Sequence: Synthetic peptide
QARILAVER

SEQ ID NO: 13584 - protein, 9 aa, synthetic construct
  REGION 1..9: note = Description of Artificial Sequence: Synthetic peptide
MVHQAISPR

SEQ ID NO: 13585 - protein, 11 aa, synthetic construct
  REGION 1..11: note = Description of Artificial Sequence: Synthetic peptide
EAWKFSSEQTR

SEQ ID NO: 13586 - protein, 11 aa, synthetic construct
  REGION 1..11: note = Description of Artificial Sequence: Synthetic peptide
ETFYVDGAANR

SEQ ID NO: 13587 - protein, 11 aa, synthetic construct
  REGION 1..11: note = Description of Artificial Sequence: Synthetic peptide
ETFYVDGAASR

SEQ ID NO: 13588 - protein, 9 aa, synthetic construct
  REGION 1..9: note = Description of Artificial Sequence: Synthetic peptide
TNMTNAMNR

SEQ ID NO: 13589 - protein, 9 aa, synthetic construct
  REGION 1..9: note = Description of Artificial Sequence: Synthetic peptide
MVHQAISPR

SEQ ID NO: 13590 - protein, 9 aa, synthetic construct
  REGION 1..9: note = Description of Artificial Sequence: Synthetic peptide
ESVKINCTR

SEQ ID NO: 13591 - protein, 9 aa, synthetic construct
  REGION 1..9: note = Description of Artificial Sequence: Synthetic peptide
EFNGTGLCR

SEQ ID NO: 13592 - protein, 9 aa, synthetic construct
  REGION 1..9: note = Description of Artificial Sequence: Synthetic peptide
CTRPTNITR

SEQ ID NO: 13593 - protein, 9 aa, synthetic construct
  REGION 1..9: note = Description of Artificial Sequence: Synthetic peptide
MYAPPIAGK

SEQ ID NO: 13594 - protein, 9 aa, synthetic construct
  REGION 1..9: note = Description of Artificial Sequence: Synthetic peptide
QARILAVER

SEQ ID NO: 13595 - protein, 9 aa, synthetic construct
  REGION 1..9: note = Description of Artificial Sequence: Synthetic peptide
FYVDGAANR

SEQ ID NO: 13596 - protein, 9 aa, synthetic construct
  REGION 1..9: note = Description of Artificial Sequence: Synthetic peptide
MVHQALSPR

SEQ ID NO: 13597 - protein, 9 aa, synthetic construct
  REGION 1..9: note = Description of Artificial Sequence: Synthetic peptide
MVHQSLSPR

SEQ ID NO: 13598 - protein, 11 aa, synthetic construct
  REGION 1..11: note = Description of Artificial Sequence: Synthetic peptide
TVNDIQKLVGK

SEQ ID NO: 13599 - protein, 10 aa, synthetic construct
  REGION 1..10: note = Description of Artificial Sequence: Synthetic peptide
DNNEIKVVPR

SEQ ID NO: 13600 - protein, 9 aa, synthetic construct
  REGION 1..9: note = Description of Artificial Sequence: Synthetic peptide
EYKKILRQK

SEQ ID NO: 13601 - protein, 11 aa, synthetic construct
  REGION 1..11: note = Description of Artificial Sequence: Synthetic peptide
EARKFSSEQTR

SEQ ID NO: 13602 - protein, 10 aa, synthetic construct
  REGION 1..10: note = Description of Artificial Sequence: Synthetic peptide
DNNEIKVIPR

SEQ ID NO: 13603 - protein, 9 aa, synthetic construct
  REGION 1..9: note = Description of Artificial Sequence: Synthetic peptide
EVHQDPVSK

SEQ ID NO: 13604 - protein, 9 aa, synthetic construct
  REGION 1..9: note = Description of Artificial Sequence: Synthetic peptide
DILSNNHTR

SEQ ID NO: 13605 - protein, 8 aa, synthetic construct
  REGION 1..8: note = Description of Artificial Sequence: Synthetic peptide
MTLTVQAR

SEQ ID NO: 13606 - protein, 11 aa, synthetic construct
  REGION 1..11: note = Description of Artificial Sequence: Synthetic peptide
EAWKFSSEQTR

SEQ ID NO: 13607 - protein, 9 aa, synthetic construct
  REGION 1..9: note = Description of Artificial Sequence: Synthetic peptide
EIHQNPVPK

SEQ ID NO: 13608 - protein, 9 aa, synthetic construct
  REGION 1..9: note = Description of Artificial Sequence: Synthetic peptide
FYVDGAASR

SEQ ID NO: 13609 - protein, 9 aa, synthetic construct
  REGION 1..9: note = Description of Artificial Sequence: Synthetic peptide
NNEIKVVPR

SEQ ID NO: 13610 - protein, 10 aa, synthetic construct
  REGION 1..10: note = Description of Artificial Sequence: Synthetic peptide
EVTTHSFNCR

SEQ ID NO: 13611 - protein, 8 aa, synthetic construct
  REGION 1..8: note = Description of Artificial Sequence: Synthetic peptide
ENLAFQQR

SEQ ID NO: 13612 - protein, 9 aa, synthetic construct
  REGION 1..9: note = Description of Artificial Sequence: Synthetic peptide
DNYTDTIYR

SEQ ID NO: 13613 - protein, 10 aa, synthetic construct
  REGION 1..10: note = Description of Artificial Sequence: Synthetic peptide
ELKKIIGQVR

SEQ ID NO: 13614 - protein, 10 aa, synthetic construct
  REGION 1..10: note = Description of Artificial Sequence: Synthetic peptide
IYQEPHKNLK

SEQ ID NO: 13615 - protein, 9 aa, synthetic construct
  REGION 1..9: note = Description of Artificial Sequence: Synthetic peptide
FNLPPIVAK

SEQ ID NO: 13616 - protein, 11 aa, synthetic construct
  REGION 1..11: note = Description of Artificial Sequence: Synthetic peptide
ETLRPGGGDMR

SEQ ID NO: 13617 - protein, 9 aa, synthetic construct
  REGION 1..9: note = Description of Artificial Sequence: Synthetic peptide
SITGLILTR

SEQ ID NO: 13618 - protein, 10 aa, synthetic construct
  REGION 1..10: note = Description of Artificial Sequence: Synthetic peptide
ATNMTNAMNR

SEQ ID NO: 13619 - protein, 11 aa, synthetic construct
  REGION 1..11: note = Description of Artificial Sequence: Synthetic peptide
TSKGLGISYGR

SEQ ID NO: 13620 - protein, 11 aa, synthetic construct
  REGION 1..11: note = Description of Artificial Sequence: Synthetic peptide
ETFYVDGAANR

SEQ ID NO: 13621 - protein, 11 aa, synthetic construct
  REGION 1..11: note = Description of Artificial Sequence: Synthetic peptide
ETFYVDGAASR

SEQ ID NO: 13622 - protein, 9 aa, synthetic construct
  REGION 1..9: note = Description of Artificial Sequence: Synthetic peptide
TSTSILMQK

SEQ ID NO: 13623 - protein, 9 aa, synthetic construct
  REGION 1..9: note = Description of Artificial Sequence: Synthetic peptide
TATSVLMQK

SEQ ID NO: 13624 - protein, 9 aa, synthetic construct
  REGION 1..9: note = Description of Artificial Sequence: Synthetic peptide
TSTAIMMQK

SEQ ID NO: 13625 - protein, 9 aa, synthetic construct
  REGION 1..9: note = Description of Artificial Sequence: Synthetic peptide
SITGLILTR

SEQ ID NO: 13626 - protein, 10 aa, synthetic construct
  REGION 1..10: note = Description of Artificial Sequence: Synthetic peptide
ITTEINDIKK

SEQ ID NO: 13627 - protein, 11 aa, synthetic construct
  REGION 1..11: note = Description of Artificial Sequence: Synthetic peptide
TVNDIQKLVGK

SEQ ID NO: 13628 - protein, 11 aa, synthetic construct
  REGION 1..11: note = Description of Artificial Sequence: Synthetic peptide
QVTSTSILMQK

SEQ ID NO: 13629 - protein, 9 aa, synthetic construct
  REGION 1..9: note = Description of Artificial Sequence: Synthetic peptide
ESVKINCTR

SEQ ID NO: 13630 - protein, 10 aa, synthetic construct
  REGION 1..10: note = Description of Artificial Sequence: Synthetic peptide
SSITGLILTR

SEQ ID NO: 13631 - protein, 10 aa, synthetic construct
  REGION 1..10: note = Description of Artificial Sequence: Synthetic peptide
ATNMTNAMNR

SEQ ID NO: 13632 - protein, 11 aa, synthetic construct
  REGION 1..11: note = Description of Artificial Sequence: Synthetic peptide
DNSLPEAGAER

SEQ ID NO: 13633 - protein, 11 aa, synthetic construct
  REGION 1..11: note = Description of Artificial Sequence: Synthetic peptide
NATNMTNAMNR

SEQ ID NO: 13634 - protein, 9 aa, synthetic construct
  REGION 1..9: note = Description of Artificial Sequence: Synthetic peptide
EVHQDPVSK

SEQ ID NO: 13635 - protein, 11 aa, synthetic construct
  REGION 1..11: note = Description of Artificial Sequence: Synthetic peptide
QVTATSVLMQK

SEQ ID NO: 13636 - protein, 9 aa, synthetic construct
  REGION 1..9: note = Description of Artificial Sequence: Synthetic peptide
TGAAIMMQK

SEQ ID NO: 13637 - protein, 10 aa, synthetic construct
  REGION 1..10: note = Description of Artificial Sequence: Synthetic peptide
ATSTAIMMQK

SEQ ID NO: 13638 - protein, 11 aa, synthetic construct
  REGION 1..11: note = Description of Artificial Sequence: Synthetic peptide
DSSLPEAGAER

SEQ ID NO: 13639 - protein, 10 aa, synthetic construct
  REGION 1..10: note = Description of Artificial Sequence: Synthetic peptide
ATGEIIGDTR

SEQ ID NO: 13640 - protein, 9 aa, synthetic construct
  REGION 1..9: note = Description of Artificial Sequence: Synthetic peptide
EPVGVAPTK

SEQ ID NO: 13641 - protein, 9 aa, synthetic construct
  REGION 1..9: note = Description of Artificial Sequence: Synthetic peptide
TNMTNAMNR

SEQ ID NO: 13642 - protein, 10 aa, synthetic construct
  REGION 1..10: note = Description of Artificial Sequence: Synthetic peptide
EVNIVTDSQY

SEQ ID NO: 13643 - protein, 11 aa, synthetic construct
  REGION 1..11: note = Description of Artificial Sequence: Synthetic peptide
DTWEGVQAIIR

SEQ ID NO: 13644 - protein, 10 aa, synthetic construct
  REGION 1..10: note = Description of Artificial Sequence: Synthetic peptide
VTSTSILMQK

SEQ ID NO: 13645 - protein, 9 aa, synthetic construct
  REGION 1..9: note = Description of Artificial Sequence: Synthetic peptide
EIHQNPVPK

SEQ ID NO: 13646 - protein, 10 aa, synthetic construct
  REGION 1..10: note = Description of Artificial Sequence: Synthetic peptide
ASITLTVQAR

SEQ ID NO: 13647 - protein, 9 aa, synthetic construct
  REGION 1..9: note = Description of Artificial Sequence: Synthetic peptide
FAVLSVVNR

SEQ ID NO: 13648 - protein, 10 aa, synthetic construct
  REGION 1..10: note = Description of Artificial Sequence: Synthetic peptide
DCFSDSAIRK

SEQ ID NO: 13649 - protein, 10 aa, synthetic construct
  REGION 1..10: note = Description of Artificial Sequence: Synthetic peptide
VTATSVLMQK

SEQ ID NO: 13650 - protein, 10 aa, synthetic construct
  REGION 1..10: note = Description of Artificial Sequence: Synthetic peptide
DNNEIKVVPR

SEQ ID NO: 13651 - protein, 10 aa, synthetic construct
  REGION 1..10: note = Description of Artificial Sequence: Synthetic peptide
NVAFQQGEAR

SEQ ID NO: 13652 - protein, 10 aa, synthetic construct
  REGION 1..10: note = Description of Artificial Sequence: Synthetic peptide
ATGEIIGDIR

SEQ ID NO: 13653 - protein, 11 aa, synthetic construct
  REGION 1..11: note = Description of Artificial Sequence: Synthetic peptide
DVKQLTEVVQK

SEQ ID NO: 13654 - protein, 9 aa, synthetic construct
  REGION 1..9: note = Description of Artificial Sequence: Synthetic peptide
NITGLLLTR

SEQ ID NO: 13655 - protein, 10 aa, synthetic construct
  REGION 1..10: note = Description of Artificial Sequence: Synthetic peptide
NSLPEAGAER

SEQ ID NO: 13656 - protein, 9 aa, synthetic construct
  REGION 1..9: note = Description of Artificial Sequence: Synthetic peptide
MVHQAISPR

SEQ ID NO: 13657 - protein, 11 aa, synthetic construct
  REGION 1..11: note = Description of Artificial Sequence: Synthetic peptide
NSSITGLILTR

SEQ ID NO: 13658 - protein, 11 aa, synthetic construct
  REGION 1..11: note = Description of Artificial Sequence: Synthetic peptide
YATGEIIGDTR

SEQ ID NO: 13659 - protein, 10 aa, synthetic construct
  REGION 1..10: note = Description of Artificial Sequence: Synthetic peptide
DIIATDIQTK

SEQ ID NO: 13660 - protein, 11 aa, synthetic construct
  REGION 1..11: note = Description of Artificial Sequence: Synthetic peptide
TAIAVAEGTDR

SEQ ID NO: 13661 - protein, 10 aa, synthetic construct
  REGION 1..10: note = Description of Artificial Sequence: Synthetic peptide
ASMTLTVQAR

SEQ ID NO: 13662 - protein, 10 aa, synthetic construct
  REGION 1..10: note = Description of Artificial Sequence: Synthetic peptide
ATGAAIMMQK

SEQ ID NO: 13663 - protein, 11 aa, synthetic construct
  REGION 1..11: note = Description of Artificial Sequence: Synthetic peptide
VGPTPVNIIGR

SEQ ID NO: 13664 - protein, 10 aa, synthetic construct
  REGION 1..10: note = Description of Artificial Sequence: Synthetic peptide
EQAPPLVSLK

SEQ ID NO: 13665 - protein, 9 aa, synthetic construct
  REGION 1..9: note = Description of Artificial Sequence: Synthetic peptide
DNYTDTIYR

SEQ ID NO: 13666 - protein, 9 aa, synthetic construct
  REGION 1..9: note = Description of Artificial Sequence: Synthetic peptide
VAFQQGEAR

SEQ ID NO: 13667 - protein, 10 aa, synthetic construct
  REGION 1..10: note = Description of Artificial Sequence: Synthetic peptide
VTIKVEGQLR

SEQ ID NO: 13668 - protein, 9 aa, synthetic construct
  REGION 1..9: note = Description of Artificial Sequence: Synthetic peptide
ETAYFILKL

SEQ ID NO: 13669 - protein, 9 aa, synthetic construct
  REGION 1..9: note = Description of Artificial Sequence: Synthetic peptide
EAAYFILKL

SEQ ID NO: 13670 - protein, 9 aa, synthetic construct
  REGION 1..9: note = Description of Artificial Sequence: Synthetic peptide
ETAYFLLKL

SEQ ID NO: 13671 - protein, 9 aa, synthetic construct
  REGION 1..9: note = Description of Artificial Sequence: Synthetic peptide
NTVAVLYYV

SEQ ID NO: 13672 - protein, 9 aa, synthetic construct
  REGION 1..9: note = Description of Artificial Sequence: Synthetic peptide
QLTEVVQKV

SEQ ID NO: 13673 - protein, 9 aa, synthetic construct
  REGION 1..9: note = Description of Artificial Sequence: Synthetic peptide
TVLSIINRV

SEQ ID NO: 13674 - protein, 9 aa, synthetic construct
  REGION 1..9: note = Description of Artificial Sequence: Synthetic peptide
YAAPIAGQI

SEQ ID NO: 13675 - protein, 10 aa, synthetic construct
  REGION 1..10: note = Description of Artificial Sequence: Synthetic peptide
EIIKEPVHGV

SEQ ID NO: 13676 - protein, 9 aa, synthetic construct
  REGION 1..9: note = Description of Artificial Sequence: Synthetic peptide
FIPGNINNL

SEQ ID NO: 13677 - protein, 9 aa, synthetic construct
  REGION 1..9: note = Description of Artificial Sequence: Synthetic peptide
QLTEVVQKI

SEQ ID NO: 13678 - protein, 9 aa, synthetic construct
  REGION 1..9: note = Description of Artificial Sequence: Synthetic peptide
NTIVVLYYV

SEQ ID NO: 13679 - protein, 9 aa, synthetic construct
  REGION 1..9: note = Description of Artificial Sequence: Synthetic peptide
TVNDIQKLV

SEQ ID NO: 13680 - protein, 9 aa, synthetic construct
  REGION 1..9: note = Description of Artificial Sequence: Synthetic peptide
EVSQNYPIV

SEQ ID NO: 13681 - protein, 9 aa, synthetic construct
  REGION 1..9: note = Description of Artificial Sequence: Synthetic peptide
TTSNLQEQI

SEQ ID NO: 13682 - protein, 9 aa, synthetic construct
  REGION 1..9: note = Description of Artificial Sequence: Synthetic peptide
EVTTHSFNC

SEQ ID NO: 13683 - protein, 9 aa, synthetic construct
  REGION 1..9: note = Description of Artificial Sequence: Synthetic peptide
FTSAVVKAA

SEQ ID NO: 13684 - protein, 9 aa, synthetic construct
  REGION 1..9: note = Description of Artificial Sequence: Synthetic peptide
EIKSLYNTV

SEQ ID NO: 13685 - protein, 9 aa, synthetic construct
  REGION 1..9: note = Description of Artificial Sequence: Synthetic peptide
EQAPPLVSL

SEQ ID NO: 13686 - protein, 9 aa, synthetic construct
  REGION 1..9: note = Description of Artificial Sequence: Synthetic peptide
LTIAIVAYI

SEQ ID NO: 13687 - protein, 10 aa, synthetic construct
  REGION 1..10: note = Description of Artificial Sequence: Synthetic peptide
EIVNQIIEQL

SEQ ID NO: 13688 - protein, 9 aa, synthetic construct
  REGION 1..9: note = Description of Artificial Sequence: Synthetic peptide
IVNQIIEQL

SEQ ID NO: 13689 - protein, 9 aa, synthetic construct
  REGION 1..9: note = Description of Artificial Sequence: Synthetic peptide
YTAFTIPSI

SEQ ID NO: 13690 - protein, 9 aa, synthetic construct
  REGION 1..9: note = Description of Artificial Sequence: Synthetic peptide
DTITLPCRI

SEQ ID NO: 13691 - protein, 9 aa, synthetic construct
  REGION 1..9: note = Description of Artificial Sequence: Synthetic peptide
FTSTVVKAA

SEQ ID NO: 13692 - protein, 9 aa, synthetic construct
  REGION 1..9: note = Description of Artificial Sequence: Synthetic peptide
GAASITLTV

SEQ ID NO: 13693 - protein, 9 aa, synthetic construct
  REGION 1..9: note = Description of Artificial Sequence: Synthetic peptide
TTSTLQEQI

SEQ ID NO: 13694 - protein, 9 aa, synthetic construct
  REGION 1..9: note = Description of Artificial Sequence: Synthetic peptide
NTSTVTQAC

SEQ ID NO: 13695 - protein, 9 aa, synthetic construct
  REGION 1..9: note = Description of Artificial Sequence: Synthetic peptide
DIAGTTSNL

SEQ ID NO: 13696 - protein, 9 aa, synthetic construct
  REGION 1..9: note = Description of Artificial Sequence: Synthetic peptide
MTSNPPVPV

SEQ ID NO: 13697 - protein, 9 aa, synthetic construct
  REGION 1..9: note = Description of Artificial Sequence: Synthetic peptide
EVIPMFSAL

SEQ ID NO: 13698 - protein, 9 aa, synthetic construct
  REGION 1..9: note = Description of Artificial Sequence: Synthetic peptide
TTALFNTTL

SEQ ID NO: 13699 - protein, 11 aa, synthetic construct
  REGION 1..11: note = Description of Artificial Sequence: Synthetic peptide
EVIPAETGQEA

SEQ ID NO: 13700 - protein, 9 aa, synthetic construct
  REGION 1..9: note = Description of Artificial Sequence: Synthetic peptide
AVLSIINRV

SEQ ID NO: 13701 - protein, 9 aa, synthetic construct
  REGION 1..9: note = Description of Artificial Sequence: Synthetic peptide
QNYPIVQNI

SEQ ID NO: 13702 - protein, 9 aa, synthetic construct
  REGION 1..9: note = Description of Artificial Sequence: Synthetic peptide
SAISLFDTI

SEQ ID NO: 13703 - protein, 11 aa, synthetic construct
  REGION 1..11: note = Description of Artificial Sequence: Synthetic peptide
ETFYVDGAANR

SEQ ID NO: 13704 - protein, 9 aa, synthetic construct
  REGION 1..9: note = Description of Artificial Sequence: Synthetic peptide
MTGNPPVPV

SEQ ID NO: 13705 - protein, 10 aa, synthetic construct
  REGION 1..10: note = Description of Artificial Sequence: Synthetic peptide
EVANNTNENI

SEQ ID NO: 13706 - protein, 9 aa, synthetic construct
  REGION 1..9: note = Description of Artificial Sequence: Synthetic peptide
AAVDLSHFL

SEQ ID NO: 13707 - protein, 9 aa, synthetic construct
  REGION 1..9: note = Description of Artificial Sequence: Synthetic peptide
LVNQIIEQL

SEQ ID NO: 13708 - protein, 9 aa, synthetic construct
  REGION 1..9: note = Description of Artificial Sequence: Synthetic peptide
ESFGFGEEI

SEQ ID NO: 13709 - protein, 9 aa, synthetic construct
  REGION 1..9: note = Description of Artificial Sequence: Synthetic peptide
EVTTHSFSC

SEQ ID NO: 13710 - protein, 10 aa, synthetic construct
  REGION 1..10: note = Description of Artificial Sequence: Synthetic peptide
TVSSLDFPQI

SEQ ID NO: 13711 - protein, 11 aa, synthetic construct
  REGION 1..11: note = Description of Artificial Sequence: Synthetic peptide
EVVQKIATESI

SEQ ID NO: 13712 - protein, 9 aa, synthetic construct
  REGION 1..9: note = Description of Artificial Sequence: Synthetic peptide
QNYPIVQNL

SEQ ID NO: 13713 - protein, 9 aa, synthetic construct
  REGION 1..9: note = Description of Artificial Sequence: Synthetic peptide
EQVPPLISL

SEQ ID NO: 13714 - protein, 9 aa, synthetic construct
  REGION 1..9: note = Description of Artificial Sequence: Synthetic peptide
NSSNIYKLI

SEQ ID NO: 13715 - protein, 10 aa, synthetic construct
  REGION 1..10: note = Description of Artificial Sequence: Synthetic peptide
EVGPFIPGDI

SEQ ID NO: 13716 - protein, 9 aa, synthetic construct
  REGION 1..9: note = Description of Artificial Sequence: Synthetic peptide
SPAIFQSSM

SEQ ID NO: 13717 - protein, 9 aa, synthetic construct
  REGION 1..9: note = Description of Artificial Sequence: Synthetic peptide
SPASRELRV

SEQ ID NO: 13718 - protein, 9 aa, synthetic construct
  REGION 1..9: note = Description of Artificial Sequence: Synthetic peptide
ILRPIGGEM

SEQ ID NO: 13719 - protein, 9 aa, synthetic construct
  REGION 1..9: note = Description of Artificial Sequence: Synthetic peptide
RPMTYKAAL

SEQ ID NO: 13720 - protein, 10 aa, synthetic construct
  REGION 1..10: note = Description of Artificial Sequence: Synthetic peptide
RPNNNTRRSI

SEQ ID NO: 13721 - protein, 9 aa, synthetic construct
  REGION 1..9: note = Description of Artificial Sequence: Synthetic peptide
APIAGQIQC

SEQ ID NO: 13722 - protein, 10 aa, synthetic construct
  REGION 1..10: note = Description of Artificial Sequence: Synthetic peptide
RPNNNTRKSI

SEQ ID NO: 13723 - protein, 9 aa, synthetic construct
  REGION 1..9: note = Description of Artificial Sequence: Synthetic peptide
GPASRGLRV

SEQ ID NO: 13724 - protein, 9 aa, synthetic construct
  REGION 1..9: note = Description of Artificial Sequence: Synthetic peptide
QIRDTKEAL

SEQ ID NO: 13725 - protein, 10 aa, synthetic construct
  REGION 1..10: note = Description of Artificial Sequence: Synthetic peptide
APPLVSLKSL

SEQ ID NO: 13726 - protein, 8 aa, synthetic construct
  REGION 1..8: note = Description of Artificial Sequence: Synthetic peptide
KPVVSTQL

SEQ ID NO: 13727 - protein, 8 aa, synthetic construct
  REGION 1..8: note = Description of Artificial Sequence: Synthetic peptide
RPVVSTQL

SEQ ID NO: 13728 - protein, 10 aa, synthetic construct
  REGION 1..10: note = Description of Artificial Sequence: Synthetic peptide
KEMYPPLTSL

SEQ ID NO: 13729 - protein, 8 aa, synthetic construct
  REGION 1..8: note = Description of Artificial Sequence: Synthetic peptide
IPGNINNL

SEQ ID NO: 13730 - protein, 10 aa, synthetic construct
  REGION 1..10: note = Description of Artificial Sequence: Synthetic peptide
SPIETVPVKL

SEQ ID NO: 13731 - protein, 10 aa, synthetic construct
  REGION 1..10: note = Description of Artificial Sequence: Synthetic peptide
VPTDPSPQEL

SEQ ID NO: 13732 - protein, 9 aa, synthetic construct
  REGION 1..9: note = Description of Artificial Sequence: Synthetic peptide
RVRGGDSSL

SEQ ID NO: 13733 - protein, 10 aa, synthetic construct
  REGION 1..10: note = Description of Artificial Sequence: Synthetic peptide
RPTNITRRSM

SEQ ID NO: 13734 - protein, 8 aa, synthetic construct
  REGION 1..8: note = Description of Artificial Sequence: Synthetic peptide
AIRVGGQL

SEQ ID NO: 13735 - protein, 10 aa, synthetic construct
  REGION 1..10: note = Description of Artificial Sequence: Synthetic peptide
APNVTISEEM

SEQ ID NO: 13736 - protein, 10 aa, synthetic construct
  REGION 1..10: note = Description of Artificial Sequence: Synthetic peptide
VPTDPNPQEL

SEQ ID NO: 13737 - protein, 9 aa, synthetic construct
  REGION 1..9: note = Description of Artificial Sequence: Synthetic peptide
SPAIFQCSM

SEQ ID NO: 13738 - protein, 9 aa, synthetic construct
  REGION 1..9: note = Description of Artificial Sequence: Synthetic peptide
TPQDLNTML

SEQ ID NO: 13739 - protein, 9 aa, synthetic construct
  REGION 1..9: note = Description of Artificial Sequence: Synthetic peptide
ELKNSAISL

SEQ ID NO: 13740 - protein, 9 aa, synthetic construct
  REGION 1..9: note = Description of Artificial Sequence: Synthetic peptide
EMYPPLTSL

SEQ ID NO: 13741 - protein, 9 aa, synthetic construct
  REGION 1..9: note = Description of Artificial Sequence: Synthetic peptide
FIPGNINNL

SEQ ID NO: 13742 - protein, 8 aa, synthetic construct
  REGION 1..8: note = Description of Artificial Sequence: Synthetic peptide
DPVSKQPL

SEQ ID NO: 13743 - protein, 9 aa, synthetic construct
  REGION 1..9: note = Description of Artificial Sequence: Synthetic peptide
DSAIRKAIL

SEQ ID NO: 13744 - protein, 9 aa, synthetic construct
  REGION 1..9: note = Description of Artificial Sequence: Synthetic peptide
EAMSKATST

SEQ ID NO: 13745 - protein, 8 aa, synthetic construct
  REGION 1..8: note = Description of Artificial Sequence: Synthetic peptide
DPVPKQPL

SEQ ID NO: 13746 - protein, 8 aa, synthetic construct
  REGION 1..8: note = Description of Artificial Sequence: Synthetic peptide
IQKEKVYL

SEQ ID NO: 13747 - protein, 8 aa, synthetic construct
  REGION 1..8: note = Description of Artificial Sequence: Synthetic peptide
TTNQKTEL

SEQ ID NO: 13748 - protein, 8 aa, synthetic construct
  REGION 1..8: note = Description of Artificial Sequence: Synthetic peptide
DNYTKTIY

SEQ ID NO: 13749 - protein, 9 aa, synthetic construct
  REGION 1..9: note = Description of Artificial Sequence: Synthetic peptide
QLQARILAV

SEQ ID NO: 13750 - protein, 8 aa, synthetic construct
  REGION 1..8: note = Description of Artificial Sequence: Synthetic peptide
HLKTAVQM

SEQ ID NO: 13751 - protein, 8 aa, synthetic construct
  REGION 1..8: note = Description of Artificial Sequence: Synthetic peptide
GQMVHQSL

SEQ ID NO: 13752 - protein, 9 aa, synthetic construct
  REGION 1..9: note = Description of Artificial Sequence: Synthetic peptide
ELKISAISL

SEQ ID NO: 13753 - protein, 11 aa, synthetic construct
  REGION 1..11: note = Description of Artificial Sequence: Synthetic peptide
TQVDPGLADQL

SEQ ID NO: 13754 - protein, 11 aa, synthetic construct
  REGION 1..11: note = Description of Artificial Sequence: Synthetic peptide
TQVDPDLADQL

SEQ ID NO: 13755 - protein, 10 aa, synthetic construct
  REGION 1..10: note = Description of Artificial Sequence: Synthetic peptide
GQIRDQAEHL

SEQ ID NO: 13756 - protein, 9 aa, synthetic construct
  REGION 1..9: note = Description of Artificial Sequence: Synthetic peptide
QLTEVVQKI

SEQ ID NO: 13757 - protein, 10 aa, synthetic construct
  REGION 1..10: note = Description of Artificial Sequence: Synthetic peptide
HQDPVSKQPL

SEQ ID NO: 13758 - protein, 10 aa, synthetic construct
  REGION 1..10: note = Description of Artificial Sequence: Synthetic peptide
GQVRDQAEHL

SEQ ID NO: 13759 - protein, 9 aa, synthetic construct
  REGION 1..9: note = Description of Artificial Sequence: Synthetic peptide
RQGAERALL

SEQ ID NO: 13760 - protein, 10 aa, synthetic construct
  REGION 1..10: note = Description of Artificial Sequence: Synthetic peptide
IQIRDTKEAL

SEQ ID NO: 13761 - protein, 10 aa, synthetic construct
  REGION 1..10: note = Description of Artificial Sequence: Synthetic peptide
HQDPVPKQPL

SEQ ID NO: 13762 - protein, 9 aa, synthetic construct
  REGION 1..9: note = Description of Artificial Sequence: Synthetic peptide
FLDNVTENF

SEQ ID NO: 13763 - protein, 9 aa, synthetic construct
  REGION 1..9: note = Description of Artificial Sequence: Synthetic peptide
VQFNESVKI

SEQ ID NO: 13764 - protein, 9 aa, synthetic construct
  REGION 1..9: note = Description of Artificial Sequence: Synthetic peptide
EQAPPLVSL

SEQ ID NO: 13765 - protein, 9 aa, synthetic construct
  REGION 1..9: note = Description of Artificial Sequence: Synthetic peptide
AQEDEEVGF

SEQ ID NO: 13766 - protein, 9 aa, synthetic construct
  REGION 1..9: note = Description of Artificial Sequence: Synthetic peptide
YQSNPYPKL

SEQ ID NO: 13767 - protein, 9 aa, synthetic construct
  REGION 1..9: note = Description of Artificial Sequence: Synthetic peptide
IQLPDKSSW

SEQ ID NO: 13768 - protein, 9 aa, synthetic construct
  REGION 1..9: note = Description of Artificial Sequence: Synthetic peptide
QLTEVVQKI

SEQ ID NO: 13769 - protein, 9 aa, synthetic construct
  REGION 1..9: note = Description of Artificial Sequence: Synthetic peptide
QLTEVVQKV

SEQ ID NO: 13770 - protein, 9 aa, synthetic construct
  REGION 1..9: note = Description of Artificial Sequence: Synthetic peptide
VQFNESVKI

SEQ ID NO: 13771 - protein, 9 aa, synthetic construct
  REGION 1..9: note = Description of Artificial Sequence: Synthetic peptide
GAASITLTV

SEQ ID NO: 13772 - protein, 9 aa, synthetic construct
  REGION 1..9: note = Description of Artificial Sequence: Synthetic peptide
VQFKNPVKI

SEQ ID NO: 13773 - protein, 8 aa, synthetic construct
  REGION 1..8: note = Description of Artificial Sequence: Synthetic peptide
GQMVHQAI

SEQ ID NO: 13774 - protein, 9 aa, synthetic construct
  REGION 1..9: note = Description of Artificial Sequence: Synthetic peptide
QQHLLQLTV

SEQ ID NO: 13775 - protein, 9 aa, synthetic construct
  REGION 1..9: note = Description of Artificial Sequence: Synthetic peptide
GQVDCSPGI

SEQ ID NO: 13776 - protein, 9 aa, synthetic construct
  REGION 1..9: note = Description of Artificial Sequence: Synthetic peptide
GAASMTLTV

SEQ ID NO: 13777 - protein, 8 aa, synthetic construct
  REGION 1..8: note = Description of Artificial Sequence: Synthetic peptide
SQVTATSV

SEQ ID NO: 13778 - protein, 8 aa, synthetic construct
  REGION 1..8: note = Description of Artificial Sequence: Synthetic peptide
VQIQPLGI

SEQ ID NO: 13779 - protein, 9 aa, synthetic construct
  REGION 1..9: note = Description of Artificial Sequence: Synthetic peptide
VQKIATESI

SEQ ID NO: 13780 - protein, 9 aa, synthetic construct
  REGION 1..9: note = Description of Artificial Sequence: Synthetic peptide
AVLSVVNRV

SEQ ID NO: 13781 - protein, 9 aa, synthetic construct
  REGION 1..9: note = Description of Artificial Sequence: Synthetic peptide
ALGEVGLFI

SEQ ID NO: 13782 - protein, 8 aa, synthetic construct
  REGION 1..8: note = Description of Artificial Sequence: Synthetic peptide
SQVTSTSI

SEQ ID NO: 13783 - protein, 9 aa, synthetic construct
  REGION 1..9: note = Description of Artificial Sequence: Synthetic peptide
AVLAVINRV

SEQ ID NO: 13784 - protein, 9 aa, synthetic construct
  REGION 1..9: note = Description of Artificial Sequence: Synthetic peptide
SQIYPGIRV

SEQ ID NO: 13785 - protein, 9 aa, synthetic construct
  REGION 1..9: note = Description of Artificial Sequence: Synthetic peptide
ALGEVGPLI

SEQ ID NO: 13786 - protein, 9 aa, synthetic construct
  REGION 1..9: note = Description of Artificial Sequence: Synthetic peptide
SQIYPGIRI

SEQ ID NO: 13787 - protein, 9 aa, synthetic construct
  REGION 1..9: note = Description of Artificial Sequence: Synthetic peptide
YQLETEPII

SEQ ID NO: 13788 - protein, 9 aa, synthetic construct
  REGION 1..9: note = Description of Artificial Sequence: Synthetic peptide
ALGEVGPFI

SEQ ID NO: 13789 - protein, 8 aa, synthetic construct
  REGION 1..8: note = Description of Artificial Sequence: Synthetic peptide
VQITPLCV

SEQ ID NO: 13790 - protein, 9 aa, synthetic construct
  REGION 1..9: note = Description of Artificial Sequence: Synthetic peptide
VQKVATEGI

SEQ ID NO: 13791 - protein, 10 aa, synthetic construct
  REGION 1..10: note = Description of Artificial Sequence: Synthetic peptide
RQYDQIPIEI

SEQ ID NO: 13792 - protein, 9 aa, synthetic construct
  REGION 1..9: note = Description of Artificial Sequence: Synthetic peptide
GQAMYAPPI

SEQ ID NO: 13793 - protein, 10 aa, synthetic construct
  REGION 1..10: note = Description of Artificial Sequence: Synthetic peptide
ALTDVVPLTV

SEQ ID NO: 13794 - protein, 8 aa, synthetic construct
  REGION 1..8: note = Description of Artificial Sequence: Synthetic peptide
GQMVHQSL

SEQ ID NO: 13795 - protein, 10 aa, synthetic construct
  REGION 1..10: note = Description of Artificial Sequence: Synthetic peptide
RQYDQVPIEI

SEQ ID NO: 13796 - protein, 9 aa, synthetic construct
  REGION 1..9: note = Description of Artificial Sequence: Synthetic peptide
AVLSIINRV

SEQ ID NO: 13797 - protein, 8 aa, synthetic construct
  REGION 1..8: note = Description of Artificial Sequence: Synthetic peptide
GQMVHQAL

SEQ ID NO: 13798 - protein, 9 aa, synthetic construct
  REGION 1..9: note = Description of Artificial Sequence: Synthetic peptide
VQNIQGQMV

SEQ ID NO: 13799 - protein, 9 aa, synthetic construct
  REGION 1..9: note = Description of Artificial Sequence: Synthetic peptide
ILAEAMSQV

SEQ ID NO: 13800 - protein, 9 aa, synthetic construct
  REGION 1..9: note = Description of Artificial Sequence: Synthetic peptide
VQKIATEGI

SEQ ID NO: 13801 - protein, 9 aa, synthetic construct
  REGION 1..9: note = Description of Artificial Sequence: Synthetic peptide
AIVAYIVAI

SEQ ID NO: 13802 - protein, 9 aa, synthetic construct
  REGION 1..9: note = Description of Artificial Sequence: Synthetic peptide
GQIQCNSSI

SEQ ID NO: 13803 - protein, 9 aa, synthetic construct
  REGION 1..9: note = Description of Artificial Sequence: Synthetic peptide
YAAPIAGQI

SEQ ID NO: 13804 - protein, 9 aa, synthetic construct
  REGION 1..9: note = Description of Artificial Sequence: Synthetic peptide
GQKAIGTVL

SEQ ID NO: 13805 - protein, 9 aa, synthetic construct
  REGION 1..9: note = Description of Artificial Sequence: Synthetic peptide
VVQIQPLGI

SEQ ID NO: 13806 - protein, 9 aa, synthetic construct
  REGION 1..9: note = Description of Artificial Sequence: Synthetic peptide
VQFNRSVAI

SEQ ID NO: 13807 - protein, 8 aa, synthetic construct
  REGION 1..8: note = Description of Artificial Sequence: Synthetic peptide
NQIIEQLI

SEQ ID NO: 13808 - protein, 9 aa, synthetic construct
  REGION 1..9: note = Description of Artificial Sequence: Synthetic peptide
VVKIEPLGV

SEQ ID NO: 13809 - protein, 8 aa, synthetic construct
  REGION 1..8: note = Description of Artificial Sequence: Synthetic peptide
GQEAAYFI

SEQ ID NO: 13810 - protein, 9 aa, synthetic construct
  REGION 1..9: note = Description of Artificial Sequence: Synthetic peptide
QNYPIVQNI

SEQ ID NO: 13811 - protein, 9 aa, synthetic construct
  REGION 1..9: note = Description of Artificial Sequence: Synthetic peptide
GQLQPSLQT

SEQ ID NO: 13812 - protein, 9 aa, synthetic construct
  REGION 1..9: note = Description of Artificial Sequence: Synthetic peptide
TLTQACPKV

SEQ ID NO: 13813 - protein, 9 aa, synthetic construct
  REGION 1..9: note = Description of Artificial Sequence: Synthetic peptide
GQLQSSLQT

SEQ ID NO: 13814 - protein, 10 aa, synthetic construct
  REGION 1..10: note = Description of Artificial Sequence: Synthetic peptide
KQLTEVVQKI

SEQ ID NO: 13815 - protein, 9 aa, synthetic construct
  REGION 1..9: note = Description of Artificial Sequence: Synthetic peptide
TVLSIINRV

SEQ ID NO: 13816 - protein, 9 aa, synthetic construct
  REGION 1..9: note = Description of Artificial Sequence: Synthetic peptide
YQSNPYPKL

SEQ ID NO: 13817 - protein, 8 aa, synthetic construct
  REGION 1..8: note = Description of Artificial Sequence: Synthetic peptide
GQETAYFI

SEQ ID NO: 13818 - protein, 10 aa, synthetic construct
  REGION 1..10: note = Description of Artificial Sequence: Synthetic peptide
RQYDQVSIEI

SEQ ID NO: 13819 - protein, 9 aa, synthetic construct
  REGION 1..9: note = Description of Artificial Sequence: Synthetic peptide
GLYPPLTSL

SEQ ID NO: 13820 - protein, 10 aa, synthetic construct
  REGION 1..10: note = Description of Artificial Sequence: Synthetic peptide
KVVQIQPLGI

SEQ ID NO: 13821 - protein, 9 aa, synthetic construct
  REGION 1..9: note = Description of Artificial Sequence: Synthetic peptide
NQKTELQAI

SEQ ID NO: 13822 - protein, 9 aa, synthetic construct
  REGION 1..9: note = Description of Artificial Sequence: Synthetic peptide
ERFALNPSL

SEQ ID NO: 13823 - protein, 9 aa, synthetic construct
  REGION 1..9: note = Description of Artificial Sequence: Synthetic peptide
ERYLKDQQL

SEQ ID NO: 13824 - protein, 8 aa, synthetic construct
  REGION 1..8: note = Description of Artificial Sequence: Synthetic peptide
ERILSTCL

SEQ ID NO: 13825 - protein, 9 aa, synthetic construct
  REGION 1..9: note = Description of Artificial Sequence: Synthetic peptide
ERQGTVSSL

SEQ ID NO: 13826 - protein, 9 aa, synthetic construct
  REGION 1..9: note = Description of Artificial Sequence: Synthetic peptide
ERFALNPGL

SEQ ID NO: 13827 - protein, 9 aa, synthetic construct
  REGION 1..9: note = Description of Artificial Sequence: Synthetic peptide
NRSVAINCT

SEQ ID NO: 13828 - protein, 8 aa, synthetic construct
  REGION 1..8: note = Description of Artificial Sequence: Synthetic peptide
GQMVHQAL

SEQ ID NO: 13829 - protein, 8 aa, synthetic construct
  REGION 1..8: note = Description of Artificial Sequence: Synthetic peptide
GQMVHQSL

SEQ ID NO: 13830 - protein, 9 aa, synthetic construct
  REGION 1..9: note = Description of Artificial Sequence: Synthetic peptide
ERYLKDQQL

SEQ ID NO: 13831 - protein, 9 aa, synthetic construct
  REGION 1..9: note = Description of Artificial Sequence: Synthetic peptide
VQFNRSVAI

SEQ ID NO: 13832 - protein, 8 aa, synthetic construct
  REGION 1..8: note = Description of Artificial Sequence: Synthetic peptide
LQAIHLAL

SEQ ID NO: 13833 - protein, 8 aa, synthetic construct
  REGION 1..8: note = Description of Artificial Sequence: Synthetic peptide
GQMVHQAI

SEQ ID NO: 13834 - protein, 9 aa, synthetic construct
  REGION 1..9: note = Description of Artificial Sequence: Synthetic peptide
DQYNKTVGF

SEQ ID NO: 13835 - protein, 8 aa, synthetic construct
  REGION 1..8: note = Description of Artificial Sequence: Synthetic peptide
YQEPHRNL

SEQ ID NO: 13836 - protein, 9 aa, synthetic construct
  REGION 1..9: note = Description of Artificial Sequence: Synthetic peptide
ERFALNPSL

SEQ ID NO: 13837 - protein, 8 aa, synthetic construct
  REGION 1..8: note = Description of Artificial Sequence: Synthetic peptide
IQKLVGKL

SEQ ID NO: 13838 - protein, 10 aa, synthetic construct
  REGION 1..10: note = Description of Artificial Sequence: Synthetic peptide
VQINNSNTSY

SEQ ID NO: 13839 - protein, 9 aa, synthetic construct
  REGION 1..9: note = Description of Artificial Sequence: Synthetic peptide
QINNSNTSY

SEQ ID NO: 13840 - protein, 9 aa, synthetic construct
  REGION 1..9: note = Description of Artificial Sequence: Synthetic peptide
GQKAIGTVL

SEQ ID NO: 13841 - protein, 9 aa, synthetic construct
  REGION 1..9: note = Description of Artificial Sequence: Synthetic peptide
TSKGLGISY

SEQ ID NO: 13842 - protein, 9 aa, synthetic construct
  REGION 1..9: note = Description of Artificial Sequence: Synthetic peptide
VSKGVSQNY

SEQ ID NO: 13843 - protein, 8 aa, synthetic construct
  REGION 1..8: note = Description of Artificial Sequence: Synthetic peptide
GQMVHQSL

SEQ ID NO: 13844 - protein, 9 aa, synthetic construct
  REGION 1..9: note = Description of Artificial Sequence: Synthetic peptide
TLIKIATEF

SEQ ID NO: 13845 - protein, 9 aa, synthetic construct
  REGION 1..9: note = Description of Artificial Sequence: Synthetic peptide
TLKNVSGEF

SEQ ID NO: 13846 - protein, 8 aa, synthetic construct
  REGION 1..8: note = Description of Artificial Sequence: Synthetic peptide
GQMVHQAL

SEQ ID NO: 13847 - protein, 9 aa, synthetic construct
  REGION 1..9: note = Description of Artificial Sequence: Synthetic peptide
KQISKIQNF

SEQ ID NO: 13848 - protein, 8 aa, synthetic construct
  REGION 1..8: note = Description of Artificial Sequence: Synthetic peptide
GQYIYNTY

SEQ ID NO: 13849 - protein, 9 aa, synthetic construct
  REGION 1..9: note = Description of Artificial Sequence: Synthetic peptide
SQVTATSVL

SEQ ID NO: 13850 - protein, 8 aa, synthetic construct
  REGION 1..8: note = Description of Artificial Sequence: Synthetic peptide
GQHIYNTY

SEQ ID NO: 13851 - protein, 11 aa, synthetic construct
  REGION 1..11: note = Description of Artificial Sequence: Synthetic peptide
VVQINNSNTSY

SEQ ID NO: 13852 - protein, 9 aa, synthetic construct
  REGION 1..9: note = Description of Artificial Sequence: Synthetic peptide
AIMMQKSNF

SEQ ID NO: 13853 - protein, 9 aa, synthetic construct
  REGION 1..9: note = Description of Artificial Sequence: Synthetic peptide
TQACPKVSF

SEQ ID NO: 13854 - protein, 9 aa, synthetic construct
  REGION 1..9: note = Description of Artificial Sequence: Synthetic peptide
KQITKIQNF

SEQ ID NO: 13855 - protein, 9 aa, synthetic construct
  REGION 1..9: note = Description of Artificial Sequence: Synthetic peptide
VQKIATESI

SEQ ID NO: 13856 - protein, 9 aa, synthetic construct
  REGION 1..9: note = Description of Artificial Sequence: Synthetic peptide
TQIGCTLNF

SEQ ID NO: 13857 - protein, 11 aa, synthetic construct
  REGION 1..11: note = Description of Artificial Sequence: Synthetic peptide
VVPINNSTSEY

SEQ ID NO: 13858 - protein, 9 aa, synthetic construct
  REGION 1..9: note = Description of Artificial Sequence: Synthetic peptide
PINNSTSEY

SEQ ID NO: 13859 - protein, 9 aa, synthetic construct
  REGION 1..9: note = Description of Artificial Sequence: Synthetic peptide
SLIVVIAAY

SEQ ID NO: 13860 - protein, 10 aa, synthetic construct
  REGION 1..10: note = Description of Artificial Sequence: Synthetic peptide
GVSKGVSQNY

SEQ ID NO: 13861 - protein, 9 aa, synthetic construct
  REGION 1..9: note = Description of Artificial Sequence: Synthetic peptide
IQQEFGVPY

SEQ ID NO: 13862 - protein, 9 aa, synthetic construct
  REGION 1..9: note = Description of Artificial Sequence: Synthetic peptide
GLYPPLTSL

SEQ ID NO: 13863 - protein, 9 aa, synthetic construct
  REGION 1..9: note = Description of Artificial Sequence: Synthetic peptide
TVLDVGDAY

SEQ ID NO: 13864 - protein, 10 aa, synthetic construct
  REGION 1..10: note = Description of Artificial Sequence: Synthetic peptide
GIRIGPGQTF

SEQ ID NO: 13865 - protein, 10 aa, synthetic construct
  REGION 1..10: note = Description of Artificial Sequence: Synthetic peptide
ILKEPVHGVY

SEQ ID NO: 13866 - protein, 9 aa, synthetic construct
  REGION 1..9: note = Description of Artificial Sequence: Synthetic peptide
DQYNKTVGF

SEQ ID NO: 13867 - protein, 9 aa, synthetic construct
  REGION 1..9: note = Description of Artificial Sequence: Synthetic peptide
ILRPIGGEM

SEQ ID NO: 13868 - protein, 9 aa, synthetic construct
  REGION 1..9: note = Description of Artificial Sequence: Synthetic peptide
VQKVATEGI

SEQ ID NO: 13869 - protein, 9 aa, synthetic construct
  REGION 1..9: note = Description of Artificial Sequence: Synthetic peptide
EQAPPLVSL

SEQ ID NO: 13870 - protein, 11 aa, synthetic construct
  REGION 1..11: note = Description of Artificial Sequence: Synthetic peptide
IVPIEKNTTSY

SEQ ID NO: 13871 - protein, 9 aa, synthetic construct
  REGION 1..9: note = Description of Artificial Sequence: Synthetic peptide
KLQEEQDKY

SEQ ID NO: 13872 - protein, 9 aa, synthetic construct
  REGION 1..9: note = Description of Artificial Sequence: Synthetic peptide
VLGNVSEKF

SEQ ID NO: 13873 - protein, 10 aa, synthetic construct
  REGION 1..10: note = Description of Artificial Sequence: Synthetic peptide
IIKEPVHGVY

SEQ ID NO: 13874 - protein, 9 aa, synthetic construct
  REGION 1..9: note = Description of Artificial Sequence: Synthetic peptide
IRIGPGQTF

SEQ ID NO: 13875 - protein, 9 aa, synthetic construct
  REGION 1..9: note = Description of Artificial Sequence: Synthetic peptide
DSKLVIVTY

SEQ ID NO: 13876 - protein, 9 aa, synthetic construct
  REGION 1..9: note = Description of Artificial Sequence: Synthetic peptide
IQQEFGIPY

SEQ ID NO: 13877 - protein, 8 aa, synthetic construct
  REGION 1..8: note = Description of Artificial Sequence: Synthetic peptide
AVHVASGY

SEQ ID NO: 13878 - protein, 9 aa, synthetic construct
  REGION 1..9: note = Description of Artificial Sequence: Synthetic peptide
ISNYTGTIY

SEQ ID NO: 13879 - protein, 8 aa, synthetic construct
  REGION 1..8: note = Description of Artificial Sequence: Synthetic peptide
IEKNTTSY

SEQ ID NO: 13880 - protein, 10 aa, synthetic construct
  REGION 1..10: note = Description of Artificial Sequence: Synthetic peptide
VPIEKNTTSY

SEQ ID NO: 13881 - protein, 9 aa, synthetic construct
  REGION 1..9: note = Description of Artificial Sequence: Synthetic peptide
FLGAAGSTM

SEQ ID NO: 13882 - protein, 8 aa, synthetic construct
  REGION 1..8: note = Description of Artificial Sequence: Synthetic peptide
GQMVHQAI

SEQ ID NO: 13883 - protein, 9 aa, synthetic construct
  REGION 1..9: note = Description of Artificial Sequence: Synthetic peptide
IQLPNKSSW

SEQ ID NO: 13884 - protein, 9 aa, synthetic construct
  REGION 1..9: note = Description of Artificial Sequence: Synthetic peptide
DSKLVIVSY

SEQ ID NO: 13885 - protein, 9 aa, synthetic construct
  REGION 1..9: note = Description of Artificial Sequence: Synthetic peptide
SQVTSTSIL

SEQ ID NO: 13886 - protein, 11 aa, synthetic construct
  REGION 1..11: note = Description of Artificial Sequence: Synthetic peptide
AAADKGVSQNY

SEQ ID NO: 13887 - protein, 8 aa, synthetic construct
  REGION 1..8: note = Description of Artificial Sequence: Synthetic peptide
LIKIATEF

SEQ ID NO: 13888 - protein, 9 aa, synthetic construct
  REGION 1..9: note = Description of Artificial Sequence: Synthetic peptide
VQKIATEGI

SEQ ID NO: 13889 - protein, 9 aa, synthetic construct
  REGION 1..9: note = Description of Artificial Sequence: Synthetic peptide
VLGNVTENF

SEQ ID NO: 13890 - protein, 10 aa, synthetic construct
  REGION 1..10: note = Description of Artificial Sequence: Synthetic peptide
MQWEKEISNY

SEQ ID NO: 13891 - protein, 9 aa, synthetic construct
  REGION 1..9: note = Description of Artificial Sequence: Synthetic peptide
RIGPGQVFY

SEQ ID NO: 13892 - protein, 10 aa, synthetic construct
  REGION 1..10: note = Description of Artificial Sequence: Synthetic peptide
VPINNSTSEY

SEQ ID NO: 13893 - protein, 8 aa, synthetic construct
  REGION 1..8: note = Description of Artificial Sequence: Synthetic peptide
WQRVGQAM

SEQ ID NO: 13894 - protein, 9 aa, synthetic construct
  REGION 1..9: note = Description of Artificial Sequence: Synthetic peptide
IQLPDKSSW

SEQ ID NO: 13895 - protein, 8 aa, synthetic construct
  REGION 1..8: note = Description of Artificial Sequence: Synthetic peptide
AQYWGQEL

SEQ ID NO: 13896 - protein, 9 aa, synthetic construct
  REGION 1..9: note = Description of Artificial Sequence: Synthetic peptide
QINNSNTSY

SEQ ID NO: 13897 - protein, 9 aa, synthetic construct
  REGION 1..9: note = Description of Artificial Sequence: Synthetic peptide
DQYNKTVGF

SEQ ID NO: 13898 - protein, 9 aa, synthetic construct
  REGION 1..9: note = Description of Artificial Sequence: Synthetic peptide
TLIKIATEF

SEQ ID NO: 13899 - protein, 10 aa, synthetic construct
  REGION 1..10: note = Description of Artificial Sequence: Synthetic peptide
VPIEKNTTSY

SEQ ID NO: 13900 - protein, 9 aa, synthetic construct
  REGION 1..9: note = Description of Artificial Sequence: Synthetic peptide
TVLDVGDAY

SEQ ID NO: 13901 - protein, 9 aa, synthetic construct
  REGION 1..9: note = Description of Artificial Sequence: Synthetic peptide
EMYPPLTSL

SEQ ID NO: 13902 - protein, 9 aa, synthetic construct
  REGION 1..9: note = Description of Artificial Sequence: Synthetic peptide
FLGAAGSTM

SEQ ID NO: 13903 - protein, 9 aa, synthetic construct
  REGION 1..9: note = Description of Artificial Sequence: Synthetic peptide
TLKNVSGEF

SEQ ID NO: 13904 - protein, 9 aa, synthetic construct
  REGION 1..9: note = Description of Artificial Sequence: Synthetic peptide
EQAPPLVSL

SEQ ID NO: 13905 - protein, 10 aa, synthetic construct
  REGION 1..10: note = Description of Artificial Sequence: Synthetic peptide
VQINNSNTSY

SEQ ID NO: 13906 - protein, 9 aa, synthetic construct
  REGION 1..9: note = Description of Artificial Sequence: Synthetic peptide
DSKLVIVTY

SEQ ID NO: 13907 - protein, 9 aa, synthetic construct
  REGION 1..9: note = Description of Artificial Sequence: Synthetic peptide
EVHNVWATY

SEQ ID NO: 13908 - protein, 9 aa, synthetic construct
  REGION 1..9: note = Description of Artificial Sequence: Synthetic peptide
DSKLVIVSY

SEQ ID NO: 13909 - protein, 9 aa, synthetic construct
  REGION 1..9: note = Description of Artificial Sequence: Synthetic peptide
TQACPKVSF

SEQ ID NO: 13910 - protein, 9 aa, synthetic construct
  REGION 1..9: note = Description of Artificial Sequence: Synthetic peptide
TSKGLGISY

SEQ ID NO: 13911 - protein, 10 aa, synthetic construct
  REGION 1..10: note = Description of Artificial Sequence: Synthetic peptide
VPINNSTSEY

SEQ ID NO: 13912 - protein, 9 aa, synthetic construct
  REGION 1..9: note = Description of Artificial Sequence: Synthetic peptide
TLRPGGGDM

SEQ ID NO: 13913 - protein, 9 aa, synthetic construct
  REGION 1..9: note = Description of Artificial Sequence: Synthetic peptide
SAISLFDTI

SEQ ID NO: 13914 - protein, 9 aa, synthetic construct
  REGION 1..9: note = Description of Artificial Sequence: Synthetic peptide
TVGGHQAAM

SEQ ID NO: 13915 - protein, 9 aa, synthetic construct
  REGION 1..9: note = Description of Artificial Sequence: Synthetic peptide
EIHNVWATY

SEQ ID NO: 13916 - protein, 10 aa, synthetic construct
  REGION 1..10: note = Description of Artificial Sequence: Synthetic peptide
EISERILTTY

SEQ ID NO: 13917 - protein, 9 aa, synthetic construct
  REGION 1..9: note = Description of Artificial Sequence: Synthetic peptide
EQVPPLISL

SEQ ID NO: 13918 - protein, 9 aa, synthetic construct
  REGION 1..9: note = Description of Artificial Sequence: Synthetic peptide
SLIVVIAAY

SEQ ID NO: 13919 - protein, 10 aa, synthetic construct
  REGION 1..10: note = Description of Artificial Sequence: Synthetic peptide
EPIKNSSNIY

SEQ ID NO: 13920 - protein, 9 aa, synthetic construct
  REGION 1..9: note = Description of Artificial Sequence: Synthetic peptide
ILRPIGGEM

SEQ ID NO: 13921 - protein, 8 aa, synthetic construct
  REGION 1..8: note = Description of Artificial Sequence: Synthetic peptide
DNYTKTIY

SEQ ID NO: 13922 - protein, 9 aa, synthetic construct
  REGION 1..9: note = Description of Artificial Sequence: Synthetic peptide
DSKLVIITY

SEQ ID NO: 13923 - protein, 9 aa, synthetic construct
  REGION 1..9: note = Description of Artificial Sequence: Synthetic peptide
AAVDLSHFL

SEQ ID NO: 13924 - protein, 8 aa, synthetic construct
  REGION 1..8: note = Description of Artificial Sequence: Synthetic peptide
DQLIHLHY

SEQ ID NO: 13925 - protein, 10 aa, synthetic construct
  REGION 1..10: note = Description of Artificial Sequence: Synthetic peptide
EISNYTGTIY

SEQ ID NO: 13926 - protein, 8 aa, synthetic construct
  REGION 1..8: note = Description of Artificial Sequence: Synthetic peptide
GQYIYNTY

SEQ ID NO: 13927 - protein, 9 aa, synthetic construct
  REGION 1..9: note = Description of Artificial Sequence: Synthetic peptide
SQVTATSVL

SEQ ID NO: 13928 - protein, 8 aa, synthetic construct
  REGION 1..8: note = Description of Artificial Sequence: Synthetic peptide
DQLIHLRY

SEQ ID NO: 13929 - protein, 9 aa, synthetic construct
  REGION 1..9: note = Description of Artificial Sequence: Synthetic peptide
YAAPIAGQI

SEQ ID NO: 13930 - protein, 9 aa, synthetic construct
  REGION 1..9: note = Description of Artificial Sequence: Synthetic peptide
DVEITTHSF

SEQ ID NO: 13931 - protein, 8 aa, synthetic construct
  REGION 1..8: note = Description of Artificial Sequence: Synthetic peptide
DQLIHLYY

SEQ ID NO: 13932 - protein, 9 aa, synthetic construct
  REGION 1..9: note = Description of Artificial Sequence: Synthetic peptide
SAEPVPLQL

SEQ ID NO: 13933 - protein, 9 aa, synthetic construct
  REGION 1..9: note = Description of Artificial Sequence: Synthetic peptide
DIAGTTSTL

SEQ ID NO: 13934 - protein, 9 aa, synthetic construct
  REGION 1..9: note = Description of Artificial Sequence: Synthetic peptide
LLTIAIVAY

SEQ ID NO: 13935 - protein, 10 aa, synthetic construct
  REGION 1..10: note = Description of Artificial Sequence: Synthetic peptide
EVNIVTDSQY

SEQ ID NO: 13936 - protein, 9 aa, synthetic construct
  REGION 1..9: note = Description of Artificial Sequence: Synthetic peptide
GLYPPLTSL

SEQ ID NO: 13937 - protein, 9 aa, synthetic construct
  REGION 1..9: note = Description of Artificial Sequence: Synthetic peptide
IRIGPGQTF

SEQ ID NO: 13938 - protein, 10 aa, synthetic construct
  REGION 1..10: note = Description of Artificial Sequence: Synthetic peptide
VQINNSNTSY

SEQ ID NO: 13939 - protein, 8 aa, synthetic construct
  REGION 1..8: note = Description of Artificial Sequence: Synthetic peptide
SKLVIVTY

SEQ ID NO: 13940 - protein, 8 aa, synthetic construct
  REGION 1..8: note = Description of Artificial Sequence: Synthetic peptide
SKLVIVSY

SEQ ID NO: 13941 - protein, 9 aa, synthetic construct
  REGION 1..9: note = Description of Artificial Sequence: Synthetic peptide
AKNPEIVIY

SEQ ID NO: 13942 - protein, 8 aa, synthetic construct
  REGION 1..8: note = Description of Artificial Sequence: Synthetic peptide
SKGLGISY

SEQ ID NO: 13943 - protein, 8 aa, synthetic construct
  REGION 1..8: note = Description of Artificial Sequence: Synthetic peptide
AKTIIVQF

SEQ ID NO: 13944 - protein, 9 aa, synthetic construct
  REGION 1..9: note = Description of Artificial Sequence: Synthetic peptide
GQKAIGTVL

SEQ ID NO: 13945 - protein, 9 aa, synthetic construct
  REGION 1..9: note = Description of Artificial Sequence: Synthetic peptide
VKNPEIVIY

SEQ ID NO: 13946 - protein, 8 aa, synthetic construct
  REGION 1..8: note = Description of Artificial Sequence: Synthetic peptide
GQYIYNTY

SEQ ID NO: 13947 - protein, 8 aa, synthetic construct
  REGION 1..8: note = Description of Artificial Sequence: Synthetic peptide
SKLVIITY

SEQ ID NO: 13948 - protein, 8 aa, synthetic construct
  REGION 1..8: note = Description of Artificial Sequence: Synthetic peptide
GQMVHQSL

SEQ ID NO: 13949 - protein, 9 aa, synthetic construct
  REGION 1..9: note = Description of Artificial Sequence: Synthetic peptide
MKKGLGISY

SEQ ID NO: 13950 - protein, 9 aa, synthetic construct
  REGION 1..9: note = Description of Artificial Sequence: Synthetic peptide
SKIGPENPY

SEQ ID NO: 13951 - protein, 9 aa, synthetic construct
  REGION 1..9: note = Description of Artificial Sequence: Synthetic peptide
TSKGLGISY

SEQ ID NO: 13952 - protein, 9 aa, synthetic construct
  REGION 1..9: note = Description of Artificial Sequence: Synthetic peptide
IRIGPGQTF

SEQ ID NO: 13953 - protein, 8 aa, synthetic construct
  REGION 1..8: note = Description of Artificial Sequence: Synthetic peptide
TKTIIVQF

SEQ ID NO: 13954 - protein, 8 aa, synthetic construct
  REGION 1..8: note = Description of Artificial Sequence: Synthetic peptide
KKGLGISY

SEQ ID NO: 13955 - protein, 8 aa, synthetic construct
  REGION 1..8: note = Description of Artificial Sequence: Synthetic peptide
GQMVHQAL

SEQ ID NO: 13956 - protein, 8 aa, synthetic construct
  REGION 1..8: note = Description of Artificial Sequence: Synthetic peptide
GQHIYNTY

SEQ ID NO: 13957 - protein, 9 aa, synthetic construct
  REGION 1..9: note = Description of Artificial Sequence: Synthetic peptide
VSKGVSQNY

SEQ ID NO: 13958 - protein, 8 aa, synthetic construct
  REGION 1..8: note = Description of Artificial Sequence: Synthetic peptide
TKNIIVQF

SEQ ID NO: 13959 - protein, 9 aa, synthetic construct
  REGION 1..9: note = Description of Artificial Sequence: Synthetic peptide
IRIGPGQVF

SEQ ID NO: 13960 - protein, 9 aa, synthetic construct
  REGION 1..9: note = Description of Artificial Sequence: Synthetic peptide
QINNSNTSY

SEQ ID NO: 13961 - protein, 9 aa, synthetic construct
  REGION 1..9: note = Description of Artificial Sequence: Synthetic peptide
SKATSTAIM

SEQ ID NO: 13962 - protein, 9 aa, synthetic construct
  REGION 1..9: note = Description of Artificial Sequence: Synthetic peptide
ARNPEIVVY

SEQ ID NO: 13963 - protein, 9 aa, synthetic construct
  REGION 1..9: note = Description of Artificial Sequence: Synthetic peptide
SQVTATSVL

SEQ ID NO: 13964 - protein, 8 aa, synthetic construct
  REGION 1..8: note = Description of Artificial Sequence: Synthetic peptide
LKNVSGEF

SEQ ID NO: 13965 - protein, 9 aa, synthetic construct
  REGION 1..9: note = Description of Artificial Sequence: Synthetic peptide
VKVIEEKAF

SEQ ID NO: 13966 - protein, 9 aa, synthetic construct
  REGION 1..9: note = Description of Artificial Sequence: Synthetic peptide
KQISKIQNF

SEQ ID NO: 13967 - protein, 9 aa, synthetic construct
  REGION 1..9: note = Description of Artificial Sequence: Synthetic peptide
KQITKIQNF

SEQ ID NO: 13968 - protein, 9 aa, synthetic construct
  REGION 1..9: note = Description of Artificial Sequence: Synthetic peptide
TQACPKVSF

SEQ ID NO: 13969 - protein, 9 aa, synthetic construct
  REGION 1..9: note = Description of Artificial Sequence: Synthetic peptide
IHEISERIL

SEQ ID NO: 13970 - protein, 9 aa, synthetic construct
  REGION 1..9: note = Description of Artificial Sequence: Synthetic peptide
EQAPPLVSL

SEQ ID NO: 13971 - protein, 9 aa, synthetic construct
  REGION 1..9: note = Description of Artificial Sequence: Synthetic peptide
HQAISPRTL

SEQ ID NO: 13972 - protein, 9 aa, synthetic construct
  REGION 1..9: note = Description of Artificial Sequence: Synthetic peptide
EHLKTAVQM

SEQ ID NO: 13973 - protein, 9 aa, synthetic construct
  REGION 1..9: note = Description of Artificial Sequence: Synthetic peptide
IHQISERIL

SEQ ID NO: 13974 - protein, 9 aa, synthetic construct
  REGION 1..9: note = Description of Artificial Sequence: Synthetic peptide
IHIGPGRAF

SEQ ID NO: 13975 - protein, 9 aa, synthetic construct
  REGION 1..9: note = Description of Artificial Sequence: Synthetic peptide
EQVPPLISL

SEQ ID NO: 13976 - protein, 9 aa, synthetic construct
  REGION 1..9: note = Description of Artificial Sequence: Synthetic peptide
THLEGKIIL

SEQ ID NO: 13977 - protein, 9 aa, synthetic construct
  REGION 1..9: note = Description of Artificial Sequence: Synthetic peptide
SQVTATSVL

SEQ ID NO: 13978 - protein, 11 aa, synthetic construct
  REGION 1..11: note = Description of Artificial Sequence: Synthetic peptide
DHQDPVSKQPL

SEQ ID NO: 13979 - protein, 9 aa, synthetic construct
  REGION 1..9: note = Description of Artificial Sequence: Synthetic peptide
HQALSPRTL

SEQ ID NO: 13980 - protein, 11 aa, synthetic construct
  REGION 1..11: note = Description of Artificial Sequence: Synthetic peptide
VHQDPVSKQPL

SEQ ID NO: 13981 - protein, 10 aa, synthetic construct
  REGION 1..10: note = Description of Artificial Sequence: Synthetic peptide
HQDPVSKQPL

SEQ ID NO: 13982 - protein, 9 aa, synthetic construct
  REGION 1..9: note = Description of Artificial Sequence: Synthetic peptide
GHQAAMQML

SEQ ID NO: 13983 - protein, 9 aa, synthetic construct
  REGION 1..9: note = Description of Artificial Sequence: Synthetic peptide
SHLNKSITF

SEQ ID NO: 13984 - protein, 9 aa, synthetic construct
  REGION 1..9: note = Description of Artificial Sequence: Synthetic peptide
HQSLSPRTL

SEQ ID NO: 13985 - protein, 9 aa, synthetic construct
  REGION 1..9: note = Description of Artificial Sequence: Synthetic peptide
YQLETEPIL

SEQ ID NO: 13986 - protein, 10 aa, synthetic construct
  REGION 1..10: note = Description of Artificial Sequence: Synthetic peptide
HQDPVPKQPL

SEQ ID NO: 13987 - protein, 9 aa, synthetic construct
  REGION 1..9: note = Description of Artificial Sequence: Synthetic peptide
AHTNDVKQL

SEQ ID NO: 13988 - protein, 9 aa, synthetic construct
  REGION 1..9: note = Description of Artificial Sequence: Synthetic peptide
GQKAIGTVL

SEQ ID NO: 13989 - protein, 9 aa, synthetic construct
  REGION 1..9: note = Description of Artificial Sequence: Synthetic peptide
YQSNPYPKL

SEQ ID NO: 13990 - protein, 11 aa, synthetic construct
  REGION 1..11: note = Description of Artificial Sequence: Synthetic peptide
IHQDPVPKQPL

SEQ ID NO: 13991 - protein, 9 aa, synthetic construct
  REGION 1..9: note = Description of Artificial Sequence: Synthetic peptide
SHAALGSGI

SEQ ID NO: 13992 - protein, 9 aa, synthetic construct
  REGION 1..9: note = Description of Artificial Sequence: Synthetic peptide
SQVTSTSIL

SEQ ID NO: 13993 - protein, 10 aa, synthetic construct
  REGION 1..10: note = Description of Artificial Sequence: Synthetic peptide
HQNPVPKQPL

SEQ ID NO: 13994 - protein, 9 aa, synthetic construct
  REGION 1..9: note = Description of Artificial Sequence: Synthetic peptide
NHTRVNDIL

SEQ ID NO: 13995 - protein, 9 aa, synthetic construct
  REGION 1..9: note = Description of Artificial Sequence: Synthetic peptide
EMYPPLTSL

SEQ ID NO: 13996 - protein, 9 aa, synthetic construct
  REGION 1..9: note = Description of Artificial Sequence: Synthetic peptide
TLIKIATEF

SEQ ID NO: 13997 - protein, 9 aa, synthetic construct
  REGION 1..9: note = Description of Artificial Sequence: Synthetic peptide
IQLPDKSSW

SEQ ID NO: 13998 - protein, 9 aa, synthetic construct
  REGION 1..9: note = Description of Artificial Sequence: Synthetic peptide
TVLDVGDAY

SEQ ID NO: 13999 - protein, 9 aa, synthetic construct
  REGION 1..9: note = Description of Artificial Sequence: Synthetic peptide
IQLPNKSSW

SEQ ID NO: 14000 - protein, 9 aa, synthetic construct
  REGION 1..9: note = Description of Artificial Sequence: Synthetic peptide
QINNSNTSY

SEQ ID NO: 14001 - protein, 9 aa, synthetic construct
  REGION 1..9: note = Description of Artificial Sequence: Synthetic peptide
IQLPEKSSW

SEQ ID NO: 14002 - protein, 9 aa, synthetic construct
  REGION 1..9: note = Description of Artificial Sequence: Synthetic peptide
TLKNVSGEF

SEQ ID NO: 14003 - protein, 9 aa, synthetic construct
  REGION 1..9: note = Description of Artificial Sequence: Synthetic peptide
TINEEAAEW

SEQ ID NO: 14004 - protein, 9 aa, synthetic construct
  REGION 1..9: note = Description of Artificial Sequence: Synthetic peptide
SAISLFDTI

SEQ ID NO: 14005 - protein, 9 aa, synthetic construct
  REGION 1..9: note = Description of Artificial Sequence: Synthetic peptide
EMYPPLTSL

SEQ ID NO: 14006 - protein, 8 aa, synthetic construct
  REGION 1..8: note = Description of Artificial Sequence: Synthetic peptide
SERILTTY

SEQ ID NO: 14007 - protein, 8 aa, synthetic construct
  REGION 1..8: note = Description of Artificial Sequence: Synthetic peptide
DEALLTAV

SEQ ID NO: 14008 - protein, 8 aa, synthetic construct
  REGION 1..8: note = Description of Artificial Sequence: Synthetic peptide
VEITTHSF

SEQ ID NO: 14009 - protein, 11 aa, synthetic construct
  REGION 1..11: note = Description of Artificial Sequence: Synthetic peptide
SEVNIVTDSQY

SEQ ID NO: 14010 - protein, 8 aa, synthetic construct
  REGION 1..8: note = Description of Artificial Sequence: Synthetic peptide
LEITTHSF

SEQ ID NO: 14011 - protein, 8 aa, synthetic construct
  REGION 1..8: note = Description of Artificial Sequence: Synthetic peptide
LEVTTHSF

SEQ ID NO: 14012 - protein, 8 aa, synthetic construct
  REGION 1..8: note = Description of Artificial Sequence: Synthetic peptide
NETPGIRY

SEQ ID NO: 14013 - protein, 10 aa, synthetic construct
  REGION 1..10: note = Description of Artificial Sequence: Synthetic peptide
DEELLKAVRY

SEQ ID NO: 14014 - protein, 8 aa, synthetic construct
  REGION 1..8: note = Description of Artificial Sequence: Synthetic peptide
PEIVVYQY

SEQ ID NO: 14015 - protein, 8 aa, synthetic construct
  REGION 1..8: note = Description of Artificial Sequence: Synthetic peptide
TELQAIQL

SEQ ID NO: 14016 - protein, 8 aa, synthetic construct
  REGION 1..8: note = Description of Artificial Sequence: Synthetic peptide
SEEIKSLY

SEQ ID NO: 14017 - protein, 8 aa, synthetic construct
  REGION 1..8: note = Description of Artificial Sequence: Synthetic peptide
PEIVIYQY

SEQ ID NO: 14018 - protein, 8 aa, synthetic construct
  REGION 1..8: note = Description of Artificial Sequence: Synthetic peptide
IEKNTTSY

SEQ ID NO: 14019 - protein, 8 aa, synthetic construct
  REGION 1..8: note = Description of Artificial Sequence: Synthetic peptide
SEELKSLY

SEQ ID NO: 14020 - protein, 11 aa, synthetic construct
  REGION 1..11: note = Description of Artificial Sequence: Synthetic peptide
HEISERILTTY

SEQ ID NO: 14021 - protein, 8 aa, synthetic construct
  REGION 1..8: note = Description of Artificial Sequence: Synthetic peptide
TELQAIHL

SEQ ID NO: 14022 - protein, 8 aa, synthetic construct
  REGION 1..8: note = Description of Artificial Sequence: Synthetic peptide
DEELLKAV

SEQ ID NO: 14023 - protein, 8 aa, synthetic construct
  REGION 1..8: note = Description of Artificial Sequence: Synthetic peptide
DDLWVTVY

SEQ ID NO: 14024 - protein, 8 aa, synthetic construct
  REGION 1..8: note = Description of Artificial Sequence: Synthetic peptide
VEAIIRTL

SEQ ID NO: 14025 - protein, 9 aa, synthetic construct
  REGION 1..9: note = Description of Artificial Sequence: Synthetic peptide
IRIGPGQTF

SEQ ID NO: 14026 - protein, 9 aa, synthetic construct
  REGION 1..9: note = Description of Artificial Sequence: Synthetic peptide
ARILAVERY

SEQ ID NO: 14027 - protein, 11 aa, synthetic construct
  REGION 1..11: note = Description of Artificial Sequence: Synthetic peptide
GIVQQQSNLLK

SEQ ID NO: 14028 - protein, 10 aa, synthetic construct
  REGION 1..10: note = Description of Artificial Sequence: Synthetic peptide
GGLDGLIYSR

SEQ ID NO: 14029 - protein, 11 aa, synthetic construct
  REGION 1..11: note = Description of Artificial Sequence: Synthetic peptide
KGGLEGLIYSK

SEQ ID NO: 14030 - protein, 11 aa, synthetic construct
  REGION 1..11: note = Description of Artificial Sequence: Synthetic peptide
YATGEIIGDTR

SEQ ID NO: 14031 - protein, 9 aa, synthetic construct
  REGION 1..9: note = Description of Artificial Sequence: Synthetic peptide
ARNPEIVVY

SEQ ID NO: 14032 - protein, 9 aa, synthetic construct
  REGION 1..9: note = Description of Artificial Sequence: Synthetic peptide
IRIGPGQVF

SEQ ID NO: 14033 - protein, 10 aa, synthetic construct
  REGION 1..10: note = Description of Artificial Sequence: Synthetic peptide
ATGEIIGDTR

SEQ ID NO: 14034 - protein, 10 aa, synthetic construct
  REGION 1..10: note = Description of Artificial Sequence: Synthetic peptide
GAVDLSHFLK

SEQ ID NO: 14035 - protein, 10 aa, synthetic construct
  REGION 1..10: note = Description of Artificial Sequence: Synthetic peptide
SEIHQNPVPK

SEQ ID NO: 14036 - protein, 10 aa, synthetic construct
  REGION 1..10: note = Description of Artificial Sequence: Synthetic peptide
IRIGPGQVFY

SEQ ID NO: 14037 - protein, 10 aa, synthetic construct
  REGION 1..10: note = Description of Artificial Sequence: Synthetic peptide
TRATNADLAW

SEQ ID NO: 14038 - protein, 11 aa, synthetic construct
  REGION 1..11: note = Description of Artificial Sequence: Synthetic peptide
IRSENISDNTK

SEQ ID NO: 14039 - protein, 11 aa, synthetic construct
  REGION 1..11: note = Description of Artificial Sequence: Synthetic peptide
FALNPGLLETK

SEQ ID NO: 14040 - protein, 11 aa, synthetic construct
  REGION 1..11: note = Description of Artificial Sequence: Synthetic peptide
YLALTALITPK

SEQ ID NO: 14041 - protein, 10 aa, synthetic construct
  REGION 1..10: note = Description of Artificial Sequence: Synthetic peptide
GGLEGLIYSK

SEQ ID NO: 14042 - protein, 10 aa, synthetic construct
  REGION 1..10: note = Description of Artificial Sequence: Synthetic peptide
GGLEGLIYSR

SEQ ID NO: 14043 - protein, 11 aa, synthetic construct
  REGION 1..11: note = Description of Artificial Sequence: Synthetic peptide
TAIAVAEGTDR

SEQ ID NO: 14044 - protein, 10 aa, synthetic construct
  REGION 1..10: note = Description of Artificial Sequence: Synthetic peptide
IRIGPGQTFF

SEQ ID NO: 14045 - protein, 9 aa, synthetic construct
  REGION 1..9: note = Description of Artificial Sequence: Synthetic peptide
ALTALVTPK

SEQ ID NO: 14046 - protein, 11 aa, synthetic construct
  REGION 1..11: note = Description of Artificial Sequence: Synthetic peptide
YATGEIIGDIR

SEQ ID NO: 14047 - protein, 8 aa, synthetic construct
  REGION 1..8: note = Description of Artificial Sequence: Synthetic peptide
QRVGQAMY

SEQ ID NO: 14048 - protein, 9 aa, synthetic construct
  REGION 1..9: note = Description of Artificial Sequence: Synthetic peptide
DRIIEVLQR

SEQ ID NO: 14049 - protein, 9 aa, synthetic construct
  REGION 1..9: note = Description of Artificial Sequence: Synthetic peptide
SRIGIIRQR

SEQ ID NO: 14050 - protein, 9 aa, synthetic construct
  REGION 1..9: note = Description of Artificial Sequence: Synthetic peptide
ARNPEIVVY

SEQ ID NO: 14051 - protein, 9 aa, synthetic construct
  REGION 1..9: note = Description of Artificial Sequence: Synthetic peptide
QRIKIGDTK

SEQ ID NO: 14052 - protein, 9 aa, synthetic construct
  REGION 1..9: note = Description of Artificial Sequence: Synthetic peptide
IRIGPGQTF

SEQ ID NO: 14053 - protein, 9 aa, synthetic construct
  REGION 1..9: note = Description of Artificial Sequence: Synthetic peptide
GRLQEPVRL

SEQ ID NO: 14054 - protein, 9 aa, synthetic construct
  REGION 1..9: note = Description of Artificial Sequence: Synthetic peptide
ARILAVERY

SEQ ID NO: 14055 - protein, 9 aa, synthetic construct
  REGION 1..9: note = Description of Artificial Sequence: Synthetic peptide
GRAVLNIPR

SEQ ID NO: 14056 - protein, 9 aa, synthetic construct
  REGION 1..9: note = Description of Artificial Sequence: Synthetic peptide
YRTQVDPGL

SEQ ID NO: 14057 - protein, 9 aa, synthetic construct
  REGION 1..9: note = Description of Artificial Sequence: Synthetic peptide
CRIKQIVNM

SEQ ID NO: 14058 - protein, 10 aa, synthetic construct
  REGION 1..10: note = Description of Artificial Sequence: Synthetic peptide
IRIGPGQVFY

SEQ ID NO: 14059 - protein, 9 aa, synthetic construct
  REGION 1..9: note = Description of Artificial Sequence: Synthetic peptide
MRAAEGVGK

SEQ ID NO: 14060 - protein, 9 aa, synthetic construct
  REGION 1..9: note = Description of Artificial Sequence: Synthetic peptide
GRAVLHIPR

SEQ ID NO: 14061 - protein, 9 aa, synthetic construct
  REGION 1..9: note = Description of Artificial Sequence: Synthetic peptide
IRIGPGQVF

SEQ ID NO: 14062 - protein, 9 aa, synthetic construct
  REGION 1..9: note = Description of Artificial Sequence: Synthetic peptide
TRKGLGISY

SEQ ID NO: 14063 - protein, 9 aa, synthetic construct
  REGION 1..9: note = Description of Artificial Sequence: Synthetic peptide
QRIDVRDTK

SEQ ID NO: 14064 - protein, 10 aa, synthetic construct
  REGION 1..10: note = Description of Artificial Sequence: Synthetic peptide
VPIEKNTTSY

SEQ ID NO: 14065 - protein, 9 aa, synthetic construct
  REGION 1..9: note = Description of Artificial Sequence: Synthetic peptide
EPIAGAETF

SEQ ID NO: 14066 - protein, 11 aa, synthetic construct
  REGION 1..11: note = Description of Artificial Sequence: Synthetic peptide
IPAETGQETAY

SEQ ID NO: 14067 - protein, 10 aa, synthetic construct
  REGION 1..10: note = Description of Artificial Sequence: Synthetic peptide
VPINNSTSEY

SEQ ID NO: 14068 - protein, 9 aa, synthetic construct
  REGION 1..9: note = Description of Artificial Sequence: Synthetic peptide
NPEIVVYQY

SEQ ID NO: 14069 - protein, 9 aa, synthetic construct
  REGION 1..9: note = Description of Artificial Sequence: Synthetic peptide
EPIIGAETF

SEQ ID NO: 14070 - protein, 9 aa, synthetic construct
  REGION 1..9: note = Description of Artificial Sequence: Synthetic peptide
NPEIVIYQY

SEQ ID NO: 14071 - protein, 11 aa, synthetic construct
  REGION 1..11: note = Description of Artificial Sequence: Synthetic peptide
IPAETGQEAAY

SEQ ID NO: 14072 - protein, 9 aa, synthetic construct
  REGION 1..9: note = Description of Artificial Sequence: Synthetic peptide
NCTDVNITM

SEQ ID NO: 14073 - protein, 9 aa, synthetic construct
  REGION 1..9: note = Description of Artificial Sequence: Synthetic peptide
EPILGAETF

SEQ ID NO: 14074 - protein, 9 aa, synthetic construct
  REGION 1..9: note = Description of Artificial Sequence: Synthetic peptide
NATNMTNAM

SEQ ID NO: 14075 - protein, 9 aa, synthetic construct
  REGION 1..9: note = Description of Artificial Sequence: Synthetic peptide
TVLDVGDAY

SEQ ID NO: 14076 - protein, 8 aa, synthetic construct
  REGION 1..8: note = Description of Artificial Sequence: Synthetic peptide
TPGPGIRY

SEQ ID NO: 14077 - protein, 10 aa, synthetic construct
  REGION 1..10: note = Description of Artificial Sequence: Synthetic peptide
EPIKNSSNIY

SEQ ID NO: 14078 - protein, 9 aa, synthetic construct
  REGION 1..9: note = Description of Artificial Sequence: Synthetic peptide
PPVPVGEIY

SEQ ID NO: 14079 - protein, 9 aa, synthetic construct
  REGION 1..9: note = Description of Artificial Sequence: Synthetic peptide
NAKTIIVQF

SEQ ID NO: 14080 - protein, 10 aa, synthetic construct
  REGION 1..10: note = Description of Artificial Sequence: Synthetic peptide
NPPVPVGEIY

SEQ ID NO: 14081 - protein, 8 aa, synthetic construct
  REGION 1..8: note = Description of Artificial Sequence: Synthetic peptide
TPGPGTRY

SEQ ID NO: 14082 - protein, 8 aa, synthetic construct
  REGION 1..8: note = Description of Artificial Sequence: Synthetic peptide
IPGNINNL

SEQ ID NO: 14083 - protein, 9 aa, synthetic construct
  REGION 1..9: note = Description of Artificial Sequence: Synthetic peptide
DSKLVIVTY

SEQ ID NO: 14084 - protein, 9 aa, synthetic construct
  REGION 1..9: note = Description of Artificial Sequence: Synthetic peptide
SPAIFQSSM

SEQ ID NO: 14085 - protein, 9 aa, synthetic construct
  REGION 1..9: note = Description of Artificial Sequence: Synthetic peptide
IATEFKDQY

SEQ ID NO: 14086 - protein, 9 aa, synthetic construct
  REGION 1..9: note = Description of Artificial Sequence: Synthetic peptide
FPISSIETV

SEQ ID NO: 14087 - protein, 9 aa, synthetic construct
  REGION 1..9: note = Description of Artificial Sequence: Synthetic peptide
DSKLVIVSY

SEQ ID NO: 14088 - protein, 8 aa, synthetic construct
  REGION 1..8: note = Description of Artificial Sequence: Synthetic peptide
NAVVVLYY

SEQ ID NO: 14089 - protein, 9 aa, synthetic construct
  REGION 1..9: note = Description of Artificial Sequence: Synthetic peptide
EVHNVWATY

SEQ ID NO: 14090 - protein, 10 aa, synthetic construct
  REGION 1..10: note = Description of Artificial Sequence: Synthetic peptide
EPIAGAETFY

SEQ ID NO: 14091 - protein, 9 aa, synthetic construct
  REGION 1..9: note = Description of Artificial Sequence: Synthetic peptide
LAFQQGEAW

SEQ ID NO: 14092 - protein, 9 aa, synthetic construct
  REGION 1..9: note = Description of Artificial Sequence: Synthetic peptide
TSKGLGISY

SEQ ID NO: 14093 - protein, 9 aa, synthetic construct
  REGION 1..9: note = Description of Artificial Sequence: Synthetic peptide
SAEPVPLQL

SEQ ID NO: 14094 - protein, 9 aa, synthetic construct
  REGION 1..9: note = Description of Artificial Sequence: Synthetic peptide
VPLTVEAEL

SEQ ID NO: 14095 - protein, 9 aa, synthetic construct
  REGION 1..9: note = Description of Artificial Sequence: Synthetic peptide
FPISPIETV

SEQ ID NO: 14096 - protein, 9 aa, synthetic construct
  REGION 1..9: note = Description of Artificial Sequence: Synthetic peptide
HPDKSESEL

SEQ ID NO: 14097 - protein, 9 aa, synthetic construct
  REGION 1..9: note = Description of Artificial Sequence: Synthetic peptide
IPLEEDSKL

SEQ ID NO: 14098 - protein, 9 aa, synthetic construct
  REGION 1..9: note = Description of Artificial Sequence: Synthetic peptide
IPLEDDSKL

SEQ ID NO: 14099 - protein, 9 aa, synthetic construct
  REGION 1..9: note = Description of Artificial Sequence: Synthetic peptide
IPLENDSKL

SEQ ID NO: 14100 - protein, 9 aa, synthetic construct
  REGION 1..9: note = Description of Artificial Sequence: Synthetic peptide
QPDKSESEL

SEQ ID NO: 14101 - protein, 9 aa, synthetic construct
  REGION 1..9: note = Description of Artificial Sequence: Synthetic peptide
DPDPQEIFL

SEQ ID NO: 14102 - protein, 9 aa, synthetic construct
  REGION 1..9: note = Description of Artificial Sequence: Synthetic peptide
DPNPQELVL

SEQ ID NO: 14103 - protein, 9 aa, synthetic construct
  REGION 1..9: note = Description of Artificial Sequence: Synthetic peptide
SAEPVPLQL

SEQ ID NO: 14104 - protein, 9 aa, synthetic construct
  REGION 1..9: note = Description of Artificial Sequence: Synthetic peptide
DPSPQELVL

SEQ ID NO: 14105 - protein, 9 aa, synthetic construct
  REGION 1..9: note = Description of Artificial Sequence: Synthetic peptide
VPLTAEAEL

SEQ ID NO: 14106 - protein, 9 aa, synthetic construct
  REGION 1..9: note = Description of Artificial Sequence: Synthetic peptide
VPLTVEAEL

SEQ ID NO: 14107 - protein, 8 aa, synthetic construct
  REGION 1..8: note = Description of Artificial Sequence: Synthetic peptide
IPGNINNL

SEQ ID NO: 14108 - protein, 9 aa, synthetic construct
  REGION 1..9: note = Description of Artificial Sequence: Synthetic peptide
EPIAGAETF

SEQ ID NO: 14109 - protein, 9 aa, synthetic construct
  REGION 1..9: note = Description of Artificial Sequence: Synthetic peptide
IPLKDDSKL

SEQ ID NO: 14110 - protein, 9 aa, synthetic construct
  REGION 1..9: note = Description of Artificial Sequence: Synthetic peptide
HPDKSESEI

SEQ ID NO: 14111 - protein, 9 aa, synthetic construct
  REGION 1..9: note = Description of Artificial Sequence: Synthetic peptide
FPISSIETV

SEQ ID NO: 14112 - protein, 9 aa, synthetic construct
  REGION 1..9: note = Description of Artificial Sequence: Synthetic peptide
FPISPIETV

SEQ ID NO: 14113 - protein, 9 aa, synthetic construct
  REGION 1..9: note = Description of Artificial Sequence: Synthetic peptide
IPLEDDSKL

SEQ ID NO: 14114 - protein, 9 aa, synthetic construct
  REGION 1..9: note = Description of Artificial Sequence: Synthetic peptide
IPLEEDSKL

SEQ ID NO: 14115 - protein, 9 aa, synthetic construct
  REGION 1..9: note = Description of Artificial Sequence: Synthetic peptide
IPLENDSKL

SEQ ID NO: 14116 - protein, 9 aa, synthetic construct
  REGION 1..9: note = Description of Artificial Sequence: Synthetic peptide
HPDKSESEL

SEQ ID NO: 14117 - protein, 9 aa, synthetic construct
  REGION 1..9: note = Description of Artificial Sequence: Synthetic peptide
FPISSIETV

SEQ ID NO: 14118 - protein, 9 aa, synthetic construct
  REGION 1..9: note = Description of Artificial Sequence: Synthetic peptide
DPNPQELVL

SEQ ID NO: 14119 - protein, 9 aa, synthetic construct
  REGION 1..9: note = Description of Artificial Sequence: Synthetic peptide
VPLTAEAEL

SEQ ID NO: 14120 - protein, 9 aa, synthetic construct
  REGION 1..9: note = Description of Artificial Sequence: Synthetic peptide
VPLTVEAEL

SEQ ID NO: 14121 - protein, 9 aa, synthetic construct
  REGION 1..9: note = Description of Artificial Sequence: Synthetic peptide
NATNMTNAM

SEQ ID NO: 14122 - protein, 9 aa, synthetic construct
  REGION 1..9: note = Description of Artificial Sequence: Synthetic peptide
FPISPIETV

SEQ ID NO: 14123 - protein, 9 aa, synthetic construct
  REGION 1..9: note = Description of Artificial Sequence: Synthetic peptide
EPIAGAETF

SEQ ID NO: 14124 - protein, 9 aa, synthetic construct
  REGION 1..9: note = Description of Artificial Sequence: Synthetic peptide
NCTDVNITM

SEQ ID NO: 14125 - protein, 8 aa, synthetic construct
  REGION 1..8: note = Description of Artificial Sequence: Synthetic peptide
IPGNINNL

SEQ ID NO: 14126 - protein, 9 aa, synthetic construct
  REGION 1..9: note = Description of Artificial Sequence: Synthetic peptide
SAEPVPLQL

SEQ ID NO: 14127 - protein, 9 aa, synthetic construct
  REGION 1..9: note = Description of Artificial Sequence: Synthetic peptide
DPSPQELVL

SEQ ID NO: 14128 - protein, 9 aa, synthetic construct
  REGION 1..9: note = Description of Artificial Sequence: Synthetic peptide
TPQDLNTML

SEQ ID NO: 14129 - protein, 9 aa, synthetic construct
  REGION 1..9: note = Description of Artificial Sequence: Synthetic peptide
IVTDSQYAL

SEQ ID NO: 14130 - protein, 10 aa, synthetic construct
  REGION 1..10: note = Description of Artificial Sequence: Synthetic peptide
SPIETVPVKL

SEQ ID NO: 14131 - protein, 9 aa, synthetic construct
  REGION 1..9: note = Description of Artificial Sequence: Synthetic peptide
IPLKDDSKL

SEQ ID NO: 14132 - protein, 10 aa, synthetic construct
  REGION 1..10: note = Description of Artificial Sequence: Synthetic peptide
VPTDPSPQEL

SEQ ID NO: 14133 - protein, 9 aa, synthetic construct
  REGION 1..9: note = Description of Artificial Sequence: Synthetic peptide
MVVGGLIGL

SEQ ID NO: 14134 - protein, 9 aa, synthetic construct
  REGION 1..9: note = Description of Artificial Sequence: Synthetic peptide
YAAPIAGQI

SEQ ID NO: 14135 - protein, 9 aa, synthetic construct
  REGION 1..9: note = Description of Artificial Sequence: Synthetic peptide
EPILGAETF

SEQ ID NO: 14136 - protein, 10 aa, synthetic construct
  REGION 1..10: note = Description of Artificial Sequence: Synthetic peptide
VPTDPNPQEL

SEQ ID NO: 14137 - protein, 10 aa, synthetic construct
  REGION 1..10: note = Description of Artificial Sequence: Synthetic peptide
NANPDCKTIL

SEQ ID NO: 14138 - protein, 8 aa, synthetic construct
  REGION 1..8: note = Description of Artificial Sequence: Synthetic peptide
IPGDINNL

SEQ ID NO: 14139 - protein, 11 aa, synthetic construct
  REGION 1..11: note = Description of Artificial Sequence: Synthetic peptide
HGMEDDDKEVL

SEQ ID NO: 14140 - protein, 10 aa, synthetic construct
  REGION 1..10: note = Description of Artificial Sequence: Synthetic peptide
HQDPVSKQPL

SEQ ID NO: 14141 - protein, 9 aa, synthetic construct
  REGION 1..9: note = Description of Artificial Sequence: Synthetic peptide
EPIIGAETF

SEQ ID NO: 14142 - protein, 9 aa, synthetic construct
  REGION 1..9: note = Description of Artificial Sequence: Synthetic peptide
DPDPQEIFL

SEQ ID NO: 14143 - protein, 11 aa, synthetic construct
  REGION 1..11: note = Description of Artificial Sequence: Synthetic peptide
VPLTAEAELEL

SEQ ID NO: 14144 - protein, 10 aa, synthetic construct
  REGION 1..10: note = Description of Artificial Sequence: Synthetic peptide
NANPDCKIIL

SEQ ID NO: 14145 - protein, 9 aa, synthetic construct
  REGION 1..9: note = Description of Artificial Sequence: Synthetic peptide
QPDKSESEL

SEQ ID NO: 14146 - protein, 9 aa, synthetic construct
  REGION 1..9: note = Description of Artificial Sequence: Synthetic peptide
YQLETEPIL

SEQ ID NO: 14147 - protein, 9 aa, synthetic construct
  REGION 1..9: note = Description of Artificial Sequence: Synthetic peptide
LPDKSSWTV

SEQ ID NO: 14148 - protein, 9 aa, synthetic construct
  REGION 1..9: note = Description of Artificial Sequence: Synthetic peptide
EQAPPLVSL

SEQ ID NO: 14149 - protein, 11 aa, synthetic construct
  REGION 1..11: note = Description of Artificial Sequence: Synthetic peptide
IPAETGQETAY

SEQ ID NO: 14150 - protein, 11 aa, synthetic construct
  REGION 1..11: note = Description of Artificial Sequence: Synthetic peptide
IPAETGQEAAY

SEQ ID NO: 14151 - protein, 9 aa, synthetic construct
  REGION 1..9: note = Description of Artificial Sequence: Synthetic peptide
HPDKSESEL

SEQ ID NO: 14152 - protein, 9 aa, synthetic construct
  REGION 1..9: note = Description of Artificial Sequence: Synthetic peptide
EPIAGAETF

SEQ ID NO: 14153 - protein, 10 aa, synthetic construct
  REGION 1..10: note = Description of Artificial Sequence: Synthetic peptide
VPIEKNTTSY

SEQ ID NO: 14154 - protein, 9 aa, synthetic construct
  REGION 1..9: note = Description of Artificial Sequence: Synthetic peptide
IPLEDDSKL

SEQ ID NO: 14155 - protein, 9 aa, synthetic construct
  REGION 1..9: note = Description of Artificial Sequence: Synthetic peptide
NPEIVVYQY

SEQ ID NO: 14156 - protein, 9 aa, synthetic construct
  REGION 1..9: note = Description of Artificial Sequence: Synthetic peptide
IPLEEDSKL

SEQ ID NO: 14157 - protein, 9 aa, synthetic construct
  REGION 1..9: note = Description of Artificial Sequence: Synthetic peptide
EPILGAETF

SEQ ID NO: 14158 - protein, 10 aa, synthetic construct
  REGION 1..10: note = Description of Artificial Sequence: Synthetic peptide
VPINNSTSEY

SEQ ID NO: 14159 - protein, 9 aa, synthetic construct
  REGION 1..9: note = Description of Artificial Sequence: Synthetic peptide
EPIIGAETF

SEQ ID NO: 14160 - protein, 9 aa, synthetic construct
  REGION 1..9: note = Description of Artificial Sequence: Synthetic peptide
NPEIVIYQY

SEQ ID NO: 14161 - protein, 10 aa, synthetic construct
  REGION 1..10: note = Description of Artificial Sequence: Synthetic peptide
EPIKNSSNIY

SEQ ID NO: 14162 - protein, 9 aa, synthetic construct
  REGION 1..9: note = Description of Artificial Sequence: Synthetic peptide
EAQEEEVGF

SEQ ID NO: 14163 - protein, 9 aa, synthetic construct
  REGION 1..9: note = Description of Artificial Sequence: Synthetic peptide
TVLDVGDAY

SEQ ID NO: 14164 - protein, 10 aa, synthetic construct
  REGION 1..10: note = Description of Artificial Sequence: Synthetic peptide
NPPVPVGEIY

SEQ ID NO: 14165 - protein, 9 aa, synthetic construct
  REGION 1..9: note = Description of Artificial Sequence: Synthetic peptide
IPLENDSKL

SEQ ID NO: 14166 - protein, 8 aa, synthetic construct
  REGION 1..8: note = Description of Artificial Sequence: Synthetic peptide
TPGPGIRY

SEQ ID NO: 14167 - protein, 9 aa, synthetic construct
  REGION 1..9: note = Description of Artificial Sequence: Synthetic peptide
HPDKSESEL

SEQ ID NO: 14168 - protein, 9 aa, synthetic construct
  REGION 1..9: note = Description of Artificial Sequence: Synthetic peptide
IPLEEDSKL

SEQ ID NO: 14169 - protein, 9 aa, synthetic construct
  REGION 1..9: note = Description of Artificial Sequence: Synthetic peptide
IPLEDDSKL

SEQ ID NO: 14170 - protein, 9 aa, synthetic construct
  REGION 1..9: note = Description of Artificial Sequence: Synthetic peptide
IPLENDSKL

SEQ ID NO: 14171 - protein, 9 aa, synthetic construct
  REGION 1..9: note = Description of Artificial Sequence: Synthetic peptide
DPNPQELVL

SEQ ID NO: 14172 - protein, 9 aa, synthetic construct
  REGION 1..9: note = Description of Artificial Sequence: Synthetic peptide
QPDKSESEL

SEQ ID NO: 14173 - protein, 9 aa, synthetic construct
  REGION 1..9: note = Description of Artificial Sequence: Synthetic peptide
DPDPQEIFL

SEQ ID NO: 14174 - protein, 9 aa, synthetic construct
  REGION 1..9: note = Description of Artificial Sequence: Synthetic peptide
VPLTAEAEL

SEQ ID NO: 14175 - protein, 9 aa, synthetic construct
  REGION 1..9: note = Description of Artificial Sequence: Synthetic peptide
VPLTVEAEL

SEQ ID NO: 14176 - protein, 9 aa, synthetic construct
  REGION 1..9: note = Description of Artificial Sequence: Synthetic peptide
DPSPQELVL

SEQ ID NO: 14177 - protein, 9 aa, synthetic construct
  REGION 1..9: note = Description of Artificial Sequence: Synthetic peptide
IPLKDDSKL

SEQ ID NO: 14178 - protein, 9 aa, synthetic construct
  REGION 1..9: note = Description of Artificial Sequence: Synthetic peptide
SAEPVPLQL

SEQ ID NO: 14179 - protein, 9 aa, synthetic construct
  REGION 1..9: note = Description of Artificial Sequence: Synthetic peptide
EPIAGAETF

SEQ ID NO: 14180 - protein, 9 aa, synthetic construct
  REGION 1..9: note = Description of Artificial Sequence: Synthetic peptide
FPISSIETV

SEQ ID NO: 14181 - protein, 8 aa, synthetic construct
  REGION 1..8: note = Description of Artificial Sequence: Synthetic peptide
DPDLADQL

SEQ ID NO: 14182 - protein, 8 aa, synthetic construct
  REGION 1..8: note = Description of Artificial Sequence: Synthetic peptide
IPGNINNL

SEQ ID NO: 14183 - protein, 9 aa, synthetic construct
  REGION 1..9: note = Description of Artificial Sequence: Synthetic peptide
FPISPIETV

SEQ ID NO: 14184 - protein, 9 aa, synthetic construct
  REGION 1..9: note = Description of Artificial Sequence: Synthetic peptide
HPDKSESEI

SEQ ID NO: 14185 - protein, 9 aa, synthetic construct
  REGION 1..9: note = Description of Artificial Sequence: Synthetic peptide
EPILGAETF

SEQ ID NO: 14186 - protein, 8 aa, synthetic construct
  REGION 1..8: note = Description of Artificial Sequence: Synthetic peptide
VEITTHSF

SEQ ID NO: 14187 - protein, 8 aa, synthetic construct
  REGION 1..8: note = Description of Artificial Sequence: Synthetic peptide
SEELKSLF

SEQ ID NO: 14188 - protein, 8 aa, synthetic construct
  REGION 1..8: note = Description of Artificial Sequence: Synthetic peptide
LDNVTENF

SEQ ID NO: 14189 - protein, 10 aa, synthetic construct
  REGION 1..10: note = Description of Artificial Sequence: Synthetic peptide
KEQVPPLISL

SEQ ID NO: 14190 - protein, 8 aa, synthetic construct
  REGION 1..8: note = Description of Artificial Sequence: Synthetic peptide
AEHLKTAV

SEQ ID NO: 14191 - protein, 8 aa, synthetic construct
  REGION 1..8: note = Description of Artificial Sequence: Synthetic peptide
ADQLIHKY

SEQ ID NO: 14192 - protein, 9 aa, synthetic construct
  REGION 1..9: note = Description of Artificial Sequence: Synthetic peptide
QDPVPKQPL

SEQ ID NO: 14193 - protein, 8 aa, synthetic construct
  REGION 1..8: note = Description of Artificial Sequence: Synthetic peptide
KEATTTLF

SEQ ID NO: 14194 - protein, 8 aa, synthetic construct
  REGION 1..8: note = Description of Artificial Sequence: Synthetic peptide
KEFNGTGL

SEQ ID NO: 14195 - protein, 10 aa, synthetic construct
  REGION 1..10: note = Description of Artificial Sequence: Synthetic peptide
KEMYPPLTSL

SEQ ID NO: 14196 - protein, 8 aa, synthetic construct
  REGION 1..8: note = Description of Artificial Sequence: Synthetic peptide
ADNLWVTV

SEQ ID NO: 14197 - protein, 9 aa, synthetic construct
  REGION 1..9: note = Description of Artificial Sequence: Synthetic peptide
SHAALGSGI

SEQ ID NO: 14198 - protein, 9 aa, synthetic construct
  REGION 1..9: note = Description of Artificial Sequence: Synthetic peptide
IHTDNGSNF

SEQ ID NO: 14199 - protein, 9 aa, synthetic construct
  REGION 1..9: note = Description of Artificial Sequence: Synthetic peptide
EQAPPLVSL

SEQ ID NO: 14200 - protein, 11 aa, synthetic construct
  REGION 1..11: note = Description of Artificial Sequence: Synthetic peptide
TQVDPGLADQL

SEQ ID NO: 14201 - protein, 10 aa, synthetic construct
  REGION 1..10: note = Description of Artificial Sequence: Synthetic peptide
HQDPVSKQPL

SEQ ID NO: 14202 - protein, 9 aa, synthetic construct
  REGION 1..9: note = Description of Artificial Sequence: Synthetic peptide
IRIGPGQTF

SEQ ID NO: 14203 - protein, 10 aa, synthetic construct
  REGION 1..10: note = Description of Artificial Sequence: Synthetic peptide
HQDPVPKQPL

SEQ ID NO: 14204 - protein, 9 aa, synthetic construct
  REGION 1..9: note = Description of Artificial Sequence: Synthetic peptide
FLDNVTENF

SEQ ID NO: 14205 - protein, 9 aa, synthetic construct
  REGION 1..9: note = Description of Artificial Sequence: Synthetic peptide
GHDQWTYQI

SEQ ID NO: 14206 - protein, 11 aa, synthetic construct
  REGION 1..11: note = Description of Artificial Sequence: Synthetic peptide
TQVDPDLADQL

SEQ ID NO: 14207 - protein, 9 aa, synthetic construct
  REGION 1..9: note = Description of Artificial Sequence: Synthetic peptide
TQDFWEVQL

SEQ ID NO: 14208 - protein, 9 aa, synthetic construct
  REGION 1..9: note = Description of Artificial Sequence: Synthetic peptide
NHTRENDTI

SEQ ID NO: 14209 - protein, 9 aa, synthetic construct
  REGION 1..9: note = Description of Artificial Sequence: Synthetic peptide
YRTQVDPGL

SEQ ID NO: 14210 - protein, 11 aa, synthetic construct
  REGION 1..11: note = Description of Artificial Sequence: Synthetic peptide
DHQDPVSKQPL

SEQ ID NO: 14211 - protein, 9 aa, synthetic construct
  REGION 1..9: note = Description of Artificial Sequence: Synthetic peptide
EQVPPLISL

SEQ ID NO: 14212 - protein, 9 aa, synthetic construct
  REGION 1..9: note = Description of Artificial Sequence: Synthetic peptide
SHLNKSITF

SEQ ID NO: 14213 - protein, 9 aa, synthetic construct
  REGION 1..9: note = Description of Artificial Sequence: Synthetic peptide
GHQAAMQML

SEQ ID NO: 14214 - protein, 9 aa, synthetic construct
  REGION 1..9: note = Description of Artificial Sequence: Synthetic peptide
THLEGKIIL

SEQ ID NO: 14215 - protein, 9 aa, synthetic construct
  REGION 1..9: note = Description of Artificial Sequence: Synthetic peptide
AHTNDVKQL

SEQ ID NO: 14216 - protein, 9 aa, synthetic construct
  REGION 1..9: note = Description of Artificial Sequence: Synthetic peptide
NHTRVNDIL

SEQ ID NO: 14217 - protein, 9 aa, synthetic construct
  REGION 1..9: note = Description of Artificial Sequence: Synthetic peptide
EHLKTAVQM

SEQ ID NO: 14218 - protein, 9 aa, synthetic construct
  REGION 1..9: note = Description of Artificial Sequence: Synthetic peptide
YRTQVDPDL

SEQ ID NO: 14219 - protein, 9 aa, synthetic construct
  REGION 1..9: note = Description of Artificial Sequence: Synthetic peptide
YQSNPYPKL

SEQ ID NO: 14220 - protein, 9 aa, synthetic construct
  REGION 1..9: note = Description of Artificial Sequence: Synthetic peptide
EQAPPLVSL

SEQ ID NO: 14221 - protein, 9 aa, synthetic construct
  REGION 1..9: note = Description of Artificial Sequence: Synthetic peptide
EQVPPLISL

SEQ ID NO: 14222 - protein, 9 aa, synthetic construct
  REGION 1..9: note = Description of Artificial Sequence: Synthetic peptide
YRTQVDPDL

SEQ ID NO: 14223 - protein, 9 aa, synthetic construct
  REGION 1..9: note = Description of Artificial Sequence: Synthetic peptide
NRSNGIITL

SEQ ID NO: 14224 - protein, 10 aa, synthetic construct
  REGION 1..10: note = Description of Artificial Sequence: Synthetic peptide
HQDPVSKQPL

SEQ ID NO: 14225 - protein, 11 aa, synthetic construct
  REGION 1..11: note = Description of Artificial Sequence: Synthetic peptide
TQVDPGLADQL

SEQ ID NO: 14226 - protein, 11 aa, synthetic construct
  REGION 1..11: note = Description of Artificial Sequence: Synthetic peptide
DHQDPVSKQPL

SEQ ID NO: 14227 - protein, 9 aa, synthetic construct
  REGION 1..9: note = Description of Artificial Sequence: Synthetic peptide
YRTQVDPGL

SEQ ID NO: 14228 - protein, 9 aa, synthetic construct
  REGION 1..9: note = Description of Artificial Sequence: Synthetic peptide
ERQGNVPSL

SEQ ID NO: 14229 - protein, 9 aa, synthetic construct
  REGION 1..9: note = Description of Artificial Sequence: Synthetic peptide
EHLKTAVQM

SEQ ID NO: 14230 - protein, 9 aa, synthetic construct
  REGION 1..9: note = Description of Artificial Sequence: Synthetic peptide
SQVTATSVL

SEQ ID NO: 14231 - protein, 9 aa, synthetic construct
  REGION 1..9: note = Description of Artificial Sequence: Synthetic peptide
ERQGTVSSL

SEQ ID NO: 14232 - protein, 9 aa, synthetic construct
  REGION 1..9: note = Description of Artificial Sequence: Synthetic peptide
GQKAIGTVL

SEQ ID NO: 14233 - protein, 9 aa, synthetic construct
  REGION 1..9: note = Description of Artificial Sequence: Synthetic peptide
IRIGPGQTF

SEQ ID NO: 14234 - protein, 11 aa, synthetic construct
  REGION 1..11: note = Description of Artificial Sequence: Synthetic peptide
TQVDPDLADQL

SEQ ID NO: 14235 - protein, 9 aa, synthetic construct
  REGION 1..9: note = Description of Artificial Sequence: Synthetic peptide
ERQGTGSSL

SEQ ID NO: 14236 - protein, 9 aa, synthetic construct
  REGION 1..9: note = Description of Artificial Sequence: Synthetic peptide
TRENDTITL

SEQ ID NO: 14237 - protein, 10 aa, synthetic construct
  REGION 1..10: note = Description of Artificial Sequence: Synthetic peptide
VQINNSNTSY

SEQ ID NO: 14238 - protein, 10 aa, synthetic construct
  REGION 1..10: note = Description of Artificial Sequence: Synthetic peptide
HQDPVPKQPL

SEQ ID NO: 14239 - protein, 9 aa, synthetic construct
  REGION 1..9: note = Description of Artificial Sequence: Synthetic peptide
IHTDNGSNF

SEQ ID NO: 14240 - protein, 9 aa, synthetic construct
  REGION 1..9: note = Description of Artificial Sequence: Synthetic peptide
FIPGNINNL

SEQ ID NO: 14241 - protein, 9 aa, synthetic construct
  REGION 1..9: note = Description of Artificial Sequence: Synthetic peptide
HQAISPRTL

SEQ ID NO: 14242 - protein, 9 aa, synthetic construct
  REGION 1..9: note = Description of Artificial Sequence: Synthetic peptide
SQVTSTSIL

SEQ ID NO: 14243 - protein, 9 aa, synthetic construct
  REGION 1..9: note = Description of Artificial Sequence: Synthetic peptide
ERIRQTPAA

SEQ ID NO: 14244 - protein, 8 aa, synthetic construct
  REGION 1..8: note = Description of Artificial Sequence: Synthetic peptide
MRQTPVAA

SEQ ID NO: 14245 - protein, 9 aa, synthetic construct
  REGION 1..9: note = Description of Artificial Sequence: Synthetic peptide
EQVDKLVSA

SEQ ID NO: 14246 - protein, 9 aa, synthetic construct
  REGION 1..9: note = Description of Artificial Sequence: Synthetic peptide
ERMRQTPVA

SEQ ID NO: 14247 - protein, 9 aa, synthetic construct
  REGION 1..9: note = Description of Artificial Sequence: Synthetic peptide
YQQKTQPAA

SEQ ID NO: 14248 - protein, 9 aa, synthetic construct
  REGION 1..9: note = Description of Artificial Sequence: Synthetic peptide
TIYRLIESA

SEQ ID NO: 14249 - protein, 10 aa, synthetic construct
  REGION 1..10: note = Description of Artificial Sequence: Synthetic peptide
SQYALGIIQA

SEQ ID NO: 14250 - protein, 10 aa, synthetic construct
  REGION 1..10: note = Description of Artificial Sequence: Synthetic peptide
ERMRQTPVAA

SEQ ID NO: 14251 - protein, 9 aa, synthetic construct
  REGION 1..9: note = Description of Artificial Sequence: Synthetic peptide
VQLGIPHPA

SEQ ID NO: 14252 - protein, 8 aa, synthetic construct
  REGION 1..8: note = Description of Artificial Sequence: Synthetic peptide
DQVPIEIC

SEQ ID NO: 14253 - protein, 8 aa, synthetic construct
  REGION 1..8: note = Description of Artificial Sequence: Synthetic peptide
SQVTATSV

SEQ ID NO: 14254 - protein, 8 aa, synthetic construct
  REGION 1..8: note = Description of Artificial Sequence: Synthetic peptide
DQIPIEIC

SEQ ID NO: 14255 - protein, 8 aa, synthetic construct
  REGION 1..8: note = Description of Artificial Sequence: Synthetic peptide
THGIKPVV

SEQ ID NO: 14256 - protein, 8 aa, synthetic construct
  REGION 1..8: note = Description of Artificial Sequence: Synthetic peptide
THGIRPVV

SEQ ID NO: 14257 - protein, 9 aa, synthetic construct
  REGION 1..9: note = Description of Artificial Sequence: Synthetic peptide
SQQKTQPAA

SEQ ID NO: 14258 - protein, 9 aa, synthetic construct
  REGION 1..9: note = Description of Artificial Sequence: Synthetic peptide
TIYRLIEEA

SEQ ID NO: 14259 - protein, 10 aa, synthetic construct
  REGION 1..10: note = Description of Artificial Sequence: Synthetic peptide
YQQKTQPAAA

SEQ ID NO: 14260 - protein, 9 aa, synthetic construct
  REGION 1..9: note = Description of Artificial Sequence: Synthetic peptide
YQLETEPIA

SEQ ID NO: 14261 - protein, 8 aa, synthetic construct
  REGION 1..8: note = Description of Artificial Sequence: Synthetic peptide
TDVVPLTA

SEQ ID NO: 14262 - protein, 8 aa, synthetic construct
  REGION 1..8: note = Description of Artificial Sequence: Synthetic peptide
TEVVQKVA

SEQ ID NO: 14263 - protein, 8 aa, synthetic construct
  REGION 1..8: note = Description of Artificial Sequence: Synthetic peptide
QQKTQPAA

SEQ ID NO: 14264 - protein, 8 aa, synthetic construct
  REGION 1..8: note = Description of Artificial Sequence: Synthetic peptide
SMTLTVQA

SEQ ID NO: 14265 - protein, 8 aa, synthetic construct
  REGION 1..8: note = Description of Artificial Sequence: Synthetic peptide
DQVSIEIC

SEQ ID NO: 14266 - protein, 9 aa, synthetic construct
  REGION 1..9: note = Description of Artificial Sequence: Synthetic peptide
QQKTQPAAA

SEQ ID NO: 14267 - protein, 9 aa, synthetic construct
  REGION 1..9: note = Description of Artificial Sequence: Synthetic peptide
TIYKLIENA

SEQ ID NO: 14268 - protein, 9 aa, synthetic construct
  REGION 1..9: note = Description of Artificial Sequence: Synthetic peptide
QRVGQAMYA

SEQ ID NO: 14269 - protein, 8 aa, synthetic construct
  REGION 1..8: note = Description of Artificial Sequence: Synthetic peptide
DEALLTAV

SEQ ID NO: 14270 - protein, 9 aa, synthetic construct
  REGION 1..9: note = Description of Artificial Sequence: Synthetic peptide
EQVDKLVST

SEQ ID NO: 14271 - protein, 9 aa, synthetic construct
  REGION 1..9: note = Description of Artificial Sequence: Synthetic peptide
QQHLLQLTV

SEQ ID NO: 14272 - protein, 8 aa, synthetic construct
  REGION 1..8: note = Description of Artificial Sequence: Synthetic peptide
DRTAIAVA

SEQ ID NO: 14273 - protein, 9 aa, synthetic construct
  REGION 1..9: note = Description of Artificial Sequence: Synthetic peptide
VRIEPVGVA

SEQ ID NO: 14274 - protein, 8 aa, synthetic construct
  REGION 1..8: note = Description of Artificial Sequence: Synthetic peptide
ERIRQTPA

SEQ ID NO: 14275 - protein, 9 aa, synthetic construct
  REGION 1..9: note = Description of Artificial Sequence: Synthetic peptide
EQAPPLVSL

SEQ ID NO: 14276 - protein, 9 aa, synthetic construct
  REGION 1..9: note = Description of Artificial Sequence: Synthetic peptide
IRAAEGVGA

SEQ ID NO: 14277 - protein, 8 aa, synthetic construct
  REGION 1..8: note = Description of Artificial Sequence: Synthetic peptide
DRLHPVQA

SEQ ID NO: 14278 - protein, 10 aa, synthetic construct
  REGION 1..10: note = Description of Artificial Sequence: Synthetic peptide
TETTNQKTEL

SEQ ID NO: 14279 - protein, 9 aa, synthetic construct
  REGION 1..9: note = Description of Artificial Sequence: Synthetic peptide
MEDDDKEVL

SEQ ID NO: 14280 - protein, 11 aa, synthetic construct
  REGION 1..11: note = Description of Artificial Sequence: Synthetic peptide
GEEQAPPLVSL

SEQ ID NO: 14281 - protein, 9 aa, synthetic construct
  REGION 1..9: note = Description of Artificial Sequence: Synthetic peptide
MEDEDREVL

SEQ ID NO: 14282 - protein, 10 aa, synthetic construct
  REGION 1..10: note = Description of Artificial Sequence: Synthetic peptide
KEIDNYTDTI

SEQ ID NO: 14283 - protein, 10 aa, synthetic construct
  REGION 1..10: note = Description of Artificial Sequence: Synthetic peptide
KEIGNYTDTI

SEQ ID NO: 14284 - protein, 10 aa, synthetic construct
  REGION 1..10: note = Description of Artificial Sequence: Synthetic peptide
IEVRDTKEAL

SEQ ID NO: 14285 - protein, 8 aa, synthetic construct
  REGION 1..8: note = Description of Artificial Sequence: Synthetic peptide
KEFNGTGL

SEQ ID NO: 14286 - protein, 10 aa, synthetic construct
  REGION 1..10: note = Description of Artificial Sequence: Synthetic peptide
EEQAPPLVSL

SEQ ID NO: 14287 - protein, 10 aa, synthetic construct
  REGION 1..10: note = Description of Artificial Sequence: Synthetic peptide
KEMYPPLTSL

SEQ ID NO: 14288 - protein, 10 aa, synthetic construct
  REGION 1..10: note = Description of Artificial Sequence: Synthetic peptide
KEQVPPLISL

SEQ ID NO: 14289 - protein, 9 aa, synthetic construct
  REGION 1..9: note = Description of Artificial Sequence: Synthetic peptide
AEVKNLTNI

SEQ ID NO: 14290 - protein, 9 aa, synthetic construct
  REGION 1..9: note = Description of Artificial Sequence: Synthetic peptide
SEGATPQDL

SEQ ID NO: 14291 - protein, 9 aa, synthetic construct
  REGION 1..9: note = Description of Artificial Sequence: Synthetic peptide
SESAIRNAI

SEQ ID NO: 14292 - protein, 9 aa, synthetic construct
  REGION 1..9: note = Description of Artificial Sequence: Synthetic peptide
GEGNESETL

SEQ ID NO: 14293 - protein, 8 aa, synthetic construct
  REGION 1..8: note = Description of Artificial Sequence: Synthetic peptide
IETVPVKL

SEQ ID NO: 14294 - protein, 10 aa, synthetic construct
  REGION 1..10: note = Description of Artificial Sequence: Synthetic peptide
QELKNSAISL

SEQ ID NO: 14295 - protein, 9 aa, synthetic construct
  REGION 1..9: note = Description of Artificial Sequence: Synthetic peptide
VEGQLREAL

SEQ ID NO: 14296 - protein, 10 aa, synthetic construct
  REGION 1..10: note = Description of Artificial Sequence: Synthetic peptide
SESAIRNAIL

SEQ ID NO: 14297 - protein, 10 aa, synthetic construct
  REGION 1..10: note = Description of Artificial Sequence: Synthetic peptide
REIKNSAIDL

SEQ ID NO: 14298 - protein, 9 aa, synthetic construct
  REGION 1..9: note = Description of Artificial Sequence: Synthetic peptide
QEKNEQDLL

SEQ ID NO: 14299 - protein, 11 aa, synthetic construct
  REGION 1..11: note = Description of Artificial Sequence: Synthetic peptide
SEIVNQIIEQL

SEQ ID NO: 14300 - protein, 8 aa, synthetic construct
  REGION 1..8: note = Description of Artificial Sequence: Synthetic peptide
TELQAIQL

SEQ ID NO: 14301 - protein, 11 aa, synthetic construct
  REGION 1..11: note = Description of Artificial Sequence: Synthetic peptide
AEGTDRIIEVL

SEQ ID NO: 14302 - protein, 10 aa, synthetic construct
  REGION 1..10: note = Description of Artificial Sequence: Synthetic peptide
IEAQQHLLQL

SEQ ID NO: 14303 - protein, 11 aa, synthetic construct
  REGION 1..11: note = Description of Artificial Sequence: Synthetic peptide
SEGDAEELAAL

SEQ ID NO: 14304 - protein, 9 aa, synthetic construct
  REGION 1..9: note = Description of Artificial Sequence: Synthetic peptide
SESEIVNQI

SEQ ID NO: 14305 - protein, 11 aa, synthetic construct
  REGION 1..11: note = Description of Artificial Sequence: Synthetic peptide
AEVKNLTNITI

SEQ ID NO: 14306 - protein, 11 aa, synthetic construct
  REGION 1..11: note = Description of Artificial Sequence: Synthetic peptide
REIKNSAIDLL

SEQ ID NO: 14307 - protein, 10 aa, synthetic construct
  REGION 1..10: note = Description of Artificial Sequence: Synthetic peptide
AEHLKTAVQM

SEQ ID NO: 14308 - protein, 10 aa, synthetic construct
  REGION 1..10: note = Description of Artificial Sequence: Synthetic peptide
AERQGTGSSL

SEQ ID NO: 14309 - protein, 8 aa, synthetic construct
  REGION 1..8: note = Description of Artificial Sequence: Synthetic peptide
IEAQQHLL

SEQ ID NO: 14310 - protein, 9 aa, synthetic construct
  REGION 1..9: note = Description of Artificial Sequence: Synthetic peptide
AEVKNLTNI

SEQ ID NO: 14311 - protein, 10 aa, synthetic construct
  REGION 1..10: note = Description of Artificial Sequence: Synthetic peptide
TETTNQKTEL

SEQ ID NO: 14312 - protein, 10 aa, synthetic construct
  REGION 1..10: note = Description of Artificial Sequence: Synthetic peptide
KEQVPPLISL

SEQ ID NO: 14313 - protein, 11 aa, synthetic construct
  REGION 1..11: note = Description of Artificial Sequence: Synthetic peptide
AEVKNLTNITI

SEQ ID NO: 14314 - protein, 10 aa, synthetic construct
  REGION 1..10: note = Description of Artificial Sequence: Synthetic peptide
KEMYPPLTSL

SEQ ID NO: 14315 - protein, 11 aa, synthetic construct
  REGION 1..11: note = Description of Artificial Sequence: Synthetic peptide
SEIVNQIIEQL

SEQ ID NO: 14316 - protein, 8 aa, synthetic construct
  REGION 1..8: note = Description of Artificial Sequence: Synthetic peptide
TDIQTKEL

SEQ ID NO: 14317 - protein, 10 aa, synthetic construct
  REGION 1..10: note = Description of Artificial Sequence: Synthetic peptide
AEHLKTAVQM

SEQ ID NO: 14318 - protein, 11 aa, synthetic construct
  REGION 1..11: note = Description of Artificial Sequence: Synthetic peptide
AEGTDRIIEVL

SEQ ID NO: 14319 - protein, 8 aa, synthetic construct
  REGION 1..8: note = Description of Artificial Sequence: Synthetic peptide
KEFNGTGL

SEQ ID NO: 14320 - protein, 10 aa, synthetic construct
  REGION 1..10: note = Description of Artificial Sequence: Synthetic peptide
AERQGNVPSL

SEQ ID NO: 14321 - protein, 9 aa, synthetic construct
  REGION 1..9: note = Description of Artificial Sequence: Synthetic peptide
SESAIRNAI

SEQ ID NO: 14322 - protein, 11 aa, synthetic construct
  REGION 1..11: note = Description of Artificial Sequence: Synthetic peptide
GEEQAPPLVSL

SEQ ID NO: 14323 - protein, 10 aa, synthetic construct
  REGION 1..10: note = Description of Artificial Sequence: Synthetic peptide
KEIDNYTDTI

SEQ ID NO: 14324 - protein, 8 aa, synthetic construct
  REGION 1..8: note = Description of Artificial Sequence: Synthetic peptide
TELQAIQL

SEQ ID NO: 14325 - protein, 8 aa, synthetic construct
  REGION 1..8: note = Description of Artificial Sequence: Synthetic peptide
SDINGTSL

SEQ ID NO: 14326 - protein, 10 aa, synthetic construct
  REGION 1..10: note = Description of Artificial Sequence: Synthetic peptide
EEQAPPLVSL

SEQ ID NO: 14327 - protein, 8 aa, synthetic construct
  REGION 1..8: note = Description of Artificial Sequence: Synthetic peptide
TDVVPLTV

SEQ ID NO: 14328 - protein, 10 aa, synthetic construct
  REGION 1..10: note = Description of Artificial Sequence: Synthetic peptide
KEIGNYTDTI

SEQ ID NO: 14329 - protein, 9 aa, synthetic construct
  REGION 1..9: note = Description of Artificial Sequence: Synthetic peptide
GEFFYCNTV

SEQ ID NO: 14330 - protein, 10 aa, synthetic construct
  REGION 1..10: note = Description of Artificial Sequence: Synthetic peptide
GEIIGDIRKA

SEQ ID NO: 14331 - protein, 10 aa, synthetic construct
  REGION 1..10: note = Description of Artificial Sequence: Synthetic peptide
IEAQQHLLQL

SEQ ID NO: 14332 - protein, 10 aa, synthetic construct
  REGION 1..10: note = Description of Artificial Sequence: Synthetic peptide
SESAIRNAIL

SEQ ID NO: 14333 - protein, 8 aa, synthetic construct
  REGION 1..8: note = Description of Artificial Sequence: Synthetic peptide
IETVPVKL

SEQ ID NO: 14334 - protein, 9 aa, synthetic construct
  REGION 1..9: note = Description of Artificial Sequence: Synthetic peptide
TEVVQKVAT

SEQ ID NO: 14335 - protein, 10 aa, synthetic construct
  REGION 1..10: note = Description of Artificial Sequence: Synthetic peptide
AERQGTVSSL

SEQ ID NO: 14336 - protein, 10 aa, synthetic construct
  REGION 1..10: note = Description of Artificial Sequence: Synthetic peptide
QELKNSAISL

SEQ ID NO: 14337 - protein, 9 aa, synthetic construct
  REGION 1..9: note = Description of Artificial Sequence: Synthetic peptide
SESEIVNQI

SEQ ID NO: 14338 - protein, 9 aa, synthetic construct
  REGION 1..9: note = Description of Artificial Sequence: Synthetic peptide
SEIHQNPVP

SEQ ID NO: 14339 - protein, 9 aa, synthetic construct
  REGION 1..9: note = Description of Artificial Sequence: Synthetic peptide
VEGQLREAL

SEQ ID NO: 14340 - protein, 8 aa, synthetic construct
  REGION 1..8: note = Description of Artificial Sequence: Synthetic peptide
VEAIIRTL

SEQ ID NO: 14341 - protein, 8 aa, synthetic construct
  REGION 1..8: note = Description of Artificial Sequence: Synthetic peptide
TELQAIHL

SEQ ID NO: 14342 - protein, 10 aa, synthetic construct
  REGION 1..10: note = Description of Artificial Sequence: Synthetic peptide
TEKGVGSPQI

SEQ ID NO: 14343 - protein, 10 aa, synthetic construct
  REGION 1..10: note = Description of Artificial Sequence: Synthetic peptide
GEIIGDTRKA

SEQ ID NO: 14344 - protein, 9 aa, synthetic construct
  REGION 1..9: note = Description of Artificial Sequence: Synthetic peptide
GEQDKTRSV

SEQ ID NO: 14345 - protein, 8 aa, synthetic construct
  REGION 1..8: note = Description of Artificial Sequence: Synthetic peptide
IEAQQHLL

SEQ ID NO: 14346 - protein, 10 aa, synthetic construct
  REGION 1..10: note = Description of Artificial Sequence: Synthetic peptide
AERQGTGSSL

SEQ ID NO: 14347 - protein, 9 aa, synthetic construct
  REGION 1..9: note = Description of Artificial Sequence: Synthetic peptide
SDFNLPPVV

SEQ ID NO: 14348 - protein, 9 aa, synthetic construct
  REGION 1..9: note = Description of Artificial Sequence: Synthetic peptide
SERILSTCL

SEQ ID NO: 14349 - protein, 10 aa, synthetic construct
  REGION 1..10: note = Description of Artificial Sequence: Synthetic peptide
IEVRDTKEAL

SEQ ID NO: 14350 - protein, 9 aa, synthetic construct
  REGION 1..9: note = Description of Artificial Sequence: Synthetic peptide
AEAMSQVTA

SEQ ID NO: 14351 - protein, 9 aa, synthetic construct
  REGION 1..9: note = Description of Artificial Sequence: Synthetic peptide
MEDEDREVL

SEQ ID NO: 14352 - protein, 11 aa, synthetic construct
  REGION 1..11: note = Description of Artificial Sequence: Synthetic peptide
SELVNQIIEQL

SEQ ID NO: 14353 - protein, 9 aa, synthetic construct
  REGION 1..9: note = Description of Artificial Sequence: Synthetic peptide
TEVVQKIAT

SEQ ID NO: 14354 - protein, 9 aa, synthetic construct
  REGION 1..9: note = Description of Artificial Sequence: Synthetic peptide
SEGATPQDL

SEQ ID NO: 14355 - protein, 10 aa, synthetic construct
  REGION 1..10: note = Description of Artificial Sequence: Synthetic peptide
HEISERILTT

SEQ ID NO: 14356 - protein, 8 aa, synthetic construct
  REGION 1..8: note = Description of Artificial Sequence: Synthetic peptide
VEITTHSF

SEQ ID NO: 14357 - protein, 10 aa, synthetic construct
  REGION 1..10: note = Description of Artificial Sequence: Synthetic peptide
SERGVGSPQI

SEQ ID NO: 14358 - protein, 11 aa, synthetic construct
  REGION 1..11: note = Description of Artificial Sequence: Synthetic peptide
VEAIIRTLQQL

SEQ ID NO: 14359 - protein, 9 aa, synthetic construct
  REGION 1..9: note = Description of Artificial Sequence: Synthetic peptide
SESELVNQI

SEQ ID NO: 14360 - protein, 9 aa, synthetic construct
  REGION 1..9: note = Description of Artificial Sequence: Synthetic peptide
SEIHQNPVP

SEQ ID NO: 14361 - protein, 10 aa, synthetic construct
  REGION 1..10: note = Description of Artificial Sequence: Synthetic peptide
GEIIGDIRKA

SEQ ID NO: 14362 - protein, 9 aa, synthetic construct
  REGION 1..9: note = Description of Artificial Sequence: Synthetic peptide
AEAMSQVTA

SEQ ID NO: 14363 - protein, 10 aa, synthetic construct
  REGION 1..10: note = Description of Artificial Sequence: Synthetic peptide
GEIIGDTRKA

SEQ ID NO: 14364 - protein, 9 aa, synthetic construct
  REGION 1..9: note = Description of Artificial Sequence: Synthetic peptide
LETEPIIGA

SEQ ID NO: 14365 - protein, 9 aa, synthetic construct
  REGION 1..9: note = Description of Artificial Sequence: Synthetic peptide
LETEPIAGA

SEQ ID NO: 14366 - protein, 11 aa, synthetic construct
  REGION 1..11: note = Description of Artificial Sequence: Synthetic peptide
AEWDRLHPVQA

SEQ ID NO: 14367 - protein, 9 aa, synthetic construct
  REGION 1..9: note = Description of Artificial Sequence: Synthetic peptide
KEFNGTGLC

SEQ ID NO: 14368 - protein, 8 aa, synthetic construct
  REGION 1..8: note = Description of Artificial Sequence: Synthetic peptide
TEVVQKVA

SEQ ID NO: 14369 - protein, 9 aa, synthetic construct
  REGION 1..9: note = Description of Artificial Sequence: Synthetic peptide
TELQAIHLA

SEQ ID NO: 14370 - protein, 9 aa, synthetic construct
  REGION 1..9: note = Description of Artificial Sequence: Synthetic peptide
TETLLVQNA

SEQ ID NO: 14371 - protein, 9 aa, synthetic construct
  REGION 1..9: note = Description of Artificial Sequence: Synthetic peptide
LETEPILGA

SEQ ID NO: 14372 - protein, 9 aa, synthetic construct
  REGION 1..9: note = Description of Artificial Sequence: Synthetic peptide
EEVGFPVRP

SEQ ID NO: 14373 - protein, 9 aa, synthetic construct
  REGION 1..9: note = Description of Artificial Sequence: Synthetic peptide
QEFGIPYNP

SEQ ID NO: 14374 - protein, 9 aa, synthetic construct
  REGION 1..9: note = Description of Artificial Sequence: Synthetic peptide
RENDTITLP

SEQ ID NO: 14375 - protein, 8 aa, synthetic construct
  REGION 1..8: note = Description of Artificial Sequence: Synthetic peptide
RDFILIAA

SEQ ID NO: 14376 - protein, 10 aa, synthetic construct
  REGION 1..10: note = Description of Artificial Sequence: Synthetic peptide
SDFNLPPVVA

SEQ ID NO: 14377 - protein, 8 aa, synthetic construct
  REGION 1..8: note = Description of Artificial Sequence: Synthetic peptide
GEGITPSP

SEQ ID NO: 14378 - protein, 8 aa, synthetic construct
  REGION 1..8: note = Description of Artificial Sequence: Synthetic peptide
SESAIRKA

SEQ ID NO: 14379 - protein, 9 aa, synthetic construct
  REGION 1..9: note = Description of Artificial Sequence: Synthetic peptide
QEFGVPYNP

SEQ ID NO: 14380 - protein, 9 aa, synthetic construct
  REGION 1..9: note = Description of Artificial Sequence: Synthetic peptide
GEQDKTRSV

SEQ ID NO: 14381 - protein, 9 aa, synthetic construct
  REGION 1..9: note = Description of Artificial Sequence: Synthetic peptide
SESAIRNAI

SEQ ID NO: 14382 - protein, 8 aa, synthetic construct
  REGION 1..8: note = Description of Artificial Sequence: Synthetic peptide
TDIQTKEL

SEQ ID NO: 14383 - protein, 9 aa, synthetic construct
  REGION 1..9: note = Description of Artificial Sequence: Synthetic peptide
GEQDKTRSV

SEQ ID NO: 14384 - protein, 9 aa, synthetic construct
  REGION 1..9: note = Description of Artificial Sequence: Synthetic peptide
SERILSTCL

SEQ ID NO: 14385 - protein, 8 aa, synthetic construct
  REGION 1..8: note = Description of Artificial Sequence: Synthetic peptide
AEHLKTAV

SEQ ID NO: 14386 - protein, 9 aa, synthetic construct
  REGION 1..9: note = Description of Artificial Sequence: Synthetic peptide
MEDEDREVL

SEQ ID NO: 14387 - protein, 10 aa, synthetic construct
  REGION 1..10: note = Description of Artificial Sequence: Synthetic peptide
AERQGTGSSL

SEQ ID NO: 14388 - protein, 10 aa, synthetic construct
  REGION 1..10: note = Description of Artificial Sequence: Synthetic peptide
KEQVPPLISL

SEQ ID NO: 14389 - protein, 9 aa, synthetic construct
  REGION 1..9: note = Description of Artificial Sequence: Synthetic peptide
VEGQLREAL

SEQ ID NO: 14390 - protein, 8 aa, synthetic construct
  REGION 1..8: note = Description of Artificial Sequence: Synthetic peptide
SDINGTSL

SEQ ID NO: 14391 - protein, 8 aa, synthetic construct
  REGION 1..8: note = Description of Artificial Sequence: Synthetic peptide
KEFNGTGL

SEQ ID NO: 14392 - protein, 9 aa, synthetic construct
  REGION 1..9: note = Description of Artificial Sequence: Synthetic peptide
SESAIRKAI

SEQ ID NO: 14393 - protein, 10 aa, synthetic construct
  REGION 1..10: note = Description of Artificial Sequence: Synthetic peptide
AERQGNVPSL

SEQ ID NO: 14394 - protein, 10 aa, synthetic construct
  REGION 1..10: note = Description of Artificial Sequence: Synthetic peptide
AERQGTVSSL

SEQ ID NO: 14395 - protein, 8 aa, synthetic construct
  REGION 1..8: note = Description of Artificial Sequence: Synthetic peptide
TDRIIEVL

SEQ ID NO: 14396 - protein, 10 aa, synthetic construct
  REGION 1..10: note = Description of Artificial Sequence: Synthetic peptide
SESAIRNAIL

SEQ ID NO: 14397 - protein, 10 aa, synthetic construct
  REGION 1..10: note = Description of Artificial Sequence: Synthetic peptide
TETTNQKTEL

SEQ ID NO: 14398 - protein, 9 aa, synthetic construct
  REGION 1..9: note = Description of Artificial Sequence: Synthetic peptide
QERNEQELL

SEQ ID NO: 14399 - protein, 10 aa, synthetic construct
  REGION 1..10: note = Description of Artificial Sequence: Synthetic peptide
KEMYPPLTSL

SEQ ID NO: 14400 - protein, 10 aa, synthetic construct
  REGION 1..10: note = Description of Artificial Sequence: Synthetic peptide
EEQAPPLVSL

SEQ ID NO: 14401 - protein, 8 aa, synthetic construct
  REGION 1..8: note = Description of Artificial Sequence: Synthetic peptide
VEAIIRTL

SEQ ID NO: 14402 - protein, 8 aa, synthetic construct
  REGION 1..8: note = Description of Artificial Sequence: Synthetic peptide
TELQAIQL

SEQ ID NO: 14403 - protein, 11 aa, synthetic construct
  REGION 1..11: note = Description of Artificial Sequence: Synthetic peptide
GEEQAPPLVSL

SEQ ID NO: 14404 - protein, 9 aa, synthetic construct
  REGION 1..9: note = Description of Artificial Sequence: Synthetic peptide
AEVKNLTNI

SEQ ID NO: 14405 - protein, 8 aa, synthetic construct
  REGION 1..8: note = Description of Artificial Sequence: Synthetic peptide
IEAQQHLL

SEQ ID NO: 14406 - protein, 9 aa, synthetic construct
  REGION 1..9: note = Description of Artificial Sequence: Synthetic peptide
QEKNEQDLL

SEQ ID NO: 14407 - protein, 9 aa, synthetic construct
  REGION 1..9: note = Description of Artificial Sequence: Synthetic peptide
KEKGGLEGL

SEQ ID NO: 14408 - protein, 10 aa, synthetic construct
  REGION 1..10: note = Description of Artificial Sequence: Synthetic peptide
TEKGVGSPQI

SEQ ID NO: 14409 - protein, 9 aa, synthetic construct
  REGION 1..9: note = Description of Artificial Sequence: Synthetic peptide
AEAMSQVTA

SEQ ID NO: 14410 - protein, 8 aa, synthetic construct
  REGION 1..8: note = Description of Artificial Sequence: Synthetic peptide
TELQAIHL

SEQ ID NO: 14411 - protein, 10 aa, synthetic construct
  REGION 1..10: note = Description of Artificial Sequence: Synthetic peptide
AEHLKTAVQM

SEQ ID NO: 14412 - protein, 8 aa, synthetic construct
  REGION 1..8: note = Description of Artificial Sequence: Synthetic peptide
TERQANFL

SEQ ID NO: 14413 - protein, 9 aa, synthetic construct
  REGION 1..9: note = Description of Artificial Sequence: Synthetic peptide
SEIHQNPVP

SEQ ID NO: 14414 - protein, 9 aa, synthetic construct
  REGION 1..9: note = Description of Artificial Sequence: Synthetic peptide
SEEMKNCSF

SEQ ID NO: 14415 - protein, 8 aa, synthetic construct
  REGION 1..8: note = Description of Artificial Sequence: Synthetic peptide
LDRTAIAV

SEQ ID NO: 14416 - protein, 8 aa, synthetic construct
  REGION 1..8: note = Description of Artificial Sequence: Synthetic peptide
GQMVHQAL

SEQ ID NO: 14417 - protein, 8 aa, synthetic construct
  REGION 1..8: note = Description of Artificial Sequence: Synthetic peptide
GQMVHQSL

SEQ ID NO: 14418 - protein, 9 aa, synthetic construct
  REGION 1..9: note = Description of Artificial Sequence: Synthetic peptide
KDIDGKEIL

SEQ ID NO: 14419 - protein, 9 aa, synthetic construct
  REGION 1..9: note = Description of Artificial Sequence: Synthetic peptide
TEVVQKVAT

SEQ ID NO: 14420 - protein, 9 aa, synthetic construct
  REGION 1..9: note = Description of Artificial Sequence: Synthetic peptide
KEKGGLDGL

SEQ ID NO: 14421 - protein, 9 aa, synthetic construct
  REGION 1..9: note = Description of Artificial Sequence: Synthetic peptide
MEDDDKEVL

SEQ ID NO: 14422 - protein, 8 aa, synthetic construct
  REGION 1..8: note = Description of Artificial Sequence: Synthetic peptide
VEITTHSF

SEQ ID NO: 14423 - protein, 9 aa, synthetic construct
  REGION 1..9: note = Description of Artificial Sequence: Synthetic peptide
SERILTTYL

SEQ ID NO: 14424 - protein, 9 aa, synthetic construct
  REGION 1..9: note = Description of Artificial Sequence: Synthetic peptide
TEMEKEGKI

SEQ ID NO: 14425 - protein, 8 aa, synthetic construct
  REGION 1..8: note = Description of Artificial Sequence: Synthetic peptide
SERILTTY

SEQ ID NO: 14426 - protein, 9 aa, synthetic construct
  REGION 1..9: note = Description of Artificial Sequence: Synthetic peptide
GEQDKDRSV

SEQ ID NO: 14427 - protein, 10 aa, synthetic construct
  REGION 1..10: note = Description of Artificial Sequence: Synthetic peptide
SERGVGSPQI

SEQ ID NO: 14428 - protein, 10 aa, synthetic construct
  REGION 1..10: note = Description of Artificial Sequence: Synthetic peptide
QELKNSAISL

SEQ ID NO: 14429 - protein, 9 aa, synthetic construct
  REGION 1..9: note = Description of Artificial Sequence: Synthetic peptide
GEQDKDRSI

SEQ ID NO: 14430 - protein, 11 aa, synthetic construct
  REGION 1..11: note = Description of Artificial Sequence: Synthetic peptide
AEQASQEVKGW

SEQ ID NO: 14431 - protein, 11 aa, synthetic construct
  REGION 1..11: note = Description of Artificial Sequence: Synthetic peptide
AEQATQEVKGW

SEQ ID NO: 14432 - protein, 11 aa, synthetic construct
  REGION 1..11: note = Description of Artificial Sequence: Synthetic peptide
AEQATQEVKNW

SEQ ID NO: 14433 - protein, 11 aa, synthetic construct
  REGION 1..11: note = Description of Artificial Sequence: Synthetic peptide
SEVNIVTDSQY

SEQ ID NO: 14434 - protein, 9 aa, synthetic construct
  REGION 1..9: note = Description of Artificial Sequence: Synthetic peptide
EEIWGNMTW

SEQ ID NO: 14435 - protein, 9 aa, synthetic construct
  REGION 1..9: note = Description of Artificial Sequence: Synthetic peptide
SESAIRNAI

SEQ ID NO: 14436 - protein, 9 aa, synthetic construct
  REGION 1..9: note = Description of Artificial Sequence: Synthetic peptide
SESAIRKAI

SEQ ID NO: 14437 - protein, 11 aa, synthetic construct
  REGION 1..11: note = Description of Artificial Sequence: Synthetic peptide
GEIIGDIRKAY

SEQ ID NO: 14438 - protein, 9 aa, synthetic construct
  REGION 1..9: note = Description of Artificial Sequence: Synthetic peptide
DEIWGNMTW

SEQ ID NO: 14439 - protein, 11 aa, synthetic construct
  REGION 1..11: note = Description of Artificial Sequence: Synthetic peptide
NEQDLLALDKW

SEQ ID NO: 14440 - protein, 9 aa, synthetic construct
  REGION 1..9: note = Description of Artificial Sequence: Synthetic peptide
SESEIVNQI

SEQ ID NO: 14441 - protein, 10 aa, synthetic construct
  REGION 1..10: note = Description of Artificial Sequence: Synthetic peptide
EEQAPPLVSL

SEQ ID NO: 14442 - protein, 11 aa, synthetic construct
  REGION 1..11: note = Description of Artificial Sequence: Synthetic peptide
HEISERILTTY

SEQ ID NO: 14443 - protein, 10 aa, synthetic construct
  REGION 1..10: note = Description of Artificial Sequence: Synthetic peptide
NETPGIRYQY

SEQ ID NO: 14444 - protein, 9 aa, synthetic construct
  REGION 1..9: note = Description of Artificial Sequence: Synthetic peptide
QELLALDKW

SEQ ID NO: 14445 - protein, 9 aa, synthetic construct
  REGION 1..9: note = Description of Artificial Sequence: Synthetic peptide
AETGQETAY

SEQ ID NO: 14446 - protein, 11 aa, synthetic construct
  REGION 1..11: note = Description of Artificial Sequence: Synthetic peptide
EEQGEIKNCSF

SEQ ID NO: 14447 - protein, 9 aa, synthetic construct
  REGION 1..9: note = Description of Artificial Sequence: Synthetic peptide
KENPEIVIY

SEQ ID NO: 14448 - protein, 11 aa, synthetic construct
  REGION 1..11: note = Description of Artificial Sequence: Synthetic peptide
NEQELLALDKW

SEQ ID NO: 14449 - protein, 11 aa, synthetic construct
  REGION 1..11: note = Description of Artificial Sequence: Synthetic peptide
SEVNIVTDSQY

SEQ ID NO: 14450 - protein, 11 aa, synthetic construct
  REGION 1..11: note = Description of Artificial Sequence: Synthetic peptide
AEQATQEVKGW

SEQ ID NO: 14451 - protein, 11 aa, synthetic construct
  REGION 1..11: note = Description of Artificial Sequence: Synthetic peptide
AEQASQEVKGW

SEQ ID NO: 14452 - protein, 11 aa, synthetic construct
  REGION 1..11: note = Description of Artificial Sequence: Synthetic peptide
AEQATQEVKNW

SEQ ID NO: 14453 - protein, 9 aa, synthetic construct
  REGION 1..9: note = Description of Artificial Sequence: Synthetic peptide
SESAIRKAI

SEQ ID NO: 14454 - protein, 9 aa, synthetic construct
  REGION 1..9: note = Description of Artificial Sequence: Synthetic peptide
SESEIVNQI

SEQ ID NO: 14455 - protein, 9 aa, synthetic construct
  REGION 1..9: note = Description of Artificial Sequence: Synthetic peptide
SESAIRNAI

SEQ ID NO: 14456 - protein, 9 aa, synthetic construct
  REGION 1..9: note = Description of Artificial Sequence: Synthetic peptide
EEIWGNMTW

SEQ ID NO: 14457 - protein, 11 aa, synthetic construct
  REGION 1..11: note = Description of Artificial Sequence: Synthetic peptide
AEVQKQGHDQW

SEQ ID NO: 14458 - protein, 11 aa, synthetic construct
  REGION 1..11: note = Description of Artificial Sequence: Synthetic peptide
AEIQKQGHDQW

SEQ ID NO: 14459 - protein, 10 aa, synthetic construct
  REGION 1..10: note = Description of Artificial Sequence: Synthetic peptide
NETPGIRYQY

SEQ ID NO: 14460 - protein, 11 aa, synthetic construct
  REGION 1..11: note = Description of Artificial Sequence: Synthetic peptide
GEIIGDIRKAY

SEQ ID NO: 14461 - protein, 9 aa, synthetic construct
  REGION 1..9: note = Description of Artificial Sequence: Synthetic peptide
DEIWGNMTW

SEQ ID NO: 14462 - protein, 9 aa, synthetic construct
  REGION 1..9: note = Description of Artificial Sequence: Synthetic peptide
AEVKNLTNI

SEQ ID NO: 14463 - protein, 11 aa, synthetic construct
  REGION 1..11: note = Description of Artificial Sequence: Synthetic peptide
NEQDLLALDKW

SEQ ID NO: 14464 - protein, 9 aa, synthetic construct
  REGION 1..9: note = Description of Artificial Sequence: Synthetic peptide
SESELVNQI

SEQ ID NO: 14465 - protein, 11 aa, synthetic construct
  REGION 1..11: note = Description of Artificial Sequence: Synthetic peptide
HEISERILTTY

SEQ ID NO: 14466 - protein, 9 aa, synthetic construct
  REGION 1..9: note = Description of Artificial Sequence: Synthetic peptide
QELLALDKW

SEQ ID NO: 14467 - protein, 10 aa, synthetic construct
  REGION 1..10: note = Description of Artificial Sequence: Synthetic peptide
EEQAPPLVSL

SEQ ID NO: 14468 - protein, 9 aa, synthetic construct
  REGION 1..9: note = Description of Artificial Sequence: Synthetic peptide
EELLKAVRY

SEQ ID NO: 14469 - protein, 10 aa, synthetic construct
  REGION 1..10: note = Description of Artificial Sequence: Synthetic peptide
KEIDNYTKTI

SEQ ID NO: 14470 - protein, 11 aa, synthetic construct
  REGION 1..11: note = Description of Artificial Sequence: Synthetic peptide
NEQELLALDKW

SEQ ID NO: 14471 - protein, 10 aa, synthetic construct
  REGION 1..10: note = Description of Artificial Sequence: Synthetic peptide
RETKIGKAGY

SEQ ID NO: 14472 - protein, 11 aa, synthetic construct
  REGION 1..11: note = Description of Artificial Sequence: Synthetic peptide
KEIDNYTKTIY

SEQ ID NO: 14473 - protein, 9 aa, synthetic construct
  REGION 1..9: note = Description of Artificial Sequence: Synthetic peptide
AETGQETAY

SEQ ID NO: 14474 - protein, 9 aa, synthetic construct
  REGION 1..9: note = Description of Artificial Sequence: Synthetic peptide
KENPEIVIY

SEQ ID NO: 14475 - protein, 9 aa, synthetic construct
  REGION 1..9: note = Description of Artificial Sequence: Synthetic peptide
NEIWENMTW

SEQ ID NO: 14476 - protein, 9 aa, synthetic construct
  REGION 1..9: note = Description of Artificial Sequence: Synthetic peptide
TEMEKEGKI

SEQ ID NO: 14477 - protein, 9 aa, synthetic construct
  REGION 1..9: note = Description of Artificial Sequence: Synthetic peptide
AEGDIVIRS

SEQ ID NO: 14478 - protein, 10 aa, synthetic construct
  REGION 1..10: note = Description of Artificial Sequence: Synthetic peptide
EEHEKYHSNW

SEQ ID NO: 14479 - protein, 11 aa, synthetic construct
  REGION 1..11: note = Description of Artificial Sequence: Synthetic peptide
KEISNYTGTIY

SEQ ID NO: 14480 - protein, 9 aa, synthetic construct
  REGION 1..9: note = Description of Artificial Sequence: Synthetic peptide
DEDREVLKW

SEQ ID NO: 14481 - protein, 10 aa, synthetic construct
  REGION 1..10: note = Description of Artificial Sequence: Synthetic peptide
TEPIIGAETF

SEQ ID NO: 14482 - protein, 10 aa, synthetic construct
  REGION 1..10: note = Description of Artificial Sequence: Synthetic peptide
EEHEKYHNNW

SEQ ID NO: 14483 - protein, 9 aa, synthetic construct
  REGION 1..9: note = Description of Artificial Sequence: Synthetic peptide
AETGQEAAY

SEQ ID NO: 14484 - protein, 10 aa, synthetic construct
  REGION 1..10: note = Description of Artificial Sequence: Synthetic peptide
AETGQEAAYF

SEQ ID NO: 14485 - protein, 11 aa, synthetic construct
  REGION 1..11: note = Description of Artificial Sequence: Synthetic peptide
MEDEDREVLKW

SEQ ID NO: 14486 - protein, 10 aa, synthetic construct
  REGION 1..10: note = Description of Artificial Sequence: Synthetic peptide
QEEIWGNMTW

SEQ ID NO: 14487 - protein, 10 aa, synthetic construct
  REGION 1..10: note = Description of Artificial Sequence: Synthetic peptide
AETGQETAYF

SEQ ID NO: 14488 - protein, 11 aa, synthetic construct
  REGION 1..11: note = Description of Artificial Sequence: Synthetic peptide
MEDEDREVLRW

SEQ ID NO: 14489 - protein, 10 aa, synthetic construct
  REGION 1..10: note = Description of Artificial Sequence: Synthetic peptide
KEMYPPLTSL

SEQ ID NO: 14490 - protein, 9 aa, synthetic construct
  REGION 1..9: note = Description of Artificial Sequence: Synthetic peptide
DEDREVLRW

SEQ ID NO: 14491 - protein, 8 aa, synthetic construct
  REGION 1..8: note = Description of Artificial Sequence: Synthetic peptide
NETPGIRY

SEQ ID NO: 14492 - protein, 10 aa, synthetic construct
  REGION 1..10: note = Description of Artificial Sequence: Synthetic peptide
REVHNVWATY

SEQ ID NO: 14493 - protein, 11 aa, synthetic construct
  REGION 1..11: note = Description of Artificial Sequence: Synthetic peptide
MEDDDKEVLKW

SEQ ID NO: 14494 - protein, 10 aa, synthetic construct
  REGION 1..10: note = Description of Artificial Sequence: Synthetic peptide
EEQAPPLVSL

SEQ ID NO: 14495 - protein, 11 aa, synthetic construct
  REGION 1..11: note = Description of Artificial Sequence: Synthetic peptide
AEQATQEVKGW

SEQ ID NO: 14496 - protein, 11 aa, synthetic construct
  REGION 1..11: note = Description of Artificial Sequence: Synthetic peptide
AEQASQEVKGW

SEQ ID NO: 14497 - protein, 9 aa, synthetic construct
  REGION 1..9: note = Description of Artificial Sequence: Synthetic peptide
AEVKNLTNI

SEQ ID NO: 14498 - protein, 9 aa, synthetic construct
  REGION 1..9: note = Description of Artificial Sequence: Synthetic peptide
SESAIRNAI

SEQ ID NO: 14499 - protein, 11 aa, synthetic construct
  REGION 1..11: note = Description of Artificial Sequence: Synthetic peptide
AEQATQEVKNW

SEQ ID NO: 14500 - protein, 11 aa, synthetic construct
  REGION 1..11: note = Description of Artificial Sequence: Synthetic peptide
AEVKNLTNITI

SEQ ID NO: 14501 - protein, 11 aa, synthetic construct
  REGION 1..11: note = Description of Artificial Sequence: Synthetic peptide
SEVNIVTDSQY

SEQ ID NO: 14502 - protein, 10 aa, synthetic construct
  REGION 1..10: note = Description of Artificial Sequence: Synthetic peptide
AETGQETAYF

SEQ ID NO: 14503 - protein, 11 aa, synthetic construct
  REGION 1..11: note = Description of Artificial Sequence: Synthetic peptide
EEQGEIKNCSF

SEQ ID NO: 14504 - protein, 10 aa, synthetic construct
  REGION 1..10: note = Description of Artificial Sequence: Synthetic peptide
TETTNQKTEL

SEQ ID NO: 14505 - protein, 9 aa, synthetic construct
  REGION 1..9: note = Description of Artificial Sequence: Synthetic peptide
SEEMKNCSF

SEQ ID NO: 14506 - protein, 9 aa, synthetic construct
  REGION 1..9: note = Description of Artificial Sequence: Synthetic peptide
SESEIVNQI

SEQ ID NO: 14507 - protein, 10 aa, synthetic construct
  REGION 1..10: note = Description of Artificial Sequence: Synthetic peptide
KEQVPPLISL

SEQ ID NO: 14508 - protein, 10 aa, synthetic construct
  REGION 1..10: note = Description of Artificial Sequence: Synthetic peptide
AETGQEAAYF

SEQ ID NO: 14509 - protein, 11 aa, synthetic construct
  REGION 1..11: note = Description of Artificial Sequence: Synthetic peptide
SEIVNQIIEQL

SEQ ID NO: 14510 - protein, 11 aa, synthetic construct
  REGION 1..11: note = Description of Artificial Sequence: Synthetic peptide
AEIQKQGHDQW

SEQ ID NO: 14511 - protein, 10 aa, synthetic construct
  REGION 1..10: note = Description of Artificial Sequence: Synthetic peptide
KEIDNYTDTI

SEQ ID NO: 14512 - protein, 10 aa, synthetic construct
  REGION 1..10: note = Description of Artificial Sequence: Synthetic peptide
TEPIIGAETF

SEQ ID NO: 14513 - protein, 11 aa, synthetic construct
  REGION 1..11: note = Description of Artificial Sequence: Synthetic peptide
AEVQKQGHDQW

SEQ ID NO: 14514 - protein, 11 aa, synthetic construct
  REGION 1..11: note = Description of Artificial Sequence: Synthetic peptide
AELELAENREI

SEQ ID NO: 14515 - protein, 10 aa, synthetic construct
  REGION 1..10: note = Description of Artificial Sequence: Synthetic peptide
KEIGNYTDTI

SEQ ID NO: 14516 - protein, 10 aa, synthetic construct
  REGION 1..10: note = Description of Artificial Sequence: Synthetic peptide
KEIDNYTKTI

SEQ ID NO: 14517 - protein, 11 aa, synthetic construct
  REGION 1..11: note = Description of Artificial Sequence: Synthetic peptide
AELEMAENREI

SEQ ID NO: 14518 - protein, 10 aa, synthetic construct
  REGION 1..10: note = Description of Artificial Sequence: Synthetic peptide
AEHLKTAVQM

SEQ ID NO: 14519 - protein, 10 aa, synthetic construct
  REGION 1..10: note = Description of Artificial Sequence: Synthetic peptide
KEMYPPLTSL

SEQ ID NO: 14520 - protein, 9 aa, synthetic construct
  REGION 1..9: note = Description of Artificial Sequence: Synthetic peptide
TEMEKEGKI

SEQ ID NO: 14521 - protein, 10 aa, synthetic construct
  REGION 1..10: note = Description of Artificial Sequence: Synthetic peptide
TEKGVGSPQI

SEQ ID NO: 14522 - protein, 9 aa, synthetic construct
  REGION 1..9: note = Description of Artificial Sequence: Synthetic peptide
SESELVNQI

SEQ ID NO: 14523 - protein, 10 aa, synthetic construct
  REGION 1..10: note = Description of Artificial Sequence: Synthetic peptide
SESAIRNAIL

SEQ ID NO: 14524 - protein, 10 aa, synthetic construct
  REGION 1..10: note = Description of Artificial Sequence: Synthetic peptide
QELKNSAISL

SEQ ID NO: 14525 - protein, 10 aa, synthetic construct
  REGION 1..10: note = Description of Artificial Sequence: Synthetic peptide
AEGTDRIIEI

SEQ ID NO: 14526 - protein, 10 aa, synthetic construct
  REGION 1..10: note = Description of Artificial Sequence: Synthetic peptide
TEPIAGAETF

SEQ ID NO: 14527 - protein, 9 aa, synthetic construct
  REGION 1..9: note = Description of Artificial Sequence: Synthetic peptide
SESAIRKAI

SEQ ID NO: 14528 - protein, 10 aa, synthetic construct
  REGION 1..10: note = Description of Artificial Sequence: Synthetic peptide
AERQGNVPSL

SEQ ID NO: 14529 - protein, 10 aa, synthetic construct
  REGION 1..10: note = Description of Artificial Sequence: Synthetic peptide
AERQGTGSSL

SEQ ID NO: 14530 - protein, 10 aa, synthetic construct
  REGION 1..10: note = Description of Artificial Sequence: Synthetic peptide
EEIKSLYNTV

SEQ ID NO: 14531 - protein, 10 aa, synthetic construct
  REGION 1..10: note = Description of Artificial Sequence: Synthetic peptide
AERQGTVSSL

SEQ ID NO: 14532 - protein, 10 aa, synthetic construct
  REGION 1..10: note = Description of Artificial Sequence: Synthetic peptide
SERGVGSPQI

SEQ ID NO: 14533 - protein, 11 aa, synthetic construct
  REGION 1..11: note = Description of Artificial Sequence: Synthetic peptide
AEGTDRIIEVL

SEQ ID NO: 14534 - protein, 11 aa, synthetic construct
  REGION 1..11: note = Description of Artificial Sequence: Synthetic peptide
GEEQAPPLVSL

SEQ ID NO: 14535 - protein, 9 aa, synthetic construct
  REGION 1..9: note = Description of Artificial Sequence: Synthetic peptide
SEGATPQDL

SEQ ID NO: 14536 - protein, 11 aa, synthetic construct
  REGION 1..11: note = Description of Artificial Sequence: Synthetic peptide
SELVNQIIEQL

SEQ ID NO: 14537 - protein, 10 aa, synthetic construct
  REGION 1..10: note = Description of Artificial Sequence: Synthetic peptide
TEPILGAETF

SEQ ID NO: 14538 - protein, 10 aa, synthetic construct
  REGION 1..10: note = Description of Artificial Sequence: Synthetic peptide
LEAQEEEVGF

SEQ ID NO: 14539 - protein, 10 aa, synthetic construct
  REGION 1..10: note = Description of Artificial Sequence: Synthetic peptide
EELKSLFNTI

SEQ ID NO: 14540 - protein, 10 aa, synthetic construct
  REGION 1..10: note = Description of Artificial Sequence: Synthetic peptide
SESEIVNQII

SEQ ID NO: 14541 - protein, 10 aa, synthetic construct
  REGION 1..10: note = Description of Artificial Sequence: Synthetic peptide
AEGTDRVIEI

SEQ ID NO: 14542 - protein, 9 aa, synthetic construct
  REGION 1..9: note = Description of Artificial Sequence: Synthetic peptide
QEKNEQDLL

SEQ ID NO: 14543 - protein, 9 aa, synthetic construct
  REGION 1..9: note = Description of Artificial Sequence: Synthetic peptide
GEQDKDRSI

SEQ ID NO: 14544 - protein, 9 aa, synthetic construct
  REGION 1..9: note = Description of Artificial Sequence: Synthetic peptide
EQAPPLVSL

SEQ ID NO: 14545 - protein, 11 aa, synthetic construct
  REGION 1..11: note = Description of Artificial Sequence: Synthetic peptide
AEGVGAVSQDL

SEQ ID NO: 14546 - protein, 8 aa, synthetic construct
  REGION 1..8: note = Description of Artificial Sequence: Synthetic peptide
VEITTHSF

SEQ ID NO: 14547 - protein, 9 aa, synthetic construct
  REGION 1..9: note = Description of Artificial Sequence: Synthetic peptide
GEQDKTRSV

SEQ ID NO: 14548 - protein, 10 aa, synthetic construct
  REGION 1..10: note = Description of Artificial Sequence: Synthetic peptide
GDVEITTHSF

SEQ ID NO: 14549 - protein, 11 aa, synthetic construct
  REGION 1..11: note = Description of Artificial Sequence: Synthetic peptide
REIKNSAIDLL

SEQ ID NO: 14550 - protein, 11 aa, synthetic construct
  REGION 1..11: note = Description of Artificial Sequence: Synthetic peptide
SENITDNAKTI

SEQ ID NO: 14551 - protein, 8 aa, synthetic construct
  REGION 1..8: note = Description of Artificial Sequence: Synthetic peptide
TELQAIQL

SEQ ID NO: 14552 - protein, 9 aa, synthetic construct
  REGION 1..9: note = Description of Artificial Sequence: Synthetic peptide
LEMAENREI

SEQ ID NO: 14553 - protein, 11 aa, synthetic construct
  REGION 1..11: note = Description of Artificial Sequence: Synthetic peptide
EELAALGEVGL

SEQ ID NO: 14554 - protein, 11 aa, synthetic construct
  REGION 1..11: note = Description of Artificial Sequence: Synthetic peptide
AEGVGKVSQDL

SEQ ID NO: 14555 - protein, 10 aa, synthetic construct
  REGION 1..10: note = Description of Artificial Sequence: Synthetic peptide
TERGVGSPQI

SEQ ID NO: 14556 - protein, 8 aa, synthetic construct
  REGION 1..8: note = Description of Artificial Sequence: Synthetic peptide
SDINGTSL

SEQ ID NO: 14557 - protein, 11 aa, synthetic construct
  REGION 1..11: note = Description of Artificial Sequence: Synthetic peptide
QELKNSAISLL

SEQ ID NO: 14558 - protein, 9 aa, synthetic construct
  REGION 1..9: note = Description of Artificial Sequence: Synthetic peptide
EDINLSGKW

SEQ ID NO: 14559 - protein, 9 aa, synthetic construct
  REGION 1..9: note = Description of Artificial Sequence: Synthetic peptide
QLTEVVQKI

SEQ ID NO: 14560 - protein, 10 aa, synthetic construct
  REGION 1..10: note = Description of Artificial Sequence: Synthetic peptide
GDLEVTTHSF

SEQ ID NO: 14561 - protein, 9 aa, synthetic construct
  REGION 1..9: note = Description of Artificial Sequence: Synthetic peptide
TSKGLGISY

SEQ ID NO: 14562 - protein, 9 aa, synthetic construct
  REGION 1..9: note = Description of Artificial Sequence: Synthetic peptide
VSKGVSQNY

SEQ ID NO: 14563 - protein, 9 aa, synthetic construct
  REGION 1..9: note = Description of Artificial Sequence: Synthetic peptide
QINNSNTSY

SEQ ID NO: 14564 - protein, 10 aa, synthetic construct
  REGION 1..10: note = Description of Artificial Sequence: Synthetic peptide
VQINNSNTSY

SEQ ID NO: 14565 - protein, 8 aa, synthetic construct
  REGION 1..8: note = Description of Artificial Sequence: Synthetic peptide
LIKIATEF

SEQ ID NO: 14566 - protein, 9 aa, synthetic construct
  REGION 1..9: note = Description of Artificial Sequence: Synthetic peptide
TLKNVSGEF

SEQ ID NO: 14567 - protein, 10 aa, synthetic construct
  REGION 1..10: note = Description of Artificial Sequence: Synthetic peptide
VPIEKNTTSY

SEQ ID NO: 14568 - protein, 9 aa, synthetic construct
  REGION 1..9: note = Description of Artificial Sequence: Synthetic peptide
ILRPIGGEM

SEQ ID NO: 14569 - protein, 10 aa, synthetic construct
  REGION 1..10: note = Description of Artificial Sequence: Synthetic peptide
ILKEPVHGVY

SEQ ID NO: 14570 - protein, 9 aa, synthetic construct
  REGION 1..9: note = Description of Artificial Sequence: Synthetic peptide
MSKATSTAI

SEQ ID NO: 14571 - protein, 9 aa, synthetic construct
  REGION 1..9: note = Description of Artificial Sequence: Synthetic peptide
FIPGNINNL

SEQ ID NO: 14572 - protein, 9 aa, synthetic construct
  REGION 1..9: note = Description of Artificial Sequence: Synthetic peptide
RAVGIGAVF

SEQ ID NO: 14573 - protein, 9 aa, synthetic construct
  REGION 1..9: note = Description of Artificial Sequence: Synthetic peptide
TLIKIATEF

SEQ ID NO: 14574 - protein, 10 aa, synthetic construct
  REGION 1..10: note = Description of Artificial Sequence: Synthetic peptide
IIKEPVHGVY

SEQ ID NO: 14575 - protein, 9 aa, synthetic construct
  REGION 1..9: note = Description of Artificial Sequence: Synthetic peptide
GQKAIGTVL

SEQ ID NO: 14576 - protein, 8 aa, synthetic construct
  REGION 1..8: note = Description of Artificial Sequence: Synthetic peptide
GQMVHQSL

SEQ ID NO: 14577 - protein, 8 aa, synthetic construct
  REGION 1..8: note = Description of Artificial Sequence: Synthetic peptide
GQMVHQAL

SEQ ID NO: 14578 - protein, 9 aa, synthetic construct
  REGION 1..9: note = Description of Artificial Sequence: Synthetic peptide
SQVTATSVL

SEQ ID NO: 14579 - protein, 10 aa, synthetic construct
  REGION 1..10: note = Description of Artificial Sequence: Synthetic peptide
HQDPVSKQPL

SEQ ID NO: 14580 - protein, 9 aa, synthetic construct
  REGION 1..9: note = Description of Artificial Sequence: Synthetic peptide
GLYPPLTSL

SEQ ID NO: 14581 - protein, 9 aa, synthetic construct
  REGION 1..9: note = Description of Artificial Sequence: Synthetic peptide
SLFGSDQSQ

SEQ ID NO: 14582 - protein, 9 aa, synthetic construct
  REGION 1..9: note = Description of Artificial Sequence: Synthetic peptide
RAVGMGAVL

SEQ ID NO: 14583 - protein, 9 aa, synthetic construct
  REGION 1..9: note = Description of Artificial Sequence: Synthetic peptide
KAIEAQQHL

SEQ ID NO: 14584 - protein, 10 aa, synthetic construct
  REGION 1..10: note = Description of Artificial Sequence: Synthetic peptide
HQDPVPKQPL

SEQ ID NO: 14585 - protein, 9 aa, synthetic construct
  REGION 1..9: note = Description of Artificial Sequence: Synthetic peptide
FIPGNINNL

SEQ ID NO: 14586 - protein, 8 aa, synthetic construct
  REGION 1..8: note = Description of Artificial Sequence: Synthetic peptide
HQAAMQML

SEQ ID NO: 14587 - protein, 9 aa, synthetic construct
  REGION 1..9: note = Description of Artificial Sequence: Synthetic peptide
HQAISPRTL

SEQ ID NO: 14588 - protein, 9 aa, synthetic construct
  REGION 1..9: note = Description of Artificial Sequence: Synthetic peptide
EQAPPLVSL

SEQ ID NO: 14589 - protein, 9 aa, synthetic construct
  REGION 1..9: note = Description of Artificial Sequence: Synthetic peptide
SQVTSTSIL

SEQ ID NO: 14590 - protein, 9 aa, synthetic construct
  REGION 1..9: note = Description of Artificial Sequence: Synthetic peptide
KALGPGATL

SEQ ID NO: 14591 - protein, 9 aa, synthetic construct
  REGION 1..9: note = Description of Artificial Sequence: Synthetic peptide
IKPVVSTQL

SEQ ID NO: 14592 - protein, 10 aa, synthetic construct
  REGION 1..10: note = Description of Artificial Sequence: Synthetic peptide
IQGQMVHQAL

SEQ ID NO: 14593 - protein, 8 aa, synthetic construct
  REGION 1..8: note = Description of Artificial Sequence: Synthetic peptide
AQYWGQEL

SEQ ID NO: 14594 - protein, 9 aa, synthetic construct
  REGION 1..9: note = Description of Artificial Sequence: Synthetic peptide
EQVPPLISL

SEQ ID NO: 14595 - protein, 9 aa, synthetic construct
  REGION 1..9: note = Description of Artificial Sequence: Synthetic peptide
RAVGIGAVL

SEQ ID NO: 14596 - protein, 8 aa, synthetic construct
  REGION 1..8: note = Description of Artificial Sequence: Synthetic peptide
GDVEITTH

SEQ ID NO: 14597 - protein, 9 aa, synthetic construct
  REGION 1..9: note = Description of Artificial Sequence: Synthetic peptide
AEVKNLTNI

SEQ ID NO: 14598 - protein, 9 aa, synthetic construct
  REGION 1..9: note = Description of Artificial Sequence: Synthetic peptide
GEFFYCNTV

SEQ ID NO: 14599 - protein, 10 aa, synthetic construct
  REGION 1..10: note = Description of Artificial Sequence: Synthetic peptide
KEIDNYTDTI

SEQ ID NO: 14600 - protein, 9 aa, synthetic construct
  REGION 1..9: note = Description of Artificial Sequence: Synthetic peptide
GEIQCTSNI

SEQ ID NO: 14601 - protein, 9 aa, synthetic construct
  REGION 1..9: note = Description of Artificial Sequence: Synthetic peptide
SESEIVNQI

SEQ ID NO: 14602 - protein, 9 aa, synthetic construct
  REGION 1..9: note = Description of Artificial Sequence: Synthetic peptide
SESELVNQI

SEQ ID NO: 14603 - protein, 9 aa, synthetic construct
  REGION 1..9: note = Description of Artificial Sequence: Synthetic peptide
SESAIRNAI

SEQ ID NO: 14604 - protein, 10 aa, synthetic construct
  REGION 1..10: note = Description of Artificial Sequence: Synthetic peptide
KEIDNYTKTI

SEQ ID NO: 14605 - protein, 10 aa, synthetic construct
  REGION 1..10: note = Description of Artificial Sequence: Synthetic peptide
KEIGNYTDTI

SEQ ID NO: 14606 - protein, 9 aa, synthetic construct
  REGION 1..9: note = Description of Artificial Sequence: Synthetic peptide
TEMEKEGKI

SEQ ID NO: 14607 - protein, 9 aa, synthetic construct
  REGION 1..9: note = Description of Artificial Sequence: Synthetic peptide
LENDSKLVI

SEQ ID NO: 14608 - protein, 11 aa, synthetic construct
  REGION 1..11: note = Description of Artificial Sequence: Synthetic peptide
AEVKNLTNITI

SEQ ID NO: 14609 - protein, 10 aa, synthetic construct
  REGION 1..10: note = Description of Artificial Sequence: Synthetic peptide
KEISNYTGTI

SEQ ID NO: 14610 - protein, 9 aa, synthetic construct
  REGION 1..9: note = Description of Artificial Sequence: Synthetic peptide
LEDDSKLVI

SEQ ID NO: 14611 - protein, 10 aa, synthetic construct
  REGION 1..10: note = Description of Artificial Sequence: Synthetic peptide
AENFGFGEGI

SEQ ID NO: 14612 - protein, 9 aa, synthetic construct
  REGION 1..9: note = Description of Artificial Sequence: Synthetic peptide
LEMAENREI

SEQ ID NO: 14613 - protein, 8 aa, synthetic construct
  REGION 1..8: note = Description of Artificial Sequence: Synthetic peptide
DEALLTAV

SEQ ID NO: 14614 - protein, 10 aa, synthetic construct
  REGION 1..10: note = Description of Artificial Sequence: Synthetic peptide
EEIKSLYNTV

SEQ ID NO: 14615 - protein, 9 aa, synthetic construct
  REGION 1..9: note = Description of Artificial Sequence: Synthetic peptide
KEFNGTGLC

SEQ ID NO: 14616 - protein, 10 aa, synthetic construct
  REGION 1..10: note = Description of Artificial Sequence: Synthetic peptide
TERGVGSPQI

SEQ ID NO: 14617 - protein, 10 aa, synthetic construct
  REGION 1..10: note = Description of Artificial Sequence: Synthetic peptide
TEKGVGSPQI

SEQ ID NO: 14618 - protein, 10 aa, synthetic construct
  REGION 1..10: note = Description of Artificial Sequence: Synthetic peptide
SERGVGSPQI

SEQ ID NO: 14619 - protein, 8 aa, synthetic construct
  REGION 1..8: note = Description of Artificial Sequence: Synthetic peptide
GEAIHGQV

SEQ ID NO: 14620 - protein, 10 aa, synthetic construct
  REGION 1..10: note = Description of Artificial Sequence: Synthetic peptide
EELKSLFNTI

SEQ ID NO: 14621 - protein, 8 aa, synthetic construct
  REGION 1..8: note = Description of Artificial Sequence: Synthetic peptide
SEIVNQII

SEQ ID NO: 14622 - protein, 8 aa, synthetic construct
  REGION 1..8: note = Description of Artificial Sequence: Synthetic peptide
YEKEAHNV

SEQ ID NO: 14623 - protein, 8 aa, synthetic construct
  REGION 1..8: note = Description of Artificial Sequence: Synthetic peptide
YEREVHNV

SEQ ID NO: 14624 - protein, 11 aa, synthetic construct
  REGION 1..11: note = Description of Artificial Sequence: Synthetic peptide
AELELAENREI

SEQ ID NO: 14625 - protein, 9 aa, synthetic construct
  REGION 1..9: note = Description of Artificial Sequence: Synthetic peptide
GEQDKTRSV

SEQ ID NO: 14626 - protein, 10 aa, synthetic construct
  REGION 1..10: note = Description of Artificial Sequence: Synthetic peptide
GEFFYCNTTI

SEQ ID NO: 14627 - protein, 9 aa, synthetic construct
  REGION 1..9: note = Description of Artificial Sequence: Synthetic peptide
IEICGQKAI

SEQ ID NO: 14628 - protein, 10 aa, synthetic construct
  REGION 1..10: note = Description of Artificial Sequence: Synthetic peptide
AEGFGFGEEI

SEQ ID NO: 14629 - protein, 10 aa, synthetic construct
  REGION 1..10: note = Description of Artificial Sequence: Synthetic peptide
EEQAPPLVSL

SEQ ID NO: 14630 - protein, 9 aa, synthetic construct
  REGION 1..9: note = Description of Artificial Sequence: Synthetic peptide
LEEDSKLVI

SEQ ID NO: 14631 - protein, 9 aa, synthetic construct
  REGION 1..9: note = Description of Artificial Sequence: Synthetic peptide
GEEQAPPLV

SEQ ID NO: 14632 - protein, 10 aa, synthetic construct
  REGION 1..10: note = Description of Artificial Sequence: Synthetic peptide
AESFGFGEEI

SEQ ID NO: 14633 - protein, 9 aa, synthetic construct
  REGION 1..9: note = Description of Artificial Sequence: Synthetic peptide
SESAIRKAI

SEQ ID NO: 14634 - protein, 10 aa, synthetic construct
  REGION 1..10: note = Description of Artificial Sequence: Synthetic peptide
GEIIGDIRKA

SEQ ID NO: 14635 - protein, 9 aa, synthetic construct
  REGION 1..9: note = Description of Artificial Sequence: Synthetic peptide
AEAMSQVTA

SEQ ID NO: 14636 - protein, 9 aa, synthetic construct
  REGION 1..9: note = Description of Artificial Sequence: Synthetic peptide
SEIHQNPVP

SEQ ID NO: 14637 - protein, 10 aa, synthetic construct
  REGION 1..10: note = Description of Artificial Sequence: Synthetic peptide
GEIIGDTRKA

SEQ ID NO: 14638 - protein, 10 aa, synthetic construct
  REGION 1..10: note = Description of Artificial Sequence: Synthetic peptide
GEIIGDIRKA

SEQ ID NO: 14639 - protein, 9 aa, synthetic construct
  REGION 1..9: note = Description of Artificial Sequence: Synthetic peptide
LETEPIAGA

SEQ ID NO: 14640 - protein, 9 aa, synthetic construct
  REGION 1..9: note = Description of Artificial Sequence: Synthetic peptide
LETEPIIGA

SEQ ID NO: 14641 - protein, 9 aa, synthetic construct
  REGION 1..9: note = Description of Artificial Sequence: Synthetic peptide
IEVRDTKEA

SEQ ID NO: 14642 - protein, 9 aa, synthetic construct
  REGION 1..9: note = Description of Artificial Sequence: Synthetic peptide
AETFYVDGA

SEQ ID NO: 14643 - protein, 9 aa, synthetic construct
  REGION 1..9: note = Description of Artificial Sequence: Synthetic peptide
FIPGNINNL

SEQ ID NO: 14644 - protein, 9 aa, synthetic construct
  REGION 1..9: note = Description of Artificial Sequence: Synthetic peptide
LETEPILGA

SEQ ID NO: 14645 - protein, 11 aa, synthetic construct
  REGION 1..11: note = Description of Artificial Sequence: Synthetic peptide
AEAMSKATGAA

SEQ ID NO: 14646 - protein, 9 aa, synthetic construct
  REGION 1..9: note = Description of Artificial Sequence: Synthetic peptide
FIPGDINNL

SEQ ID NO: 14647 - protein, 9 aa, synthetic construct
  REGION 1..9: note = Description of Artificial Sequence: Synthetic peptide
LIPGDINNL

SEQ ID NO: 14648 - protein, 9 aa, synthetic construct
  REGION 1..9: note = Description of Artificial Sequence: Synthetic peptide
TINGTLWNA

SEQ ID NO: 14649 - protein, 9 aa, synthetic construct
  REGION 1..9: note = Description of Artificial Sequence: Synthetic peptide
KEFNGTGLC

SEQ ID NO: 14650 - protein, 9 aa, synthetic construct
  REGION 1..9: note = Description of Artificial Sequence: Synthetic peptide
RVIEILQRA

SEQ ID NO: 14651 - protein, 9 aa, synthetic construct
  REGION 1..9: note = Description of Artificial Sequence: Synthetic peptide
ASITLTVQA

SEQ ID NO: 14652 - protein, 11 aa, synthetic construct
  REGION 1..11: note = Description of Artificial Sequence: Synthetic peptide
AEAMSKATSTA

SEQ ID NO: 14653 - protein, 9 aa, synthetic construct
  REGION 1..9: note = Description of Artificial Sequence: Synthetic peptide
TETLLVQNA

SEQ ID NO: 14654 - protein, 9 aa, synthetic construct
  REGION 1..9: note = Description of Artificial Sequence: Synthetic peptide
AVFLGFLGA

SEQ ID NO: 14655 - protein, 11 aa, synthetic construct
  REGION 1..11: note = Description of Artificial Sequence: Synthetic peptide
TQVDPDLADQL

SEQ ID NO: 14656 - protein, 10 aa, synthetic construct
  REGION 1..10: note = Description of Artificial Sequence: Synthetic peptide
AETFYVDGAA

SEQ ID NO: 14657 - protein, 9 aa, synthetic construct
  REGION 1..9: note = Description of Artificial Sequence: Synthetic peptide
ATLEEMMTA

SEQ ID NO: 14658 - protein, 8 aa, synthetic construct
  REGION 1..8: note = Description of Artificial Sequence: Synthetic peptide
TEVVQKVA

SEQ ID NO: 14659 - protein, 9 aa, synthetic construct
  REGION 1..9: note = Description of Artificial Sequence: Synthetic peptide
AMFLGFLGA

SEQ ID NO: 14660 - protein, 9 aa, synthetic construct
  REGION 1..9: note = Description of Artificial Sequence: Synthetic peptide
TIYRLIESA

SEQ ID NO: 14661 - protein, 9 aa, synthetic construct
  REGION 1..9: note = Description of Artificial Sequence: Synthetic peptide
GEFFYCNTV

SEQ ID NO: 14662 - protein, 9 aa, synthetic construct
  REGION 1..9: note = Description of Artificial Sequence: Synthetic peptide
ILAEAMSKA

SEQ ID NO: 14663 - protein, 9 aa, synthetic construct
  REGION 1..9: note = Description of Artificial Sequence: Synthetic peptide
VVAEGTDRV

SEQ ID NO: 14664 - protein, 9 aa, synthetic construct
  REGION 1..9: note = Description of Artificial Sequence: Synthetic peptide
TIYRLIEEA

SEQ ID NO: 14665 - protein, 10 aa, synthetic construct
  REGION 1..10: note = Description of Artificial Sequence: Synthetic peptide
AVFLGFLGAA

SEQ ID NO: 14666 - protein, 9 aa, synthetic construct
  REGION 1..9: note = Description of Artificial Sequence: Synthetic peptide
AAITLTAQA

SEQ ID NO: 14667 - protein, 9 aa, synthetic construct
  REGION 1..9: note = Description of Artificial Sequence: Synthetic peptide
VVIQDNNEI

SEQ ID NO: 14668 - protein, 9 aa, synthetic construct
  REGION 1..9: note = Description of Artificial Sequence: Synthetic peptide
ASMTLTVQA

SEQ ID NO: 14669 - protein, 9 aa, synthetic construct
  REGION 1..9: note = Description of Artificial Sequence: Synthetic peptide
RENDTITLP

SEQ ID NO: 14670 - protein, 9 aa, synthetic construct
  REGION 1..9: note = Description of Artificial Sequence: Synthetic peptide
RIIEILQRA

SEQ ID NO: 14671 - protein, 9 aa, synthetic construct
  REGION 1..9: note = Description of Artificial Sequence: Synthetic peptide
QLTEVVQKV

SEQ ID NO: 14672 - protein, 9 aa, synthetic construct
  REGION 1..9: note = Description of Artificial Sequence: Synthetic peptide
EEVGFPVRP

SEQ ID NO: 14673 - protein, 11 aa, synthetic construct
  REGION 1..11: note = Description of Artificial Sequence: Synthetic peptide
ALFNATNMTNA

SEQ ID NO: 14674 - protein, 9 aa, synthetic construct
  REGION 1..9: note = Description of Artificial Sequence: Synthetic peptide
VVAEGTDRI

SEQ ID NO: 14675 - protein, 11 aa, synthetic construct
  REGION 1..11: note = Description of Artificial Sequence: Synthetic peptide
AEWDRLHPVQA

SEQ ID NO: 14676 - protein, 8 aa, synthetic construct
  REGION 1..8: note = Description of Artificial Sequence: Synthetic peptide
TAFTIPSI

SEQ ID NO: 14677 - protein, 9 aa, synthetic construct
  REGION 1..9: note = Description of Artificial Sequence: Synthetic peptide
FPISPIETV

SEQ ID NO: 14678 - protein, 9 aa, synthetic construct
  REGION 1..9: note = Description of Artificial Sequence: Synthetic peptide
FPISSIETV

SEQ ID NO: 14679 - protein, 9 aa, synthetic construct
  REGION 1..9: note = Description of Artificial Sequence: Synthetic peptide
YAAPIAGQI

SEQ ID NO: 14680 - protein, 9 aa, synthetic construct
  REGION 1..9: note = Description of Artificial Sequence: Synthetic peptide
DAKAYEREI

SEQ ID NO: 14681 - protein, 9 aa, synthetic construct
  REGION 1..9: note = Description of Artificial Sequence: Synthetic peptide
LPNKSSWTV

SEQ ID NO: 14682 - protein, 9 aa, synthetic construct
  REGION 1..9: note = Description of Artificial Sequence: Synthetic peptide
DAKAYDPEV

SEQ ID NO: 14683 - protein, 10 aa, synthetic construct
  REGION 1..10: note = Description of Artificial Sequence: Synthetic peptide
IPYNPQSQGV

SEQ ID NO: 14684 - protein, 9 aa, synthetic construct
  REGION 1..9: note = Description of Artificial Sequence: Synthetic peptide
LPPLERLTI

SEQ ID NO: 14685 - protein, 9 aa, synthetic construct
  REGION 1..9: note = Description of Artificial Sequence: Synthetic peptide
TALVTPKKV

SEQ ID NO: 14686 - protein, 8 aa, synthetic construct
  REGION 1..8: note = Description of Artificial Sequence: Synthetic peptide
IPGNINNL

SEQ ID NO: 14687 - protein, 8 aa, synthetic construct
  REGION 1..8: note = Description of Artificial Sequence: Synthetic peptide
AAPIAGQI

SEQ ID NO: 14688 - protein, 9 aa, synthetic construct
  REGION 1..9: note = Description of Artificial Sequence: Synthetic peptide
DAKAYEREV

SEQ ID NO: 14689 - protein, 9 aa, synthetic construct
  REGION 1..9: note = Description of Artificial Sequence: Synthetic peptide
LPPVVAKEI

SEQ ID NO: 14690 - protein, 9 aa, synthetic construct
  REGION 1..9: note = Description of Artificial Sequence: Synthetic peptide
VAYIVAILI

SEQ ID NO: 14691 - protein, 11 aa, synthetic construct
  REGION 1..11: note = Description of Artificial Sequence: Synthetic peptide
IPLENDSKLVI

SEQ ID NO: 14692 - protein, 9 aa, synthetic construct
  REGION 1..9: note = Description of Artificial Sequence: Synthetic peptide
LPPIVAKEI

SEQ ID NO: 14693 - protein, 8 aa, synthetic construct
  REGION 1..8: note = Description of Artificial Sequence: Synthetic peptide
HAALGSGI

SEQ ID NO: 14694 - protein, 8 aa, synthetic construct
  REGION 1..8: note = Description of Artificial Sequence: Synthetic peptide
NPYNTPVF

SEQ ID NO: 14695 - protein, 9 aa, synthetic construct
  REGION 1..9: note = Description of Artificial Sequence: Synthetic peptide
VPSLDFPQI

SEQ ID NO: 14696 - protein, 9 aa, synthetic construct
  REGION 1..9: note = Description of Artificial Sequence: Synthetic peptide
NPPVPVGEI

SEQ ID NO: 14697 - protein, 9 aa, synthetic construct
  REGION 1..9: note = Description of Artificial Sequence: Synthetic peptide
DSSLALRHV

SEQ ID NO: 14698 - protein, 8 aa, synthetic construct
  REGION 1..8: note = Description of Artificial Sequence: Synthetic peptide
TAVRTIKI

SEQ ID NO: 14699 - protein, 8 aa, synthetic construct
  REGION 1..8: note = Description of Artificial Sequence: Synthetic peptide
APPIAGKI

SEQ ID NO: 14700 - protein, 9 aa, synthetic construct
  REGION 1..9: note = Description of Artificial Sequence: Synthetic peptide
YAPPIAGKI

SEQ ID NO: 14701 - protein, 10 aa, synthetic construct
  REGION 1..10: note = Description of Artificial Sequence: Synthetic peptide
VPYNPQSQGV

SEQ ID NO: 14702 - protein, 8 aa, synthetic construct
  REGION 1..8: note = Description of Artificial Sequence: Synthetic peptide
TAYFILKL

SEQ ID NO: 14703 - protein, 9 aa, synthetic construct
  REGION 1..9: note = Description of Artificial Sequence: Synthetic peptide
SPLSLQTLI

SEQ ID NO: 14704 - protein, 8 aa, synthetic construct
  REGION 1..8: note = Description of Artificial Sequence: Synthetic peptide
IATEGIVI

SEQ ID NO: 14705 - protein, 8 aa, synthetic construct
  REGION 1..8: note = Description of Artificial Sequence: Synthetic peptide
VAFIVALI

SEQ ID NO: 14706 - protein, 11 aa, synthetic construct
  REGION 1..11: note = Description of Artificial Sequence: Synthetic peptide
IPYNPQSQGVV

SEQ ID NO: 14707 - protein, 8 aa, synthetic construct
  REGION 1..8: note = Description of Artificial Sequence: Synthetic peptide
SPVSILDI

SEQ ID NO: 14708 - protein, 8 aa, synthetic construct
  REGION 1..8: note = Description of Artificial Sequence: Synthetic peptide
VPVEPEEV

SEQ ID NO: 14709 - protein, 9 aa, synthetic construct
  REGION 1..9: note = Description of Artificial Sequence: Synthetic peptide
FPISPIETV

SEQ ID NO: 14710 - protein, 9 aa, synthetic construct
  REGION 1..9: note = Description of Artificial Sequence: Synthetic peptide
FPISSIETV

SEQ ID NO: 14711 - protein, 11 aa, synthetic construct
  REGION 1..11: note = Description of Artificial Sequence: Synthetic peptide
MPSLLAVGISA

SEQ ID NO: 14712 - protein, 9 aa, synthetic construct
  REGION 1..9: note = Description of Artificial Sequence: Synthetic peptide
VPKQPLPQA

SEQ ID NO: 14713 - protein, 9 aa, synthetic construct
  REGION 1..9: note = Description of Artificial Sequence: Synthetic peptide
LPNKSSWTV

SEQ ID NO: 14714 - protein, 10 aa, synthetic construct
  REGION 1..10: note = Description of Artificial Sequence: Synthetic peptide
YPKPEGTRTA

SEQ ID NO: 14715 - protein, 9 aa, synthetic construct
  REGION 1..9: note = Description of Artificial Sequence: Synthetic peptide
NATLNRVAA

SEQ ID NO: 14716 - protein, 9 aa, synthetic construct
  REGION 1..9: note = Description of Artificial Sequence: Synthetic peptide
HVASGYIEA

SEQ ID NO: 14717 - protein, 9 aa, synthetic construct
  REGION 1..9: note = Description of Artificial Sequence: Synthetic peptide
IPAETGQEA

SEQ ID NO: 14718 - protein, 10 aa, synthetic construct
  REGION 1..10: note = Description of Artificial Sequence: Synthetic peptide
TPAAAPGVGA

SEQ ID NO: 14719 - protein, 10 aa, synthetic construct
  REGION 1..10: note = Description of Artificial Sequence: Synthetic peptide
EPLGVAPTKA

SEQ ID NO: 14720 - protein, 9 aa, synthetic construct
  REGION 1..9: note = Description of Artificial Sequence: Synthetic peptide
APIAGQIQC

SEQ ID NO: 14721 - protein, 10 aa, synthetic construct
  REGION 1..10: note = Description of Artificial Sequence: Synthetic peptide
YPKPEGTRQA

SEQ ID NO: 14722 - protein, 9 aa, synthetic construct
  REGION 1..9: note = Description of Artificial Sequence: Synthetic peptide
NPYNTPVFA

SEQ ID NO: 14723 - protein, 9 aa, synthetic construct
  REGION 1..9: note = Description of Artificial Sequence: Synthetic peptide
DPIPIYYCA

SEQ ID NO: 14724 - protein, 9 aa, synthetic construct
  REGION 1..9: note = Description of Artificial Sequence: Synthetic peptide
TIYRLIESA

SEQ ID NO: 14725 - protein, 10 aa, synthetic construct
  REGION 1..10: note = Description of Artificial Sequence: Synthetic peptide
QPLGIAPSRA

SEQ ID NO: 14726 - protein, 10 aa, synthetic construct
  REGION 1..10: note = Description of Artificial Sequence: Synthetic peptide
EPVGVAPTKA

SEQ ID NO: 14727 - protein, 8 aa, synthetic construct
  REGION 1..8: note = Description of Artificial Sequence: Synthetic peptide
TAFTIPSI

SEQ ID NO: 14728 - protein, 9 aa, synthetic construct
  REGION 1..9: note = Description of Artificial Sequence: Synthetic peptide
DPIPIHYCA

SEQ ID NO: 14729 - protein, 9 aa, synthetic construct
  REGION 1..9: note = Description of Artificial Sequence: Synthetic peptide
YPIVQNIQG

SEQ ID NO: 14730 - protein, 11 aa, synthetic construct
  REGION 1..11: note = Description of Artificial Sequence: Synthetic peptide
LPPVVAKEIVA

SEQ ID NO: 14731 - protein, 9 aa, synthetic construct
  REGION 1..9: note = Description of Artificial Sequence: Synthetic peptide
HPDKWTVQA

SEQ ID NO: 14732 - protein, 11 aa, synthetic construct
  REGION 1..11: note = Description of Artificial Sequence: Synthetic peptide
FPISPIETVPV

SEQ ID NO: 14733 - protein, 10 aa, synthetic construct
  REGION 1..10: note = Description of Artificial Sequence: Synthetic peptide
VPIEICGQKA

SEQ ID NO: 14734 - protein, 11 aa, synthetic construct
  REGION 1..11: note = Description of Artificial Sequence: Synthetic peptide
VPVDPEEIEKA

SEQ ID NO: 14735 - protein, 11 aa, synthetic construct
  REGION 1..11: note = Description of Artificial Sequence: Synthetic peptide
NPVPKQPLPQA

SEQ ID NO: 14736 - protein, 11 aa, synthetic construct
  REGION 1..11: note = Description of Artificial Sequence: Synthetic peptide
MLNTVGGHQAA

SEQ ID NO: 14737 - protein, 9 aa, synthetic construct
  REGION 1..9: note = Description of Artificial Sequence: Synthetic peptide
DVVPLTVEA

SEQ ID NO: 14738 - protein, 9 aa, synthetic construct
  REGION 1..9: note = Description of Artificial Sequence: Synthetic peptide
TIYRLIEEA

SEQ ID NO: 14739 - protein, 9 aa, synthetic construct
  REGION 1..9: note = Description of Artificial Sequence: Synthetic peptide
EATTTLFCA

SEQ ID NO: 14740 - protein, 10 aa, synthetic construct
  REGION 1..10: note = Description of Artificial Sequence: Synthetic peptide
IPIEICGQKA

SEQ ID NO: 14741 - protein, 9 aa, synthetic construct
  REGION 1..9: note = Description of Artificial Sequence: Synthetic peptide
HPVHAGPIP

SEQ ID NO: 14742 - protein, 11 aa, synthetic construct
  REGION 1..11: note = Description of Artificial Sequence: Synthetic peptide
FPISSIETVPV

SEQ ID NO: 14743 - protein, 9 aa, synthetic construct
  REGION 1..9: note = Description of Artificial Sequence: Synthetic peptide
AAITLTAQA

SEQ ID NO: 14744 - protein, 10 aa, synthetic construct
  REGION 1..10: note = Description of Artificial Sequence: Synthetic peptide
HPVHAGPIPP

SEQ ID NO: 14745 - protein, 9 aa, synthetic construct
  REGION 1..9: note = Description of Artificial Sequence: Synthetic peptide
YPILQNLQG

SEQ ID NO: 14746 - protein, 9 aa, synthetic construct
  REGION 1..9: note = Description of Artificial Sequence: Synthetic peptide
VPKQPLPQA

SEQ ID NO: 14747 - protein, 10 aa, synthetic construct
  REGION 1..10: note = Description of Artificial Sequence: Synthetic peptide
YPKPEGTRTA

SEQ ID NO: 14748 - protein, 9 aa, synthetic construct
  REGION 1..9: note = Description of Artificial Sequence: Synthetic peptide
APIAGQIQC

SEQ ID NO: 14749 - protein, 10 aa, synthetic construct
  REGION 1..10: note = Description of Artificial Sequence: Synthetic peptide
YPKPEGTRQA

SEQ ID NO: 14750 - protein, 9 aa, synthetic construct
  REGION 1..9: note = Description of Artificial Sequence: Synthetic peptide
VPKQPLSQT

SEQ ID NO: 14751 - protein, 9 aa, synthetic construct
  REGION 1..9: note = Description of Artificial Sequence: Synthetic peptide
FPISPIETV

SEQ ID NO: 14752 - protein, 9 aa, synthetic construct
  REGION 1..9: note = Description of Artificial Sequence: Synthetic peptide
KVKPPLPSV

SEQ ID NO: 14753 - protein, 9 aa, synthetic construct
  REGION 1..9: note = Description of Artificial Sequence: Synthetic peptide
RPEPTAPPA

SEQ ID NO: 14754 - protein, 9 aa, synthetic construct
  REGION 1..9: note = Description of Artificial Sequence: Synthetic peptide
FPISSIETV

SEQ ID NO: 14755 - protein, 9 aa, synthetic construct
  REGION 1..9: note = Description of Artificial Sequence: Synthetic peptide
IPAETGQEA

SEQ ID NO: 14756 - protein, 10 aa, synthetic construct
  REGION 1..10: note = Description of Artificial Sequence: Synthetic peptide
TPAAAPGVGA

SEQ ID NO: 14757 - protein, 9 aa, synthetic construct
  REGION 1..9: note = Description of Artificial Sequence: Synthetic peptide
APIAGQIQC

SEQ ID NO: 14758 - protein, 9 aa, synthetic construct
  REGION 1..9: note = Description of Artificial Sequence: Synthetic peptide
VPKQPLPQA

SEQ ID NO: 14759 - protein, 10 aa, synthetic construct
  REGION 1..10: note = Description of Artificial Sequence: Synthetic peptide
TPAAAPGVGA

SEQ ID NO: 14760 - protein, 9 aa, synthetic construct
  REGION 1..9: note = Description of Artificial Sequence: Synthetic peptide
FPISPIETV

SEQ ID NO: 14761 - protein, 9 aa, synthetic construct
  REGION 1..9: note = Description of Artificial Sequence: Synthetic peptide
FPISSIETV

SEQ ID NO: 14762 - protein, 11 aa, synthetic construct
  REGION 1..11: note = Description of Artificial Sequence: Synthetic peptide
MPSLLAVGISA

SEQ ID NO: 14763 - protein, 9 aa, synthetic construct
  REGION 1..9: note = Description of Artificial Sequence: Synthetic peptide
IPAETGQEA

SEQ ID NO: 14764 - protein, 10 aa, synthetic construct
  REGION 1..10: note = Description of Artificial Sequence: Synthetic peptide
IPAETGQEAA

SEQ ID NO: 14765 - protein, 10 aa, synthetic construct
  REGION 1..10: note = Description of Artificial Sequence: Synthetic peptide
VPIEICGQKA

SEQ ID NO: 14766 - protein, 10 aa, synthetic construct
  REGION 1..10: note = Description of Artificial Sequence: Synthetic peptide
QPLGIAPSRA

SEQ ID NO: 14767 - protein, 10 aa, synthetic construct
  REGION 1..10: note = Description of Artificial Sequence: Synthetic peptide
IPAETGQETA

SEQ ID NO: 14768 - protein, 9 aa, synthetic construct
  REGION 1..9: note = Description of Artificial Sequence: Synthetic peptide
NPYNTPVFA

SEQ ID NO: 14769 - protein, 9 aa, synthetic construct
  REGION 1..9: note = Description of Artificial Sequence: Synthetic peptide
RPEPTAPPA

SEQ ID NO: 14770 - protein, 10 aa, synthetic construct
  REGION 1..10: note = Description of Artificial Sequence: Synthetic peptide
EPVGVAPTKA

SEQ ID NO: 14771 - protein, 10 aa, synthetic construct
  REGION 1..10: note = Description of Artificial Sequence: Synthetic peptide
YPKPEGTRTA

SEQ ID NO: 14772 - protein, 10 aa, synthetic construct
  REGION 1..10: note = Description of Artificial Sequence: Synthetic peptide
IPIEICGQKA

SEQ ID NO: 14773 - protein, 10 aa, synthetic construct
  REGION 1..10: note = Description of Artificial Sequence: Synthetic peptide
EPLGVAPTKA

SEQ ID NO: 14774 - protein, 10 aa, synthetic construct
  REGION 1..10: note = Description of Artificial Sequence: Synthetic peptide
RPVVTIKVEG

SEQ ID NO: 14775 - protein, 10 aa, synthetic construct
  REGION 1..10: note = Description of Artificial Sequence: Synthetic peptide
YPKPEGTRQA

SEQ ID NO: 14776 - protein, 9 aa, synthetic construct
  REGION 1..9: note = Description of Artificial Sequence: Synthetic peptide
LPNKSSWTV

SEQ ID NO: 14777 - protein, 10 aa, synthetic construct
  REGION 1..10: note = Description of Artificial Sequence: Synthetic peptide
IPYNPQSQGV

SEQ ID NO: 14778 - protein, 9 aa, synthetic construct
  REGION 1..9: note = Description of Artificial Sequence: Synthetic peptide
APIAGQIQC

SEQ ID NO: 14779 - protein, 9 aa, synthetic construct
  REGION 1..9: note = Description of Artificial Sequence: Synthetic peptide
VPKQPLPQA

SEQ ID NO: 14780 - protein, 9 aa, synthetic construct
  REGION 1..9: note = Description of Artificial Sequence: Synthetic peptide
FPISPIETV

SEQ ID NO: 14781 - protein, 9 aa, synthetic construct
  REGION 1..9: note = Description of Artificial Sequence: Synthetic peptide
FPISSIETV

SEQ ID NO: 14782 - protein, 10 aa, synthetic construct
  REGION 1..10: note = Description of Artificial Sequence: Synthetic peptide
TPAAAPGVGA

SEQ ID NO: 14783 - protein, 9 aa, synthetic construct
  REGION 1..9: note = Description of Artificial Sequence: Synthetic peptide
IPAETGQEA

SEQ ID NO: 14784 - protein, 10 aa, synthetic construct
  REGION 1..10: note = Description of Artificial Sequence: Synthetic peptide
RPVVTIKVEG

SEQ ID NO: 14785 - protein, 10 aa, synthetic construct
  REGION 1..10: note = Description of Artificial Sequence: Synthetic peptide
VPIEICGQKA

SEQ ID NO: 14786 - protein, 10 aa, synthetic construct
  REGION 1..10: note = Description of Artificial Sequence: Synthetic peptide
QPLGIAPSRA

SEQ ID NO: 14787 - protein, 11 aa, synthetic construct
  REGION 1..11: note = Description of Artificial Sequence: Synthetic peptide
MPSLLAVGISA

SEQ ID NO: 14788 - protein, 10 aa, synthetic construct
  REGION 1..10: note = Description of Artificial Sequence: Synthetic peptide
IPYNPQSQGV

SEQ ID NO: 14789 - protein, 9 aa, synthetic construct
  REGION 1..9: note = Description of Artificial Sequence: Synthetic peptide
LPNKSSWTV

SEQ ID NO: 14790 - protein, 10 aa, synthetic construct
  REGION 1..10: note = Description of Artificial Sequence: Synthetic peptide
YPKPEGTRTA

SEQ ID NO: 14791 - protein, 10 aa, synthetic construct
  REGION 1..10: note = Description of Artificial Sequence: Synthetic peptide
APAGFAILKC

SEQ ID NO: 14792 - protein, 10 aa, synthetic construct
  REGION 1..10: note = Description of Artificial Sequence: Synthetic peptide
IPAETGQEAA

SEQ ID NO: 14793 - protein, 10 aa, synthetic construct
  REGION 1..10: note = Description of Artificial Sequence: Synthetic peptide
VPYNPQSQGV

SEQ ID NO: 14794 - protein, 10 aa, synthetic construct
  REGION 1..10: note = Description of Artificial Sequence: Synthetic peptide
RPVVTIKVGG

SEQ ID NO: 14795 - protein, 10 aa, synthetic construct
  REGION 1..10: note = Description of Artificial Sequence: Synthetic peptide
RPLVTIKVEG

SEQ ID NO: 14796 - protein, 10 aa, synthetic construct
  REGION 1..10: note = Description of Artificial Sequence: Synthetic peptide
IPAETGQETA

SEQ ID NO: 14797 - protein, 10 aa, synthetic construct
  REGION 1..10: note = Description of Artificial Sequence: Synthetic peptide
YPKPEGTRQA

SEQ ID NO: 14798 - protein, 9 aa, synthetic construct
  REGION 1..9: note = Description of Artificial Sequence: Synthetic peptide
RPEPTAPPA

SEQ ID NO: 14799 - protein, 10 aa, synthetic construct
  REGION 1..10: note = Description of Artificial Sequence: Synthetic peptide
SPEVIPMFSA

SEQ ID NO: 14800 - protein, 10 aa, synthetic construct
  REGION 1..10: note = Description of Artificial Sequence: Synthetic peptide
IPIEICGQKA

SEQ ID NO: 14801 - protein, 10 aa, synthetic construct
  REGION 1..10: note = Description of Artificial Sequence: Synthetic peptide
APAGYAILKC

SEQ ID NO: 14802 - protein, 9 aa, synthetic construct
  REGION 1..9: note = Description of Artificial Sequence: Synthetic peptide
NPYPKPEGT

SEQ ID NO: 14803 - protein, 11 aa, synthetic construct
  REGION 1..11: note = Description of Artificial Sequence: Synthetic peptide
KAYDPEVHNVW

SEQ ID NO: 14804 - protein, 9 aa, synthetic construct
  REGION 1..9: note = Description of Artificial Sequence: Synthetic peptide
LSFPQITLW

SEQ ID NO: 14805 - protein, 9 aa, synthetic construct
  REGION 1..9: note = Description of Artificial Sequence: Synthetic peptide
STLQEQITW

SEQ ID NO: 14806 - protein, 9 aa, synthetic construct
  REGION 1..9: note = Description of Artificial Sequence: Synthetic peptide
NTKTIIVQF

SEQ ID NO: 14807 - protein, 9 aa, synthetic construct
  REGION 1..9: note = Description of Artificial Sequence: Synthetic peptide
TTVPWNLSW

SEQ ID NO: 14808 - protein, 11 aa, synthetic construct
  REGION 1..11: note = Description of Artificial Sequence: Synthetic peptide
KAYEREIHNVW

SEQ ID NO: 14809 - protein, 11 aa, synthetic construct
  REGION 1..11: note = Description of Artificial Sequence: Synthetic peptide
RTVNKGLIRGW

SEQ ID NO: 14810 - protein, 11 aa, synthetic construct
  REGION 1..11: note = Description of Artificial Sequence: Synthetic peptide
KAYEREVHNVW

SEQ ID NO: 14811 - protein, 9 aa, synthetic construct
  REGION 1..9: note = Description of Artificial Sequence: Synthetic peptide
NTKNIIVQF

SEQ ID NO: 14812 - protein, 9 aa, synthetic construct
  REGION 1..9: note = Description of Artificial Sequence: Synthetic peptide
RIKQIVNVW

SEQ ID NO: 14813 - protein, 11 aa, synthetic construct
  REGION 1..11: note = Description of Artificial Sequence: Synthetic peptide
KAYEKEAHNVW

SEQ ID NO: 14814 - protein, 10 aa, synthetic construct
  REGION 1..10: note = Description of Artificial Sequence: Synthetic peptide
KVATEGIVIW

SEQ ID NO: 14815 - protein, 9 aa, synthetic construct
  REGION 1..9: note = Description of Artificial Sequence: Synthetic peptide
VSGFLPLTW

SEQ ID NO: 14816 - protein, 10 aa, synthetic construct
  REGION 1..10: note = Description of Artificial Sequence: Synthetic peptide
TVNKGLIRGW

SEQ ID NO: 14817 - protein, 11 aa, synthetic construct
  REGION 1..11: note = Description of Artificial Sequence: Synthetic peptide
KSIRIGPGQVF

SEQ ID NO: 14818 - protein, 9 aa, synthetic construct
  REGION 1..9: note = Description of Artificial Sequence: Synthetic peptide
RIKQIVNMW

SEQ ID NO: 14819 - protein, 10 aa, synthetic construct
  REGION 1..10: note = Description of Artificial Sequence: Synthetic peptide
TTNVPWNSSW

SEQ ID NO: 14820 - protein, 10 aa, synthetic construct
  REGION 1..10: note = Description of Artificial Sequence: Synthetic peptide
KIATEGIVIW

SEQ ID NO: 14821 - protein, 9 aa, synthetic construct
  REGION 1..9: note = Description of Artificial Sequence: Synthetic peptide
LAFQQREAW

SEQ ID NO: 14822 - protein, 9 aa, synthetic construct
  REGION 1..9: note = Description of Artificial Sequence: Synthetic peptide
VSKGVSQNY

SEQ ID NO: 14823 - protein, 10 aa, synthetic construct
  REGION 1..10: note = Description of Artificial Sequence: Synthetic peptide
TTNVRWNSSW

SEQ ID NO: 14824 - protein, 11 aa, synthetic construct
  REGION 1..11: note = Description of Artificial Sequence: Synthetic peptide
TTSTLQEQITW

SEQ ID NO: 14825 - protein, 10 aa, synthetic construct
  REGION 1..10: note = Description of Artificial Sequence: Synthetic peptide
KYLGNLAQYW

SEQ ID NO: 14826 - protein, 9 aa, synthetic construct
  REGION 1..9: note = Description of Artificial Sequence: Synthetic peptide
IQLPNKSSW

SEQ ID NO: 14827 - protein, 9 aa, synthetic construct
  REGION 1..9: note = Description of Artificial Sequence: Synthetic peptide
RIRQFVNMW

SEQ ID NO: 14828 - protein, 9 aa, synthetic construct
  REGION 1..9: note = Description of Artificial Sequence: Synthetic peptide
RVREMQRNW

SEQ ID NO: 14829 - protein, 9 aa, synthetic construct
  REGION 1..9: note = Description of Artificial Sequence: Synthetic peptide
STLQEQIAW

SEQ ID NO: 14830 - protein, 9 aa, synthetic construct
  REGION 1..9: note = Description of Artificial Sequence: Synthetic peptide
IQLPDKSSW

SEQ ID NO: 14831 - protein, 9 aa, synthetic construct
  REGION 1..9: note = Description of Artificial Sequence: Synthetic peptide
RIRQIVNMW

SEQ ID NO: 14832 - protein, 10 aa, synthetic construct
  REGION 1..10: note = Description of Artificial Sequence: Synthetic peptide
KIATESIVIW

SEQ ID NO: 14833 - protein, 11 aa, synthetic construct
  REGION 1..11: note = Description of Artificial Sequence: Synthetic peptide
RTVDRGVKGGW

SEQ ID NO: 14834 - protein, 9 aa, synthetic construct
  REGION 1..9: note = Description of Artificial Sequence: Synthetic peptide
LAFQQGEAW

SEQ ID NO: 14835 - protein, 10 aa, synthetic construct
  REGION 1..10: note = Description of Artificial Sequence: Synthetic peptide
KAIEAQQHLL

SEQ ID NO: 14836 - protein, 10 aa, synthetic construct
  REGION 1..10: note = Description of Artificial Sequence: Synthetic peptide
LVSGFLPLTW

SEQ ID NO: 14837 - protein, 10 aa, synthetic construct
  REGION 1..10: note = Description of Artificial Sequence: Synthetic peptide
VTVYYGVPVW

SEQ ID NO: 14838 - protein, 9 aa, synthetic construct
  REGION 1..9: note = Description of Artificial Sequence: Synthetic peptide
TSKGLGISY

SEQ ID NO: 14839 - protein, 9 aa, synthetic construct
  REGION 1..9: note = Description of Artificial Sequence: Synthetic peptide
LGHGVSIEW

SEQ ID NO: 14840 - protein, 11 aa, synthetic construct
  REGION 1..11: note = Description of Artificial Sequence: Synthetic peptide
SVLSGGKLDAW

SEQ ID NO: 14841 - protein, 10 aa, synthetic construct
  REGION 1..10: note = Description of Artificial Sequence: Synthetic peptide
KSLFGNDPSQ

SEQ ID NO: 14842 - protein, 11 aa, synthetic construct
  REGION 1..11: note = Description of Artificial Sequence: Synthetic peptide
VAFQQGEARKF

SEQ ID NO: 14843 - protein, 9 aa, synthetic construct
  REGION 1..9: note = Description of Artificial Sequence: Synthetic peptide
RSIRLVSGF

SEQ ID NO: 14844 - protein, 9 aa, synthetic construct
  REGION 1..9: note = Description of Artificial Sequence: Synthetic peptide
KTAVQMAVF

SEQ ID NO: 14845 - protein, 9 aa, synthetic construct
  REGION 1..9: note = Description of Artificial Sequence: Synthetic peptide
WSKSSIVGW

SEQ ID NO: 14846 - protein, 11 aa, synthetic construct
  REGION 1..11: note = Description of Artificial Sequence: Synthetic peptide
SSLSFPQITLW

SEQ ID NO: 14847 - protein, 9 aa, synthetic construct
  REGION 1..9: note = Description of Artificial Sequence: Synthetic peptide
RVRGMQRNW

SEQ ID NO: 14848 - protein, 9 aa, synthetic construct
  REGION 1..9: note = Description of Artificial Sequence: Synthetic peptide
RSVRLVSGF

SEQ ID NO: 14849 - protein, 9 aa, synthetic construct
  REGION 1..9: note = Description of Artificial Sequence: Synthetic peptide
FSVPLDKEF

SEQ ID NO: 14850 - protein, 9 aa, synthetic construct
  REGION 1..9: note = Description of Artificial Sequence: Synthetic peptide
STLQEQITW

SEQ ID NO: 14851 - protein, 9 aa, synthetic construct
  REGION 1..9: note = Description of Artificial Sequence: Synthetic peptide
KAIEAQQHL

SEQ ID NO: 14852 - protein, 11 aa, synthetic construct
  REGION 1..11: note = Description of Artificial Sequence: Synthetic peptide
KAYDPEVHNVW

SEQ ID NO: 14853 - protein, 9 aa, synthetic construct
  REGION 1..9: note = Description of Artificial Sequence: Synthetic peptide
LAFQQGEAW

SEQ ID NO: 14854 - protein, 9 aa, synthetic construct
  REGION 1..9: note = Description of Artificial Sequence: Synthetic peptide
ISERILTTY

SEQ ID NO: 14855 - protein, 9 aa, synthetic construct
  REGION 1..9: note = Description of Artificial Sequence: Synthetic peptide
KSTPLCVTL

SEQ ID NO: 14856 - protein, 9 aa, synthetic construct
  REGION 1..9: note = Description of Artificial Sequence: Synthetic peptide
IQLPDKSSW

SEQ ID NO: 14857 - protein, 9 aa, synthetic construct
  REGION 1..9: note = Description of Artificial Sequence: Synthetic peptide
RAVGIGAVF

SEQ ID NO: 14858 - protein, 9 aa, synthetic construct
  REGION 1..9: note = Description of Artificial Sequence: Synthetic peptide
IQLPNKSSW

SEQ ID NO: 14859 - protein, 10 aa, synthetic construct
  REGION 1..10: note = Description of Artificial Sequence: Synthetic peptide
KAIEAQQHLL

SEQ ID NO: 14860 - protein, 9 aa, synthetic construct
  REGION 1..9: note = Description of Artificial Sequence: Synthetic peptide
STLQEQIAW

SEQ ID NO: 14861 - protein, 10 aa, synthetic construct
  REGION 1..10: note = Description of Artificial Sequence: Synthetic peptide
AADKGVSQNY

SEQ ID NO: 14862 - protein, 8 aa, synthetic construct
  REGION 1..8: note = Description of Artificial Sequence: Synthetic peptide
VEITTHSF

SEQ ID NO: 14863 - protein, 9 aa, synthetic construct
  REGION 1..9: note = Description of Artificial Sequence: Synthetic peptide
VSKGVSQNY

SEQ ID NO: 14864 - protein, 9 aa, synthetic construct
  REGION 1..9: note = Description of Artificial Sequence: Synthetic peptide
AAVDLSHFL

SEQ ID NO: 14865 - protein, 9 aa, synthetic construct
  REGION 1..9: note = Description of Artificial Sequence: Synthetic peptide
KAAVDLSHF

SEQ ID NO: 14866 - protein, 9 aa, synthetic construct
  REGION 1..9: note = Description of Artificial Sequence: Synthetic peptide
GSEEIKSLY

SEQ ID NO: 14867 - protein, 11 aa, synthetic construct
  REGION 1..11: note = Description of Artificial Sequence: Synthetic peptide
KSIRIGPGQVF

SEQ ID NO: 14868 - protein, 9 aa, synthetic construct
  REGION 1..9: note = Description of Artificial Sequence: Synthetic peptide
KTAVQMAVF

SEQ ID NO: 14869 - protein, 9 aa, synthetic construct
  REGION 1..9: note = Description of Artificial Sequence: Synthetic peptide
KATSTAIMM

SEQ ID NO: 14870 - protein, 9 aa, synthetic construct
  REGION 1..9: note = Description of Artificial Sequence: Synthetic peptide
GSEELKSLY

SEQ ID NO: 14871 - protein, 8 aa, synthetic construct
  REGION 1..8: note = Description of Artificial Sequence: Synthetic peptide
GQGVSIEW

SEQ ID NO: 14872 - protein, 9 aa, synthetic construct
  REGION 1..9: note = Description of Artificial Sequence: Synthetic peptide
KALGPGATL

SEQ ID NO: 14873 - protein, 9 aa, synthetic construct
  REGION 1..9: note = Description of Artificial Sequence: Synthetic peptide
TINEEAAEW

SEQ ID NO: 14874 - protein, 9 aa, synthetic construct
  REGION 1..9: note = Description of Artificial Sequence: Synthetic peptide
FIPGNINNL

SEQ ID NO: 14875 - protein, 9 aa, synthetic construct
  REGION 1..9: note = Description of Artificial Sequence: Synthetic peptide
FIPGDINNL

SEQ ID NO: 14876 - protein, 9 aa, synthetic construct
  REGION 1..9: note = Description of Artificial Sequence: Synthetic peptide
YSPLSLQTL

SEQ ID NO: 14877 - protein, 8 aa, synthetic construct
  REGION 1..8: note = Description of Artificial Sequence: Synthetic peptide
NSPASREL

SEQ ID NO: 14878 - protein, 9 aa, synthetic construct
  REGION 1..9: note = Description of Artificial Sequence: Synthetic peptide
LIPGDINNL

SEQ ID NO: 14879 - protein, 9 aa, synthetic construct
  REGION 1..9: note = Description of Artificial Sequence: Synthetic peptide
FAPSSGGDL

SEQ ID NO: 14880 - protein, 9 aa, synthetic construct
  REGION 1..9: note = Description of Artificial Sequence: Synthetic peptide
YSPVSILDI

SEQ ID NO: 14881 - protein, 8 aa, synthetic construct
  REGION 1..8: note = Description of Artificial Sequence: Synthetic peptide
AAPIAGQI

SEQ ID NO: 14882 - protein, 9 aa, synthetic construct
  REGION 1..9: note = Description of Artificial Sequence: Synthetic peptide
FIPGNINNL

SEQ ID NO: 14883 - protein, 9 aa, synthetic construct
  REGION 1..9: note = Description of Artificial Sequence: Synthetic peptide
NAKTIIVQF

SEQ ID NO: 14884 - protein, 10 aa, synthetic construct
  REGION 1..10: note = Description of Artificial Sequence: Synthetic peptide
VSFDPIPIYY

SEQ ID NO: 14885 - protein, 9 aa, synthetic construct
  REGION 1..9: note = Description of Artificial Sequence: Synthetic peptide
TSKGLGISY

SEQ ID NO: 14886 - protein, 9 aa, synthetic construct
  REGION 1..9: note = Description of Artificial Sequence: Synthetic peptide
RAVGIGAVF

SEQ ID NO: 14887 - protein, 9 aa, synthetic construct
  REGION 1..9: note = Description of Artificial Sequence: Synthetic peptide
AAVDLSHFL

SEQ ID NO: 14888 - protein, 9 aa, synthetic construct
  REGION 1..9: note = Description of Artificial Sequence: Synthetic peptide
DSKLVIVTY

SEQ ID NO: 14889 - protein, 9 aa, synthetic construct
  REGION 1..9: note = Description of Artificial Sequence: Synthetic peptide
DSKLVIVSY

SEQ ID NO: 14890 - protein, 9 aa, synthetic construct
  REGION 1..9: note = Description of Artificial Sequence: Synthetic peptide
TSKGLGISY

SEQ ID NO: 14891 - protein, 9 aa, synthetic construct
  REGION 1..9: note = Description of Artificial Sequence: Synthetic peptide
ISERILTTY

SEQ ID NO: 14892 - protein, 10 aa, synthetic construct
  REGION 1..10: note = Description of Artificial Sequence: Synthetic peptide
AADKGVSQNY

SEQ ID NO: 14893 - protein, 9 aa, synthetic construct
  REGION 1..9: note = Description of Artificial Sequence: Synthetic peptide
DSKLVIITY

SEQ ID NO: 14894 - protein, 9 aa, synthetic construct
  REGION 1..9: note = Description of Artificial Sequence: Synthetic peptide
VSKGVSQNY

SEQ ID NO: 14895 - protein, 8 aa, synthetic construct
  REGION 1..8: note = Description of Artificial Sequence: Synthetic peptide
SERILTTY

SEQ ID NO: 14896 - protein, 9 aa, synthetic construct
  REGION 1..9: note = Description of Artificial Sequence: Synthetic peptide
GSEELKSLY

SEQ ID NO: 14897 - protein, 9 aa, synthetic construct
  REGION 1..9: note = Description of Artificial Sequence: Synthetic peptide
NAKTIIVQF

SEQ ID NO: 14898 - protein, 9 aa, synthetic construct
  REGION 1..9: note = Description of Artificial Sequence: Synthetic peptide
GSEEIKSLY

SEQ ID NO: 14899 - protein, 9 aa, synthetic construct
  REGION 1..9: note = Description of Artificial Sequence: Synthetic peptide
LADQLIHKY

SEQ ID NO: 14900 - protein, 8 aa, synthetic construct
  REGION 1..8: note = Description of Artificial Sequence: Synthetic peptide
VLDVGDAY

SEQ ID NO: 14901 - protein, 9 aa, synthetic construct
  REGION 1..9: note = Description of Artificial Sequence: Synthetic peptide
AAVDLSHFL

SEQ ID NO: 14902 - protein, 9 aa, synthetic construct
  REGION 1..9: note = Description of Artificial Sequence: Synthetic peptide
FIPGNINNL

SEQ ID NO: 14903 - protein, 9 aa, synthetic construct
  REGION 1..9: note = Description of Artificial Sequence: Synthetic peptide
VAIRVGGQL

SEQ ID NO: 14904 - protein, 9 aa, synthetic construct
  REGION 1..9: note = Description of Artificial Sequence: Synthetic peptide
ISVESHAAL

SEQ ID NO: 14905 - protein, 9 aa, synthetic construct
  REGION 1..9: note = Description of Artificial Sequence: Synthetic peptide
KAIEAQQHL

SEQ ID NO: 14906 - protein, 9 aa, synthetic construct
  REGION 1..9: note = Description of Artificial Sequence: Synthetic peptide
KALGPGATL

SEQ ID NO: 14907 - protein, 9 aa, synthetic construct
  REGION 1..9: note = Description of Artificial Sequence: Synthetic peptide
LAWDDFRSL

SEQ ID NO: 14908 - protein, 9 aa, synthetic construct
  REGION 1..9: note = Description of Artificial Sequence: Synthetic peptide
AALDLSHFL

SEQ ID NO: 14909 - protein, 9 aa, synthetic construct
  REGION 1..9: note = Description of Artificial Sequence: Synthetic peptide
LAWDDLRSL

SEQ ID NO: 14910 - protein, 9 aa, synthetic construct
  REGION 1..9: note = Description of Artificial Sequence: Synthetic peptide
RAVGIGAVL

SEQ ID NO: 14911 - protein, 9 aa, synthetic construct
  REGION 1..9: note = Description of Artificial Sequence: Synthetic peptide
YAAPIAGQI

SEQ ID NO: 14912 - protein, 9 aa, synthetic construct
  REGION 1..9: note = Description of Artificial Sequence: Synthetic peptide
AAVDLSHFL

SEQ ID NO: 14913 - protein, 9 aa, synthetic construct
  REGION 1..9: note = Description of Artificial Sequence: Synthetic peptide
FIPGNINNL

SEQ ID NO: 14914 - protein, 9 aa, synthetic construct
  REGION 1..9: note = Description of Artificial Sequence: Synthetic peptide
VAIRVGGQL

SEQ ID NO: 14915 - protein, 9 aa, synthetic construct
  REGION 1..9: note = Description of Artificial Sequence: Synthetic peptide
KAIEAQQHL

SEQ ID NO: 14916 - protein, 9 aa, synthetic construct
  REGION 1..9: note = Description of Artificial Sequence: Synthetic peptide
ISVESHAAL

SEQ ID NO: 14917 - protein, 9 aa, synthetic construct
  REGION 1..9: note = Description of Artificial Sequence: Synthetic peptide
KALGPGATL

SEQ ID NO: 14918 - protein, 9 aa, synthetic construct
  REGION 1..9: note = Description of Artificial Sequence: Synthetic peptide
AALDLSHFL

SEQ ID NO: 14919 - protein, 9 aa, synthetic construct
  REGION 1..9: note = Description of Artificial Sequence: Synthetic peptide
GAVDLSHFL

SEQ ID NO: 14920 - protein, 9 aa, synthetic construct
  REGION 1..9: note = Description of Artificial Sequence: Synthetic peptide
LAWDDFRSL

SEQ ID NO: 14921 - protein, 9 aa, synthetic construct
  REGION 1..9: note = Description of Artificial Sequence: Synthetic peptide
FIPGDINNL

SEQ ID NO: 14922 - protein, 9 aa, synthetic construct
  REGION 1..9: note = Description of Artificial Sequence: Synthetic peptide
YAAPIAGQI

SEQ ID NO: 14923 - protein, 9 aa, synthetic construct
  REGION 1..9: note = Description of Artificial Sequence: Synthetic peptide
ATDIQTKEL

SEQ ID NO: 14924 - protein, 9 aa, synthetic construct
  REGION 1..9: note = Description of Artificial Sequence: Synthetic peptide
YVDRFFKTL

SEQ ID NO: 14925 - protein, 9 aa, synthetic construct
  REGION 1..9: note = Description of Artificial Sequence: Synthetic peptide
RAVGIGAVL

SEQ ID NO: 14926 - protein, 9 aa, synthetic construct
  REGION 1..9: note = Description of Artificial Sequence: Synthetic peptide
LAWDDLRSL

SEQ ID NO: 14927 - protein, 9 aa, synthetic construct
  REGION 1..9: note = Description of Artificial Sequence: Synthetic peptide
SAEPVPLQL

SEQ ID NO: 14928 - protein, 9 aa, synthetic construct
  REGION 1..9: note = Description of Artificial Sequence: Synthetic peptide
QYDQVPIEI

SEQ ID NO: 14929 - protein, 9 aa, synthetic construct
  REGION 1..9: note = Description of Artificial Sequence: Synthetic peptide
FLDNVTENF

SEQ ID NO: 14930 - protein, 9 aa, synthetic construct
  REGION 1..9: note = Description of Artificial Sequence: Synthetic peptide
SFDPIPIYY

SEQ ID NO: 14931 - protein, 9 aa, synthetic construct
  REGION 1..9: note = Description of Artificial Sequence: Synthetic peptide
QYDQIPIEI

SEQ ID NO: 14932 - protein, 9 aa, synthetic construct
  REGION 1..9: note = Description of Artificial Sequence: Synthetic peptide
SFDPIPIHY

SEQ ID NO: 14933 - protein, 9 aa, synthetic construct
  REGION 1..9: note = Description of Artificial Sequence: Synthetic peptide
MSDINGTSL

SEQ ID NO: 14934 - protein, 9 aa, synthetic construct
  REGION 1..9: note = Description of Artificial Sequence: Synthetic peptide
FLDNVTENF

SEQ ID NO: 14935 - protein, 8 aa, synthetic construct
  REGION 1..8: note = Description of Artificial Sequence: Synthetic peptide
HTDNGSNF

SEQ ID NO: 14936 - protein, 9 aa, synthetic construct
  REGION 1..9: note = Description of Artificial Sequence: Synthetic peptide
SAEPVPLQL

SEQ ID NO: 14937 - protein, 8 aa, synthetic construct
  REGION 1..8: note = Description of Artificial Sequence: Synthetic peptide
AVDLSHFL

SEQ ID NO: 14938 - protein, 9 aa, synthetic construct
  REGION 1..9: note = Description of Artificial Sequence: Synthetic peptide
ITDNAKTII

SEQ ID NO: 14939 - protein, 9 aa, synthetic construct
  REGION 1..9: note = Description of Artificial Sequence: Synthetic peptide
IQDNNEIKV

SEQ ID NO: 14940 - protein, 9 aa, synthetic construct
  REGION 1..9: note = Description of Artificial Sequence: Synthetic peptide
LTDVVPLTV

SEQ ID NO: 14941 - protein, 9 aa, synthetic construct
  REGION 1..9: note = Description of Artificial Sequence: Synthetic peptide
ISDNTKTII

SEQ ID NO: 14942 - protein, 9 aa, synthetic construct
  REGION 1..9: note = Description of Artificial Sequence: Synthetic peptide
ISDNAKTII

SEQ ID NO: 14943 - protein, 9 aa, synthetic construct
  REGION 1..9: note = Description of Artificial Sequence: Synthetic peptide
VLDVGDAYF

SEQ ID NO: 14944 - protein, 9 aa, synthetic construct
  REGION 1..9: note = Description of Artificial Sequence: Synthetic peptide
AADKLWVTV

SEQ ID NO: 14945 - protein, 9 aa, synthetic construct
  REGION 1..9: note = Description of Artificial Sequence: Synthetic peptide
ARQNQIRQI

SEQ ID NO: 14946 - protein, 9 aa, synthetic construct
  REGION 1..9: note = Description of Artificial Sequence: Synthetic peptide
QRPVVTIKV

SEQ ID NO: 14947 - protein, 9 aa, synthetic construct
  REGION 1..9: note = Description of Artificial Sequence: Synthetic peptide
QRPLVTIKV

SEQ ID NO: 14948 - protein, 9 aa, synthetic construct
  REGION 1..9: note = Description of Artificial Sequence: Synthetic peptide
ARNPEIVVY

SEQ ID NO: 14949 - protein, 9 aa, synthetic construct
  REGION 1..9: note = Description of Artificial Sequence: Synthetic peptide
ARNPEIVVY

SEQ ID NO: 14950 - protein, 9 aa, synthetic construct
  REGION 1..9: note = Description of Artificial Sequence: Synthetic peptide
AAVDLSHFL

SEQ ID NO: 14951 - protein, 9 aa, synthetic construct
  REGION 1..9: note = Description of Artificial Sequence: Synthetic peptide
SAISLFDTI

SEQ ID NO: 14952 - protein, 9 aa, synthetic construct
  REGION 1..9: note = Description of Artificial Sequence: Synthetic peptide
QINNSNTSY

SEQ ID NO: 14953 - protein, 9 aa, synthetic construct
  REGION 1..9: note = Description of Artificial Sequence: Synthetic peptide
TLIKIATEF

SEQ ID NO: 14954 - protein, 9 aa, synthetic construct
  REGION 1..9: note = Description of Artificial Sequence: Synthetic peptide
TLKNVSGEF

SEQ ID NO: 14955 - protein, 9 aa, synthetic construct
  REGION 1..9: note = Description of Artificial Sequence: Synthetic peptide
TLRPGGGDM

SEQ ID NO: 14956 - protein, 9 aa, synthetic construct
  REGION 1..9: note = Description of Artificial Sequence: Synthetic peptide
ISVESHAAL

SEQ ID NO: 14957 - protein, 9 aa, synthetic construct
  REGION 1..9: note = Description of Artificial Sequence: Synthetic peptide
FIPGNINNL

SEQ ID NO: 14958 - protein, 10 aa, synthetic construct
  REGION 1..10: note = Description of Artificial Sequence: Synthetic peptide
VPIEKNTTSY

SEQ ID NO: 14959 - protein, 9 aa, synthetic construct
  REGION 1..9: note = Description of Artificial Sequence: Synthetic peptide
SAEPVPLQL

SEQ ID NO: 14960 - protein, 9 aa, synthetic construct
  REGION 1..9: note = Description of Artificial Sequence: Synthetic peptide
ILRPIGGEM

SEQ ID NO: 14961 - protein, 9 aa, synthetic construct
  REGION 1..9: note = Description of Artificial Sequence: Synthetic peptide
DQYNKTVGF

SEQ ID NO: 14962 - protein, 9 aa, synthetic construct
  REGION 1..9: note = Description of Artificial Sequence: Synthetic peptide
KAIEAQQHL

SEQ ID NO: 14963 - protein, 9 aa, synthetic construct
  REGION 1..9: note = Description of Artificial Sequence: Synthetic peptide
FLGAAGSTM

SEQ ID NO: 14964 - protein, 9 aa, synthetic construct
  REGION 1..9: note = Description of Artificial Sequence: Synthetic peptide
EQAPPLVSL

SEQ ID NO: 14965 - protein, 9 aa, synthetic construct
  REGION 1..9: note = Description of Artificial Sequence: Synthetic peptide
FIPGDINNL

SEQ ID NO: 14966 - protein, 9 aa, synthetic construct
  REGION 1..9: note = Description of Artificial Sequence: Synthetic peptide
MSDINGTSL

SEQ ID NO: 14967 - protein, 9 aa, synthetic construct
  REGION 1..9: note = Description of Artificial Sequence: Synthetic peptide
TVLDVGDAY

SEQ ID NO: 14968 - protein, 9 aa, synthetic construct
  REGION 1..9: note = Description of Artificial Sequence: Synthetic peptide
AALDLSHFL

SEQ ID NO: 14969 - protein, 9 aa, synthetic construct
  REGION 1..9: note = Description of Artificial Sequence: Synthetic peptide
DSKLVIVSY

SEQ ID NO: 14970 - protein, 9 aa, synthetic construct
  REGION 1..9: note = Description of Artificial Sequence: Synthetic peptide
GAVDLSHFL

SEQ ID NO: 14971 - protein, 9 aa, synthetic construct
  REGION 1..9: note = Description of Artificial Sequence: Synthetic peptide
IVTDSQYAL

SEQ ID NO: 14972 - protein, 10 aa, synthetic construct
  REGION 1..10: note = Description of Artificial Sequence: Synthetic peptide
EISERILTTY

SEQ ID NO: 14973 - protein, 9 aa, synthetic construct
  REGION 1..9: note = Description of Artificial Sequence: Synthetic peptide
NCTDVNITM

SEQ ID NO: 14974 - protein, 9 aa, synthetic construct
  REGION 1..9: note = Description of Artificial Sequence: Synthetic peptide
AADKLWVTV

SEQ ID NO: 14975 - protein, 9 aa, synthetic construct
  REGION 1..9: note = Description of Artificial Sequence: Synthetic peptide
MSDINGTSL

SEQ ID NO: 14976 - protein, 8 aa, synthetic construct
  REGION 1..8: note = Description of Artificial Sequence: Synthetic peptide
AVDLSHFL

SEQ ID NO: 14977 - protein, 9 aa, synthetic construct
  REGION 1..9: note = Description of Artificial Sequence: Synthetic peptide
ATDIQTKEL

SEQ ID NO: 14978 - protein, 9 aa, synthetic construct
  REGION 1..9: note = Description of Artificial Sequence: Synthetic peptide
FLDNVTENF

SEQ ID NO: 14979 - protein, 8 aa, synthetic construct
  REGION 1..8: note = Description of Artificial Sequence: Synthetic peptide
ALDLSHFL

SEQ ID NO: 14980 - protein, 9 aa, synthetic construct
  REGION 1..9: note = Description of Artificial Sequence: Synthetic peptide
SLDFPQITL

SEQ ID NO: 14981 - protein, 9 aa, synthetic construct
  REGION 1..9: note = Description of Artificial Sequence: Synthetic peptide
ISDNTKTII

SEQ ID NO: 14982 - protein, 9 aa, synthetic construct
  REGION 1..9: note = Description of Artificial Sequence: Synthetic peptide
TQDFWEVQL

SEQ ID NO: 14983 - protein, 9 aa, synthetic construct
  REGION 1..9: note = Description of Artificial Sequence: Synthetic peptide
HPDKSESEL

SEQ ID NO: 14984 - protein, 9 aa, synthetic construct
  REGION 1..9: note = Description of Artificial Sequence: Synthetic peptide
LTDVVPLTV

SEQ ID NO: 14985 - protein, 10 aa, synthetic construct
  REGION 1..10: note = Description of Artificial Sequence: Synthetic peptide
HQDPVPKQPL

SEQ ID NO: 14986 - protein, 9 aa, synthetic construct
  REGION 1..9: note = Description of Artificial Sequence: Synthetic peptide
ISDNAKTII

SEQ ID NO: 14987 - protein, 9 aa, synthetic construct
  REGION 1..9: note = Description of Artificial Sequence: Synthetic peptide
SAEPVPLQL

SEQ ID NO: 14988 - protein, 8 aa, synthetic construct
  REGION 1..8: note = Description of Artificial Sequence: Synthetic peptide
GQMVHQSL

SEQ ID NO: 14989 - protein, 8 aa, synthetic construct
  REGION 1..8: note = Description of Artificial Sequence: Synthetic peptide
GQMVHQAL

SEQ ID NO: 14990 - protein, 9 aa, synthetic construct
  REGION 1..9: note = Description of Artificial Sequence: Synthetic peptide
GQKAIGTVL

SEQ ID NO: 14991 - protein, 9 aa, synthetic construct
  REGION 1..9: note = Description of Artificial Sequence: Synthetic peptide
SQVTATSVL

SEQ ID NO: 14992 - protein, 9 aa, synthetic construct
  REGION 1..9: note = Description of Artificial Sequence: Synthetic peptide
RAVGMGAVL

SEQ ID NO: 14993 - protein, 9 aa, synthetic construct
  REGION 1..9: note = Description of Artificial Sequence: Synthetic peptide
SQVTSTSIL

SEQ ID NO: 14994 - protein, 9 aa, synthetic construct
  REGION 1..9: note = Description of Artificial Sequence: Synthetic peptide
EQAPPLVSL

SEQ ID NO: 14995 - protein, 8 aa, synthetic construct
  REGION 1..8: note = Description of Artificial Sequence: Synthetic peptide
RQGTVSSL

SEQ ID NO: 14996 - protein, 9 aa, synthetic construct
  REGION 1..9: note = Description of Artificial Sequence: Synthetic peptide
GLYPPLTSL

SEQ ID NO: 14997 - protein, 9 aa, synthetic construct
  REGION 1..9: note = Description of Artificial Sequence: Synthetic peptide
RAVGIGAVL

SEQ ID NO: 14998 - protein, 10 aa, synthetic construct
  REGION 1..10: note = Description of Artificial Sequence: Synthetic peptide
VSFDPIPIYY

SEQ ID NO: 14999 - protein, 9 aa, synthetic construct
  REGION 1..9: note = Description of Artificial Sequence: Synthetic peptide
NAKTIIVQF

SEQ ID NO: 15000 - protein, 10 aa, synthetic construct
  REGION 1..10: note = Description of Artificial Sequence: Synthetic peptide
VSFDPIPIHY

SEQ ID NO: 15001 - protein, 9 aa, synthetic construct
  REGION 1..9: note = Description of Artificial Sequence: Synthetic peptide
YAAPIAGQI

SEQ ID NO: 15002 - protein, 9 aa, synthetic construct
  REGION 1..9: note = Description of Artificial Sequence: Synthetic peptide
NTKNIIVQF

SEQ ID NO: 15003 - protein, 9 aa, synthetic construct
  REGION 1..9: note = Description of Artificial Sequence: Synthetic peptide
AAVDLSHFL

SEQ ID NO: 15004 - protein, 9 aa, synthetic construct
  REGION 1..9: note = Description of Artificial Sequence: Synthetic peptide
NTKTIIVQF

SEQ ID NO: 15005 - protein, 9 aa, synthetic construct
  REGION 1..9: note = Description of Artificial Sequence: Synthetic peptide
GAASITLTV

SEQ ID NO: 15006 - protein, 11 aa, synthetic construct
  REGION 1..11: note = Description of Artificial Sequence: Synthetic peptide
KAYDPEVHNVW

SEQ ID NO: 15007 - protein, 9 aa, synthetic construct
  REGION 1..9: note = Description of Artificial Sequence: Synthetic peptide
VAKEVQSHL

SEQ ID NO: 15008 - protein, 8 aa, synthetic construct
  REGION 1..8: note = Description of Artificial Sequence: Synthetic peptide
SFNVTTEL

SEQ ID NO: 15009 - protein, 9 aa, synthetic construct
  REGION 1..9: note = Description of Artificial Sequence: Synthetic peptide
IYQEPHRNL

SEQ ID NO: 15010 - protein, 9 aa, synthetic construct
  REGION 1..9: note = Description of Artificial Sequence: Synthetic peptide
IYQEPHKNL

SEQ ID NO: 15011 - protein, 9 aa, synthetic construct
  REGION 1..9: note = Description of Artificial Sequence: Synthetic peptide
VYIEYKKQL

SEQ ID NO: 15012 - protein, 9 aa, synthetic construct
  REGION 1..9: note = Description of Artificial Sequence: Synthetic peptide
IYQEPYKNL

SEQ ID NO: 15013 - protein, 9 aa, synthetic construct
  REGION 1..9: note = Description of Artificial Sequence: Synthetic peptide
VFYATGTVL

SEQ ID NO: 15014 - protein, 8 aa, synthetic construct
  REGION 1..8: note = Description of Artificial Sequence: Synthetic peptide
FYATGTVL

SEQ ID NO: 15015 - protein, 10 aa, synthetic construct
  REGION 1..10: note = Description of Artificial Sequence: Synthetic peptide
LFIPGNINNL

SEQ ID NO: 15016 - protein, 9 aa, synthetic construct
  REGION 1..9: note = Description of Artificial Sequence: Synthetic peptide
VYIEYKKIL

SEQ ID NO: 15017 - protein, 9 aa, synthetic construct
  REGION 1..9: note = Description of Artificial Sequence: Synthetic peptide
FIPGNINNL

SEQ ID NO: 15018 - protein, 8 aa, synthetic construct
  REGION 1..8: note = Description of Artificial Sequence: Synthetic peptide
FYYNTSGL

SEQ ID NO: 15019 - protein, 10 aa, synthetic construct
  REGION 1..10: note = Description of Artificial Sequence: Synthetic peptide
GFLGAAGSTM

SEQ ID NO: 15020 - protein, 8 aa, synthetic construct
  REGION 1..8: note = Description of Artificial Sequence: Synthetic peptide
YYNTSGLF

SEQ ID NO: 15021 - protein, 8 aa, synthetic construct
  REGION 1..8: note = Description of Artificial Sequence: Synthetic peptide
VYHTQGYF

SEQ ID NO: 15022 - protein, 9 aa, synthetic construct
  REGION 1..9: note = Description of Artificial Sequence: Synthetic peptide
TYQIYQEPY

SEQ ID NO: 15023 - protein, 9 aa, synthetic construct
  REGION 1..9: note = Description of Artificial Sequence: Synthetic peptide
FFYYNTSGL

SEQ ID NO: 15024 - protein, 9 aa, synthetic construct
  REGION 1..9: note = Description of Artificial Sequence: Synthetic peptide
KYHSNWRAM

SEQ ID NO: 15025 - protein, 8 aa, synthetic construct
  REGION 1..8: note = Description of Artificial Sequence: Synthetic peptide
NYPIVQNL

SEQ ID NO: 15026 - protein, 8 aa, synthetic construct
  REGION 1..8: note = Description of Artificial Sequence: Synthetic peptide
SFNVTTEL

SEQ ID NO: 15027 - protein, 9 aa, synthetic construct
  REGION 1..9: note = Description of Artificial Sequence: Synthetic peptide
IYQEPHRNL

SEQ ID NO: 15028 - protein, 8 aa, synthetic construct
  REGION 1..8: note = Description of Artificial Sequence: Synthetic peptide
FYATGTVL

SEQ ID NO: 15029 - protein, 9 aa, synthetic construct
  REGION 1..9: note = Description of Artificial Sequence: Synthetic peptide
KYLGNLAQY

SEQ ID NO: 15030 - protein, 9 aa, synthetic construct
  REGION 1..9: note = Description of Artificial Sequence: Synthetic peptide
IYQEPHKNL

SEQ ID NO: 15031 - protein, 9 aa, synthetic construct
  REGION 1..9: note = Description of Artificial Sequence: Synthetic peptide
IYQEPYKNL

SEQ ID NO: 15032 - protein, 10 aa, synthetic construct
  REGION 1..10: note = Description of Artificial Sequence: Synthetic peptide
GFLGAAGSTM

SEQ ID NO: 15033 - protein, 9 aa, synthetic construct
  REGION 1..9: note = Description of Artificial Sequence: Synthetic peptide
VFYATGTVL

SEQ ID NO: 15034 - protein, 8 aa, synthetic construct
  REGION 1..8: note = Description of Artificial Sequence: Synthetic peptide
LYNTVAVL

SEQ ID NO: 15035 - protein, 9 aa, synthetic construct
  REGION 1..9: note = Description of Artificial Sequence: Synthetic peptide
TYQIYQEPY

SEQ ID NO: 15036 - protein, 9 aa, synthetic construct
  REGION 1..9: note = Description of Artificial Sequence: Synthetic peptide
TSNITGLLL

SEQ ID NO: 15037 - protein, 9 aa, synthetic construct
  REGION 1..9: note = Description of Artificial Sequence: Synthetic peptide
LTDVVPLTV

SEQ ID NO: 15038 - protein, 9 aa, synthetic construct
  REGION 1..9: note = Description of Artificial Sequence: Synthetic peptide
ANSPASREL

SEQ ID NO: 15039 - protein, 9 aa, synthetic construct
  REGION 1..9: note = Description of Artificial Sequence: Synthetic peptide
NSNITGLLL

SEQ ID NO: 15040 - protein, 9 aa, synthetic construct
  REGION 1..9: note = Description of Artificial Sequence: Synthetic peptide
GAASITLTV

SEQ ID NO: 15041 - protein, 9 aa, synthetic construct
  REGION 1..9: note = Description of Artificial Sequence: Synthetic peptide
IATEFKDQY

SEQ ID NO: 15042 - protein, 9 aa, synthetic construct
  REGION 1..9: note = Description of Artificial Sequence: Synthetic peptide
VSTGIRKVL

SEQ ID NO: 15043 - protein, 9 aa, synthetic construct
  REGION 1..9: note = Description of Artificial Sequence: Synthetic peptide
AAVDLSHFL

SEQ ID NO: 15044 - protein, 9 aa, synthetic construct
  REGION 1..9: note = Description of Artificial Sequence: Synthetic peptide
KATSTAIMM

SEQ ID NO: 15045 - protein, 9 aa, synthetic construct
  REGION 1..9: note = Description of Artificial Sequence: Synthetic peptide
KATGAAIMM

SEQ ID NO: 15046 - protein, 9 aa, synthetic construct
  REGION 1..9: note = Description of Artificial Sequence: Synthetic peptide
VSSGIRKVL

SEQ ID NO: 15047 - protein, 9 aa, synthetic construct
  REGION 1..9: note = Description of Artificial Sequence: Synthetic peptide
VARERHPEF

SEQ ID NO: 15048 - protein, 9 aa, synthetic construct
  REGION 1..9: note = Description of Artificial Sequence: Synthetic peptide
IARERHPEY

SEQ ID NO: 15049 - protein, 9 aa, synthetic construct
  REGION 1..9: note = Description of Artificial Sequence: Synthetic peptide
AAVDLSHFL

SEQ ID NO: 15050 - protein, 9 aa, synthetic construct
  REGION 1..9: note = Description of Artificial Sequence: Synthetic peptide
KAIEAQQHL

SEQ ID NO: 15051 - protein, 9 aa, synthetic construct
  REGION 1..9: note = Description of Artificial Sequence: Synthetic peptide
ANSPASREL

SEQ ID NO: 15052 - protein, 10 aa, synthetic construct
  REGION 1..10: note = Description of Artificial Sequence: Synthetic peptide
IATDIQTKEL

SEQ ID NO: 15053 - protein, 9 aa, synthetic construct
  REGION 1..9: note = Description of Artificial Sequence: Synthetic peptide
VAKEVQSHL

SEQ ID NO: 15054 - protein, 9 aa, synthetic construct
  REGION 1..9: note = Description of Artificial Sequence: Synthetic peptide
IATEFKDQY

SEQ ID NO: 15055 - protein, 8 aa, synthetic construct
  REGION 1..8: note = Description of Artificial Sequence: Synthetic peptide
VAAEVKNL

SEQ ID NO: 15056 - protein, 9 aa, synthetic construct
  REGION 1..9: note = Description of Artificial Sequence: Synthetic peptide
AAAPGVGAV

SEQ ID NO: 15057 - protein, 9 aa, synthetic construct
  REGION 1..9: note = Description of Artificial Sequence: Synthetic peptide
KATSTAIMM

SEQ ID NO: 15058 - protein, 9 aa, synthetic construct
  REGION 1..9: note = Description of Artificial Sequence: Synthetic peptide
VSTGIRKVL

SEQ ID NO: 15059 - protein, 9 aa, synthetic construct
  REGION 1..9: note = Description of Artificial Sequence: Synthetic peptide
GAASITLTV

SEQ ID NO: 15060 - protein, 11 aa, synthetic construct
  REGION 1..11: note = Description of Artificial Sequence: Synthetic peptide
AEQASQEVKGW

SEQ ID NO: 15061 - protein, 9 aa, synthetic construct
  REGION 1..9: note = Description of Artificial Sequence: Synthetic peptide
ARNPEIVVY

SEQ ID NO: 15062 - protein, 9 aa, synthetic construct
  REGION 1..9: note = Description of Artificial Sequence: Synthetic peptide
YAAPIAGQI

SEQ ID NO: 15063 - protein, 9 aa, synthetic construct
  REGION 1..9: note = Description of Artificial Sequence: Synthetic peptide
IRIGPGQTF

SEQ ID NO: 15064 - protein, 9 aa, synthetic construct
  REGION 1..9: note = Description of Artificial Sequence: Synthetic peptide
AAVDLSHFL

SEQ ID NO: 15065 - protein, 11 aa, synthetic construct
  REGION 1..11: note = Description of Artificial Sequence: Synthetic peptide
SEVNIVTDSQY

SEQ ID NO: 15066 - protein, 9 aa, synthetic construct
  REGION 1..9: note = Description of Artificial Sequence: Synthetic peptide
IRIGPGQVF

SEQ ID NO: 15067 - protein, 11 aa, synthetic construct
  REGION 1..11: note = Description of Artificial Sequence: Synthetic peptide
AEQATQEVKGW

SEQ ID NO: 15068 - protein, 9 aa, synthetic construct
  REGION 1..9: note = Description of Artificial Sequence: Synthetic peptide
SESAIRNAI

SEQ ID NO: 15069 - protein, 9 aa, synthetic construct
  REGION 1..9: note = Description of Artificial Sequence: Synthetic peptide
GAAAITLTA

SEQ ID NO: 15070 - protein, 9 aa, synthetic construct
  REGION 1..9: note = Description of Artificial Sequence: Synthetic peptide
FIPGNINNL

SEQ ID NO: 15071 - protein, 9 aa, synthetic construct
  REGION 1..9: note = Description of Artificial Sequence: Synthetic peptide
AAVDLSHFL

SEQ ID NO: 15072 - protein, 9 aa, synthetic construct
  REGION 1..9: note = Description of Artificial Sequence: Synthetic peptide
FIPGDINNL

SEQ ID NO: 15073 - protein, 9 aa, synthetic construct
  REGION 1..9: note = Description of Artificial Sequence: Synthetic peptide
SAEPVPLQL

SEQ ID NO: 15074 - protein, 9 aa, synthetic construct
  REGION 1..9: note = Description of Artificial Sequence: Synthetic peptide
AALDLSHFL

SEQ ID NO: 15075 - protein, 9 aa, synthetic construct
  REGION 1..9: note = Description of Artificial Sequence: Synthetic peptide
GAVDLSHFL

SEQ ID NO: 15076 - protein, 8 aa, synthetic construct
  REGION 1..8: note = Description of Artificial Sequence: Synthetic peptide
FALNPSLL

SEQ ID NO: 15077 - protein, 10 aa, synthetic construct
  REGION 1..10: note = Description of Artificial Sequence: Synthetic peptide
RAVGIGAVFL

SEQ ID NO: 15078 - protein, 9 aa, synthetic construct
  REGION 1..9: note = Description of Artificial Sequence: Synthetic peptide
KATGAAIMM

SEQ ID NO: 15079 - protein, 9 aa, synthetic construct
  REGION 1..9: note = Description of Artificial Sequence: Synthetic peptide
YAAPIAGQI

SEQ ID NO: 15080 - protein, 11 aa, synthetic construct
  REGION 1..11: note = Description of Artificial Sequence: Synthetic peptide
ETEPIIGAETY

SEQ ID NO: 15081 - protein, 11 aa, synthetic construct
  REGION 1..11: note = Description of Artificial Sequence: Synthetic peptide
ETEPIPGAETY

SEQ ID NO: 15082 - protein, 11 aa, synthetic construct
  REGION 1..11: note = Description of Artificial Sequence: Synthetic peptide
ETEPIPGVETY

SEQ ID NO: 15083 - protein, 8 aa, synthetic construct
  REGION 1..8: note = Description of Artificial Sequence: Synthetic peptide
VLDVGDAY

SEQ ID NO: 15084 - protein, 9 aa, synthetic construct
  REGION 1..9: note = Description of Artificial Sequence: Synthetic peptide
SFDPIPIHY

SEQ ID NO: 15085 - protein, 10 aa, synthetic construct
  REGION 1..10: note = Description of Artificial Sequence: Synthetic peptide
VTVLDVGDAY

SEQ ID NO: 15086 - protein, 9 aa, synthetic construct
  REGION 1..9: note = Description of Artificial Sequence: Synthetic peptide
STRNITEEY

SEQ ID NO: 15087 - protein, 9 aa, synthetic construct
  REGION 1..9: note = Description of Artificial Sequence: Synthetic peptide
QLTEVVQKI

SEQ ID NO: 15088 - protein, 9 aa, synthetic construct
  REGION 1..9: note = Description of Artificial Sequence: Synthetic peptide
VLAEAMSQA

SEQ ID NO: 15089 - protein, 10 aa, synthetic construct
  REGION 1..10: note = Description of Artificial Sequence: Synthetic peptide
AMDEGNSSQV

SEQ ID NO: 15090 - protein, 9 aa, synthetic construct
  REGION 1..9: note = Description of Artificial Sequence: Synthetic peptide
IMAQLQPAL

SEQ ID NO: 15091 - protein, 9 aa, synthetic construct
  REGION 1..9: note = Description of Artificial Sequence: Synthetic peptide
ILKEPVHGV

SEQ ID NO: 15092 - protein, 9 aa, synthetic construct
  REGION 1..9: note = Description of Artificial Sequence: Synthetic peptide
SLFNTVATL

SEQ ID NO: 15093 - protein, 9 aa, synthetic construct
  REGION 1..9: note = Description of Artificial Sequence: Synthetic peptide
SLAEGEIMI

SEQ ID NO: 15094 - protein, 10 aa, synthetic construct
  REGION 1..10: note = Description of Artificial Sequence: Synthetic peptide
ALNPGLLETA

SEQ ID NO: 15095 - protein, 9 aa, synthetic construct
  REGION 1..9: note = Description of Artificial Sequence: Synthetic peptide
GLCKNVSTV

SEQ ID NO: 15096 - protein, 9 aa, synthetic construct
  REGION 1..9: note = Description of Artificial Sequence: Synthetic peptide
ALQDSQSEV

SEQ ID NO: 15097 - protein, 10 aa, synthetic construct
  REGION 1..10: note = Description of Artificial Sequence: Synthetic peptide
TLWQRPLVTV

SEQ ID NO: 15098 - protein, 9 aa, synthetic construct
  REGION 1..9: note = Description of Artificial Sequence: Synthetic peptide
AVLSIVNRV

SEQ ID NO: 15099 - protein, 9 aa, synthetic construct
  REGION 1..9: note = Description of Artificial Sequence: Synthetic peptide
ALTEICTEM

SEQ ID NO: 15100 - protein, 9 aa, synthetic construct
  REGION 1..9: note = Description of Artificial Sequence: Synthetic peptide
LLDTIAIAV

SEQ ID NO: 15101 - protein, 9 aa, synthetic construct
  REGION 1..9: note = Description of Artificial Sequence: Synthetic peptide
SLAEEDIRI

SEQ ID NO: 15102 - protein, 9 aa, synthetic construct
  REGION 1..9: note = Description of Artificial Sequence: Synthetic peptide
NLIDTVAIA

SEQ ID NO: 15103 - protein, 9 aa, synthetic construct
  REGION 1..9: note = Description of Artificial Sequence: Synthetic peptide
ALTDIVPLT

SEQ ID NO: 15104 - protein, 9 aa, synthetic construct
  REGION 1..9: note = Description of Artificial Sequence: Synthetic peptide
AVLSIINRV

SEQ ID NO: 15105 - protein, 9 aa, synthetic construct
  REGION 1..9: note = Description of Artificial Sequence: Synthetic peptide
IQDNNEIKV

SEQ ID NO: 15106 - protein, 9 aa, synthetic construct
  REGION 1..9: note = Description of Artificial Sequence: Synthetic peptide
KLVPVDPAV

SEQ ID NO: 15107 - protein, 9 aa, synthetic construct
  REGION 1..9: note = Description of Artificial Sequence: Synthetic peptide
IVTDSQYAL

SEQ ID NO: 15108 - protein, 9 aa, synthetic construct
  REGION 1..9: note = Description of Artificial Sequence: Synthetic peptide
ILKEPVHGV

SEQ ID NO: 15109 - protein, 9 aa, synthetic construct
  REGION 1..9: note = Description of Artificial Sequence: Synthetic peptide
VLAEAMSQA

SEQ ID NO: 15110 - protein, 9 aa, synthetic construct
  REGION 1..9: note = Description of Artificial Sequence: Synthetic peptide
SLFNTVATL

SEQ ID NO: 15111 - protein, 9 aa, synthetic construct
  REGION 1..9: note = Description of Artificial Sequence: Synthetic peptide
QLTEVVQKI

SEQ ID NO: 15112 - protein, 9 aa, synthetic construct
  REGION 1..9: note = Description of Artificial Sequence: Synthetic peptide
TLNAWVKVV

SEQ ID NO: 15113 - protein, 9 aa, synthetic construct
  REGION 1..9: note = Description of Artificial Sequence: Synthetic peptide
SISERILSA

SEQ ID NO: 15114 - protein, 10 aa, synthetic construct
  REGION 1..10: note = Description of Artificial Sequence: Synthetic peptide
TLWQRPLVTV

SEQ ID NO: 15115 - protein, 10 aa, synthetic construct
  REGION 1..10: note = Description of Artificial Sequence: Synthetic peptide
ALNPGLLETA

SEQ ID NO: 15116 - protein, 10 aa, synthetic construct
  REGION 1..10: note = Description of Artificial Sequence: Synthetic peptide
YLKDQQLLGI

SEQ ID NO: 15117 - protein, 9 aa, synthetic construct
  REGION 1..9: note = Description of Artificial Sequence: Synthetic peptide
AIIGDIRQA

SEQ ID NO: 15118 - protein, 10 aa, synthetic construct
  REGION 1..10: note = Description of Artificial Sequence: Synthetic peptide
YLRDQQLLGI

SEQ ID NO: 15119 - protein, 9 aa, synthetic construct
  REGION 1..9: note = Description of Artificial Sequence: Synthetic peptide
VVKIKPLGV

SEQ ID NO: 15120 - protein, 9 aa, synthetic construct
  REGION 1..9: note = Description of Artificial Sequence: Synthetic peptide
GLCKNVSTV

SEQ ID NO: 15121 - protein, 9 aa, synthetic construct
  REGION 1..9: note = Description of Artificial Sequence: Synthetic peptide
ALKALVTPT

SEQ ID NO: 15122 - protein, 9 aa, synthetic construct
  REGION 1..9: note = Description of Artificial Sequence: Synthetic peptide
MLKNVTAQL

SEQ ID NO: 15123 - protein, 9 aa, synthetic construct
  REGION 1..9: note = Description of Artificial Sequence: Synthetic peptide
ALFYKLDVV

SEQ ID NO: 15124 - protein, 9 aa, synthetic construct
  REGION 1..9: note = Description of Artificial Sequence: Synthetic peptide
ALIRILQQL

SEQ ID NO: 15125 - protein, 9 aa, synthetic construct
  REGION 1..9: note = Description of Artificial Sequence: Synthetic peptide
ASITLTVQV

SEQ ID NO: 15126 - protein, 10 aa, synthetic construct
  REGION 1..10: note = Description of Artificial Sequence: Synthetic peptide
GLFNNNISNI

SEQ ID NO: 15127 - protein, 9 aa, synthetic construct
  REGION 1..9: note = Description of Artificial Sequence: Synthetic peptide
QLQARVLAV

SEQ ID NO: 15128 - protein, 11 aa, synthetic construct
  REGION 1..11: note = Description of Artificial Sequence: Synthetic peptide
FLKEKGGLEGL

SEQ ID NO: 15129 - protein, 9 aa, synthetic construct
  REGION 1..9: note = Description of Artificial Sequence: Synthetic peptide
ASITLTAQV

SEQ ID NO: 15130 - protein, 9 aa, synthetic construct
  REGION 1..9: note = Description of Artificial Sequence: Synthetic peptide
GAASITLTV

SEQ ID NO: 15131 - protein, 9 aa, synthetic construct
  REGION 1..9: note = Description of Artificial Sequence: Synthetic peptide
ALNPGLLET

SEQ ID NO: 15132 - protein, 11 aa, synthetic construct
  REGION 1..11: note = Description of Artificial Sequence: Synthetic peptide
FLKEKGGLDGL

SEQ ID NO: 15133 - protein, 9 aa, synthetic construct
  REGION 1..9: note = Description of Artificial Sequence: Synthetic peptide
AVLSIVNRV

SEQ ID NO: 15134 - protein, 10 aa, synthetic construct
  REGION 1..10: note = Description of Artificial Sequence: Synthetic peptide
KLVPVDPAVV

SEQ ID NO: 15135 - protein, 9 aa, synthetic construct
  REGION 1..9: note = Description of Artificial Sequence: Synthetic peptide
RAIEVVQRV

SEQ ID NO: 15136 - protein, 10 aa, synthetic construct
  REGION 1..10: note = Description of Artificial Sequence: Synthetic peptide
ALTDIVPLTA

SEQ ID NO: 15137 - protein, 9 aa, synthetic construct
  REGION 1..9: note = Description of Artificial Sequence: Synthetic peptide
ELKKIIGQV

SEQ ID NO: 15138 - protein, 8 aa, synthetic construct
  REGION 1..8: note = Description of Artificial Sequence: Synthetic peptide
VLSIVNRV

SEQ ID NO: 15139 - protein, 9 aa, synthetic construct
  REGION 1..9: note = Description of Artificial Sequence: Synthetic peptide
AVLSIINRV

SEQ ID NO: 15140 - protein, 9 aa, synthetic construct
  REGION 1..9: note = Description of Artificial Sequence: Synthetic peptide
ALTDIVSMT

SEQ ID NO: 15141 - protein, 8 aa, synthetic construct
  REGION 1..8: note = Description of Artificial Sequence: Synthetic peptide
VLSIINRV

SEQ ID NO: 15142 - protein, 9 aa, synthetic construct
  REGION 1..9: note = Description of Artificial Sequence: Synthetic peptide
EIKSLFNTV

SEQ ID NO: 15143 - protein, 9 aa, synthetic construct
  REGION 1..9: note = Description of Artificial Sequence: Synthetic peptide
SLGVAPTRA

SEQ ID NO: 15144 - protein, 10 aa, synthetic construct
  REGION 1..10: note = Description of Artificial Sequence: Synthetic peptide
GLIGLRIVFA

SEQ ID NO: 15145 - protein, 9 aa, synthetic construct
  REGION 1..9: note = Description of Artificial Sequence: Synthetic peptide
ELRSLFNTV

SEQ ID NO: 15146 - protein, 9 aa, synthetic construct
  REGION 1..9: note = Description of Artificial Sequence: Synthetic peptide
TVKIKSLGV

SEQ ID NO: 15147 - protein, 10 aa, synthetic construct
  REGION 1..10: note = Description of Artificial Sequence: Synthetic peptide
HLRDFILIAA

SEQ ID NO: 15148 - protein, 10 aa, synthetic construct
  REGION 1..10: note = Description of Artificial Sequence: Synthetic peptide
ALNPDLLETA

SEQ ID NO: 15149 - protein, 9 aa, synthetic construct
  REGION 1..9: note = Description of Artificial Sequence: Synthetic peptide
ALQDSQSEV

SEQ ID NO: 15150 - protein, 9 aa, synthetic construct
  REGION 1..9: note = Description of Artificial Sequence: Synthetic peptide
NLIDTVAIA

SEQ ID NO: 15151 - protein, 9 aa, synthetic construct
  REGION 1..9: note = Description of Artificial Sequence: Synthetic peptide
TLTAQVRQL

SEQ ID NO: 15152 - protein, 9 aa, synthetic construct
  REGION 1..9: note = Description of Artificial Sequence: Synthetic peptide
SAINLIDTV

SEQ ID NO: 15153 - protein, 9 aa, synthetic construct
  REGION 1..9: note = Description of Artificial Sequence: Synthetic peptide
AILNVPTRI

SEQ ID NO: 15154 - protein, 9 aa, synthetic construct
  REGION 1..9: note = Description of Artificial Sequence: Synthetic peptide
SLGIAPTRA

SEQ ID NO: 15155 - protein, 10 aa, synthetic construct
  REGION 1..10: note = Description of Artificial Sequence: Synthetic peptide
GLISLKIIFA

SEQ ID NO: 15156 - protein, 9 aa, synthetic construct
  REGION 1..9: note = Description of Artificial Sequence: Synthetic peptide
GLGQWTYQV

SEQ ID NO: 15157 - protein, 9 aa, synthetic construct
  REGION 1..9: note = Description of Artificial Sequence: Synthetic peptide
SISNWLWYI

SEQ ID NO: 15158 - protein, 9 aa, synthetic construct
  REGION 1..9: note = Description of Artificial Sequence: Synthetic peptide
AVLSIINRV

SEQ ID NO: 15159 - protein, 9 aa, synthetic construct
  REGION 1..9: note = Description of Artificial Sequence: Synthetic peptide
SLFNTVATL

SEQ ID NO: 15160 - protein, 9 aa, synthetic construct
  REGION 1..9: note = Description of Artificial Sequence: Synthetic peptide
ALIRILQQL

SEQ ID NO: 15161 - protein, 9 aa, synthetic construct
  REGION 1..9: note = Description of Artificial Sequence: Synthetic peptide
LLLYWAREL

SEQ ID NO: 15162 - protein, 9 aa, synthetic construct
  REGION 1..9: note = Description of Artificial Sequence: Synthetic peptide
TLNAWVKVV

SEQ ID NO: 15163 - protein, 9 aa, synthetic construct
  REGION 1..9: note = Description of Artificial Sequence: Synthetic peptide
AVLSIVNRV

SEQ ID NO: 15164 - protein, 9 aa, synthetic construct
  REGION 1..9: note = Description of Artificial Sequence: Synthetic peptide
QLTEVVQKI

SEQ ID NO: 15165 - protein, 9 aa, synthetic construct
  REGION 1..9: note = Description of Artificial Sequence: Synthetic peptide
ILKEPVHGV

SEQ ID NO: 15166 - protein, 9 aa, synthetic construct
  REGION 1..9: note = Description of Artificial Sequence: Synthetic peptide
HLWNWGILI

SEQ ID NO: 15167 - protein, 9 aa, synthetic construct
  REGION 1..9: note = Description of Artificial Sequence: Synthetic peptide
LLLYWGREL

SEQ ID NO: 15168 - protein, 10 aa, synthetic construct
  REGION 1..10: note = Description of Artificial Sequence: Synthetic peptide
TLWQRPLVTV

SEQ ID NO: 15169 - protein, 9 aa, synthetic construct
  REGION 1..9: note = Description of Artificial Sequence: Synthetic peptide
IVNQIIEQL

SEQ ID NO: 15170 - protein, 9 aa, synthetic construct
  REGION 1..9: note = Description of Artificial Sequence: Synthetic peptide
LLWKWGTLI

SEQ ID NO: 15171 - protein, 9 aa, synthetic construct
  REGION 1..9: note = Description of Artificial Sequence: Synthetic peptide
AILNIPVRI

SEQ ID NO: 15172 - protein, 9 aa, synthetic construct
  REGION 1..9: note = Description of Artificial Sequence: Synthetic peptide
TLTAQVRQL

SEQ ID NO: 15173 - protein, 9 aa, synthetic construct
  REGION 1..9: note = Description of Artificial Sequence: Synthetic peptide
HLWKWGTLI

SEQ ID NO: 15174 - protein, 9 aa, synthetic construct
  REGION 1..9: note = Description of Artificial Sequence: Synthetic peptide
TISSIFPQI

SEQ ID NO: 15175 - protein, 9 aa, synthetic construct
  REGION 1..9: note = Description of Artificial Sequence: Synthetic peptide
LVNQIIEQL

SEQ ID NO: 15176 - protein, 10 aa, synthetic construct
  REGION 1..10: note = Description of Artificial Sequence: Synthetic peptide
NLLDTIAIAV

SEQ ID NO: 15177 - protein, 9 aa, synthetic construct
  REGION 1..9: note = Description of Artificial Sequence: Synthetic peptide
AILNVPTRI

SEQ ID NO: 15178 - protein, 9 aa, synthetic construct
  REGION 1..9: note = Description of Artificial Sequence: Synthetic peptide
AIIVWTIVL

SEQ ID NO: 15179 - protein, 9 aa, synthetic construct
  REGION 1..9: note = Description of Artificial Sequence: Synthetic peptide
ALFYKLDVV

SEQ ID NO: 15180 - protein, 10 aa, synthetic construct
  REGION 1..10: note = Description of Artificial Sequence: Synthetic peptide
NLIDTVAIAV

SEQ ID NO: 15181 - protein, 9 aa, synthetic construct
  REGION 1..9: note = Description of Artificial Sequence: Synthetic peptide
TLTVQVRQL

SEQ ID NO: 15182 - protein, 9 aa, synthetic construct
  REGION 1..9: note = Description of Artificial Sequence: Synthetic peptide
IMAQLQPAL

SEQ ID NO: 15183 - protein, 9 aa, synthetic construct
  REGION 1..9: note = Description of Artificial Sequence: Synthetic peptide
HLEGKIILV

SEQ ID NO: 15184 - protein, 9 aa, synthetic construct
  REGION 1..9: note = Description of Artificial Sequence: Synthetic peptide
SALDLSFFL

SEQ ID NO: 15185 - protein, 9 aa, synthetic construct
  REGION 1..9: note = Description of Artificial Sequence: Synthetic peptide
VLVEPPVVL

SEQ ID NO: 15186 - protein, 9 aa, synthetic construct
  REGION 1..9: note = Description of Artificial Sequence: Synthetic peptide
ALTDIVPLT

SEQ ID NO: 15187 - protein, 9 aa, synthetic construct
  REGION 1..9: note = Description of Artificial Sequence: Synthetic peptide
VIWGKIPKF

SEQ ID NO: 15188 - protein, 10 aa, synthetic construct
  REGION 1..10: note = Description of Artificial Sequence: Synthetic peptide
TLWQRPIVKV

SEQ ID NO: 15189 - protein, 9 aa, synthetic construct
  REGION 1..9: note = Description of Artificial Sequence: Synthetic peptide
AIIGDIRQA

SEQ ID NO: 15190 - protein, 11 aa, synthetic construct
  REGION 1..11: note = Description of Artificial Sequence: Synthetic peptide
GLNTGEKDWQL

SEQ ID NO: 15191 - protein, 9 aa, synthetic construct
  REGION 1..9: note = Description of Artificial Sequence: Synthetic peptide
RAIEVVQRV

SEQ ID NO: 15192 - protein, 9 aa, synthetic construct
  REGION 1..9: note = Description of Artificial Sequence: Synthetic peptide
KLVPVDPAV

SEQ ID NO: 15193 - protein, 9 aa, synthetic construct
  REGION 1..9: note = Description of Artificial Sequence: Synthetic peptide
IVTDSQYAL

SEQ ID NO: 15194 - protein, 10 aa, synthetic construct
  REGION 1..10: note = Description of Artificial Sequence: Synthetic peptide
ALNPGLLETA

SEQ ID NO: 15195 - protein, 11 aa, synthetic construct
  REGION 1..11: note = Description of Artificial Sequence: Synthetic peptide
FLKEKGGLEGL

SEQ ID NO: 15196 - protein, 9 aa, synthetic construct
  REGION 1..9: note = Description of Artificial Sequence: Synthetic peptide
IIWGKIPKF

SEQ ID NO: 15197 - protein, 9 aa, synthetic construct
  REGION 1..9: note = Description of Artificial Sequence: Synthetic peptide
ALNPGLLET

SEQ ID NO: 15198 - protein, 9 aa, synthetic construct
  REGION 1..9: note = Description of Artificial Sequence: Synthetic peptide
LLQLTVWGI

SEQ ID NO: 15199 - protein, 9 aa, synthetic construct
  REGION 1..9: note = Description of Artificial Sequence: Synthetic peptide
HLLNWGFTT

SEQ ID NO: 15200 - protein, 9 aa, synthetic construct
  REGION 1..9: note = Description of Artificial Sequence: Synthetic peptide
AIIRILQQL

SEQ ID NO: 15201 - protein, 9 aa, synthetic construct
  REGION 1..9: note = Description of Artificial Sequence: Synthetic peptide
FQLPPLEGL

SEQ ID NO: 15202 - protein, 11 aa, synthetic construct
  REGION 1..11: note = Description of Artificial Sequence: Synthetic peptide
VQLGIPHPAGL

SEQ ID NO: 15203 - protein, 10 aa, synthetic construct
  REGION 1..10: note = Description of Artificial Sequence: Synthetic peptide
RTQDFWEVQL

SEQ ID NO: 15204 - protein, 9 aa, synthetic construct
  REGION 1..9: note = Description of Artificial Sequence: Synthetic peptide
ALQDSRPEV

SEQ ID NO: 15205 - protein, 9 aa, synthetic construct
  REGION 1..9: note = Description of Artificial Sequence: Synthetic peptide
TIVWSIVFI

SEQ ID NO: 15206 - protein, 10 aa, synthetic construct
  REGION 1..10: note = Description of Artificial Sequence: Synthetic peptide
YLRDQQLLGI

SEQ ID NO: 15207 - protein, 9 aa, synthetic construct
  REGION 1..9: note = Description of Artificial Sequence: Synthetic peptide
LLDTIAIAV

SEQ ID NO: 15208 - protein, 9 aa, synthetic construct
  REGION 1..9: note = Description of Artificial Sequence: Synthetic peptide
EGLKYLWNL

SEQ ID NO: 15209 - protein, 9 aa, synthetic construct
  REGION 1..9: note = Description of Artificial Sequence: Synthetic peptide
DLADHLIHL

SEQ ID NO: 15210 - protein, 9 aa, synthetic construct
  REGION 1..9: note = Description of Artificial Sequence: Synthetic peptide
TLRDVQAKL

SEQ ID NO: 15211 - protein, 10 aa, synthetic construct
  REGION 1..10: note = Description of Artificial Sequence: Synthetic peptide
KLVPVDPAVV

SEQ ID NO: 15212 - protein, 9 aa, synthetic construct
  REGION 1..9: note = Description of Artificial Sequence: Synthetic peptide
KLTPLCVTL

SEQ ID NO: 15213 - protein, 10 aa, synthetic construct
  REGION 1..10: note = Description of Artificial Sequence: Synthetic peptide
ILIAARTVEL

SEQ ID NO: 15214 - protein, 9 aa, synthetic construct
  REGION 1..9: note = Description of Artificial Sequence: Synthetic peptide
AVANWTDRV

SEQ ID NO: 15215 - protein, 9 aa, synthetic construct
  REGION 1..9: note = Description of Artificial Sequence: Synthetic peptide
AIIGDIRQA

SEQ ID NO: 15216 - protein, 9 aa, synthetic construct
  REGION 1..9: note = Description of Artificial Sequence: Synthetic peptide
RVIEIVQRA

SEQ ID NO: 15217 - protein, 9 aa, synthetic construct
  REGION 1..9: note = Description of Artificial Sequence: Synthetic peptide
SAINLIDTV

SEQ ID NO: 15218 - protein, 11 aa, synthetic construct
  REGION 1..11: note = Description of Artificial Sequence: Synthetic peptide
TQIDPDLADQL

SEQ ID NO: 15219 - protein, 9 aa, synthetic construct
  REGION 1..9: note = Description of Artificial Sequence: Synthetic peptide
QLTEVVQKI

SEQ ID NO: 15220 - protein, 11 aa, synthetic construct
  REGION 1..11: note = Description of Artificial Sequence: Synthetic peptide
TQIDPNTADHL

SEQ ID NO: 15221 - protein, 9 aa, synthetic construct
  REGION 1..9: note = Description of Artificial Sequence: Synthetic peptide
VVIQDNNEI

SEQ ID NO: 15222 - protein, 11 aa, synthetic construct
  REGION 1..11: note = Description of Artificial Sequence: Synthetic peptide
TQVDPDLADHL

SEQ ID NO: 15223 - protein, 9 aa, synthetic construct
  REGION 1..9: note = Description of Artificial Sequence: Synthetic peptide
EVIGDIRKA

SEQ ID NO: 15224 - protein, 9 aa, synthetic construct
  REGION 1..9: note = Description of Artificial Sequence: Synthetic peptide
VLAEAMSQA

SEQ ID NO: 15225 - protein, 9 aa, synthetic construct
  REGION 1..9: note = Description of Artificial Sequence: Synthetic peptide
IVNQIIEQL

SEQ ID NO: 15226 - protein, 9 aa, synthetic construct
  REGION 1..9: note = Description of Artificial Sequence: Synthetic peptide
SETETFRPA

SEQ ID NO: 15227 - protein, 9 aa, synthetic construct
  REGION 1..9: note = Description of Artificial Sequence: Synthetic peptide
RAIEVVQRV

SEQ ID NO: 15228 - protein, 9 aa, synthetic construct
  REGION 1..9: note = Description of Artificial Sequence: Synthetic peptide
AVLSIINRV

SEQ ID NO: 15229 - protein, 9 aa, synthetic construct
  REGION 1..9: note = Description of Artificial Sequence: Synthetic peptide
NETVPITCA

SEQ ID NO: 15230 - protein, 9 aa, synthetic construct
  REGION 1..9: note = Description of Artificial Sequence: Synthetic peptide
AVLSIVNRV

SEQ ID NO: 15231 - protein, 9 aa, synthetic construct
  REGION 1..9: note = Description of Artificial Sequence: Synthetic peptide
SISERILSA

SEQ ID NO: 15232 - protein, 9 aa, synthetic construct
  REGION 1..9: note = Description of Artificial Sequence: Synthetic peptide
SQQEIQQAA

SEQ ID NO: 15233 - protein, 9 aa, synthetic construct
  REGION 1..9: note = Description of Artificial Sequence: Synthetic peptide
AEWDRIHPP

SEQ ID NO: 15234 - protein, 9 aa, synthetic construct
  REGION 1..9: note = Description of Artificial Sequence: Synthetic peptide
SAINLLDTI

SEQ ID NO: 15235 - protein, 9 aa, synthetic construct
  REGION 1..9: note = Description of Artificial Sequence: Synthetic peptide
WTVNDIQKL

SEQ ID NO: 15236 - protein, 10 aa, synthetic construct
  REGION 1..10: note = Description of Artificial Sequence: Synthetic peptide
REFPSEQARA

SEQ ID NO: 15237 - protein, 9 aa, synthetic construct
  REGION 1..9: note = Description of Artificial Sequence: Synthetic peptide
ATLEEMMTA

SEQ ID NO: 15238 - protein, 9 aa, synthetic construct
  REGION 1..9: note = Description of Artificial Sequence: Synthetic peptide
GAASITLTV

SEQ ID NO: 15239 - protein, 9 aa, synthetic construct
  REGION 1..9: note = Description of Artificial Sequence: Synthetic peptide
IVTDSQYAL

SEQ ID NO: 15240 - protein, 9 aa, synthetic construct
  REGION 1..9: note = Description of Artificial Sequence: Synthetic peptide
NLIDTVAIA

SEQ ID NO: 15241 - protein, 9 aa, synthetic construct
  REGION 1..9: note = Description of Artificial Sequence: Synthetic peptide
SLFNTVATL

SEQ ID NO: 15242 - protein, 9 aa, synthetic construct
  REGION 1..9: note = Description of Artificial Sequence: Synthetic peptide
RVIEVAQRA

SEQ ID NO: 15243 - protein, 9 aa, synthetic construct
  REGION 1..9: note = Description of Artificial Sequence: Synthetic peptide
LVNQIIEQL

SEQ ID NO: 15244 - protein, 10 aa, synthetic construct
  REGION 1..10: note = Description of Artificial Sequence: Synthetic peptide
SQYALGIIQA

SEQ ID NO: 15245 - protein, 9 aa, synthetic construct
  REGION 1..9: note = Description of Artificial Sequence: Synthetic peptide
ATSTLQEQI

SEQ ID NO: 15246 - protein, 9 aa, synthetic construct
  REGION 1..9: note = Description of Artificial Sequence: Synthetic peptide
RAIEAQQHL

SEQ ID NO: 15247 - protein, 11 aa, synthetic construct
  REGION 1..11: note = Description of Artificial Sequence: Synthetic peptide
VVIQDNNEIKV

SEQ ID NO: 15248 - protein, 9 aa, synthetic construct
  REGION 1..9: note = Description of Artificial Sequence: Synthetic peptide
ASITLTVQV

SEQ ID NO: 15249 - protein, 9 aa, synthetic construct
  REGION 1..9: note = Description of Artificial Sequence: Synthetic peptide
STAGYREEL

SEQ ID NO: 15250 - protein, 9 aa, synthetic construct
  REGION 1..9: note = Description of Artificial Sequence: Synthetic peptide
SQIYPGIKV

SEQ ID NO: 15251 - protein, 9 aa, synthetic construct
  REGION 1..9: note = Description of Artificial Sequence: Synthetic peptide
FQLPPLEGL

SEQ ID NO: 15252 - protein, 9 aa, synthetic construct
  REGION 1..9: note = Description of Artificial Sequence: Synthetic peptide
TTSNLQEQI

SEQ ID NO: 15253 - protein, 9 aa, synthetic construct
  REGION 1..9: note = Description of Artificial Sequence: Synthetic peptide
ATGDIIGNI

SEQ ID NO: 15254 - protein, 9 aa, synthetic construct
  REGION 1..9: note = Description of Artificial Sequence: Synthetic peptide
AVANWTDRV

SEQ ID NO: 15255 - protein, 10 aa, synthetic construct
  REGION 1..10: note = Description of Artificial Sequence: Synthetic peptide
ASETETFRPA

SEQ ID NO: 15256 - protein, 9 aa, synthetic construct
  REGION 1..9: note = Description of Artificial Sequence: Synthetic peptide
IEVKDTKEA

SEQ ID NO: 15257 - protein, 9 aa, synthetic construct
  REGION 1..9: note = Description of Artificial Sequence: Synthetic peptide
FTSAAVKAA

SEQ ID NO: 15258 - protein, 9 aa, synthetic construct
  REGION 1..9: note = Description of Artificial Sequence: Synthetic peptide
ASITLTAQV

SEQ ID NO: 15259 - protein, 9 aa, synthetic construct
  REGION 1..9: note = Description of Artificial Sequence: Synthetic peptide
SEVGFPVRP

SEQ ID NO: 15260 - protein, 9 aa, synthetic construct
  REGION 1..9: note = Description of Artificial Sequence: Synthetic peptide
ILKEPVHGV

SEQ ID NO: 15261 - protein, 9 aa, synthetic construct
  REGION 1..9: note = Description of Artificial Sequence: Synthetic peptide
DIIGNIRQA

SEQ ID NO: 15262 - protein, 9 aa, synthetic construct
  REGION 1..9: note = Description of Artificial Sequence: Synthetic peptide
DIIGDIRQA

SEQ ID NO: 15263 - protein, 9 aa, synthetic construct
  REGION 1..9: note = Description of Artificial Sequence: Synthetic peptide
NAKNIIVQL

SEQ ID NO: 15264 - protein, 9 aa, synthetic construct
  REGION 1..9: note = Description of Artificial Sequence: Synthetic peptide
QLTEVVQKI

SEQ ID NO: 15265 - protein, 9 aa, synthetic construct
  REGION 1..9: note = Description of Artificial Sequence: Synthetic peptide
IQDNNEIKV

SEQ ID NO: 15266 - protein, 9 aa, synthetic construct
  REGION 1..9: note = Description of Artificial Sequence: Synthetic peptide
SAINLIDTV

SEQ ID NO: 15267 - protein, 9 aa, synthetic construct
  REGION 1..9: note = Description of Artificial Sequence: Synthetic peptide
IVTDSQYAL

SEQ ID NO: 15268 - protein, 9 aa, synthetic construct
  REGION 1..9: note = Description of Artificial Sequence: Synthetic peptide
AVLSIINRV

SEQ ID NO: 15269 - protein, 9 aa, synthetic construct
  REGION 1..9: note = Description of Artificial Sequence: Synthetic peptide
VVIQDNNEI

SEQ ID NO: 15270 - protein, 9 aa, synthetic construct
  REGION 1..9: note = Description of Artificial Sequence: Synthetic peptide
AVLSIVNRV

SEQ ID NO: 15271 - protein, 9 aa, synthetic construct
  REGION 1..9: note = Description of Artificial Sequence: Synthetic peptide
AIIGDIRQA

SEQ ID NO: 15272 - protein, 9 aa, synthetic construct
  REGION 1..9: note = Description of Artificial Sequence: Synthetic peptide
RAIEVVQRV

SEQ ID NO: 15273 - protein, 11 aa, synthetic construct
  REGION 1..11: note = Description of Artificial Sequence: Synthetic peptide
TQIDPDLADQL

SEQ ID NO: 15274 - protein, 9 aa, synthetic construct
  REGION 1..9: note = Description of Artificial Sequence: Synthetic peptide
RVIEIVQRA

SEQ ID NO: 15275 - protein, 9 aa, synthetic construct
  REGION 1..9: note = Description of Artificial Sequence: Synthetic peptide
SAINLLDTI

SEQ ID NO: 15276 - protein, 9 aa, synthetic construct
  REGION 1..9: note = Description of Artificial Sequence: Synthetic peptide
FQLPPLEGL

SEQ ID NO: 15277 - protein, 11 aa, synthetic construct
  REGION 1..11: note = Description of Artificial Sequence: Synthetic peptide
VVIQDNNEIKV

SEQ ID NO: 15278 - protein, 9 aa, synthetic construct
  REGION 1..9: note = Description of Artificial Sequence: Synthetic peptide
GGIGGFIKV

SEQ ID NO: 15279 - protein, 9 aa, synthetic construct
  REGION 1..9: note = Description of Artificial Sequence: Synthetic peptide
SQIYPGIKV

SEQ ID NO: 15280 - protein, 9 aa, synthetic construct
  REGION 1..9: note = Description of Artificial Sequence: Synthetic peptide
KLVPVDPAV

SEQ ID NO: 15281 - protein, 9 aa, synthetic construct
  REGION 1..9: note = Description of Artificial Sequence: Synthetic peptide
YSTQVDPDL

SEQ ID NO: 15282 - protein, 9 aa, synthetic construct
  REGION 1..9: note = Description of Artificial Sequence: Synthetic peptide
YSTQIDPDL

SEQ ID NO: 15283 - protein, 10 aa, synthetic construct
  REGION 1..10: note = Description of Artificial Sequence: Synthetic peptide
TVLDVGDAYF

SEQ ID NO: 15284 - protein, 9 aa, synthetic construct
  REGION 1..9: note = Description of Artificial Sequence: Synthetic peptide
VLAEAMSQA

SEQ ID NO: 15285 - protein, 10 aa, synthetic construct
  REGION 1..10: note = Description of Artificial Sequence: Synthetic peptide
GVIPLNLPQI

SEQ ID NO: 15286 - protein, 9 aa, synthetic construct
  REGION 1..9: note = Description of Artificial Sequence: Synthetic peptide
ASITLTVQV

SEQ ID NO: 15287 - protein, 9 aa, synthetic construct
  REGION 1..9: note = Description of Artificial Sequence: Synthetic peptide
GAASITLTV

SEQ ID NO: 15288 - protein, 11 aa, synthetic construct
  REGION 1..11: note = Description of Artificial Sequence: Synthetic peptide
TQVDPDLADHL

SEQ ID NO: 15289 - protein, 9 aa, synthetic construct
  REGION 1..9: note = Description of Artificial Sequence: Synthetic peptide
ASITLTAQV

SEQ ID NO: 15290 - protein, 9 aa, synthetic construct
  REGION 1..9: note = Description of Artificial Sequence: Synthetic peptide
IVNQIIEQL

SEQ ID NO: 15291 - protein, 9 aa, synthetic construct
  REGION 1..9: note = Description of Artificial Sequence: Synthetic peptide
ASDFNLPHI

SEQ ID NO: 15292 - protein, 9 aa, synthetic construct
  REGION 1..9: note = Description of Artificial Sequence: Synthetic peptide
SLAEEDIRI

SEQ ID NO: 15293 - protein, 9 aa, synthetic construct
  REGION 1..9: note = Description of Artificial Sequence: Synthetic peptide
LLDTIAIAV

SEQ ID NO: 15294 - protein, 9 aa, synthetic construct
  REGION 1..9: note = Description of Artificial Sequence: Synthetic peptide
YVDRFFKTL

SEQ ID NO: 15295 - protein, 9 aa, synthetic construct
  REGION 1..9: note = Description of Artificial Sequence: Synthetic peptide
LIDTVAIAV

SEQ ID NO: 15296 - protein, 9 aa, synthetic construct
  REGION 1..9: note = Description of Artificial Sequence: Synthetic peptide
FDPWVGDNL

SEQ ID NO: 15297 - protein, 9 aa, synthetic construct
  REGION 1..9: note = Description of Artificial Sequence: Synthetic peptide
FDPWIGDNL

SEQ ID NO: 15298 - protein, 9 aa, synthetic construct
  REGION 1..9: note = Description of Artificial Sequence: Synthetic peptide
FDPWVGNNL

SEQ ID NO: 15299 - protein, 9 aa, synthetic construct
  REGION 1..9: note = Description of Artificial Sequence: Synthetic peptide
AVLSIINRV

SEQ ID NO: 15300 - protein, 9 aa, synthetic construct
  REGION 1..9: note = Description of Artificial Sequence: Synthetic peptide
AVLSIVNRV

SEQ ID NO: 15301 - protein, 9 aa, synthetic construct
  REGION 1..9: note = Description of Artificial Sequence: Synthetic peptide
QLTEVVQKI

SEQ ID NO: 15302 - protein, 10 aa, synthetic construct
  REGION 1..10: note = Description of Artificial Sequence: Synthetic peptide
TLWQRPLVTV

SEQ ID NO: 15303 - protein, 9 aa, synthetic construct
  REGION 1..9: note = Description of Artificial Sequence: Synthetic peptide
ILKEPVHGV

SEQ ID NO: 15304 - protein, 10 aa, synthetic construct
  REGION 1..10: note = Description of Artificial Sequence: Synthetic peptide
TLWQRPIVKV

SEQ ID NO: 15305 - protein, 9 aa, synthetic construct
  REGION 1..9: note = Description of Artificial Sequence: Synthetic peptide
FSPEVIPMF

SEQ ID NO: 15306 - protein, 9 aa, synthetic construct
  REGION 1..9: note = Description of Artificial Sequence: Synthetic peptide
VIPLNLPQI

SEQ ID NO: 15307 - protein, 9 aa, synthetic construct
  REGION 1..9: note = Description of Artificial Sequence: Synthetic peptide
HLEGKIILV

SEQ ID NO: 15308 - protein, 9 aa, synthetic construct
  REGION 1..9: note = Description of Artificial Sequence: Synthetic peptide
RVIEIVQRA

SEQ ID NO: 15309 - protein, 9 aa, synthetic construct
  REGION 1..9: note = Description of Artificial Sequence: Synthetic peptide
AIIGDIRQA

SEQ ID NO: 15310 - protein, 10 aa, synthetic construct
  REGION 1..10: note = Description of Artificial Sequence: Synthetic peptide
KIIGQVGDQA

SEQ ID NO: 15311 - protein, 9 aa, synthetic construct
  REGION 1..9: note = Description of Artificial Sequence: Synthetic peptide
KVITLTETT

SEQ ID NO: 15312 - protein, 9 aa, synthetic construct
  REGION 1..9: note = Description of Artificial Sequence: Synthetic peptide
AVLSIINRV

SEQ ID NO: 15313 - protein, 9 aa, synthetic construct
  REGION 1..9: note = Description of Artificial Sequence: Synthetic peptide
IVNQIIEQL

SEQ ID NO: 15314 - protein, 9 aa, synthetic construct
  REGION 1..9: note = Description of Artificial Sequence: Synthetic peptide
VVIQDNNEI

SEQ ID NO: 15315 - protein, 9 aa, synthetic construct
  REGION 1..9: note = Description of Artificial Sequence: Synthetic peptide
WTVNDIQKL

SEQ ID NO: 15316 - protein, 9 aa, synthetic construct
  REGION 1..9: note = Description of Artificial Sequence: Synthetic peptide
SETETFRPA

SEQ ID NO: 15317 - protein, 9 aa, synthetic construct
  REGION 1..9: note = Description of Artificial Sequence: Synthetic peptide
EVIGDIRKA

SEQ ID NO: 15318 - protein, 9 aa, synthetic construct
  REGION 1..9: note = Description of Artificial Sequence: Synthetic peptide
QLTEVVQKI

SEQ ID NO: 15319 - protein, 9 aa, synthetic construct
  REGION 1..9: note = Description of Artificial Sequence: Synthetic peptide
AIIRILQQL

SEQ ID NO: 15320 - protein, 9 aa, synthetic construct
  REGION 1..9: note = Description of Artificial Sequence: Synthetic peptide
VLAEAMSQA

SEQ ID NO: 15321 - protein, 9 aa, synthetic construct
  REGION 1..9: note = Description of Artificial Sequence: Synthetic peptide
AVLSIVNRV

SEQ ID NO: 15322 - protein, 10 aa, synthetic construct
  REGION 1..10: note = Description of Artificial Sequence: Synthetic peptide
REFPSEQARA

SEQ ID NO: 15323 - protein, 10 aa, synthetic construct
  REGION 1..10: note = Description of Artificial Sequence: Synthetic peptide
AVVIQDNNEI

SEQ ID NO: 15324 - protein, 10 aa, synthetic construct
  REGION 1..10: note = Description of Artificial Sequence: Synthetic peptide
KAYSTESHNV

SEQ ID NO: 15325 - protein, 9 aa, synthetic construct
  REGION 1..9: note = Description of Artificial Sequence: Synthetic peptide
RVIEVAQRA

SEQ ID NO: 15326 - protein, 9 aa, synthetic construct
  REGION 1..9: note = Description of Artificial Sequence: Synthetic peptide
RAIEVVQRV

SEQ ID NO: 15327 - protein, 9 aa, synthetic construct
  REGION 1..9: note = Description of Artificial Sequence: Synthetic peptide
NETVPITCA

SEQ ID NO: 15328 - protein, 9 aa, synthetic construct
  REGION 1..9: note = Description of Artificial Sequence: Synthetic peptide
GTAGSTMGA

SEQ ID NO: 15329 - protein, 10 aa, synthetic construct
  REGION 1..10: note = Description of Artificial Sequence: Synthetic peptide
RVLAEAMSQA

SEQ ID NO: 15330 - protein, 11 aa, synthetic construct
  REGION 1..11: note = Description of Artificial Sequence: Synthetic peptide
TQIDPNTADHL

SEQ ID NO: 15331 - protein, 9 aa, synthetic construct
  REGION 1..9: note = Description of Artificial Sequence: Synthetic peptide
IEVKDTKEA

SEQ ID NO: 15332 - protein, 9 aa, synthetic construct
  REGION 1..9: note = Description of Artificial Sequence: Synthetic peptide
KIITLTETT

SEQ ID NO: 15333 - protein, 9 aa, synthetic construct
  REGION 1..9: note = Description of Artificial Sequence: Synthetic peptide
ILKEPVHGV

SEQ ID NO: 15334 - protein, 9 aa, synthetic construct
  REGION 1..9: note = Description of Artificial Sequence: Synthetic peptide
KIGGQLIEA

SEQ ID NO: 15335 - protein, 9 aa, synthetic construct
  REGION 1..9: note = Description of Artificial Sequence: Synthetic peptide
ALIRILQQL

SEQ ID NO: 15336 - protein, 9 aa, synthetic construct
  REGION 1..9: note = Description of Artificial Sequence: Synthetic peptide
KQMAGGDCV

SEQ ID NO: 15337 - protein, 9 aa, synthetic construct
  REGION 1..9: note = Description of Artificial Sequence: Synthetic peptide
QIYPGIKVK

SEQ ID NO: 15338 - protein, 9 aa, synthetic construct
  REGION 1..9: note = Description of Artificial Sequence: Synthetic peptide
AMYSPPIAR

SEQ ID NO: 15339 - protein, 9 aa, synthetic construct
  REGION 1..9: note = Description of Artificial Sequence: Synthetic peptide
ALATPTKAK

SEQ ID NO: 15340 - protein, 9 aa, synthetic construct
  REGION 1..9: note = Description of Artificial Sequence: Synthetic peptide
KLQEYFINK

SEQ ID NO: 15341 - protein, 9 aa, synthetic construct
  REGION 1..9: note = Description of Artificial Sequence: Synthetic peptide
GLFNNSILK

SEQ ID NO: 15342 - protein, 9 aa, synthetic construct
  REGION 1..9: note = Description of Artificial Sequence: Synthetic peptide
AAAAIMMQK

SEQ ID NO: 15343 - protein, 9 aa, synthetic construct
  REGION 1..9: note = Description of Artificial Sequence: Synthetic peptide
QIYPGIKIK

SEQ ID NO: 15344 - protein, 9 aa, synthetic construct
  REGION 1..9: note = Description of Artificial Sequence: Synthetic peptide
SGATIMMQK

SEQ ID NO: 15345 - protein, 10 aa, synthetic construct
  REGION 1..10: note = Description of Artificial Sequence: Synthetic peptide
ASGATIMMQK

SEQ ID NO: 15346 - protein, 9 aa, synthetic construct
  REGION 1..9: note = Description of Artificial Sequence: Synthetic peptide
AIFQSSMTK

SEQ ID NO: 15347 - protein, 9 aa, synthetic construct
  REGION 1..9: note = Description of Artificial Sequence: Synthetic peptide
SLFGNDQSK

SEQ ID NO: 15348 - protein, 9 aa, synthetic construct
  REGION 1..9: note = Description of Artificial Sequence: Synthetic peptide
KILEPSRTK

SEQ ID NO: 15349 - protein, 10 aa, synthetic construct
  REGION 1..10: note = Description of Artificial Sequence: Synthetic peptide
AAAAAIMMQK

SEQ ID NO: 15350 - protein, 9 aa, synthetic construct
  REGION 1..9: note = Description of Artificial Sequence: Synthetic peptide
QIYPGIKVR

SEQ ID NO: 15351 - protein, 9 aa, synthetic construct
  REGION 1..9: note = Description of Artificial Sequence: Synthetic peptide
LLNGSLAEK

SEQ ID NO: 15352 - protein, 10 aa, synthetic construct
  REGION 1..10: note = Description of Artificial Sequence: Synthetic peptide
GAAAAIMMQK

SEQ ID NO: 15353 - protein, 11 aa, synthetic construct
  REGION 1..11: note = Description of Artificial Sequence: Synthetic peptide
TVNDIQKLVGK

SEQ ID NO: 15354 - protein, 9 aa, synthetic construct
  REGION 1..9: note = Description of Artificial Sequence: Synthetic peptide
STIKQACPK

SEQ ID NO: 15355 - protein, 11 aa, synthetic construct
  REGION 1..11: note = Description of Artificial Sequence: Synthetic peptide
TVNDIQKLVGK

SEQ ID NO: 15356 - protein, 10 aa, synthetic construct
  REGION 1..10: note = Description of Artificial Sequence: Synthetic peptide
TVQPIQLPNK

SEQ ID NO: 15357 - protein, 9 aa, synthetic construct
  REGION 1..9: note = Description of Artificial Sequence: Synthetic peptide
KLQEYFINK

SEQ ID NO: 15358 - protein, 9 aa, synthetic construct
  REGION 1..9: note = Description of Artificial Sequence: Synthetic peptide
QIYPGIKVK

SEQ ID NO: 15359 - protein, 10 aa, synthetic construct
  REGION 1..10: note = Description of Artificial Sequence: Synthetic peptide
TVQPIQLPEK

SEQ ID NO: 15360 - protein, 9 aa, synthetic construct
  REGION 1..9: note = Description of Artificial Sequence: Synthetic peptide
SLFGNDQSK

SEQ ID NO: 15361 - protein, 9 aa, synthetic construct
  REGION 1..9: note = Description of Artificial Sequence: Synthetic peptide
ALATPTKAK

SEQ ID NO: 15362 - protein, 9 aa, synthetic construct
  REGION 1..9: note = Description of Artificial Sequence: Synthetic peptide
AMYSPPIAR

SEQ ID NO: 15363 - protein, 9 aa, synthetic construct
  REGION 1..9: note = Description of Artificial Sequence: Synthetic peptide
GLDGLVYSK

SEQ ID NO: 15364 - protein, 11 aa, synthetic construct
  REGION 1..11: note = Description of Artificial Sequence: Synthetic peptide
QASGATIMMQK

SEQ ID NO: 15365 - protein, 9 aa, synthetic construct
  REGION 1..9: note = Description of Artificial Sequence: Synthetic peptide
AAAAIMMQK

SEQ ID NO: 15366 - protein, 9 aa, synthetic construct
  REGION 1..9: note = Description of Artificial Sequence: Synthetic peptide
SGATIMMQK

SEQ ID NO: 15367 - protein, 9 aa, synthetic construct
  REGION 1..9: note = Description of Artificial Sequence: Synthetic peptide
IIASDIQTK

SEQ ID NO: 15368 - protein, 9 aa, synthetic construct
  REGION 1..9: note = Description of Artificial Sequence: Synthetic peptide
LLNGSLAEK

SEQ ID NO: 15369 - protein, 9 aa, synthetic construct
  REGION 1..9: note = Description of Artificial Sequence: Synthetic peptide
AIFQSSMTK

SEQ ID NO: 15370 - protein, 9 aa, synthetic construct
  REGION 1..9: note = Description of Artificial Sequence: Synthetic peptide
GLDGLIYSK

SEQ ID NO: 15371 - protein, 10 aa, synthetic construct
  REGION 1..10: note = Description of Artificial Sequence: Synthetic peptide
TVQPIQLPDK

SEQ ID NO: 15372 - protein, 10 aa, synthetic construct
  REGION 1..10: note = Description of Artificial Sequence: Synthetic peptide
ASGATIMMQK

SEQ ID NO: 15373 - protein, 10 aa, synthetic construct
  REGION 1..10: note = Description of Artificial Sequence: Synthetic peptide
GSNFTSAAVK

SEQ ID NO: 15374 - protein, 9 aa, synthetic construct
  REGION 1..9: note = Description of Artificial Sequence: Synthetic peptide
APGGFAILK

SEQ ID NO: 15375 - protein, 9 aa, synthetic construct
  REGION 1..9: note = Description of Artificial Sequence: Synthetic peptide
GLFNNSILK

SEQ ID NO: 15376 - protein, 10 aa, synthetic construct
  REGION 1..10: note = Description of Artificial Sequence: Synthetic peptide
KSLFGNDQSK

SEQ ID NO: 15377 - protein, 11 aa, synthetic construct
  REGION 1..11: note = Description of Artificial Sequence: Synthetic peptide
QVYQEPYKNLK

SEQ ID NO: 15378 - protein, 10 aa, synthetic construct
  REGION 1..10: note = Description of Artificial Sequence: Synthetic peptide
SQQEIQQAAK

SEQ ID NO: 15379 - protein, 9 aa, synthetic construct
  REGION 1..9: note = Description of Artificial Sequence: Synthetic peptide
APAGFAILK

SEQ ID NO: 15380 - protein, 10 aa, synthetic construct
  REGION 1..10: note = Description of Artificial Sequence: Synthetic peptide
AAAAAIMMQK

SEQ ID NO: 15381 - protein, 11 aa, synthetic construct
  REGION 1..11: note = Description of Artificial Sequence: Synthetic peptide
SGAAAAIMMQK

SEQ ID NO: 15382 - protein, 11 aa, synthetic construct
  REGION 1..11: note = Description of Artificial Sequence: Synthetic peptide
GAAAAAIMMQK

SEQ ID NO: 15383 - protein, 9 aa, synthetic construct
  REGION 1..9: note = Description of Artificial Sequence: Synthetic peptide
KILEPSRTK

SEQ ID NO: 15384 - protein, 10 aa, synthetic construct
  REGION 1..10: note = Description of Artificial Sequence: Synthetic peptide
QVGDQAEHLK

SEQ ID NO: 15385 - protein, 10 aa, synthetic construct
  REGION 1..10: note = Description of Artificial Sequence: Synthetic peptide
GAAAAIMMQK

SEQ ID NO: 15386 - protein, 9 aa, synthetic construct
  REGION 1..9: note = Description of Artificial Sequence: Synthetic peptide
KQLTEVVQK

SEQ ID NO: 15387 - protein, 11 aa, synthetic construct
  REGION 1..11: note = Description of Artificial Sequence: Synthetic peptide
QSQGVVESMNK

SEQ ID NO: 15388 - protein, 9 aa, synthetic construct
  REGION 1..9: note = Description of Artificial Sequence: Synthetic peptide
ALQVCFLNK

SEQ ID NO: 15389 - protein, 9 aa, synthetic construct
  REGION 1..9: note = Description of Artificial Sequence: Synthetic peptide
GIIQAQPNK

SEQ ID NO: 15390 - protein, 10 aa, synthetic construct
  REGION 1..10: note = Description of Artificial Sequence: Synthetic peptide
GGLDGLVYSK

SEQ ID NO: 15391 - protein, 9 aa, synthetic construct
  REGION 1..9: note = Description of Artificial Sequence: Synthetic peptide
STIKQACPK

SEQ ID NO: 15392 - protein, 9 aa, synthetic construct
  REGION 1..9: note = Description of Artificial Sequence: Synthetic peptide
QIYPGIKIK

SEQ ID NO: 15393 - protein, 10 aa, synthetic construct
  REGION 1..10: note = Description of Artificial Sequence: Synthetic peptide
GSQPTTPCNK

SEQ ID NO: 15394 - protein, 11 aa, synthetic construct
  REGION 1..11: note = Description of Artificial Sequence: Synthetic peptide
TTGEVIGDIRK

SEQ ID NO: 15395 - protein, 10 aa, synthetic construct
  REGION 1..10: note = Description of Artificial Sequence: Synthetic peptide
ATESIVIWGK

SEQ ID NO: 15396 - protein, 10 aa, synthetic construct
  REGION 1..10: note = Description of Artificial Sequence: Synthetic peptide
VVESMNKELK

SEQ ID NO: 15397 - protein, 9 aa, synthetic construct
  REGION 1..9: note = Description of Artificial Sequence: Synthetic peptide
AAAAIMMQK

SEQ ID NO: 15398 - protein, 9 aa, synthetic construct
  REGION 1..9: note = Description of Artificial Sequence: Synthetic peptide
SGATIMMQK

SEQ ID NO: 15399 - protein, 10 aa, synthetic construct
  REGION 1..10: note = Description of Artificial Sequence: Synthetic peptide
ASGATIMMQK

SEQ ID NO: 15400 - protein, 9 aa, synthetic construct
  REGION 1..9: note = Description of Artificial Sequence: Synthetic peptide
QIYPGIKVK

SEQ ID NO: 15401 - protein, 9 aa, synthetic construct
  REGION 1..9: note = Description of Artificial Sequence: Synthetic peptide
KLQEYFINK

SEQ ID NO: 15402 - protein, 9 aa, synthetic construct
  REGION 1..9: note = Description of Artificial Sequence: Synthetic peptide
AMYSPPIAR

SEQ ID NO: 15403 - protein, 9 aa, synthetic construct
  REGION 1..9: note = Description of Artificial Sequence: Synthetic peptide
GSLQYLASK

SEQ ID NO: 15404 - protein, 11 aa, synthetic construct
  REGION 1..11: note = Description of Artificial Sequence: Synthetic peptide
QASGATIMMQK

SEQ ID NO: 15405 - protein, 10 aa, synthetic construct
  REGION 1..10: note = Description of Artificial Sequence: Synthetic peptide
AAAAAIMMQK

SEQ ID NO: 15406 - protein, 9 aa, synthetic construct
  REGION 1..9: note = Description of Artificial Sequence: Synthetic peptide
STIKQACPK

SEQ ID NO: 15407 - protein, 11 aa, synthetic construct
  REGION 1..11: note = Description of Artificial Sequence: Synthetic peptide
TVNDIQKLVGK

SEQ ID NO: 15408 - protein, 10 aa, synthetic construct
  REGION 1..10: note = Description of Artificial Sequence: Synthetic peptide
TVQPIQLPNK

SEQ ID NO: 15409 - protein, 9 aa, synthetic construct
  REGION 1..9: note = Description of Artificial Sequence: Synthetic peptide
APAGFAILK

SEQ ID NO: 15410 - protein, 9 aa, synthetic construct
  REGION 1..9: note = Description of Artificial Sequence: Synthetic peptide
APGGFAILK

SEQ ID NO: 15411 - protein, 10 aa, synthetic construct
  REGION 1..10: note = Description of Artificial Sequence: Synthetic peptide
TVQPIQLPEK

SEQ ID NO: 15412 - protein, 11 aa, synthetic construct
  REGION 1..11: note = Description of Artificial Sequence: Synthetic peptide
GAAAAAIMMQK

SEQ ID NO: 15413 - protein, 11 aa, synthetic construct
  REGION 1..11: note = Description of Artificial Sequence: Synthetic peptide
SGAAAAIMMQK

SEQ ID NO: 15414 - protein, 9 aa, synthetic construct
  REGION 1..9: note = Description of Artificial Sequence: Synthetic peptide
ATLYCVHQK

SEQ ID NO: 15415 - protein, 10 aa, synthetic construct
  REGION 1..10: note = Description of Artificial Sequence: Synthetic peptide
GAAAAIMMQK

SEQ ID NO: 15416 - protein, 9 aa, synthetic construct
  REGION 1..9: note = Description of Artificial Sequence: Synthetic peptide
GIIQAQPNK

SEQ ID NO: 15417 - protein, 10 aa, synthetic construct
  REGION 1..10: note = Description of Artificial Sequence: Synthetic peptide
GSNFTSAAVK

SEQ ID NO: 15418 - protein, 10 aa, synthetic construct
  REGION 1..10: note = Description of Artificial Sequence: Synthetic peptide
GGLDGLVYSK

SEQ ID NO: 15419 - protein, 9 aa, synthetic construct
  REGION 1..9: note = Description of Artificial Sequence: Synthetic peptide
GLFNNSILK

SEQ ID NO: 15420 - protein, 10 aa, synthetic construct
  REGION 1..10: note = Description of Artificial Sequence: Synthetic peptide
GGLDGLIYSK

SEQ ID NO: 15421 - protein, 11 aa, synthetic construct
  REGION 1..11: note = Description of Artificial Sequence: Synthetic peptide
TTGEVIGDIRK

SEQ ID NO: 15422 - protein, 9 aa, synthetic construct
  REGION 1..9: note = Description of Artificial Sequence: Synthetic peptide
QIYPGIKIK

SEQ ID NO: 15423 - protein, 9 aa, synthetic construct
  REGION 1..9: note = Description of Artificial Sequence: Synthetic peptide
AIFQSSMTK

SEQ ID NO: 15424 - protein, 9 aa, synthetic construct
  REGION 1..9: note = Description of Artificial Sequence: Synthetic peptide
GSLQYLALK

SEQ ID NO: 15425 - protein, 10 aa, synthetic construct
  REGION 1..10: note = Description of Artificial Sequence: Synthetic peptide
KSLFGNDQSK

SEQ ID NO: 15426 - protein, 9 aa, synthetic construct
  REGION 1..9: note = Description of Artificial Sequence: Synthetic peptide
SLFGNDQSK

SEQ ID NO: 15427 - protein, 10 aa, synthetic construct
  REGION 1..10: note = Description of Artificial Sequence: Synthetic peptide
ATGDIIGNIR

SEQ ID NO: 15428 - protein, 10 aa, synthetic construct
  REGION 1..10: note = Description of Artificial Sequence: Synthetic peptide
ATESIVIWGK

SEQ ID NO: 15429 - protein, 9 aa, synthetic construct
  REGION 1..9: note = Description of Artificial Sequence: Synthetic peptide
ALATPTKAK

SEQ ID NO: 15430 - protein, 10 aa, synthetic construct
  REGION 1..10: note = Description of Artificial Sequence: Synthetic peptide
SQQEIQQAAK

SEQ ID NO: 15431 - protein, 10 aa, synthetic construct
  REGION 1..10: note = Description of Artificial Sequence: Synthetic peptide
STDHQNPVRK

SEQ ID NO: 15432 - protein, 8 aa, synthetic construct
  REGION 1..8: note = Description of Artificial Sequence: Synthetic peptide
AAAIMMQK

SEQ ID NO: 15433 - protein, 8 aa, synthetic construct
  REGION 1..8: note = Description of Artificial Sequence: Synthetic peptide
PGGFAILK

SEQ ID NO: 15434 - protein, 9 aa, synthetic construct
  REGION 1..9: note = Description of Artificial Sequence: Synthetic peptide
QIIEQLIKK

SEQ ID NO: 15435 - protein, 9 aa, synthetic construct
  REGION 1..9: note = Description of Artificial Sequence: Synthetic peptide
KQLTEVVQK

SEQ ID NO: 15436 - protein, 10 aa, synthetic construct
  REGION 1..10: note = Description of Artificial Sequence: Synthetic peptide
QVGDQAEHLK

SEQ ID NO: 15437 - protein, 10 aa, synthetic construct
  REGION 1..10: note = Description of Artificial Sequence: Synthetic peptide
ATEGIVIWGK

SEQ ID NO: 15438 - protein, 10 aa, synthetic construct
  REGION 1..10: note = Description of Artificial Sequence: Synthetic peptide
SQIYPGIKVK

SEQ ID NO: 15439 - protein, 9 aa, synthetic construct
  REGION 1..9: note = Description of Artificial Sequence: Synthetic peptide
GTNETEIFR

SEQ ID NO: 15440 - protein, 9 aa, synthetic construct
  REGION 1..9: note = Description of Artificial Sequence: Synthetic peptide
IIASDIQTK

SEQ ID NO: 15441 - protein, 10 aa, synthetic construct
  REGION 1..10: note = Description of Artificial Sequence: Synthetic peptide
ITLTETTNQK

SEQ ID NO: 15442 - protein, 9 aa, synthetic construct
  REGION 1..9: note = Description of Artificial Sequence: Synthetic peptide
KILEPSRTK

SEQ ID NO: 15443 - protein, 11 aa, synthetic construct
  REGION 1..11: note = Description of Artificial Sequence: Synthetic peptide
GVVESMNKELK

SEQ ID NO: 15444 - protein, 9 aa, synthetic construct
  REGION 1..9: note = Description of Artificial Sequence: Synthetic peptide
KSLGVAPTR

SEQ ID NO: 15445 - protein, 11 aa, synthetic construct
  REGION 1..11: note = Description of Artificial Sequence: Synthetic peptide
QVYQEPYKNLK

SEQ ID NO: 15446 - protein, 9 aa, synthetic construct
  REGION 1..9: note = Description of Artificial Sequence: Synthetic peptide
GLDGLIYSK

SEQ ID NO: 15447 - protein, 11 aa, synthetic construct
  REGION 1..11: note = Description of Artificial Sequence: Synthetic peptide
TVLEGINLPGK

SEQ ID NO: 15448 - protein, 9 aa, synthetic construct
  REGION 1..9: note = Description of Artificial Sequence: Synthetic peptide
QIYPGIKVR

SEQ ID NO: 15449 - protein, 11 aa, synthetic construct
  REGION 1..11: note = Description of Artificial Sequence: Synthetic peptide
STYWGLNTGEK

SEQ ID NO: 15450 - protein, 9 aa, synthetic construct
  REGION 1..9: note = Description of Artificial Sequence: Synthetic peptide
GLDGLVYSK

SEQ ID NO: 15451 - protein, 10 aa, synthetic construct
  REGION 1..10: note = Description of Artificial Sequence: Synthetic peptide
ATEGIIIWGK

SEQ ID NO: 15452 - protein, 9 aa, synthetic construct
  REGION 1..9: note = Description of Artificial Sequence: Synthetic peptide
IYNNKNITF

SEQ ID NO: 15453 - protein, 9 aa, synthetic construct
  REGION 1..9: note = Description of Artificial Sequence: Synthetic peptide
NYTQQIYTL

SEQ ID NO: 15454 - protein, 9 aa, synthetic construct
  REGION 1..9: note = Description of Artificial Sequence: Synthetic peptide
YFINKSIEF

SEQ ID NO: 15455 - protein, 9 aa, synthetic construct
  REGION 1..9: note = Description of Artificial Sequence: Synthetic peptide
NYTQQIYSL

SEQ ID NO: 15456 - protein, 9 aa, synthetic construct
  REGION 1..9: note = Description of Artificial Sequence: Synthetic peptide
NYTQHIYSL

SEQ ID NO: 15457 - protein, 9 aa, synthetic construct
  REGION 1..9: note = Description of Artificial Sequence: Synthetic peptide
NYTYHIYSL

SEQ ID NO: 15458 - protein, 9 aa, synthetic construct
  REGION 1..9: note = Description of Artificial Sequence: Synthetic peptide
RWADITQEF

SEQ ID NO: 15459 - protein, 9 aa, synthetic construct
  REGION 1..9: note = Description of Artificial Sequence: Synthetic peptide
VYQEPYKNL

SEQ ID NO: 15460 - protein, 9 aa, synthetic construct
  REGION 1..9: note = Description of Artificial Sequence: Synthetic peptide
RYLKDQQLL

SEQ ID NO: 15461 - protein, 10 aa, synthetic construct
  REGION 1..10: note = Description of Artificial Sequence: Synthetic peptide
EYFINKSIEF

SEQ ID NO: 15462 - protein, 9 aa, synthetic construct
  REGION 1..9: note = Description of Artificial Sequence: Synthetic peptide
AFLNIPTRI

SEQ ID NO: 15463 - protein, 9 aa, synthetic construct
  REGION 1..9: note = Description of Artificial Sequence: Synthetic peptide
RYLRDQQLL

SEQ ID NO: 15464 - protein, 9 aa, synthetic construct
  REGION 1..9: note = Description of Artificial Sequence: Synthetic peptide
VWTIVLVQY

SEQ ID NO: 15465 - protein, 9 aa, synthetic construct
  REGION 1..9: note = Description of Artificial Sequence: Synthetic peptide
IYQEPYKNL

SEQ ID NO: 15466 - protein, 9 aa, synthetic construct
  REGION 1..9: note = Description of Artificial Sequence: Synthetic peptide
IYNNKNITF

SEQ ID NO: 15467 - protein, 9 aa, synthetic construct
  REGION 1..9: note = Description of Artificial Sequence: Synthetic peptide
NYTQQIYTL

SEQ ID NO: 15468 - protein, 9 aa, synthetic construct
  REGION 1..9: note = Description of Artificial Sequence: Synthetic peptide
YFINKSIEF

SEQ ID NO: 15469 - protein, 9 aa, synthetic construct
  REGION 1..9: note = Description of Artificial Sequence: Synthetic peptide
NYTQQIYSL

SEQ ID NO: 15470 - protein, 9 aa, synthetic construct
  REGION 1..9: note = Description of Artificial Sequence: Synthetic peptide
RWADITQEF

SEQ ID NO: 15471 - protein, 9 aa, synthetic construct
  REGION 1..9: note = Description of Artificial Sequence: Synthetic peptide
NYTQHIYSL

SEQ ID NO: 15472 - protein, 9 aa, synthetic construct
  REGION 1..9: note = Description of Artificial Sequence: Synthetic peptide
VYQEPYKNL

SEQ ID NO: 15473 - protein, 9 aa, synthetic construct
  REGION 1..9: note = Description of Artificial Sequence: Synthetic peptide
RYLKDQQLL

SEQ ID NO: 15474 - protein, 9 aa, synthetic construct
  REGION 1..9: note = Description of Artificial Sequence: Synthetic peptide
YYDPSKELI

SEQ ID NO: 15475 - protein, 10 aa, synthetic construct
  REGION 1..10: note = Description of Artificial Sequence: Synthetic peptide
EYFINKSIEF

SEQ ID NO: 15476 - protein, 9 aa, synthetic construct
  REGION 1..9: note = Description of Artificial Sequence: Synthetic peptide
IYQEPYKNL

SEQ ID NO: 15477 - protein, 9 aa, synthetic construct
  REGION 1..9: note = Description of Artificial Sequence: Synthetic peptide
IYNTYGDTW

SEQ ID NO: 15478 - protein, 9 aa, synthetic construct
  REGION 1..9: note = Description of Artificial Sequence: Synthetic peptide
RYLRDQQLL

SEQ ID NO: 15479 - protein, 9 aa, synthetic construct
  REGION 1..9: note = Description of Artificial Sequence: Synthetic peptide
YYDPSKDLI

SEQ ID NO: 15480 - protein, 10 aa, synthetic construct
  REGION 1..10: note = Description of Artificial Sequence: Synthetic peptide
DTIAIAVANW

SEQ ID NO: 15481 - protein, 10 aa, synthetic construct
  REGION 1..10: note = Description of Artificial Sequence: Synthetic peptide
EVQKQGLGQW

SEQ ID NO: 15482 - protein, 10 aa, synthetic construct
  REGION 1..10: note = Description of Artificial Sequence: Synthetic peptide
DTVAIAVANW

SEQ ID NO: 15483 - protein, 10 aa, synthetic construct
  REGION 1..10: note = Description of Artificial Sequence: Synthetic peptide
ETINDEAAEW

SEQ ID NO: 15484 - protein, 10 aa, synthetic construct
  REGION 1..10: note = Description of Artificial Sequence: Synthetic peptide
DTINEEAAEW

SEQ ID NO: 15485 - protein, 10 aa, synthetic construct
  REGION 1..10: note = Description of Artificial Sequence: Synthetic peptide
DTINDEAAEW

SEQ ID NO: 15486 - protein, 10 aa, synthetic construct
  REGION 1..10: note = Description of Artificial Sequence: Synthetic peptide
EVQKQGPGQW

SEQ ID NO: 15487 - protein, 9 aa, synthetic construct
  REGION 1..9: note = Description of Artificial Sequence: Synthetic peptide
EVIPMFSAL

SEQ ID NO: 15488 - protein, 9 aa, synthetic construct
  REGION 1..9: note = Description of Artificial Sequence: Synthetic peptide
EVIPMFTAL

SEQ ID NO: 15489 - protein, 10 aa, synthetic construct
  REGION 1..10: note = Description of Artificial Sequence: Synthetic peptide
EVQKQEQGQW

SEQ ID NO: 15490 - protein, 10 aa, synthetic construct
  REGION 1..10: note = Description of Artificial Sequence: Synthetic peptide
EQATQEVKSW

SEQ ID NO: 15491 - protein, 9 aa, synthetic construct
  REGION 1..9: note = Description of Artificial Sequence: Synthetic peptide
DVQAKLQEY

SEQ ID NO: 15492 - protein, 9 aa, synthetic construct
  REGION 1..9: note = Description of Artificial Sequence: Synthetic peptide
NVTENFNVW

SEQ ID NO: 15493 - protein, 9 aa, synthetic construct
  REGION 1..9: note = Description of Artificial Sequence: Synthetic peptide
TVAIAVANW

SEQ ID NO: 15494 - protein, 9 aa, synthetic construct
  REGION 1..9: note = Description of Artificial Sequence: Synthetic peptide
STVGSTAGY

SEQ ID NO: 15495 - protein, 9 aa, synthetic construct
  REGION 1..9: note = Description of Artificial Sequence: Synthetic peptide
DIAGATSTL

SEQ ID NO: 15496 - protein, 10 aa, synthetic construct
  REGION 1..10: note = Description of Artificial Sequence: Synthetic peptide
EQATQEVKGW

SEQ ID NO: 15497 - protein, 9 aa, synthetic construct
  REGION 1..9: note = Description of Artificial Sequence: Synthetic peptide
ENNGTNSTW

SEQ ID NO: 15498 - protein, 9 aa, synthetic construct
  REGION 1..9: note = Description of Artificial Sequence: Synthetic peptide
DIAGTTSTL

SEQ ID NO: 15499 - protein, 10 aa, synthetic construct
  REGION 1..10: note = Description of Artificial Sequence: Synthetic peptide
EVQKQGPDQW

SEQ ID NO: 15500 - protein, 9 aa, synthetic construct
  REGION 1..9: note = Description of Artificial Sequence: Synthetic peptide
EVIGDIRKA

SEQ ID NO: 15501 - protein, 9 aa, synthetic construct
  REGION 1..9: note = Description of Artificial Sequence: Synthetic peptide
NVTENFNMW

SEQ ID NO: 15502 - protein, 10 aa, synthetic construct
  REGION 1..10: note = Description of Artificial Sequence: Synthetic peptide
SVAIGPGQAF

SEQ ID NO: 15503 - protein, 11 aa, synthetic construct
  REGION 1..11: note = Description of Artificial Sequence: Synthetic peptide
SVLSGGKLDSW

SEQ ID NO: 15504 - protein, 9 aa, synthetic construct
  REGION 1..9: note = Description of Artificial Sequence: Synthetic peptide
DAKLVVSTY

SEQ ID NO: 15505 - protein, 10 aa, synthetic construct
  REGION 1..10: note = Description of Artificial Sequence: Synthetic peptide
EVNIVTDSQY

SEQ ID NO: 15506 - protein, 9 aa, synthetic construct
  REGION 1..9: note = Description of Artificial Sequence: Synthetic peptide
STVGSTAGY

SEQ ID NO: 15507 - protein, 9 aa, synthetic construct
  REGION 1..9: note = Description of Artificial Sequence: Synthetic peptide
EVIGDIRKA

SEQ ID NO: 15508 - protein, 9 aa, synthetic construct
  REGION 1..9: note = Description of Artificial Sequence: Synthetic peptide
DVQAKLQEY

SEQ ID NO: 15509 - protein, 10 aa, synthetic construct
  REGION 1..10: note = Description of Artificial Sequence: Synthetic peptide
EVNIVTDSQY

SEQ ID NO: 15510 - protein, 9 aa, synthetic construct
  REGION 1..9: note = Description of Artificial Sequence: Synthetic peptide
EVIPMFSAL

SEQ ID NO: 15511 - protein, 9 aa, synthetic construct
  REGION 1..9: note = Description of Artificial Sequence: Synthetic peptide
EVIPMFTAL

SEQ ID NO: 15512 - protein, 9 aa, synthetic construct
  REGION 1..9: note = Description of Artificial Sequence: Synthetic peptide
ETKLGKAGY

SEQ ID NO: 15513 - protein, 9 aa, synthetic construct
  REGION 1..9: note = Description of Artificial Sequence: Synthetic peptide
ETPGIRYQY

SEQ ID NO: 15514 - protein, 9 aa, synthetic construct
  REGION 1..9: note = Description of Artificial Sequence: Synthetic peptide
EIVSPRCEY

SEQ ID NO: 15515 - protein, 9 aa, synthetic construct
  REGION 1..9: note = Description of Artificial Sequence: Synthetic peptide
STRNITEEY

SEQ ID NO: 15516 - protein, 8 aa, synthetic construct
  REGION 1..8: note = Description of Artificial Sequence: Synthetic peptide
DVVPINEM

SEQ ID NO: 15517 - protein, 9 aa, synthetic construct
  REGION 1..9: note = Description of Artificial Sequence: Synthetic peptide
DIIGNIRQA

SEQ ID NO: 15518 - protein, 10 aa, synthetic construct
  REGION 1..10: note = Description of Artificial Sequence: Synthetic peptide
ETFRPAGGNM

SEQ ID NO: 15519 - protein, 10 aa, synthetic construct
  REGION 1..10: note = Description of Artificial Sequence: Synthetic peptide
ETAEGCVQIM

SEQ ID NO: 15520 - protein, 10 aa, synthetic construct
  REGION 1..10: note = Description of Artificial Sequence: Synthetic peptide
EVIPAETGQE

SEQ ID NO: 15521 - protein, 10 aa, synthetic construct
  REGION 1..10: note = Description of Artificial Sequence: Synthetic peptide
DTIAIAVANW

SEQ ID NO: 15522 - protein, 10 aa, synthetic construct
  REGION 1..10: note = Description of Artificial Sequence: Synthetic peptide
EVQKQGLGQW

SEQ ID NO: 15523 - protein, 9 aa, synthetic construct
  REGION 1..9: note = Description of Artificial Sequence: Synthetic peptide
DIIGDIRQA

SEQ ID NO: 15524 - protein, 10 aa, synthetic construct
  REGION 1..10: note = Description of Artificial Sequence: Synthetic peptide
NTADHLIHLY

SEQ ID NO: 15525 - protein, 10 aa, synthetic construct
  REGION 1..10: note = Description of Artificial Sequence: Synthetic peptide
ETFRPGGGDM

SEQ ID NO: 15526 - protein, 10 aa, synthetic construct
  REGION 1..10: note = Description of Artificial Sequence: Synthetic peptide
EIFRPGGGDM

SEQ ID NO: 15527 - protein, 9 aa, synthetic construct
  REGION 1..9: note = Description of Artificial Sequence: Synthetic peptide
EVIPAETGQ

SEQ ID NO: 15528 - protein, 9 aa, synthetic construct
  REGION 1..9: note = Description of Artificial Sequence: Synthetic peptide
DSSNSTGNY

SEQ ID NO: 15529 - protein, 9 aa, synthetic construct
  REGION 1..9: note = Description of Artificial Sequence: Synthetic peptide
ETVEITCVR

SEQ ID NO: 15530 - protein, 9 aa, synthetic construct
  REGION 1..9: note = Description of Artificial Sequence: Synthetic peptide
ETVPITCAR

SEQ ID NO: 15531 - protein, 10 aa, synthetic construct
  REGION 1..10: note = Description of Artificial Sequence: Synthetic peptide
ETINDEAAEW

SEQ ID NO: 15532 - protein, 9 aa, synthetic construct
  REGION 1..9: note = Description of Artificial Sequence: Synthetic peptide
EPIPGVETY

SEQ ID NO: 15533 - protein, 9 aa, synthetic construct
  REGION 1..9: note = Description of Artificial Sequence: Synthetic peptide
EVVQRVGRA

SEQ ID NO: 15534 - protein, 9 aa, synthetic construct
  REGION 1..9: note = Description of Artificial Sequence: Synthetic peptide
EVIPMFSAL

SEQ ID NO: 15535 - protein, 9 aa, synthetic construct
  REGION 1..9: note = Description of Artificial Sequence: Synthetic peptide
EVIPMFTAL

SEQ ID NO: 15536 - protein, 9 aa, synthetic construct
  REGION 1..9: note = Description of Artificial Sequence: Synthetic peptide
DVQAKLQEY

SEQ ID NO: 15537 - protein, 10 aa, synthetic construct
  REGION 1..10: note = Description of Artificial Sequence: Synthetic peptide
EVQKQGLGQW

SEQ ID NO: 15538 - protein, 9 aa, synthetic construct
  REGION 1..9: note = Description of Artificial Sequence: Synthetic peptide
DIAGTTSNL

SEQ ID NO: 15539 - protein, 10 aa, synthetic construct
  REGION 1..10: note = Description of Artificial Sequence: Synthetic peptide
EVNIVTDSQY

SEQ ID NO: 15540 - protein, 9 aa, synthetic construct
  REGION 1..9: note = Description of Artificial Sequence: Synthetic peptide
EVIGDIRKA

SEQ ID NO: 15541 - protein, 8 aa, synthetic construct
  REGION 1..8: note = Description of Artificial Sequence: Synthetic peptide
DVVPINEM

SEQ ID NO: 15542 - protein, 9 aa, synthetic construct
  REGION 1..9: note = Description of Artificial Sequence: Synthetic peptide
DIAGTTSTL

SEQ ID NO: 15543 - protein, 9 aa, synthetic construct
  REGION 1..9: note = Description of Artificial Sequence: Synthetic peptide
DIAGATSTL

SEQ ID NO: 15544 - protein, 9 aa, synthetic construct
  REGION 1..9: note = Description of Artificial Sequence: Synthetic peptide
STVGSTAGY

SEQ ID NO: 15545 - protein, 10 aa, synthetic construct
  REGION 1..10: note = Description of Artificial Sequence: Synthetic peptide
EIFRPGGGDM

SEQ ID NO: 15546 - protein, 10 aa, synthetic construct
  REGION 1..10: note = Description of Artificial Sequence: Synthetic peptide
ETAEGCVQIM

SEQ ID NO: 15547 - protein, 9 aa, synthetic construct
  REGION 1..9: note = Description of Artificial Sequence: Synthetic peptide
DAKLVVSTY

SEQ ID NO: 15548 - protein, 10 aa, synthetic construct
  REGION 1..10: note = Description of Artificial Sequence: Synthetic peptide
ETFRPAGGNM

SEQ ID NO: 15549 - protein, 9 aa, synthetic construct
  REGION 1..9: note = Description of Artificial Sequence: Synthetic peptide
EPIPGVETY

SEQ ID NO: 15550 - protein, 9 aa, synthetic construct
  REGION 1..9: note = Description of Artificial Sequence: Synthetic peptide
ETITLPCKI

SEQ ID NO: 15551 - protein, 9 aa, synthetic construct
  REGION 1..9: note = Description of Artificial Sequence: Synthetic peptide
EVIGDIRKA

SEQ ID NO: 15552 - protein, 9 aa, synthetic construct
  REGION 1..9: note = Description of Artificial Sequence: Synthetic peptide
ETVPITCAR

SEQ ID NO: 15553 - protein, 9 aa, synthetic construct
  REGION 1..9: note = Description of Artificial Sequence: Synthetic peptide
EVIPMFTAL

SEQ ID NO: 15554 - protein, 9 aa, synthetic construct
  REGION 1..9: note = Description of Artificial Sequence: Synthetic peptide
EVIPMFSAL

SEQ ID NO: 15555 - protein, 9 aa, synthetic construct
  REGION 1..9: note = Description of Artificial Sequence: Synthetic peptide
STVGSTAGY

SEQ ID NO: 15556 - protein, 9 aa, synthetic construct
  REGION 1..9: note = Description of Artificial Sequence: Synthetic peptide
DIIGNIRQA

SEQ ID NO: 15557 - protein, 9 aa, synthetic construct
  REGION 1..9: note = Description of Artificial Sequence: Synthetic peptide
DIIGDIRQA

SEQ ID NO: 15558 - protein, 9 aa, synthetic construct
  REGION 1..9: note = Description of Artificial Sequence: Synthetic peptide
ETVEITCVR

SEQ ID NO: 15559 - protein, 9 aa, synthetic construct
  REGION 1..9: note = Description of Artificial Sequence: Synthetic peptide
DIAGTTSNL

SEQ ID NO: 15560 - protein, 10 aa, synthetic construct
  REGION 1..10: note = Description of Artificial Sequence: Synthetic peptide
DTIAIAVANW

SEQ ID NO: 15561 - protein, 9 aa, synthetic construct
  REGION 1..9: note = Description of Artificial Sequence: Synthetic peptide
DIAGATSTL

SEQ ID NO: 15562 - protein, 9 aa, synthetic construct
  REGION 1..9: note = Description of Artificial Sequence: Synthetic peptide
MVHQAISPR

SEQ ID NO: 15563 - protein, 9 aa, synthetic construct
  REGION 1..9: note = Description of Artificial Sequence: Synthetic peptide
DVQAKLQEY

SEQ ID NO: 15564 - protein, 9 aa, synthetic construct
  REGION 1..9: note = Description of Artificial Sequence: Synthetic peptide
DIAGTTSTL

SEQ ID NO: 15565 - protein, 11 aa, synthetic construct
  REGION 1..11: note = Description of Artificial Sequence: Synthetic peptide
ETYYVDGAANR

SEQ ID NO: 15566 - protein, 10 aa, synthetic construct
  REGION 1..10: note = Description of Artificial Sequence: Synthetic peptide
EVQKQGLGQW

SEQ ID NO: 15567 - protein, 10 aa, synthetic construct
  REGION 1..10: note = Description of Artificial Sequence: Synthetic peptide
DVVPISNGNK

SEQ ID NO: 15568 - protein, 9 aa, synthetic construct
  REGION 1..9: note = Description of Artificial Sequence: Synthetic peptide
NITGLILTR

SEQ ID NO: 15569 - protein, 9 aa, synthetic construct
  REGION 1..9: note = Description of Artificial Sequence: Synthetic peptide
EIHPLASLK

SEQ ID NO: 15570 - protein, 9 aa, synthetic construct
  REGION 1..9: note = Description of Artificial Sequence: Synthetic peptide
LFNTVATLY

SEQ ID NO: 15571 - protein, 9 aa, synthetic construct
  REGION 1..9: note = Description of Artificial Sequence: Synthetic peptide
TVLDVGDAY

SEQ ID NO: 15572 - protein, 9 aa, synthetic construct
  REGION 1..9: note = Description of Artificial Sequence: Synthetic peptide
STVGSTAGY

SEQ ID NO: 15573 - protein, 9 aa, synthetic construct
  REGION 1..9: note = Description of Artificial Sequence: Synthetic peptide
NSNPVSQNY

SEQ ID NO: 15574 - protein, 10 aa, synthetic construct
  REGION 1..10: note = Description of Artificial Sequence: Synthetic peptide
GNSSQVSQNY

SEQ ID NO: 15575 - protein, 9 aa, synthetic construct
  REGION 1..9: note = Description of Artificial Sequence: Synthetic peptide
SFDPIPIHY

SEQ ID NO: 15576 - protein, 9 aa, synthetic construct
  REGION 1..9: note = Description of Artificial Sequence: Synthetic peptide
STRNITEEY

SEQ ID NO: 15577 - protein, 10 aa, synthetic construct
  REGION 1..10: note = Description of Artificial Sequence: Synthetic peptide
VTFEPIPIHY

SEQ ID NO: 15578 - protein, 9 aa, synthetic construct
  REGION 1..9: note = Description of Artificial Sequence: Synthetic peptide
NSSQVSQNY

SEQ ID NO: 15579 - protein, 10 aa, synthetic construct
  REGION 1..10: note = Description of Artificial Sequence: Synthetic peptide
GNSNPVSQNY

SEQ ID NO: 15580 - protein, 10 aa, synthetic construct
  REGION 1..10: note = Description of Artificial Sequence: Synthetic peptide
NSSSQVSQNY

SEQ ID NO: 15581 - protein, 9 aa, synthetic construct
  REGION 1..9: note = Description of Artificial Sequence: Synthetic peptide
NFDPIPIHY

SEQ ID NO: 15582 - protein, 9 aa, synthetic construct
  REGION 1..9: note = Description of Artificial Sequence: Synthetic peptide
SSSQVSQNY

SEQ ID NO: 15583 - protein, 9 aa, synthetic construct
  REGION 1..9: note = Description of Artificial Sequence: Synthetic peptide
HLGPGQALY

SEQ ID NO: 15584 - protein, 9 aa, synthetic construct
  REGION 1..9: note = Description of Artificial Sequence: Synthetic peptide
TFEPIPIHY

SEQ ID NO: 15585 - protein, 10 aa, synthetic construct
  REGION 1..10: note = Description of Artificial Sequence: Synthetic peptide
VSFDPIPIHY

SEQ ID NO: 15586 - protein, 10 aa, synthetic construct
  REGION 1..10: note = Description of Artificial Sequence: Synthetic peptide
FLNKGLGISY

SEQ ID NO: 15587 - protein, 10 aa, synthetic construct
  REGION 1..10: note = Description of Artificial Sequence: Synthetic peptide
VNFDPIPIHY

SEQ ID NO: 15588 - protein, 9 aa, synthetic construct
  REGION 1..9: note = Description of Artificial Sequence: Synthetic peptide
VWSIVFIEY

SEQ ID NO: 15589 - protein, 9 aa, synthetic construct
  REGION 1..9: note = Description of Artificial Sequence: Synthetic peptide
LFNTVATLY

SEQ ID NO: 15590 - protein, 9 aa, synthetic construct
  REGION 1..9: note = Description of Artificial Sequence: Synthetic peptide
GFFPDWQNY

SEQ ID NO: 15591 - protein, 9 aa, synthetic construct
  REGION 1..9: note = Description of Artificial Sequence: Synthetic peptide
VWSIVFIEY

SEQ ID NO: 15592 - protein, 9 aa, synthetic construct
  REGION 1..9: note = Description of Artificial Sequence: Synthetic peptide
STVGSTAGY

SEQ ID NO: 15593 - protein, 10 aa, synthetic construct
  REGION 1..10: note = Description of Artificial Sequence: Synthetic peptide
GNSSQVSQNY

SEQ ID NO: 15594 - protein, 9 aa, synthetic construct
  REGION 1..9: note = Description of Artificial Sequence: Synthetic peptide
SFDPIPIHY

SEQ ID NO: 15595 - protein, 10 aa, synthetic construct
  REGION 1..10: note = Description of Artificial Sequence: Synthetic peptide
VTFEPIPIHY

SEQ ID NO: 15596 - protein, 9 aa, synthetic construct
  REGION 1..9: note = Description of Artificial Sequence: Synthetic peptide
HLGPGQALY

SEQ ID NO: 15597 - protein, 9 aa, synthetic construct
  REGION 1..9: note = Description of Artificial Sequence: Synthetic peptide
NFDPIPIHY

SEQ ID NO: 15598 - protein, 10 aa, synthetic construct
  REGION 1..10: note = Description of Artificial Sequence: Synthetic peptide
GNSNPVSQNY

SEQ ID NO: 15599 - protein, 9 aa, synthetic construct
  REGION 1..9: note = Description of Artificial Sequence: Synthetic peptide
NSNPVSQNY

SEQ ID NO: 15600 - protein, 9 aa, synthetic construct
  REGION 1..9: note = Description of Artificial Sequence: Synthetic peptide
TFEPIPIHY

SEQ ID NO: 15601 - protein, 9 aa, synthetic construct
  REGION 1..9: note = Description of Artificial Sequence: Synthetic peptide
VWTIVFIEY

SEQ ID NO: 15602 - protein, 10 aa, synthetic construct
  REGION 1..10: note = Description of Artificial Sequence: Synthetic peptide
VSFDPIPIHY

SEQ ID NO: 15603 - protein, 9 aa, synthetic construct
  REGION 1..9: note = Description of Artificial Sequence: Synthetic peptide
YFINKSIEF

SEQ ID NO: 15604 - protein, 9 aa, synthetic construct
  REGION 1..9: note = Description of Artificial Sequence: Synthetic peptide
NNLWVTVYY

SEQ ID NO: 15605 - protein, 9 aa, synthetic construct
  REGION 1..9: note = Description of Artificial Sequence: Synthetic peptide
NSSQVSQNY

SEQ ID NO: 15606 - protein, 10 aa, synthetic construct
  REGION 1..10: note = Description of Artificial Sequence: Synthetic peptide
VNFDPIPIHY

SEQ ID NO: 15607 - protein, 10 aa, synthetic construct
  REGION 1..10: note = Description of Artificial Sequence: Synthetic peptide
VAIGPGQAFY

SEQ ID NO: 15608 - protein, 9 aa, synthetic construct
  REGION 1..9: note = Description of Artificial Sequence: Synthetic peptide
STRNITEEY

SEQ ID NO: 15609 - protein, 9 aa, synthetic construct
  REGION 1..9: note = Description of Artificial Sequence: Synthetic peptide
LNKGLGISY

SEQ ID NO: 15610 - protein, 9 aa, synthetic construct
  REGION 1..9: note = Description of Artificial Sequence: Synthetic peptide
TVLDVGDAY

SEQ ID NO: 15611 - protein, 9 aa, synthetic construct
  REGION 1..9: note = Description of Artificial Sequence: Synthetic peptide
SSSQVSQNY

SEQ ID NO: 15612 - protein, 9 aa, synthetic construct
  REGION 1..9: note = Description of Artificial Sequence: Synthetic peptide
RFGPGQAFY

SEQ ID NO: 15613 - protein, 9 aa, synthetic construct
  REGION 1..9: note = Description of Artificial Sequence: Synthetic peptide
KTRPPLPSV

SEQ ID NO: 15614 - protein, 9 aa, synthetic construct
  REGION 1..9: note = Description of Artificial Sequence: Synthetic peptide
SENNDTITL

SEQ ID NO: 15615 - protein, 9 aa, synthetic construct
  REGION 1..9: note = Description of Artificial Sequence: Synthetic peptide
KAKPPLPSV

SEQ ID NO: 15616 - protein, 9 aa, synthetic construct
  REGION 1..9: note = Description of Artificial Sequence: Synthetic peptide
SESAIRNAI

SEQ ID NO: 15617 - protein, 9 aa, synthetic construct
  REGION 1..9: note = Description of Artificial Sequence: Synthetic peptide
KELYPLTSL

SEQ ID NO: 15618 - protein, 9 aa, synthetic construct
  REGION 1..9: note = Description of Artificial Sequence: Synthetic peptide
NSNPVSQNY

SEQ ID NO: 15619 - protein, 9 aa, synthetic construct
  REGION 1..9: note = Description of Artificial Sequence: Synthetic peptide
STVGSTAGY

SEQ ID NO: 15620 - protein, 9 aa, synthetic construct
  REGION 1..9: note = Description of Artificial Sequence: Synthetic peptide
STRNITEEY

SEQ ID NO: 15621 - protein, 9 aa, synthetic construct
  REGION 1..9: note = Description of Artificial Sequence: Synthetic peptide
SSSQVSQNY

SEQ ID NO: 15622 - protein, 9 aa, synthetic construct
  REGION 1..9: note = Description of Artificial Sequence: Synthetic peptide
ISNGNKTSY

SEQ ID NO: 15623 - protein, 11 aa, synthetic construct
  REGION 1..11: note = Description of Artificial Sequence: Synthetic peptide
STSTVGSTAGY

SEQ ID NO: 15624 - protein, 10 aa, synthetic construct
  REGION 1..10: note = Description of Artificial Sequence: Synthetic peptide
VAIGPGQAFY

SEQ ID NO: 15625 - protein, 9 aa, synthetic construct
  REGION 1..9: note = Description of Artificial Sequence: Synthetic peptide
KQGPGQWTY

SEQ ID NO: 15626 - protein, 10 aa, synthetic construct
  REGION 1..10: note = Description of Artificial Sequence: Synthetic peptide
RVIEVAQRAY

SEQ ID NO: 15627 - protein, 9 aa, synthetic construct
  REGION 1..9: note = Description of Artificial Sequence: Synthetic peptide
NSSQVSQNY

SEQ ID NO: 15628 - protein, 11 aa, synthetic construct
  REGION 1..11: note = Description of Artificial Sequence: Synthetic peptide
TQNPEIVIYQY

SEQ ID NO: 15629 - protein, 9 aa, synthetic construct
  REGION 1..9: note = Description of Artificial Sequence: Synthetic peptide
AIGPGQAFY

SEQ ID NO: 15630 - protein, 9 aa, synthetic construct
  REGION 1..9: note = Description of Artificial Sequence: Synthetic peptide
KQGPDQWTY

SEQ ID NO: 15631 - protein, 9 aa, synthetic construct
  REGION 1..9: note = Description of Artificial Sequence: Synthetic peptide
TVLDVGDAY

SEQ ID NO: 15632 - protein, 9 aa, synthetic construct
  REGION 1..9: note = Description of Artificial Sequence: Synthetic peptide
HLGPGQALY

SEQ ID NO: 15633 - protein, 9 aa, synthetic construct
  REGION 1..9: note = Description of Artificial Sequence: Synthetic peptide
KAQEEHERY

SEQ ID NO: 15634 - protein, 10 aa, synthetic construct
  REGION 1..10: note = Description of Artificial Sequence: Synthetic peptide
ILKEPVHGVY

SEQ ID NO: 15635 - protein, 10 aa, synthetic construct
  REGION 1..10: note = Description of Artificial Sequence: Synthetic peptide
NSSSQVSQNY

SEQ ID NO: 15636 - protein, 11 aa, synthetic construct
  REGION 1..11: note = Description of Artificial Sequence: Synthetic peptide
SSNSTGNYSNY

SEQ ID NO: 15637 - protein, 9 aa, synthetic construct
  REGION 1..9: note = Description of Artificial Sequence: Synthetic peptide
STVGSTAGY

SEQ ID NO: 15638 - protein, 9 aa, synthetic construct
  REGION 1..9: note = Description of Artificial Sequence: Synthetic peptide
STRNITEEY

SEQ ID NO: 15639 - protein, 9 aa, synthetic construct
  REGION 1..9: note = Description of Artificial Sequence: Synthetic peptide
KQGPGQWTY

SEQ ID NO: 15640 - protein, 10 aa, synthetic construct
  REGION 1..10: note = Description of Artificial Sequence: Synthetic peptide
RVIEVAQRAY

SEQ ID NO: 15641 - protein, 9 aa, synthetic construct
  REGION 1..9: note = Description of Artificial Sequence: Synthetic peptide
KQGPDQWTY

SEQ ID NO: 15642 - protein, 9 aa, synthetic construct
  REGION 1..9: note = Description of Artificial Sequence: Synthetic peptide
NSNPVSQNY

SEQ ID NO: 15643 - protein, 9 aa, synthetic construct
  REGION 1..9: note = Description of Artificial Sequence: Synthetic peptide
SSSQVSQNY

SEQ ID NO: 15644 - protein, 9 aa, synthetic construct
  REGION 1..9: note = Description of Artificial Sequence: Synthetic peptide
ISNGNKTSY

SEQ ID NO: 15645 - protein, 9 aa, synthetic construct
  REGION 1..9: note = Description of Artificial Sequence: Synthetic peptide
AIGPGQAFY

SEQ ID NO: 15646 - protein, 10 aa, synthetic construct
  REGION 1..10: note = Description of Artificial Sequence: Synthetic peptide
FLNKGLGISY

SEQ ID NO: 15647 - protein, 10 aa, synthetic construct
  REGION 1..10: note = Description of Artificial Sequence: Synthetic peptide
VAIGPGQAFY

SEQ ID NO: 15648 - protein, 9 aa, synthetic construct
  REGION 1..9: note = Description of Artificial Sequence: Synthetic peptide
HLGPGQALY

SEQ ID NO: 15649 - protein, 11 aa, synthetic construct
  REGION 1..11: note = Description of Artificial Sequence: Synthetic peptide
STSTVGSTAGY

SEQ ID NO: 15650 - protein, 9 aa, synthetic construct
  REGION 1..9: note = Description of Artificial Sequence: Synthetic peptide
AMYSPPIAR

SEQ ID NO: 15651 - protein, 11 aa, synthetic construct
  REGION 1..11: note = Description of Artificial Sequence: Synthetic peptide
RVIEVAQRAYR

SEQ ID NO: 15652 - protein, 10 aa, synthetic construct
  REGION 1..10: note = Description of Artificial Sequence: Synthetic peptide
KTRPPLPSVR

SEQ ID NO: 15653 - protein, 11 aa, synthetic construct
  REGION 1..11: note = Description of Artificial Sequence: Synthetic peptide
KGRPGNFLQNR

SEQ ID NO: 15654 - protein, 11 aa, synthetic construct
  REGION 1..11: note = Description of Artificial Sequence: Synthetic peptide
RVIEVAQRAGR

SEQ ID NO: 15655 - protein, 9 aa, synthetic construct
  REGION 1..9: note = Description of Artificial Sequence: Synthetic peptide
KSLGVAPTR

SEQ ID NO: 15656 - protein, 11 aa, synthetic construct
  REGION 1..11: note = Description of Artificial Sequence: Synthetic peptide
KSLGVAPTRAR

SEQ ID NO: 15657 - protein, 9 aa, synthetic construct
  REGION 1..9: note = Description of Artificial Sequence: Synthetic peptide
QIYPGIKVR

SEQ ID NO: 15658 - protein, 9 aa, synthetic construct
  REGION 1..9: note = Description of Artificial Sequence: Synthetic peptide
ATLYCVHQR

SEQ ID NO: 15659 - protein, 11 aa, synthetic construct
  REGION 1..11: note = Description of Artificial Sequence: Synthetic peptide
KSNITGLILTR

SEQ ID NO: 15660 - protein, 11 aa, synthetic construct
  REGION 1..11: note = Description of Artificial Sequence: Synthetic peptide
RAIEVVQRVGR

SEQ ID NO: 15661 - protein, 11 aa, synthetic construct
  REGION 1..11: note = Description of Artificial Sequence: Synthetic peptide
RLRDLVLIAAR

SEQ ID NO: 15662 - protein, 9 aa, synthetic construct
  REGION 1..9: note = Description of Artificial Sequence: Synthetic peptide
QSRVLAIER

SEQ ID NO: 15663 - protein, 9 aa, synthetic construct
  REGION 1..9: note = Description of Artificial Sequence: Synthetic peptide
KVLVAPTRR

SEQ ID NO: 15664 - protein, 11 aa, synthetic construct
  REGION 1..11: note = Description of Artificial Sequence: Synthetic peptide
TVNDIQKLVGK

SEQ ID NO: 15665 - protein, 9 aa, synthetic construct
  REGION 1..9: note = Description of Artificial Sequence: Synthetic peptide
KGLGISYGR

SEQ ID NO: 15666 - protein, 9 aa, synthetic construct
  REGION 1..9: note = Description of Artificial Sequence: Synthetic peptide
AIRNAILGR

SEQ ID NO: 15667 - protein, 9 aa, synthetic construct
  REGION 1..9: note = Description of Artificial Sequence: Synthetic peptide
KSLGIAPTR

SEQ ID NO: 15668 - protein, 9 aa, synthetic construct
  REGION 1..9: note = Description of Artificial Sequence: Synthetic peptide
KLQEYFINK

SEQ ID NO: 15669 - protein, 9 aa, synthetic construct
  REGION 1..9: note = Description of Artificial Sequence: Synthetic peptide
ILNIPVRIR

SEQ ID NO: 15670 - protein, 10 aa, synthetic construct
  REGION 1..10: note = Description of Artificial Sequence: Synthetic peptide
KAKPPLPSVR

SEQ ID NO: 15671 - protein, 9 aa, synthetic construct
  REGION 1..9: note = Description of Artificial Sequence: Synthetic peptide
RQIHSISER

SEQ ID NO: 15672 - protein, 9 aa, synthetic construct
  REGION 1..9: note = Description of Artificial Sequence: Synthetic peptide
RSVEINCTR

SEQ ID NO: 15673 - protein, 9 aa, synthetic construct
  REGION 1..9: note = Description of Artificial Sequence: Synthetic peptide
RLIDRIRER

SEQ ID NO: 15674 - protein, 11 aa, synthetic construct
  REGION 1..11: note = Description of Artificial Sequence: Synthetic peptide
KSLGIAPTRAR

SEQ ID NO: 15675 - protein, 9 aa, synthetic construct
  REGION 1..9: note = Description of Artificial Sequence: Synthetic peptide
HSRIGITPR

SEQ ID NO: 15676 - protein, 9 aa, synthetic construct
  REGION 1..9: note = Description of Artificial Sequence: Synthetic peptide
CVRPNNNTR

SEQ ID NO: 15677 - protein, 9 aa, synthetic construct
  REGION 1..9: note = Description of Artificial Sequence: Synthetic peptide
TVWGIKQLR

SEQ ID NO: 15678 - protein, 9 aa, synthetic construct
  REGION 1..9: note = Description of Artificial Sequence: Synthetic peptide
KVIIVHLNR

SEQ ID NO: 15679 - protein, 8 aa, synthetic construct
  REGION 1..8: note = Description of Artificial Sequence: Synthetic peptide
AVLSIVNR

SEQ ID NO: 15680 - protein, 11 aa, synthetic construct
  REGION 1..11: note = Description of Artificial Sequence: Synthetic peptide
RSNITGLILTR

SEQ ID NO: 15681 - protein, 10 aa, synthetic construct
  REGION 1..10: note = Description of Artificial Sequence: Synthetic peptide
AGRAVLNIPR

SEQ ID NO: 15682 - protein, 8 aa, synthetic construct
  REGION 1..8: note = Description of Artificial Sequence: Synthetic peptide
RVIEIVQR

SEQ ID NO: 15683 - protein, 11 aa, synthetic construct
  REGION 1..11: note = Description of Artificial Sequence: Synthetic peptide
KIKPLGVTPTR

SEQ ID NO: 15684 - protein, 9 aa, synthetic construct
  REGION 1..9: note = Description of Artificial Sequence: Synthetic peptide
IVNRVRQGY

SEQ ID NO: 15685 - protein, 9 aa, synthetic construct
  REGION 1..9: note = Description of Artificial Sequence: Synthetic peptide
ISNGNKTSY

SEQ ID NO: 15686 - protein, 9 aa, synthetic construct
  REGION 1..9: note = Description of Artificial Sequence: Synthetic peptide
STRNITEEY

SEQ ID NO: 15687 - protein, 9 aa, synthetic construct
  REGION 1..9: note = Description of Artificial Sequence: Synthetic peptide
KIFNKTITF

SEQ ID NO: 15688 - protein, 9 aa, synthetic construct
  REGION 1..9: note = Description of Artificial Sequence: Synthetic peptide
NSNPVSQNY

SEQ ID NO: 15689 - protein, 9 aa, synthetic construct
  REGION 1..9: note = Description of Artificial Sequence: Synthetic peptide
DAKAYSTER

SEQ ID NO: 15690 - protein, 11 aa, synthetic construct
  REGION 1..11: note = Description of Artificial Sequence: Synthetic peptide
ETYYVDGAANR

SEQ ID NO: 15691 - protein, 10 aa, synthetic construct
  REGION 1..10: note = Description of Artificial Sequence: Synthetic peptide
DNNEIKVVPR

SEQ ID NO: 15692 - protein, 11 aa, synthetic construct
  REGION 1..11: note = Description of Artificial Sequence: Synthetic peptide
EAREFSSEQAR

SEQ ID NO: 15693 - protein, 11 aa, synthetic construct
  REGION 1..11: note = Description of Artificial Sequence: Synthetic peptide
EAREFSPEQAR

SEQ ID NO: 15694 - protein, 11 aa, synthetic construct
  REGION 1..11: note = Description of Artificial Sequence: Synthetic peptide
DGRNSSANNYR

SEQ ID NO: 15695 - protein, 9 aa, synthetic construct
  REGION 1..9: note = Description of Artificial Sequence: Synthetic peptide
DRHGAITSR

SEQ ID NO: 15696 - protein, 11 aa, synthetic construct
  REGION 1..11: note = Description of Artificial Sequence: Synthetic peptide
DVKQLTEVVQK

SEQ ID NO: 15697 - protein, 10 aa, synthetic construct
  REGION 1..10: note = Description of Artificial Sequence: Synthetic peptide
DNNSTSEIFR

SEQ ID NO: 15698 - protein, 11 aa, synthetic construct
  REGION 1..11: note = Description of Artificial Sequence: Synthetic peptide
ENLAFQQGEAR

SEQ ID NO: 15699 - protein, 9 aa, synthetic construct
  REGION 1..9: note = Description of Artificial Sequence: Synthetic peptide
ETVEITCVR

SEQ ID NO: 15700 - protein, 9 aa, synthetic construct
  REGION 1..9: note = Description of Artificial Sequence: Synthetic peptide
DAWEKIRLR

SEQ ID NO: 15701 - protein, 9 aa, synthetic construct
  REGION 1..9: note = Description of Artificial Sequence: Synthetic peptide
QARVLAVER

SEQ ID NO: 15702 - protein, 9 aa, synthetic construct
  REGION 1..9: note = Description of Artificial Sequence: Synthetic peptide
AMYSPPIAR

SEQ ID NO: 15703 - protein, 11 aa, synthetic construct
  REGION 1..11: note = Description of Artificial Sequence: Synthetic peptide
EAREFPSEQAR

SEQ ID NO: 15704 - protein, 9 aa, synthetic construct
  REGION 1..9: note = Description of Artificial Sequence: Synthetic peptide
NITGLILTR

SEQ ID NO: 15705 - protein, 9 aa, synthetic construct
  REGION 1..9: note = Description of Artificial Sequence: Synthetic peptide
NNEIKVVPR

SEQ ID NO: 15706 - protein, 9 aa, synthetic construct
  REGION 1..9: note = Description of Artificial Sequence: Synthetic peptide
DVQAKLQEY

SEQ ID NO: 15707 - protein, 9 aa, synthetic construct
  REGION 1..9: note = Description of Artificial Sequence: Synthetic peptide
MVHQAISPR

SEQ ID NO: 15708 - protein, 11 aa, synthetic construct
  REGION 1..11: note = Description of Artificial Sequence: Synthetic peptide
ETYYVDGAANR

SEQ ID NO: 15709 - protein, 9 aa, synthetic construct
  REGION 1..9: note = Description of Artificial Sequence: Synthetic peptide
ETVPITCAR

SEQ ID NO: 15710 - protein, 9 aa, synthetic construct
  REGION 1..9: note = Description of Artificial Sequence: Synthetic peptide
DAKAYSTER

SEQ ID NO: 15711 - protein, 9 aa, synthetic construct
  REGION 1..9: note = Description of Artificial Sequence: Synthetic peptide
ETVEITCVR

SEQ ID NO: 15712 - protein, 11 aa, synthetic construct
  REGION 1..11: note = Description of Artificial Sequence: Synthetic peptide
EAREFSSEQAR

SEQ ID NO: 15713 - protein, 11 aa, synthetic construct
  REGION 1..11: note = Description of Artificial Sequence: Synthetic peptide
EAREFSPEQAR

SEQ ID NO: 15714 - protein, 9 aa, synthetic construct
  REGION 1..9: note = Description of Artificial Sequence: Synthetic peptide
YYVDGAANR

SEQ ID NO: 15715 - protein, 9 aa, synthetic construct
  REGION 1..9: note = Description of Artificial Sequence: Synthetic peptide
MVHQAISPR

SEQ ID NO: 15716 - protein, 9 aa, synthetic construct
  REGION 1..9: note = Description of Artificial Sequence: Synthetic peptide
AMYSPPIAR

SEQ ID NO: 15717 - protein, 9 aa, synthetic construct
  REGION 1..9: note = Description of Artificial Sequence: Synthetic peptide
QARVLAVER

SEQ ID NO: 15718 - protein, 10 aa, synthetic construct
  REGION 1..10: note = Description of Artificial Sequence: Synthetic peptide
TYYVDGAANR

SEQ ID NO: 15719 - protein, 11 aa, synthetic construct
  REGION 1..11: note = Description of Artificial Sequence: Synthetic peptide
TVNDIQKLVGK

SEQ ID NO: 15720 - protein, 10 aa, synthetic construct
  REGION 1..10: note = Description of Artificial Sequence: Synthetic peptide
DNNEIKVVPR

SEQ ID NO: 15721 - protein, 8 aa, synthetic construct
  REGION 1..8: note = Description of Artificial Sequence: Synthetic peptide
MYSPPIAR

SEQ ID NO: 15722 - protein, 11 aa, synthetic construct
  REGION 1..11: note = Description of Artificial Sequence: Synthetic peptide
EAREFPSEQAR

SEQ ID NO: 15723 - protein, 10 aa, synthetic construct
  REGION 1..10: note = Description of Artificial Sequence: Synthetic peptide
QAMYSPPIAR

SEQ ID NO: 15724 - protein, 9 aa, synthetic construct
  REGION 1..9: note = Description of Artificial Sequence: Synthetic peptide
QSRVLAIER

SEQ ID NO: 15725 - protein, 9 aa, synthetic construct
  REGION 1..9: note = Description of Artificial Sequence: Synthetic peptide
HSRIGITPR

SEQ ID NO: 15726 - protein, 9 aa, synthetic construct
  REGION 1..9: note = Description of Artificial Sequence: Synthetic peptide
MIHQAISPR

SEQ ID NO: 15727 - protein, 9 aa, synthetic construct
  REGION 1..9: note = Description of Artificial Sequence: Synthetic peptide
QIYPGIKVR

SEQ ID NO: 15728 - protein, 9 aa, synthetic construct
  REGION 1..9: note = Description of Artificial Sequence: Synthetic peptide
DRHGAITSR

SEQ ID NO: 15729 - protein, 8 aa, synthetic construct
  REGION 1..8: note = Description of Artificial Sequence: Synthetic peptide
SFKITTER

SEQ ID NO: 15730 - protein, 9 aa, synthetic construct
  REGION 1..9: note = Description of Artificial Sequence: Synthetic peptide
NNEIKVVPR

SEQ ID NO: 15731 - protein, 10 aa, synthetic construct
  REGION 1..10: note = Description of Artificial Sequence: Synthetic peptide
ELKKIIGQVR

SEQ ID NO: 15732 - protein, 10 aa, synthetic construct
  REGION 1..10: note = Description of Artificial Sequence: Synthetic peptide
ETFRPAGGNM

SEQ ID NO: 15733 - protein, 9 aa, synthetic construct
  REGION 1..9: note = Description of Artificial Sequence: Synthetic peptide
QQKIQQAAR

SEQ ID NO: 15734 - protein, 9 aa, synthetic construct
  REGION 1..9: note = Description of Artificial Sequence: Synthetic peptide
NITGLILTR

SEQ ID NO: 15735 - protein, 11 aa, synthetic construct
  REGION 1..11: note = Description of Artificial Sequence: Synthetic peptide
ETFRPGGGDMR

SEQ ID NO: 15736 - protein, 9 aa, synthetic construct
  REGION 1..9: note = Description of Artificial Sequence: Synthetic peptide
NSIEINCIR

SEQ ID NO: 15737 - protein, 10 aa, synthetic construct
  REGION 1..10: note = Description of Artificial Sequence: Synthetic peptide
ATGDIIGNIR

SEQ ID NO: 15738 - protein, 9 aa, synthetic construct
  REGION 1..9: note = Description of Artificial Sequence: Synthetic peptide
FNLPPIVAK

SEQ ID NO: 15739 - protein, 10 aa, synthetic construct
  REGION 1..10: note = Description of Artificial Sequence: Synthetic peptide
TTGEVIGDIR

SEQ ID NO: 15740 - protein, 9 aa, synthetic construct
  REGION 1..9: note = Description of Artificial Sequence: Synthetic peptide
MTKILEPSR

SEQ ID NO: 15741 - protein, 10 aa, synthetic construct
  REGION 1..10: note = Description of Artificial Sequence: Synthetic peptide
SNITGLILTR

SEQ ID NO: 15742 - protein, 10 aa, synthetic construct
  REGION 1..10: note = Description of Artificial Sequence: Synthetic peptide
SFQTLTHHQR

SEQ ID NO: 15743 - protein, 11 aa, synthetic construct
  REGION 1..11: note = Description of Artificial Sequence: Synthetic peptide
ETYYVDGAANR

SEQ ID NO: 15744 - protein, 9 aa, synthetic construct
  REGION 1..9: note = Description of Artificial Sequence: Synthetic peptide
ETVEITCVR

SEQ ID NO: 15745 - protein, 9 aa, synthetic construct
  REGION 1..9: note = Description of Artificial Sequence: Synthetic peptide
ETVPITCAR

SEQ ID NO: 15746 - protein, 10 aa, synthetic construct
  REGION 1..10: note = Description of Artificial Sequence: Synthetic peptide
TTGEVIGDIR

SEQ ID NO: 15747 - protein, 9 aa, synthetic construct
  REGION 1..9: note = Description of Artificial Sequence: Synthetic peptide
NITGLILTR

SEQ ID NO: 15748 - protein, 11 aa, synthetic construct
  REGION 1..11: note = Description of Artificial Sequence: Synthetic peptide
QASGATIMMQK

SEQ ID NO: 15749 - protein, 10 aa, synthetic construct
  REGION 1..10: note = Description of Artificial Sequence: Synthetic peptide
ATGDIIGNIR

SEQ ID NO: 15750 - protein, 9 aa, synthetic construct
  REGION 1..9: note = Description of Artificial Sequence: Synthetic peptide
AAAAIMMQK

SEQ ID NO: 15751 - protein, 11 aa, synthetic construct
  REGION 1..11: note = Description of Artificial Sequence: Synthetic peptide
TVNDIQKLVGK

SEQ ID NO: 15752 - protein, 11 aa, synthetic construct
  REGION 1..11: note = Description of Artificial Sequence: Synthetic peptide
ETFRPGGGDMR

SEQ ID NO: 15753 - protein, 10 aa, synthetic construct
  REGION 1..10: note = Description of Artificial Sequence: Synthetic peptide
QAMYSPPIAR

SEQ ID NO: 15754 - protein, 11 aa, synthetic construct
  REGION 1..11: note = Description of Artificial Sequence: Synthetic peptide
ETFRPAGGNMK

SEQ ID NO: 15755 - protein, 11 aa, synthetic construct
  REGION 1..11: note = Description of Artificial Sequence: Synthetic peptide
TTGEVIGDIRK

SEQ ID NO: 15756 - protein, 10 aa, synthetic construct
  REGION 1..10: note = Description of Artificial Sequence: Synthetic peptide
DVVPISNGNK

SEQ ID NO: 15757 - protein, 9 aa, synthetic construct
  REGION 1..9: note = Description of Artificial Sequence: Synthetic peptide
DIVPINDGR

SEQ ID NO: 15758 - protein, 9 aa, synthetic construct
  REGION 1..9: note = Description of Artificial Sequence: Synthetic peptide
SGATIMMQK

SEQ ID NO: 15759 - protein, 10 aa, synthetic construct
  REGION 1..10: note = Description of Artificial Sequence: Synthetic peptide
EVNIVTDSQY

SEQ ID NO: 15760 - protein, 10 aa, synthetic construct
  REGION 1..10: note = Description of Artificial Sequence: Synthetic peptide
AAAAAIMMQK

SEQ ID NO: 15761 - protein, 10 aa, synthetic construct
  REGION 1..10: note = Description of Artificial Sequence: Synthetic peptide
ASITLTVQVR

SEQ ID NO: 15762 - protein, 10 aa, synthetic construct
  REGION 1..10: note = Description of Artificial Sequence: Synthetic peptide
TTSNLQEQIR

SEQ ID NO: 15763 - protein, 11 aa, synthetic construct
  REGION 1..11: note = Description of Artificial Sequence: Synthetic peptide
EIFRPGGGDMK

SEQ ID NO: 15764 - protein, 10 aa, synthetic construct
  REGION 1..10: note = Description of Artificial Sequence: Synthetic peptide
DCFSDSAIRK

SEQ ID NO: 15765 - protein, 9 aa, synthetic construct
  REGION 1..9: note = Description of Artificial Sequence: Synthetic peptide
AMYSPPIAR

SEQ ID NO: 15766 - protein, 10 aa, synthetic construct
  REGION 1..10: note = Description of Artificial Sequence: Synthetic peptide
DNNEIKVVPR

SEQ ID NO: 15767 - protein, 9 aa, synthetic construct
  REGION 1..9: note = Description of Artificial Sequence: Synthetic peptide
FAVLSIVNR

SEQ ID NO: 15768 - protein, 10 aa, synthetic construct
  REGION 1..10: note = Description of Artificial Sequence: Synthetic peptide
ATGDIIGDIR

SEQ ID NO: 15769 - protein, 11 aa, synthetic construct
  REGION 1..11: note = Description of Artificial Sequence: Synthetic peptide
DVKQLTEVVQK

SEQ ID NO: 15770 - protein, 10 aa, synthetic construct
  REGION 1..10: note = Description of Artificial Sequence: Synthetic peptide
TTSTLQEQIR

SEQ ID NO: 15771 - protein, 11 aa, synthetic construct
  REGION 1..11: note = Description of Artificial Sequence: Synthetic peptide
YATGDIIGNIR

SEQ ID NO: 15772 - protein, 9 aa, synthetic construct
  REGION 1..9: note = Description of Artificial Sequence: Synthetic peptide
NITGLLLTR

SEQ ID NO: 15773 - protein, 9 aa, synthetic construct
  REGION 1..9: note = Description of Artificial Sequence: Synthetic peptide
MVHQAISPR

SEQ ID NO: 15774 - protein, 9 aa, synthetic construct
  REGION 1..9: note = Description of Artificial Sequence: Synthetic peptide
SITLTVQVR

SEQ ID NO: 15775 - protein, 11 aa, synthetic construct
  REGION 1..11: note = Description of Artificial Sequence: Synthetic peptide
NCTEINNNSTR

SEQ ID NO: 15776 - protein, 10 aa, synthetic construct
  REGION 1..10: note = Description of Artificial Sequence: Synthetic peptide
SNITGLILTR

SEQ ID NO: 15777 - protein, 10 aa, synthetic construct
  REGION 1..10: note = Description of Artificial Sequence: Synthetic peptide
ESWTVNDIQK

SEQ ID NO: 15778 - protein, 9 aa, synthetic construct
  REGION 1..9: note = Description of Artificial Sequence: Synthetic peptide
NSIEINCIR

SEQ ID NO: 15779 - protein, 10 aa, synthetic construct
  REGION 1..10: note = Description of Artificial Sequence: Synthetic peptide
DNNSTSEIFR

SEQ ID NO: 15780 - protein, 11 aa, synthetic construct
  REGION 1..11: note = Description of Artificial Sequence: Synthetic peptide
ETAEGCQQIMR

SEQ ID NO: 15781 - protein, 9 aa, synthetic construct
  REGION 1..9: note = Description of Artificial Sequence: Synthetic peptide
DAKAYSTER

SEQ ID NO: 15782 - protein, 10 aa, synthetic construct
  REGION 1..10: note = Description of Artificial Sequence: Synthetic peptide
ASITLTAQVR

SEQ ID NO: 15783 - protein, 9 aa, synthetic construct
  REGION 1..9: note = Description of Artificial Sequence: Synthetic peptide
SRIGIIPQR

SEQ ID NO: 15784 - protein, 10 aa, synthetic construct
  REGION 1..10: note = Description of Artificial Sequence: Synthetic peptide
GAAAAIMMQK

SEQ ID NO: 15785 - protein, 11 aa, synthetic construct
  REGION 1..11: note = Description of Artificial Sequence: Synthetic peptide
EALEEVEKIQK

SEQ ID NO: 15786 - protein, 9 aa, synthetic construct
  REGION 1..9: note = Description of Artificial Sequence: Synthetic peptide
ETAYFILKL

SEQ ID NO: 15787 - protein, 9 aa, synthetic construct
  REGION 1..9: note = Description of Artificial Sequence: Synthetic peptide
TISSIFPQI

SEQ ID NO: 15788 - protein, 9 aa, synthetic construct
  REGION 1..9: note = Description of Artificial Sequence: Synthetic peptide
ETITLPCKI

SEQ ID NO: 15789 - protein, 9 aa, synthetic construct
  REGION 1..9: note = Description of Artificial Sequence: Synthetic peptide
ETAEGCVQI

SEQ ID NO: 15790 - protein, 9 aa, synthetic construct
  REGION 1..9: note = Description of Artificial Sequence: Synthetic peptide
EISAIVGLI

SEQ ID NO: 15791 - protein, 9 aa, synthetic construct
  REGION 1..9: note = Description of Artificial Sequence: Synthetic peptide
EIKSLFNTV

SEQ ID NO: 15792 - protein, 9 aa, synthetic construct
  REGION 1..9: note = Description of Artificial Sequence: Synthetic peptide
SAINLIDTV

SEQ ID NO: 15793 - protein, 9 aa, synthetic construct
  REGION 1..9: note = Description of Artificial Sequence: Synthetic peptide
QLTEVVQKI

SEQ ID NO: 15794 - protein, 9 aa, synthetic construct
  REGION 1..9: note = Description of Artificial Sequence: Synthetic peptide
EVIGDIRKA

SEQ ID NO: 15795 - protein, 9 aa, synthetic construct
  REGION 1..9: note = Description of Artificial Sequence: Synthetic peptide
EVIPMFTAL

SEQ ID NO: 15796 - protein, 9 aa, synthetic construct
  REGION 1..9: note = Description of Artificial Sequence: Synthetic peptide
TVNDIQKLV

SEQ ID NO: 15797 - protein, 9 aa, synthetic construct
  REGION 1..9: note = Description of Artificial Sequence: Synthetic peptide
ATGDIIGNI

SEQ ID NO: 15798 - protein, 9 aa, synthetic construct
  REGION 1..9: note = Description of Artificial Sequence: Synthetic peptide
TTSNLQEQI

SEQ ID NO: 15799 - protein, 9 aa, synthetic construct
  REGION 1..9: note = Description of Artificial Sequence: Synthetic peptide
TCTNVTINV

SEQ ID NO: 15800 - protein, 9 aa, synthetic construct
  REGION 1..9: note = Description of Artificial Sequence: Synthetic peptide
EISNYTQQI

SEQ ID NO: 15801 - protein, 9 aa, synthetic construct
  REGION 1..9: note = Description of Artificial Sequence: Synthetic peptide
ETVPITCAR

SEQ ID NO: 15802 - protein, 10 aa, synthetic construct
  REGION 1..10: note = Description of Artificial Sequence: Synthetic peptide
EIVNQIIEQL

SEQ ID NO: 15803 - protein, 9 aa, synthetic construct
  REGION 1..9: note = Description of Artificial Sequence: Synthetic peptide
IVNQIIEQL

SEQ ID NO: 15804 - protein, 9 aa, synthetic construct
  REGION 1..9: note = Description of Artificial Sequence: Synthetic peptide
RAIEVVQRV

SEQ ID NO: 15805 - protein, 9 aa, synthetic construct
  REGION 1..9: note = Description of Artificial Sequence: Synthetic peptide
YTAFTIPSI

SEQ ID NO: 15806 - protein, 9 aa, synthetic construct
  REGION 1..9: note = Description of Artificial Sequence: Synthetic peptide
NTVATLYCV

SEQ ID NO: 15807 - protein, 9 aa, synthetic construct
  REGION 1..9: note = Description of Artificial Sequence: Synthetic peptide
ETTNQKAEL

SEQ ID NO: 15808 - protein, 10 aa, synthetic construct
  REGION 1..10: note = Description of Artificial Sequence: Synthetic peptide
NVTTVANESV

SEQ ID NO: 15809 - protein, 9 aa, synthetic construct
  REGION 1..9: note = Description of Artificial Sequence: Synthetic peptide
DTITLPCRI

SEQ ID NO: 15810 - protein, 9 aa, synthetic construct
  REGION 1..9: note = Description of Artificial Sequence: Synthetic peptide
ETVEITCVR

SEQ ID NO: 15811 - protein, 9 aa, synthetic construct
  REGION 1..9: note = Description of Artificial Sequence: Synthetic peptide
GAASITLTV

SEQ ID NO: 15812 - protein, 9 aa, synthetic construct
  REGION 1..9: note = Description of Artificial Sequence: Synthetic peptide
TTSTLQEQI

SEQ ID NO: 15813 - protein, 9 aa, synthetic construct
  REGION 1..9: note = Description of Artificial Sequence: Synthetic peptide
DIAGTTSNL

SEQ ID NO: 15814 - protein, 9 aa, synthetic construct
  REGION 1..9: note = Description of Artificial Sequence: Synthetic peptide
MTSNPPVPV

SEQ ID NO: 15815 - protein, 9 aa, synthetic construct
  REGION 1..9: note = Description of Artificial Sequence: Synthetic peptide
NTADHLIHL

SEQ ID NO: 15816 - protein, 9 aa, synthetic construct
  REGION 1..9: note = Description of Artificial Sequence: Synthetic peptide
EVIPMFSAL

SEQ ID NO: 15817 - protein, 9 aa, synthetic construct
  REGION 1..9: note = Description of Artificial Sequence: Synthetic peptide
AVLSIINRV

SEQ ID NO: 15818 - protein, 10 aa, synthetic construct
  REGION 1..10: note = Description of Artificial Sequence: Synthetic peptide
DTIAIAVANW

SEQ ID NO: 15819 - protein, 10 aa, synthetic construct
  REGION 1..10: note = Description of Artificial Sequence: Synthetic peptide
EISAIVGLIV

SEQ ID NO: 15820 - protein, 9 aa, synthetic construct
  REGION 1..9: note = Description of Artificial Sequence: Synthetic peptide
AVLSIVNRV

SEQ ID NO: 15821 - protein, 9 aa, synthetic construct
  REGION 1..9: note = Description of Artificial Sequence: Synthetic peptide
NTKVIIVQL

SEQ ID NO: 15822 - protein, 9 aa, synthetic construct
  REGION 1..9: note = Description of Artificial Sequence: Synthetic peptide
LTAQVRQLL

SEQ ID NO: 15823 - protein, 9 aa, synthetic construct
  REGION 1..9: note = Description of Artificial Sequence: Synthetic peptide
LVNQIIEQL

SEQ ID NO: 15824 - protein, 9 aa, synthetic construct
  REGION 1..9: note = Description of Artificial Sequence: Synthetic peptide
ESFGFGEEI

SEQ ID NO: 15825 - protein, 9 aa, synthetic construct
  REGION 1..9: note = Description of Artificial Sequence: Synthetic peptide
MTSNPPIPV

SEQ ID NO: 15826 - protein, 11 aa, synthetic construct
  REGION 1..11: note = Description of Artificial Sequence: Synthetic peptide
TTSTSTVGSTA

SEQ ID NO: 15827 - protein, 11 aa, synthetic construct
  REGION 1..11: note = Description of Artificial Sequence: Synthetic peptide
EVVQKIATESI

SEQ ID NO: 15828 - protein, 9 aa, synthetic construct
  REGION 1..9: note = Description of Artificial Sequence: Synthetic peptide
NAKNIIVQL

SEQ ID NO: 15829 - protein, 9 aa, synthetic construct
  REGION 1..9: note = Description of Artificial Sequence: Synthetic peptide
IPIGPGQAF

SEQ ID NO: 15830 - protein, 9 aa, synthetic construct
  REGION 1..9: note = Description of Artificial Sequence: Synthetic peptide
SPAIFQSSM

SEQ ID NO: 15831 - protein, 9 aa, synthetic construct
  REGION 1..9: note = Description of Artificial Sequence: Synthetic peptide
RPMTYKSAL

SEQ ID NO: 15832 - protein, 9 aa, synthetic construct
  REGION 1..9: note = Description of Artificial Sequence: Synthetic peptide
TPTKAKPPL

SEQ ID NO: 15833 - protein, 10 aa, synthetic construct
  REGION 1..10: note = Description of Artificial Sequence: Synthetic peptide
RPNNNTRRSV

SEQ ID NO: 15834 - protein, 9 aa, synthetic construct
  REGION 1..9: note = Description of Artificial Sequence: Synthetic peptide
TPTKTRPPL

SEQ ID NO: 15835 - protein, 9 aa, synthetic construct
  REGION 1..9: note = Description of Artificial Sequence: Synthetic peptide
QPNKSESEL

SEQ ID NO: 15836 - protein, 9 aa, synthetic construct
  REGION 1..9: note = Description of Artificial Sequence: Synthetic peptide
GPSHKARVL

SEQ ID NO: 15837 - protein, 10 aa, synthetic construct
  REGION 1..10: note = Description of Artificial Sequence: Synthetic peptide
TPGPGTRVPL

SEQ ID NO: 15838 - protein, 10 aa, synthetic construct
  REGION 1..10: note = Description of Artificial Sequence: Synthetic peptide
RPNNNTRKSI

SEQ ID NO: 15839 - protein, 8 aa, synthetic construct
  REGION 1..8: note = Description of Artificial Sequence: Synthetic peptide
KPVVSTQL

SEQ ID NO: 15840 - protein, 10 aa, synthetic construct
  REGION 1..10: note = Description of Artificial Sequence: Synthetic peptide
SPIETVPVKL

SEQ ID NO: 15841 - protein, 10 aa, synthetic construct
  REGION 1..10: note = Description of Artificial Sequence: Synthetic peptide
TPGPGTRLPL

SEQ ID NO: 15842 - protein, 10 aa, synthetic construct
  REGION 1..10: note = Description of Artificial Sequence: Synthetic peptide
RPSNNTRKSI

SEQ ID NO: 15843 - protein, 9 aa, synthetic construct
  REGION 1..9: note = Description of Artificial Sequence: Synthetic peptide
VAIGPGQAF

SEQ ID NO: 15844 - protein, 9 aa, synthetic construct
  REGION 1..9: note = Description of Artificial Sequence: Synthetic peptide
SPTSRELRI

SEQ ID NO: 15845 - protein, 10 aa, synthetic construct
  REGION 1..10: note = Description of Artificial Sequence: Synthetic peptide
SIRFGPGQAF

SEQ ID NO: 15846 - protein, 8 aa, synthetic construct
  REGION 1..8: note = Description of Artificial Sequence: Synthetic peptide
TPGPGTRL

SEQ ID NO: 15847 - protein, 9 aa, synthetic construct
  REGION 1..9: note = Description of Artificial Sequence: Synthetic peptide
QPDRSGSEL

SEQ ID NO: 15848 - protein, 8 aa, synthetic construct
  REGION 1..8: note = Description of Artificial Sequence: Synthetic peptide
DPWVGNNL

SEQ ID NO: 15849 - protein, 9 aa, synthetic construct
  REGION 1..9: note = Description of Artificial Sequence: Synthetic peptide
TPQDLNTML

SEQ ID NO: 15850 - protein, 8 aa, synthetic construct
  REGION 1..8: note = Description of Artificial Sequence: Synthetic peptide
ELLGHNSL

SEQ ID NO: 15851 - protein, 8 aa, synthetic construct
  REGION 1..8: note = Description of Artificial Sequence: Synthetic peptide
ELLGRNSL

SEQ ID NO: 15852 - protein, 9 aa, synthetic construct
  REGION 1..9: note = Description of Artificial Sequence: Synthetic peptide
QLQARVLAL

SEQ ID NO: 15853 - protein, 8 aa, synthetic construct
  REGION 1..8: note = Description of Artificial Sequence: Synthetic peptide
DSAIRKAL

SEQ ID NO: 15854 - protein, 9 aa, synthetic construct
  REGION 1..9: note = Description of Artificial Sequence: Synthetic peptide
SISERILSA

SEQ ID NO: 15855 - protein, 9 aa, synthetic construct
  REGION 1..9: note = Description of Artificial Sequence: Synthetic peptide
YPGIKVKQL

SEQ ID NO: 15856 - protein, 8 aa, synthetic construct
  REGION 1..8: note = Description of Artificial Sequence: Synthetic peptide
DPWVGNNL

SEQ ID NO: 15857 - protein, 8 aa, synthetic construct
  REGION 1..8: note = Description of Artificial Sequence: Synthetic peptide
TAQVRQLL

SEQ ID NO: 15858 - protein, 8 aa, synthetic construct
  REGION 1..8: note = Description of Artificial Sequence: Synthetic peptide
ELLGRSSL

SEQ ID NO: 15859 - protein, 8 aa, synthetic construct
  REGION 1..8: note = Description of Artificial Sequence: Synthetic peptide
IEKVKAQL

SEQ ID NO: 15860 - protein, 8 aa, synthetic construct
  REGION 1..8: note = Description of Artificial Sequence: Synthetic peptide
TTNQKTEL

SEQ ID NO: 15861 - protein, 8 aa, synthetic construct
  REGION 1..8: note = Description of Artificial Sequence: Synthetic peptide
HLKTAVQM

SEQ ID NO: 15862 - protein, 9 aa, synthetic construct
  REGION 1..9: note = Description of Artificial Sequence: Synthetic peptide
TVKIKSLGV

SEQ ID NO: 15863 - protein, 11 aa, synthetic construct
  REGION 1..11: note = Description of Artificial Sequence: Synthetic peptide
TQIDPDLADQL

SEQ ID NO: 15864 - protein, 11 aa, synthetic construct
  REGION 1..11: note = Description of Artificial Sequence: Synthetic peptide
TQVDPDLADHL

SEQ ID NO: 15865 - protein, 11 aa, synthetic construct
  REGION 1..11: note = Description of Artificial Sequence: Synthetic peptide
TQIDPNTADHL

SEQ ID NO: 15866 - protein, 10 aa, synthetic construct
  REGION 1..10: note = Description of Artificial Sequence: Synthetic peptide
GQVGDQAEHL

SEQ ID NO: 15867 - protein, 9 aa, synthetic construct
  REGION 1..9: note = Description of Artificial Sequence: Synthetic peptide
QLTEVVQKI

SEQ ID NO: 15868 - protein, 10 aa, synthetic construct
  REGION 1..10: note = Description of Artificial Sequence: Synthetic peptide
AQNEDSEVGF

SEQ ID NO: 15869 - protein, 9 aa, synthetic construct
  REGION 1..9: note = Description of Artificial Sequence: Synthetic peptide
KQEQGQWTY

SEQ ID NO: 15870 - protein, 9 aa, synthetic construct
  REGION 1..9: note = Description of Artificial Sequence: Synthetic peptide
SLAEEDIRI

SEQ ID NO: 15871 - protein, 10 aa, synthetic construct
  REGION 1..10: note = Description of Artificial Sequence: Synthetic peptide
AQEEDSEVGF

SEQ ID NO: 15872 - protein, 10 aa, synthetic construct
  REGION 1..10: note = Description of Artificial Sequence: Synthetic peptide
GQVRDQAEHL

SEQ ID NO: 15873 - protein, 10 aa, synthetic construct
  REGION 1..10: note = Description of Artificial Sequence: Synthetic peptide
AQEEDSDVGF

SEQ ID NO: 15874 - protein, 11 aa, synthetic construct
  REGION 1..11: note = Description of Artificial Sequence: Synthetic peptide
GQIRDPTGSDI

SEQ ID NO: 15875 - protein, 9 aa, synthetic construct
  REGION 1..9: note = Description of Artificial Sequence: Synthetic peptide
SQIYPGIKI

SEQ ID NO: 15876 - protein, 9 aa, synthetic construct
  REGION 1..9: note = Description of Artificial Sequence: Synthetic peptide
QLTEVVQKI

SEQ ID NO: 15877 - protein, 9 aa, synthetic construct
  REGION 1..9: note = Description of Artificial Sequence: Synthetic peptide
GAASITLTV

SEQ ID NO: 15878 - protein, 8 aa, synthetic construct
  REGION 1..8: note = Description of Artificial Sequence: Synthetic peptide
GQMIHQAI

SEQ ID NO: 15879 - protein, 8 aa, synthetic construct
  REGION 1..8: note = Description of Artificial Sequence: Synthetic peptide
GQMVHQAI

SEQ ID NO: 15880 - protein, 9 aa, synthetic construct
  REGION 1..9: note = Description of Artificial Sequence: Synthetic peptide
SQIYPGIKI

SEQ ID NO: 15881 - protein, 9 aa, synthetic construct
  REGION 1..9: note = Description of Artificial Sequence: Synthetic peptide
SQIYPGIKV

SEQ ID NO: 15882 - protein, 9 aa, synthetic construct
  REGION 1..9: note = Description of Artificial Sequence: Synthetic peptide
QQHLLQLTV

SEQ ID NO: 15883 - protein, 9 aa, synthetic construct
  REGION 1..9: note = Description of Artificial Sequence: Synthetic peptide
GQVDCSPGI

SEQ ID NO: 15884 - protein, 9 aa, synthetic construct
  REGION 1..9: note = Description of Artificial Sequence: Synthetic peptide
VQKIATESI

SEQ ID NO: 15885 - protein, 9 aa, synthetic construct
  REGION 1..9: note = Description of Artificial Sequence: Synthetic peptide
IQKNSQQEI

SEQ ID NO: 15886 - protein, 9 aa, synthetic construct
  REGION 1..9: note = Description of Artificial Sequence: Synthetic peptide
AILNVPTRI

SEQ ID NO: 15887 - protein, 9 aa, synthetic construct
  REGION 1..9: note = Description of Artificial Sequence: Synthetic peptide
RAIEVVQRV

SEQ ID NO: 15888 - protein, 9 aa, synthetic construct
  REGION 1..9: note = Description of Artificial Sequence: Synthetic peptide
AVLSIVNRV

SEQ ID NO: 15889 - protein, 10 aa, synthetic construct
  REGION 1..10: note = Description of Artificial Sequence: Synthetic peptide
AQGQMVHQAI

SEQ ID NO: 15890 - protein, 9 aa, synthetic construct
  REGION 1..9: note = Description of Artificial Sequence: Synthetic peptide
VQNAQGQMI

SEQ ID NO: 15891 - protein, 9 aa, synthetic construct
  REGION 1..9: note = Description of Artificial Sequence: Synthetic peptide
GQGVIPLNL

SEQ ID NO: 15892 - protein, 11 aa, synthetic construct
  REGION 1..11: note = Description of Artificial Sequence: Synthetic peptide
SQASGAAAAAI

SEQ ID NO: 15893 - protein, 9 aa, synthetic construct
  REGION 1..9: note = Description of Artificial Sequence: Synthetic peptide
VQNAQGQMV

SEQ ID NO: 15894 - protein, 9 aa, synthetic construct
  REGION 1..9: note = Description of Artificial Sequence: Synthetic peptide
ASITLTVQV

SEQ ID NO: 15895 - protein, 9 aa, synthetic construct
  REGION 1..9: note = Description of Artificial Sequence: Synthetic peptide
GQAMYAPPI

SEQ ID NO: 15896 - protein, 9 aa, synthetic construct
  REGION 1..9: note = Description of Artificial Sequence: Synthetic peptide
GQAMYSPPI

SEQ ID NO: 15897 - protein, 9 aa, synthetic construct
  REGION 1..9: note = Description of Artificial Sequence: Synthetic peptide
AILNIPVRI

SEQ ID NO: 15898 - protein, 9 aa, synthetic construct
  REGION 1..9: note = Description of Artificial Sequence: Synthetic peptide
AVLSIINRV

SEQ ID NO: 15899 - protein, 9 aa, synthetic construct
  REGION 1..9: note = Description of Artificial Sequence: Synthetic peptide
VQKIATEGI

SEQ ID NO: 15900 - protein, 9 aa, synthetic construct
  REGION 1..9: note = Description of Artificial Sequence: Synthetic peptide
VQLNETVEI

SEQ ID NO: 15901 - protein, 10 aa, synthetic construct
  REGION 1..10: note = Description of Artificial Sequence: Synthetic peptide
AQGQMIHQAI

SEQ ID NO: 15902 - protein, 10 aa, synthetic construct
  REGION 1..10: note = Description of Artificial Sequence: Synthetic peptide
RQHPAAAEGV

SEQ ID NO: 15903 - protein, 9 aa, synthetic construct
  REGION 1..9: note = Description of Artificial Sequence: Synthetic peptide
SQQKIQQAA

SEQ ID NO: 15904 - protein, 9 aa, synthetic construct
  REGION 1..9: note = Description of Artificial Sequence: Synthetic peptide
GQAMYALPI

SEQ ID NO: 15905 - protein, 9 aa, synthetic construct
  REGION 1..9: note = Description of Artificial Sequence: Synthetic peptide
ASITLTAQV

SEQ ID NO: 15906 - protein, 8 aa, synthetic construct
  REGION 1..8: note = Description of Artificial Sequence: Synthetic peptide
NQIIEQLI

SEQ ID NO: 15907 - protein, 9 aa, synthetic construct
  REGION 1..9: note = Description of Artificial Sequence: Synthetic peptide
TISSIFPQI

SEQ ID NO: 15908 - protein, 9 aa, synthetic construct
  REGION 1..9: note = Description of Artificial Sequence: Synthetic peptide
SQQEIQQAA

SEQ ID NO: 15909 - protein, 9 aa, synthetic construct
  REGION 1..9: note = Description of Artificial Sequence: Synthetic peptide
SLAEGEIMI

SEQ ID NO: 15910 - protein, 10 aa, synthetic construct
  REGION 1..10: note = Description of Artificial Sequence: Synthetic peptide
KQLTEVVQKI

SEQ ID NO: 15911 - protein, 10 aa, synthetic construct
  REGION 1..10: note = Description of Artificial Sequence: Synthetic peptide
SQATGAAAAI

SEQ ID NO: 15912 - protein, 9 aa, synthetic construct
  REGION 1..9: note = Description of Artificial Sequence: Synthetic peptide
SQVSQNYPI

SEQ ID NO: 15913 - protein, 9 aa, synthetic construct
  REGION 1..9: note = Description of Artificial Sequence: Synthetic peptide
SLAEEDIRI

SEQ ID NO: 15914 - protein, 10 aa, synthetic construct
  REGION 1..10: note = Description of Artificial Sequence: Synthetic peptide
SQASGAAAAI

SEQ ID NO: 15915 - protein, 11 aa, synthetic construct
  REGION 1..11: note = Description of Artificial Sequence: Synthetic peptide
QQAGPIAPGQI

SEQ ID NO: 15916 - protein, 8 aa, synthetic construct
  REGION 1..8: note = Description of Artificial Sequence: Synthetic peptide
GQETAYFI

SEQ ID NO: 15917 - protein, 8 aa, synthetic construct
  REGION 1..8: note = Description of Artificial Sequence: Synthetic peptide
KQNKIQKI

SEQ ID NO: 15918 - protein, 9 aa, synthetic construct
  REGION 1..9: note = Description of Artificial Sequence: Synthetic peptide
NQKTELQAI

SEQ ID NO: 15919 - protein, 9 aa, synthetic construct
  REGION 1..9: note = Description of Artificial Sequence: Synthetic peptide
KQMAGGDCV

SEQ ID NO: 15920 - protein, 9 aa, synthetic construct
  REGION 1..9: note = Description of Artificial Sequence: Synthetic peptide
KLVPVDPAV

SEQ ID NO: 15921 - protein, 9 aa, synthetic construct
  REGION 1..9: note = Description of Artificial Sequence: Synthetic peptide
AQLQPALQT

SEQ ID NO: 15922 - protein, 9 aa, synthetic construct
  REGION 1..9: note = Description of Artificial Sequence: Synthetic peptide
NQKAELQAI

SEQ ID NO: 15923 - protein, 9 aa, synthetic construct
  REGION 1..9: note = Description of Artificial Sequence: Synthetic peptide
TCTNVTINV

SEQ ID NO: 15924 - protein, 9 aa, synthetic construct
  REGION 1..9: note = Description of Artificial Sequence: Synthetic peptide
ERYLRDQQL

SEQ ID NO: 15925 - protein, 8 aa, synthetic construct
  REGION 1..8: note = Description of Artificial Sequence: Synthetic peptide
ERVLSTCL

SEQ ID NO: 15926 - protein, 9 aa, synthetic construct
  REGION 1..9: note = Description of Artificial Sequence: Synthetic peptide
DRFALNPGL

SEQ ID NO: 15927 - protein, 9 aa, synthetic construct
  REGION 1..9: note = Description of Artificial Sequence: Synthetic peptide
ERYLKDQQL

SEQ ID NO: 15928 - protein, 8 aa, synthetic construct
  REGION 1..8: note = Description of Artificial Sequence: Synthetic peptide
ERILSTCL

SEQ ID NO: 15929 - protein, 8 aa, synthetic construct
  REGION 1..8: note = Description of Artificial Sequence: Synthetic peptide
ERILSSCL

SEQ ID NO: 15930 - protein, 8 aa, synthetic construct
  REGION 1..8: note = Description of Artificial Sequence: Synthetic peptide
MRQLQPAL

SEQ ID NO: 15931 - protein, 9 aa, synthetic construct
  REGION 1..9: note = Description of Artificial Sequence: Synthetic peptide
ERFALNPGL

SEQ ID NO: 15932 - protein, 9 aa, synthetic construct
  REGION 1..9: note = Description of Artificial Sequence: Synthetic peptide
ERYLRDQQL

SEQ ID NO: 15933 - protein, 9 aa, synthetic construct
  REGION 1..9: note = Description of Artificial Sequence: Synthetic peptide
ERYLKDQQL

SEQ ID NO: 15934 - protein, 8 aa, synthetic construct
  REGION 1..8: note = Description of Artificial Sequence: Synthetic peptide
GQMVHQAI

SEQ ID NO: 15935 - protein, 9 aa, synthetic construct
  REGION 1..9: note = Description of Artificial Sequence: Synthetic peptide
VELLGHNSL

SEQ ID NO: 15936 - protein, 8 aa, synthetic construct
  REGION 1..8: note = Description of Artificial Sequence: Synthetic peptide
DSAIRKAL

SEQ ID NO: 15937 - protein, 8 aa, synthetic construct
  REGION 1..8: note = Description of Artificial Sequence: Synthetic peptide
GQMIHQAI

SEQ ID NO: 15938 - protein, 8 aa, synthetic construct
  REGION 1..8: note = Description of Artificial Sequence: Synthetic peptide
ERVLSTCL

SEQ ID NO: 15939 - protein, 9 aa, synthetic construct
  REGION 1..9: note = Description of Artificial Sequence: Synthetic peptide
DRFALNPGL

SEQ ID NO: 15940 - protein, 9 aa, synthetic construct
  REGION 1..9: note = Description of Artificial Sequence: Synthetic peptide
TGVGRPQVL

SEQ ID NO: 15941 - protein, 8 aa, synthetic construct
  REGION 1..8: note = Description of Artificial Sequence: Synthetic peptide
ELLGHNSL

SEQ ID NO: 15942 - protein, 8 aa, synthetic construct
  REGION 1..8: note = Description of Artificial Sequence: Synthetic peptide
IQKLVGKL

SEQ ID NO: 15943 - protein, 9 aa, synthetic construct
  REGION 1..9: note = Description of Artificial Sequence: Synthetic peptide
VELLGRSSL

SEQ ID NO: 15944 - protein, 9 aa, synthetic construct
  REGION 1..9: note = Description of Artificial Sequence: Synthetic peptide
VAIGPGQAF

SEQ ID NO: 15945 - protein, 9 aa, synthetic construct
  REGION 1..9: note = Description of Artificial Sequence: Synthetic peptide
ISNGNKTSY

SEQ ID NO: 15946 - protein, 9 aa, synthetic construct
  REGION 1..9: note = Description of Artificial Sequence: Synthetic peptide
SQKQQQAAM

SEQ ID NO: 15947 - protein, 9 aa, synthetic construct
  REGION 1..9: note = Description of Artificial Sequence: Synthetic peptide
STVGSTAGY

SEQ ID NO: 15948 - protein, 9 aa, synthetic construct
  REGION 1..9: note = Description of Artificial Sequence: Synthetic peptide
KQGPGQWTY

SEQ ID NO: 15949 - protein, 9 aa, synthetic construct
  REGION 1..9: note = Description of Artificial Sequence: Synthetic peptide
TQNPEIVIY

SEQ ID NO: 15950 - protein, 9 aa, synthetic construct
  REGION 1..9: note = Description of Artificial Sequence: Synthetic peptide
STRNITEEY

SEQ ID NO: 15951 - protein, 8 aa, synthetic construct
  REGION 1..8: note = Description of Artificial Sequence: Synthetic peptide
VQAKLQEY

SEQ ID NO: 15952 - protein, 9 aa, synthetic construct
  REGION 1..9: note = Description of Artificial Sequence: Synthetic peptide
AIGPGQAFY

SEQ ID NO: 15953 - protein, 8 aa, synthetic construct
  REGION 1..8: note = Description of Artificial Sequence: Synthetic peptide
GQYIYNTY

SEQ ID NO: 15954 - protein, 9 aa, synthetic construct
  REGION 1..9: note = Description of Artificial Sequence: Synthetic peptide
WQKVGQAMY

SEQ ID NO: 15955 - protein, 8 aa, synthetic construct
  REGION 1..8: note = Description of Artificial Sequence: Synthetic peptide
GQHIYNTY

SEQ ID NO: 15956 - protein, 11 aa, synthetic construct
  REGION 1..11: note = Description of Artificial Sequence: Synthetic peptide
VQKQEQGQWTY

SEQ ID NO: 15957 - protein, 10 aa, synthetic construct
  REGION 1..10: note = Description of Artificial Sequence: Synthetic peptide
RVIEVAQRAY

SEQ ID NO: 15958 - protein, 9 aa, synthetic construct
  REGION 1..9: note = Description of Artificial Sequence: Synthetic peptide
KQGPDQWTY

SEQ ID NO: 15959 - protein, 9 aa, synthetic construct
  REGION 1..9: note = Description of Artificial Sequence: Synthetic peptide
HLGPGQALY

SEQ ID NO: 15960 - protein, 8 aa, synthetic construct
  REGION 1..8: note = Description of Artificial Sequence: Synthetic peptide
GQLIYNTY

SEQ ID NO: 15961 - protein, 11 aa, synthetic construct
  REGION 1..11: note = Description of Artificial Sequence: Synthetic peptide
VQKQGPGQWTY

SEQ ID NO: 15962 - protein, 9 aa, synthetic construct
  REGION 1..9: note = Description of Artificial Sequence: Synthetic peptide
AIMMQKSNF

SEQ ID NO: 15963 - protein, 10 aa, synthetic construct
  REGION 1..10: note = Description of Artificial Sequence: Synthetic peptide
SVAIGPGQAF

SEQ ID NO: 15964 - protein, 9 aa, synthetic construct
  REGION 1..9: note = Description of Artificial Sequence: Synthetic peptide
KQITKIQNF

SEQ ID NO: 15965 - protein, 9 aa, synthetic construct
  REGION 1..9: note = Description of Artificial Sequence: Synthetic peptide
VQKIATESI

SEQ ID NO: 15966 - protein, 9 aa, synthetic construct
  REGION 1..9: note = Description of Artificial Sequence: Synthetic peptide
FQQGEAREF

SEQ ID NO: 15967 - protein, 9 aa, synthetic construct
  REGION 1..9: note = Description of Artificial Sequence: Synthetic peptide
TQIGCTLNF

SEQ ID NO: 15968 - protein, 10 aa, synthetic construct
  REGION 1..10: note = Description of Artificial Sequence: Synthetic peptide
AQNEDSEVGF

SEQ ID NO: 15969 - protein, 11 aa, synthetic construct
  REGION 1..11: note = Description of Artificial Sequence: Synthetic peptide
VQKQGPDQWTY

SEQ ID NO: 15970 - protein, 10 aa, synthetic construct
  REGION 1..10: note = Description of Artificial Sequence: Synthetic peptide
IQWDREISNY

SEQ ID NO: 15971 - protein, 9 aa, synthetic construct
  REGION 1..9: note = Description of Artificial Sequence: Synthetic peptide
TVLDVGDAY

SEQ ID NO: 15972 - protein, 9 aa, synthetic construct
  REGION 1..9: note = Description of Artificial Sequence: Synthetic peptide
IPIGPGQAF

SEQ ID NO: 15973 - protein, 9 aa, synthetic construct
  REGION 1..9: note = Description of Artificial Sequence: Synthetic peptide
NSNPVSQNY

SEQ ID NO: 15974 - protein, 9 aa, synthetic construct
  REGION 1..9: note = Description of Artificial Sequence: Synthetic peptide
KQEQGQWTY

SEQ ID NO: 15975 - protein, 10 aa, synthetic construct
  REGION 1..10: note = Description of Artificial Sequence: Synthetic peptide
ILKEPVHGVY

SEQ ID NO: 15976 - protein, 9 aa, synthetic construct
  REGION 1..9: note = Description of Artificial Sequence: Synthetic peptide
SQASGATIM

SEQ ID NO: 15977 - protein, 9 aa, synthetic construct
  REGION 1..9: note = Description of Artificial Sequence: Synthetic peptide
AIVGLIVAF

SEQ ID NO: 15978 - protein, 10 aa, synthetic construct
  REGION 1..10: note = Description of Artificial Sequence: Synthetic peptide
FLNKGLGISY

SEQ ID NO: 15979 - protein, 9 aa, synthetic construct
  REGION 1..9: note = Description of Artificial Sequence: Synthetic peptide
RAVGVGAVF

SEQ ID NO: 15980 - protein, 9 aa, synthetic construct
  REGION 1..9: note = Description of Artificial Sequence: Synthetic peptide
KQIIKIQNF

SEQ ID NO: 15981 - protein, 9 aa, synthetic construct
  REGION 1..9: note = Description of Artificial Sequence: Synthetic peptide
GIVSPRCEY

SEQ ID NO: 15982 - protein, 10 aa, synthetic construct
  REGION 1..10: note = Description of Artificial Sequence: Synthetic peptide
VQWEREISNY

SEQ ID NO: 15983 - protein, 9 aa, synthetic construct
  REGION 1..9: note = Description of Artificial Sequence: Synthetic peptide
VIEVAQRAY

SEQ ID NO: 15984 - protein, 11 aa, synthetic construct
  REGION 1..11: note = Description of Artificial Sequence: Synthetic peptide
KSIPIGPGQAF

SEQ ID NO: 15985 - protein, 8 aa, synthetic construct
  REGION 1..8: note = Description of Artificial Sequence: Synthetic peptide
AVHVASGY

SEQ ID NO: 15986 - protein, 10 aa, synthetic construct
  REGION 1..10: note = Description of Artificial Sequence: Synthetic peptide
VAIGPGQAFY

SEQ ID NO: 15987 - protein, 9 aa, synthetic construct
  REGION 1..9: note = Description of Artificial Sequence: Synthetic peptide
VQKQEQGQW

SEQ ID NO: 15988 - protein, 9 aa, synthetic construct
  REGION 1..9: note = Description of Artificial Sequence: Synthetic peptide
SSSQVSQNY

SEQ ID NO: 15989 - protein, 8 aa, synthetic construct
  REGION 1..8: note = Description of Artificial Sequence: Synthetic peptide
WQKVGQAM

SEQ ID NO: 15990 - protein, 9 aa, synthetic construct
  REGION 1..9: note = Description of Artificial Sequence: Synthetic peptide
FLGAAGSTM

SEQ ID NO: 15991 - protein, 8 aa, synthetic construct
  REGION 1..8: note = Description of Artificial Sequence: Synthetic peptide
GQMVHQAI

SEQ ID NO: 15992 - protein, 9 aa, synthetic construct
  REGION 1..9: note = Description of Artificial Sequence: Synthetic peptide
HTKVGSLQY

SEQ ID NO: 15993 - protein, 9 aa, synthetic construct
  REGION 1..9: note = Description of Artificial Sequence: Synthetic peptide
AQEIKNCSF

SEQ ID NO: 15994 - protein, 9 aa, synthetic construct
  REGION 1..9: note = Description of Artificial Sequence: Synthetic peptide
FLGTAGSTM

SEQ ID NO: 15995 - protein, 9 aa, synthetic construct
  REGION 1..9: note = Description of Artificial Sequence: Synthetic peptide
SVAALQVCF

SEQ ID NO: 15996 - protein, 9 aa, synthetic construct
  REGION 1..9: note = Description of Artificial Sequence: Synthetic peptide
VQKIATEGI

SEQ ID NO: 15997 - protein, 9 aa, synthetic construct
  REGION 1..9: note = Description of Artificial Sequence: Synthetic peptide
NMRNVTENF

SEQ ID NO: 15998 - protein, 10 aa, synthetic construct
  REGION 1..10: note = Description of Artificial Sequence: Synthetic peptide
GFLGTAGSTM

SEQ ID NO: 15999 - protein, 8 aa, synthetic construct
  REGION 1..8: note = Description of Artificial Sequence: Synthetic peptide
WQRVGQAM

SEQ ID NO: 16000 - protein, 9 aa, synthetic construct
  REGION 1..9: note = Description of Artificial Sequence: Synthetic peptide
ISNYTQQIY

SEQ ID NO: 16001 - protein, 9 aa, synthetic construct
  REGION 1..9: note = Description of Artificial Sequence: Synthetic peptide
AQRAGRAVL

SEQ ID NO: 16002 - protein, 9 aa, synthetic construct
  REGION 1..9: note = Description of Artificial Sequence: Synthetic peptide
IPIGPGQAF

SEQ ID NO: 16003 - protein, 9 aa, synthetic construct
  REGION 1..9: note = Description of Artificial Sequence: Synthetic peptide
TVLDVGDAY

SEQ ID NO: 16004 - protein, 9 aa, synthetic construct
  REGION 1..9: note = Description of Artificial Sequence: Synthetic peptide
FLGAAGSTM

SEQ ID NO: 16005 - protein, 9 aa, synthetic construct
  REGION 1..9: note = Description of Artificial Sequence: Synthetic peptide
HLGPGQALY

SEQ ID NO: 16006 - protein, 9 aa, synthetic construct
  REGION 1..9: note = Description of Artificial Sequence: Synthetic peptide
FLGTAGSTM

SEQ ID NO: 16007 - protein, 8 aa, synthetic construct
  REGION 1..8: note = Description of Artificial Sequence: Synthetic peptide
DVVPINEM

SEQ ID NO: 16008 - protein, 9 aa, synthetic construct
  REGION 1..9: note = Description of Artificial Sequence: Synthetic peptide
VAIGPGQAF

SEQ ID NO: 16009 - protein, 10 aa, synthetic construct
  REGION 1..10: note = Description of Artificial Sequence: Synthetic peptide
FLNKGLGISY

SEQ ID NO: 16010 - protein, 10 aa, synthetic construct
  REGION 1..10: note = Description of Artificial Sequence: Synthetic peptide
SVAIGPGQAF

SEQ ID NO: 16011 - protein, 9 aa, synthetic construct
  REGION 1..9: note = Description of Artificial Sequence: Synthetic peptide
DAKLVVSTY

SEQ ID NO: 16012 - protein, 9 aa, synthetic construct
  REGION 1..9: note = Description of Artificial Sequence: Synthetic peptide
TQNPEIVIY

SEQ ID NO: 16013 - protein, 9 aa, synthetic construct
  REGION 1..9: note = Description of Artificial Sequence: Synthetic peptide
TVGGHQAAM

SEQ ID NO: 16014 - protein, 9 aa, synthetic construct
  REGION 1..9: note = Description of Artificial Sequence: Synthetic peptide
EPIPGVETY

SEQ ID NO: 16015 - protein, 9 aa, synthetic construct
  REGION 1..9: note = Description of Artificial Sequence: Synthetic peptide
SQKQQQAAM

SEQ ID NO: 16016 - protein, 9 aa, synthetic construct
  REGION 1..9: note = Description of Artificial Sequence: Synthetic peptide
QASGATIMM

SEQ ID NO: 16017 - protein, 9 aa, synthetic construct
  REGION 1..9: note = Description of Artificial Sequence: Synthetic peptide
EPIPGAETY

SEQ ID NO: 16018 - protein, 9 aa, synthetic construct
  REGION 1..9: note = Description of Artificial Sequence: Synthetic peptide
DATLVVRTY

SEQ ID NO: 16019 - protein, 11 aa, synthetic construct
  REGION 1..11: note = Description of Artificial Sequence: Synthetic peptide
VPISNGNKTSY

SEQ ID NO: 16020 - protein, 9 aa, synthetic construct
  REGION 1..9: note = Description of Artificial Sequence: Synthetic peptide
EPIIGAETY

SEQ ID NO: 16021 - protein, 9 aa, synthetic construct
  REGION 1..9: note = Description of Artificial Sequence: Synthetic peptide
HTKVGSLQY

SEQ ID NO: 16022 - protein, 9 aa, synthetic construct
  REGION 1..9: note = Description of Artificial Sequence: Synthetic peptide
DIAGATSTL

SEQ ID NO: 16023 - protein, 8 aa, synthetic construct
  REGION 1..8: note = Description of Artificial Sequence: Synthetic peptide
DQLIHLHY

SEQ ID NO: 16024 - protein, 9 aa, synthetic construct
  REGION 1..9: note = Description of Artificial Sequence: Synthetic peptide
SQASGATIM

SEQ ID NO: 16025 - protein, 9 aa, synthetic construct
  REGION 1..9: note = Description of Artificial Sequence: Synthetic peptide
EIVSPRCEY

SEQ ID NO: 16026 - protein, 9 aa, synthetic construct
  REGION 1..9: note = Description of Artificial Sequence: Synthetic peptide
STVGSTAGY

SEQ ID NO: 16027 - protein, 8 aa, synthetic construct
  REGION 1..8: note = Description of Artificial Sequence: Synthetic peptide
GQYIYNTY

SEQ ID NO: 16028 - protein, 9 aa, synthetic construct
  REGION 1..9: note = Description of Artificial Sequence: Synthetic peptide
NVTENFNVW

SEQ ID NO: 16029 - protein, 9 aa, synthetic construct
  REGION 1..9: note = Description of Artificial Sequence: Synthetic peptide
NMRNVTENF

SEQ ID NO: 16030 - protein, 9 aa, synthetic construct
  REGION 1..9: note = Description of Artificial Sequence: Synthetic peptide
FQQGEAREF

SEQ ID NO: 16031 - protein, 9 aa, synthetic construct
  REGION 1..9: note = Description of Artificial Sequence: Synthetic peptide
STRNITEEY

SEQ ID NO: 16032 - protein, 8 aa, synthetic construct
  REGION 1..8: note = Description of Artificial Sequence: Synthetic peptide
DHRENPTM

SEQ ID NO: 16033 - protein, 9 aa, synthetic construct
  REGION 1..9: note = Description of Artificial Sequence: Synthetic peptide
SAEPVPLQL

SEQ ID NO: 16034 - protein, 9 aa, synthetic construct
  REGION 1..9: note = Description of Artificial Sequence: Synthetic peptide
DIAGTTSTL

SEQ ID NO: 16035 - protein, 9 aa, synthetic construct
  REGION 1..9: note = Description of Artificial Sequence: Synthetic peptide
VIEVAQRAY

SEQ ID NO: 16036 - protein, 10 aa, synthetic construct
  REGION 1..10: note = Description of Artificial Sequence: Synthetic peptide
EVNIVTDSQY

SEQ ID NO: 16037 - protein, 8 aa, synthetic construct
  REGION 1..8: note = Description of Artificial Sequence: Synthetic peptide
AKLVVSTY

SEQ ID NO: 16038 - protein, 9 aa, synthetic construct
  REGION 1..9: note = Description of Artificial Sequence: Synthetic peptide
KQGPGQWTY

SEQ ID NO: 16039 - protein, 8 aa, synthetic construct
  REGION 1..8: note = Description of Artificial Sequence: Synthetic peptide
GQYIYNTY

SEQ ID NO: 16040 - protein, 9 aa, synthetic construct
  REGION 1..9: note = Description of Artificial Sequence: Synthetic peptide
VAIGPGQAF

SEQ ID NO: 16041 - protein, 8 aa, synthetic construct
  REGION 1..8: note = Description of Artificial Sequence: Synthetic peptide
AKLVVRTY

SEQ ID NO: 16042 - protein, 9 aa, synthetic construct
  REGION 1..9: note = Description of Artificial Sequence: Synthetic peptide
IKNPEIVIY

SEQ ID NO: 16043 - protein, 9 aa, synthetic construct
  REGION 1..9: note = Description of Artificial Sequence: Synthetic peptide
SKIGPENPY

SEQ ID NO: 16044 - protein, 9 aa, synthetic construct
  REGION 1..9: note = Description of Artificial Sequence: Synthetic peptide
TQNPEIVIY

SEQ ID NO: 16045 - protein, 9 aa, synthetic construct
  REGION 1..9: note = Description of Artificial Sequence: Synthetic peptide
STRNITEEY

SEQ ID NO: 16046 - protein, 9 aa, synthetic construct
  REGION 1..9: note = Description of Artificial Sequence: Synthetic peptide
GKGDTSLSF

SEQ ID NO: 16047 - protein, 9 aa, synthetic construct
  REGION 1..9: note = Description of Artificial Sequence: Synthetic peptide
GKKAIGTVL

SEQ ID NO: 16048 - protein, 8 aa, synthetic construct
  REGION 1..8: note = Description of Artificial Sequence: Synthetic peptide
VQAKLQEY

SEQ ID NO: 16049 - protein, 8 aa, synthetic construct
  REGION 1..8: note = Description of Artificial Sequence: Synthetic peptide
GQLIYNTY

SEQ ID NO: 16050 - protein, 8 aa, synthetic construct
  REGION 1..8: note = Description of Artificial Sequence: Synthetic peptide
QKVGQAMY

SEQ ID NO: 16051 - protein, 8 aa, synthetic construct
  REGION 1..8: note = Description of Artificial Sequence: Synthetic peptide
GQHIYNTY

SEQ ID NO: 16052 - protein, 9 aa, synthetic construct
  REGION 1..9: note = Description of Artificial Sequence: Synthetic peptide
TKNPEMVIY

SEQ ID NO: 16053 - protein, 8 aa, synthetic construct
  REGION 1..8: note = Description of Artificial Sequence: Synthetic peptide
TKVGSLQY

SEQ ID NO: 16054 - protein, 9 aa, synthetic construct
  REGION 1..9: note = Description of Artificial Sequence: Synthetic peptide
SQKQQQAAM

SEQ ID NO: 16055 - protein, 9 aa, synthetic construct
  REGION 1..9: note = Description of Artificial Sequence: Synthetic peptide
FQQGEAREF

SEQ ID NO: 16056 - protein, 8 aa, synthetic construct
  REGION 1..8: note = Description of Artificial Sequence: Synthetic peptide
NKGLGISY

SEQ ID NO: 16057 - protein, 9 aa, synthetic construct
  REGION 1..9: note = Description of Artificial Sequence: Synthetic peptide
WQKVGQAMY

SEQ ID NO: 16058 - protein, 9 aa, synthetic construct
  REGION 1..9: note = Description of Artificial Sequence: Synthetic peptide
KQEQGQWTY

SEQ ID NO: 16059 - protein, 9 aa, synthetic construct
  REGION 1..9: note = Description of Artificial Sequence: Synthetic peptide
KQGPDQWTY

SEQ ID NO: 16060 - protein, 9 aa, synthetic construct
  REGION 1..9: note = Description of Artificial Sequence: Synthetic peptide
IRFGPGQAF

SEQ ID NO: 16061 - protein, 10 aa, synthetic construct
  REGION 1..10: note = Description of Artificial Sequence: Synthetic peptide
QKQGPGQWTY

SEQ ID NO: 16062 - protein, 9 aa, synthetic construct
  REGION 1..9: note = Description of Artificial Sequence: Synthetic peptide
VKVVEEKAF

SEQ ID NO: 16063 - protein, 9 aa, synthetic construct
  REGION 1..9: note = Description of Artificial Sequence: Synthetic peptide
GKRAIGTVL

SEQ ID NO: 16064 - protein, 9 aa, synthetic construct
  REGION 1..9: note = Description of Artificial Sequence: Synthetic peptide
IKNPEMVIY

SEQ ID NO: 16065 - protein, 9 aa, synthetic construct
  REGION 1..9: note = Description of Artificial Sequence: Synthetic peptide
KQITKIQNF

SEQ ID NO: 16066 - protein, 9 aa, synthetic construct
  REGION 1..9: note = Description of Artificial Sequence: Synthetic peptide
QHSRIGITL

SEQ ID NO: 16067 - protein, 9 aa, synthetic construct
  REGION 1..9: note = Description of Artificial Sequence: Synthetic peptide
IHLGPGQAL

SEQ ID NO: 16068 - protein, 8 aa, synthetic construct
  REGION 1..8: note = Description of Artificial Sequence: Synthetic peptide
YHDPSKEL

SEQ ID NO: 16069 - protein, 9 aa, synthetic construct
  REGION 1..9: note = Description of Artificial Sequence: Synthetic peptide
IHSISERVL

SEQ ID NO: 16070 - protein, 9 aa, synthetic construct
  REGION 1..9: note = Description of Artificial Sequence: Synthetic peptide
HQAISPRTL

SEQ ID NO: 16071 - protein, 9 aa, synthetic construct
  REGION 1..9: note = Description of Artificial Sequence: Synthetic peptide
EHLKTAVQM

SEQ ID NO: 16072 - protein, 9 aa, synthetic construct
  REGION 1..9: note = Description of Artificial Sequence: Synthetic peptide
THLEGKIIL

SEQ ID NO: 16073 - protein, 9 aa, synthetic construct
  REGION 1..9: note = Description of Artificial Sequence: Synthetic peptide
NHTEANNTV

SEQ ID NO: 16074 - protein, 9 aa, synthetic construct
  REGION 1..9: note = Description of Artificial Sequence: Synthetic peptide
GHQAAMQML

SEQ ID NO: 16075 - protein, 9 aa, synthetic construct
  REGION 1..9: note = Description of Artificial Sequence: Synthetic peptide
YHDPSKELI

SEQ ID NO: 16076 - protein, 9 aa, synthetic construct
  REGION 1..9: note = Description of Artificial Sequence: Synthetic peptide
IHSISERIL

SEQ ID NO: 16077 - protein, 9 aa, synthetic construct
  REGION 1..9: note = Description of Artificial Sequence: Synthetic peptide
AHTNDVKQL

SEQ ID NO: 16078 - protein, 9 aa, synthetic construct
  REGION 1..9: note = Description of Artificial Sequence: Synthetic peptide
FQQGEARKL

SEQ ID NO: 16079 - protein, 9 aa, synthetic construct
  REGION 1..9: note = Description of Artificial Sequence: Synthetic peptide
IHTDNGPNF

SEQ ID NO: 16080 - protein, 8 aa, synthetic construct
  REGION 1..8: note = Description of Artificial Sequence: Synthetic peptide
DHRENPTM

SEQ ID NO: 16081 - protein, 10 aa, synthetic construct
  REGION 1..10: note = Description of Artificial Sequence: Synthetic peptide
HQNPVPKQPL

SEQ ID NO: 16082 - protein, 10 aa, synthetic construct
  REGION 1..10: note = Description of Artificial Sequence: Synthetic peptide
IHQAISPRTL

SEQ ID NO: 16083 - protein, 9 aa, synthetic construct
  REGION 1..9: note = Description of Artificial Sequence: Synthetic peptide
SQIYPGIKV

SEQ ID NO: 16084 - protein, 9 aa, synthetic construct
  REGION 1..9: note = Description of Artificial Sequence: Synthetic peptide
VAIGPGQAF

SEQ ID NO: 16085 - protein, 9 aa, synthetic construct
  REGION 1..9: note = Description of Artificial Sequence: Synthetic peptide
TVAIAVANW

SEQ ID NO: 16086 - protein, 9 aa, synthetic construct
  REGION 1..9: note = Description of Artificial Sequence: Synthetic peptide
TVLDVGDAY

SEQ ID NO: 16087 - protein, 9 aa, synthetic construct
  REGION 1..9: note = Description of Artificial Sequence: Synthetic peptide
TINDEAAEW

SEQ ID NO: 16088 - protein, 9 aa, synthetic construct
  REGION 1..9: note = Description of Artificial Sequence: Synthetic peptide
IPIGPGQAF

SEQ ID NO: 16089 - protein, 9 aa, synthetic construct
  REGION 1..9: note = Description of Artificial Sequence: Synthetic peptide
TINEEAAEW

SEQ ID NO: 16090 - protein, 9 aa, synthetic construct
  REGION 1..9: note = Description of Artificial Sequence: Synthetic peptide
VQKQEQGQW

SEQ ID NO: 16091 - protein, 9 aa, synthetic construct
  REGION 1..9: note = Description of Artificial Sequence: Synthetic peptide
TIAIAVANW

SEQ ID NO: 16092 - protein, 9 aa, synthetic construct
  REGION 1..9: note = Description of Artificial Sequence: Synthetic peptide
DELATLVEM

SEQ ID NO: 16093 - protein, 11 aa, synthetic construct
  REGION 1..11: note = Description of Artificial Sequence: Synthetic peptide
SEVNIVTDSQY

SEQ ID NO: 16094 - protein, 8 aa, synthetic construct
  REGION 1..8: note = Description of Artificial Sequence: Synthetic peptide
LEITTHSF

SEQ ID NO: 16095 - protein, 8 aa, synthetic construct
  REGION 1..8: note = Description of Artificial Sequence: Synthetic peptide
NETPGIRY

SEQ ID NO: 16096 - protein, 8 aa, synthetic construct
  REGION 1..8: note = Description of Artificial Sequence: Synthetic peptide
IENVTENF

SEQ ID NO: 16097 - protein, 8 aa, synthetic construct
  REGION 1..8: note = Description of Artificial Sequence: Synthetic peptide
TELQAIQL

SEQ ID NO: 16098 - protein, 8 aa, synthetic construct
  REGION 1..8: note = Description of Artificial Sequence: Synthetic peptide
PEIVIYQY

SEQ ID NO: 16099 - protein, 8 aa, synthetic construct
  REGION 1..8: note = Description of Artificial Sequence: Synthetic peptide
EEIKNCSF

SEQ ID NO: 16100 - protein, 8 aa, synthetic construct
  REGION 1..8: note = Description of Artificial Sequence: Synthetic peptide
IEIVQRAF

SEQ ID NO: 16101 - protein, 8 aa, synthetic construct
  REGION 1..8: note = Description of Artificial Sequence: Synthetic peptide
DEELLRAV

SEQ ID NO: 16102 - protein, 8 aa, synthetic construct
  REGION 1..8: note = Description of Artificial Sequence: Synthetic peptide
TEELATLM

SEQ ID NO: 16103 - protein, 8 aa, synthetic construct
  REGION 1..8: note = Description of Artificial Sequence: Synthetic peptide
IEVAQRAY

SEQ ID NO: 16104 - protein, 10 aa, synthetic construct
  REGION 1..10: note = Description of Artificial Sequence: Synthetic peptide
TEPIIGAETY

SEQ ID NO: 16105 - protein, 8 aa, synthetic construct
  REGION 1..8: note = Description of Artificial Sequence: Synthetic peptide
PEMVIYQY

SEQ ID NO: 16106 - protein, 8 aa, synthetic construct
  REGION 1..8: note = Description of Artificial Sequence: Synthetic peptide
NETEIFRP

SEQ ID NO: 16107 - protein, 8 aa, synthetic construct
  REGION 1..8: note = Description of Artificial Sequence: Synthetic peptide
DEELLTAV

SEQ ID NO: 16108 - protein, 9 aa, synthetic construct
  REGION 1..9: note = Description of Artificial Sequence: Synthetic peptide
ARVLAVERY

SEQ ID NO: 16109 - protein, 10 aa, synthetic construct
  REGION 1..10: note = Description of Artificial Sequence: Synthetic peptide
GNSSQVSQNY

SEQ ID NO: 16110 - protein, 10 aa, synthetic construct
  REGION 1..10: note = Description of Artificial Sequence: Synthetic peptide
VRQGYSPLSF

SEQ ID NO: 16111 - protein, 10 aa, synthetic construct
  REGION 1..10: note = Description of Artificial Sequence: Synthetic peptide
GGLDGLVYSK

SEQ ID NO: 16112 - protein, 9 aa, synthetic construct
  REGION 1..9: note = Description of Artificial Sequence: Synthetic peptide
GRNSSANNY

SEQ ID NO: 16113 - protein, 11 aa, synthetic construct
  REGION 1..11: note = Description of Artificial Sequence: Synthetic peptide
GQVGDQAEHLK

SEQ ID NO: 16114 - protein, 9 aa, synthetic construct
  REGION 1..9: note = Description of Artificial Sequence: Synthetic peptide
SRVLAIERY

SEQ ID NO: 16115 - protein, 10 aa, synthetic construct
  REGION 1..10: note = Description of Artificial Sequence: Synthetic peptide
GGLDGLIYSK

SEQ ID NO: 16116 - protein, 10 aa, synthetic construct
  REGION 1..10: note = Description of Artificial Sequence: Synthetic peptide
IRFGPGQAFY

SEQ ID NO: 16117 - protein, 11 aa, synthetic construct
  REGION 1..11: note = Description of Artificial Sequence: Synthetic peptide
KGGLEGLIYSK

SEQ ID NO: 16118 - protein, 8 aa, synthetic construct
  REGION 1..8: note = Description of Artificial Sequence: Synthetic peptide
LDGLVYSK

SEQ ID NO: 16119 - protein, 9 aa, synthetic construct
  REGION 1..9: note = Description of Artificial Sequence: Synthetic peptide
SLFGNDQSK

SEQ ID NO: 16120 - protein, 9 aa, synthetic construct
  REGION 1..9: note = Description of Artificial Sequence: Synthetic peptide
ILGEIVSPR

SEQ ID NO: 16121 - protein, 9 aa, synthetic construct
  REGION 1..9: note = Description of Artificial Sequence: Synthetic peptide
GLDGLVYSK

SEQ ID NO: 16122 - protein, 9 aa, synthetic construct
  REGION 1..9: note = Description of Artificial Sequence: Synthetic peptide
TDAIIGDIR

SEQ ID NO: 16123 - protein, 9 aa, synthetic construct
  REGION 1..9: note = Description of Artificial Sequence: Synthetic peptide
IRFGPGQAF

SEQ ID NO: 16124 - protein, 10 aa, synthetic construct
  REGION 1..10: note = Description of Artificial Sequence: Synthetic peptide
DQILIEISGK

SEQ ID NO: 16125 - protein, 10 aa, synthetic construct
  REGION 1..10: note = Description of Artificial Sequence: Synthetic peptide
KSLFGNDQSK

SEQ ID NO: 16126 - protein, 9 aa, synthetic construct
  REGION 1..9: note = Description of Artificial Sequence: Synthetic peptide
DRVIEVAQR

SEQ ID NO: 16127 - protein, 11 aa, synthetic construct
  REGION 1..11: note = Description of Artificial Sequence: Synthetic peptide
YATDAIIGDIR

SEQ ID NO: 16128 - protein, 9 aa, synthetic construct
  REGION 1..9: note = Description of Artificial Sequence: Synthetic peptide
GDSPLPEAR

SEQ ID NO: 16129 - protein, 10 aa, synthetic construct
  REGION 1..10: note = Description of Artificial Sequence: Synthetic peptide
TYYVDGAANR

SEQ ID NO: 16130 - protein, 9 aa, synthetic construct
  REGION 1..9: note = Description of Artificial Sequence: Synthetic peptide
GLDGLIYSK

SEQ ID NO: 16131 - protein, 10 aa, synthetic construct
  REGION 1..10: note = Description of Artificial Sequence: Synthetic peptide
GGLEGLIYSK

SEQ ID NO: 16132 - protein, 10 aa, synthetic construct
  REGION 1..10: note = Description of Artificial Sequence: Synthetic peptide
GNSNPVSQNY

SEQ ID NO: 16133 - protein, 9 aa, synthetic construct
  REGION 1..9: note = Description of Artificial Sequence: Synthetic peptide
HLGPGQALY

SEQ ID NO: 16134 - protein, 8 aa, synthetic construct
  REGION 1..8: note = Description of Artificial Sequence: Synthetic peptide
QRVGQAMY

SEQ ID NO: 16135 - protein, 11 aa, synthetic construct
  REGION 1..11: note = Description of Artificial Sequence: Synthetic peptide
GDNNSTSEIFR

SEQ ID NO: 16136 - protein, 9 aa, synthetic construct
  REGION 1..9: note = Description of Artificial Sequence: Synthetic peptide
SRIGIIPQR

SEQ ID NO: 16137 - protein, 9 aa, synthetic construct
  REGION 1..9: note = Description of Artificial Sequence: Synthetic peptide
SRIGITPQR

SEQ ID NO: 16138 - protein, 9 aa, synthetic construct
  REGION 1..9: note = Description of Artificial Sequence: Synthetic peptide
ARVLAVERY

SEQ ID NO: 16139 - protein, 9 aa, synthetic construct
  REGION 1..9: note = Description of Artificial Sequence: Synthetic peptide
GRNSSANNY

SEQ ID NO: 16140 - protein, 9 aa, synthetic construct
  REGION 1..9: note = Description of Artificial Sequence: Synthetic peptide
GRAVLNIPR

SEQ ID NO: 16141 - protein, 10 aa, synthetic construct
  REGION 1..10: note = Description of Artificial Sequence: Synthetic peptide
IRFGPGQAFY

SEQ ID NO: 16142 - protein, 9 aa, synthetic construct
  REGION 1..9: note = Description of Artificial Sequence: Synthetic peptide
IRFGPGQAF

SEQ ID NO: 16143 - protein, 9 aa, synthetic construct
  REGION 1..9: note = Description of Artificial Sequence: Synthetic peptide
SRIGITPRR

SEQ ID NO: 16144 - protein, 9 aa, synthetic construct
  REGION 1..9: note = Description of Artificial Sequence: Synthetic peptide
QRIEVKDTK

SEQ ID NO: 16145 - protein, 11 aa, synthetic construct
  REGION 1..11: note = Description of Artificial Sequence: Synthetic peptide
GRNSSANNYRL

SEQ ID NO: 16146 - protein, 9 aa, synthetic construct
  REGION 1..9: note = Description of Artificial Sequence: Synthetic peptide
EPIPGVETY

SEQ ID NO: 16147 - protein, 9 aa, synthetic construct
  REGION 1..9: note = Description of Artificial Sequence: Synthetic peptide
EPIPGAETY

SEQ ID NO: 16148 - protein, 9 aa, synthetic construct
  REGION 1..9: note = Description of Artificial Sequence: Synthetic peptide
EPIIGAETY

SEQ ID NO: 16149 - protein, 9 aa, synthetic construct
  REGION 1..9: note = Description of Artificial Sequence: Synthetic peptide
IPIGPGQAF

SEQ ID NO: 16150 - protein, 11 aa, synthetic construct
  REGION 1..11: note = Description of Artificial Sequence: Synthetic peptide
VPISNGNKTSY

SEQ ID NO: 16151 - protein, 11 aa, synthetic construct
  REGION 1..11: note = Description of Artificial Sequence: Synthetic peptide
IPAETGQETAY

SEQ ID NO: 16152 - protein, 9 aa, synthetic construct
  REGION 1..9: note = Description of Artificial Sequence: Synthetic peptide
NPEMVIYQY

SEQ ID NO: 16153 - protein, 9 aa, synthetic construct
  REGION 1..9: note = Description of Artificial Sequence: Synthetic peptide
NPEIVIYQY

SEQ ID NO: 16154 - protein, 9 aa, synthetic construct
  REGION 1..9: note = Description of Artificial Sequence: Synthetic peptide
DATLVVRTY

SEQ ID NO: 16155 - protein, 9 aa, synthetic construct
  REGION 1..9: note = Description of Artificial Sequence: Synthetic peptide
QASGATIMM

SEQ ID NO: 16156 - protein, 9 aa, synthetic construct
  REGION 1..9: note = Description of Artificial Sequence: Synthetic peptide
TVLDVGDAY

SEQ ID NO: 16157 - protein, 11 aa, synthetic construct
  REGION 1..11: note = Description of Artificial Sequence: Synthetic peptide
NANNASETETF

SEQ ID NO: 16158 - protein, 9 aa, synthetic construct
  REGION 1..9: note = Description of Artificial Sequence: Synthetic peptide
VAIGPGQAF

SEQ ID NO: 16159 - protein, 9 aa, synthetic construct
  REGION 1..9: note = Description of Artificial Sequence: Synthetic peptide
PPVPVGEIY

SEQ ID NO: 16160 - protein, 10 aa, synthetic construct
  REGION 1..10: note = Description of Artificial Sequence: Synthetic peptide
EPIPGVETYY

SEQ ID NO: 16161 - protein, 10 aa, synthetic construct
  REGION 1..10: note = Description of Artificial Sequence: Synthetic peptide
IPIGPGQAFY

SEQ ID NO: 16162 - protein, 9 aa, synthetic construct
  REGION 1..9: note = Description of Artificial Sequence: Synthetic peptide
VPLTAEAEM

SEQ ID NO: 16163 - protein, 8 aa, synthetic construct
  REGION 1..8: note = Description of Artificial Sequence: Synthetic peptide
DPWVGNNL

SEQ ID NO: 16164 - protein, 9 aa, synthetic construct
  REGION 1..9: note = Description of Artificial Sequence: Synthetic peptide
PPIPVGEIY

SEQ ID NO: 16165 - protein, 8 aa, synthetic construct
  REGION 1..8: note = Description of Artificial Sequence: Synthetic peptide
DPWVGDNL

SEQ ID NO: 16166 - protein, 9 aa, synthetic construct
  REGION 1..9: note = Description of Artificial Sequence: Synthetic peptide
TAEGCVQIM

SEQ ID NO: 16167 - protein, 10 aa, synthetic construct
  REGION 1..10: note = Description of Artificial Sequence: Synthetic peptide
EPIPGAETYY

SEQ ID NO: 16168 - protein, 10 aa, synthetic construct
  REGION 1..10: note = Description of Artificial Sequence: Synthetic peptide
NPPVPVGEIY

SEQ ID NO: 16169 - protein, 10 aa, synthetic construct
  REGION 1..10: note = Description of Artificial Sequence: Synthetic peptide
IPMKNVTENF

SEQ ID NO: 16170 - protein, 10 aa, synthetic construct
  REGION 1..10: note = Description of Artificial Sequence: Synthetic peptide
NPPIPVGEIY

SEQ ID NO: 16171 - protein, 10 aa, synthetic construct
  REGION 1..10: note = Description of Artificial Sequence: Synthetic peptide
VPLDENFRKY

SEQ ID NO: 16172 - protein, 9 aa, synthetic construct
  REGION 1..9: note = Description of Artificial Sequence: Synthetic peptide
NSNPVSQNY

SEQ ID NO: 16173 - protein, 9 aa, synthetic construct
  REGION 1..9: note = Description of Artificial Sequence: Synthetic peptide
SPAIFQSSM

SEQ ID NO: 16174 - protein, 10 aa, synthetic construct
  REGION 1..10: note = Description of Artificial Sequence: Synthetic peptide
IPLGNVTENF

SEQ ID NO: 16175 - protein, 9 aa, synthetic construct
  REGION 1..9: note = Description of Artificial Sequence: Synthetic peptide
DPSPQEINM

SEQ ID NO: 16176 - protein, 9 aa, synthetic construct
  REGION 1..9: note = Description of Artificial Sequence: Synthetic peptide
DAKLVVSTY

SEQ ID NO: 16177 - protein, 9 aa, synthetic construct
  REGION 1..9: note = Description of Artificial Sequence: Synthetic peptide
STRNITEEY

SEQ ID NO: 16178 - protein, 10 aa, synthetic construct
  REGION 1..10: note = Description of Artificial Sequence: Synthetic peptide
VPLDESFRKY

SEQ ID NO: 16179 - protein, 10 aa, synthetic construct
  REGION 1..10: note = Description of Artificial Sequence: Synthetic peptide
TAANNPDCAW

SEQ ID NO: 16180 - protein, 9 aa, synthetic construct
  REGION 1..9: note = Description of Artificial Sequence: Synthetic peptide
DPNPQEIPM

SEQ ID NO: 16181 - protein, 9 aa, synthetic construct
  REGION 1..9: note = Description of Artificial Sequence: Synthetic peptide
TGAAAAIMM

SEQ ID NO: 16182 - protein, 8 aa, synthetic construct
  REGION 1..8: note = Description of Artificial Sequence: Synthetic peptide
DPWIGDNL

SEQ ID NO: 16183 - protein, 9 aa, synthetic construct
  REGION 1..9: note = Description of Artificial Sequence: Synthetic peptide
TQNPEIVIY

SEQ ID NO: 16184 - protein, 9 aa, synthetic construct
  REGION 1..9: note = Description of Artificial Sequence: Synthetic peptide
SAEPVPLQL

SEQ ID NO: 16185 - protein, 9 aa, synthetic construct
  REGION 1..9: note = Description of Artificial Sequence: Synthetic peptide
FPISPIETV

SEQ ID NO: 16186 - protein, 9 aa, synthetic construct
  REGION 1..9: note = Description of Artificial Sequence: Synthetic peptide
NVTENFNVW

SEQ ID NO: 16187 - protein, 9 aa, synthetic construct
  REGION 1..9: note = Description of Artificial Sequence: Synthetic peptide
DPDPQEIPL

SEQ ID NO: 16188 - protein, 9 aa, synthetic construct
  REGION 1..9: note = Description of Artificial Sequence: Synthetic peptide
DPNPQEIPM

SEQ ID NO: 16189 - protein, 9 aa, synthetic construct
  REGION 1..9: note = Description of Artificial Sequence: Synthetic peptide
QPDRSESEL

SEQ ID NO: 16190 - protein, 9 aa, synthetic construct
  REGION 1..9: note = Description of Artificial Sequence: Synthetic peptide
DPSPQEINM

SEQ ID NO: 16191 - protein, 9 aa, synthetic construct
  REGION 1..9: note = Description of Artificial Sequence: Synthetic peptide
VPLTAEAEM

SEQ ID NO: 16192 - protein, 9 aa, synthetic construct
  REGION 1..9: note = Description of Artificial Sequence: Synthetic peptide
QPQGTEPGL

SEQ ID NO: 16193 - protein, 9 aa, synthetic construct
  REGION 1..9: note = Description of Artificial Sequence: Synthetic peptide
YSTQVDPDL

SEQ ID NO: 16194 - protein, 9 aa, synthetic construct
  REGION 1..9: note = Description of Artificial Sequence: Synthetic peptide
SAEPVPLQL

SEQ ID NO: 16195 - protein, 9 aa, synthetic construct
  REGION 1..9: note = Description of Artificial Sequence: Synthetic peptide
YSTQIDPDL

SEQ ID NO: 16196 - protein, 11 aa, synthetic construct
  REGION 1..11: note = Description of Artificial Sequence: Synthetic peptide
VPVWEDADTTL

SEQ ID NO: 16197 - protein, 9 aa, synthetic construct
  REGION 1..9: note = Description of Artificial Sequence: Synthetic peptide
TAEGCVQIM

SEQ ID NO: 16198 - protein, 9 aa, synthetic construct
  REGION 1..9: note = Description of Artificial Sequence: Synthetic peptide
VPLTAEAEL

SEQ ID NO: 16199 - protein, 9 aa, synthetic construct
  REGION 1..9: note = Description of Artificial Sequence: Synthetic peptide
TAEGCQQIM

SEQ ID NO: 16200 - protein, 9 aa, synthetic construct
  REGION 1..9: note = Description of Artificial Sequence: Synthetic peptide
MTAEAEMEL

SEQ ID NO: 16201 - protein, 9 aa, synthetic construct
  REGION 1..9: note = Description of Artificial Sequence: Synthetic peptide
IPIGPGQAF

SEQ ID NO: 16202 - protein, 8 aa, synthetic construct
  REGION 1..8: note = Description of Artificial Sequence: Synthetic peptide
DADKEVLV

SEQ ID NO: 16203 - protein, 8 aa, synthetic construct
  REGION 1..8: note = Description of Artificial Sequence: Synthetic peptide
DPWVGDNL

SEQ ID NO: 16204 - protein, 9 aa, synthetic construct
  REGION 1..9: note = Description of Artificial Sequence: Synthetic peptide
QPDRSGSEL

SEQ ID NO: 16205 - protein, 9 aa, synthetic construct
  REGION 1..9: note = Description of Artificial Sequence: Synthetic peptide
FPISPIETV

SEQ ID NO: 16206 - protein, 9 aa, synthetic construct
  REGION 1..9: note = Description of Artificial Sequence: Synthetic peptide
IPIGPGQAF

SEQ ID NO: 16207 - protein, 9 aa, synthetic construct
  REGION 1..9: note = Description of Artificial Sequence: Synthetic peptide
QASGATIMM

SEQ ID NO: 16208 - protein, 9 aa, synthetic construct
  REGION 1..9: note = Description of Artificial Sequence: Synthetic peptide
VPLTAEAEL

SEQ ID NO: 16209 - protein, 9 aa, synthetic construct
  REGION 1..9: note = Description of Artificial Sequence: Synthetic peptide
FPISPIETV

SEQ ID NO: 16210 - protein, 9 aa, synthetic construct
  REGION 1..9: note = Description of Artificial Sequence: Synthetic peptide
VPLTAEAEM

SEQ ID NO: 16211 - protein, 9 aa, synthetic construct
  REGION 1..9: note = Description of Artificial Sequence: Synthetic peptide
SAEPVPLQL

SEQ ID NO: 16212 - protein, 11 aa, synthetic construct
  REGION 1..11: note = Description of Artificial Sequence: Synthetic peptide
VPVWEDADTTL

SEQ ID NO: 16213 - protein, 9 aa, synthetic construct
  REGION 1..9: note = Description of Artificial Sequence: Synthetic peptide
DPNPQEIPM

SEQ ID NO: 16214 - protein, 9 aa, synthetic construct
  REGION 1..9: note = Description of Artificial Sequence: Synthetic peptide
TAEGCVQIM

SEQ ID NO: 16215 - protein, 9 aa, synthetic construct
  REGION 1..9: note = Description of Artificial Sequence: Synthetic peptide
YSTQVDPDL

SEQ ID NO: 16216 - protein, 9 aa, synthetic construct
  REGION 1..9: note = Description of Artificial Sequence: Synthetic peptide
YSTQIDPDL

SEQ ID NO: 16217 - protein, 9 aa, synthetic construct
  REGION 1..9: note = Description of Artificial Sequence: Synthetic peptide
TPQDLNTML

SEQ ID NO: 16218 - protein, 9 aa, synthetic construct
  REGION 1..9: note = Description of Artificial Sequence: Synthetic peptide
QPQGTEPGL

SEQ ID NO: 16219 - protein, 8 aa, synthetic construct
  REGION 1..8: note = Description of Artificial Sequence: Synthetic peptide
DPWVGNNL

SEQ ID NO: 16220 - protein, 9 aa, synthetic construct
  REGION 1..9: note = Description of Artificial Sequence: Synthetic peptide
LPIAGNLVC

SEQ ID NO: 16221 - protein, 8 aa, synthetic construct
  REGION 1..8: note = Description of Artificial Sequence: Synthetic peptide
DPWVGDNL

SEQ ID NO: 16222 - protein, 9 aa, synthetic construct
  REGION 1..9: note = Description of Artificial Sequence: Synthetic peptide
DPSPQEINM

SEQ ID NO: 16223 - protein, 9 aa, synthetic construct
  REGION 1..9: note = Description of Artificial Sequence: Synthetic peptide
IVTDSQYAL

SEQ ID NO: 16224 - protein, 10 aa, synthetic construct
  REGION 1..10: note = Description of Artificial Sequence: Synthetic peptide
SPIETVPVKL

SEQ ID NO: 16225 - protein, 9 aa, synthetic construct
  REGION 1..9: note = Description of Artificial Sequence: Synthetic peptide
SALFNSSSL

SEQ ID NO: 16226 - protein, 9 aa, synthetic construct
  REGION 1..9: note = Description of Artificial Sequence: Synthetic peptide
HPQQAGPIA

SEQ ID NO: 16227 - protein, 9 aa, synthetic construct
  REGION 1..9: note = Description of Artificial Sequence: Synthetic peptide
TAEGCQQIM

SEQ ID NO: 16228 - protein, 9 aa, synthetic construct
  REGION 1..9: note = Description of Artificial Sequence: Synthetic peptide
DPDPQEIPL

SEQ ID NO: 16229 - protein, 9 aa, synthetic construct
  REGION 1..9: note = Description of Artificial Sequence: Synthetic peptide
TANGTDRVI

SEQ ID NO: 16230 - protein, 9 aa, synthetic construct
  REGION 1..9: note = Description of Artificial Sequence: Synthetic peptide
MIVGGLISL

SEQ ID NO: 16231 - protein, 8 aa, synthetic construct
  REGION 1..8: note = Description of Artificial Sequence: Synthetic peptide
DPWIGDNL

SEQ ID NO: 16232 - protein, 10 aa, synthetic construct
  REGION 1..10: note = Description of Artificial Sequence: Synthetic peptide
NANPDCKTIL

SEQ ID NO: 16233 - protein, 9 aa, synthetic construct
  REGION 1..9: note = Description of Artificial Sequence: Synthetic peptide
MTAEAEMEL

SEQ ID NO: 16234 - protein, 11 aa, synthetic construct
  REGION 1..11: note = Description of Artificial Sequence: Synthetic peptide
VPVWEDAKTTL

SEQ ID NO: 16235 - protein, 8 aa, synthetic construct
  REGION 1..8: note = Description of Artificial Sequence: Synthetic peptide
TPGPGTRL

SEQ ID NO: 16236 - protein, 11 aa, synthetic construct
  REGION 1..11: note = Description of Artificial Sequence: Synthetic peptide
VPLTAEAELEL

SEQ ID NO: 16237 - protein, 10 aa, synthetic construct
  REGION 1..10: note = Description of Artificial Sequence: Synthetic peptide
NANPDCKIIL

SEQ ID NO: 16238 - protein, 9 aa, synthetic construct
  REGION 1..9: note = Description of Artificial Sequence: Synthetic peptide
YPLSSLKSL

SEQ ID NO: 16239 - protein, 11 aa, synthetic construct
  REGION 1..11: note = Description of Artificial Sequence: Synthetic peptide
IPAETGQETAY

SEQ ID NO: 16240 - protein, 9 aa, synthetic construct
  REGION 1..9: note = Description of Artificial Sequence: Synthetic peptide
EPIPGVETY

SEQ ID NO: 16241 - protein, 9 aa, synthetic construct
  REGION 1..9: note = Description of Artificial Sequence: Synthetic peptide
EPIPGAETY

SEQ ID NO: 16242 - protein, 9 aa, synthetic construct
  REGION 1..9: note = Description of Artificial Sequence: Synthetic peptide
IPIGPGQAF

SEQ ID NO: 16243 - protein, 9 aa, synthetic construct
  REGION 1..9: note = Description of Artificial Sequence: Synthetic peptide
EPIIGAETY

SEQ ID NO: 16244 - protein, 11 aa, synthetic construct
  REGION 1..11: note = Description of Artificial Sequence: Synthetic peptide
NANNASETETF

SEQ ID NO: 16245 - protein, 11 aa, synthetic construct
  REGION 1..11: note = Description of Artificial Sequence: Synthetic peptide
VPISNGNKTSY

SEQ ID NO: 16246 - protein, 9 aa, synthetic construct
  REGION 1..9: note = Description of Artificial Sequence: Synthetic peptide
VPLTAEAEM

SEQ ID NO: 16247 - protein, 9 aa, synthetic construct
  REGION 1..9: note = Description of Artificial Sequence: Synthetic peptide
NPEIVIYQY

SEQ ID NO: 16248 - protein, 9 aa, synthetic construct
  REGION 1..9: note = Description of Artificial Sequence: Synthetic peptide
NPEMVIYQY

SEQ ID NO: 16249 - protein, 9 aa, synthetic construct
  REGION 1..9: note = Description of Artificial Sequence: Synthetic peptide
DPNPQEIPM

SEQ ID NO: 16250 - protein, 9 aa, synthetic construct
  REGION 1..9: note = Description of Artificial Sequence: Synthetic peptide
FSVPLDESF

SEQ ID NO: 16251 - protein, 10 aa, synthetic construct
  REGION 1..10: note = Description of Artificial Sequence: Synthetic peptide
EPIPGVETYY

SEQ ID NO: 16252 - protein, 10 aa, synthetic construct
  REGION 1..10: note = Description of Artificial Sequence: Synthetic peptide
EPIPGAETYY

SEQ ID NO: 16253 - protein, 9 aa, synthetic construct
  REGION 1..9: note = Description of Artificial Sequence: Synthetic peptide
TVLDVGDAY

SEQ ID NO: 16254 - protein, 10 aa, synthetic construct
  REGION 1..10: note = Description of Artificial Sequence: Synthetic peptide
NPPVPVGEIY

SEQ ID NO: 16255 - protein, 10 aa, synthetic construct
  REGION 1..10: note = Description of Artificial Sequence: Synthetic peptide
NPPIPVGEIY

SEQ ID NO: 16256 - protein, 9 aa, synthetic construct
  REGION 1..9: note = Description of Artificial Sequence: Synthetic peptide
VAIGPGQAF

SEQ ID NO: 16257 - protein, 9 aa, synthetic construct
  REGION 1..9: note = Description of Artificial Sequence: Synthetic peptide
DPNPQEIPM

SEQ ID NO: 16258 - protein, 9 aa, synthetic construct
  REGION 1..9: note = Description of Artificial Sequence: Synthetic peptide
DPDPQEIPL

SEQ ID NO: 16259 - protein, 9 aa, synthetic construct
  REGION 1..9: note = Description of Artificial Sequence: Synthetic peptide
DPSPQEINM

SEQ ID NO: 16260 - protein, 9 aa, synthetic construct
  REGION 1..9: note = Description of Artificial Sequence: Synthetic peptide
VPLTAEAEM

SEQ ID NO: 16261 - protein, 9 aa, synthetic construct
  REGION 1..9: note = Description of Artificial Sequence: Synthetic peptide
QPDRSESEL

SEQ ID NO: 16262 - protein, 9 aa, synthetic construct
  REGION 1..9: note = Description of Artificial Sequence: Synthetic peptide
VPLTAEAEL

SEQ ID NO: 16263 - protein, 9 aa, synthetic construct
  REGION 1..9: note = Description of Artificial Sequence: Synthetic peptide
IPIGPGQAF

SEQ ID NO: 16264 - protein, 9 aa, synthetic construct
  REGION 1..9: note = Description of Artificial Sequence: Synthetic peptide
SAEPVPLQL

SEQ ID NO: 16265 - protein, 11 aa, synthetic construct
  REGION 1..11: note = Description of Artificial Sequence: Synthetic peptide
VPVWEDADTTL

SEQ ID NO: 16266 - protein, 9 aa, synthetic construct
  REGION 1..9: note = Description of Artificial Sequence: Synthetic peptide
QPQGTEPGL

SEQ ID NO: 16267 - protein, 9 aa, synthetic construct
  REGION 1..9: note = Description of Artificial Sequence: Synthetic peptide
TAEGCVQIM

SEQ ID NO: 16268 - protein, 9 aa, synthetic construct
  REGION 1..9: note = Description of Artificial Sequence: Synthetic peptide
YSTQVDPDL

SEQ ID NO: 16269 - protein, 9 aa, synthetic construct
  REGION 1..9: note = Description of Artificial Sequence: Synthetic peptide
TAEGCQQIM

SEQ ID NO: 16270 - protein, 9 aa, synthetic construct
  REGION 1..9: note = Description of Artificial Sequence: Synthetic peptide
YSTQIDPDL

SEQ ID NO: 16271 - protein, 9 aa, synthetic construct
  REGION 1..9: note = Description of Artificial Sequence: Synthetic peptide
QASGATIMM

SEQ ID NO: 16272 - protein, 8 aa, synthetic construct
  REGION 1..8: note = Description of Artificial Sequence: Synthetic peptide
DPWVGDNL

SEQ ID NO: 16273 - protein, 8 aa, synthetic construct
  REGION 1..8: note = Description of Artificial Sequence: Synthetic peptide
DPDLADQL

SEQ ID NO: 16274 - protein, 9 aa, synthetic construct
  REGION 1..9: note = Description of Artificial Sequence: Synthetic peptide
FPISPIETV

SEQ ID NO: 16275 - protein, 8 aa, synthetic construct
  REGION 1..8: note = Description of Artificial Sequence: Synthetic peptide
DPDLADHL

SEQ ID NO: 16276 - protein, 9 aa, synthetic construct
  REGION 1..9: note = Description of Artificial Sequence: Synthetic peptide
QPDRSGSEL

SEQ ID NO: 16277 - protein, 9 aa, synthetic construct
  REGION 1..9: note = Description of Artificial Sequence: Synthetic peptide
FSVPLDESF

SEQ ID NO: 16278 - protein, 9 aa, synthetic construct
  REGION 1..9: note = Description of Artificial Sequence: Synthetic peptide
LPDKESWTV

SEQ ID NO: 16279 - protein, 9 aa, synthetic construct
  REGION 1..9: note = Description of Artificial Sequence: Synthetic peptide
LPIAGNLVC

SEQ ID NO: 16280 - protein, 9 aa, synthetic construct
  REGION 1..9: note = Description of Artificial Sequence: Synthetic peptide
QPNKSESEL

SEQ ID NO: 16281 - protein, 8 aa, synthetic construct
  REGION 1..8: note = Description of Artificial Sequence: Synthetic peptide
IENVTENF

SEQ ID NO: 16282 - protein, 8 aa, synthetic construct
  REGION 1..8: note = Description of Artificial Sequence: Synthetic peptide
IDTVAIAV

SEQ ID NO: 16283 - protein, 9 aa, synthetic construct
  REGION 1..9: note = Description of Artificial Sequence: Synthetic peptide
QDLARHGAI

SEQ ID NO: 16284 - protein, 8 aa, synthetic construct
  REGION 1..8: note = Description of Artificial Sequence: Synthetic peptide
AEHLKTAV

SEQ ID NO: 16285 - protein, 8 aa, synthetic construct
  REGION 1..8: note = Description of Artificial Sequence: Synthetic peptide
AELQAIQL

SEQ ID NO: 16286 - protein, 9 aa, synthetic construct
  REGION 1..9: note = Description of Artificial Sequence: Synthetic peptide
QTPVPKQPF

SEQ ID NO: 16287 - protein, 9 aa, synthetic construct
  REGION 1..9: note = Description of Artificial Sequence: Synthetic peptide
TDVVPINEM

SEQ ID NO: 16288 - protein, 9 aa, synthetic construct
  REGION 1..9: note = Description of Artificial Sequence: Synthetic peptide
REPDRPAGI

SEQ ID NO: 16289 - protein, 8 aa, synthetic construct
  REGION 1..8: note = Description of Artificial Sequence: Synthetic peptide
AELHAIQL

SEQ ID NO: 16290 - protein, 8 aa, synthetic construct
  REGION 1..8: note = Description of Artificial Sequence: Synthetic peptide
KEFNGTGL

SEQ ID NO: 16291 - protein, 8 aa, synthetic construct
  REGION 1..8: note = Description of Artificial Sequence: Synthetic peptide
SDIQTKEL

SEQ ID NO: 16292 - protein, 9 aa, synthetic construct
  REGION 1..9: note = Description of Artificial Sequence: Synthetic peptide
YHDPSKELI

SEQ ID NO: 16293 - protein, 9 aa, synthetic construct
  REGION 1..9: note = Description of Artificial Sequence: Synthetic peptide
QHSRIGITL

SEQ ID NO: 16294 - protein, 9 aa, synthetic construct
  REGION 1..9: note = Description of Artificial Sequence: Synthetic peptide
IHTDNGPNF

SEQ ID NO: 16295 - protein, 9 aa, synthetic construct
  REGION 1..9: note = Description of Artificial Sequence: Synthetic peptide
AHSTESHNI

SEQ ID NO: 16296 - protein, 9 aa, synthetic construct
  REGION 1..9: note = Description of Artificial Sequence: Synthetic peptide
IHTDNGSNF

SEQ ID NO: 16297 - protein, 11 aa, synthetic construct
  REGION 1..11: note = Description of Artificial Sequence: Synthetic peptide
TQIDPDLADQL

SEQ ID NO: 16298 - protein, 9 aa, synthetic construct
  REGION 1..9: note = Description of Artificial Sequence: Synthetic peptide
IHLGPGQAL

SEQ ID NO: 16299 - protein, 9 aa, synthetic construct
  REGION 1..9: note = Description of Artificial Sequence: Synthetic peptide
TQDFWEVQL

SEQ ID NO: 16300 - protein, 11 aa, synthetic construct
  REGION 1..11: note = Description of Artificial Sequence: Synthetic peptide
QIDPNTADHLI

SEQ ID NO: 16301 - protein, 10 aa, synthetic construct
  REGION 1..10: note = Description of Artificial Sequence: Synthetic peptide
IHTDNGPNFI

SEQ ID NO: 16302 - protein, 11 aa, synthetic construct
  REGION 1..11: note = Description of Artificial Sequence: Synthetic peptide
TQIDPNTADHL

SEQ ID NO: 16303 - protein, 11 aa, synthetic construct
  REGION 1..11: note = Description of Artificial Sequence: Synthetic peptide
TQVDPDLADHL

SEQ ID NO: 16304 - protein, 9 aa, synthetic construct
  REGION 1..9: note = Description of Artificial Sequence: Synthetic peptide
NHTEANNTV

SEQ ID NO: 16305 - protein, 9 aa, synthetic construct
  REGION 1..9: note = Description of Artificial Sequence: Synthetic peptide
THLEGKIII

SEQ ID NO: 16306 - protein, 9 aa, synthetic construct
  REGION 1..9: note = Description of Artificial Sequence: Synthetic peptide
GHQAAMQML

SEQ ID NO: 16307 - protein, 9 aa, synthetic construct
  REGION 1..9: note = Description of Artificial Sequence: Synthetic peptide
THLEGKIIL

SEQ ID NO: 16308 - protein, 9 aa, synthetic construct
  REGION 1..9: note = Description of Artificial Sequence: Synthetic peptide
AHTNDVKQL

SEQ ID NO: 16309 - protein, 9 aa, synthetic construct
  REGION 1..9: note = Description of Artificial Sequence: Synthetic peptide
EHLKTAVQM

SEQ ID NO: 16310 - protein, 8 aa, synthetic construct
  REGION 1..8: note = Description of Artificial Sequence: Synthetic peptide
YHDPSKEL

SEQ ID NO: 16311 - protein, 9 aa, synthetic construct
  REGION 1..9: note = Description of Artificial Sequence: Synthetic peptide
NHTEANNTV

SEQ ID NO: 16312 - protein, 11 aa, synthetic construct
  REGION 1..11: note = Description of Artificial Sequence: Synthetic peptide
TQIDPDLADQL

SEQ ID NO: 16313 - protein, 9 aa, synthetic construct
  REGION 1..9: note = Description of Artificial Sequence: Synthetic peptide
QHSRIGITL

SEQ ID NO: 16314 - protein, 9 aa, synthetic construct
  REGION 1..9: note = Description of Artificial Sequence: Synthetic peptide
EHLKTAVQM

SEQ ID NO: 16315 - protein, 9 aa, synthetic construct
  REGION 1..9: note = Description of Artificial Sequence: Synthetic peptide
IHLGPGQAL

SEQ ID NO: 16316 - protein, 8 aa, synthetic construct
  REGION 1..8: note = Description of Artificial Sequence: Synthetic peptide
YHDPSKEL

SEQ ID NO: 16317 - protein, 11 aa, synthetic construct
  REGION 1..11: note = Description of Artificial Sequence: Synthetic peptide
TQIDPNTADHL

SEQ ID NO: 16318 - protein, 11 aa, synthetic construct
  REGION 1..11: note = Description of Artificial Sequence: Synthetic peptide
TQVDPDLADHL

SEQ ID NO: 16319 - protein, 9 aa, synthetic construct
  REGION 1..9: note = Description of Artificial Sequence: Synthetic peptide
IHTDNGPNF

SEQ ID NO: 16320 - protein, 9 aa, synthetic construct
  REGION 1..9: note = Description of Artificial Sequence: Synthetic peptide
IHTDNGSNF

SEQ ID NO: 16321 - protein, 9 aa, synthetic construct
  REGION 1..9: note = Description of Artificial Sequence: Synthetic peptide
HQAISPRTL

SEQ ID NO: 16322 - protein, 8 aa, synthetic construct
  REGION 1..8: note = Description of Artificial Sequence: Synthetic peptide
MRQLQPAL

SEQ ID NO: 16323 - protein, 9 aa, synthetic construct
  REGION 1..9: note = Description of Artificial Sequence: Synthetic peptide
YHDPSKELI

SEQ ID NO: 16324 - protein, 9 aa, synthetic construct
  REGION 1..9: note = Description of Artificial Sequence: Synthetic peptide
ERIRQTPVA

SEQ ID NO: 16325 - protein, 9 aa, synthetic construct
  REGION 1..9: note = Description of Artificial Sequence: Synthetic peptide
SQQKIQQAA

SEQ ID NO: 16326 - protein, 9 aa, synthetic construct
  REGION 1..9: note = Description of Artificial Sequence: Synthetic peptide
SQQEIQQAA

SEQ ID NO: 16327 - protein, 10 aa, synthetic construct
  REGION 1..10: note = Description of Artificial Sequence: Synthetic peptide
SQYALGIIQA

SEQ ID NO: 16328 - protein, 9 aa, synthetic construct
  REGION 1..9: note = Description of Artificial Sequence: Synthetic peptide
VQLGIPHPA

SEQ ID NO: 16329 - protein, 8 aa, synthetic construct
  REGION 1..8: note = Description of Artificial Sequence: Synthetic peptide
SQQKIQQA

SEQ ID NO: 16330 - protein, 8 aa, synthetic construct
  REGION 1..8: note = Description of Artificial Sequence: Synthetic peptide
THGIKPVV

SEQ ID NO: 16331 - protein, 9 aa, synthetic construct
  REGION 1..9: note = Description of Artificial Sequence: Synthetic peptide
QNYPIVQNA

SEQ ID NO: 16332 - protein, 8 aa, synthetic construct
  REGION 1..8: note = Description of Artificial Sequence: Synthetic peptide
TDIVPLTA

SEQ ID NO: 16333 - protein, 9 aa, synthetic construct
  REGION 1..9: note = Description of Artificial Sequence: Synthetic peptide
DNGPNFISA

SEQ ID NO: 16334 - protein, 9 aa, synthetic construct
  REGION 1..9: note = Description of Artificial Sequence: Synthetic peptide
ENMKQNVTA

SEQ ID NO: 16335 - protein, 8 aa, synthetic construct
  REGION 1..8: note = Description of Artificial Sequence: Synthetic peptide
WQRPLVTV

SEQ ID NO: 16336 - protein, 10 aa, synthetic construct
  REGION 1..10: note = Description of Artificial Sequence: Synthetic peptide
ERIRQTPVAA

SEQ ID NO: 16337 - protein, 8 aa, synthetic construct
  REGION 1..8: note = Description of Artificial Sequence: Synthetic peptide
DQILIEIC

SEQ ID NO: 16338 - protein, 8 aa, synthetic construct
  REGION 1..8: note = Description of Artificial Sequence: Synthetic peptide
IRQTPVAA

SEQ ID NO: 16339 - protein, 9 aa, synthetic construct
  REGION 1..9: note = Description of Artificial Sequence: Synthetic peptide
NETVPITCA

SEQ ID NO: 16340 - protein, 8 aa, synthetic construct
  REGION 1..8: note = Description of Artificial Sequence: Synthetic peptide
TRPPLPSV

SEQ ID NO: 16341 - protein, 9 aa, synthetic construct
  REGION 1..9: note = Description of Artificial Sequence: Synthetic peptide
NGPNFISAA

SEQ ID NO: 16342 - protein, 8 aa, synthetic construct
  REGION 1..8: note = Description of Artificial Sequence: Synthetic peptide
GKIIIVAV

SEQ ID NO: 16343 - protein, 8 aa, synthetic construct
  REGION 1..8: note = Description of Artificial Sequence: Synthetic peptide
QQKIQQAA

SEQ ID NO: 16344 - protein, 9 aa, synthetic construct
  REGION 1..9: note = Description of Artificial Sequence: Synthetic peptide
QRVGQAMYA

SEQ ID NO: 16345 - protein, 8 aa, synthetic construct
  REGION 1..8: note = Description of Artificial Sequence: Synthetic peptide
SQQEIQQA

SEQ ID NO: 16346 - protein, 9 aa, synthetic construct
  REGION 1..9: note = Description of Artificial Sequence: Synthetic peptide
QQHLLQLTV

SEQ ID NO: 16347 - protein, 8 aa, synthetic construct
  REGION 1..8: note = Description of Artificial Sequence: Synthetic peptide
ETVPITCA

SEQ ID NO: 16348 - protein, 8 aa, synthetic construct
  REGION 1..8: note = Description of Artificial Sequence: Synthetic peptide
EMLKNVTA

SEQ ID NO: 16349 - protein, 8 aa, synthetic construct
  REGION 1..8: note = Description of Artificial Sequence: Synthetic peptide
TDIVSMTA

SEQ ID NO: 16350 - protein, 9 aa, synthetic construct
  REGION 1..9: note = Description of Artificial Sequence: Synthetic peptide
SENNDTITL

SEQ ID NO: 16351 - protein, 10 aa, synthetic construct
  REGION 1..10: note = Description of Artificial Sequence: Synthetic peptide
IEVKDTKEAL

SEQ ID NO: 16352 - protein, 10 aa, synthetic construct
  REGION 1..10: note = Description of Artificial Sequence: Synthetic peptide
TETTNQKAEL

SEQ ID NO: 16353 - protein, 10 aa, synthetic construct
  REGION 1..10: note = Description of Artificial Sequence: Synthetic peptide
TETTNQKTEL

SEQ ID NO: 16354 - protein, 9 aa, synthetic construct
  REGION 1..9: note = Description of Artificial Sequence: Synthetic peptide
MEDADKEVL

SEQ ID NO: 16355 - protein, 9 aa, synthetic construct
  REGION 1..9: note = Description of Artificial Sequence: Synthetic peptide
MEDEDREVL

SEQ ID NO: 16356 - protein, 9 aa, synthetic construct
  REGION 1..9: note = Description of Artificial Sequence: Synthetic peptide
AEGKGDTSL

SEQ ID NO: 16357 - protein, 10 aa, synthetic construct
  REGION 1..10: note = Description of Artificial Sequence: Synthetic peptide
IEVRDTKEAL

SEQ ID NO: 16358 - protein, 8 aa, synthetic construct
  REGION 1..8: note = Description of Artificial Sequence: Synthetic peptide
KEFNGTGL

SEQ ID NO: 16359 - protein, 9 aa, synthetic construct
  REGION 1..9: note = Description of Artificial Sequence: Synthetic peptide
SEGATPQDL

SEQ ID NO: 16360 - protein, 9 aa, synthetic construct
  REGION 1..9: note = Description of Artificial Sequence: Synthetic peptide
AEGQGVIPL

SEQ ID NO: 16361 - protein, 8 aa, synthetic construct
  REGION 1..8: note = Description of Artificial Sequence: Synthetic peptide
AELQAIQL

SEQ ID NO: 16362 - protein, 9 aa, synthetic construct
  REGION 1..9: note = Description of Artificial Sequence: Synthetic peptide
SESAIRNAI

SEQ ID NO: 16363 - protein, 8 aa, synthetic construct
  REGION 1..8: note = Description of Artificial Sequence: Synthetic peptide
IETVPVKL

SEQ ID NO: 16364 - protein, 9 aa, synthetic construct
  REGION 1..9: note = Description of Artificial Sequence: Synthetic peptide
MEDEDGEVL

SEQ ID NO: 16365 - protein, 10 aa, synthetic construct
  REGION 1..10: note = Description of Artificial Sequence: Synthetic peptide
KEAPEEVEKI

SEQ ID NO: 16366 - protein, 9 aa, synthetic construct
  REGION 1..9: note = Description of Artificial Sequence: Synthetic peptide
VELLGHNSL

SEQ ID NO: 16367 - protein, 8 aa, synthetic construct
  REGION 1..8: note = Description of Artificial Sequence: Synthetic peptide
AELHAIQL

SEQ ID NO: 16368 - protein, 9 aa, synthetic construct
  REGION 1..9: note = Description of Artificial Sequence: Synthetic peptide
KEIHPLASL

SEQ ID NO: 16369 - protein, 10 aa, synthetic construct
  REGION 1..10: note = Description of Artificial Sequence: Synthetic peptide
SESAIRNAIL

SEQ ID NO: 16370 - protein, 10 aa, synthetic construct
  REGION 1..10: note = Description of Artificial Sequence: Synthetic peptide
TEIGVGSPQI

SEQ ID NO: 16371 - protein, 9 aa, synthetic construct
  REGION 1..9: note = Description of Artificial Sequence: Synthetic peptide
KELYPLTSL

SEQ ID NO: 16372 - protein, 9 aa, synthetic construct
  REGION 1..9: note = Description of Artificial Sequence: Synthetic peptide
QEKNEQDLL

SEQ ID NO: 16373 - protein, 11 aa, synthetic construct
  REGION 1..11: note = Description of Artificial Sequence: Synthetic peptide
SEIVNQIIEQL

SEQ ID NO: 16374 - protein, 11 aa, synthetic construct
  REGION 1..11: note = Description of Artificial Sequence: Synthetic peptide
IEFNSSSGGDL

SEQ ID NO: 16375 - protein, 9 aa, synthetic construct
  REGION 1..9: note = Description of Artificial Sequence: Synthetic peptide
LEISAIVGL

SEQ ID NO: 16376 - protein, 8 aa, synthetic construct
  REGION 1..8: note = Description of Artificial Sequence: Synthetic peptide
TELQAIQL

SEQ ID NO: 16377 - protein, 10 aa, synthetic construct
  REGION 1..10: note = Description of Artificial Sequence: Synthetic peptide
IEAQQHLLQL

SEQ ID NO: 16378 - protein, 9 aa, synthetic construct
  REGION 1..9: note = Description of Artificial Sequence: Synthetic peptide
VELLGRSSL

SEQ ID NO: 16379 - protein, 9 aa, synthetic construct
  REGION 1..9: note = Description of Artificial Sequence: Synthetic peptide
KELYPLSSL

SEQ ID NO: 16380 - protein, 9 aa, synthetic construct
  REGION 1..9: note = Description of Artificial Sequence: Synthetic peptide
SESEIVNQI

SEQ ID NO: 16381 - protein, 10 aa, synthetic construct
  REGION 1..10: note = Description of Artificial Sequence: Synthetic peptide
AEHLKTAVQM

SEQ ID NO: 16382 - protein, 10 aa, synthetic construct
  REGION 1..10: note = Description of Artificial Sequence: Synthetic peptide
TETGVGGPQI

SEQ ID NO: 16383 - protein, 8 aa, synthetic construct
  REGION 1..8: note = Description of Artificial Sequence: Synthetic peptide
IEAQQHLL

SEQ ID NO: 16384 - protein, 10 aa, synthetic construct
  REGION 1..10: note = Description of Artificial Sequence: Synthetic peptide
NESEGDREEL

SEQ ID NO: 16385 - protein, 9 aa, synthetic construct
  REGION 1..9: note = Description of Artificial Sequence: Synthetic peptide
SENNDTITL

SEQ ID NO: 16386 - protein, 8 aa, synthetic construct
  REGION 1..8: note = Description of Artificial Sequence: Synthetic peptide
AELQAIQL

SEQ ID NO: 16387 - protein, 8 aa, synthetic construct
  REGION 1..8: note = Description of Artificial Sequence: Synthetic peptide
SDIQTKEL

SEQ ID NO: 16388 - protein, 10 aa, synthetic construct
  REGION 1..10: note = Description of Artificial Sequence: Synthetic peptide
TETTNQKTEL

SEQ ID NO: 16389 - protein, 11 aa, synthetic construct
  REGION 1..11: note = Description of Artificial Sequence: Synthetic peptide
SEIVNQIIEQL

SEQ ID NO: 16390 - protein, 10 aa, synthetic construct
  REGION 1..10: note = Description of Artificial Sequence: Synthetic peptide
TETTNQKAEL

SEQ ID NO: 16391 - protein, 10 aa, synthetic construct
  REGION 1..10: note = Description of Artificial Sequence: Synthetic peptide
AEHLKTAVQM

SEQ ID NO: 16392 - protein, 9 aa, synthetic construct
  REGION 1..9: note = Description of Artificial Sequence: Synthetic peptide
NETVPITCA

SEQ ID NO: 16393 - protein, 9 aa, synthetic construct
  REGION 1..9: note = Description of Artificial Sequence: Synthetic peptide
VELLGHNSL

SEQ ID NO: 16394 - protein, 8 aa, synthetic construct
  REGION 1..8: note = Description of Artificial Sequence: Synthetic peptide
KEFNGTGL

SEQ ID NO: 16395 - protein, 8 aa, synthetic construct
  REGION 1..8: note = Description of Artificial Sequence: Synthetic peptide
AELHAIQL

SEQ ID NO: 16396 - protein, 9 aa, synthetic construct
  REGION 1..9: note = Description of Artificial Sequence: Synthetic peptide
NETVEITCV

SEQ ID NO: 16397 - protein, 9 aa, synthetic construct
  REGION 1..9: note = Description of Artificial Sequence: Synthetic peptide
SESAIRNAI

SEQ ID NO: 16398 - protein, 9 aa, synthetic construct
  REGION 1..9: note = Description of Artificial Sequence: Synthetic peptide
TDVVPINEM

SEQ ID NO: 16399 - protein, 10 aa, synthetic construct
  REGION 1..10: note = Description of Artificial Sequence: Synthetic peptide
TEIGVGSPQI

SEQ ID NO: 16400 - protein, 8 aa, synthetic construct
  REGION 1..8: note = Description of Artificial Sequence: Synthetic peptide
TELQAIQL

SEQ ID NO: 16401 - protein, 10 aa, synthetic construct
  REGION 1..10: note = Description of Artificial Sequence: Synthetic peptide
IEVKDTKEAL

SEQ ID NO: 16402 - protein, 10 aa, synthetic construct
  REGION 1..10: note = Description of Artificial Sequence: Synthetic peptide
GEVIGDIRKA

SEQ ID NO: 16403 - protein, 10 aa, synthetic construct
  REGION 1..10: note = Description of Artificial Sequence: Synthetic peptide
IEAQQHLLQL

SEQ ID NO: 16404 - protein, 10 aa, synthetic construct
  REGION 1..10: note = Description of Artificial Sequence: Synthetic peptide
SESAIRNAIL

SEQ ID NO: 16405 - protein, 10 aa, synthetic construct
  REGION 1..10: note = Description of Artificial Sequence: Synthetic peptide
TETGVGGPQI

SEQ ID NO: 16406 - protein, 8 aa, synthetic construct
  REGION 1..8: note = Description of Artificial Sequence: Synthetic peptide
IETVPVKL

SEQ ID NO: 16407 - protein, 9 aa, synthetic construct
  REGION 1..9: note = Description of Artificial Sequence: Synthetic peptide
SESEIVNQI

SEQ ID NO: 16408 - protein, 9 aa, synthetic construct
  REGION 1..9: note = Description of Artificial Sequence: Synthetic peptide
AEGKGDTSL

SEQ ID NO: 16409 - protein, 9 aa, synthetic construct
  REGION 1..9: note = Description of Artificial Sequence: Synthetic peptide
VELLGRNSL

SEQ ID NO: 16410 - protein, 9 aa, synthetic construct
  REGION 1..9: note = Description of Artificial Sequence: Synthetic peptide
KEIHPLASL

SEQ ID NO: 16411 - protein, 9 aa, synthetic construct
  REGION 1..9: note = Description of Artificial Sequence: Synthetic peptide
KELYPLTSL

SEQ ID NO: 16412 - protein, 10 aa, synthetic construct
  REGION 1..10: note = Description of Artificial Sequence: Synthetic peptide
TETGVGRPQV

SEQ ID NO: 16413 - protein, 9 aa, synthetic construct
  REGION 1..9: note = Description of Artificial Sequence: Synthetic peptide
SERVLSTCL

SEQ ID NO: 16414 - protein, 9 aa, synthetic construct
  REGION 1..9: note = Description of Artificial Sequence: Synthetic peptide
VELLGRSSL

SEQ ID NO: 16415 - protein, 8 aa, synthetic construct
  REGION 1..8: note = Description of Artificial Sequence: Synthetic peptide
SDFNLPHI

SEQ ID NO: 16416 - protein, 8 aa, synthetic construct
  REGION 1..8: note = Description of Artificial Sequence: Synthetic peptide
IEAQQHLL

SEQ ID NO: 16417 - protein, 9 aa, synthetic construct
  REGION 1..9: note = Description of Artificial Sequence: Synthetic peptide
AEGQGVIPL

SEQ ID NO: 16418 - protein, 9 aa, synthetic construct
  REGION 1..9: note = Description of Artificial Sequence: Synthetic peptide
SDFNLPPVV

SEQ ID NO: 16419 - protein, 9 aa, synthetic construct
  REGION 1..9: note = Description of Artificial Sequence: Synthetic peptide
SERILSTCL

SEQ ID NO: 16420 - protein, 9 aa, synthetic construct
  REGION 1..9: note = Description of Artificial Sequence: Synthetic peptide
LETEPIPGV

SEQ ID NO: 16421 - protein, 10 aa, synthetic construct
  REGION 1..10: note = Description of Artificial Sequence: Synthetic peptide
IEVRDTKEAL

SEQ ID NO: 16422 - protein, 9 aa, synthetic construct
  REGION 1..9: note = Description of Artificial Sequence: Synthetic peptide
MEDEDREVL

SEQ ID NO: 16423 - protein, 10 aa, synthetic construct
  REGION 1..10: note = Description of Artificial Sequence: Synthetic peptide
AELQAIQLAL

SEQ ID NO: 16424 - protein, 9 aa, synthetic construct
  REGION 1..9: note = Description of Artificial Sequence: Synthetic peptide
KELYPLSSL

SEQ ID NO: 16425 - protein, 11 aa, synthetic construct
  REGION 1..11: note = Description of Artificial Sequence: Synthetic peptide
SELVNQIIEQL

SEQ ID NO: 16426 - protein, 9 aa, synthetic construct
  REGION 1..9: note = Description of Artificial Sequence: Synthetic peptide
TEVVQKIAT

SEQ ID NO: 16427 - protein, 9 aa, synthetic construct
  REGION 1..9: note = Description of Artificial Sequence: Synthetic peptide
SEGATPQDL

SEQ ID NO: 16428 - protein, 10 aa, synthetic construct
  REGION 1..10: note = Description of Artificial Sequence: Synthetic peptide
KEAPEEVEKI

SEQ ID NO: 16429 - protein, 10 aa, synthetic construct
  REGION 1..10: note = Description of Artificial Sequence: Synthetic peptide
GEIMIRSENI

SEQ ID NO: 16430 - protein, 9 aa, synthetic construct
  REGION 1..9: note = Description of Artificial Sequence: Synthetic peptide
SESELVNQI

SEQ ID NO: 16431 - protein, 10 aa, synthetic construct
  REGION 1..10: note = Description of Artificial Sequence: Synthetic peptide
REFPSEQARA

SEQ ID NO: 16432 - protein, 9 aa, synthetic construct
  REGION 1..9: note = Description of Artificial Sequence: Synthetic peptide
SEVGFPVRP

SEQ ID NO: 16433 - protein, 9 aa, synthetic construct
  REGION 1..9: note = Description of Artificial Sequence: Synthetic peptide
AEWDRIHPP

SEQ ID NO: 16434 - protein, 10 aa, synthetic construct
  REGION 1..10: note = Description of Artificial Sequence: Synthetic peptide
REFPSEQARA

SEQ ID NO: 16435 - protein, 10 aa, synthetic construct
  REGION 1..10: note = Description of Artificial Sequence: Synthetic peptide
GEVIGDIRKA

SEQ ID NO: 16436 - protein, 9 aa, synthetic construct
  REGION 1..9: note = Description of Artificial Sequence: Synthetic peptide
SETETFRPA

SEQ ID NO: 16437 - protein, 9 aa, synthetic construct
  REGION 1..9: note = Description of Artificial Sequence: Synthetic peptide
NETVPITCA

SEQ ID NO: 16438 - protein, 10 aa, synthetic construct
  REGION 1..10: note = Description of Artificial Sequence: Synthetic peptide
REFSPEQARA

SEQ ID NO: 16439 - protein, 9 aa, synthetic construct
  REGION 1..9: note = Description of Artificial Sequence: Synthetic peptide
LETEPIPGA

SEQ ID NO: 16440 - protein, 9 aa, synthetic construct
  REGION 1..9: note = Description of Artificial Sequence: Synthetic peptide
LETEPIIGA

SEQ ID NO: 16441 - protein, 10 aa, synthetic construct
  REGION 1..10: note = Description of Artificial Sequence: Synthetic peptide
REFSSEQARA

SEQ ID NO: 16442 - protein, 8 aa, synthetic construct
  REGION 1..8: note = Description of Artificial Sequence: Synthetic peptide
SETETFRP

SEQ ID NO: 16443 - protein, 9 aa, synthetic construct
  REGION 1..9: note = Description of Artificial Sequence: Synthetic peptide
KEFNGTGLC

SEQ ID NO: 16444 - protein, 9 aa, synthetic construct
  REGION 1..9: note = Description of Artificial Sequence: Synthetic peptide
KEFNGTGPC

SEQ ID NO: 16445 - protein, 11 aa, synthetic construct
  REGION 1..11: note = Description of Artificial Sequence: Synthetic peptide
AEWDRLHPQQA

SEQ ID NO: 16446 - protein, 8 aa, synthetic construct
  REGION 1..8: note = Description of Artificial Sequence: Synthetic peptide
REFPSEQA

SEQ ID NO: 16447 - protein, 9 aa, synthetic construct
  REGION 1..9: note = Description of Artificial Sequence: Synthetic peptide
KEYNGTGPC

SEQ ID NO: 16448 - protein, 11 aa, synthetic construct
  REGION 1..11: note = Description of Artificial Sequence: Synthetic peptide
AEWDRIHPQQA

SEQ ID NO: 16449 - protein, 9 aa, synthetic construct
  REGION 1..9: note = Description of Artificial Sequence: Synthetic peptide
IEVKDTKEA

SEQ ID NO: 16450 - protein, 9 aa, synthetic construct
  REGION 1..9: note = Description of Artificial Sequence: Synthetic peptide
QEFGIPYNP

SEQ ID NO: 16451 - protein, 9 aa, synthetic construct
  REGION 1..9: note = Description of Artificial Sequence: Synthetic peptide
AETYYVDGA

SEQ ID NO: 16452 - protein, 10 aa, synthetic construct
  REGION 1..10: note = Description of Artificial Sequence: Synthetic peptide
KEKEFNGTGP

SEQ ID NO: 16453 - protein, 8 aa, synthetic construct
  REGION 1..8: note = Description of Artificial Sequence: Synthetic peptide
RDFILIAA

SEQ ID NO: 16454 - protein, 9 aa, synthetic construct
  REGION 1..9: note = Description of Artificial Sequence: Synthetic peptide
REMLKNVTA

SEQ ID NO: 16455 - protein, 8 aa, synthetic construct
  REGION 1..8: note = Description of Artificial Sequence: Synthetic peptide
KEFNGTGP

SEQ ID NO: 16456 - protein, 10 aa, synthetic construct
  REGION 1..10: note = Description of Artificial Sequence: Synthetic peptide
SDFNLPPVVA

SEQ ID NO: 16457 - protein, 9 aa, synthetic construct
  REGION 1..9: note = Description of Artificial Sequence: Synthetic peptide
GENNSLLHP

SEQ ID NO: 16458 - protein, 9 aa, synthetic construct
  REGION 1..9: note = Description of Artificial Sequence: Synthetic peptide
AELHAIQLA

SEQ ID NO: 16459 - protein, 9 aa, synthetic construct
  REGION 1..9: note = Description of Artificial Sequence: Synthetic peptide
EEIAPSPKP

SEQ ID NO: 16460 - protein, 8 aa, synthetic construct
  REGION 1..8: note = Description of Artificial Sequence: Synthetic peptide
NETEIFRP

SEQ ID NO: 16461 - protein, 8 aa, synthetic construct
  REGION 1..8: note = Description of Artificial Sequence: Synthetic peptide
SESAIRKA

SEQ ID NO: 16462 - protein, 9 aa, synthetic construct
  REGION 1..9: note = Description of Artificial Sequence: Synthetic peptide
AELQAIQLA

SEQ ID NO: 16463 - protein, 9 aa, synthetic construct
  REGION 1..9: note = Description of Artificial Sequence: Synthetic peptide
NETEIFRPV

SEQ ID NO: 16464 - protein, 9 aa, synthetic construct
  REGION 1..9: note = Description of Artificial Sequence: Synthetic peptide
SENNDTITL

SEQ ID NO: 16465 - protein, 8 aa, synthetic construct
  REGION 1..8: note = Description of Artificial Sequence: Synthetic peptide
SDIQTKEL

SEQ ID NO: 16466 - protein, 9 aa, synthetic construct
  REGION 1..9: note = Description of Artificial Sequence: Synthetic peptide
SESAIRNAI

SEQ ID NO: 16467 - protein, 9 aa, synthetic construct
  REGION 1..9: note = Description of Artificial Sequence: Synthetic peptide
SERVLSTCL

SEQ ID NO: 16468 - protein, 8 aa, synthetic construct
  REGION 1..8: note = Description of Artificial Sequence: Synthetic peptide
AEVQKQGL

SEQ ID NO: 16469 - protein, 8 aa, synthetic construct
  REGION 1..8: note = Description of Artificial Sequence: Synthetic peptide
AELQAIQL

SEQ ID NO: 16470 - protein, 9 aa, synthetic construct
  REGION 1..9: note = Description of Artificial Sequence: Synthetic peptide
SERILSTCL

SEQ ID NO: 16471 - protein, 9 aa, synthetic construct
  REGION 1..9: note = Description of Artificial Sequence: Synthetic peptide
VELLGRNSL

SEQ ID NO: 16472 - protein, 8 aa, synthetic construct
  REGION 1..8: note = Description of Artificial Sequence: Synthetic peptide
AEHLKTAV

SEQ ID NO: 16473 - protein, 8 aa, synthetic construct
  REGION 1..8: note = Description of Artificial Sequence: Synthetic peptide
IEKVKAQL

SEQ ID NO: 16474 - protein, 9 aa, synthetic construct
  REGION 1..9: note = Description of Artificial Sequence: Synthetic peptide
MEDEDREVL

SEQ ID NO: 16475 - protein, 9 aa, synthetic construct
  REGION 1..9: note = Description of Artificial Sequence: Synthetic peptide
VELLGRSSL

SEQ ID NO: 16476 - protein, 9 aa, synthetic construct
  REGION 1..9: note = Description of Artificial Sequence: Synthetic peptide
SERILSSCL

SEQ ID NO: 16477 - protein, 8 aa, synthetic construct
  REGION 1..8: note = Description of Artificial Sequence: Synthetic peptide
KEFNGTGL

SEQ ID NO: 16478 - protein, 9 aa, synthetic construct
  REGION 1..9: note = Description of Artificial Sequence: Synthetic peptide
SESAIRKAI

SEQ ID NO: 16479 - protein, 8 aa, synthetic construct
  REGION 1..8: note = Description of Artificial Sequence: Synthetic peptide
AELHAIQL

SEQ ID NO: 16480 - protein, 9 aa, synthetic construct
  REGION 1..9: note = Description of Artificial Sequence: Synthetic peptide
VELLGHNSL

SEQ ID NO: 16481 - protein, 9 aa, synthetic construct
  REGION 1..9: note = Description of Artificial Sequence: Synthetic peptide
SDSAIRKAL

SEQ ID NO: 16482 - protein, 9 aa, synthetic construct
  REGION 1..9: note = Description of Artificial Sequence: Synthetic peptide
AEGKGDTSL

SEQ ID NO: 16483 - protein, 10 aa, synthetic construct
  REGION 1..10: note = Description of Artificial Sequence: Synthetic peptide
SESAIRNAIL

SEQ ID NO: 16484 - protein, 10 aa, synthetic construct
  REGION 1..10: note = Description of Artificial Sequence: Synthetic peptide
TETTNQKTEL

SEQ ID NO: 16485 - protein, 8 aa, synthetic construct
  REGION 1..8: note = Description of Artificial Sequence: Synthetic peptide
TELQAIQL

SEQ ID NO: 16486 - protein, 8 aa, synthetic construct
  REGION 1..8: note = Description of Artificial Sequence: Synthetic peptide
IEAQQHLL

SEQ ID NO: 16487 - protein, 9 aa, synthetic construct
  REGION 1..9: note = Description of Artificial Sequence: Synthetic peptide
QEKNEQDLL

SEQ ID NO: 16488 - protein, 8 aa, synthetic construct
  REGION 1..8: note = Description of Artificial Sequence: Synthetic peptide
REMERFAL

SEQ ID NO: 16489 - protein, 9 aa, synthetic construct
  REGION 1..9: note = Description of Artificial Sequence: Synthetic peptide
KEKGGLEGL

SEQ ID NO: 16490 - protein, 8 aa, synthetic construct
  REGION 1..8: note = Description of Artificial Sequence: Synthetic peptide
AEKLWVTV

SEQ ID NO: 16491 - protein, 9 aa, synthetic construct
  REGION 1..9: note = Description of Artificial Sequence: Synthetic peptide
GEQDRDRSI

SEQ ID NO: 16492 - protein, 9 aa, synthetic construct
  REGION 1..9: note = Description of Artificial Sequence: Synthetic peptide
IEIGGKKAI

SEQ ID NO: 16493 - protein, 9 aa, synthetic construct
  REGION 1..9: note = Description of Artificial Sequence: Synthetic peptide
GEQDRDKSI

SEQ ID NO: 16494 - protein, 10 aa, synthetic construct
  REGION 1..10: note = Description of Artificial Sequence: Synthetic peptide
TETTNQKAEL

SEQ ID NO: 16495 - protein, 9 aa, synthetic construct
  REGION 1..9: note = Description of Artificial Sequence: Synthetic peptide
SERILSACL

SEQ ID NO: 16496 - protein, 10 aa, synthetic construct
  REGION 1..10: note = Description of Artificial Sequence: Synthetic peptide
AEHLKTAVQM

SEQ ID NO: 16497 - protein, 9 aa, synthetic construct
  REGION 1..9: note = Description of Artificial Sequence: Synthetic peptide
KEIHPLASL

SEQ ID NO: 16498 - protein, 8 aa, synthetic construct
  REGION 1..8: note = Description of Artificial Sequence: Synthetic peptide
TERQANFL

SEQ ID NO: 16499 - protein, 9 aa, synthetic construct
  REGION 1..9: note = Description of Artificial Sequence: Synthetic peptide
KELYPLTSL

SEQ ID NO: 16500 - protein, 9 aa, synthetic construct
  REGION 1..9: note = Description of Artificial Sequence: Synthetic peptide
IEISGKKAI

SEQ ID NO: 16501 - protein, 9 aa, synthetic construct
  REGION 1..9: note = Description of Artificial Sequence: Synthetic peptide
TEMEREGKI

SEQ ID NO: 16502 - protein, 9 aa, synthetic construct
  REGION 1..9: note = Description of Artificial Sequence: Synthetic peptide
REMLKNVTA

SEQ ID NO: 16503 - protein, 9 aa, synthetic construct
  REGION 1..9: note = Description of Artificial Sequence: Synthetic peptide
MEDADKEVL

SEQ ID NO: 16504 - protein, 9 aa, synthetic construct
  REGION 1..9: note = Description of Artificial Sequence: Synthetic peptide
KEKGGLDGL

SEQ ID NO: 16505 - protein, 9 aa, synthetic construct
  REGION 1..9: note = Description of Artificial Sequence: Synthetic peptide
AEGQGVIPL

SEQ ID NO: 16506 - protein, 9 aa, synthetic construct
  REGION 1..9: note = Description of Artificial Sequence: Synthetic peptide
KELYPLSSL

SEQ ID NO: 16507 - protein, 9 aa, synthetic construct
  REGION 1..9: note = Description of Artificial Sequence: Synthetic peptide
AEKDIIISS

SEQ ID NO: 16508 - protein, 9 aa, synthetic construct
  REGION 1..9: note = Description of Artificial Sequence: Synthetic peptide
ANSPTRREL

SEQ ID NO: 16509 - protein, 9 aa, synthetic construct
  REGION 1..9: note = Description of Artificial Sequence: Synthetic peptide
GEQDKDRSI

SEQ ID NO: 16510 - protein, 8 aa, synthetic construct
  REGION 1..8: note = Description of Artificial Sequence: Synthetic peptide
IEIVQRAF

SEQ ID NO: 16511 - protein, 11 aa, synthetic construct
  REGION 1..11: note = Description of Artificial Sequence: Synthetic peptide
AEQATQEVKSW

SEQ ID NO: 16512 - protein, 11 aa, synthetic construct
  REGION 1..11: note = Description of Artificial Sequence: Synthetic peptide
AEQATQEVKGW

SEQ ID NO: 16513 - protein, 10 aa, synthetic construct
  REGION 1..10: note = Description of Artificial Sequence: Synthetic peptide
NENNGTNSTW

SEQ ID NO: 16514 - protein, 11 aa, synthetic construct
  REGION 1..11: note = Description of Artificial Sequence: Synthetic peptide
SEVNIVTDSQY

SEQ ID NO: 16515 - protein, 9 aa, synthetic construct
  REGION 1..9: note = Description of Artificial Sequence: Synthetic peptide
EEIDLPGKW

SEQ ID NO: 16516 - protein, 9 aa, synthetic construct
  REGION 1..9: note = Description of Artificial Sequence: Synthetic peptide
SESAIRNAI

SEQ ID NO: 16517 - protein, 9 aa, synthetic construct
  REGION 1..9: note = Description of Artificial Sequence: Synthetic peptide
SESAIRKAI

SEQ ID NO: 16518 - protein, 11 aa, synthetic construct
  REGION 1..11: note = Description of Artificial Sequence: Synthetic peptide
NEQDLLALDKW

SEQ ID NO: 16519 - protein, 11 aa, synthetic construct
  REGION 1..11: note = Description of Artificial Sequence: Synthetic peptide
NEQDLLALDQW

SEQ ID NO: 16520 - protein, 9 aa, synthetic construct
  REGION 1..9: note = Description of Artificial Sequence: Synthetic peptide
SENNDTITL

SEQ ID NO: 16521 - protein, 9 aa, synthetic construct
  REGION 1..9: note = Description of Artificial Sequence: Synthetic peptide
SESEIVNQI

SEQ ID NO: 16522 - protein, 11 aa, synthetic construct
  REGION 1..11: note = Description of Artificial Sequence: Synthetic peptide
AEMELAENREI

SEQ ID NO: 16523 - protein, 10 aa, synthetic construct
  REGION 1..10: note = Description of Artificial Sequence: Synthetic peptide
NETPGIRYQY

SEQ ID NO: 16524 - protein, 10 aa, synthetic construct
  REGION 1..10: note = Description of Artificial Sequence: Synthetic peptide
TEPIIGAETY

SEQ ID NO: 16525 - protein, 9 aa, synthetic construct
  REGION 1..9: note = Description of Artificial Sequence: Synthetic peptide
AETGQETAY

SEQ ID NO: 16526 - protein, 9 aa, synthetic construct
  REGION 1..9: note = Description of Artificial Sequence: Synthetic peptide
GEGAISLNF

SEQ ID NO: 16527 - protein, 11 aa, synthetic construct
  REGION 1..11: note = Description of Artificial Sequence: Synthetic peptide
NEQDLLALDNW

SEQ ID NO: 16528 - protein, 11 aa, synthetic construct
  REGION 1..11: note = Description of Artificial Sequence: Synthetic peptide
SEVNIVTDSQY

SEQ ID NO: 16529 - protein, 11 aa, synthetic construct
  REGION 1..11: note = Description of Artificial Sequence: Synthetic peptide
AEQATQEVKSW

SEQ ID NO: 16530 - protein, 11 aa, synthetic construct
  REGION 1..11: note = Description of Artificial Sequence: Synthetic peptide
AEQATQEVKGW

SEQ ID NO: 16531 - protein, 9 aa, synthetic construct
  REGION 1..9: note = Description of Artificial Sequence: Synthetic peptide
EEIDLPGKW

SEQ ID NO: 16532 - protein, 10 aa, synthetic construct
  REGION 1..10: note = Description of Artificial Sequence: Synthetic peptide
NENNGTNSTW

SEQ ID NO: 16533 - protein, 9 aa, synthetic construct
  REGION 1..9: note = Description of Artificial Sequence: Synthetic peptide
SESAIRKAI

SEQ ID NO: 16534 - protein, 9 aa, synthetic construct
  REGION 1..9: note = Description of Artificial Sequence: Synthetic peptide
SESEIVNQI

SEQ ID NO: 16535 - protein, 9 aa, synthetic construct
  REGION 1..9: note = Description of Artificial Sequence: Synthetic peptide
SESAIRNAI

SEQ ID NO: 16536 - protein, 11 aa, synthetic construct
  REGION 1..11: note = Description of Artificial Sequence: Synthetic peptide
AEVQKQGLGQW

SEQ ID NO: 16537 - protein, 11 aa, synthetic construct
  REGION 1..11: note = Description of Artificial Sequence: Synthetic peptide
AEVQKQGPDQW

SEQ ID NO: 16538 - protein, 9 aa, synthetic construct
  REGION 1..9: note = Description of Artificial Sequence: Synthetic peptide
SENNDTITL

SEQ ID NO: 16539 - protein, 10 aa, synthetic construct
  REGION 1..10: note = Description of Artificial Sequence: Synthetic peptide
NETPGIRYQY

SEQ ID NO: 16540 - protein, 11 aa, synthetic construct
  REGION 1..11: note = Description of Artificial Sequence: Synthetic peptide
AEVQKQEQGQW

SEQ ID NO: 16541 - protein, 9 aa, synthetic construct
  REGION 1..9: note = Description of Artificial Sequence: Synthetic peptide
GEGAISLNF

SEQ ID NO: 16542 - protein, 10 aa, synthetic construct
  REGION 1..10: note = Description of Artificial Sequence: Synthetic peptide
TEPIIGAETY

SEQ ID NO: 16543 - protein, 11 aa, synthetic construct
  REGION 1..11: note = Description of Artificial Sequence: Synthetic peptide
NEQDLLALDKW

SEQ ID NO: 16544 - protein, 11 aa, synthetic construct
  REGION 1..11: note = Description of Artificial Sequence: Synthetic peptide
AEVQKQGPGQW

SEQ ID NO: 16545 - protein, 9 aa, synthetic construct
  REGION 1..9: note = Description of Artificial Sequence: Synthetic peptide
SESELVNQI

SEQ ID NO: 16546 - protein, 11 aa, synthetic construct
  REGION 1..11: note = Description of Artificial Sequence: Synthetic peptide
NEQDLLALDQW

SEQ ID NO: 16547 - protein, 9 aa, synthetic construct
  REGION 1..9: note = Description of Artificial Sequence: Synthetic peptide
AETGQETAY

SEQ ID NO: 16548 - protein, 9 aa, synthetic construct
  REGION 1..9: note = Description of Artificial Sequence: Synthetic peptide
NEIWENMTW

SEQ ID NO: 16549 - protein, 11 aa, synthetic construct
  REGION 1..11: note = Description of Artificial Sequence: Synthetic peptide
AEMELAENREI

SEQ ID NO: 16550 - protein, 11 aa, synthetic construct
  REGION 1..11: note = Description of Artificial Sequence: Synthetic peptide
TEIGVGSPQIF

SEQ ID NO: 16551 - protein, 11 aa, synthetic construct
  REGION 1..11: note = Description of Artificial Sequence: Synthetic peptide
QEYFINKSIEF

SEQ ID NO: 16552 - protein, 9 aa, synthetic construct
  REGION 1..9: note = Description of Artificial Sequence: Synthetic peptide
NEIWDNMTW

SEQ ID NO: 16553 - protein, 9 aa, synthetic construct
  REGION 1..9: note = Description of Artificial Sequence: Synthetic peptide
QEQKEKELY

SEQ ID NO: 16554 - protein, 10 aa, synthetic construct
  REGION 1..10: note = Description of Artificial Sequence: Synthetic peptide
TEIGVGSPQI

SEQ ID NO: 16555 - protein, 9 aa, synthetic construct
  REGION 1..9: note = Description of Artificial Sequence: Synthetic peptide
TEMEREGKI

SEQ ID NO: 16556 - protein, 10 aa, synthetic construct
  REGION 1..10: note = Description of Artificial Sequence: Synthetic peptide
AETGQETAYF

SEQ ID NO: 16557 - protein, 11 aa, synthetic construct
  REGION 1..11: note = Description of Artificial Sequence: Synthetic peptide
AEGKGDTSLSF

SEQ ID NO: 16558 - protein, 11 aa, synthetic construct
  REGION 1..11: note = Description of Artificial Sequence: Synthetic peptide
NEQDLLALDNW

SEQ ID NO: 16559 - protein, 8 aa, synthetic construct
  REGION 1..8: note = Description of Artificial Sequence: Synthetic peptide
NETPGIRY

SEQ ID NO: 16560 - protein, 11 aa, synthetic construct
  REGION 1..11: note = Description of Artificial Sequence: Synthetic peptide
TEPIPGVETYY

SEQ ID NO: 16561 - protein, 11 aa, synthetic construct
  REGION 1..11: note = Description of Artificial Sequence: Synthetic peptide
TEPIIGAETYY

SEQ ID NO: 16562 - protein, 10 aa, synthetic construct
  REGION 1..10: note = Description of Artificial Sequence: Synthetic peptide
TEPIPGVETY

SEQ ID NO: 16563 - protein, 9 aa, synthetic construct
  REGION 1..9: note = Description of Artificial Sequence: Synthetic peptide
SENNDTITL

SEQ ID NO: 16564 - protein, 11 aa, synthetic construct
  REGION 1..11: note = Description of Artificial Sequence: Synthetic peptide
AEQATQEVKSW

SEQ ID NO: 16565 - protein, 11 aa, synthetic construct
  REGION 1..11: note = Description of Artificial Sequence: Synthetic peptide
AEQATQEVKGW

SEQ ID NO: 16566 - protein, 10 aa, synthetic construct
  REGION 1..10: note = Description of Artificial Sequence: Synthetic peptide
NENNGTNSTW

SEQ ID NO: 16567 - protein, 9 aa, synthetic construct
  REGION 1..9: note = Description of Artificial Sequence: Synthetic peptide
SESAIRNAI

SEQ ID NO: 16568 - protein, 11 aa, synthetic construct
  REGION 1..11: note = Description of Artificial Sequence: Synthetic peptide
AEMELAENREI

SEQ ID NO: 16569 - protein, 11 aa, synthetic construct
  REGION 1..11: note = Description of Artificial Sequence: Synthetic peptide
SEVNIVTDSQY

SEQ ID NO: 16570 - protein, 10 aa, synthetic construct
  REGION 1..10: note = Description of Artificial Sequence: Synthetic peptide
AETGQETAYF

SEQ ID NO: 16571 - protein, 10 aa, synthetic construct
  REGION 1..10: note = Description of Artificial Sequence: Synthetic peptide
TETTNQKTEL

SEQ ID NO: 16572 - protein, 10 aa, synthetic construct
  REGION 1..10: note = Description of Artificial Sequence: Synthetic peptide
TETTNQKAEL

SEQ ID NO: 16573 - protein, 9 aa, synthetic construct
  REGION 1..9: note = Description of Artificial Sequence: Synthetic peptide
QEEDSEVGF

SEQ ID NO: 16574 - protein, 9 aa, synthetic construct
  REGION 1..9: note = Description of Artificial Sequence: Synthetic peptide
EEIDLPGKW

SEQ ID NO: 16575 - protein, 9 aa, synthetic construct
  REGION 1..9: note = Description of Artificial Sequence: Synthetic peptide
SESEIVNQI

SEQ ID NO: 16576 - protein, 11 aa, synthetic construct
  REGION 1..11: note = Description of Artificial Sequence: Synthetic peptide
TEIGVGSPQIF

SEQ ID NO: 16577 - protein, 11 aa, synthetic construct
  REGION 1..11: note = Description of Artificial Sequence: Synthetic peptide
SEIVNQIIEQL

SEQ ID NO: 16578 - protein, 11 aa, synthetic construct
  REGION 1..11: note = Description of Artificial Sequence: Synthetic peptide
TEINNNSTRNI

SEQ ID NO: 16579 - protein, 11 aa, synthetic construct
  REGION 1..11: note = Description of Artificial Sequence: Synthetic peptide
AEGKGDTSLSF

SEQ ID NO: 16580 - protein, 10 aa, synthetic construct
  REGION 1..10: note = Description of Artificial Sequence: Synthetic peptide
TEIGVGSPQI

SEQ ID NO: 16581 - protein, 9 aa, synthetic construct
  REGION 1..9: note = Description of Artificial Sequence: Synthetic peptide
AEGKGDTSL

SEQ ID NO: 16582 - protein, 10 aa, synthetic construct
  REGION 1..10: note = Description of Artificial Sequence: Synthetic peptide
TETGVGGPQI

SEQ ID NO: 16583 - protein, 11 aa, synthetic construct
  REGION 1..11: note = Description of Artificial Sequence: Synthetic peptide
AEVQKQEQGQW

SEQ ID NO: 16584 - protein, 11 aa, synthetic construct
  REGION 1..11: note = Description of Artificial Sequence: Synthetic peptide
AEVQKQGPDQW

SEQ ID NO: 16585 - protein, 11 aa, synthetic construct
  REGION 1..11: note = Description of Artificial Sequence: Synthetic peptide
AELELAENREI

SEQ ID NO: 16586 - protein, 9 aa, synthetic construct
  REGION 1..9: note = Description of Artificial Sequence: Synthetic peptide
QEEDSDVGF

SEQ ID NO: 16587 - protein, 8 aa, synthetic construct
  REGION 1..8: note = Description of Artificial Sequence: Synthetic peptide
AELQAIQL

SEQ ID NO: 16588 - protein, 10 aa, synthetic construct
  REGION 1..10: note = Description of Artificial Sequence: Synthetic peptide
AEHLKTAVQM

SEQ ID NO: 16589 - protein, 9 aa, synthetic construct
  REGION 1..9: note = Description of Artificial Sequence: Synthetic peptide
SESELVNQI

SEQ ID NO: 16590 - protein, 10 aa, synthetic construct
  REGION 1..10: note = Description of Artificial Sequence: Synthetic peptide
SESAIRNAIL

SEQ ID NO: 16591 - protein, 10 aa, synthetic construct
  REGION 1..10: note = Description of Artificial Sequence: Synthetic peptide
AEGKGTISSI

SEQ ID NO: 16592 - protein, 10 aa, synthetic construct
  REGION 1..10: note = Description of Artificial Sequence: Synthetic peptide
REISNYTQQI

SEQ ID NO: 16593 - protein, 10 aa, synthetic construct
  REGION 1..10: note = Description of Artificial Sequence: Synthetic peptide
AELQAIQLAL

SEQ ID NO: 16594 - protein, 9 aa, synthetic construct
  REGION 1..9: note = Description of Artificial Sequence: Synthetic peptide
SESAIRKAI

SEQ ID NO: 16595 - protein, 10 aa, synthetic construct
  REGION 1..10: note = Description of Artificial Sequence: Synthetic peptide
GEIIIKSENI

SEQ ID NO: 16596 - protein, 10 aa, synthetic construct
  REGION 1..10: note = Description of Artificial Sequence: Synthetic peptide
KEAPEEVEKI

SEQ ID NO: 16597 - protein, 11 aa, synthetic construct
  REGION 1..11: note = Description of Artificial Sequence: Synthetic peptide
TEPTAPPAESF

SEQ ID NO: 16598 - protein, 9 aa, synthetic construct
  REGION 1..9: note = Description of Artificial Sequence: Synthetic peptide
TEMEREGKI

SEQ ID NO: 16599 - protein, 8 aa, synthetic construct
  REGION 1..8: note = Description of Artificial Sequence: Synthetic peptide
AELHAIQL

SEQ ID NO: 16600 - protein, 9 aa, synthetic construct
  REGION 1..9: note = Description of Artificial Sequence: Synthetic peptide
NESVSAQEI

SEQ ID NO: 16601 - protein, 9 aa, synthetic construct
  REGION 1..9: note = Description of Artificial Sequence: Synthetic peptide
VELLGHNSL

SEQ ID NO: 16602 - protein, 11 aa, synthetic construct
  REGION 1..11: note = Description of Artificial Sequence: Synthetic peptide
AEVQKQGPGQW

SEQ ID NO: 16603 - protein, 9 aa, synthetic construct
  REGION 1..9: note = Description of Artificial Sequence: Synthetic peptide
SEGATPQDL

SEQ ID NO: 16604 - protein, 9 aa, synthetic construct
  REGION 1..9: note = Description of Artificial Sequence: Synthetic peptide
EELLTAVRI

SEQ ID NO: 16605 - protein, 9 aa, synthetic construct
  REGION 1..9: note = Description of Artificial Sequence: Synthetic peptide
NEMEKEGKI

SEQ ID NO: 16606 - protein, 9 aa, synthetic construct
  REGION 1..9: note = Description of Artificial Sequence: Synthetic peptide
GEGAISLNF

SEQ ID NO: 16607 - protein, 11 aa, synthetic construct
  REGION 1..11: note = Description of Artificial Sequence: Synthetic peptide
SELVNQIIEQL

SEQ ID NO: 16608 - protein, 10 aa, synthetic construct
  REGION 1..10: note = Description of Artificial Sequence: Synthetic peptide
SESEIVNQII

SEQ ID NO: 16609 - protein, 11 aa, synthetic construct
  REGION 1..11: note = Description of Artificial Sequence: Synthetic peptide
AEGKGTISSIF

SEQ ID NO: 16610 - protein, 9 aa, synthetic construct
  REGION 1..9: note = Description of Artificial Sequence: Synthetic peptide
QEKNEQDLL

SEQ ID NO: 16611 - protein, 10 aa, synthetic construct
  REGION 1..10: note = Description of Artificial Sequence: Synthetic peptide
AELHAIQLAL

SEQ ID NO: 16612 - protein, 10 aa, synthetic construct
  REGION 1..10: note = Description of Artificial Sequence: Synthetic peptide
GEIMIRSENI

SEQ ID NO: 16613 - protein, 9 aa, synthetic construct
  REGION 1..9: note = Description of Artificial Sequence: Synthetic peptide
GEQDKDRSI

SEQ ID NO: 16614 - protein, 11 aa, synthetic construct
  REGION 1..11: note = Description of Artificial Sequence: Synthetic peptide
TETGVGGPQIF

SEQ ID NO: 16615 - protein, 9 aa, synthetic construct
  REGION 1..9: note = Description of Artificial Sequence: Synthetic peptide
AEGQGVIPL

SEQ ID NO: 16616 - protein, 10 aa, synthetic construct
  REGION 1..10: note = Description of Artificial Sequence: Synthetic peptide
TEPGLGGPQI

SEQ ID NO: 16617 - protein, 10 aa, synthetic construct
  REGION 1..10: note = Description of Artificial Sequence: Synthetic peptide
EEIKSLFNTV

SEQ ID NO: 16618 - protein, 11 aa, synthetic construct
  REGION 1..11: note = Description of Artificial Sequence: Synthetic peptide
AEGVGAVSQDL

SEQ ID NO: 16619 - protein, 9 aa, synthetic construct
  REGION 1..9: note = Description of Artificial Sequence: Synthetic peptide
SERVLSTCL

SEQ ID NO: 16620 - protein, 11 aa, synthetic construct
  REGION 1..11: note = Description of Artificial Sequence: Synthetic peptide
AEVQKQGLGQW

SEQ ID NO: 16621 - protein, 9 aa, synthetic construct
  REGION 1..9: note = Description of Artificial Sequence: Synthetic peptide
KEIHPLASL

SEQ ID NO: 16622 - protein, 11 aa, synthetic construct
  REGION 1..11: note = Description of Artificial Sequence: Synthetic peptide
SEGDTEELATL

SEQ ID NO: 16623 - protein, 11 aa, synthetic construct
  REGION 1..11: note = Description of Artificial Sequence: Synthetic peptide
NEQDLLALDQW

SEQ ID NO: 16624 - protein, 9 aa, synthetic construct
  REGION 1..9: note = Description of Artificial Sequence: Synthetic peptide
TDVVPINEM

SEQ ID NO: 16625 - protein, 8 aa, synthetic construct
  REGION 1..8: note = Description of Artificial Sequence: Synthetic peptide
TELQAIQL

SEQ ID NO: 16626 - protein, 11 aa, synthetic construct
  REGION 1..11: note = Description of Artificial Sequence: Synthetic peptide
KETINDEAAEW

SEQ ID NO: 16627 - protein, 9 aa, synthetic construct
  REGION 1..9: note = Description of Artificial Sequence: Synthetic peptide
EELATLMEL

SEQ ID NO: 16628 - protein, 8 aa, synthetic construct
  REGION 1..8: note = Description of Artificial Sequence: Synthetic peptide
EEIKNCSF

SEQ ID NO: 16629 - protein, 9 aa, synthetic construct
  REGION 1..9: note = Description of Artificial Sequence: Synthetic peptide
GEQDRDRSI

SEQ ID NO: 16630 - protein, 9 aa, synthetic construct
  REGION 1..9: note = Description of Artificial Sequence: Synthetic peptide
VELLGRNSL

SEQ ID NO: 16631 - protein, 9 aa, synthetic construct
  REGION 1..9: note = Description of Artificial Sequence: Synthetic peptide
QLTEVVQKI

SEQ ID NO: 16632 - protein, 8 aa, synthetic construct
  REGION 1..8: note = Description of Artificial Sequence: Synthetic peptide
SDIQTKEL

SEQ ID NO: 16633 - protein, 9 aa, synthetic construct
  REGION 1..9: note = Description of Artificial Sequence: Synthetic peptide
GEQDRDKSI

SEQ ID NO: 16634 - protein, 9 aa, synthetic construct
  REGION 1..9: note = Description of Artificial Sequence: Synthetic peptide
VAIGPGQAF

SEQ ID NO: 16635 - protein, 9 aa, synthetic construct
  REGION 1..9: note = Description of Artificial Sequence: Synthetic peptide
STRNITEEY

SEQ ID NO: 16636 - protein, 9 aa, synthetic construct
  REGION 1..9: note = Description of Artificial Sequence: Synthetic peptide
ISNGNKTSY

SEQ ID NO: 16637 - protein, 9 aa, synthetic construct
  REGION 1..9: note = Description of Artificial Sequence: Synthetic peptide
IPIGPGQAF

SEQ ID NO: 16638 - protein, 9 aa, synthetic construct
  REGION 1..9: note = Description of Artificial Sequence: Synthetic peptide
RAVGVGAVF

SEQ ID NO: 16639 - protein, 10 aa, synthetic construct
  REGION 1..10: note = Description of Artificial Sequence: Synthetic peptide
ILKEPVHGVY

SEQ ID NO: 16640 - protein, 10 aa, synthetic construct
  REGION 1..10: note = Description of Artificial Sequence: Synthetic peptide
VAIGPGQAFY

SEQ ID NO: 16641 - protein, 9 aa, synthetic construct
  REGION 1..9: note = Description of Artificial Sequence: Synthetic peptide
SALFNSSSL

SEQ ID NO: 16642 - protein, 10 aa, synthetic construct
  REGION 1..10: note = Description of Artificial Sequence: Synthetic peptide
SIRFGPGQAF

SEQ ID NO: 16643 - protein, 9 aa, synthetic construct
  REGION 1..9: note = Description of Artificial Sequence: Synthetic peptide
STVGSTAGY

SEQ ID NO: 16644 - protein, 9 aa, synthetic construct
  REGION 1..9: note = Description of Artificial Sequence: Synthetic peptide
KAKPPLPSV

SEQ ID NO: 16645 - protein, 9 aa, synthetic construct
  REGION 1..9: note = Description of Artificial Sequence: Synthetic peptide
FLGTAGSTM

SEQ ID NO: 16646 - protein, 8 aa, synthetic construct
  REGION 1..8: note = Description of Artificial Sequence: Synthetic peptide
HLGPGQAL

SEQ ID NO: 16647 - protein, 9 aa, synthetic construct
  REGION 1..9: note = Description of Artificial Sequence: Synthetic peptide
GKKAIGTVL

SEQ ID NO: 16648 - protein, 8 aa, synthetic construct
  REGION 1..8: note = Description of Artificial Sequence: Synthetic peptide
HQAAMQML

SEQ ID NO: 16649 - protein, 8 aa, synthetic construct
  REGION 1..8: note = Description of Artificial Sequence: Synthetic peptide
GKQKIITL

SEQ ID NO: 16650 - protein, 9 aa, synthetic construct
  REGION 1..9: note = Description of Artificial Sequence: Synthetic peptide
HQAISPRTL

SEQ ID NO: 16651 - protein, 9 aa, synthetic construct
  REGION 1..9: note = Description of Artificial Sequence: Synthetic peptide
IKPVVSTQL

SEQ ID NO: 16652 - protein, 8 aa, synthetic construct
  REGION 1..8: note = Description of Artificial Sequence: Synthetic peptide
KQLQSRVL

SEQ ID NO: 16653 - protein, 8 aa, synthetic construct
  REGION 1..8: note = Description of Artificial Sequence: Synthetic peptide
AKNIIVQL

SEQ ID NO: 16654 - protein, 9 aa, synthetic construct
  REGION 1..9: note = Description of Artificial Sequence: Synthetic peptide
RAIEAQQHL

SEQ ID NO: 16655 - protein, 9 aa, synthetic construct
  REGION 1..9: note = Description of Artificial Sequence: Synthetic peptide
KALTDIVSM

SEQ ID NO: 16656 - protein, 8 aa, synthetic construct
  REGION 1..8: note = Description of Artificial Sequence: Synthetic peptide
AKVIIVHL

SEQ ID NO: 16657 - protein, 9 aa, synthetic construct
  REGION 1..9: note = Description of Artificial Sequence: Synthetic peptide
RALGPGASL

SEQ ID NO: 16658 - protein, 11 aa, synthetic construct
  REGION 1..11: note = Description of Artificial Sequence: Synthetic peptide
TQIDPDLADQL

SEQ ID NO: 16659 - protein, 9 aa, synthetic construct
  REGION 1..9: note = Description of Artificial Sequence: Synthetic peptide
IMAQLQPAL

SEQ ID NO: 16660 - protein, 8 aa, synthetic construct
  REGION 1..8: note = Description of Artificial Sequence: Synthetic peptide
KQLQARVL

SEQ ID NO: 16661 - protein, 9 aa, synthetic construct
  REGION 1..9: note = Description of Artificial Sequence: Synthetic peptide
RALGPGATL

SEQ ID NO: 16662 - protein, 9 aa, synthetic construct
  REGION 1..9: note = Description of Artificial Sequence: Synthetic peptide
RAVGLGAVL

SEQ ID NO: 16663 - protein, 9 aa, synthetic construct
  REGION 1..9: note = Description of Artificial Sequence: Synthetic peptide
SALFNSSSL

SEQ ID NO: 16664 - protein, 8 aa, synthetic construct
  REGION 1..8: note = Description of Artificial Sequence: Synthetic peptide
KKAIGTVL

SEQ ID NO: 16665 - protein, 10 aa, synthetic construct
  REGION 1..10: note = Description of Artificial Sequence: Synthetic peptide
TEIGVGSPQI

SEQ ID NO: 16666 - protein, 9 aa, synthetic construct
  REGION 1..9: note = Description of Artificial Sequence: Synthetic peptide
SESEIVNQI

SEQ ID NO: 16667 - protein, 9 aa, synthetic construct
  REGION 1..9: note = Description of Artificial Sequence: Synthetic peptide
SESELVNQI

SEQ ID NO: 16668 - protein, 9 aa, synthetic construct
  REGION 1..9: note = Description of Artificial Sequence: Synthetic peptide
SESAIRNAI

SEQ ID NO: 16669 - protein, 10 aa, synthetic construct
  REGION 1..10: note = Description of Artificial Sequence: Synthetic peptide
CEYPAGHNKV

SEQ ID NO: 16670 - protein, 10 aa, synthetic construct
  REGION 1..10: note = Description of Artificial Sequence: Synthetic peptide
EEIKSLFNTV

SEQ ID NO: 16671 - protein, 9 aa, synthetic construct
  REGION 1..9: note = Description of Artificial Sequence: Synthetic peptide
LETEPIPGV

SEQ ID NO: 16672 - protein, 9 aa, synthetic construct
  REGION 1..9: note = Description of Artificial Sequence: Synthetic peptide
NETVEITCV

SEQ ID NO: 16673 - protein, 9 aa, synthetic construct
  REGION 1..9: note = Description of Artificial Sequence: Synthetic peptide
QEYFINKSI

SEQ ID NO: 16674 - protein, 9 aa, synthetic construct
  REGION 1..9: note = Description of Artificial Sequence: Synthetic peptide
IEIGGKKAI

SEQ ID NO: 16675 - protein, 10 aa, synthetic construct
  REGION 1..10: note = Description of Artificial Sequence: Synthetic peptide
TETGVGGPQI

SEQ ID NO: 16676 - protein, 9 aa, synthetic construct
  REGION 1..9: note = Description of Artificial Sequence: Synthetic peptide
TEMEREGKI

SEQ ID NO: 16677 - protein, 10 aa, synthetic construct
  REGION 1..10: note = Description of Artificial Sequence: Synthetic peptide
REISNYTQQI

SEQ ID NO: 16678 - protein, 10 aa, synthetic construct
  REGION 1..10: note = Description of Artificial Sequence: Synthetic peptide
TETGVGRPQV

SEQ ID NO: 16679 - protein, 9 aa, synthetic construct
  REGION 1..9: note = Description of Artificial Sequence: Synthetic peptide
IEISGKKAI

SEQ ID NO: 16680 - protein, 9 aa, synthetic construct
  REGION 1..9: note = Description of Artificial Sequence: Synthetic peptide
LEITTHSFI

SEQ ID NO: 16681 - protein, 10 aa, synthetic construct
  REGION 1..10: note = Description of Artificial Sequence: Synthetic peptide
CEYQAGHNKV

SEQ ID NO: 16682 - protein, 9 aa, synthetic construct
  REGION 1..9: note = Description of Artificial Sequence: Synthetic peptide
SENNDTITL

SEQ ID NO: 16683 - protein, 9 aa, synthetic construct
  REGION 1..9: note = Description of Artificial Sequence: Synthetic peptide
KEFNGTGLC

SEQ ID NO: 16684 - protein, 10 aa, synthetic construct
  REGION 1..10: note = Description of Artificial Sequence: Synthetic peptide
CEYQAGHTKV

SEQ ID NO: 16685 - protein, 9 aa, synthetic construct
  REGION 1..9: note = Description of Artificial Sequence: Synthetic peptide
NESVSAQEI

SEQ ID NO: 16686 - protein, 8 aa, synthetic construct
  REGION 1..8: note = Description of Artificial Sequence: Synthetic peptide
FESMHPKV

SEQ ID NO: 16687 - protein, 10 aa, synthetic construct
  REGION 1..10: note = Description of Artificial Sequence: Synthetic peptide
AENFGFGEEI

SEQ ID NO: 16688 - protein, 11 aa, synthetic construct
  REGION 1..11: note = Description of Artificial Sequence: Synthetic peptide
TEINNNSTRNI

SEQ ID NO: 16689 - protein, 8 aa, synthetic construct
  REGION 1..8: note = Description of Artificial Sequence: Synthetic peptide
QEIPMKNV

SEQ ID NO: 16690 - protein, 9 aa, synthetic construct
  REGION 1..9: note = Description of Artificial Sequence: Synthetic peptide
NETISNGTI

SEQ ID NO: 16691 - protein, 8 aa, synthetic construct
  REGION 1..8: note = Description of Artificial Sequence: Synthetic peptide
SEIVNQII

SEQ ID NO: 16692 - protein, 11 aa, synthetic construct
  REGION 1..11: note = Description of Artificial Sequence: Synthetic peptide
AEMELAENREI

SEQ ID NO: 16693 - protein, 10 aa, synthetic construct
  REGION 1..10: note = Description of Artificial Sequence: Synthetic peptide
AEGKGTISSI

SEQ ID NO: 16694 - protein, 10 aa, synthetic construct
  REGION 1..10: note = Description of Artificial Sequence: Synthetic peptide
KEAPEEVEKI

SEQ ID NO: 16695 - protein, 8 aa, synthetic construct
  REGION 1..8: note = Description of Artificial Sequence: Synthetic peptide
QEINMRNV

SEQ ID NO: 16696 - protein, 11 aa, synthetic construct
  REGION 1..11: note = Description of Artificial Sequence: Synthetic peptide
AELELAENREI

SEQ ID NO: 16697 - protein, 9 aa, synthetic construct
  REGION 1..9: note = Description of Artificial Sequence: Synthetic peptide
NETEIFRPV

SEQ ID NO: 16698 - protein, 9 aa, synthetic construct
  REGION 1..9: note = Description of Artificial Sequence: Synthetic peptide
MELAENREI

SEQ ID NO: 16699 - protein, 10 aa, synthetic construct
  REGION 1..10: note = Description of Artificial Sequence: Synthetic peptide
EELRSLFNTV

SEQ ID NO: 16700 - protein, 10 aa, synthetic construct
  REGION 1..10: note = Description of Artificial Sequence: Synthetic peptide
GEIIIKSENI

SEQ ID NO: 16701 - protein, 10 aa, synthetic construct
  REGION 1..10: note = Description of Artificial Sequence: Synthetic peptide
GEIMIRSENI

SEQ ID NO: 16702 - protein, 9 aa, synthetic construct
  REGION 1..9: note = Description of Artificial Sequence: Synthetic peptide
IEISGKRAI

SEQ ID NO: 16703 - protein, 10 aa, synthetic construct
  REGION 1..10: note = Description of Artificial Sequence: Synthetic peptide
MEDEDREVLI

SEQ ID NO: 16704 - protein, 9 aa, synthetic construct
  REGION 1..9: note = Description of Artificial Sequence: Synthetic peptide
LETEPIPGA

SEQ ID NO: 16705 - protein, 8 aa, synthetic construct
  REGION 1..8: note = Description of Artificial Sequence: Synthetic peptide
QEIPLGNV

SEQ ID NO: 16706 - protein, 9 aa, synthetic construct
  REGION 1..9: note = Description of Artificial Sequence: Synthetic peptide
NEMEKEGKI

SEQ ID NO: 16707 - protein, 8 aa, synthetic construct
  REGION 1..8: note = Description of Artificial Sequence: Synthetic peptide
DEDLLRTI

SEQ ID NO: 16708 - protein, 10 aa, synthetic construct
  REGION 1..10: note = Description of Artificial Sequence: Synthetic peptide
AESFGFGEEI

SEQ ID NO: 16709 - protein, 9 aa, synthetic construct
  REGION 1..9: note = Description of Artificial Sequence: Synthetic peptide
SESAIRKAI

SEQ ID NO: 16710 - protein, 9 aa, synthetic construct
  REGION 1..9: note = Description of Artificial Sequence: Synthetic peptide
SETETFRPA

SEQ ID NO: 16711 - protein, 9 aa, synthetic construct
  REGION 1..9: note = Description of Artificial Sequence: Synthetic peptide
SEVGFPVRP

SEQ ID NO: 16712 - protein, 9 aa, synthetic construct
  REGION 1..9: note = Description of Artificial Sequence: Synthetic peptide
IEVKDTKEA

SEQ ID NO: 16713 - protein, 9 aa, synthetic construct
  REGION 1..9: note = Description of Artificial Sequence: Synthetic peptide
NETVPITCA

SEQ ID NO: 16714 - protein, 9 aa, synthetic construct
  REGION 1..9: note = Description of Artificial Sequence: Synthetic peptide
AEWDRIHPP

SEQ ID NO: 16715 - protein, 9 aa, synthetic construct
  REGION 1..9: note = Description of Artificial Sequence: Synthetic peptide
AIIGDIRQA

SEQ ID NO: 16716 - protein, 10 aa, synthetic construct
  REGION 1..10: note = Description of Artificial Sequence: Synthetic peptide
GEVIGDIRKA

SEQ ID NO: 16717 - protein, 9 aa, synthetic construct
  REGION 1..9: note = Description of Artificial Sequence: Synthetic peptide
LETEPIIGA

SEQ ID NO: 16718 - protein, 9 aa, synthetic construct
  REGION 1..9: note = Description of Artificial Sequence: Synthetic peptide
REMLKNVTA

SEQ ID NO: 16719 - protein, 9 aa, synthetic construct
  REGION 1..9: note = Description of Artificial Sequence: Synthetic peptide
IEVRDTKEA

SEQ ID NO: 16720 - protein, 10 aa, synthetic construct
  REGION 1..10: note = Description of Artificial Sequence: Synthetic peptide
REFPSEQARA

SEQ ID NO: 16721 - protein, 9 aa, synthetic construct
  REGION 1..9: note = Description of Artificial Sequence: Synthetic peptide
LETEPIPGA

SEQ ID NO: 16722 - protein, 11 aa, synthetic construct
  REGION 1..11: note = Description of Artificial Sequence: Synthetic peptide
AEAMSQATGAA

SEQ ID NO: 16723 - protein, 9 aa, synthetic construct
  REGION 1..9: note = Description of Artificial Sequence: Synthetic peptide
KEFNGTGPC

SEQ ID NO: 16724 - protein, 11 aa, synthetic construct
  REGION 1..11: note = Description of Artificial Sequence: Synthetic peptide
TQIDPDLADQL

SEQ ID NO: 16725 - protein, 9 aa, synthetic construct
  REGION 1..9: note = Description of Artificial Sequence: Synthetic peptide
KEYNGTGPC

SEQ ID NO: 16726 - protein, 9 aa, synthetic construct
  REGION 1..9: note = Description of Artificial Sequence: Synthetic peptide
EVIGDIRKA

SEQ ID NO: 16727 - protein, 9 aa, synthetic construct
  REGION 1..9: note = Description of Artificial Sequence: Synthetic peptide
AETYYVDGA

SEQ ID NO: 16728 - protein, 9 aa, synthetic construct
  REGION 1..9: note = Description of Artificial Sequence: Synthetic peptide
KEFNGTGLC

SEQ ID NO: 16729 - protein, 10 aa, synthetic construct
  REGION 1..10: note = Description of Artificial Sequence: Synthetic peptide
REFSPEQARA

SEQ ID NO: 16730 - protein, 9 aa, synthetic construct
  REGION 1..9: note = Description of Artificial Sequence: Synthetic peptide
RVIEIVQRA

SEQ ID NO: 16731 - protein, 10 aa, synthetic construct
  REGION 1..10: note = Description of Artificial Sequence: Synthetic peptide
KEKEFNGTGP

SEQ ID NO: 16732 - protein, 11 aa, synthetic construct
  REGION 1..11: note = Description of Artificial Sequence: Synthetic peptide
AEAMSQASGAA

SEQ ID NO: 16733 - protein, 10 aa, synthetic construct
  REGION 1..10: note = Description of Artificial Sequence: Synthetic peptide
REFSSEQARA

SEQ ID NO: 16734 - protein, 10 aa, synthetic construct
  REGION 1..10: note = Description of Artificial Sequence: Synthetic peptide
AEAMSQATGA

SEQ ID NO: 16735 - protein, 9 aa, synthetic construct
  REGION 1..9: note = Description of Artificial Sequence: Synthetic peptide
AVFLGFLGA

SEQ ID NO: 16736 - protein, 9 aa, synthetic construct
  REGION 1..9: note = Description of Artificial Sequence: Synthetic peptide
ATLEEMMTA

SEQ ID NO: 16737 - protein, 10 aa, synthetic construct
  REGION 1..10: note = Description of Artificial Sequence: Synthetic peptide
AETYYVDGAA

SEQ ID NO: 16738 - protein, 10 aa, synthetic construct
  REGION 1..10: note = Description of Artificial Sequence: Synthetic peptide
SETETFRPAG

SEQ ID NO: 16739 - protein, 9 aa, synthetic construct
  REGION 1..9: note = Description of Artificial Sequence: Synthetic peptide
AELHAIQLA

SEQ ID NO: 16740 - protein, 10 aa, synthetic construct
  REGION 1..10: note = Description of Artificial Sequence: Synthetic peptide
AVFLGFLGAA

SEQ ID NO: 16741 - protein, 9 aa, synthetic construct
  REGION 1..9: note = Description of Artificial Sequence: Synthetic peptide
VVIQDNNEI

SEQ ID NO: 16742 - protein, 9 aa, synthetic construct
  REGION 1..9: note = Description of Artificial Sequence: Synthetic peptide
SQQEIQQAA

SEQ ID NO: 16743 - protein, 8 aa, synthetic construct
  REGION 1..8: note = Description of Artificial Sequence: Synthetic peptide
REFPSEQA

SEQ ID NO: 16744 - protein, 9 aa, synthetic construct
  REGION 1..9: note = Description of Artificial Sequence: Synthetic peptide
EEIAPSPKP

SEQ ID NO: 16745 - protein, 8 aa, synthetic construct
  REGION 1..8: note = Description of Artificial Sequence: Synthetic peptide
TEIGVGSP

SEQ ID NO: 16746 - protein, 11 aa, synthetic construct
  REGION 1..11: note = Description of Artificial Sequence: Synthetic peptide
GEAREFPSEQA

SEQ ID NO: 16747 - protein, 9 aa, synthetic construct
  REGION 1..9: note = Description of Artificial Sequence: Synthetic peptide
AELQAIQLA

SEQ ID NO: 16748 - protein, 9 aa, synthetic construct
  REGION 1..9: note = Description of Artificial Sequence: Synthetic peptide
RVIEVAQRA

SEQ ID NO: 16749 - protein, 8 aa, synthetic construct
  REGION 1..8: note = Description of Artificial Sequence: Synthetic peptide
TAFTIPSI

SEQ ID NO: 16750 - protein, 8 aa, synthetic construct
  REGION 1..8: note = Description of Artificial Sequence: Synthetic peptide
IPLNLPQI

SEQ ID NO: 16751 - protein, 8 aa, synthetic construct
  REGION 1..8: note = Description of Artificial Sequence: Synthetic peptide
DPWVGNNL

SEQ ID NO: 16752 - protein, 9 aa, synthetic construct
  REGION 1..9: note = Description of Artificial Sequence: Synthetic peptide
FPISPIETV

SEQ ID NO: 16753 - protein, 8 aa, synthetic construct
  REGION 1..8: note = Description of Artificial Sequence: Synthetic peptide
VPMEPSEV

SEQ ID NO: 16754 - protein, 8 aa, synthetic construct
  REGION 1..8: note = Description of Artificial Sequence: Synthetic peptide
DPWIGDNL

SEQ ID NO: 16755 - protein, 8 aa, synthetic construct
  REGION 1..8: note = Description of Artificial Sequence: Synthetic peptide
LPIAGNLV

SEQ ID NO: 16756 - protein, 9 aa, synthetic construct
  REGION 1..9: note = Description of Artificial Sequence: Synthetic peptide
DPNTADHLI

SEQ ID NO: 16757 - protein, 8 aa, synthetic construct
  REGION 1..8: note = Description of Artificial Sequence: Synthetic peptide
DPWVGDNL

SEQ ID NO: 16758 - protein, 10 aa, synthetic construct
  REGION 1..10: note = Description of Artificial Sequence: Synthetic peptide
IPYNPQSQGV

SEQ ID NO: 16759 - protein, 9 aa, synthetic construct
  REGION 1..9: note = Description of Artificial Sequence: Synthetic peptide
LPPVVAKEI

SEQ ID NO: 16760 - protein, 9 aa, synthetic construct
  REGION 1..9: note = Description of Artificial Sequence: Synthetic peptide
LPPIVAKEI

SEQ ID NO: 16761 - protein, 8 aa, synthetic construct
  REGION 1..8: note = Description of Artificial Sequence: Synthetic peptide
VPMDPAEI

SEQ ID NO: 16762 - protein, 9 aa, synthetic construct
  REGION 1..9: note = Description of Artificial Sequence: Synthetic peptide
LPHIVAKEI

SEQ ID NO: 16763 - protein, 9 aa, synthetic construct
  REGION 1..9: note = Description of Artificial Sequence: Synthetic peptide
IPLGDAKLV

SEQ ID NO: 16764 - protein, 9 aa, synthetic construct
  REGION 1..9: note = Description of Artificial Sequence: Synthetic peptide
NPPVPVGEI

SEQ ID NO: 16765 - protein, 8 aa, synthetic construct
  REGION 1..8: note = Description of Artificial Sequence: Synthetic peptide
VPVDPAVV

SEQ ID NO: 16766 - protein, 10 aa, synthetic construct
  REGION 1..10: note = Description of Artificial Sequence: Synthetic peptide
IPLGDAKLVV

SEQ ID NO: 16767 - protein, 8 aa, synthetic construct
  REGION 1..8: note = Description of Artificial Sequence: Synthetic peptide
SPPIARNI

SEQ ID NO: 16768 - protein, 9 aa, synthetic construct
  REGION 1..9: note = Description of Artificial Sequence: Synthetic peptide
DPNPQEIAI

SEQ ID NO: 16769 - protein, 8 aa, synthetic construct
  REGION 1..8: note = Description of Artificial Sequence: Synthetic peptide
TAYFILKL

SEQ ID NO: 16770 - protein, 8 aa, synthetic construct
  REGION 1..8: note = Description of Artificial Sequence: Synthetic peptide
YPAGHNKV

SEQ ID NO: 16771 - protein, 9 aa, synthetic construct
  REGION 1..9: note = Description of Artificial Sequence: Synthetic peptide
IPLRDATLV

SEQ ID NO: 16772 - protein, 9 aa, synthetic construct
  REGION 1..9: note = Description of Artificial Sequence: Synthetic peptide
NPPIPVGEI

SEQ ID NO: 16773 - protein, 8 aa, synthetic construct
  REGION 1..8: note = Description of Artificial Sequence: Synthetic peptide
IATEGIVI

SEQ ID NO: 16774 - protein, 9 aa, synthetic construct
  REGION 1..9: note = Description of Artificial Sequence: Synthetic peptide
VPKQPLPTT

SEQ ID NO: 16775 - protein, 8 aa, synthetic construct
  REGION 1..8: note = Description of Artificial Sequence: Synthetic peptide
QPLEISAI

SEQ ID NO: 16776 - protein, 9 aa, synthetic construct
  REGION 1..9: note = Description of Artificial Sequence: Synthetic peptide
YAPPIAGNI

SEQ ID NO: 16777 - protein, 11 aa, synthetic construct
  REGION 1..11: note = Description of Artificial Sequence: Synthetic peptide
IPYNPQSQGVV

SEQ ID NO: 16778 - protein, 9 aa, synthetic construct
  REGION 1..9: note = Description of Artificial Sequence: Synthetic peptide
DPDLADHLI

SEQ ID NO: 16779 - protein, 8 aa, synthetic construct
  REGION 1..8: note = Description of Artificial Sequence: Synthetic peptide
VPMDPAEV

SEQ ID NO: 16780 - protein, 9 aa, synthetic construct
  REGION 1..9: note = Description of Artificial Sequence: Synthetic peptide
EALEEVEKI

SEQ ID NO: 16781 - protein, 8 aa, synthetic construct
  REGION 1..8: note = Description of Artificial Sequence: Synthetic peptide
SPVSILDI

SEQ ID NO: 16782 - protein, 8 aa, synthetic construct
  REGION 1..8: note = Description of Artificial Sequence: Synthetic peptide
VGLIVASI

SEQ ID NO: 16783 - protein, 10 aa, synthetic construct
  REGION 1..10: note = Description of Artificial Sequence: Synthetic peptide
YALPIAGNLV

SEQ ID NO: 16784 - protein, 9 aa, synthetic construct
  REGION 1..9: note = Description of Artificial Sequence: Synthetic peptide
FPISPIETV

SEQ ID NO: 16785 - protein, 9 aa, synthetic construct
  REGION 1..9: note = Description of Artificial Sequence: Synthetic peptide
HPQQAGPIA

SEQ ID NO: 16786 - protein, 9 aa, synthetic construct
  REGION 1..9: note = Description of Artificial Sequence: Synthetic peptide
DANAPLFCA

SEQ ID NO: 16787 - protein, 9 aa, synthetic construct
  REGION 1..9: note = Description of Artificial Sequence: Synthetic peptide
TPIRQTPPA

SEQ ID NO: 16788 - protein, 9 aa, synthetic construct
  REGION 1..9: note = Description of Artificial Sequence: Synthetic peptide
LPIAGNLVC

SEQ ID NO: 16789 - protein, 10 aa, synthetic construct
  REGION 1..10: note = Description of Artificial Sequence: Synthetic peptide
YPSPAGTRQA

SEQ ID NO: 16790 - protein, 11 aa, synthetic construct
  REGION 1..11: note = Description of Artificial Sequence: Synthetic peptide
IPIGPGQAFYA

SEQ ID NO: 16791 - protein, 9 aa, synthetic construct
  REGION 1..9: note = Description of Artificial Sequence: Synthetic peptide
FPVRPQVPV

SEQ ID NO: 16792 - protein, 11 aa, synthetic construct
  REGION 1..11: note = Description of Artificial Sequence: Synthetic peptide
LPHIVAKEIVA

SEQ ID NO: 16793 - protein, 9 aa, synthetic construct
  REGION 1..9: note = Description of Artificial Sequence: Synthetic peptide
EPIPIHYCA

SEQ ID NO: 16794 - protein, 9 aa, synthetic construct
  REGION 1..9: note = Description of Artificial Sequence: Synthetic peptide
HVASGYIEA

SEQ ID NO: 16795 - protein, 11 aa, synthetic construct
  REGION 1..11: note = Description of Artificial Sequence: Synthetic peptide
VPVDPAVVEEA

SEQ ID NO: 16796 - protein, 10 aa, synthetic construct
  REGION 1..10: note = Description of Artificial Sequence: Synthetic peptide
HPAAAEGVGA

SEQ ID NO: 16797 - protein, 9 aa, synthetic construct
  REGION 1..9: note = Description of Artificial Sequence: Synthetic peptide
NPYNTPIFA

SEQ ID NO: 16798 - protein, 9 aa, synthetic construct
  REGION 1..9: note = Description of Artificial Sequence: Synthetic peptide
HPGSQPKTA

SEQ ID NO: 16799 - protein, 11 aa, synthetic construct
  REGION 1..11: note = Description of Artificial Sequence: Synthetic peptide
FALNPGLLETA

SEQ ID NO: 16800 - protein, 9 aa, synthetic construct
  REGION 1..9: note = Description of Artificial Sequence: Synthetic peptide
YPLSSLKSL

SEQ ID NO: 16801 - protein, 8 aa, synthetic construct
  REGION 1..8: note = Description of Artificial Sequence: Synthetic peptide
TAFTIPSI

SEQ ID NO: 16802 - protein, 9 aa, synthetic construct
  REGION 1..9: note = Description of Artificial Sequence: Synthetic peptide
DPIPIHYCA

SEQ ID NO: 16803 - protein, 11 aa, synthetic construct
  REGION 1..11: note = Description of Artificial Sequence: Synthetic peptide
VPMEPSEVEEA

SEQ ID NO: 16804 - protein, 9 aa, synthetic construct
  REGION 1..9: note = Description of Artificial Sequence: Synthetic peptide
EAMSQATGA

SEQ ID NO: 16805 - protein, 11 aa, synthetic construct
  REGION 1..11: note = Description of Artificial Sequence: Synthetic peptide
VPINDGRNSSA

SEQ ID NO: 16806 - protein, 8 aa, synthetic construct
  REGION 1..8: note = Description of Artificial Sequence: Synthetic peptide
NPYPSPAG

SEQ ID NO: 16807 - protein, 11 aa, synthetic construct
  REGION 1..11: note = Description of Artificial Sequence: Synthetic peptide
VPMDPAEIEEA

SEQ ID NO: 16808 - protein, 10 aa, synthetic construct
  REGION 1..10: note = Description of Artificial Sequence: Synthetic peptide
HSISERILSA

SEQ ID NO: 16809 - protein, 11 aa, synthetic construct
  REGION 1..11: note = Description of Artificial Sequence: Synthetic peptide
LPPVVAKEIVA

SEQ ID NO: 16810 - protein, 9 aa, synthetic construct
  REGION 1..9: note = Description of Artificial Sequence: Synthetic peptide
YPLTSLKSL

SEQ ID NO: 16811 - protein, 10 aa, synthetic construct
  REGION 1..10: note = Description of Artificial Sequence: Synthetic peptide
YPPPEGTRQA

SEQ ID NO: 16812 - protein, 9 aa, synthetic construct
  REGION 1..9: note = Description of Artificial Sequence: Synthetic peptide
YPIVQNAQG

SEQ ID NO: 16813 - protein, 11 aa, synthetic construct
  REGION 1..11: note = Description of Artificial Sequence: Synthetic peptide
VPMDPAEVEEA

SEQ ID NO: 16814 - protein, 8 aa, synthetic construct
  REGION 1..8: note = Description of Artificial Sequence: Synthetic peptide
TAFTIPST

SEQ ID NO: 16815 - protein, 11 aa, synthetic construct
  REGION 1..11: note = Description of Artificial Sequence: Synthetic peptide
FPISPIETVPV

SEQ ID NO: 16816 - protein, 8 aa, synthetic construct
  REGION 1..8: note = Description of Artificial Sequence: Synthetic peptide
IPLNLPQI

SEQ ID NO: 16817 - protein, 9 aa, synthetic construct
  REGION 1..9: note = Description of Artificial Sequence: Synthetic peptide
VPKQPLPTT

SEQ ID NO: 16818 - protein, 9 aa, synthetic construct
  REGION 1..9: note = Description of Artificial Sequence: Synthetic peptide
SAIVGLIVA

SEQ ID NO: 16819 - protein, 11 aa, synthetic construct
  REGION 1..11: note = Description of Artificial Sequence: Synthetic peptide
MLNTVGGHQAA

SEQ ID NO: 16820 - protein, 9 aa, synthetic construct
  REGION 1..9: note = Description of Artificial Sequence: Synthetic peptide
VPLGIPHPG

SEQ ID NO: 16821 - protein, 10 aa, synthetic construct
  REGION 1..10: note = Description of Artificial Sequence: Synthetic peptide
TPVAAEGVGA

SEQ ID NO: 16822 - protein, 9 aa, synthetic construct
  REGION 1..9: note = Description of Artificial Sequence: Synthetic peptide
VPKQPFSTT

SEQ ID NO: 16823 - protein, 9 aa, synthetic construct
  REGION 1..9: note = Description of Artificial Sequence: Synthetic peptide
FAIVGLIVA

SEQ ID NO: 16824 - protein, 9 aa, synthetic construct
  REGION 1..9: note = Description of Artificial Sequence: Synthetic peptide
QAMYSPPIA

SEQ ID NO: 16825 - protein, 10 aa, synthetic construct
  REGION 1..10: note = Description of Artificial Sequence: Synthetic peptide
APSAAVGVGA

SEQ ID NO: 16826 - protein, 9 aa, synthetic construct
  REGION 1..9: note = Description of Artificial Sequence: Synthetic peptide
SISERILSA

SEQ ID NO: 16827 - protein, 9 aa, synthetic construct
  REGION 1..9: note = Description of Artificial Sequence: Synthetic peptide
VPKQPLPTT

SEQ ID NO: 16828 - protein, 9 aa, synthetic construct
  REGION 1..9: note = Description of Artificial Sequence: Synthetic peptide
TPIRQTPPA

SEQ ID NO: 16829 - protein, 9 aa, synthetic construct
  REGION 1..9: note = Description of Artificial Sequence: Synthetic peptide
VPKQPFSTT

SEQ ID NO: 16830 - protein, 10 aa, synthetic construct
  REGION 1..10: note = Description of Artificial Sequence: Synthetic peptide
YPSPAGTRQA

SEQ ID NO: 16831 - protein, 9 aa, synthetic construct
  REGION 1..9: note = Description of Artificial Sequence: Synthetic peptide
HPQQAGPIA

SEQ ID NO: 16832 - protein, 9 aa, synthetic construct
  REGION 1..9: note = Description of Artificial Sequence: Synthetic peptide
FPISPIETV

SEQ ID NO: 16833 - protein, 9 aa, synthetic construct
  REGION 1..9: note = Description of Artificial Sequence: Synthetic peptide
KAKPPLPSV

SEQ ID NO: 16834 - protein, 10 aa, synthetic construct
  REGION 1..10: note = Description of Artificial Sequence: Synthetic peptide
APSAAVGVGA

SEQ ID NO: 16835 - protein, 9 aa, synthetic construct
  REGION 1..9: note = Description of Artificial Sequence: Synthetic peptide
RPEPTAPPA

SEQ ID NO: 16836 - protein, 10 aa, synthetic construct
  REGION 1..10: note = Description of Artificial Sequence: Synthetic peptide
KPLGVTPTRA

SEQ ID NO: 16837 - protein, 10 aa, synthetic construct
  REGION 1..10: note = Description of Artificial Sequence: Synthetic peptide
KPLGVAPTKA

SEQ ID NO: 16838 - protein, 9 aa, synthetic construct
  REGION 1..9: note = Description of Artificial Sequence: Synthetic peptide
VPKQPLPIT

SEQ ID NO: 16839 - protein, 9 aa, synthetic construct
  REGION 1..9: note = Description of Artificial Sequence: Synthetic peptide
IPIGPGQAF

SEQ ID NO: 16840 - protein, 11 aa, synthetic construct
  REGION 1..11: note = Description of Artificial Sequence: Synthetic peptide
VPINDGRNSSA

SEQ ID NO: 16841 - protein, 9 aa, synthetic construct
  REGION 1..9: note = Description of Artificial Sequence: Synthetic peptide
LPIAGNLVC

SEQ ID NO: 16842 - protein, 10 aa, synthetic construct
  REGION 1..10: note = Description of Artificial Sequence: Synthetic peptide
APSAAVGVGA

SEQ ID NO: 16843 - protein, 9 aa, synthetic construct
  REGION 1..9: note = Description of Artificial Sequence: Synthetic peptide
FPISPIETV

SEQ ID NO: 16844 - protein, 9 aa, synthetic construct
  REGION 1..9: note = Description of Artificial Sequence: Synthetic peptide
TPIRQTPPA

SEQ ID NO: 16845 - protein, 10 aa, synthetic construct
  REGION 1..10: note = Description of Artificial Sequence: Synthetic peptide
HPAAAEGVGA

SEQ ID NO: 16846 - protein, 10 aa, synthetic construct
  REGION 1..10: note = Description of Artificial Sequence: Synthetic peptide
KPLGVAPTKA

SEQ ID NO: 16847 - protein, 9 aa, synthetic construct
  REGION 1..9: note = Description of Artificial Sequence: Synthetic peptide
HPQQAGPIA

SEQ ID NO: 16848 - protein, 10 aa, synthetic construct
  REGION 1..10: note = Description of Artificial Sequence: Synthetic peptide
TPVAAEGVGA

SEQ ID NO: 16849 - protein, 10 aa, synthetic construct
  REGION 1..10: note = Description of Artificial Sequence: Synthetic peptide
KPLGVTPTRA

SEQ ID NO: 16850 - protein, 11 aa, synthetic construct
  REGION 1..11: note = Description of Artificial Sequence: Synthetic peptide
VPVDPAVVEEA

SEQ ID NO: 16851 - protein, 10 aa, synthetic construct
  REGION 1..10: note = Description of Artificial Sequence: Synthetic peptide
TPIRQTPPAA

SEQ ID NO: 16852 - protein, 9 aa, synthetic construct
  REGION 1..9: note = Description of Artificial Sequence: Synthetic peptide
VPKQPLPTT

SEQ ID NO: 16853 - protein, 10 aa, synthetic construct
  REGION 1..10: note = Description of Artificial Sequence: Synthetic peptide
IPAETGQETA

SEQ ID NO: 16854 - protein, 10 aa, synthetic construct
  REGION 1..10: note = Description of Artificial Sequence: Synthetic peptide
YPSPAGTRQA

SEQ ID NO: 16855 - protein, 11 aa, synthetic construct
  REGION 1..11: note = Description of Artificial Sequence: Synthetic peptide
GPNFISAAVKA

SEQ ID NO: 16856 - protein, 9 aa, synthetic construct
  REGION 1..9: note = Description of Artificial Sequence: Synthetic peptide
NPYNTPIFA

SEQ ID NO: 16857 - protein, 9 aa, synthetic construct
  REGION 1..9: note = Description of Artificial Sequence: Synthetic peptide
RPEPTAPPA

SEQ ID NO: 16858 - protein, 9 aa, synthetic construct
  REGION 1..9: note = Description of Artificial Sequence: Synthetic peptide
VPKQPFSTT

SEQ ID NO: 16859 - protein, 9 aa, synthetic construct
  REGION 1..9: note = Description of Artificial Sequence: Synthetic peptide
LPIAGNLVC

SEQ ID NO: 16860 - protein, 11 aa, synthetic construct
  REGION 1..11: note = Description of Artificial Sequence: Synthetic peptide
VPMDPAEIEEA

SEQ ID NO: 16861 - protein, 11 aa, synthetic construct
  REGION 1..11: note = Description of Artificial Sequence: Synthetic peptide
VPINDGRNSSA

SEQ ID NO: 16862 - protein, 11 aa, synthetic construct
  REGION 1..11: note = Description of Artificial Sequence: Synthetic peptide
VPMEPSEVEEA

SEQ ID NO: 16863 - protein, 9 aa, synthetic construct
  REGION 1..9: note = Description of Artificial Sequence: Synthetic peptide
IPIGPGQAF

SEQ ID NO: 16864 - protein, 9 aa, synthetic construct
  REGION 1..9: note = Description of Artificial Sequence: Synthetic peptide
HPGSQPKTA

SEQ ID NO: 16865 - protein, 9 aa, synthetic construct
  REGION 1..9: note = Description of Artificial Sequence: Synthetic peptide
QPLEISAIV

SEQ ID NO: 16866 - protein, 10 aa, synthetic construct
  REGION 1..10: note = Description of Artificial Sequence: Synthetic peptide
IPYNPQSQGV

SEQ ID NO: 16867 - protein, 11 aa, synthetic construct
  REGION 1..11: note = Description of Artificial Sequence: Synthetic peptide
VPMDPAEVEEA

SEQ ID NO: 16868 - protein, 10 aa, synthetic construct
  REGION 1..10: note = Description of Artificial Sequence: Synthetic peptide
APSAAVGVGA

SEQ ID NO: 16869 - protein, 9 aa, synthetic construct
  REGION 1..9: note = Description of Artificial Sequence: Synthetic peptide
FPISPIETV

SEQ ID NO: 16870 - protein, 9 aa, synthetic construct
  REGION 1..9: note = Description of Artificial Sequence: Synthetic peptide
TPIRQTPPA

SEQ ID NO: 16871 - protein, 10 aa, synthetic construct
  REGION 1..10: note = Description of Artificial Sequence: Synthetic peptide
KPLGVAPTKA

SEQ ID NO: 16872 - protein, 11 aa, synthetic construct
  REGION 1..11: note = Description of Artificial Sequence: Synthetic peptide
VPINDGRNSSA

SEQ ID NO: 16873 - protein, 10 aa, synthetic construct
  REGION 1..10: note = Description of Artificial Sequence: Synthetic peptide
KPLGVTPTRA

SEQ ID NO: 16874 - protein, 9 aa, synthetic construct
  REGION 1..9: note = Description of Artificial Sequence: Synthetic peptide
VPKQPLPTT

SEQ ID NO: 16875 - protein, 9 aa, synthetic construct
  REGION 1..9: note = Description of Artificial Sequence: Synthetic peptide
HPQQAGPIA

SEQ ID NO: 16876 - protein, 9 aa, synthetic construct
  REGION 1..9: note = Description of Artificial Sequence: Synthetic peptide
VPKQPFSTT

SEQ ID NO: 16877 - protein, 9 aa, synthetic construct
  REGION 1..9: note = Description of Artificial Sequence: Synthetic peptide
LPIAGNLVC

SEQ ID NO: 16878 - protein, 10 aa, synthetic construct
  REGION 1..10: note = Description of Artificial Sequence: Synthetic peptide
IPYNPQSQGV

SEQ ID NO: 16879 - protein, 10 aa, synthetic construct
  REGION 1..10: note = Description of Artificial Sequence: Synthetic peptide
YPSPAGTRQA

SEQ ID NO: 16880 - protein, 10 aa, synthetic construct
  REGION 1..10: note = Description of Artificial Sequence: Synthetic peptide
HPAAAEGVGA

SEQ ID NO: 16881 - protein, 10 aa, synthetic construct
  REGION 1..10: note = Description of Artificial Sequence: Synthetic peptide
APAGFAILKC

SEQ ID NO: 16882 - protein, 11 aa, synthetic construct
  REGION 1..11: note = Description of Artificial Sequence: Synthetic peptide
VPVDPAVVEEA

SEQ ID NO: 16883 - protein, 11 aa, synthetic construct
  REGION 1..11: note = Description of Artificial Sequence: Synthetic peptide
APSAAVGVGAV

SEQ ID NO: 16884 - protein, 10 aa, synthetic construct
  REGION 1..10: note = Description of Artificial Sequence: Synthetic peptide
TPIRQTPPAA

SEQ ID NO: 16885 - protein, 10 aa, synthetic construct
  REGION 1..10: note = Description of Artificial Sequence: Synthetic peptide
TPVAAEGVGA

SEQ ID NO: 16886 - protein, 11 aa, synthetic construct
  REGION 1..11: note = Description of Artificial Sequence: Synthetic peptide
GPNFISAAVKA

SEQ ID NO: 16887 - protein, 10 aa, synthetic construct
  REGION 1..10: note = Description of Artificial Sequence: Synthetic peptide
IPAETGQETA

SEQ ID NO: 16888 - protein, 11 aa, synthetic construct
  REGION 1..11: note = Description of Artificial Sequence: Synthetic peptide
VPMEPSEVEEA

SEQ ID NO: 16889 - protein, 9 aa, synthetic construct
  REGION 1..9: note = Description of Artificial Sequence: Synthetic peptide
RPEPTAPPA

SEQ ID NO: 16890 - protein, 10 aa, synthetic construct
  REGION 1..10: note = Description of Artificial Sequence: Synthetic peptide
SPEVIPMFSA

SEQ ID NO: 16891 - protein, 9 aa, synthetic construct
  REGION 1..9: note = Description of Artificial Sequence: Synthetic peptide
HPGSQPKTA

SEQ ID NO: 16892 - protein, 8 aa, synthetic construct
  REGION 1..8: note = Description of Artificial Sequence: Synthetic peptide
VPMEPSEV

SEQ ID NO: 16893 - protein, 11 aa, synthetic construct
  REGION 1..11: note = Description of Artificial Sequence: Synthetic peptide
VPMDPAEIEEA

SEQ ID NO: 16894 - protein, 9 aa, synthetic construct
  REGION 1..9: note = Description of Artificial Sequence: Synthetic peptide
IPIGPGQAF

SEQ ID NO: 16895 - protein, 11 aa, synthetic construct
  REGION 1..11: note = Description of Artificial Sequence: Synthetic peptide
VPMDPAEVEEA

SEQ ID NO: 16896 - protein, 10 aa, synthetic construct
  REGION 1..10: note = Description of Artificial Sequence: Synthetic peptide
RPLVTVKIGG

SEQ ID NO: 16897 - protein, 9 aa, synthetic construct
  REGION 1..9: note = Description of Artificial Sequence: Synthetic peptide
NPYNTPIFA

SEQ ID NO: 16898 - protein, 9 aa, synthetic construct
  REGION 1..9: note = Description of Artificial Sequence: Synthetic peptide
ATLVVRTYW

SEQ ID NO: 16899 - protein, 9 aa, synthetic construct
  REGION 1..9: note = Description of Artificial Sequence: Synthetic peptide
STLQEQIRW

SEQ ID NO: 16900 - protein, 11 aa, synthetic construct
  REGION 1..11: note = Description of Artificial Sequence: Synthetic peptide
KSYSSEKHNVW

SEQ ID NO: 16901 - protein, 9 aa, synthetic construct
  REGION 1..9: note = Description of Artificial Sequence: Synthetic peptide
LSFPQITLW

SEQ ID NO: 16902 - protein, 11 aa, synthetic construct
  REGION 1..11: note = Description of Artificial Sequence: Synthetic peptide
KAYSTESHNVW

SEQ ID NO: 16903 - protein, 9 aa, synthetic construct
  REGION 1..9: note = Description of Artificial Sequence: Synthetic peptide
RVRGTQTNW

SEQ ID NO: 16904 - protein, 9 aa, synthetic construct
  REGION 1..9: note = Description of Artificial Sequence: Synthetic peptide
RVKGIQRNW

SEQ ID NO: 16905 - protein, 9 aa, synthetic construct
  REGION 1..9: note = Description of Artificial Sequence: Synthetic peptide
RVKGIERNW

SEQ ID NO: 16906 - protein, 10 aa, synthetic construct
  REGION 1..10: note = Description of Artificial Sequence: Synthetic peptide
TTNVPWNTSW

SEQ ID NO: 16907 - protein, 9 aa, synthetic construct
  REGION 1..9: note = Description of Artificial Sequence: Synthetic peptide
YSSEKHNVW

SEQ ID NO: 16908 - protein, 11 aa, synthetic construct
  REGION 1..11: note = Description of Artificial Sequence: Synthetic peptide
TTSTLQEQIRW

SEQ ID NO: 16909 - protein, 11 aa, synthetic construct
  REGION 1..11: note = Description of Artificial Sequence: Synthetic peptide
ATSTLQEQIRW

SEQ ID NO: 16910 - protein, 9 aa, synthetic construct
  REGION 1..9: note = Description of Artificial Sequence: Synthetic peptide
KSLGVAPTR

SEQ ID NO: 16911 - protein, 10 aa, synthetic construct
  REGION 1..10: note = Description of Artificial Sequence: Synthetic peptide
TSNLQEQIRW

SEQ ID NO: 16912 - protein, 11 aa, synthetic construct
  REGION 1..11: note = Description of Artificial Sequence: Synthetic peptide
TTSNLQEQIRW

SEQ ID NO: 16913 - protein, 11 aa, synthetic construct
  REGION 1..11: note = Description of Artificial Sequence: Synthetic peptide
KSIPIGPGQAF

SEQ ID NO: 16914 - protein, 9 aa, synthetic construct
  REGION 1..9: note = Description of Artificial Sequence: Synthetic peptide
ASIAAIVVW

SEQ ID NO: 16915 - protein, 9 aa, synthetic construct
  REGION 1..9: note = Description of Artificial Sequence: Synthetic peptide
YSTESHNVW

SEQ ID NO: 16916 - protein, 9 aa, synthetic construct
  REGION 1..9: note = Description of Artificial Sequence: Synthetic peptide
STRNITEEY

SEQ ID NO: 16917 - protein, 10 aa, synthetic construct
  REGION 1..10: note = Description of Artificial Sequence: Synthetic peptide
KIATEGIVIW

SEQ ID NO: 16918 - protein, 9 aa, synthetic construct
  REGION 1..9: note = Description of Artificial Sequence: Synthetic peptide
KIFNKTITF

SEQ ID NO: 16919 - protein, 9 aa, synthetic construct
  REGION 1..9: note = Description of Artificial Sequence: Synthetic peptide
SIFPQITLW

SEQ ID NO: 16920 - protein, 9 aa, synthetic construct
  REGION 1..9: note = Description of Artificial Sequence: Synthetic peptide
TVAIAVANW

SEQ ID NO: 16921 - protein, 10 aa, synthetic construct
  REGION 1..10: note = Description of Artificial Sequence: Synthetic peptide
KQRQDILDLW

SEQ ID NO: 16922 - protein, 11 aa, synthetic construct
  REGION 1..11: note = Description of Artificial Sequence: Synthetic peptide
ISLNFPQITLW

SEQ ID NO: 16923 - protein, 9 aa, synthetic construct
  REGION 1..9: note = Description of Artificial Sequence: Synthetic peptide
KSIRLVSGF

SEQ ID NO: 16924 - protein, 10 aa, synthetic construct
  REGION 1..10: note = Description of Artificial Sequence: Synthetic peptide
SSLKGLRLGW

SEQ ID NO: 16925 - protein, 9 aa, synthetic construct
  REGION 1..9: note = Description of Artificial Sequence: Synthetic peptide
KSLGIAPTR

SEQ ID NO: 16926 - protein, 10 aa, synthetic construct
  REGION 1..10: note = Description of Artificial Sequence: Synthetic peptide
RTIRIIKILY

SEQ ID NO: 16927 - protein, 11 aa, synthetic construct
  REGION 1..11: note = Description of Artificial Sequence: Synthetic peptide
IVASIAAIVVW

SEQ ID NO: 16928 - protein, 9 aa, synthetic construct
  REGION 1..9: note = Description of Artificial Sequence: Synthetic peptide
HSTESHNIW

SEQ ID NO: 16929 - protein, 10 aa, synthetic construct
  REGION 1..10: note = Description of Artificial Sequence: Synthetic peptide
TTNVPWNASW

SEQ ID NO: 16930 - protein, 10 aa, synthetic construct
  REGION 1..10: note = Description of Artificial Sequence: Synthetic peptide
RVIEIVQRAF

SEQ ID NO: 16931 - protein, 10 aa, synthetic construct
  REGION 1..10: note = Description of Artificial Sequence: Synthetic peptide
KIATEGIIIW

SEQ ID NO: 16932 - protein, 10 aa, synthetic construct
  REGION 1..10: note = Description of Artificial Sequence: Synthetic peptide
KIATESIVIW

SEQ ID NO: 16933 - protein, 9 aa, synthetic construct
  REGION 1..9: note = Description of Artificial Sequence: Synthetic peptide
KIKQIVRMW

SEQ ID NO: 16934 - protein, 10 aa, synthetic construct
  REGION 1..10: note = Description of Artificial Sequence: Synthetic peptide
RVIEVAQRAY

SEQ ID NO: 16935 - protein, 10 aa, synthetic construct
  REGION 1..10: note = Description of Artificial Sequence: Synthetic peptide
VTVYYGVPVW

SEQ ID NO: 16936 - protein, 10 aa, synthetic construct
  REGION 1..10: note = Description of Artificial Sequence: Synthetic peptide
SSLKGLSLGW

SEQ ID NO: 16937 - protein, 9 aa, synthetic construct
  REGION 1..9: note = Description of Artificial Sequence: Synthetic peptide
RIKQIVRMW

SEQ ID NO: 16938 - protein, 9 aa, synthetic construct
  REGION 1..9: note = Description of Artificial Sequence: Synthetic peptide
LGHGVSIEW

SEQ ID NO: 16939 - protein, 10 aa, synthetic construct
  REGION 1..10: note = Description of Artificial Sequence: Synthetic peptide
GTRLPLTFGW

SEQ ID NO: 16940 - protein, 11 aa, synthetic construct
  REGION 1..11: note = Description of Artificial Sequence: Synthetic peptide
KAYSTERHNIW

SEQ ID NO: 16941 - protein, 11 aa, synthetic construct
  REGION 1..11: note = Description of Artificial Sequence: Synthetic peptide
SVLSGGKLDAW

SEQ ID NO: 16942 - protein, 9 aa, synthetic construct
  REGION 1..9: note = Description of Artificial Sequence: Synthetic peptide
RAVGVGAVF

SEQ ID NO: 16943 - protein, 11 aa, synthetic construct
  REGION 1..11: note = Description of Artificial Sequence: Synthetic peptide
KSLFNTVATLY

SEQ ID NO: 16944 - protein, 10 aa, synthetic construct
  REGION 1..10: note = Description of Artificial Sequence: Synthetic peptide
GTRVPLTFGW

SEQ ID NO: 16945 - protein, 9 aa, synthetic construct
  REGION 1..9: note = Description of Artificial Sequence: Synthetic peptide
RSIRLVSGF

SEQ ID NO: 16946 - protein, 10 aa, synthetic construct
  REGION 1..10: note = Description of Artificial Sequence: Synthetic peptide
GTRFPLTFGW

SEQ ID NO: 16947 - protein, 9 aa, synthetic construct
  REGION 1..9: note = Description of Artificial Sequence: Synthetic peptide
KTAVQMAVF

SEQ ID NO: 16948 - protein, 11 aa, synthetic construct
  REGION 1..11: note = Description of Artificial Sequence: Synthetic peptide
KSIRFGPGQAF

SEQ ID NO: 16949 - protein, 9 aa, synthetic construct
  REGION 1..9: note = Description of Artificial Sequence: Synthetic peptide
HTKVGSLQY

SEQ ID NO: 16950 - protein, 11 aa, synthetic construct
  REGION 1..11: note = Description of Artificial Sequence: Synthetic peptide
SVLSGGKLDSW

SEQ ID NO: 16951 - protein, 9 aa, synthetic construct
  REGION 1..9: note = Description of Artificial Sequence: Synthetic peptide
WSKSSIVGW

SEQ ID NO: 16952 - protein, 10 aa, synthetic construct
  REGION 1..10: note = Description of Artificial Sequence: Synthetic peptide
RAVRIIKTLY

SEQ ID NO: 16953 - protein, 9 aa, synthetic construct
  REGION 1..9: note = Description of Artificial Sequence: Synthetic peptide
QATQEVKSW

SEQ ID NO: 16954 - protein, 9 aa, synthetic construct
  REGION 1..9: note = Description of Artificial Sequence: Synthetic peptide
IQRNWQHLW

SEQ ID NO: 16955 - protein, 10 aa, synthetic construct
  REGION 1..10: note = Description of Artificial Sequence: Synthetic peptide
VAIGPGQAFY

SEQ ID NO: 16956 - protein, 9 aa, synthetic construct
  REGION 1..9: note = Description of Artificial Sequence: Synthetic peptide
KALTDIVSM

SEQ ID NO: 16957 - protein, 9 aa, synthetic construct
  REGION 1..9: note = Description of Artificial Sequence: Synthetic peptide
VAIGPGQAF

SEQ ID NO: 16958 - protein, 11 aa, synthetic construct
  REGION 1..11: note = Description of Artificial Sequence: Synthetic peptide
KSIPIGPGQAF

SEQ ID NO: 16959 - protein, 9 aa, synthetic construct
  REGION 1..9: note = Description of Artificial Sequence: Synthetic peptide
YSTESHNVW

SEQ ID NO: 16960 - protein, 9 aa, synthetic construct
  REGION 1..9: note = Description of Artificial Sequence: Synthetic peptide
NSNPVSQNY

SEQ ID NO: 16961 - protein, 9 aa, synthetic construct
  REGION 1..9: note = Description of Artificial Sequence: Synthetic peptide
RAVGVGAVF

SEQ ID NO: 16962 - protein, 9 aa, synthetic construct
  REGION 1..9: note = Description of Artificial Sequence: Synthetic peptide
KALTDIVSM

SEQ ID NO: 16963 - protein, 11 aa, synthetic construct
  REGION 1..11: note = Description of Artificial Sequence: Synthetic peptide
RSVAIGPGQAF

SEQ ID NO: 16964 - protein, 11 aa, synthetic construct
  REGION 1..11: note = Description of Artificial Sequence: Synthetic peptide
KAYSTESHNVW

SEQ ID NO: 16965 - protein, 9 aa, synthetic construct
  REGION 1..9: note = Description of Artificial Sequence: Synthetic peptide
TVAIAVANW

SEQ ID NO: 16966 - protein, 9 aa, synthetic construct
  REGION 1..9: note = Description of Artificial Sequence: Synthetic peptide
RAVGVGAIF

SEQ ID NO: 16967 - protein, 9 aa, synthetic construct
  REGION 1..9: note = Description of Artificial Sequence: Synthetic peptide
STLQEQIRW

SEQ ID NO: 16968 - protein, 9 aa, synthetic construct
  REGION 1..9: note = Description of Artificial Sequence: Synthetic peptide
SSSQVSQNY

SEQ ID NO: 16969 - protein, 9 aa, synthetic construct
  REGION 1..9: note = Description of Artificial Sequence: Synthetic peptide
RAIEAQQHL

SEQ ID NO: 16970 - protein, 9 aa, synthetic construct
  REGION 1..9: note = Description of Artificial Sequence: Synthetic peptide
ASIAAIVVW

SEQ ID NO: 16971 - protein, 9 aa, synthetic construct
  REGION 1..9: note = Description of Artificial Sequence: Synthetic peptide
QATQEVKSW

SEQ ID NO: 16972 - protein, 9 aa, synthetic construct
  REGION 1..9: note = Description of Artificial Sequence: Synthetic peptide
NSSQVSQNY

SEQ ID NO: 16973 - protein, 9 aa, synthetic construct
  REGION 1..9: note = Description of Artificial Sequence: Synthetic peptide
ISNGNKTSY

SEQ ID NO: 16974 - protein, 9 aa, synthetic construct
  REGION 1..9: note = Description of Artificial Sequence: Synthetic peptide
YSSEKHNVW

SEQ ID NO: 16975 - protein, 9 aa, synthetic construct
  REGION 1..9: note = Description of Artificial Sequence: Synthetic peptide
RSTRLVSGF

SEQ ID NO: 16976 - protein, 9 aa, synthetic construct
  REGION 1..9: note = Description of Artificial Sequence: Synthetic peptide
STVGSTAGY

SEQ ID NO: 16977 - protein, 9 aa, synthetic construct
  REGION 1..9: note = Description of Artificial Sequence: Synthetic peptide
KSIRLVSGF

SEQ ID NO: 16978 - protein, 10 aa, synthetic construct
  REGION 1..10: note = Description of Artificial Sequence: Synthetic peptide
KIYNNKNITF

SEQ ID NO: 16979 - protein, 9 aa, synthetic construct
  REGION 1..9: note = Description of Artificial Sequence: Synthetic peptide
KTAVQMAVF

SEQ ID NO: 16980 - protein, 9 aa, synthetic construct
  REGION 1..9: note = Description of Artificial Sequence: Synthetic peptide
IPIGPGQAF

SEQ ID NO: 16981 - protein, 9 aa, synthetic construct
  REGION 1..9: note = Description of Artificial Sequence: Synthetic peptide
TIAIAVANW

SEQ ID NO: 16982 - protein, 10 aa, synthetic construct
  REGION 1..10: note = Description of Artificial Sequence: Synthetic peptide
IAIENVTENF

SEQ ID NO: 16983 - protein, 10 aa, synthetic construct
  REGION 1..10: note = Description of Artificial Sequence: Synthetic peptide
RAIEAQQHLL

SEQ ID NO: 16984 - protein, 9 aa, synthetic construct
  REGION 1..9: note = Description of Artificial Sequence: Synthetic peptide
RVRGTQTNW

SEQ ID NO: 16985 - protein, 10 aa, synthetic construct
  REGION 1..10: note = Description of Artificial Sequence: Synthetic peptide
TAANNPDCAW

SEQ ID NO: 16986 - protein, 9 aa, synthetic construct
  REGION 1..9: note = Description of Artificial Sequence: Synthetic peptide
RAIEVVQRV

SEQ ID NO: 16987 - protein, 9 aa, synthetic construct
  REGION 1..9: note = Description of Artificial Sequence: Synthetic peptide
RAVGLGAVF

SEQ ID NO: 16988 - protein, 9 aa, synthetic construct
  REGION 1..9: note = Description of Artificial Sequence: Synthetic peptide
FSVPLDESF

SEQ ID NO: 16989 - protein, 9 aa, synthetic construct
  REGION 1..9: note = Description of Artificial Sequence: Synthetic peptide
TINEEAAEW

SEQ ID NO: 16990 - protein, 9 aa, synthetic construct
  REGION 1..9: note = Description of Artificial Sequence: Synthetic peptide
ASITLTVQV

SEQ ID NO: 16991 - protein, 9 aa, synthetic construct
  REGION 1..9: note = Description of Artificial Sequence: Synthetic peptide
ISNINNETI

SEQ ID NO: 16992 - protein, 9 aa, synthetic construct
  REGION 1..9: note = Description of Artificial Sequence: Synthetic peptide
AANNPDCAW

SEQ ID NO: 16993 - protein, 8 aa, synthetic construct
  REGION 1..8: note = Description of Artificial Sequence: Synthetic peptide
NSPTSREL

SEQ ID NO: 16994 - protein, 9 aa, synthetic construct
  REGION 1..9: note = Description of Artificial Sequence: Synthetic peptide
YSPLSFQTL

SEQ ID NO: 16995 - protein, 8 aa, synthetic construct
  REGION 1..8: note = Description of Artificial Sequence: Synthetic peptide
NSPTRREL

SEQ ID NO: 16996 - protein, 9 aa, synthetic construct
  REGION 1..9: note = Description of Artificial Sequence: Synthetic peptide
YSPVSILDI

SEQ ID NO: 16997 - protein, 9 aa, synthetic construct
  REGION 1..9: note = Description of Artificial Sequence: Synthetic peptide
VAIGPGQAF

SEQ ID NO: 16998 - protein, 9 aa, synthetic construct
  REGION 1..9: note = Description of Artificial Sequence: Synthetic peptide
STRNITEEY

SEQ ID NO: 16999 - protein, 10 aa, synthetic construct
  REGION 1..10: note = Description of Artificial Sequence: Synthetic peptide
VAIGPGQAFY

SEQ ID NO: 17000 - protein, 9 aa, synthetic construct
  REGION 1..9: note = Description of Artificial Sequence: Synthetic peptide
VAIGPGQAF

SEQ ID NO: 17001 - protein, 11 aa, synthetic construct
  REGION 1..11: note = Description of Artificial Sequence: Synthetic peptide
ETEPIIGAETY

SEQ ID NO: 17002 - protein, 9 aa, synthetic construct
  REGION 1..9: note = Description of Artificial Sequence: Synthetic peptide
NSNPVSQNY

SEQ ID NO: 17003 - protein, 9 aa, synthetic construct
  REGION 1..9: note = Description of Artificial Sequence: Synthetic peptide
STRNITEEY

SEQ ID NO: 17004 - protein, 9 aa, synthetic construct
  REGION 1..9: note = Description of Artificial Sequence: Synthetic peptide
HTKVGSLQY

SEQ ID NO: 17005 - protein, 9 aa, synthetic construct
  REGION 1..9: note = Description of Artificial Sequence: Synthetic peptide
DAKLVVSTY

SEQ ID NO: 17006 - protein, 8 aa, synthetic construct
  REGION 1..8: note = Description of Artificial Sequence: Synthetic peptide
VLDVGDAY

SEQ ID NO: 17007 - protein, 9 aa, synthetic construct
  REGION 1..9: note = Description of Artificial Sequence: Synthetic peptide
IPIGPGQAF

SEQ ID NO: 17008 - protein, 9 aa, synthetic construct
  REGION 1..9: note = Description of Artificial Sequence: Synthetic peptide
VAIGPGQAF

SEQ ID NO: 17009 - protein, 9 aa, synthetic construct
  REGION 1..9: note = Description of Artificial Sequence: Synthetic peptide
SALFNSSSL

SEQ ID NO: 17010 - protein, 9 aa, synthetic construct
  REGION 1..9: note = Description of Artificial Sequence: Synthetic peptide
RALGPGASL

SEQ ID NO: 17011 - protein, 9 aa, synthetic construct
  REGION 1..9: note = Description of Artificial Sequence: Synthetic peptide
RAIEAQQHL

SEQ ID NO: 17012 - protein, 9 aa, synthetic construct
  REGION 1..9: note = Description of Artificial Sequence: Synthetic peptide
RALGPGATL

SEQ ID NO: 17013 - protein, 9 aa, synthetic construct
  REGION 1..9: note = Description of Artificial Sequence: Synthetic peptide
LAWDDLRSL

SEQ ID NO: 17014 - protein, 9 aa, synthetic construct
  REGION 1..9: note = Description of Artificial Sequence: Synthetic peptide
RAVGVGAVF

SEQ ID NO: 17015 - protein, 9 aa, synthetic construct
  REGION 1..9: note = Description of Artificial Sequence: Synthetic peptide
YSTQVDPDL

SEQ ID NO: 17016 - protein, 9 aa, synthetic construct
  REGION 1..9: note = Description of Artificial Sequence: Synthetic peptide
LALDKWASL

SEQ ID NO: 17017 - protein, 9 aa, synthetic construct
  REGION 1..9: note = Description of Artificial Sequence: Synthetic peptide
VAIGPGQAF

SEQ ID NO: 17018 - protein, 9 aa, synthetic construct
  REGION 1..9: note = Description of Artificial Sequence: Synthetic peptide
SALFNSSSL

SEQ ID NO: 17019 - protein, 9 aa, synthetic construct
  REGION 1..9: note = Description of Artificial Sequence: Synthetic peptide
RALGPGASL

SEQ ID NO: 17020 - protein, 9 aa, synthetic construct
  REGION 1..9: note = Description of Artificial Sequence: Synthetic peptide
RAIEAQQHL

SEQ ID NO: 17021 - protein, 9 aa, synthetic construct
  REGION 1..9: note = Description of Artificial Sequence: Synthetic peptide
YSTQVDPDL

SEQ ID NO: 17022 - protein, 9 aa, synthetic construct
  REGION 1..9: note = Description of Artificial Sequence: Synthetic peptide
MIVGGLISL

SEQ ID NO: 17023 - protein, 9 aa, synthetic construct
  REGION 1..9: note = Description of Artificial Sequence: Synthetic peptide
YSTQIDPDL

SEQ ID NO: 17024 - protein, 9 aa, synthetic construct
  REGION 1..9: note = Description of Artificial Sequence: Synthetic peptide
RALGPGATL

SEQ ID NO: 17025 - protein, 8 aa, synthetic construct
  REGION 1..8: note = Description of Artificial Sequence: Synthetic peptide
HSRIGITL

SEQ ID NO: 17026 - protein, 9 aa, synthetic construct
  REGION 1..9: note = Description of Artificial Sequence: Synthetic peptide
YVDRFFKTL

SEQ ID NO: 17027 - protein, 9 aa, synthetic construct
  REGION 1..9: note = Description of Artificial Sequence: Synthetic peptide
LAWDDLRSL

SEQ ID NO: 17028 - protein, 9 aa, synthetic construct
  REGION 1..9: note = Description of Artificial Sequence: Synthetic peptide
SAEPVPLQL

SEQ ID NO: 17029 - protein, 11 aa, synthetic construct
  REGION 1..11: note = Description of Artificial Sequence: Synthetic peptide
KSIHLGPGQAL

SEQ ID NO: 17030 - protein, 9 aa, synthetic construct
  REGION 1..9: note = Description of Artificial Sequence: Synthetic peptide
YYDPSKELI

SEQ ID NO: 17031 - protein, 9 aa, synthetic construct
  REGION 1..9: note = Description of Artificial Sequence: Synthetic peptide
NFDPIPIHY

SEQ ID NO: 17032 - protein, 9 aa, synthetic construct
  REGION 1..9: note = Description of Artificial Sequence: Synthetic peptide
QYDQILIEI

SEQ ID NO: 17033 - protein, 9 aa, synthetic construct
  REGION 1..9: note = Description of Artificial Sequence: Synthetic peptide
SFDPIPIHY

SEQ ID NO: 17034 - protein, 9 aa, synthetic construct
  REGION 1..9: note = Description of Artificial Sequence: Synthetic peptide
HTDNGPNFI

SEQ ID NO: 17035 - protein, 8 aa, synthetic construct
  REGION 1..8: note = Description of Artificial Sequence: Synthetic peptide
HTDNGSNF

SEQ ID NO: 17036 - protein, 9 aa, synthetic construct
  REGION 1..9: note = Description of Artificial Sequence: Synthetic peptide
SAEPVPLQL

SEQ ID NO: 17037 - protein, 9 aa, synthetic construct
  REGION 1..9: note = Description of Artificial Sequence: Synthetic peptide
IQDNNEIKV

SEQ ID NO: 17038 - protein, 8 aa, synthetic construct
  REGION 1..8: note = Description of Artificial Sequence: Synthetic peptide
WADITQEF

SEQ ID NO: 17039 - protein, 9 aa, synthetic construct
  REGION 1..9: note = Description of Artificial Sequence: Synthetic peptide
KAELQAIQL

SEQ ID NO: 17040 - protein, 9 aa, synthetic construct
  REGION 1..9: note = Description of Artificial Sequence: Synthetic peptide
VLDVGDAYF

SEQ ID NO: 17041 - protein, 9 aa, synthetic construct
  REGION 1..9: note = Description of Artificial Sequence: Synthetic peptide
ISDNAKVII

SEQ ID NO: 17042 - protein, 9 aa, synthetic construct
  REGION 1..9: note = Description of Artificial Sequence: Synthetic peptide
QRPLVTVKI

SEQ ID NO: 17043 - protein, 10 aa, synthetic construct
  REGION 1..10: note = Description of Artificial Sequence: Synthetic peptide
IRFGPGQAFY

SEQ ID NO: 17044 - protein, 9 aa, synthetic construct
  REGION 1..9: note = Description of Artificial Sequence: Synthetic peptide
QRPLVTVRI

SEQ ID NO: 17045 - protein, 9 aa, synthetic construct
  REGION 1..9: note = Description of Artificial Sequence: Synthetic peptide
YSPPIARNI

SEQ ID NO: 17046 - protein, 9 aa, synthetic construct
  REGION 1..9: note = Description of Artificial Sequence: Synthetic peptide
KRKEYALFY

SEQ ID NO: 17047 - protein, 9 aa, synthetic construct
  REGION 1..9: note = Description of Artificial Sequence: Synthetic peptide
QASGATIMM

SEQ ID NO: 17048 - protein, 9 aa, synthetic construct
  REGION 1..9: note = Description of Artificial Sequence: Synthetic peptide
VAIGPGQAF

SEQ ID NO: 17049 - protein, 9 aa, synthetic construct
  REGION 1..9: note = Description of Artificial Sequence: Synthetic peptide
DAKLVVSTY

SEQ ID NO: 17050 - protein, 9 aa, synthetic construct
  REGION 1..9: note = Description of Artificial Sequence: Synthetic peptide
HLGPGQALY

SEQ ID NO: 17051 - protein, 9 aa, synthetic construct
  REGION 1..9: note = Description of Artificial Sequence: Synthetic peptide
IPIGPGQAF

SEQ ID NO: 17052 - protein, 9 aa, synthetic construct
  REGION 1..9: note = Description of Artificial Sequence: Synthetic peptide
SALFNSSSL

SEQ ID NO: 17053 - protein, 9 aa, synthetic construct
  REGION 1..9: note = Description of Artificial Sequence: Synthetic peptide
STRNITEEY

SEQ ID NO: 17054 - protein, 9 aa, synthetic construct
  REGION 1..9: note = Description of Artificial Sequence: Synthetic peptide
SAINLIDTV

SEQ ID NO: 17055 - protein, 9 aa, synthetic construct
  REGION 1..9: note = Description of Artificial Sequence: Synthetic peptide
NVTENFNVW

SEQ ID NO: 17056 - protein, 9 aa, synthetic construct
  REGION 1..9: note = Description of Artificial Sequence: Synthetic peptide
SAEPVPLQL

SEQ ID NO: 17057 - protein, 9 aa, synthetic construct
  REGION 1..9: note = Description of Artificial Sequence: Synthetic peptide
FLGAAGSTM

SEQ ID NO: 17058 - protein, 9 aa, synthetic construct
  REGION 1..9: note = Description of Artificial Sequence: Synthetic peptide
SAINLLDTI

SEQ ID NO: 17059 - protein, 11 aa, synthetic construct
  REGION 1..11: note = Description of Artificial Sequence: Synthetic peptide
TQIDPDLADQL

SEQ ID NO: 17060 - protein, 11 aa, synthetic construct
  REGION 1..11: note = Description of Artificial Sequence: Synthetic peptide
TQVDPDLADHL

SEQ ID NO: 17061 - protein, 8 aa, synthetic construct
  REGION 1..8: note = Description of Artificial Sequence: Synthetic peptide
DVVPINEM

SEQ ID NO: 17062 - protein, 9 aa, synthetic construct
  REGION 1..9: note = Description of Artificial Sequence: Synthetic peptide
DATLVVRTY

SEQ ID NO: 17063 - protein, 9 aa, synthetic construct
  REGION 1..9: note = Description of Artificial Sequence: Synthetic peptide
TVLDVGDAY

SEQ ID NO: 17064 - protein, 9 aa, synthetic construct
  REGION 1..9: note = Description of Artificial Sequence: Synthetic peptide
KALTDIVSM

SEQ ID NO: 17065 - protein, 9 aa, synthetic construct
  REGION 1..9: note = Description of Artificial Sequence: Synthetic peptide
IVTDSQYAL

SEQ ID NO: 17066 - protein, 9 aa, synthetic construct
  REGION 1..9: note = Description of Artificial Sequence: Synthetic peptide
VSSDVHIPL

SEQ ID NO: 17067 - protein, 9 aa, synthetic construct
  REGION 1..9: note = Description of Artificial Sequence: Synthetic peptide
TQNPEIVIY

SEQ ID NO: 17068 - protein, 10 aa, synthetic construct
  REGION 1..10: note = Description of Artificial Sequence: Synthetic peptide
SVAIGPGQAF

SEQ ID NO: 17069 - protein, 9 aa, synthetic construct
  REGION 1..9: note = Description of Artificial Sequence: Synthetic peptide
NMRNVTENF

SEQ ID NO: 17070 - protein, 9 aa, synthetic construct
  REGION 1..9: note = Description of Artificial Sequence: Synthetic peptide
ASDIQTKEL

SEQ ID NO: 17071 - protein, 8 aa, synthetic construct
  REGION 1..8: note = Description of Artificial Sequence: Synthetic peptide
VGDQAEHL

SEQ ID NO: 17072 - protein, 10 aa, synthetic construct
  REGION 1..10: note = Description of Artificial Sequence: Synthetic peptide
RAEGKGDTSL

SEQ ID NO: 17073 - protein, 9 aa, synthetic construct
  REGION 1..9: note = Description of Artificial Sequence: Synthetic peptide
TQDFWEVQL

SEQ ID NO: 17074 - protein, 9 aa, synthetic construct
  REGION 1..9: note = Description of Artificial Sequence: Synthetic peptide
HTDNGPNFI

SEQ ID NO: 17075 - protein, 9 aa, synthetic construct
  REGION 1..9: note = Description of Artificial Sequence: Synthetic peptide
SAEPVPLQL

SEQ ID NO: 17076 - protein, 9 aa, synthetic construct
  REGION 1..9: note = Description of Artificial Sequence: Synthetic peptide
KAELQAIQL

SEQ ID NO: 17077 - protein, 9 aa, synthetic construct
  REGION 1..9: note = Description of Artificial Sequence: Synthetic peptide
RALGPGATL

SEQ ID NO: 17078 - protein, 9 aa, synthetic construct
  REGION 1..9: note = Description of Artificial Sequence: Synthetic peptide
RALGPGASL

SEQ ID NO: 17079 - protein, 9 aa, synthetic construct
  REGION 1..9: note = Description of Artificial Sequence: Synthetic peptide
RAVGLGAVL

SEQ ID NO: 17080 - protein, 9 aa, synthetic construct
  REGION 1..9: note = Description of Artificial Sequence: Synthetic peptide
NAKNIIVQL

SEQ ID NO: 17081 - protein, 10 aa, synthetic construct
  REGION 1..10: note = Description of Artificial Sequence: Synthetic peptide
VSFDPIPIHY

SEQ ID NO: 17082 - protein, 10 aa, synthetic construct
  REGION 1..10: note = Description of Artificial Sequence: Synthetic peptide
VTFEPIPIHY

SEQ ID NO: 17083 - protein, 9 aa, synthetic construct
  REGION 1..9: note = Description of Artificial Sequence: Synthetic peptide
RAIEVVQRV

SEQ ID NO: 17084 - protein, 11 aa, synthetic construct
  REGION 1..11: note = Description of Artificial Sequence: Synthetic peptide
KAYSTESHNVW

SEQ ID NO: 17085 - protein, 9 aa, synthetic construct
  REGION 1..9: note = Description of Artificial Sequence: Synthetic peptide
SAINLIDTV

SEQ ID NO: 17086 - protein, 9 aa, synthetic construct
  REGION 1..9: note = Description of Artificial Sequence: Synthetic peptide
KAKPPLPSV

SEQ ID NO: 17087 - protein, 9 aa, synthetic construct
  REGION 1..9: note = Description of Artificial Sequence: Synthetic peptide
GAASITLTV

SEQ ID NO: 17088 - protein, 9 aa, synthetic construct
  REGION 1..9: note = Description of Artificial Sequence: Synthetic peptide
YSSEKHNVW

SEQ ID NO: 17089 - protein, 9 aa, synthetic construct
  REGION 1..9: note = Description of Artificial Sequence: Synthetic peptide
ASITLTVQV

SEQ ID NO: 17090 - protein, 9 aa, synthetic construct
  REGION 1..9: note = Description of Artificial Sequence: Synthetic peptide
YFINKSIEF

SEQ ID NO: 17091 - protein, 9 aa, synthetic construct
  REGION 1..9: note = Description of Artificial Sequence: Synthetic peptide
IYNNKNITF

SEQ ID NO: 17092 - protein, 9 aa, synthetic construct
  REGION 1..9: note = Description of Artificial Sequence: Synthetic peptide
VYQEPYKNL

SEQ ID NO: 17093 - protein, 9 aa, synthetic construct
  REGION 1..9: note = Description of Artificial Sequence: Synthetic peptide
IYQEPYKNL

SEQ ID NO: 17094 - protein, 8 aa, synthetic construct
  REGION 1..8: note = Description of Artificial Sequence: Synthetic peptide
SFNMTTEL

SEQ ID NO: 17095 - protein, 10 aa, synthetic construct
  REGION 1..10: note = Description of Artificial Sequence: Synthetic peptide
AFQQGEAREF

SEQ ID NO: 17096 - protein, 9 aa, synthetic construct
  REGION 1..9: note = Description of Artificial Sequence: Synthetic peptide
VYYDPSKEL

SEQ ID NO: 17097 - protein, 9 aa, synthetic construct
  REGION 1..9: note = Description of Artificial Sequence: Synthetic peptide
VYYEPSKEL

SEQ ID NO: 17098 - protein, 10 aa, synthetic construct
  REGION 1..10: note = Description of Artificial Sequence: Synthetic peptide
GFLGTAGSTM

SEQ ID NO: 17099 - protein, 9 aa, synthetic construct
  REGION 1..9: note = Description of Artificial Sequence: Synthetic peptide
VYHDPSKEL

SEQ ID NO: 17100 - protein, 9 aa, synthetic construct
  REGION 1..9: note = Description of Artificial Sequence: Synthetic peptide
IFRPGGGDM

SEQ ID NO: 17101 - protein, 10 aa, synthetic construct
  REGION 1..10: note = Description of Artificial Sequence: Synthetic peptide
GFLGAAGSTM

SEQ ID NO: 17102 - protein, 8 aa, synthetic construct
  REGION 1..8: note = Description of Artificial Sequence: Synthetic peptide
RFGPGQAF

SEQ ID NO: 17103 - protein, 9 aa, synthetic construct
  REGION 1..9: note = Description of Artificial Sequence: Synthetic peptide
TYQVYQEPY

SEQ ID NO: 17104 - protein, 9 aa, synthetic construct
  REGION 1..9: note = Description of Artificial Sequence: Synthetic peptide
IFRPVGGDM

SEQ ID NO: 17105 - protein, 9 aa, synthetic construct
  REGION 1..9: note = Description of Artificial Sequence: Synthetic peptide
TYQIYQEPY

SEQ ID NO: 17106 - protein, 9 aa, synthetic construct
  REGION 1..9: note = Description of Artificial Sequence: Synthetic peptide
LFNTVATLY

SEQ ID NO: 17107 - protein, 8 aa, synthetic construct
  REGION 1..8: note = Description of Artificial Sequence: Synthetic peptide
IFNKTITF

SEQ ID NO: 17108 - protein, 9 aa, synthetic construct
  REGION 1..9: note = Description of Artificial Sequence: Synthetic peptide
KYHSNWRAM

SEQ ID NO: 17109 - protein, 9 aa, synthetic construct
  REGION 1..9: note = Description of Artificial Sequence: Synthetic peptide
IYNNKNITF

SEQ ID NO: 17110 - protein, 9 aa, synthetic construct
  REGION 1..9: note = Description of Artificial Sequence: Synthetic peptide
YFINKSIEF

SEQ ID NO: 17111 - protein, 9 aa, synthetic construct
  REGION 1..9: note = Description of Artificial Sequence: Synthetic peptide
VYQEPYKNL

SEQ ID NO: 17112 - protein, 8 aa, synthetic construct
  REGION 1..8: note = Description of Artificial Sequence: Synthetic peptide
SFNMTTEL

SEQ ID NO: 17113 - protein, 9 aa, synthetic construct
  REGION 1..9: note = Description of Artificial Sequence: Synthetic peptide
VYYEPSKEL

SEQ ID NO: 17114 - protein, 9 aa, synthetic construct
  REGION 1..9: note = Description of Artificial Sequence: Synthetic peptide
IYQEPYKNL

SEQ ID NO: 17115 - protein, 10 aa, synthetic construct
  REGION 1..10: note = Description of Artificial Sequence: Synthetic peptide
GFLGTAGSTM

SEQ ID NO: 17116 - protein, 9 aa, synthetic construct
  REGION 1..9: note = Description of Artificial Sequence: Synthetic peptide
VYYDPSKEL

SEQ ID NO: 17117 - protein, 10 aa, synthetic construct
  REGION 1..10: note = Description of Artificial Sequence: Synthetic peptide
GFLGAAGSTM

SEQ ID NO: 17118 - protein, 9 aa, synthetic construct
  REGION 1..9: note = Description of Artificial Sequence: Synthetic peptide
TYQVYQEPY

SEQ ID NO: 17119 - protein, 9 aa, synthetic construct
  REGION 1..9: note = Description of Artificial Sequence: Synthetic peptide
VAIGPGQAF

SEQ ID NO: 17120 - protein, 9 aa, synthetic construct
  REGION 1..9: note = Description of Artificial Sequence: Synthetic peptide
VYHDPSKEL

SEQ ID NO: 17121 - protein, 8 aa, synthetic construct
  REGION 1..8: note = Description of Artificial Sequence: Synthetic peptide
RFGPGQAF

SEQ ID NO: 17122 - protein, 10 aa, synthetic construct
  REGION 1..10: note = Description of Artificial Sequence: Synthetic peptide
AFQQGEAREF

SEQ ID NO: 17123 - protein, 9 aa, synthetic construct
  REGION 1..9: note = Description of Artificial Sequence: Synthetic peptide
TYQIYQEPY

SEQ ID NO: 17124 - protein, 9 aa, synthetic construct
  REGION 1..9: note = Description of Artificial Sequence: Synthetic peptide
NYTQQIYTL

SEQ ID NO: 17125 - protein, 9 aa, synthetic construct
  REGION 1..9: note = Description of Artificial Sequence: Synthetic peptide
ASITLTVQV

SEQ ID NO: 17126 - protein, 9 aa, synthetic construct
  REGION 1..9: note = Description of Artificial Sequence: Synthetic peptide
KSNITGLLL

SEQ ID NO: 17127 - protein, 9 aa, synthetic construct
  REGION 1..9: note = Description of Artificial Sequence: Synthetic peptide
KSNITGLIL

SEQ ID NO: 17128 - protein, 9 aa, synthetic construct
  REGION 1..9: note = Description of Artificial Sequence: Synthetic peptide
RAIEVVQRV

SEQ ID NO: 17129 - protein, 9 aa, synthetic construct
  REGION 1..9: note = Description of Artificial Sequence: Synthetic peptide
RSNITGLIL

SEQ ID NO: 17130 - protein, 9 aa, synthetic construct
  REGION 1..9: note = Description of Artificial Sequence: Synthetic peptide
ASITLTAQV

SEQ ID NO: 17131 - protein, 9 aa, synthetic construct
  REGION 1..9: note = Description of Artificial Sequence: Synthetic peptide
MSNITGLLL

SEQ ID NO: 17132 - protein, 9 aa, synthetic construct
  REGION 1..9: note = Description of Artificial Sequence: Synthetic peptide
ISAIVGLIV

SEQ ID NO: 17133 - protein, 9 aa, synthetic construct
  REGION 1..9: note = Description of Artificial Sequence: Synthetic peptide
QSLGIFAIV

SEQ ID NO: 17134 - protein, 9 aa, synthetic construct
  REGION 1..9: note = Description of Artificial Sequence: Synthetic peptide
ANSPTSREL

SEQ ID NO: 17135 - protein, 9 aa, synthetic construct
  REGION 1..9: note = Description of Artificial Sequence: Synthetic peptide
GAASITLTV

SEQ ID NO: 17136 - protein, 9 aa, synthetic construct
  REGION 1..9: note = Description of Artificial Sequence: Synthetic peptide
NASWSNKTY

SEQ ID NO: 17137 - protein, 9 aa, synthetic construct
  REGION 1..9: note = Description of Artificial Sequence: Synthetic peptide
NASWSNKSY

SEQ ID NO: 17138 - protein, 9 aa, synthetic construct
  REGION 1..9: note = Description of Artificial Sequence: Synthetic peptide
DATLVVRTY

SEQ ID NO: 17139 - protein, 8 aa, synthetic construct
  REGION 1..8: note = Description of Artificial Sequence: Synthetic peptide
TAGYREEL

SEQ ID NO: 17140 - protein, 9 aa, synthetic construct
  REGION 1..9: note = Description of Artificial Sequence: Synthetic peptide
VAIGPGQAF

SEQ ID NO: 17141 - protein, 9 aa, synthetic construct
  REGION 1..9: note = Description of Artificial Sequence: Synthetic peptide
YSSEKHNVW

SEQ ID NO: 17142 - protein, 9 aa, synthetic construct
  REGION 1..9: note = Description of Artificial Sequence: Synthetic peptide
ISNGNKTSY

SEQ ID NO: 17143 - protein, 9 aa, synthetic construct
  REGION 1..9: note = Description of Artificial Sequence: Synthetic peptide
VSSGIRKVL

SEQ ID NO: 17144 - protein, 8 aa, synthetic construct
  REGION 1..8: note = Description of Artificial Sequence: Synthetic peptide
TAQVRQLL

SEQ ID NO: 17145 - protein, 9 aa, synthetic construct
  REGION 1..9: note = Description of Artificial Sequence: Synthetic peptide
NASWSNKTY

SEQ ID NO: 17146 - protein, 9 aa, synthetic construct
  REGION 1..9: note = Description of Artificial Sequence: Synthetic peptide
RAIEVVQRV

SEQ ID NO: 17147 - protein, 9 aa, synthetic construct
  REGION 1..9: note = Description of Artificial Sequence: Synthetic peptide
NASWSNKSY

SEQ ID NO: 17148 - protein, 9 aa, synthetic construct
  REGION 1..9: note = Description of Artificial Sequence: Synthetic peptide
DATLVVRTY

SEQ ID NO: 17149 - protein, 9 aa, synthetic construct
  REGION 1..9: note = Description of Artificial Sequence: Synthetic peptide
NAKNIIVQL

SEQ ID NO: 17150 - protein, 9 aa, synthetic construct
  REGION 1..9: note = Description of Artificial Sequence: Synthetic peptide
ANSPTSREL

SEQ ID NO: 17151 - protein, 9 aa, synthetic construct
  REGION 1..9: note = Description of Artificial Sequence: Synthetic peptide
NGTDRVIEV

SEQ ID NO: 17152 - protein, 9 aa, synthetic construct
  REGION 1..9: note = Description of Artificial Sequence: Synthetic peptide
KAKPPLPSV

SEQ ID NO: 17153 - protein, 9 aa, synthetic construct
  REGION 1..9: note = Description of Artificial Sequence: Synthetic peptide
SAINLIDTV

SEQ ID NO: 17154 - protein, 10 aa, synthetic construct
  REGION 1..10: note = Description of Artificial Sequence: Synthetic peptide
IASDIQTKEL

SEQ ID NO: 17155 - protein, 9 aa, synthetic construct
  REGION 1..9: note = Description of Artificial Sequence: Synthetic peptide
ASITLTAQV

SEQ ID NO: 17156 - protein, 9 aa, synthetic construct
  REGION 1..9: note = Description of Artificial Sequence: Synthetic peptide
RAIEAQQHL

SEQ ID NO: 17157 - protein, 9 aa, synthetic construct
  REGION 1..9: note = Description of Artificial Sequence: Synthetic peptide
TANGTDRVI

SEQ ID NO: 17158 - protein, 9 aa, synthetic construct
  REGION 1..9: note = Description of Artificial Sequence: Synthetic peptide
GAASITLTV

SEQ ID NO: 17159 - protein, 10 aa, synthetic construct
  REGION 1..10: note = Description of Artificial Sequence: Synthetic peptide
NENNGTNSTW

SEQ ID NO: 17160 - protein, 9 aa, synthetic construct
  REGION 1..9: note = Description of Artificial Sequence: Synthetic peptide
VAIGPGQAF

SEQ ID NO: 17161 - protein, 11 aa, synthetic construct
  REGION 1..11: note = Description of Artificial Sequence: Synthetic peptide
SEVNIVTDSQY

SEQ ID NO: 17162 - protein, 11 aa, synthetic construct
  REGION 1..11: note = Description of Artificial Sequence: Synthetic peptide
AEQATQEVKGW

SEQ ID NO: 17163 - protein, 9 aa, synthetic construct
  REGION 1..9: note = Description of Artificial Sequence: Synthetic peptide
SAINLIDTV

SEQ ID NO: 17164 - protein, 9 aa, synthetic construct
  REGION 1..9: note = Description of Artificial Sequence: Synthetic peptide
SESAIRNAI

SEQ ID NO: 17165 - protein, 11 aa, synthetic construct
  REGION 1..11: note = Description of Artificial Sequence: Synthetic peptide
AEVQKQGPDQW

SEQ ID NO: 17166 - protein, 9 aa, synthetic construct
  REGION 1..9: note = Description of Artificial Sequence: Synthetic peptide
VAALQVCFL

SEQ ID NO: 17167 - protein, 10 aa, synthetic construct
  REGION 1..10: note = Description of Artificial Sequence: Synthetic peptide
RAVGVGAVFL

SEQ ID NO: 17168 - protein, 9 aa, synthetic construct
  REGION 1..9: note = Description of Artificial Sequence: Synthetic peptide
SAEPVPLQL

SEQ ID NO: 17169 - protein, 10 aa, synthetic construct
  REGION 1..10: note = Description of Artificial Sequence: Synthetic peptide
RAVGVGAIFL

SEQ ID NO: 17170 - protein, 9 aa, synthetic construct
  REGION 1..9: note = Description of Artificial Sequence: Synthetic peptide
YALPIAGNL

SEQ ID NO: 17171 - protein, 10 aa, synthetic construct
  REGION 1..10: note = Description of Artificial Sequence: Synthetic peptide
RAVGLGAVFL

SEQ ID NO: 17172 - protein, 8 aa, synthetic construct
  REGION 1..8: note = Description of Artificial Sequence: Synthetic peptide
IAARTVEL

SEQ ID NO: 17173 - protein, 9 aa, synthetic construct
  REGION 1..9: note = Description of Artificial Sequence: Synthetic peptide
SALFNSSSL

SEQ ID NO: 17174 - protein, 8 aa, synthetic construct
  REGION 1..8: note = Description of Artificial Sequence: Synthetic peptide
FALNPDLL

SEQ ID NO: 17175 - protein, 11 aa, synthetic construct
  REGION 1..11: note = Description of Artificial Sequence: Synthetic peptide
ETEPIAGAETY

SEQ ID NO: 17176 - protein, 11 aa, synthetic construct
  REGION 1..11: note = Description of Artificial Sequence: Synthetic peptide
ETEPIVGAETY

SEQ ID NO: 17177 - protein, 11 aa, synthetic construct
  REGION 1..11: note = Description of Artificial Sequence: Synthetic peptide
ETEPIEGAETY

SEQ ID NO: 17178 - protein, 9 aa, synthetic construct
  REGION 1..9: note = Description of Artificial Sequence: Synthetic peptide
GTEDLQSLY

SEQ ID NO: 17179 - protein, 9 aa, synthetic construct
  REGION 1..9: note = Description of Artificial Sequence: Synthetic peptide
NSSYTNDTY

SEQ ID NO: 17180 - protein, 9 aa, synthetic construct
  REGION 1..9: note = Description of Artificial Sequence: Synthetic peptide
PIDNNSTQY

SEQ ID NO: 17181 - protein, 8 aa, synthetic construct
  REGION 1..8: note = Description of Artificial Sequence: Synthetic peptide
VLDVGDAY

SEQ ID NO: 17182 - protein, 9 aa, synthetic construct
  REGION 1..9: note = Description of Artificial Sequence: Synthetic peptide
SFDPIPIHY

SEQ ID NO: 17183 - protein, 10 aa, synthetic construct
  REGION 1..10: note = Description of Artificial Sequence: Synthetic peptide
VTVLDVGDAY

SEQ ID NO: 17184 - protein, 10 aa, synthetic construct
  REGION 1..10: note = Description of Artificial Sequence: Synthetic peptide
VSVLDVGDAY

SEQ ID NO: 17185 - protein, 9 aa, synthetic construct
  REGION 1..9: note = Description of Artificial Sequence: Synthetic peptide
VLAEAMSQV

SEQ ID NO: 17186 - protein, 9 aa, synthetic construct
  REGION 1..9: note = Description of Artificial Sequence: Synthetic peptide
TLYNVVNQL

SEQ ID NO: 17187 - protein, 9 aa, synthetic construct
  REGION 1..9: note = Description of Artificial Sequence: Synthetic peptide
QLTEVVQKI

SEQ ID NO: 17188 - protein, 10 aa, synthetic construct
  REGION 1..10: note = Description of Artificial Sequence: Synthetic peptide
KLIPVDPQEV

SEQ ID NO: 17189 - protein, 9 aa, synthetic construct
  REGION 1..9: note = Description of Artificial Sequence: Synthetic peptide
SLFGSDPLL

SEQ ID NO: 17190 - protein, 10 aa, synthetic construct
  REGION 1..10: note = Description of Artificial Sequence: Synthetic peptide
FLDGIDKAQV

SEQ ID NO: 17191 - protein, 9 aa, synthetic construct
  REGION 1..9: note = Description of Artificial Sequence: Synthetic peptide
TVLSIINSV

SEQ ID NO: 17192 - protein, 9 aa, synthetic construct
  REGION 1..9: note = Description of Artificial Sequence: Synthetic peptide
ALQESGPEV

SEQ ID NO: 17193 - protein, 9 aa, synthetic construct
  REGION 1..9: note = Description of Artificial Sequence: Synthetic peptide
LLNGSLAEV

SEQ ID NO: 17194 - protein, 8 aa, synthetic construct
  REGION 1..8: note = Description of Artificial Sequence: Synthetic peptide
NLGYVADV

SEQ ID NO: 17195 - protein, 10 aa, synthetic construct
  REGION 1..10: note = Description of Artificial Sequence: Synthetic peptide
KLVPVDPQEV

SEQ ID NO: 17196 - protein, 9 aa, synthetic construct
  REGION 1..9: note = Description of Artificial Sequence: Synthetic peptide
GLCTNVSTV

SEQ ID NO: 17197 - protein, 9 aa, synthetic construct
  REGION 1..9: note = Description of Artificial Sequence: Synthetic peptide
QLTEAVQKI

SEQ ID NO: 17198 - protein, 9 aa, synthetic construct
  REGION 1..9: note = Description of Artificial Sequence: Synthetic peptide
ILGQLQPAL

SEQ ID NO: 17199 - protein, 9 aa, synthetic construct
  REGION 1..9: note = Description of Artificial Sequence: Synthetic peptide
SLQDHQNSI

SEQ ID NO: 17200 - protein, 9 aa, synthetic construct
  REGION 1..9: note = Description of Artificial Sequence: Synthetic peptide
ALTEIVPLT

SEQ ID NO: 17201 - protein, 10 aa, synthetic construct
  REGION 1..10: note = Description of Artificial Sequence: Synthetic peptide
ALNPGLLESA

SEQ ID NO: 17202 - protein, 9 aa, synthetic construct
  REGION 1..9: note = Description of Artificial Sequence: Synthetic peptide
GLADQLIHM

SEQ ID NO: 17203 - protein, 10 aa, synthetic construct
  REGION 1..10: note = Description of Artificial Sequence: Synthetic peptide
TLWQRPLVTV

SEQ ID NO: 17204 - protein, 9 aa, synthetic construct
  REGION 1..9: note = Description of Artificial Sequence: Synthetic peptide
AVLSIVNRV

SEQ ID NO: 17205 - protein, 10 aa, synthetic construct
  REGION 1..10: note = Description of Artificial Sequence: Synthetic peptide
YVDNGTNVTL

SEQ ID NO: 17206 - protein, 9 aa, synthetic construct
  REGION 1..9: note = Description of Artificial Sequence: Synthetic peptide
SLAEGQVII

SEQ ID NO: 17207 - protein, 9 aa, synthetic construct
  REGION 1..9: note = Description of Artificial Sequence: Synthetic peptide
ALTEICTEM

SEQ ID NO: 17208 - protein, 10 aa, synthetic construct
  REGION 1..10: note = Description of Artificial Sequence: Synthetic peptide
TLWQRPIVTV

SEQ ID NO: 17209 - protein, 10 aa, synthetic construct
  REGION 1..10: note = Description of Artificial Sequence: Synthetic peptide
KLVPVNPQEV

SEQ ID NO: 17210 - protein, 9 aa, synthetic construct
  REGION 1..9: note = Description of Artificial Sequence: Synthetic peptide
ALTDVVPLT

SEQ ID NO: 17211 - protein, 9 aa, synthetic construct
  REGION 1..9: note = Description of Artificial Sequence: Synthetic peptide
ILREPVHGV

SEQ ID NO: 17212 - protein, 11 aa, synthetic construct
  REGION 1..11: note = Description of Artificial Sequence: Synthetic peptide
VLDVGGAYFSV

SEQ ID NO: 17213 - protein, 9 aa, synthetic construct
  REGION 1..9: note = Description of Artificial Sequence: Synthetic peptide
IVTDSQYAL

SEQ ID NO: 17214 - protein, 9 aa, synthetic construct
  REGION 1..9: note = Description of Artificial Sequence: Synthetic peptide
VLAEAMSQV

SEQ ID NO: 17215 - protein, 9 aa, synthetic construct
  REGION 1..9: note = Description of Artificial Sequence: Synthetic peptide
ILREPVHGV

SEQ ID NO: 17216 - protein, 9 aa, synthetic construct
  REGION 1..9: note = Description of Artificial Sequence: Synthetic peptide
TLYNVVNQL

SEQ ID NO: 17217 - protein, 9 aa, synthetic construct
  REGION 1..9: note = Description of Artificial Sequence: Synthetic peptide
ILREPIHGV

SEQ ID NO: 17218 - protein, 10 aa, synthetic construct
  REGION 1..10: note = Description of Artificial Sequence: Synthetic peptide
KLIPVDPQEV

SEQ ID NO: 17219 - protein, 9 aa, synthetic construct
  REGION 1..9: note = Description of Artificial Sequence: Synthetic peptide
VVKIEPLGV

SEQ ID NO: 17220 - protein, 9 aa, synthetic construct
  REGION 1..9: note = Description of Artificial Sequence: Synthetic peptide
QLTEVVQKI

SEQ ID NO: 17221 - protein, 9 aa, synthetic construct
  REGION 1..9: note = Description of Artificial Sequence: Synthetic peptide
TLNAWVKVV

SEQ ID NO: 17222 - protein, 9 aa, synthetic construct
  REGION 1..9: note = Description of Artificial Sequence: Synthetic peptide
GLCTNVSTV

SEQ ID NO: 17223 - protein, 9 aa, synthetic construct
  REGION 1..9: note = Description of Artificial Sequence: Synthetic peptide
ILKEPVHGA

SEQ ID NO: 17224 - protein, 10 aa, synthetic construct
  REGION 1..10: note = Description of Artificial Sequence: Synthetic peptide
ALNPGLLESA

SEQ ID NO: 17225 - protein, 10 aa, synthetic construct
  REGION 1..10: note = Description of Artificial Sequence: Synthetic peptide
TLWQRPLVTV

SEQ ID NO: 17226 - protein, 10 aa, synthetic construct
  REGION 1..10: note = Description of Artificial Sequence: Synthetic peptide
YLKDQQLLGI

SEQ ID NO: 17227 - protein, 9 aa, synthetic construct
  REGION 1..9: note = Description of Artificial Sequence: Synthetic peptide
TLHQVVTQL

SEQ ID NO: 17228 - protein, 10 aa, synthetic construct
  REGION 1..10: note = Description of Artificial Sequence: Synthetic peptide
YLRDQQLLGI

SEQ ID NO: 17229 - protein, 9 aa, synthetic construct
  REGION 1..9: note = Description of Artificial Sequence: Synthetic peptide
LLNGSLAEV

SEQ ID NO: 17230 - protein, 10 aa, synthetic construct
  REGION 1..10: note = Description of Artificial Sequence: Synthetic peptide
TLWQRPIVTV

SEQ ID NO: 17231 - protein, 9 aa, synthetic construct
  REGION 1..9: note = Description of Artificial Sequence: Synthetic peptide
KIKPPLPSV

SEQ ID NO: 17232 - protein, 9 aa, synthetic construct
  REGION 1..9: note = Description of Artificial Sequence: Synthetic peptide
TVLSIINSV

SEQ ID NO: 17233 - protein, 10 aa, synthetic construct
  REGION 1..10: note = Description of Artificial Sequence: Synthetic peptide
KLVPVNPQEV

SEQ ID NO: 17234 - protein, 9 aa, synthetic construct
  REGION 1..9: note = Description of Artificial Sequence: Synthetic peptide
VLAEAMSQM

SEQ ID NO: 17235 - protein, 10 aa, synthetic construct
  REGION 1..10: note = Description of Artificial Sequence: Synthetic peptide
KLVPVDPQEV

SEQ ID NO: 17236 - protein, 9 aa, synthetic construct
  REGION 1..9: note = Description of Artificial Sequence: Synthetic peptide
QLQARVLAV

SEQ ID NO: 17237 - protein, 11 aa, synthetic construct
  REGION 1..11: note = Description of Artificial Sequence: Synthetic peptide
FLKEKGGLEGL

SEQ ID NO: 17238 - protein, 9 aa, synthetic construct
  REGION 1..9: note = Description of Artificial Sequence: Synthetic peptide
GAASITLTV

SEQ ID NO: 17239 - protein, 9 aa, synthetic construct
  REGION 1..9: note = Description of Artificial Sequence: Synthetic peptide
ALNPGLLET

SEQ ID NO: 17240 - protein, 11 aa, synthetic construct
  REGION 1..11: note = Description of Artificial Sequence: Synthetic peptide
FLKEKGGLDGL

SEQ ID NO: 17241 - protein, 9 aa, synthetic construct
  REGION 1..9: note = Description of Artificial Sequence: Synthetic peptide
AVLSIVNRV

SEQ ID NO: 17242 - protein, 9 aa, synthetic construct
  REGION 1..9: note = Description of Artificial Sequence: Synthetic peptide
QLTEAVQKI

SEQ ID NO: 17243 - protein, 9 aa, synthetic construct
  REGION 1..9: note = Description of Artificial Sequence: Synthetic peptide
SLLIVIRTV

SEQ ID NO: 17244 - protein, 9 aa, synthetic construct
  REGION 1..9: note = Description of Artificial Sequence: Synthetic peptide
RTKPPLPSV

SEQ ID NO: 17245 - protein, 9 aa, synthetic construct
  REGION 1..9: note = Description of Artificial Sequence: Synthetic peptide
ALTRILQQL

SEQ ID NO: 17246 - protein, 10 aa, synthetic construct
  REGION 1..10: note = Description of Artificial Sequence: Synthetic peptide
ALIGLRIIFA

SEQ ID NO: 17247 - protein, 9 aa, synthetic construct
  REGION 1..9: note = Description of Artificial Sequence: Synthetic peptide
SLAEGQVII

SEQ ID NO: 17248 - protein, 9 aa, synthetic construct
  REGION 1..9: note = Description of Artificial Sequence: Synthetic peptide
ALIRTLQQL

SEQ ID NO: 17249 - protein, 9 aa, synthetic construct
  REGION 1..9: note = Description of Artificial Sequence: Synthetic peptide
KTKPPLPSV

SEQ ID NO: 17250 - protein, 9 aa, synthetic construct
  REGION 1..9: note = Description of Artificial Sequence: Synthetic peptide
ELKKIIGQV

SEQ ID NO: 17251 - protein, 8 aa, synthetic construct
  REGION 1..8: note = Description of Artificial Sequence: Synthetic peptide
VLSIVNRV

SEQ ID NO: 17252 - protein, 9 aa, synthetic construct
  REGION 1..9: note = Description of Artificial Sequence: Synthetic peptide
ALFYRIDVV

SEQ ID NO: 17253 - protein, 9 aa, synthetic construct
  REGION 1..9: note = Description of Artificial Sequence: Synthetic peptide
TLHKVITKL

SEQ ID NO: 17254 - protein, 9 aa, synthetic construct
  REGION 1..9: note = Description of Artificial Sequence: Synthetic peptide
LLSIVARTV

SEQ ID NO: 17255 - protein, 10 aa, synthetic construct
  REGION 1..10: note = Description of Artificial Sequence: Synthetic peptide
KVVKIEPLGV

SEQ ID NO: 17256 - protein, 9 aa, synthetic construct
  REGION 1..9: note = Description of Artificial Sequence: Synthetic peptide
VVKIEPLGI

SEQ ID NO: 17257 - protein, 9 aa, synthetic construct
  REGION 1..9: note = Description of Artificial Sequence: Synthetic peptide
EVIGNIRQA

SEQ ID NO: 17258 - protein, 9 aa, synthetic construct
  REGION 1..9: note = Description of Artificial Sequence: Synthetic peptide
ALFYRLDVV

SEQ ID NO: 17259 - protein, 8 aa, synthetic construct
  REGION 1..8: note = Description of Artificial Sequence: Synthetic peptide
VLSIINSV

SEQ ID NO: 17260 - protein, 9 aa, synthetic construct
  REGION 1..9: note = Description of Artificial Sequence: Synthetic peptide
SLYNTIAVL

SEQ ID NO: 17261 - protein, 9 aa, synthetic construct
  REGION 1..9: note = Description of Artificial Sequence: Synthetic peptide
VLRDKQQKV

SEQ ID NO: 17262 - protein, 10 aa, synthetic construct
  REGION 1..10: note = Description of Artificial Sequence: Synthetic peptide
ALNPDLLETA

SEQ ID NO: 17263 - protein, 9 aa, synthetic construct
  REGION 1..9: note = Description of Artificial Sequence: Synthetic peptide
SLQDHQNSI

SEQ ID NO: 17264 - protein, 9 aa, synthetic construct
  REGION 1..9: note = Description of Artificial Sequence: Synthetic peptide
LLNTTAIAV

SEQ ID NO: 17265 - protein, 9 aa, synthetic construct
  REGION 1..9: note = Description of Artificial Sequence: Synthetic peptide
TLYNVVNQL

SEQ ID NO: 17266 - protein, 9 aa, synthetic construct
  REGION 1..9: note = Description of Artificial Sequence: Synthetic peptide
SITNWLWYI

SEQ ID NO: 17267 - protein, 9 aa, synthetic construct
  REGION 1..9: note = Description of Artificial Sequence: Synthetic peptide
LLLYWGQEL

SEQ ID NO: 17268 - protein, 9 aa, synthetic construct
  REGION 1..9: note = Description of Artificial Sequence: Synthetic peptide
TLHQVVTQL

SEQ ID NO: 17269 - protein, 9 aa, synthetic construct
  REGION 1..9: note = Description of Artificial Sequence: Synthetic peptide
SLLIVIRTV

SEQ ID NO: 17270 - protein, 9 aa, synthetic construct
  REGION 1..9: note = Description of Artificial Sequence: Synthetic peptide
TVLSIINSV

SEQ ID NO: 17271 - protein, 9 aa, synthetic construct
  REGION 1..9: note = Description of Artificial Sequence: Synthetic peptide
TLNAWVKVV

SEQ ID NO: 17272 - protein, 9 aa, synthetic construct
  REGION 1..9: note = Description of Artificial Sequence: Synthetic peptide
AVLSIVNRV

SEQ ID NO: 17273 - protein, 9 aa, synthetic construct
  REGION 1..9: note = Description of Artificial Sequence: Synthetic peptide
QLTEVVQKI

SEQ ID NO: 17274 - protein, 9 aa, synthetic construct
  REGION 1..9: note = Description of Artificial Sequence: Synthetic peptide
TLHKVITKL

SEQ ID NO: 17275 - protein, 9 aa, synthetic construct
  REGION 1..9: note = Description of Artificial Sequence: Synthetic peptide
TVLEEINLL

SEQ ID NO: 17276 - protein, 9 aa, synthetic construct
  REGION 1..9: note = Description of Artificial Sequence: Synthetic peptide
ALIRTLQQL

SEQ ID NO: 17277 - protein, 9 aa, synthetic construct
  REGION 1..9: note = Description of Artificial Sequence: Synthetic peptide
LLQYWGQEL

SEQ ID NO: 17278 - protein, 9 aa, synthetic construct
  REGION 1..9: note = Description of Artificial Sequence: Synthetic peptide
ALTRILQQL

SEQ ID NO: 17279 - protein, 10 aa, synthetic construct
  REGION 1..10: note = Description of Artificial Sequence: Synthetic peptide
TLWQRPLVTV

SEQ ID NO: 17280 - protein, 9 aa, synthetic construct
  REGION 1..9: note = Description of Artificial Sequence: Synthetic peptide
ILREPIHGV

SEQ ID NO: 17281 - protein, 10 aa, synthetic construct
  REGION 1..10: note = Description of Artificial Sequence: Synthetic peptide
KLIPVDPQEV

SEQ ID NO: 17282 - protein, 9 aa, synthetic construct
  REGION 1..9: note = Description of Artificial Sequence: Synthetic peptide
SLYNTIAVL

SEQ ID NO: 17283 - protein, 9 aa, synthetic construct
  REGION 1..9: note = Description of Artificial Sequence: Synthetic peptide
ILREPVHGV

SEQ ID NO: 17284 - protein, 9 aa, synthetic construct
  REGION 1..9: note = Description of Artificial Sequence: Synthetic peptide
SLFGSDPLL

SEQ ID NO: 17285 - protein, 9 aa, synthetic construct
  REGION 1..9: note = Description of Artificial Sequence: Synthetic peptide
TLQQIATQL

SEQ ID NO: 17286 - protein, 10 aa, synthetic construct
  REGION 1..10: note = Description of Artificial Sequence: Synthetic peptide
TLWQRPIVTV

SEQ ID NO: 17287 - protein, 9 aa, synthetic construct
  REGION 1..9: note = Description of Artificial Sequence: Synthetic peptide
ILGQLQPAL

SEQ ID NO: 17288 - protein, 9 aa, synthetic construct
  REGION 1..9: note = Description of Artificial Sequence: Synthetic peptide
ALTDIIPLT

SEQ ID NO: 17289 - protein, 9 aa, synthetic construct
  REGION 1..9: note = Description of Artificial Sequence: Synthetic peptide
GLADQLIHM

SEQ ID NO: 17290 - protein, 9 aa, synthetic construct
  REGION 1..9: note = Description of Artificial Sequence: Synthetic peptide
MLQLTVWGV

SEQ ID NO: 17291 - protein, 10 aa, synthetic construct
  REGION 1..10: note = Description of Artificial Sequence: Synthetic peptide
NLLQYWGQEL

SEQ ID NO: 17292 - protein, 9 aa, synthetic construct
  REGION 1..9: note = Description of Artificial Sequence: Synthetic peptide
LVWQDLWNL

SEQ ID NO: 17293 - protein, 9 aa, synthetic construct
  REGION 1..9: note = Description of Artificial Sequence: Synthetic peptide
LLLIVVRTV

SEQ ID NO: 17294 - protein, 9 aa, synthetic construct
  REGION 1..9: note = Description of Artificial Sequence: Synthetic peptide
KIKPPLPSV

SEQ ID NO: 17295 - protein, 9 aa, synthetic construct
  REGION 1..9: note = Description of Artificial Sequence: Synthetic peptide
SLWRWGTLI

SEQ ID NO: 17296 - protein, 9 aa, synthetic construct
  REGION 1..9: note = Description of Artificial Sequence: Synthetic peptide
HLEGKIILV

SEQ ID NO: 17297 - protein, 9 aa, synthetic construct
  REGION 1..9: note = Description of Artificial Sequence: Synthetic peptide
NITGLILTL

SEQ ID NO: 17298 - protein, 9 aa, synthetic construct
  REGION 1..9: note = Description of Artificial Sequence: Synthetic peptide
ALTEIVPLT

SEQ ID NO: 17299 - protein, 10 aa, synthetic construct
  REGION 1..10: note = Description of Artificial Sequence: Synthetic peptide
NLLLYWGQEL

SEQ ID NO: 17300 - protein, 10 aa, synthetic construct
  REGION 1..10: note = Description of Artificial Sequence: Synthetic peptide
KLVPVNPQEV

SEQ ID NO: 17301 - protein, 9 aa, synthetic construct
  REGION 1..9: note = Description of Artificial Sequence: Synthetic peptide
LLNTTAIAV

SEQ ID NO: 17302 - protein, 10 aa, synthetic construct
  REGION 1..10: note = Description of Artificial Sequence: Synthetic peptide
KLVPVDPQEV

SEQ ID NO: 17303 - protein, 9 aa, synthetic construct
  REGION 1..9: note = Description of Artificial Sequence: Synthetic peptide
VLAEAMSQV

SEQ ID NO: 17304 - protein, 9 aa, synthetic construct
  REGION 1..9: note = Description of Artificial Sequence: Synthetic peptide
ALTDVVPLT

SEQ ID NO: 17305 - protein, 9 aa, synthetic construct
  REGION 1..9: note = Description of Artificial Sequence: Synthetic peptide
VIWGKIPKF

SEQ ID NO: 17306 - protein, 9 aa, synthetic construct
  REGION 1..9: note = Description of Artificial Sequence: Synthetic peptide
AALDLSHFL

SEQ ID NO: 17307 - protein, 11 aa, synthetic construct
  REGION 1..11: note = Description of Artificial Sequence: Synthetic peptide
SVLSGGRLDTL

SEQ ID NO: 17308 - protein, 9 aa, synthetic construct
  REGION 1..9: note = Description of Artificial Sequence: Synthetic peptide
IVWDDLRSL

SEQ ID NO: 17309 - protein, 9 aa, synthetic construct
  REGION 1..9: note = Description of Artificial Sequence: Synthetic peptide
LLNGSLAEV

SEQ ID NO: 17310 - protein, 9 aa, synthetic construct
  REGION 1..9: note = Description of Artificial Sequence: Synthetic peptide
NLVAVLYCV

SEQ ID NO: 17311 - protein, 9 aa, synthetic construct
  REGION 1..9: note = Description of Artificial Sequence: Synthetic peptide
IIAIVVWTI

SEQ ID NO: 17312 - protein, 9 aa, synthetic construct
  REGION 1..9: note = Description of Artificial Sequence: Synthetic peptide
SLFNLVAVL

SEQ ID NO: 17313 - protein, 9 aa, synthetic construct
  REGION 1..9: note = Description of Artificial Sequence: Synthetic peptide
LLNTTAIVV

SEQ ID NO: 17314 - protein, 9 aa, synthetic construct
  REGION 1..9: note = Description of Artificial Sequence: Synthetic peptide
NITGLILTI

SEQ ID NO: 17315 - protein, 9 aa, synthetic construct
  REGION 1..9: note = Description of Artificial Sequence: Synthetic peptide
VVWDDLRSL

SEQ ID NO: 17316 - protein, 9 aa, synthetic construct
  REGION 1..9: note = Description of Artificial Sequence: Synthetic peptide
ALQESGPEV

SEQ ID NO: 17317 - protein, 9 aa, synthetic construct
  REGION 1..9: note = Description of Artificial Sequence: Synthetic peptide
ALFYRIDVV

SEQ ID NO: 17318 - protein, 9 aa, synthetic construct
  REGION 1..9: note = Description of Artificial Sequence: Synthetic peptide
IVTDSQYAL

SEQ ID NO: 17319 - protein, 9 aa, synthetic construct
  REGION 1..9: note = Description of Artificial Sequence: Synthetic peptide
HLEGKVILV

SEQ ID NO: 17320 - protein, 11 aa, synthetic construct
  REGION 1..11: note = Description of Artificial Sequence: Synthetic peptide
FLKEKGGLEGL

SEQ ID NO: 17321 - protein, 11 aa, synthetic construct
  REGION 1..11: note = Description of Artificial Sequence: Synthetic peptide
ALFYRADIVQI

SEQ ID NO: 17322 - protein, 9 aa, synthetic construct
  REGION 1..9: note = Description of Artificial Sequence: Synthetic peptide
LVNQIIEEL

SEQ ID NO: 17323 - protein, 9 aa, synthetic construct
  REGION 1..9: note = Description of Artificial Sequence: Synthetic peptide
SIVARTVEL

SEQ ID NO: 17324 - protein, 10 aa, synthetic construct
  REGION 1..10: note = Description of Artificial Sequence: Synthetic peptide
ALNPGLLESA

SEQ ID NO: 17325 - protein, 9 aa, synthetic construct
  REGION 1..9: note = Description of Artificial Sequence: Synthetic peptide
FPRDWLHQL

SEQ ID NO: 17326 - protein, 9 aa, synthetic construct
  REGION 1..9: note = Description of Artificial Sequence: Synthetic peptide
RTKPPLPSV

SEQ ID NO: 17327 - protein, 9 aa, synthetic construct
  REGION 1..9: note = Description of Artificial Sequence: Synthetic peptide
ALNPGLLET

SEQ ID NO: 17328 - protein, 9 aa, synthetic construct
  REGION 1..9: note = Description of Artificial Sequence: Synthetic peptide
ALFYRLDVV

SEQ ID NO: 17329 - protein, 10 aa, synthetic construct
  REGION 1..10: note = Description of Artificial Sequence: Synthetic peptide
LLIVIRTVEL

SEQ ID NO: 17330 - protein, 9 aa, synthetic construct
  REGION 1..9: note = Description of Artificial Sequence: Synthetic peptide
IIAVIVWTI

SEQ ID NO: 17331 - protein, 9 aa, synthetic construct
  REGION 1..9: note = Description of Artificial Sequence: Synthetic peptide
NYTEVIYRL

SEQ ID NO: 17332 - protein, 9 aa, synthetic construct
  REGION 1..9: note = Description of Artificial Sequence: Synthetic peptide
DISHWLWYI

SEQ ID NO: 17333 - protein, 10 aa, synthetic construct
  REGION 1..10: note = Description of Artificial Sequence: Synthetic peptide
IMIVGGIIGL

SEQ ID NO: 17334 - protein, 9 aa, synthetic construct
  REGION 1..9: note = Description of Artificial Sequence: Synthetic peptide
KQVGTLQYL

SEQ ID NO: 17335 - protein, 9 aa, synthetic construct
  REGION 1..9: note = Description of Artificial Sequence: Synthetic peptide
TLQEQIAWM

SEQ ID NO: 17336 - protein, 9 aa, synthetic construct
  REGION 1..9: note = Description of Artificial Sequence: Synthetic peptide
HLEGQVILV

SEQ ID NO: 17337 - protein, 10 aa, synthetic construct
  REGION 1..10: note = Description of Artificial Sequence: Synthetic peptide
FLDGIDKAQV

SEQ ID NO: 17338 - protein, 9 aa, synthetic construct
  REGION 1..9: note = Description of Artificial Sequence: Synthetic peptide
GALDLSHFL

SEQ ID NO: 17339 - protein, 11 aa, synthetic construct
  REGION 1..11: note = Description of Artificial Sequence: Synthetic peptide
VQLGIPHPAGL

SEQ ID NO: 17340 - protein, 10 aa, synthetic construct
  REGION 1..10: note = Description of Artificial Sequence: Synthetic peptide
RTQDFWEVQL

SEQ ID NO: 17341 - protein, 9 aa, synthetic construct
  REGION 1..9: note = Description of Artificial Sequence: Synthetic peptide
SLSLFSYRL

SEQ ID NO: 17342 - protein, 10 aa, synthetic construct
  REGION 1..10: note = Description of Artificial Sequence: Synthetic peptide
YLRDQQLLGI

SEQ ID NO: 17343 - protein, 9 aa, synthetic construct
  REGION 1..9: note = Description of Artificial Sequence: Synthetic peptide
ILTQIGCTL

SEQ ID NO: 17344 - protein, 9 aa, synthetic construct
  REGION 1..9: note = Description of Artificial Sequence: Synthetic peptide
YPRPWLHDL

SEQ ID NO: 17345 - protein, 9 aa, synthetic construct
  REGION 1..9: note = Description of Artificial Sequence: Synthetic peptide
IIVWTIVYL

SEQ ID NO: 17346 - protein, 9 aa, synthetic construct
  REGION 1..9: note = Description of Artificial Sequence: Synthetic peptide
NTKNIIVQL

SEQ ID NO: 17347 - protein, 9 aa, synthetic construct
  REGION 1..9: note = Description of Artificial Sequence: Synthetic peptide
SLAEGQVII

SEQ ID NO: 17348 - protein, 9 aa, synthetic construct
  REGION 1..9: note = Description of Artificial Sequence: Synthetic peptide
KLTPLCVTL

SEQ ID NO: 17349 - protein, 10 aa, synthetic construct
  REGION 1..10: note = Description of Artificial Sequence: Synthetic peptide
ALIGLRIIFA

SEQ ID NO: 17350 - protein, 9 aa, synthetic construct
  REGION 1..9: note = Description of Artificial Sequence: Synthetic peptide
TLYNVVNQL

SEQ ID NO: 17351 - protein, 11 aa, synthetic construct
  REGION 1..11: note = Description of Artificial Sequence: Synthetic peptide
TQIDPDLADQL

SEQ ID NO: 17352 - protein, 9 aa, synthetic construct
  REGION 1..9: note = Description of Artificial Sequence: Synthetic peptide
EVIGNIRQA

SEQ ID NO: 17353 - protein, 9 aa, synthetic construct
  REGION 1..9: note = Description of Artificial Sequence: Synthetic peptide
NQVGSLQYL

SEQ ID NO: 17354 - protein, 9 aa, synthetic construct
  REGION 1..9: note = Description of Artificial Sequence: Synthetic peptide
QLTEVVQKI

SEQ ID NO: 17355 - protein, 9 aa, synthetic construct
  REGION 1..9: note = Description of Artificial Sequence: Synthetic peptide
RQIDNYTEV

SEQ ID NO: 17356 - protein, 9 aa, synthetic construct
  REGION 1..9: note = Description of Artificial Sequence: Synthetic peptide
VLAEAMSQV

SEQ ID NO: 17357 - protein, 9 aa, synthetic construct
  REGION 1..9: note = Description of Artificial Sequence: Synthetic peptide
AVAEGTDRI

SEQ ID NO: 17358 - protein, 9 aa, synthetic construct
  REGION 1..9: note = Description of Artificial Sequence: Synthetic peptide
TVLSIINSV

SEQ ID NO: 17359 - protein, 9 aa, synthetic construct
  REGION 1..9: note = Description of Artificial Sequence: Synthetic peptide
VVAEGTDRI

SEQ ID NO: 17360 - protein, 11 aa, synthetic construct
  REGION 1..11: note = Description of Artificial Sequence: Synthetic peptide
TQVDPDLADQL

SEQ ID NO: 17361 - protein, 11 aa, synthetic construct
  REGION 1..11: note = Description of Artificial Sequence: Synthetic peptide
TQVDPGLADQL

SEQ ID NO: 17362 - protein, 9 aa, synthetic construct
  REGION 1..9: note = Description of Artificial Sequence: Synthetic peptide
TVLEEINLL

SEQ ID NO: 17363 - protein, 9 aa, synthetic construct
  REGION 1..9: note = Description of Artificial Sequence: Synthetic peptide
AVLSIVNRV

SEQ ID NO: 17364 - protein, 9 aa, synthetic construct
  REGION 1..9: note = Description of Artificial Sequence: Synthetic peptide
ASIEEMMTA

SEQ ID NO: 17365 - protein, 9 aa, synthetic construct
  REGION 1..9: note = Description of Artificial Sequence: Synthetic peptide
KQVGTLQYL

SEQ ID NO: 17366 - protein, 10 aa, synthetic construct
  REGION 1..10: note = Description of Artificial Sequence: Synthetic peptide
SEFNLPPIVA

SEQ ID NO: 17367 - protein, 9 aa, synthetic construct
  REGION 1..9: note = Description of Artificial Sequence: Synthetic peptide
WTVNDIQKL

SEQ ID NO: 17368 - protein, 9 aa, synthetic construct
  REGION 1..9: note = Description of Artificial Sequence: Synthetic peptide
RIIEIVQRA

SEQ ID NO: 17369 - protein, 9 aa, synthetic construct
  REGION 1..9: note = Description of Artificial Sequence: Synthetic peptide
GAASITLTV

SEQ ID NO: 17370 - protein, 9 aa, synthetic construct
  REGION 1..9: note = Description of Artificial Sequence: Synthetic peptide
IVTDSQYAL

SEQ ID NO: 17371 - protein, 11 aa, synthetic construct
  REGION 1..11: note = Description of Artificial Sequence: Synthetic peptide
TQVEPGLADQL

SEQ ID NO: 17372 - protein, 10 aa, synthetic construct
  REGION 1..10: note = Description of Artificial Sequence: Synthetic peptide
YVDNGTNVTL

SEQ ID NO: 17373 - protein, 9 aa, synthetic construct
  REGION 1..9: note = Description of Artificial Sequence: Synthetic peptide
SQMTNMNTA

SEQ ID NO: 17374 - protein, 9 aa, synthetic construct
  REGION 1..9: note = Description of Artificial Sequence: Synthetic peptide
VQFNESVQI

SEQ ID NO: 17375 - protein, 9 aa, synthetic construct
  REGION 1..9: note = Description of Artificial Sequence: Synthetic peptide
FTSGAVKAA

SEQ ID NO: 17376 - protein, 9 aa, synthetic construct
  REGION 1..9: note = Description of Artificial Sequence: Synthetic peptide
QIIEQIQPA

SEQ ID NO: 17377 - protein, 9 aa, synthetic construct
  REGION 1..9: note = Description of Artificial Sequence: Synthetic peptide
SQIYPNIKV

SEQ ID NO: 17378 - protein, 9 aa, synthetic construct
  REGION 1..9: note = Description of Artificial Sequence: Synthetic peptide
VVIQDNSEI

SEQ ID NO: 17379 - protein, 9 aa, synthetic construct
  REGION 1..9: note = Description of Artificial Sequence: Synthetic peptide
SIVARTVEL

SEQ ID NO: 17380 - protein, 10 aa, synthetic construct
  REGION 1..10: note = Description of Artificial Sequence: Synthetic peptide
GEVIGNIRQA

SEQ ID NO: 17381 - protein, 9 aa, synthetic construct
  REGION 1..9: note = Description of Artificial Sequence: Synthetic peptide
LEAEPIAGA

SEQ ID NO: 17382 - protein, 9 aa, synthetic construct
  REGION 1..9: note = Description of Artificial Sequence: Synthetic peptide
RIIELVQRA

SEQ ID NO: 17383 - protein, 9 aa, synthetic construct
  REGION 1..9: note = Description of Artificial Sequence: Synthetic peptide
ASITLTVQA

SEQ ID NO: 17384 - protein, 10 aa, synthetic construct
  REGION 1..10: note = Description of Artificial Sequence: Synthetic peptide
SQYALGIIQA

SEQ ID NO: 17385 - protein, 9 aa, synthetic construct
  REGION 1..9: note = Description of Artificial Sequence: Synthetic peptide
SQSEIWDNM

SEQ ID NO: 17386 - protein, 9 aa, synthetic construct
  REGION 1..9: note = Description of Artificial Sequence: Synthetic peptide
LTFGYVADL

SEQ ID NO: 17387 - protein, 9 aa, synthetic construct
  REGION 1..9: note = Description of Artificial Sequence: Synthetic peptide
AVAEGTDGI

SEQ ID NO: 17388 - protein, 9 aa, synthetic construct
  REGION 1..9: note = Description of Artificial Sequence: Synthetic peptide
IVIRTVELL

SEQ ID NO: 17389 - protein, 9 aa, synthetic construct
  REGION 1..9: note = Description of Artificial Sequence: Synthetic peptide
QLTEAVQKI

SEQ ID NO: 17390 - protein, 11 aa, synthetic construct
  REGION 1..11: note = Description of Artificial Sequence: Synthetic peptide
VVIQDNSEIKV

SEQ ID NO: 17391 - protein, 9 aa, synthetic construct
  REGION 1..9: note = Description of Artificial Sequence: Synthetic peptide
IVARTVELL

SEQ ID NO: 17392 - protein, 9 aa, synthetic construct
  REGION 1..9: note = Description of Artificial Sequence: Synthetic peptide
YIIGIGIGA

SEQ ID NO: 17393 - protein, 9 aa, synthetic construct
  REGION 1..9: note = Description of Artificial Sequence: Synthetic peptide
SQIYPGIKV

SEQ ID NO: 17394 - protein, 9 aa, synthetic construct
  REGION 1..9: note = Description of Artificial Sequence: Synthetic peptide
SQVTNTNTA

SEQ ID NO: 17395 - protein, 9 aa, synthetic construct
  REGION 1..9: note = Description of Artificial Sequence: Synthetic peptide
ATGDIIGNI

SEQ ID NO: 17396 - protein, 9 aa, synthetic construct
  REGION 1..9: note = Description of Artificial Sequence: Synthetic peptide
NTKNIIVQL

SEQ ID NO: 17397 - protein, 9 aa, synthetic construct
  REGION 1..9: note = Description of Artificial Sequence: Synthetic peptide
TETLLVQNA

SEQ ID NO: 17398 - protein, 9 aa, synthetic construct
  REGION 1..9: note = Description of Artificial Sequence: Synthetic peptide
IEVKDTKEA

SEQ ID NO: 17399 - protein, 9 aa, synthetic construct
  REGION 1..9: note = Description of Artificial Sequence: Synthetic peptide
FTSAAVKAA

SEQ ID NO: 17400 - protein, 9 aa, synthetic construct
  REGION 1..9: note = Description of Artificial Sequence: Synthetic peptide
LETEPIVGA

SEQ ID NO: 17401 - protein, 10 aa, synthetic construct
  REGION 1..10: note = Description of Artificial Sequence: Synthetic peptide
KLIPVDPQEV

SEQ ID NO: 17402 - protein, 9 aa, synthetic construct
  REGION 1..9: note = Description of Artificial Sequence: Synthetic peptide
SLFGSDPLL

SEQ ID NO: 17403 - protein, 9 aa, synthetic construct
  REGION 1..9: note = Description of Artificial Sequence: Synthetic peptide
DIIGNIRQA

SEQ ID NO: 17404 - protein, 9 aa, synthetic construct
  REGION 1..9: note = Description of Artificial Sequence: Synthetic peptide
LVNQIIEEL

SEQ ID NO: 17405 - protein, 9 aa, synthetic construct
  REGION 1..9: note = Description of Artificial Sequence: Synthetic peptide
DIIGDIRQA

SEQ ID NO: 17406 - protein, 9 aa, synthetic construct
  REGION 1..9: note = Description of Artificial Sequence: Synthetic peptide
QLTEVVQKI

SEQ ID NO: 17407 - protein, 10 aa, synthetic construct
  REGION 1..10: note = Description of Artificial Sequence: Synthetic peptide
YVDNGTNVTL

SEQ ID NO: 17408 - protein, 9 aa, synthetic construct
  REGION 1..9: note = Description of Artificial Sequence: Synthetic peptide
IVTDSQYAL

SEQ ID NO: 17409 - protein, 9 aa, synthetic construct
  REGION 1..9: note = Description of Artificial Sequence: Synthetic peptide
RQIDNYTEV

SEQ ID NO: 17410 - protein, 9 aa, synthetic construct
  REGION 1..9: note = Description of Artificial Sequence: Synthetic peptide
TVLSIINSV

SEQ ID NO: 17411 - protein, 9 aa, synthetic construct
  REGION 1..9: note = Description of Artificial Sequence: Synthetic peptide
YSTQVDPGL

SEQ ID NO: 17412 - protein, 9 aa, synthetic construct
  REGION 1..9: note = Description of Artificial Sequence: Synthetic peptide
IQDNSEIKV

SEQ ID NO: 17413 - protein, 9 aa, synthetic construct
  REGION 1..9: note = Description of Artificial Sequence: Synthetic peptide
AVLSIVNRV

SEQ ID NO: 17414 - protein, 9 aa, synthetic construct
  REGION 1..9: note = Description of Artificial Sequence: Synthetic peptide
NQVGSLQYL

SEQ ID NO: 17415 - protein, 9 aa, synthetic construct
  REGION 1..9: note = Description of Artificial Sequence: Synthetic peptide
VLAEAMSQV

SEQ ID NO: 17416 - protein, 9 aa, synthetic construct
  REGION 1..9: note = Description of Artificial Sequence: Synthetic peptide
TVLEEINLL

SEQ ID NO: 17417 - protein, 11 aa, synthetic construct
  REGION 1..11: note = Description of Artificial Sequence: Synthetic peptide
TQIDPDLADQL

SEQ ID NO: 17418 - protein, 11 aa, synthetic construct
  REGION 1..11: note = Description of Artificial Sequence: Synthetic peptide
TQVDPGLADQL

SEQ ID NO: 17419 - protein, 11 aa, synthetic construct
  REGION 1..11: note = Description of Artificial Sequence: Synthetic peptide
VVIQDNSEIKV

SEQ ID NO: 17420 - protein, 9 aa, synthetic construct
  REGION 1..9: note = Description of Artificial Sequence: Synthetic peptide
GGIGGFIKV

SEQ ID NO: 17421 - protein, 9 aa, synthetic construct
  REGION 1..9: note = Description of Artificial Sequence: Synthetic peptide
SQIYPGIKV

SEQ ID NO: 17422 - protein, 9 aa, synthetic construct
  REGION 1..9: note = Description of Artificial Sequence: Synthetic peptide
YSTQVDPDL

SEQ ID NO: 17423 - protein, 11 aa, synthetic construct
  REGION 1..11: note = Description of Artificial Sequence: Synthetic peptide
TQVEPGLADQL

SEQ ID NO: 17424 - protein, 9 aa, synthetic construct
  REGION 1..9: note = Description of Artificial Sequence: Synthetic peptide
YSTQIDPDL

SEQ ID NO: 17425 - protein, 9 aa, synthetic construct
  REGION 1..9: note = Description of Artificial Sequence: Synthetic peptide
KQVGTLQYL

SEQ ID NO: 17426 - protein, 9 aa, synthetic construct
  REGION 1..9: note = Description of Artificial Sequence: Synthetic peptide
VQLDSPIEI

SEQ ID NO: 17427 - protein, 10 aa, synthetic construct
  REGION 1..10: note = Description of Artificial Sequence: Synthetic peptide
TVLDVGDAYF

SEQ ID NO: 17428 - protein, 9 aa, synthetic construct
  REGION 1..9: note = Description of Artificial Sequence: Synthetic peptide
SQIYPNIKV

SEQ ID NO: 17429 - protein, 9 aa, synthetic construct
  REGION 1..9: note = Description of Artificial Sequence: Synthetic peptide
EVIGNIRQA

SEQ ID NO: 17430 - protein, 9 aa, synthetic construct
  REGION 1..9: note = Description of Artificial Sequence: Synthetic peptide
TLYNVVNQL

SEQ ID NO: 17431 - protein, 11 aa, synthetic construct
  REGION 1..11: note = Description of Artificial Sequence: Synthetic peptide
TQVDPDLADQL

SEQ ID NO: 17432 - protein, 9 aa, synthetic construct
  REGION 1..9: note = Description of Artificial Sequence: Synthetic peptide
YSTQVEPGL

SEQ ID NO: 17433 - protein, 9 aa, synthetic construct
  REGION 1..9: note = Description of Artificial Sequence: Synthetic peptide
VVIQDNSEI

SEQ ID NO: 17434 - protein, 10 aa, synthetic construct
  REGION 1..10: note = Description of Artificial Sequence: Synthetic peptide
KVVKIEPLGV

SEQ ID NO: 17435 - protein, 11 aa, synthetic construct
  REGION 1..11: note = Description of Artificial Sequence: Synthetic peptide
VQDTSEALNKV

SEQ ID NO: 17436 - protein, 9 aa, synthetic construct
  REGION 1..9: note = Description of Artificial Sequence: Synthetic peptide
VQFNESVQI

SEQ ID NO: 17437 - protein, 9 aa, synthetic construct
  REGION 1..9: note = Description of Artificial Sequence: Synthetic peptide
VQLNEPVQI

SEQ ID NO: 17438 - protein, 9 aa, synthetic construct
  REGION 1..9: note = Description of Artificial Sequence: Synthetic peptide
GAASITLTV

SEQ ID NO: 17439 - protein, 9 aa, synthetic construct
  REGION 1..9: note = Description of Artificial Sequence: Synthetic peptide
QLTEAVQKI

SEQ ID NO: 17440 - protein, 8 aa, synthetic construct
  REGION 1..8: note = Description of Artificial Sequence: Synthetic peptide
GQVILVAV

SEQ ID NO: 17441 - protein, 10 aa, synthetic construct
  REGION 1..10: note = Description of Artificial Sequence: Synthetic peptide
SVLDVGDAYF

SEQ ID NO: 17442 - protein, 9 aa, synthetic construct
  REGION 1..9: note = Description of Artificial Sequence: Synthetic peptide
YQLETEPIV

SEQ ID NO: 17443 - protein, 10 aa, synthetic construct
  REGION 1..10: note = Description of Artificial Sequence: Synthetic peptide
KLVPVDPQEV

SEQ ID NO: 17444 - protein, 9 aa, synthetic construct
  REGION 1..9: note = Description of Artificial Sequence: Synthetic peptide
AVAEGTDRI

SEQ ID NO: 17445 - protein, 9 aa, synthetic construct
  REGION 1..9: note = Description of Artificial Sequence: Synthetic peptide
MIVGGIIGL

SEQ ID NO: 17446 - protein, 9 aa, synthetic construct
  REGION 1..9: note = Description of Artificial Sequence: Synthetic peptide
AALDLSHFL

SEQ ID NO: 17447 - protein, 9 aa, synthetic construct
  REGION 1..9: note = Description of Artificial Sequence: Synthetic peptide
SLFGSDPLL

SEQ ID NO: 17448 - protein, 10 aa, synthetic construct
  REGION 1..10: note = Description of Artificial Sequence: Synthetic peptide
KLIPVDPQEV

SEQ ID NO: 17449 - protein, 10 aa, synthetic construct
  REGION 1..10: note = Description of Artificial Sequence: Synthetic peptide
YVDNGTNVTL

SEQ ID NO: 17450 - protein, 10 aa, synthetic construct
  REGION 1..10: note = Description of Artificial Sequence: Synthetic peptide
FLDGIDKAQV

SEQ ID NO: 17451 - protein, 9 aa, synthetic construct
  REGION 1..9: note = Description of Artificial Sequence: Synthetic peptide
YVDRFFKTL

SEQ ID NO: 17452 - protein, 9 aa, synthetic construct
  REGION 1..9: note = Description of Artificial Sequence: Synthetic peptide
FLPLVWEDL

SEQ ID NO: 17453 - protein, 9 aa, synthetic construct
  REGION 1..9: note = Description of Artificial Sequence: Synthetic peptide
YTDEIYRLL

SEQ ID NO: 17454 - protein, 9 aa, synthetic construct
  REGION 1..9: note = Description of Artificial Sequence: Synthetic peptide
FLPVVWDDL

SEQ ID NO: 17455 - protein, 9 aa, synthetic construct
  REGION 1..9: note = Description of Artificial Sequence: Synthetic peptide
FLPIVWDDL

SEQ ID NO: 17456 - protein, 10 aa, synthetic construct
  REGION 1..10: note = Description of Artificial Sequence: Synthetic peptide
TLWQRPIVTV

SEQ ID NO: 17457 - protein, 9 aa, synthetic construct
  REGION 1..9: note = Description of Artificial Sequence: Synthetic peptide
SLDEIWDNM

SEQ ID NO: 17458 - protein, 9 aa, synthetic construct
  REGION 1..9: note = Description of Artificial Sequence: Synthetic peptide
TLYNVVNQL

SEQ ID NO: 17459 - protein, 9 aa, synthetic construct
  REGION 1..9: note = Description of Artificial Sequence: Synthetic peptide
AVLSIVNRV

SEQ ID NO: 17460 - protein, 9 aa, synthetic construct
  REGION 1..9: note = Description of Artificial Sequence: Synthetic peptide
QLTEVVQKI

SEQ ID NO: 17461 - protein, 10 aa, synthetic construct
  REGION 1..10: note = Description of Artificial Sequence: Synthetic peptide
TLWQRPLVTV

SEQ ID NO: 17462 - protein, 10 aa, synthetic construct
  REGION 1..10: note = Description of Artificial Sequence: Synthetic peptide
RLDTLEKIRL

SEQ ID NO: 17463 - protein, 9 aa, synthetic construct
  REGION 1..9: note = Description of Artificial Sequence: Synthetic peptide
ILREPVHGV

SEQ ID NO: 17464 - protein, 9 aa, synthetic construct
  REGION 1..9: note = Description of Artificial Sequence: Synthetic peptide
ILREPIHGV

SEQ ID NO: 17465 - protein, 9 aa, synthetic construct
  REGION 1..9: note = Description of Artificial Sequence: Synthetic peptide
YVDRFFRVL

SEQ ID NO: 17466 - protein, 9 aa, synthetic construct
  REGION 1..9: note = Description of Artificial Sequence: Synthetic peptide
TVLSIINSV

SEQ ID NO: 17467 - protein, 9 aa, synthetic construct
  REGION 1..9: note = Description of Artificial Sequence: Synthetic peptide
FSPEVIPMF

SEQ ID NO: 17468 - protein, 9 aa, synthetic construct
  REGION 1..9: note = Description of Artificial Sequence: Synthetic peptide
VLAEAMSQV

SEQ ID NO: 17469 - protein, 9 aa, synthetic construct
  REGION 1..9: note = Description of Artificial Sequence: Synthetic peptide
HLEGKIILV

SEQ ID NO: 17470 - protein, 9 aa, synthetic construct
  REGION 1..9: note = Description of Artificial Sequence: Synthetic peptide
GTDGIIVIV

SEQ ID NO: 17471 - protein, 9 aa, synthetic construct
  REGION 1..9: note = Description of Artificial Sequence: Synthetic peptide
YTEEIYRLL

SEQ ID NO: 17472 - protein, 9 aa, synthetic construct
  REGION 1..9: note = Description of Artificial Sequence: Synthetic peptide
HLEGKVILV

SEQ ID NO: 17473 - protein, 10 aa, synthetic construct
  REGION 1..10: note = Description of Artificial Sequence: Synthetic peptide
KLIPVDPQEV

SEQ ID NO: 17474 - protein, 9 aa, synthetic construct
  REGION 1..9: note = Description of Artificial Sequence: Synthetic peptide
IVIRTVELL

SEQ ID NO: 17475 - protein, 9 aa, synthetic construct
  REGION 1..9: note = Description of Artificial Sequence: Synthetic peptide
KQVGTLQYL

SEQ ID NO: 17476 - protein, 9 aa, synthetic construct
  REGION 1..9: note = Description of Artificial Sequence: Synthetic peptide
IVARTVELL

SEQ ID NO: 17477 - protein, 10 aa, synthetic construct
  REGION 1..10: note = Description of Artificial Sequence: Synthetic peptide
KVVKIEPLGV

SEQ ID NO: 17478 - protein, 9 aa, synthetic construct
  REGION 1..9: note = Description of Artificial Sequence: Synthetic peptide
KQISQIQKF

SEQ ID NO: 17479 - protein, 9 aa, synthetic construct
  REGION 1..9: note = Description of Artificial Sequence: Synthetic peptide
IVVRTVELL

SEQ ID NO: 17480 - protein, 9 aa, synthetic construct
  REGION 1..9: note = Description of Artificial Sequence: Synthetic peptide
EVIGNIRQA

SEQ ID NO: 17481 - protein, 9 aa, synthetic construct
  REGION 1..9: note = Description of Artificial Sequence: Synthetic peptide
AIIRTLQQL

SEQ ID NO: 17482 - protein, 9 aa, synthetic construct
  REGION 1..9: note = Description of Artificial Sequence: Synthetic peptide
KQISNIQKF

SEQ ID NO: 17483 - protein, 9 aa, synthetic construct
  REGION 1..9: note = Description of Artificial Sequence: Synthetic peptide
KTKPPLPSV

SEQ ID NO: 17484 - protein, 9 aa, synthetic construct
  REGION 1..9: note = Description of Artificial Sequence: Synthetic peptide
RIIEIVQRA

SEQ ID NO: 17485 - protein, 9 aa, synthetic construct
  REGION 1..9: note = Description of Artificial Sequence: Synthetic peptide
KVVSLTETT

SEQ ID NO: 17486 - protein, 9 aa, synthetic construct
  REGION 1..9: note = Description of Artificial Sequence: Synthetic peptide
RQIDNYTEV

SEQ ID NO: 17487 - protein, 9 aa, synthetic construct
  REGION 1..9: note = Description of Artificial Sequence: Synthetic peptide
WTVNDIQKL

SEQ ID NO: 17488 - protein, 10 aa, synthetic construct
  REGION 1..10: note = Description of Artificial Sequence: Synthetic peptide
KTLQQIATQL

SEQ ID NO: 17489 - protein, 10 aa, synthetic construct
  REGION 1..10: note = Description of Artificial Sequence: Synthetic peptide
KLIPVDPQEV

SEQ ID NO: 17490 - protein, 9 aa, synthetic construct
  REGION 1..9: note = Description of Artificial Sequence: Synthetic peptide
QLTEVVQKI

SEQ ID NO: 17491 - protein, 9 aa, synthetic construct
  REGION 1..9: note = Description of Artificial Sequence: Synthetic peptide
ALTRILQQL

SEQ ID NO: 17492 - protein, 9 aa, synthetic construct
  REGION 1..9: note = Description of Artificial Sequence: Synthetic peptide
NQVGSLQYL

SEQ ID NO: 17493 - protein, 9 aa, synthetic construct
  REGION 1..9: note = Description of Artificial Sequence: Synthetic peptide
AVLSIVNRV

SEQ ID NO: 17494 - protein, 9 aa, synthetic construct
  REGION 1..9: note = Description of Artificial Sequence: Synthetic peptide
RIIELVQRA

SEQ ID NO: 17495 - protein, 9 aa, synthetic construct
  REGION 1..9: note = Description of Artificial Sequence: Synthetic peptide
TVLSIINSV

SEQ ID NO: 17496 - protein, 9 aa, synthetic construct
  REGION 1..9: note = Description of Artificial Sequence: Synthetic peptide
KIKPPLPSV

SEQ ID NO: 17497 - protein, 9 aa, synthetic construct
  REGION 1..9: note = Description of Artificial Sequence: Synthetic peptide
RTKPPLPSV

SEQ ID NO: 17498 - protein, 9 aa, synthetic construct
  REGION 1..9: note = Description of Artificial Sequence: Synthetic peptide
YIIGIGIGA

SEQ ID NO: 17499 - protein, 9 aa, synthetic construct
  REGION 1..9: note = Description of Artificial Sequence: Synthetic peptide
KVVALTETT

SEQ ID NO: 17500 - protein, 9 aa, synthetic construct
  REGION 1..9: note = Description of Artificial Sequence: Synthetic peptide
VLAEAMSQV

SEQ ID NO: 17501 - protein, 9 aa, synthetic construct
  REGION 1..9: note = Description of Artificial Sequence: Synthetic peptide
FTSGAVKAA

SEQ ID NO: 17502 - protein, 10 aa, synthetic construct
  REGION 1..10: note = Description of Artificial Sequence: Synthetic peptide
GEVIGNIRQA

SEQ ID NO: 17503 - protein, 10 aa, synthetic construct
  REGION 1..10: note = Description of Artificial Sequence: Synthetic peptide
RVLAEAMSQV

SEQ ID NO: 17504 - protein, 9 aa, synthetic construct
  REGION 1..9: note = Description of Artificial Sequence: Synthetic peptide
ALIRTLQQL

SEQ ID NO: 17505 - protein, 9 aa, synthetic construct
  REGION 1..9: note = Description of Artificial Sequence: Synthetic peptide
TLYNVVNQL

SEQ ID NO: 17506 - protein, 9 aa, synthetic construct
  REGION 1..9: note = Description of Artificial Sequence: Synthetic peptide
LETEPIVGA

SEQ ID NO: 17507 - protein, 9 aa, synthetic construct
  REGION 1..9: note = Description of Artificial Sequence: Synthetic peptide
IEVKDTKEA

SEQ ID NO: 17508 - protein, 10 aa, synthetic construct
  REGION 1..10: note = Description of Artificial Sequence: Synthetic peptide
KTLYNVVNQL

SEQ ID NO: 17509 - protein, 9 aa, synthetic construct
  REGION 1..9: note = Description of Artificial Sequence: Synthetic peptide
LTFGYVADL

SEQ ID NO: 17510 - protein, 10 aa, synthetic construct
  REGION 1..10: note = Description of Artificial Sequence: Synthetic peptide
KTGTEDLQSL

SEQ ID NO: 17511 - protein, 11 aa, synthetic construct
  REGION 1..11: note = Description of Artificial Sequence: Synthetic peptide
SVLSGGRLDTL

SEQ ID NO: 17512 - protein, 9 aa, synthetic construct
  REGION 1..9: note = Description of Artificial Sequence: Synthetic peptide
VVKIEPLGV

SEQ ID NO: 17513 - protein, 9 aa, synthetic construct
  REGION 1..9: note = Description of Artificial Sequence: Synthetic peptide
QIYPNIKVK

SEQ ID NO: 17514 - protein, 9 aa, synthetic construct
  REGION 1..9: note = Description of Artificial Sequence: Synthetic peptide
ASAAIMMQK

SEQ ID NO: 17515 - protein, 9 aa, synthetic construct
  REGION 1..9: note = Description of Artificial Sequence: Synthetic peptide
SVNATNVTK

SEQ ID NO: 17516 - protein, 9 aa, synthetic construct
  REGION 1..9: note = Description of Artificial Sequence: Synthetic peptide
ALTALVTPK

SEQ ID NO: 17517 - protein, 10 aa, synthetic construct
  REGION 1..10: note = Description of Artificial Sequence: Synthetic peptide
ALTDVVPLTK

SEQ ID NO: 17518 - protein, 9 aa, synthetic construct
  REGION 1..9: note = Description of Artificial Sequence: Synthetic peptide
AIFQSSMTK

SEQ ID NO: 17519 - protein, 9 aa, synthetic construct
  REGION 1..9: note = Description of Artificial Sequence: Synthetic peptide
AIFQNSMTK

SEQ ID NO: 17520 - protein, 11 aa, synthetic construct
  REGION 1..11: note = Description of Artificial Sequence: Synthetic peptide
ALNKVKEIQNK

SEQ ID NO: 17521 - protein, 10 aa, synthetic construct
  REGION 1..10: note = Description of Artificial Sequence: Synthetic peptide
NTNTAIMMQK

SEQ ID NO: 17522 - protein, 10 aa, synthetic construct
  REGION 1..10: note = Description of Artificial Sequence: Synthetic peptide
GTNFTSTAVK

SEQ ID NO: 17523 - protein, 9 aa, synthetic construct
  REGION 1..9: note = Description of Artificial Sequence: Synthetic peptide
SVIKQACPK

SEQ ID NO: 17524 - protein, 10 aa, synthetic construct
  REGION 1..10: note = Description of Artificial Sequence: Synthetic peptide
ALTDIIPLTK

SEQ ID NO: 17525 - protein, 9 aa, synthetic construct
  REGION 1..9: note = Description of Artificial Sequence: Synthetic peptide
ALTALISPK

SEQ ID NO: 17526 - protein, 9 aa, synthetic construct
  REGION 1..9: note = Description of Artificial Sequence: Synthetic peptide
ALTALVAPK

SEQ ID NO: 17527 - protein, 9 aa, synthetic construct
  REGION 1..9: note = Description of Artificial Sequence: Synthetic peptide
ANAAIMMQK

SEQ ID NO: 17528 - protein, 10 aa, synthetic construct
  REGION 1..10: note = Description of Artificial Sequence: Synthetic peptide
NMNTAIMVQK

SEQ ID NO: 17529 - protein, 10 aa, synthetic construct
  REGION 1..10: note = Description of Artificial Sequence: Synthetic peptide
KTKPPLPSVK

SEQ ID NO: 17530 - protein, 9 aa, synthetic construct
  REGION 1..9: note = Description of Artificial Sequence: Synthetic peptide
QIYPGIKVR

SEQ ID NO: 17531 - protein, 10 aa, synthetic construct
  REGION 1..10: note = Description of Artificial Sequence: Synthetic peptide
QVAIEIFGKK

SEQ ID NO: 17532 - protein, 9 aa, synthetic construct
  REGION 1..9: note = Description of Artificial Sequence: Synthetic peptide
SISKQPLSR

SEQ ID NO: 17533 - protein, 10 aa, synthetic construct
  REGION 1..10: note = Description of Artificial Sequence: Synthetic peptide
TVYYGVPVWK

SEQ ID NO: 17534 - protein, 11 aa, synthetic construct
  REGION 1..11: note = Description of Artificial Sequence: Synthetic peptide
TVNDIQKLVGK

SEQ ID NO: 17535 - protein, 10 aa, synthetic construct
  REGION 1..10: note = Description of Artificial Sequence: Synthetic peptide
TLIPKQPLSR

SEQ ID NO: 17536 - protein, 11 aa, synthetic construct
  REGION 1..11: note = Description of Artificial Sequence: Synthetic peptide
KALTDVVPLTK

SEQ ID NO: 17537 - protein, 11 aa, synthetic construct
  REGION 1..11: note = Description of Artificial Sequence: Synthetic peptide
RTKPPLPSVRK

SEQ ID NO: 17538 - protein, 11 aa, synthetic construct
  REGION 1..11: note = Description of Artificial Sequence: Synthetic peptide
SLQDHQTLIPK

SEQ ID NO: 17539 - protein, 11 aa, synthetic construct
  REGION 1..11: note = Description of Artificial Sequence: Synthetic peptide
KTKPPLPSVKK

SEQ ID NO: 17540 - protein, 8 aa, synthetic construct
  REGION 1..8: note = Description of Artificial Sequence: Synthetic peptide
SAAIMMQK

SEQ ID NO: 17541 - protein, 10 aa, synthetic construct
  REGION 1..10: note = Description of Artificial Sequence: Synthetic peptide
SLFGNDPLSQ

SEQ ID NO: 17542 - protein, 10 aa, synthetic construct
  REGION 1..10: note = Description of Artificial Sequence: Synthetic peptide
ALTEIVPLTK

SEQ ID NO: 17543 - protein, 9 aa, synthetic construct
  REGION 1..9: note = Description of Artificial Sequence: Synthetic peptide
SVITQACPK

SEQ ID NO: 17544 - protein, 9 aa, synthetic construct
  REGION 1..9: note = Description of Artificial Sequence: Synthetic peptide
SVNATNVTK

SEQ ID NO: 17545 - protein, 11 aa, synthetic construct
  REGION 1..11: note = Description of Artificial Sequence: Synthetic peptide
TVNDIQKLVGK

SEQ ID NO: 17546 - protein, 11 aa, synthetic construct
  REGION 1..11: note = Description of Artificial Sequence: Synthetic peptide
GLQDNQDPIPK

SEQ ID NO: 17547 - protein, 9 aa, synthetic construct
  REGION 1..9: note = Description of Artificial Sequence: Synthetic peptide
QIYPNIKVK

SEQ ID NO: 17548 - protein, 9 aa, synthetic construct
  REGION 1..9: note = Description of Artificial Sequence: Synthetic peptide
ASAAIMMQK

SEQ ID NO: 17549 - protein, 9 aa, synthetic construct
  REGION 1..9: note = Description of Artificial Sequence: Synthetic peptide
ALTALVTPK

SEQ ID NO: 17550 - protein, 11 aa, synthetic construct
  REGION 1..11: note = Description of Artificial Sequence: Synthetic peptide
ALNKVKEIQNK

SEQ ID NO: 17551 - protein, 11 aa, synthetic construct
  REGION 1..11: note = Description of Artificial Sequence: Synthetic peptide
SLQDHQNSISK

SEQ ID NO: 17552 - protein, 10 aa, synthetic construct
  REGION 1..10: note = Description of Artificial Sequence: Synthetic peptide
NTNTAIMMQK

SEQ ID NO: 17553 - protein, 10 aa, synthetic construct
  REGION 1..10: note = Description of Artificial Sequence: Synthetic peptide
GTNFTSTAVK

SEQ ID NO: 17554 - protein, 11 aa, synthetic construct
  REGION 1..11: note = Description of Artificial Sequence: Synthetic peptide
VVALTETTNQK

SEQ ID NO: 17555 - protein, 10 aa, synthetic construct
  REGION 1..10: note = Description of Artificial Sequence: Synthetic peptide
ALTDVVPLTK

SEQ ID NO: 17556 - protein, 11 aa, synthetic construct
  REGION 1..11: note = Description of Artificial Sequence: Synthetic peptide
KIEPLGIAPTK

SEQ ID NO: 17557 - protein, 10 aa, synthetic construct
  REGION 1..10: note = Description of Artificial Sequence: Synthetic peptide
TVQPVKLPEK

SEQ ID NO: 17558 - protein, 10 aa, synthetic construct
  REGION 1..10: note = Description of Artificial Sequence: Synthetic peptide
NMNTAIMVQK

SEQ ID NO: 17559 - protein, 10 aa, synthetic construct
  REGION 1..10: note = Description of Artificial Sequence: Synthetic peptide
ALTDIIPLTK

SEQ ID NO: 17560 - protein, 9 aa, synthetic construct
  REGION 1..9: note = Description of Artificial Sequence: Synthetic peptide
AIFQNSMTK

SEQ ID NO: 17561 - protein, 9 aa, synthetic construct
  REGION 1..9: note = Description of Artificial Sequence: Synthetic peptide
AIFQSSMTK

SEQ ID NO: 17562 - protein, 9 aa, synthetic construct
  REGION 1..9: note = Description of Artificial Sequence: Synthetic peptide
GLDGLIYSK

SEQ ID NO: 17563 - protein, 10 aa, synthetic construct
  REGION 1..10: note = Description of Artificial Sequence: Synthetic peptide
ILGQLQPALK

SEQ ID NO: 17564 - protein, 9 aa, synthetic construct
  REGION 1..9: note = Description of Artificial Sequence: Synthetic peptide
SVIKQACPK

SEQ ID NO: 17565 - protein, 9 aa, synthetic construct
  REGION 1..9: note = Description of Artificial Sequence: Synthetic peptide
ALTALVAPK

SEQ ID NO: 17566 - protein, 10 aa, synthetic construct
  REGION 1..10: note = Description of Artificial Sequence: Synthetic peptide
TVQTVKLPEK

SEQ ID NO: 17567 - protein, 10 aa, synthetic construct
  REGION 1..10: note = Description of Artificial Sequence: Synthetic peptide
GSNFTSAAVK

SEQ ID NO: 17568 - protein, 11 aa, synthetic construct
  REGION 1..11: note = Description of Artificial Sequence: Synthetic peptide
SLQDHQTLIPK

SEQ ID NO: 17569 - protein, 11 aa, synthetic construct
  REGION 1..11: note = Description of Artificial Sequence: Synthetic peptide
QIEPLGIAPTK

SEQ ID NO: 17570 - protein, 10 aa, synthetic construct
  REGION 1..10: note = Description of Artificial Sequence: Synthetic peptide
GSNFTSGAVK

SEQ ID NO: 17571 - protein, 11 aa, synthetic construct
  REGION 1..11: note = Description of Artificial Sequence: Synthetic peptide
VVSLTETTNQK

SEQ ID NO: 17572 - protein, 9 aa, synthetic construct
  REGION 1..9: note = Description of Artificial Sequence: Synthetic peptide
ALTALISPK

SEQ ID NO: 17573 - protein, 11 aa, synthetic construct
  REGION 1..11: note = Description of Artificial Sequence: Synthetic peptide
IVSLTETTNQK

SEQ ID NO: 17574 - protein, 11 aa, synthetic construct
  REGION 1..11: note = Description of Artificial Sequence: Synthetic peptide
EVQDTSEALNK

SEQ ID NO: 17575 - protein, 9 aa, synthetic construct
  REGION 1..9: note = Description of Artificial Sequence: Synthetic peptide
SVITQACPK

SEQ ID NO: 17576 - protein, 9 aa, synthetic construct
  REGION 1..9: note = Description of Artificial Sequence: Synthetic peptide
APAGFAILK

SEQ ID NO: 17577 - protein, 11 aa, synthetic construct
  REGION 1..11: note = Description of Artificial Sequence: Synthetic peptide
TLQQIATQLSK

SEQ ID NO: 17578 - protein, 11 aa, synthetic construct
  REGION 1..11: note = Description of Artificial Sequence: Synthetic peptide
ATDIPTKELQK

SEQ ID NO: 17579 - protein, 9 aa, synthetic construct
  REGION 1..9: note = Description of Artificial Sequence: Synthetic peptide
KTQQATANK

SEQ ID NO: 17580 - protein, 10 aa, synthetic construct
  REGION 1..10: note = Description of Artificial Sequence: Synthetic peptide
SSVNATNVTK

SEQ ID NO: 17581 - protein, 9 aa, synthetic construct
  REGION 1..9: note = Description of Artificial Sequence: Synthetic peptide
KQLTEVVQK

SEQ ID NO: 17582 - protein, 11 aa, synthetic construct
  REGION 1..11: note = Description of Artificial Sequence: Synthetic peptide
QSQGVVESMNK

SEQ ID NO: 17583 - protein, 10 aa, synthetic construct
  REGION 1..10: note = Description of Artificial Sequence: Synthetic peptide
ALTEIVPLTK

SEQ ID NO: 17584 - protein, 9 aa, synthetic construct
  REGION 1..9: note = Description of Artificial Sequence: Synthetic peptide
QVAIEIFGK

SEQ ID NO: 17585 - protein, 11 aa, synthetic construct
  REGION 1..11: note = Description of Artificial Sequence: Synthetic peptide
SVQDHQNHIPK

SEQ ID NO: 17586 - protein, 10 aa, synthetic construct
  REGION 1..10: note = Description of Artificial Sequence: Synthetic peptide
KIEEIQNKNK

SEQ ID NO: 17587 - protein, 10 aa, synthetic construct
  REGION 1..10: note = Description of Artificial Sequence: Synthetic peptide
HTNYTSNDTK

SEQ ID NO: 17588 - protein, 9 aa, synthetic construct
  REGION 1..9: note = Description of Artificial Sequence: Synthetic peptide
ALTETTNQK

SEQ ID NO: 17589 - protein, 11 aa, synthetic construct
  REGION 1..11: note = Description of Artificial Sequence: Synthetic peptide
RTQQAPAAADK

SEQ ID NO: 17590 - protein, 9 aa, synthetic construct
  REGION 1..9: note = Description of Artificial Sequence: Synthetic peptide
IIATDIPTK

SEQ ID NO: 17591 - protein, 9 aa, synthetic construct
  REGION 1..9: note = Description of Artificial Sequence: Synthetic peptide
IIATDIQTK

SEQ ID NO: 17592 - protein, 9 aa, synthetic construct
  REGION 1..9: note = Description of Artificial Sequence: Synthetic peptide
GLEGLVYSK

SEQ ID NO: 17593 - protein, 11 aa, synthetic construct
  REGION 1..11: note = Description of Artificial Sequence: Synthetic peptide
KALTDVVPLTK

SEQ ID NO: 17594 - protein, 10 aa, synthetic construct
  REGION 1..10: note = Description of Artificial Sequence: Synthetic peptide
ATESIVIWGK

SEQ ID NO: 17595 - protein, 9 aa, synthetic construct
  REGION 1..9: note = Description of Artificial Sequence: Synthetic peptide
QVAIEICGK

SEQ ID NO: 17596 - protein, 9 aa, synthetic construct
  REGION 1..9: note = Description of Artificial Sequence: Synthetic peptide
KLVSSGVRK

SEQ ID NO: 17597 - protein, 9 aa, synthetic construct
  REGION 1..9: note = Description of Artificial Sequence: Synthetic peptide
SNFTSGAVK

SEQ ID NO: 17598 - protein, 9 aa, synthetic construct
  REGION 1..9: note = Description of Artificial Sequence: Synthetic peptide
KQLTEAVQK

SEQ ID NO: 17599 - protein, 11 aa, synthetic construct
  REGION 1..11: note = Description of Artificial Sequence: Synthetic peptide
ATDIQTKELQK

SEQ ID NO: 17600 - protein, 10 aa, synthetic construct
  REGION 1..10: note = Description of Artificial Sequence: Synthetic peptide
SILDIKQGPK

SEQ ID NO: 17601 - protein, 8 aa, synthetic construct
  REGION 1..8: note = Description of Artificial Sequence: Synthetic peptide
SAAIMMQK

SEQ ID NO: 17602 - protein, 10 aa, synthetic construct
  REGION 1..10: note = Description of Artificial Sequence: Synthetic peptide
VVESMNKELK

SEQ ID NO: 17603 - protein, 10 aa, synthetic construct
  REGION 1..10: note = Description of Artificial Sequence: Synthetic peptide
QVAIEIFGKK

SEQ ID NO: 17604 - protein, 9 aa, synthetic construct
  REGION 1..9: note = Description of Artificial Sequence: Synthetic peptide
SVNATNVTK

SEQ ID NO: 17605 - protein, 9 aa, synthetic construct
  REGION 1..9: note = Description of Artificial Sequence: Synthetic peptide
ASAAIMMQK

SEQ ID NO: 17606 - protein, 9 aa, synthetic construct
  REGION 1..9: note = Description of Artificial Sequence: Synthetic peptide
QIYPNIKVK

SEQ ID NO: 17607 - protein, 10 aa, synthetic construct
  REGION 1..10: note = Description of Artificial Sequence: Synthetic peptide
SSVNATNVTK

SEQ ID NO: 17608 - protein, 11 aa, synthetic construct
  REGION 1..11: note = Description of Artificial Sequence: Synthetic peptide
ATDIPTKELQK

SEQ ID NO: 17609 - protein, 9 aa, synthetic construct
  REGION 1..9: note = Description of Artificial Sequence: Synthetic peptide
SVITQACPK

SEQ ID NO: 17610 - protein, 10 aa, synthetic construct
  REGION 1..10: note = Description of Artificial Sequence: Synthetic peptide
NTNTAIMMQK

SEQ ID NO: 17611 - protein, 9 aa, synthetic construct
  REGION 1..9: note = Description of Artificial Sequence: Synthetic peptide
SVIKQACPK

SEQ ID NO: 17612 - protein, 9 aa, synthetic construct
  REGION 1..9: note = Description of Artificial Sequence: Synthetic peptide
STPIFAIKK

SEQ ID NO: 17613 - protein, 11 aa, synthetic construct
  REGION 1..11: note = Description of Artificial Sequence: Synthetic peptide
TVNDIQKLVGK

SEQ ID NO: 17614 - protein, 10 aa, synthetic construct
  REGION 1..10: note = Description of Artificial Sequence: Synthetic peptide
TVQTVKLPEK

SEQ ID NO: 17615 - protein, 10 aa, synthetic construct
  REGION 1..10: note = Description of Artificial Sequence: Synthetic peptide
GTNFTSTAVK

SEQ ID NO: 17616 - protein, 9 aa, synthetic construct
  REGION 1..9: note = Description of Artificial Sequence: Synthetic peptide
APAGFAILK

SEQ ID NO: 17617 - protein, 10 aa, synthetic construct
  REGION 1..10: note = Description of Artificial Sequence: Synthetic peptide
GSNFTSGAVK

SEQ ID NO: 17618 - protein, 10 aa, synthetic construct
  REGION 1..10: note = Description of Artificial Sequence: Synthetic peptide
TVQPVKLPEK

SEQ ID NO: 17619 - protein, 11 aa, synthetic construct
  REGION 1..11: note = Description of Artificial Sequence: Synthetic peptide
SVQDHQNHIPK

SEQ ID NO: 17620 - protein, 11 aa, synthetic construct
  REGION 1..11: note = Description of Artificial Sequence: Synthetic peptide
GTDGIIVIVQR

SEQ ID NO: 17621 - protein, 10 aa, synthetic construct
  REGION 1..10: note = Description of Artificial Sequence: Synthetic peptide
GSNFTSAAVK

SEQ ID NO: 17622 - protein, 8 aa, synthetic construct
  REGION 1..8: note = Description of Artificial Sequence: Synthetic peptide
SAAIMMQK

SEQ ID NO: 17623 - protein, 11 aa, synthetic construct
  REGION 1..11: note = Description of Artificial Sequence: Synthetic peptide
VVALTETTNQK

SEQ ID NO: 17624 - protein, 11 aa, synthetic construct
  REGION 1..11: note = Description of Artificial Sequence: Synthetic peptide
ATDIQTKELQK

SEQ ID NO: 17625 - protein, 10 aa, synthetic construct
  REGION 1..10: note = Description of Artificial Sequence: Synthetic peptide
GGLDGLIYSK

SEQ ID NO: 17626 - protein, 9 aa, synthetic construct
  REGION 1..9: note = Description of Artificial Sequence: Synthetic peptide
AIFQNSMTK

SEQ ID NO: 17627 - protein, 9 aa, synthetic construct
  REGION 1..9: note = Description of Artificial Sequence: Synthetic peptide
AIFQSSMTK

SEQ ID NO: 17628 - protein, 9 aa, synthetic construct
  REGION 1..9: note = Description of Artificial Sequence: Synthetic peptide
STILGTGTK

SEQ ID NO: 17629 - protein, 10 aa, synthetic construct
  REGION 1..10: note = Description of Artificial Sequence: Synthetic peptide
ALTDVVPLTK

SEQ ID NO: 17630 - protein, 9 aa, synthetic construct
  REGION 1..9: note = Description of Artificial Sequence: Synthetic peptide
ALTALVTPK

SEQ ID NO: 17631 - protein, 10 aa, synthetic construct
  REGION 1..10: note = Description of Artificial Sequence: Synthetic peptide
ATGDIIGNIR

SEQ ID NO: 17632 - protein, 10 aa, synthetic construct
  REGION 1..10: note = Description of Artificial Sequence: Synthetic peptide
ATESIVIWGK

SEQ ID NO: 17633 - protein, 9 aa, synthetic construct
  REGION 1..9: note = Description of Artificial Sequence: Synthetic peptide
LTDIIPLTK

SEQ ID NO: 17634 - protein, 9 aa, synthetic construct
  REGION 1..9: note = Description of Artificial Sequence: Synthetic peptide
ALTALISPK

SEQ ID NO: 17635 - protein, 9 aa, synthetic construct
  REGION 1..9: note = Description of Artificial Sequence: Synthetic peptide
LTDVVPLTK

SEQ ID NO: 17636 - protein, 9 aa, synthetic construct
  REGION 1..9: note = Description of Artificial Sequence: Synthetic peptide
KQLTEVVQK

SEQ ID NO: 17637 - protein, 11 aa, synthetic construct
  REGION 1..11: note = Description of Artificial Sequence: Synthetic peptide
GLQDNQDPIPK

SEQ ID NO: 17638 - protein, 11 aa, synthetic construct
  REGION 1..11: note = Description of Artificial Sequence: Synthetic peptide
VVSLTETTNQK

SEQ ID NO: 17639 - protein, 11 aa, synthetic construct
  REGION 1..11: note = Description of Artificial Sequence: Synthetic peptide
EVQDTSEALNK

SEQ ID NO: 17640 - protein, 10 aa, synthetic construct
  REGION 1..10: note = Description of Artificial Sequence: Synthetic peptide
AALDLSHFLK

SEQ ID NO: 17641 - protein, 10 aa, synthetic construct
  REGION 1..10: note = Description of Artificial Sequence: Synthetic peptide
GALDLSHFLK

SEQ ID NO: 17642 - protein, 8 aa, synthetic construct
  REGION 1..8: note = Description of Artificial Sequence: Synthetic peptide
TDVVPLTK

SEQ ID NO: 17643 - protein, 10 aa, synthetic construct
  REGION 1..10: note = Description of Artificial Sequence: Synthetic peptide
ALTDIIPLTK

SEQ ID NO: 17644 - protein, 11 aa, synthetic construct
  REGION 1..11: note = Description of Artificial Sequence: Synthetic peptide
GVVESMNKELK

SEQ ID NO: 17645 - protein, 9 aa, synthetic construct
  REGION 1..9: note = Description of Artificial Sequence: Synthetic peptide
ANAAIMMQK

SEQ ID NO: 17646 - protein, 10 aa, synthetic construct
  REGION 1..10: note = Description of Artificial Sequence: Synthetic peptide
GAFDLSHFLK

SEQ ID NO: 17647 - protein, 9 aa, synthetic construct
  REGION 1..9: note = Description of Artificial Sequence: Synthetic peptide
GLDGLIYSK

SEQ ID NO: 17648 - protein, 9 aa, synthetic construct
  REGION 1..9: note = Description of Artificial Sequence: Synthetic peptide
ALTALVAPK

SEQ ID NO: 17649 - protein, 11 aa, synthetic construct
  REGION 1..11: note = Description of Artificial Sequence: Synthetic peptide
ATGDIIGDIRR

SEQ ID NO: 17650 - protein, 9 aa, synthetic construct
  REGION 1..9: note = Description of Artificial Sequence: Synthetic peptide
QIYPGIKVR

SEQ ID NO: 17651 - protein, 10 aa, synthetic construct
  REGION 1..10: note = Description of Artificial Sequence: Synthetic peptide
SILDIKQGPK

SEQ ID NO: 17652 - protein, 9 aa, synthetic construct
  REGION 1..9: note = Description of Artificial Sequence: Synthetic peptide
VAIEIFGKK

SEQ ID NO: 17653 - protein, 11 aa, synthetic construct
  REGION 1..11: note = Description of Artificial Sequence: Synthetic peptide
RYVDNGTNVTL

SEQ ID NO: 17654 - protein, 9 aa, synthetic construct
  REGION 1..9: note = Description of Artificial Sequence: Synthetic peptide
NYTEVIYRL

SEQ ID NO: 17655 - protein, 9 aa, synthetic construct
  REGION 1..9: note = Description of Artificial Sequence: Synthetic peptide
NYTDEIYRL

SEQ ID NO: 17656 - protein, 9 aa, synthetic construct
  REGION 1..9: note = Description of Artificial Sequence: Synthetic peptide
YFVNRTLIF

SEQ ID NO: 17657 - protein, 9 aa, synthetic construct
  REGION 1..9: note = Description of Artificial Sequence: Synthetic peptide
NYTEEIYRL

SEQ ID NO: 17658 - protein, 9 aa, synthetic construct
  REGION 1..9: note = Description of Artificial Sequence: Synthetic peptide
IYQEPFKNL

SEQ ID NO: 17659 - protein, 9 aa, synthetic construct
  REGION 1..9: note = Description of Artificial Sequence: Synthetic peptide
VLENVTETF

SEQ ID NO: 17660 - protein, 9 aa, synthetic construct
  REGION 1..9: note = Description of Artificial Sequence: Synthetic peptide
VMENVTESF

SEQ ID NO: 17661 - protein, 9 aa, synthetic construct
  REGION 1..9: note = Description of Artificial Sequence: Synthetic peptide
NITGLILTF

SEQ ID NO: 17662 - protein, 9 aa, synthetic construct
  REGION 1..9: note = Description of Artificial Sequence: Synthetic peptide
VLENVTENF

SEQ ID NO: 17663 - protein, 9 aa, synthetic construct
  REGION 1..9: note = Description of Artificial Sequence: Synthetic peptide
RYLKDQQLL

SEQ ID NO: 17664 - protein, 9 aa, synthetic construct
  REGION 1..9: note = Description of Artificial Sequence: Synthetic peptide
KQISQIQKF

SEQ ID NO: 17665 - protein, 9 aa, synthetic construct
  REGION 1..9: note = Description of Artificial Sequence: Synthetic peptide
RYLRDQQLL

SEQ ID NO: 17666 - protein, 9 aa, synthetic construct
  REGION 1..9: note = Description of Artificial Sequence: Synthetic peptide
KQISNIQKF

SEQ ID NO: 17667 - protein, 8 aa, synthetic construct
  REGION 1..8: note = Description of Artificial Sequence: Synthetic peptide
IEITSHTF

SEQ ID NO: 17668 - protein, 9 aa, synthetic construct
  REGION 1..9: note = Description of Artificial Sequence: Synthetic peptide
NYTEVIYRL

SEQ ID NO: 17669 - protein, 11 aa, synthetic construct
  REGION 1..11: note = Description of Artificial Sequence: Synthetic peptide
RYVDNGTNVTL

SEQ ID NO: 17670 - protein, 9 aa, synthetic construct
  REGION 1..9: note = Description of Artificial Sequence: Synthetic peptide
IYQEPFKNL

SEQ ID NO: 17671 - protein, 9 aa, synthetic construct
  REGION 1..9: note = Description of Artificial Sequence: Synthetic peptide
NYTEEIYRL

SEQ ID NO: 17672 - protein, 9 aa, synthetic construct
  REGION 1..9: note = Description of Artificial Sequence: Synthetic peptide
RYLKDQQLL

SEQ ID NO: 17673 - protein, 9 aa, synthetic construct
  REGION 1..9: note = Description of Artificial Sequence: Synthetic peptide
IYSAAGNLW

SEQ ID NO: 17674 - protein, 9 aa, synthetic construct
  REGION 1..9: note = Description of Artificial Sequence: Synthetic peptide
YFVNRTLIF

SEQ ID NO: 17675 - protein, 9 aa, synthetic construct
  REGION 1..9: note = Description of Artificial Sequence: Synthetic peptide
YYDPSKELI

SEQ ID NO: 17676 - protein, 9 aa, synthetic construct
  REGION 1..9: note = Description of Artificial Sequence: Synthetic peptide
NYTDEIYRL

SEQ ID NO: 17677 - protein, 9 aa, synthetic construct
  REGION 1..9: note = Description of Artificial Sequence: Synthetic peptide
IYNTYGDTW

SEQ ID NO: 17678 - protein, 9 aa, synthetic construct
  REGION 1..9: note = Description of Artificial Sequence: Synthetic peptide
RYLRDQQLL

SEQ ID NO: 17679 - protein, 9 aa, synthetic construct
  REGION 1..9: note = Description of Artificial Sequence: Synthetic peptide
YYDPSKDLI

SEQ ID NO: 17680 - protein, 10 aa, synthetic construct
  REGION 1..10: note = Description of Artificial Sequence: Synthetic peptide
DTINEEAAEW

SEQ ID NO: 17681 - protein, 9 aa, synthetic construct
  REGION 1..9: note = Description of Artificial Sequence: Synthetic peptide
EVIPMFSAL

SEQ ID NO: 17682 - protein, 9 aa, synthetic construct
  REGION 1..9: note = Description of Artificial Sequence: Synthetic peptide
ETQRNYPSL

SEQ ID NO: 17683 - protein, 9 aa, synthetic construct
  REGION 1..9: note = Description of Artificial Sequence: Synthetic peptide
EVIGNIRQA

SEQ ID NO: 17684 - protein, 10 aa, synthetic construct
  REGION 1..10: note = Description of Artificial Sequence: Synthetic peptide
MVMENVTESF

SEQ ID NO: 17685 - protein, 9 aa, synthetic construct
  REGION 1..9: note = Description of Artificial Sequence: Synthetic peptide
DIAGTTSTL

SEQ ID NO: 17686 - protein, 10 aa, synthetic construct
  REGION 1..10: note = Description of Artificial Sequence: Synthetic peptide
NTSGLFNSSW

SEQ ID NO: 17687 - protein, 9 aa, synthetic construct
  REGION 1..9: note = Description of Artificial Sequence: Synthetic peptide
NVTENFNMW

SEQ ID NO: 17688 - protein, 9 aa, synthetic construct
  REGION 1..9: note = Description of Artificial Sequence: Synthetic peptide
EVIYRLLEL

SEQ ID NO: 17689 - protein, 9 aa, synthetic construct
  REGION 1..9: note = Description of Artificial Sequence: Synthetic peptide
EAMSQMTNM

SEQ ID NO: 17690 - protein, 9 aa, synthetic construct
  REGION 1..9: note = Description of Artificial Sequence: Synthetic peptide
ETKIGRAGY

SEQ ID NO: 17691 - protein, 9 aa, synthetic construct
  REGION 1..9: note = Description of Artificial Sequence: Synthetic peptide
SVLDVGGAY

SEQ ID NO: 17692 - protein, 10 aa, synthetic construct
  REGION 1..10: note = Description of Artificial Sequence: Synthetic peptide
TVKLPEKDSW

SEQ ID NO: 17693 - protein, 10 aa, synthetic construct
  REGION 1..10: note = Description of Artificial Sequence: Synthetic peptide
EVNIVTDSQY

SEQ ID NO: 17694 - protein, 9 aa, synthetic construct
  REGION 1..9: note = Description of Artificial Sequence: Synthetic peptide
EVIGNIRQA

SEQ ID NO: 17695 - protein, 10 aa, synthetic construct
  REGION 1..10: note = Description of Artificial Sequence: Synthetic peptide
EVNIVTDSQY

SEQ ID NO: 17696 - protein, 9 aa, synthetic construct
  REGION 1..9: note = Description of Artificial Sequence: Synthetic peptide
ETKIGKAGY

SEQ ID NO: 17697 - protein, 9 aa, synthetic construct
  REGION 1..9: note = Description of Artificial Sequence: Synthetic peptide
EAMSQMTNM

SEQ ID NO: 17698 - protein, 9 aa, synthetic construct
  REGION 1..9: note = Description of Artificial Sequence: Synthetic peptide
EVIPMFSAL

SEQ ID NO: 17699 - protein, 9 aa, synthetic construct
  REGION 1..9: note = Description of Artificial Sequence: Synthetic peptide
ETKMGKAGY

SEQ ID NO: 17700 - protein, 9 aa, synthetic construct
  REGION 1..9: note = Description of Artificial Sequence: Synthetic peptide
ETKIGRAGY

SEQ ID NO: 17701 - protein, 9 aa, synthetic construct
  REGION 1..9: note = Description of Artificial Sequence: Synthetic peptide
ETKLGKAGY

SEQ ID NO: 17702 - protein, 9 aa, synthetic construct
  REGION 1..9: note = Description of Artificial Sequence: Synthetic peptide
ETPGIRYQY

SEQ ID NO: 17703 - protein, 10 aa, synthetic construct
  REGION 1..10: note = Description of Artificial Sequence: Synthetic peptide
EVIPAETGKE

SEQ ID NO: 17704 - protein, 9 aa, synthetic construct
  REGION 1..9: note = Description of Artificial Sequence: Synthetic peptide
DIIGNIRQA

SEQ ID NO: 17705 - protein, 9 aa, synthetic construct
  REGION 1..9: note = Description of Artificial Sequence: Synthetic peptide
QIATQLSKY

SEQ ID NO: 17706 - protein, 10 aa, synthetic construct
  REGION 1..10: note = Description of Artificial Sequence: Synthetic peptide
EVIPAETGQE

SEQ ID NO: 17707 - protein, 10 aa, synthetic construct
  REGION 1..10: note = Description of Artificial Sequence: Synthetic peptide
DIIGDIRRAY

SEQ ID NO: 17708 - protein, 9 aa, synthetic construct
  REGION 1..9: note = Description of Artificial Sequence: Synthetic peptide
SVLDVGGAY

SEQ ID NO: 17709 - protein, 9 aa, synthetic construct
  REGION 1..9: note = Description of Artificial Sequence: Synthetic peptide
DIIGDIRQA

SEQ ID NO: 17710 - protein, 10 aa, synthetic construct
  REGION 1..10: note = Description of Artificial Sequence: Synthetic peptide
EPIEGAETYY

SEQ ID NO: 17711 - protein, 9 aa, synthetic construct
  REGION 1..9: note = Description of Artificial Sequence: Synthetic peptide
EVIPAETGQ

SEQ ID NO: 17712 - protein, 9 aa, synthetic construct
  REGION 1..9: note = Description of Artificial Sequence: Synthetic peptide
NTKNIIVQF

SEQ ID NO: 17713 - protein, 10 aa, synthetic construct
  REGION 1..10: note = Description of Artificial Sequence: Synthetic peptide
EPIAGAETYY

SEQ ID NO: 17714 - protein, 9 aa, synthetic construct
  REGION 1..9: note = Description of Artificial Sequence: Synthetic peptide
NITGLILTY

SEQ ID NO: 17715 - protein, 9 aa, synthetic construct
  REGION 1..9: note = Description of Artificial Sequence: Synthetic peptide
EAMSQMTNM

SEQ ID NO: 17716 - protein, 9 aa, synthetic construct
  REGION 1..9: note = Description of Artificial Sequence: Synthetic peptide
EVIPMFSAL

SEQ ID NO: 17717 - protein, 9 aa, synthetic construct
  REGION 1..9: note = Description of Artificial Sequence: Synthetic peptide
EVIGNIRQA

SEQ ID NO: 17718 - protein, 9 aa, synthetic construct
  REGION 1..9: note = Description of Artificial Sequence: Synthetic peptide
NTKNIIVQF

SEQ ID NO: 17719 - protein, 10 aa, synthetic construct
  REGION 1..10: note = Description of Artificial Sequence: Synthetic peptide
EVNIVTDSQY

SEQ ID NO: 17720 - protein, 9 aa, synthetic construct
  REGION 1..9: note = Description of Artificial Sequence: Synthetic peptide
DIAGTTSTL

SEQ ID NO: 17721 - protein, 9 aa, synthetic construct
  REGION 1..9: note = Description of Artificial Sequence: Synthetic peptide
QIATQLSKY

SEQ ID NO: 17722 - protein, 10 aa, synthetic construct
  REGION 1..10: note = Description of Artificial Sequence: Synthetic peptide
MVMENVTESF

SEQ ID NO: 17723 - protein, 9 aa, synthetic construct
  REGION 1..9: note = Description of Artificial Sequence: Synthetic peptide
DTSEALNKV

SEQ ID NO: 17724 - protein, 9 aa, synthetic construct
  REGION 1..9: note = Description of Artificial Sequence: Synthetic peptide
EVIGNIRQA

SEQ ID NO: 17725 - protein, 9 aa, synthetic construct
  REGION 1..9: note = Description of Artificial Sequence: Synthetic peptide
EVIPMFSAL

SEQ ID NO: 17726 - protein, 9 aa, synthetic construct
  REGION 1..9: note = Description of Artificial Sequence: Synthetic peptide
EAMSQMTNM

SEQ ID NO: 17727 - protein, 9 aa, synthetic construct
  REGION 1..9: note = Description of Artificial Sequence: Synthetic peptide
DIIGNIRQA

SEQ ID NO: 17728 - protein, 9 aa, synthetic construct
  REGION 1..9: note = Description of Artificial Sequence: Synthetic peptide
DIIGDIRQA

SEQ ID NO: 17729 - protein, 11 aa, synthetic construct
  REGION 1..11: note = Description of Artificial Sequence: Synthetic peptide
ETYYIDGAANR

SEQ ID NO: 17730 - protein, 9 aa, synthetic construct
  REGION 1..9: note = Description of Artificial Sequence: Synthetic peptide
EVIPAETGK

SEQ ID NO: 17731 - protein, 10 aa, synthetic construct
  REGION 1..10: note = Description of Artificial Sequence: Synthetic peptide
EVTTHSFNCR

SEQ ID NO: 17732 - protein, 9 aa, synthetic construct
  REGION 1..9: note = Description of Artificial Sequence: Synthetic peptide
MVHQAISPR

SEQ ID NO: 17733 - protein, 9 aa, synthetic construct
  REGION 1..9: note = Description of Artificial Sequence: Synthetic peptide
DIAGTTSTL

SEQ ID NO: 17734 - protein, 11 aa, synthetic construct
  REGION 1..11: note = Description of Artificial Sequence: Synthetic peptide
ETYYVDGAANR

SEQ ID NO: 17735 - protein, 9 aa, synthetic construct
  REGION 1..9: note = Description of Artificial Sequence: Synthetic peptide
DIIGDIRRA

SEQ ID NO: 17736 - protein, 10 aa, synthetic construct
  REGION 1..10: note = Description of Artificial Sequence: Synthetic peptide
YIIGIGIGAL

SEQ ID NO: 17737 - protein, 10 aa, synthetic construct
  REGION 1..10: note = Description of Artificial Sequence: Synthetic peptide
TLIPKQPLSR

SEQ ID NO: 17738 - protein, 9 aa, synthetic construct
  REGION 1..9: note = Description of Artificial Sequence: Synthetic peptide
EAMSQVTNA

SEQ ID NO: 17739 - protein, 9 aa, synthetic construct
  REGION 1..9: note = Description of Artificial Sequence: Synthetic peptide
ESVQINCTR

SEQ ID NO: 17740 - protein, 9 aa, synthetic construct
  REGION 1..9: note = Description of Artificial Sequence: Synthetic peptide
NITGLILTY

SEQ ID NO: 17741 - protein, 9 aa, synthetic construct
  REGION 1..9: note = Description of Artificial Sequence: Synthetic peptide
SVLDVGDAY

SEQ ID NO: 17742 - protein, 9 aa, synthetic construct
  REGION 1..9: note = Description of Artificial Sequence: Synthetic peptide
TVLDVGDAY

SEQ ID NO: 17743 - protein, 9 aa, synthetic construct
  REGION 1..9: note = Description of Artificial Sequence: Synthetic peptide
SVLDVGGAY

SEQ ID NO: 17744 - protein, 9 aa, synthetic construct
  REGION 1..9: note = Description of Artificial Sequence: Synthetic peptide
SFDPIPIHY

SEQ ID NO: 17745 - protein, 10 aa, synthetic construct
  REGION 1..10: note = Description of Artificial Sequence: Synthetic peptide
VTFEPIPIHY

SEQ ID NO: 17746 - protein, 9 aa, synthetic construct
  REGION 1..9: note = Description of Artificial Sequence: Synthetic peptide
LYNTIAVLY

SEQ ID NO: 17747 - protein, 10 aa, synthetic construct
  REGION 1..10: note = Description of Artificial Sequence: Synthetic peptide
SNITGLILTY

SEQ ID NO: 17748 - protein, 9 aa, synthetic construct
  REGION 1..9: note = Description of Artificial Sequence: Synthetic peptide
HFGPGQAFY

SEQ ID NO: 17749 - protein, 9 aa, synthetic construct
  REGION 1..9: note = Description of Artificial Sequence: Synthetic peptide
SFEPIPIHY

SEQ ID NO: 17750 - protein, 9 aa, synthetic construct
  REGION 1..9: note = Description of Artificial Sequence: Synthetic peptide
TFEPIPIHY

SEQ ID NO: 17751 - protein, 10 aa, synthetic construct
  REGION 1..10: note = Description of Artificial Sequence: Synthetic peptide
VSFDPIPIHY

SEQ ID NO: 17752 - protein, 9 aa, synthetic construct
  REGION 1..9: note = Description of Artificial Sequence: Synthetic peptide
NITGLILTY

SEQ ID NO: 17753 - protein, 9 aa, synthetic construct
  REGION 1..9: note = Description of Artificial Sequence: Synthetic peptide
HFGPGQAFY

SEQ ID NO: 17754 - protein, 9 aa, synthetic construct
  REGION 1..9: note = Description of Artificial Sequence: Synthetic peptide
VWTIVYLEY

SEQ ID NO: 17755 - protein, 9 aa, synthetic construct
  REGION 1..9: note = Description of Artificial Sequence: Synthetic peptide
GYFPDWHNY

SEQ ID NO: 17756 - protein, 9 aa, synthetic construct
  REGION 1..9: note = Description of Artificial Sequence: Synthetic peptide
SFDPIPIHY

SEQ ID NO: 17757 - protein, 9 aa, synthetic construct
  REGION 1..9: note = Description of Artificial Sequence: Synthetic peptide
GYFPDWQNY

SEQ ID NO: 17758 - protein, 9 aa, synthetic construct
  REGION 1..9: note = Description of Artificial Sequence: Synthetic peptide
SFEPIPIHY

SEQ ID NO: 17759 - protein, 10 aa, synthetic construct
  REGION 1..10: note = Description of Artificial Sequence: Synthetic peptide
VTFEPIPIHY

SEQ ID NO: 17760 - protein, 9 aa, synthetic construct
  REGION 1..9: note = Description of Artificial Sequence: Synthetic peptide
LYNTIAVLY

SEQ ID NO: 17761 - protein, 9 aa, synthetic construct
  REGION 1..9: note = Description of Artificial Sequence: Synthetic peptide
TFEPIPIHY

SEQ ID NO: 17762 - protein, 10 aa, synthetic construct
  REGION 1..10: note = Description of Artificial Sequence: Synthetic peptide
VSFDPIPIHY

SEQ ID NO: 17763 - protein, 10 aa, synthetic construct
  REGION 1..10: note = Description of Artificial Sequence: Synthetic peptide
YFSVPLHEDF

SEQ ID NO: 17764 - protein, 9 aa, synthetic construct
  REGION 1..9: note = Description of Artificial Sequence: Synthetic peptide
SVLDVGDAY

SEQ ID NO: 17765 - protein, 9 aa, synthetic construct
  REGION 1..9: note = Description of Artificial Sequence: Synthetic peptide
LFNLVAVLY

SEQ ID NO: 17766 - protein, 9 aa, synthetic construct
  REGION 1..9: note = Description of Artificial Sequence: Synthetic peptide
VWTIVYIEY

SEQ ID NO: 17767 - protein, 9 aa, synthetic construct
  REGION 1..9: note = Description of Artificial Sequence: Synthetic peptide
KLLGNLLLY

SEQ ID NO: 17768 - protein, 9 aa, synthetic construct
  REGION 1..9: note = Description of Artificial Sequence: Synthetic peptide
GNLWVTVYY

SEQ ID NO: 17769 - protein, 10 aa, synthetic construct
  REGION 1..10: note = Description of Artificial Sequence: Synthetic peptide
IHFGPGQAFY

SEQ ID NO: 17770 - protein, 9 aa, synthetic construct
  REGION 1..9: note = Description of Artificial Sequence: Synthetic peptide
SSWEMHTNY

SEQ ID NO: 17771 - protein, 9 aa, synthetic construct
  REGION 1..9: note = Description of Artificial Sequence: Synthetic peptide
TVLDVGDAY

SEQ ID NO: 17772 - protein, 9 aa, synthetic construct
  REGION 1..9: note = Description of Artificial Sequence: Synthetic peptide
YFVNRTLIF

SEQ ID NO: 17773 - protein, 10 aa, synthetic construct
  REGION 1..10: note = Description of Artificial Sequence: Synthetic peptide
GTNGTNRTLY

SEQ ID NO: 17774 - protein, 10 aa, synthetic construct
  REGION 1..10: note = Description of Artificial Sequence: Synthetic peptide
KEKEPPLTSL

SEQ ID NO: 17775 - protein, 9 aa, synthetic construct
  REGION 1..9: note = Description of Artificial Sequence: Synthetic peptide
RTKPPLPSV

SEQ ID NO: 17776 - protein, 9 aa, synthetic construct
  REGION 1..9: note = Description of Artificial Sequence: Synthetic peptide
KTKPPLPSV

SEQ ID NO: 17777 - protein, 10 aa, synthetic construct
  REGION 1..10: note = Description of Artificial Sequence: Synthetic peptide
KEQEPPLTSL

SEQ ID NO: 17778 - protein, 9 aa, synthetic construct
  REGION 1..9: note = Description of Artificial Sequence: Synthetic peptide
SEFNLPPIV

SEQ ID NO: 17779 - protein, 9 aa, synthetic construct
  REGION 1..9: note = Description of Artificial Sequence: Synthetic peptide
KIKPPLPSV

SEQ ID NO: 17780 - protein, 10 aa, synthetic construct
  REGION 1..10: note = Description of Artificial Sequence: Synthetic peptide
KDKEPPLASL

SEQ ID NO: 17781 - protein, 10 aa, synthetic construct
  REGION 1..10: note = Description of Artificial Sequence: Synthetic peptide
GEKGVGSPQI

SEQ ID NO: 17782 - protein, 10 aa, synthetic construct
  REGION 1..10: note = Description of Artificial Sequence: Synthetic peptide
GTNGTNRTLY

SEQ ID NO: 17783 - protein, 11 aa, synthetic construct
  REGION 1..11: note = Description of Artificial Sequence: Synthetic peptide
KQNPEVIIYQY

SEQ ID NO: 17784 - protein, 11 aa, synthetic construct
  REGION 1..11: note = Description of Artificial Sequence: Synthetic peptide
SVSVLDVGGAY

SEQ ID NO: 17785 - protein, 11 aa, synthetic construct
  REGION 1..11: note = Description of Artificial Sequence: Synthetic peptide
KQNPEIIIYQY

SEQ ID NO: 17786 - protein, 9 aa, synthetic construct
  REGION 1..9: note = Description of Artificial Sequence: Synthetic peptide
IINSVRQGY

SEQ ID NO: 17787 - protein, 9 aa, synthetic construct
  REGION 1..9: note = Description of Artificial Sequence: Synthetic peptide
SVLDVGGAY

SEQ ID NO: 17788 - protein, 9 aa, synthetic construct
  REGION 1..9: note = Description of Artificial Sequence: Synthetic peptide
RVMETQRNY

SEQ ID NO: 17789 - protein, 9 aa, synthetic construct
  REGION 1..9: note = Description of Artificial Sequence: Synthetic peptide
KQNPEVIIY

SEQ ID NO: 17790 - protein, 10 aa, synthetic construct
  REGION 1..10: note = Description of Artificial Sequence: Synthetic peptide
QQIATQLSKY

SEQ ID NO: 17791 - protein, 11 aa, synthetic construct
  REGION 1..11: note = Description of Artificial Sequence: Synthetic peptide
KQNPEMVIYQY

SEQ ID NO: 17792 - protein, 9 aa, synthetic construct
  REGION 1..9: note = Description of Artificial Sequence: Synthetic peptide
KVITKLGSY

SEQ ID NO: 17793 - protein, 9 aa, synthetic construct
  REGION 1..9: note = Description of Artificial Sequence: Synthetic peptide
SVLDVGDAY

SEQ ID NO: 17794 - protein, 9 aa, synthetic construct
  REGION 1..9: note = Description of Artificial Sequence: Synthetic peptide
KAQVQHEKY

SEQ ID NO: 17795 - protein, 9 aa, synthetic construct
  REGION 1..9: note = Description of Artificial Sequence: Synthetic peptide
KAQEAHERY

SEQ ID NO: 17796 - protein, 11 aa, synthetic construct
  REGION 1..11: note = Description of Artificial Sequence: Synthetic peptide
LQQIATQLSKY

SEQ ID NO: 17797 - protein, 11 aa, synthetic construct
  REGION 1..11: note = Description of Artificial Sequence: Synthetic peptide
SVSVLDVGDAY

SEQ ID NO: 17798 - protein, 9 aa, synthetic construct
  REGION 1..9: note = Description of Artificial Sequence: Synthetic peptide
KQISQIQKF

SEQ ID NO: 17799 - protein, 9 aa, synthetic construct
  REGION 1..9: note = Description of Artificial Sequence: Synthetic peptide
AQNLWVTVY

SEQ ID NO: 17800 - protein, 9 aa, synthetic construct
  REGION 1..9: note = Description of Artificial Sequence: Synthetic peptide
KQNPEMVIY

SEQ ID NO: 17801 - protein, 9 aa, synthetic construct
  REGION 1..9: note = Description of Artificial Sequence: Synthetic peptide
KQGPDQWTY

SEQ ID NO: 17802 - protein, 9 aa, synthetic construct
  REGION 1..9: note = Description of Artificial Sequence: Synthetic peptide
TVLDVGDAY

SEQ ID NO: 17803 - protein, 9 aa, synthetic construct
  REGION 1..9: note = Description of Artificial Sequence: Synthetic peptide
KQNPEIIIY

SEQ ID NO: 17804 - protein, 10 aa, synthetic construct
  REGION 1..10: note = Description of Artificial Sequence: Synthetic peptide
ILKEPVHGAY

SEQ ID NO: 17805 - protein, 11 aa, synthetic construct
  REGION 1..11: note = Description of Artificial Sequence: Synthetic peptide
KTGTEDLQSLY

SEQ ID NO: 17806 - protein, 9 aa, synthetic construct
  REGION 1..9: note = Description of Artificial Sequence: Synthetic peptide
KAQEEHERY

SEQ ID NO: 17807 - protein, 9 aa, synthetic construct
  REGION 1..9: note = Description of Artificial Sequence: Synthetic peptide
SSWEMHTNY

SEQ ID NO: 17808 - protein, 9 aa, synthetic construct
  REGION 1..9: note = Description of Artificial Sequence: Synthetic peptide
RIGPGQAFY

SEQ ID NO: 17809 - protein, 9 aa, synthetic construct
  REGION 1..9: note = Description of Artificial Sequence: Synthetic peptide
KQISNIQKF

SEQ ID NO: 17810 - protein, 9 aa, synthetic construct
  REGION 1..9: note = Description of Artificial Sequence: Synthetic peptide
IINSVRQGY

SEQ ID NO: 17811 - protein, 9 aa, synthetic construct
  REGION 1..9: note = Description of Artificial Sequence: Synthetic peptide
KQISQIQKF

SEQ ID NO: 17812 - protein, 9 aa, synthetic construct
  REGION 1..9: note = Description of Artificial Sequence: Synthetic peptide
KQISNIQKF

SEQ ID NO: 17813 - protein, 11 aa, synthetic construct
  REGION 1..11: note = Description of Artificial Sequence: Synthetic peptide
KQNPEIIIYQY

SEQ ID NO: 17814 - protein, 9 aa, synthetic construct
  REGION 1..9: note = Description of Artificial Sequence: Synthetic peptide
KQNPEVIIY

SEQ ID NO: 17815 - protein, 11 aa, synthetic construct
  REGION 1..11: note = Description of Artificial Sequence: Synthetic peptide
KQNPEVIIYQY

SEQ ID NO: 17816 - protein, 10 aa, synthetic construct
  REGION 1..10: note = Description of Artificial Sequence: Synthetic peptide
GTNGTNRTLY

SEQ ID NO: 17817 - protein, 9 aa, synthetic construct
  REGION 1..9: note = Description of Artificial Sequence: Synthetic peptide
RVMETQRNY

SEQ ID NO: 17818 - protein, 9 aa, synthetic construct
  REGION 1..9: note = Description of Artificial Sequence: Synthetic peptide
KQGPDQWTY

SEQ ID NO: 17819 - protein, 9 aa, synthetic construct
  REGION 1..9: note = Description of Artificial Sequence: Synthetic peptide
AQNLWVTVY

SEQ ID NO: 17820 - protein, 9 aa, synthetic construct
  REGION 1..9: note = Description of Artificial Sequence: Synthetic peptide
KQNPEIIIY

SEQ ID NO: 17821 - protein, 9 aa, synthetic construct
  REGION 1..9: note = Description of Artificial Sequence: Synthetic peptide
KQNPEMVIY

SEQ ID NO: 17822 - protein, 9 aa, synthetic construct
  REGION 1..9: note = Description of Artificial Sequence: Synthetic peptide
KQGQGQWTY

SEQ ID NO: 17823 - protein, 10 aa, synthetic construct
  REGION 1..10: note = Description of Artificial Sequence: Synthetic peptide
SIINSVRQGY

SEQ ID NO: 17824 - protein, 10 aa, synthetic construct
  REGION 1..10: note = Description of Artificial Sequence: Synthetic peptide
FLKKGLGISY

SEQ ID NO: 17825 - protein, 9 aa, synthetic construct
  REGION 1..9: note = Description of Artificial Sequence: Synthetic peptide
RIGPGQAFY

SEQ ID NO: 17826 - protein, 9 aa, synthetic construct
  REGION 1..9: note = Description of Artificial Sequence: Synthetic peptide
SQIQKFRVY

SEQ ID NO: 17827 - protein, 9 aa, synthetic construct
  REGION 1..9: note = Description of Artificial Sequence: Synthetic peptide
KVITKLGSY

SEQ ID NO: 17828 - protein, 11 aa, synthetic construct
  REGION 1..11: note = Description of Artificial Sequence: Synthetic peptide
KQNPEMVIYQY

SEQ ID NO: 17829 - protein, 10 aa, synthetic construct
  REGION 1..10: note = Description of Artificial Sequence: Synthetic peptide
RTKPPLPSVR

SEQ ID NO: 17830 - protein, 11 aa, synthetic construct
  REGION 1..11: note = Description of Artificial Sequence: Synthetic peptide
ATQLSKYFVNR

SEQ ID NO: 17831 - protein, 10 aa, synthetic construct
  REGION 1..10: note = Description of Artificial Sequence: Synthetic peptide
KTKPPLPSVR

SEQ ID NO: 17832 - protein, 11 aa, synthetic construct
  REGION 1..11: note = Description of Artificial Sequence: Synthetic peptide
RTNSPTSRMLR

SEQ ID NO: 17833 - protein, 10 aa, synthetic construct
  REGION 1..10: note = Description of Artificial Sequence: Synthetic peptide
TQLSKYFVNR

SEQ ID NO: 17834 - protein, 9 aa, synthetic construct
  REGION 1..9: note = Description of Artificial Sequence: Synthetic peptide
SFNVTTVLR

SEQ ID NO: 17835 - protein, 9 aa, synthetic construct
  REGION 1..9: note = Description of Artificial Sequence: Synthetic peptide
AIRGAILGR

SEQ ID NO: 17836 - protein, 11 aa, synthetic construct
  REGION 1..11: note = Description of Artificial Sequence: Synthetic peptide
VTQLGIHLNNR

SEQ ID NO: 17837 - protein, 9 aa, synthetic construct
  REGION 1..9: note = Description of Artificial Sequence: Synthetic peptide
QLSKYFVNR

SEQ ID NO: 17838 - protein, 10 aa, synthetic construct
  REGION 1..10: note = Description of Artificial Sequence: Synthetic peptide
TLIPKQPLSR

SEQ ID NO: 17839 - protein, 9 aa, synthetic construct
  REGION 1..9: note = Description of Artificial Sequence: Synthetic peptide
KGLGIYYGR

SEQ ID NO: 17840 - protein, 11 aa, synthetic construct
  REGION 1..11: note = Description of Artificial Sequence: Synthetic peptide
KTLYNVVNQLR

SEQ ID NO: 17841 - protein, 9 aa, synthetic construct
  REGION 1..9: note = Description of Artificial Sequence: Synthetic peptide
VGWPAVRER

SEQ ID NO: 17842 - protein, 11 aa, synthetic construct
  REGION 1..11: note = Description of Artificial Sequence: Synthetic peptide
RLRDLLSIVAR

SEQ ID NO: 17843 - protein, 9 aa, synthetic construct
  REGION 1..9: note = Description of Artificial Sequence: Synthetic peptide
QIYPGIKVR

SEQ ID NO: 17844 - protein, 9 aa, synthetic construct
  REGION 1..9: note = Description of Artificial Sequence: Synthetic peptide
KQIVNMWQR

SEQ ID NO: 17845 - protein, 11 aa, synthetic construct
  REGION 1..11: note = Description of Artificial Sequence: Synthetic peptide
RTNSPTSRELR

SEQ ID NO: 17846 - protein, 10 aa, synthetic construct
  REGION 1..10: note = Description of Artificial Sequence: Synthetic peptide
TQLGIHLNNR

SEQ ID NO: 17847 - protein, 9 aa, synthetic construct
  REGION 1..9: note = Description of Artificial Sequence: Synthetic peptide
KQIINMWQR

SEQ ID NO: 17848 - protein, 10 aa, synthetic construct
  REGION 1..10: note = Description of Artificial Sequence: Synthetic peptide
KIKPPLPSVR

SEQ ID NO: 17849 - protein, 9 aa, synthetic construct
  REGION 1..9: note = Description of Artificial Sequence: Synthetic peptide
RSLSLFSYR

SEQ ID NO: 17850 - protein, 11 aa, synthetic construct
  REGION 1..11: note = Description of Artificial Sequence: Synthetic peptide
TVNDIQKLVGK

SEQ ID NO: 17851 - protein, 9 aa, synthetic construct
  REGION 1..9: note = Description of Artificial Sequence: Synthetic peptide
KGLGISYGR

SEQ ID NO: 17852 - protein, 11 aa, synthetic construct
  REGION 1..11: note = Description of Artificial Sequence: Synthetic peptide
KGRPGNFLQSR

SEQ ID NO: 17853 - protein, 11 aa, synthetic construct
  REGION 1..11: note = Description of Artificial Sequence: Synthetic peptide
TVWGVKQLQAR

SEQ ID NO: 17854 - protein, 11 aa, synthetic construct
  REGION 1..11: note = Description of Artificial Sequence: Synthetic peptide
QTLIPKQPLSR

SEQ ID NO: 17855 - protein, 10 aa, synthetic construct
  REGION 1..10: note = Description of Artificial Sequence: Synthetic peptide
QVRDQAEHLR

SEQ ID NO: 17856 - protein, 9 aa, synthetic construct
  REGION 1..9: note = Description of Artificial Sequence: Synthetic peptide
RQIHSISER

SEQ ID NO: 17857 - protein, 9 aa, synthetic construct
  REGION 1..9: note = Description of Artificial Sequence: Synthetic peptide
TVKIEGQLR

SEQ ID NO: 17858 - protein, 9 aa, synthetic construct
  REGION 1..9: note = Description of Artificial Sequence: Synthetic peptide
LYNVVNQLR

SEQ ID NO: 17859 - protein, 11 aa, synthetic construct
  REGION 1..11: note = Description of Artificial Sequence: Synthetic peptide
VTINNTASTNR

SEQ ID NO: 17860 - protein, 10 aa, synthetic construct
  REGION 1..10: note = Description of Artificial Sequence: Synthetic peptide
AVLSIVGRVR

SEQ ID NO: 17861 - protein, 8 aa, synthetic construct
  REGION 1..8: note = Description of Artificial Sequence: Synthetic peptide
AVLSIVNR

SEQ ID NO: 17862 - protein, 11 aa, synthetic construct
  REGION 1..11: note = Description of Artificial Sequence: Synthetic peptide
VGPTPVNIIGR

SEQ ID NO: 17863 - protein, 9 aa, synthetic construct
  REGION 1..9: note = Description of Artificial Sequence: Synthetic peptide
IINSVRQGY

SEQ ID NO: 17864 - protein, 9 aa, synthetic construct
  REGION 1..9: note = Description of Artificial Sequence: Synthetic peptide
KQISQIQKF

SEQ ID NO: 17865 - protein, 9 aa, synthetic construct
  REGION 1..9: note = Description of Artificial Sequence: Synthetic peptide
IVNRVRQGY

SEQ ID NO: 17866 - protein, 10 aa, synthetic construct
  REGION 1..10: note = Description of Artificial Sequence: Synthetic peptide
SIINSVRQGY

SEQ ID NO: 17867 - protein, 9 aa, synthetic construct
  REGION 1..9: note = Description of Artificial Sequence: Synthetic peptide
KQISNIQKF

SEQ ID NO: 17868 - protein, 10 aa, synthetic construct
  REGION 1..10: note = Description of Artificial Sequence: Synthetic peptide
GTNGTNRTLY

SEQ ID NO: 17869 - protein, 9 aa, synthetic construct
  REGION 1..9: note = Description of Artificial Sequence: Synthetic peptide
IVGRVRQGY

SEQ ID NO: 17870 - protein, 9 aa, synthetic construct
  REGION 1..9: note = Description of Artificial Sequence: Synthetic peptide
RVMETQRNY

SEQ ID NO: 17871 - protein, 11 aa, synthetic construct
  REGION 1..11: note = Description of Artificial Sequence: Synthetic peptide
ETYYIDGAANR

SEQ ID NO: 17872 - protein, 10 aa, synthetic construct
  REGION 1..10: note = Description of Artificial Sequence: Synthetic peptide
DYNGTNGTNR

SEQ ID NO: 17873 - protein, 9 aa, synthetic construct
  REGION 1..9: note = Description of Artificial Sequence: Synthetic peptide
DNYTEVIYR

SEQ ID NO: 17874 - protein, 11 aa, synthetic construct
  REGION 1..11: note = Description of Artificial Sequence: Synthetic peptide
ETYYVDGAANR

SEQ ID NO: 17875 - protein, 11 aa, synthetic construct
  REGION 1..11: note = Description of Artificial Sequence: Synthetic peptide
EDYNGTNGTNR

SEQ ID NO: 17876 - protein, 9 aa, synthetic construct
  REGION 1..9: note = Description of Artificial Sequence: Synthetic peptide
DGIIVIVQR

SEQ ID NO: 17877 - protein, 9 aa, synthetic construct
  REGION 1..9: note = Description of Artificial Sequence: Synthetic peptide
DAKAYDTER

SEQ ID NO: 17878 - protein, 11 aa, synthetic construct
  REGION 1..11: note = Description of Artificial Sequence: Synthetic peptide
DTEELSTLVER

SEQ ID NO: 17879 - protein, 9 aa, synthetic construct
  REGION 1..9: note = Description of Artificial Sequence: Synthetic peptide
NNTNNVTFR

SEQ ID NO: 17880 - protein, 9 aa, synthetic construct
  REGION 1..9: note = Description of Artificial Sequence: Synthetic peptide
DNGTNVTLR

SEQ ID NO: 17881 - protein, 11 aa, synthetic construct
  REGION 1..11: note = Description of Artificial Sequence: Synthetic peptide
DINIGEIQEQR

SEQ ID NO: 17882 - protein, 10 aa, synthetic construct
  REGION 1..10: note = Description of Artificial Sequence: Synthetic peptide
DNSEIKVVPR

SEQ ID NO: 17883 - protein, 11 aa, synthetic construct
  REGION 1..11: note = Description of Artificial Sequence: Synthetic peptide
DVKQLTEAVQK

SEQ ID NO: 17884 - protein, 9 aa, synthetic construct
  REGION 1..9: note = Description of Artificial Sequence: Synthetic peptide
DTLEKIRLR

SEQ ID NO: 17885 - protein, 11 aa, synthetic construct
  REGION 1..11: note = Description of Artificial Sequence: Synthetic peptide
EARELSPEQAR

SEQ ID NO: 17886 - protein, 9 aa, synthetic construct
  REGION 1..9: note = Description of Artificial Sequence: Synthetic peptide
DAKAYSTEK

SEQ ID NO: 17887 - protein, 11 aa, synthetic construct
  REGION 1..11: note = Description of Artificial Sequence: Synthetic peptide
DVKQLTEVVQK

SEQ ID NO: 17888 - protein, 11 aa, synthetic construct
  REGION 1..11: note = Description of Artificial Sequence: Synthetic peptide
EPLGIAPTKAR

SEQ ID NO: 17889 - protein, 11 aa, synthetic construct
  REGION 1..11: note = Description of Artificial Sequence: Synthetic peptide
EARKFSPEQAR

SEQ ID NO: 17890 - protein, 9 aa, synthetic construct
  REGION 1..9: note = Description of Artificial Sequence: Synthetic peptide
MNTAIMVQK

SEQ ID NO: 17891 - protein, 9 aa, synthetic construct
  REGION 1..9: note = Description of Artificial Sequence: Synthetic peptide
DGLIYSKQR

SEQ ID NO: 17892 - protein, 9 aa, synthetic construct
  REGION 1..9: note = Description of Artificial Sequence: Synthetic peptide
DAWEKIRLR

SEQ ID NO: 17893 - protein, 9 aa, synthetic construct
  REGION 1..9: note = Description of Artificial Sequence: Synthetic peptide
DSHLAFRHR

SEQ ID NO: 17894 - protein, 9 aa, synthetic construct
  REGION 1..9: note = Description of Artificial Sequence: Synthetic peptide
QARVLAVER

SEQ ID NO: 17895 - protein, 9 aa, synthetic construct
  REGION 1..9: note = Description of Artificial Sequence: Synthetic peptide
SFNVTTVLR

SEQ ID NO: 17896 - protein, 9 aa, synthetic construct
  REGION 1..9: note = Description of Artificial Sequence: Synthetic peptide
ESVQINCTR

SEQ ID NO: 17897 - protein, 8 aa, synthetic construct
  REGION 1..8: note = Description of Artificial Sequence: Synthetic peptide
DLLSIVAR

SEQ ID NO: 17898 - protein, 9 aa, synthetic construct
  REGION 1..9: note = Description of Artificial Sequence: Synthetic peptide
YYIDGAANR

SEQ ID NO: 17899 - protein, 9 aa, synthetic construct
  REGION 1..9: note = Description of Artificial Sequence: Synthetic peptide
DAKAYETEK

SEQ ID NO: 17900 - protein, 9 aa, synthetic construct
  REGION 1..9: note = Description of Artificial Sequence: Synthetic peptide
MVHQAISPR

SEQ ID NO: 17901 - protein, 11 aa, synthetic construct
  REGION 1..11: note = Description of Artificial Sequence: Synthetic peptide
ETYYIDGAANR

SEQ ID NO: 17902 - protein, 10 aa, synthetic construct
  REGION 1..10: note = Description of Artificial Sequence: Synthetic peptide
DYNGTNGTNR

SEQ ID NO: 17903 - protein, 11 aa, synthetic construct
  REGION 1..11: note = Description of Artificial Sequence: Synthetic peptide
ETYYVDGAANR

SEQ ID NO: 17904 - protein, 9 aa, synthetic construct
  REGION 1..9: note = Description of Artificial Sequence: Synthetic peptide
ESVQINCTR

SEQ ID NO: 17905 - protein, 9 aa, synthetic construct
  REGION 1..9: note = Description of Artificial Sequence: Synthetic peptide
EYRKLVQQK

SEQ ID NO: 17906 - protein, 9 aa, synthetic construct
  REGION 1..9: note = Description of Artificial Sequence: Synthetic peptide
YYVDGAANR

SEQ ID NO: 17907 - protein, 11 aa, synthetic construct
  REGION 1..11: note = Description of Artificial Sequence: Synthetic peptide
EDYNGTNGTNR

SEQ ID NO: 17908 - protein, 9 aa, synthetic construct
  REGION 1..9: note = Description of Artificial Sequence: Synthetic peptide
MVHQAISPR

SEQ ID NO: 17909 - protein, 9 aa, synthetic construct
  REGION 1..9: note = Description of Artificial Sequence: Synthetic peptide
YYIDGAANR

SEQ ID NO: 17910 - protein, 11 aa, synthetic construct
  REGION 1..11: note = Description of Artificial Sequence: Synthetic peptide
EARELSPEQAR

SEQ ID NO: 17911 - protein, 9 aa, synthetic construct
  REGION 1..9: note = Description of Artificial Sequence: Synthetic peptide
SFNVTTVLR

SEQ ID NO: 17912 - protein, 9 aa, synthetic construct
  REGION 1..9: note = Description of Artificial Sequence: Synthetic peptide
ETLHKVITK

SEQ ID NO: 17913 - protein, 9 aa, synthetic construct
  REGION 1..9: note = Description of Artificial Sequence: Synthetic peptide
QARVLAVER

SEQ ID NO: 17914 - protein, 10 aa, synthetic construct
  REGION 1..10: note = Description of Artificial Sequence: Synthetic peptide
TYYVDGAANR

SEQ ID NO: 17915 - protein, 11 aa, synthetic construct
  REGION 1..11: note = Description of Artificial Sequence: Synthetic peptide
EVKDTKEALGK

SEQ ID NO: 17916 - protein, 11 aa, synthetic construct
  REGION 1..11: note = Description of Artificial Sequence: Synthetic peptide
EARKFSPEQAR

SEQ ID NO: 17917 - protein, 9 aa, synthetic construct
  REGION 1..9: note = Description of Artificial Sequence: Synthetic peptide
MYISKKANR

SEQ ID NO: 17918 - protein, 11 aa, synthetic construct
  REGION 1..11: note = Description of Artificial Sequence: Synthetic peptide
TVNDIQKLVGK

SEQ ID NO: 17919 - protein, 11 aa, synthetic construct
  REGION 1..11: note = Description of Artificial Sequence: Synthetic peptide
EPLGIAPTKTR

SEQ ID NO: 17920 - protein, 10 aa, synthetic construct
  REGION 1..10: note = Description of Artificial Sequence: Synthetic peptide
EVHIPVGDAR

SEQ ID NO: 17921 - protein, 11 aa, synthetic construct
  REGION 1..11: note = Description of Artificial Sequence: Synthetic peptide
EPLGIAPTKAR

SEQ ID NO: 17922 - protein, 10 aa, synthetic construct
  REGION 1..10: note = Description of Artificial Sequence: Synthetic peptide
EVRTHSFNCR

SEQ ID NO: 17923 - protein, 10 aa, synthetic construct
  REGION 1..10: note = Description of Artificial Sequence: Synthetic peptide
TYYIDGAANR

SEQ ID NO: 17924 - protein, 10 aa, synthetic construct
  REGION 1..10: note = Description of Artificial Sequence: Synthetic peptide
EVHIPLGEAR

SEQ ID NO: 17925 - protein, 9 aa, synthetic construct
  REGION 1..9: note = Description of Artificial Sequence: Synthetic peptide
DAKAYDTER

SEQ ID NO: 17926 - protein, 9 aa, synthetic construct
  REGION 1..9: note = Description of Artificial Sequence: Synthetic peptide
SFNVTTVIR

SEQ ID NO: 17927 - protein, 10 aa, synthetic construct
  REGION 1..10: note = Description of Artificial Sequence: Synthetic peptide
DNSEIKVVPR

SEQ ID NO: 17928 - protein, 9 aa, synthetic construct
  REGION 1..9: note = Description of Artificial Sequence: Synthetic peptide
NSEIKVVPR

SEQ ID NO: 17929 - protein, 11 aa, synthetic construct
  REGION 1..11: note = Description of Artificial Sequence: Synthetic peptide
EPLGVAPTEAR

SEQ ID NO: 17930 - protein, 9 aa, synthetic construct
  REGION 1..9: note = Description of Artificial Sequence: Synthetic peptide
YNGTNGTNR

SEQ ID NO: 17931 - protein, 9 aa, synthetic construct
  REGION 1..9: note = Description of Artificial Sequence: Synthetic peptide
DGIIVIVQR

SEQ ID NO: 17932 - protein, 9 aa, synthetic construct
  REGION 1..9: note = Description of Artificial Sequence: Synthetic peptide
DNGTNVTLR

SEQ ID NO: 17933 - protein, 9 aa, synthetic construct
  REGION 1..9: note = Description of Artificial Sequence: Synthetic peptide
LYNVVNQLR

SEQ ID NO: 17934 - protein, 9 aa, synthetic construct
  REGION 1..9: note = Description of Artificial Sequence: Synthetic peptide
QIYPGIKVR

SEQ ID NO: 17935 - protein, 9 aa, synthetic construct
  REGION 1..9: note = Description of Artificial Sequence: Synthetic peptide
DNYTEVIYR

SEQ ID NO: 17936 - protein, 10 aa, synthetic construct
  REGION 1..10: note = Description of Artificial Sequence: Synthetic peptide
VTGEVIGNIR

SEQ ID NO: 17937 - protein, 8 aa, synthetic construct
  REGION 1..8: note = Description of Artificial Sequence: Synthetic peptide
NTNNVTFR

SEQ ID NO: 17938 - protein, 9 aa, synthetic construct
  REGION 1..9: note = Description of Artificial Sequence: Synthetic peptide
DTLEKIRLR

SEQ ID NO: 17939 - protein, 9 aa, synthetic construct
  REGION 1..9: note = Description of Artificial Sequence: Synthetic peptide
NNTNNVTFR

SEQ ID NO: 17940 - protein, 9 aa, synthetic construct
  REGION 1..9: note = Description of Artificial Sequence: Synthetic peptide
TVKIEGQLR

SEQ ID NO: 17941 - protein, 10 aa, synthetic construct
  REGION 1..10: note = Description of Artificial Sequence: Synthetic peptide
EVTTHSFNCR

SEQ ID NO: 17942 - protein, 8 aa, synthetic construct
  REGION 1..8: note = Description of Artificial Sequence: Synthetic peptide
ENLAFQQR

SEQ ID NO: 17943 - protein, 10 aa, synthetic construct
  REGION 1..10: note = Description of Artificial Sequence: Synthetic peptide
ELKKIIGQVR

SEQ ID NO: 17944 - protein, 10 aa, synthetic construct
  REGION 1..10: note = Description of Artificial Sequence: Synthetic peptide
EFNLPPIVAK

SEQ ID NO: 17945 - protein, 9 aa, synthetic construct
  REGION 1..9: note = Description of Artificial Sequence: Synthetic peptide
GNNDNVTFR

SEQ ID NO: 17946 - protein, 8 aa, synthetic construct
  REGION 1..8: note = Description of Artificial Sequence: Synthetic peptide
HYDSPHPR

SEQ ID NO: 17947 - protein, 9 aa, synthetic construct
  REGION 1..9: note = Description of Artificial Sequence: Synthetic peptide
EYKKLVRQK

SEQ ID NO: 17948 - protein, 9 aa, synthetic construct
  REGION 1..9: note = Description of Artificial Sequence: Synthetic peptide
INNTASTNR

SEQ ID NO: 17949 - protein, 11 aa, synthetic construct
  REGION 1..11: note = Description of Artificial Sequence: Synthetic peptide
DTEELSTLVER

SEQ ID NO: 17950 - protein, 10 aa, synthetic construct
  REGION 1..10: note = Description of Artificial Sequence: Synthetic peptide
QVRDQAEHLR

SEQ ID NO: 17951 - protein, 8 aa, synthetic construct
  REGION 1..8: note = Description of Artificial Sequence: Synthetic peptide
NYTEVIYR

SEQ ID NO: 17952 - protein, 10 aa, synthetic construct
  REGION 1..10: note = Description of Artificial Sequence: Synthetic peptide
EVEEVIIRSK

SEQ ID NO: 17953 - protein, 11 aa, synthetic construct
  REGION 1..11: note = Description of Artificial Sequence: Synthetic peptide
ESAIRGAILGR

SEQ ID NO: 17954 - protein, 10 aa, synthetic construct
  REGION 1..10: note = Description of Artificial Sequence: Synthetic peptide
ATGDIIGNIR

SEQ ID NO: 17955 - protein, 9 aa, synthetic construct
  REGION 1..9: note = Description of Artificial Sequence: Synthetic peptide
EAMSQMTNM

SEQ ID NO: 17956 - protein, 10 aa, synthetic construct
  REGION 1..10: note = Description of Artificial Sequence: Synthetic peptide
EVHIPLGDAR

SEQ ID NO: 17957 - protein, 9 aa, synthetic construct
  REGION 1..9: note = Description of Artificial Sequence: Synthetic peptide
FNLPPIVAK

SEQ ID NO: 17958 - protein, 10 aa, synthetic construct
  REGION 1..10: note = Description of Artificial Sequence: Synthetic peptide
TQLGIHLNNR

SEQ ID NO: 17959 - protein, 9 aa, synthetic construct
  REGION 1..9: note = Description of Artificial Sequence: Synthetic peptide
EYRKLVKQK

SEQ ID NO: 17960 - protein, 9 aa, synthetic construct
  REGION 1..9: note = Description of Artificial Sequence: Synthetic peptide
SFNVTTAIR

SEQ ID NO: 17961 - protein, 9 aa, synthetic construct
  REGION 1..9: note = Description of Artificial Sequence: Synthetic peptide
MNTAIMVQK

SEQ ID NO: 17962 - protein, 9 aa, synthetic construct
  REGION 1..9: note = Description of Artificial Sequence: Synthetic peptide
EVIGNIRQA

SEQ ID NO: 17963 - protein, 9 aa, synthetic construct
  REGION 1..9: note = Description of Artificial Sequence: Synthetic peptide
EPVQINCTR

SEQ ID NO: 17964 - protein, 11 aa, synthetic construct
  REGION 1..11: note = Description of Artificial Sequence: Synthetic peptide
ENLAFQQGKAR

SEQ ID NO: 17965 - protein, 11 aa, synthetic construct
  REGION 1..11: note = Description of Artificial Sequence: Synthetic peptide
ETYYIDGAANR

SEQ ID NO: 17966 - protein, 11 aa, synthetic construct
  REGION 1..11: note = Description of Artificial Sequence: Synthetic peptide
ETYYVDGAANR

SEQ ID NO: 17967 - protein, 9 aa, synthetic construct
  REGION 1..9: note = Description of Artificial Sequence: Synthetic peptide
ESVQINCTR

SEQ ID NO: 17968 - protein, 11 aa, synthetic construct
  REGION 1..11: note = Description of Artificial Sequence: Synthetic peptide
DTEELSTLVER

SEQ ID NO: 17969 - protein, 11 aa, synthetic construct
  REGION 1..11: note = Description of Artificial Sequence: Synthetic peptide
EDYNGTNGTNR

SEQ ID NO: 17970 - protein, 10 aa, synthetic construct
  REGION 1..10: note = Description of Artificial Sequence: Synthetic peptide
EVEEVIIRSK

SEQ ID NO: 17971 - protein, 10 aa, synthetic construct
  REGION 1..10: note = Description of Artificial Sequence: Synthetic peptide
VTGEVIGNIR

SEQ ID NO: 17972 - protein, 9 aa, synthetic construct
  REGION 1..9: note = Description of Artificial Sequence: Synthetic peptide
DGIIVIVQR

SEQ ID NO: 17973 - protein, 10 aa, synthetic construct
  REGION 1..10: note = Description of Artificial Sequence: Synthetic peptide
ATGDIIGNIR

SEQ ID NO: 17974 - protein, 9 aa, synthetic construct
  REGION 1..9: note = Description of Artificial Sequence: Synthetic peptide
EVIPAETGK

SEQ ID NO: 17975 - protein, 11 aa, synthetic construct
  REGION 1..11: note = Description of Artificial Sequence: Synthetic peptide
TVNDIQKLVGK

SEQ ID NO: 17976 - protein, 11 aa, synthetic construct
  REGION 1..11: note = Description of Artificial Sequence: Synthetic peptide
PAADGVGAVSR

SEQ ID NO: 17977 - protein, 11 aa, synthetic construct
  REGION 1..11: note = Description of Artificial Sequence: Synthetic peptide
EVQDTSEALNK

SEQ ID NO: 17978 - protein, 9 aa, synthetic construct
  REGION 1..9: note = Description of Artificial Sequence: Synthetic peptide
EPVQINCTR

SEQ ID NO: 17979 - protein, 11 aa, synthetic construct
  REGION 1..11: note = Description of Artificial Sequence: Synthetic peptide
GTDGIIVIVQR

SEQ ID NO: 17980 - protein, 10 aa, synthetic construct
  REGION 1..10: note = Description of Artificial Sequence: Synthetic peptide
SLAEGQVIIR

SEQ ID NO: 17981 - protein, 10 aa, synthetic construct
  REGION 1..10: note = Description of Artificial Sequence: Synthetic peptide
DNSEIKVVPR

SEQ ID NO: 17982 - protein, 10 aa, synthetic construct
  REGION 1..10: note = Description of Artificial Sequence: Synthetic peptide
IPVDPQEVER

SEQ ID NO: 17983 - protein, 9 aa, synthetic construct
  REGION 1..9: note = Description of Artificial Sequence: Synthetic peptide
NIGEIQEQR

SEQ ID NO: 17984 - protein, 9 aa, synthetic construct
  REGION 1..9: note = Description of Artificial Sequence: Synthetic peptide
ASAAIMMQK

SEQ ID NO: 17985 - protein, 10 aa, synthetic construct
  REGION 1..10: note = Description of Artificial Sequence: Synthetic peptide
SSVNATNVTK

SEQ ID NO: 17986 - protein, 9 aa, synthetic construct
  REGION 1..9: note = Description of Artificial Sequence: Synthetic peptide
NSEIKVVPR

SEQ ID NO: 17987 - protein, 10 aa, synthetic construct
  REGION 1..10: note = Description of Artificial Sequence: Synthetic peptide
NSISKQPLSR

SEQ ID NO: 17988 - protein, 9 aa, synthetic construct
  REGION 1..9: note = Description of Artificial Sequence: Synthetic peptide
ETLHKVITK

SEQ ID NO: 17989 - protein, 11 aa, synthetic construct
  REGION 1..11: note = Description of Artificial Sequence: Synthetic peptide
VTINNTASTNR

SEQ ID NO: 17990 - protein, 11 aa, synthetic construct
  REGION 1..11: note = Description of Artificial Sequence: Synthetic peptide
PVAEGVGAVSR

SEQ ID NO: 17991 - protein, 11 aa, synthetic construct
  REGION 1..11: note = Description of Artificial Sequence: Synthetic peptide
ESSTILGTGTK

SEQ ID NO: 17992 - protein, 10 aa, synthetic construct
  REGION 1..10: note = Description of Artificial Sequence: Synthetic peptide
NTNTAIMMQK

SEQ ID NO: 17993 - protein, 9 aa, synthetic construct
  REGION 1..9: note = Description of Artificial Sequence: Synthetic peptide
DNGTNVTLR

SEQ ID NO: 17994 - protein, 9 aa, synthetic construct
  REGION 1..9: note = Description of Artificial Sequence: Synthetic peptide
LAEGQVIIR

SEQ ID NO: 17995 - protein, 9 aa, synthetic construct
  REGION 1..9: note = Description of Artificial Sequence: Synthetic peptide
SVNATNVTK

SEQ ID NO: 17996 - protein, 9 aa, synthetic construct
  REGION 1..9: note = Description of Artificial Sequence: Synthetic peptide
NNTNNVTFR

SEQ ID NO: 17997 - protein, 10 aa, synthetic construct
  REGION 1..10: note = Description of Artificial Sequence: Synthetic peptide
EVNIVTDSQY

SEQ ID NO: 17998 - protein, 10 aa, synthetic construct
  REGION 1..10: note = Description of Artificial Sequence: Synthetic peptide
NASAAIMMQK

SEQ ID NO: 17999 - protein, 9 aa, synthetic construct
  REGION 1..9: note = Description of Artificial Sequence: Synthetic peptide
TPVNITCTR

SEQ ID NO: 18000 - protein, 10 aa, synthetic construct
  REGION 1..10: note = Description of Artificial Sequence: Synthetic peptide
ASITLTVQAR

SEQ ID NO: 18001 - protein, 10 aa, synthetic construct
  REGION 1..10: note = Description of Artificial Sequence: Synthetic peptide
TVLSIINSVR

SEQ ID NO: 18002 - protein, 10 aa, synthetic construct
  REGION 1..10: note = Description of Artificial Sequence: Synthetic peptide
VAEGVGAVSR

SEQ ID NO: 18003 - protein, 11 aa, synthetic construct
  REGION 1..11: note = Description of Artificial Sequence: Synthetic peptide
DVKQLTEAVQK

SEQ ID NO: 18004 - protein, 10 aa, synthetic construct
  REGION 1..10: note = Description of Artificial Sequence: Synthetic peptide
SAIRGAILGR

SEQ ID NO: 18005 - protein, 11 aa, synthetic construct
  REGION 1..11: note = Description of Artificial Sequence: Synthetic peptide
YVDNGTNVTLR

SEQ ID NO: 18006 - protein, 10 aa, synthetic construct
  REGION 1..10: note = Description of Artificial Sequence: Synthetic peptide
DCFSDSAIRK

SEQ ID NO: 18007 - protein, 9 aa, synthetic construct
  REGION 1..9: note = Description of Artificial Sequence: Synthetic peptide
FAVLSIVNR

SEQ ID NO: 18008 - protein, 10 aa, synthetic construct
  REGION 1..10: note = Description of Artificial Sequence: Synthetic peptide
ATGDIIGDIR

SEQ ID NO: 18009 - protein, 9 aa, synthetic construct
  REGION 1..9: note = Description of Artificial Sequence: Synthetic peptide
MNTAIMVQK

SEQ ID NO: 18010 - protein, 11 aa, synthetic construct
  REGION 1..11: note = Description of Artificial Sequence: Synthetic peptide
DVKQLTEVVQK

SEQ ID NO: 18011 - protein, 10 aa, synthetic construct
  REGION 1..10: note = Description of Artificial Sequence: Synthetic peptide
NANAAIMMQK

SEQ ID NO: 18012 - protein, 11 aa, synthetic construct
  REGION 1..11: note = Description of Artificial Sequence: Synthetic peptide
YATGDIIGNIR

SEQ ID NO: 18013 - protein, 10 aa, synthetic construct
  REGION 1..10: note = Description of Artificial Sequence: Synthetic peptide
EVHIPVGDAR

SEQ ID NO: 18014 - protein, 11 aa, synthetic construct
  REGION 1..11: note = Description of Artificial Sequence: Synthetic peptide
TNMNTAIMVQK

SEQ ID NO: 18015 - protein, 10 aa, synthetic construct
  REGION 1..10: note = Description of Artificial Sequence: Synthetic peptide
TINNTASTNR

SEQ ID NO: 18016 - protein, 9 aa, synthetic construct
  REGION 1..9: note = Description of Artificial Sequence: Synthetic peptide
MVHQAISPR

SEQ ID NO: 18017 - protein, 9 aa, synthetic construct
  REGION 1..9: note = Description of Artificial Sequence: Synthetic peptide
NVTTVIRDK

SEQ ID NO: 18018 - protein, 10 aa, synthetic construct
  REGION 1..10: note = Description of Artificial Sequence: Synthetic peptide
DSPIEITCTR

SEQ ID NO: 18019 - protein, 11 aa, synthetic construct
  REGION 1..11: note = Description of Artificial Sequence: Synthetic peptide
VVALTETTNQK

SEQ ID NO: 18020 - protein, 10 aa, synthetic construct
  REGION 1..10: note = Description of Artificial Sequence: Synthetic peptide
DIIATDIQTK

SEQ ID NO: 18021 - protein, 11 aa, synthetic construct
  REGION 1..11: note = Description of Artificial Sequence: Synthetic peptide
TAIAVAEGTDR

SEQ ID NO: 18022 - protein, 11 aa, synthetic construct
  REGION 1..11: note = Description of Artificial Sequence: Synthetic peptide
YVTGEVIGNIR

SEQ ID NO: 18023 - protein, 9 aa, synthetic construct
  REGION 1..9: note = Description of Artificial Sequence: Synthetic peptide
DNYTEVIYR

SEQ ID NO: 18024 - protein, 11 aa, synthetic construct
  REGION 1..11: note = Description of Artificial Sequence: Synthetic peptide
VGPTPVNIIGR

SEQ ID NO: 18025 - protein, 10 aa, synthetic construct
  REGION 1..10: note = Description of Artificial Sequence: Synthetic peptide
AADGVGAVSR

SEQ ID NO: 18026 - protein, 11 aa, synthetic construct
  REGION 1..11: note = Description of Artificial Sequence: Synthetic peptide
ATGDIIGDIRR

SEQ ID NO: 18027 - protein, 9 aa, synthetic construct
  REGION 1..9: note = Description of Artificial Sequence: Synthetic peptide
FAVLSIVGR

SEQ ID NO: 18028 - protein, 10 aa, synthetic construct
  REGION 1..10: note = Description of Artificial Sequence: Synthetic peptide
STILGTGTKE

SEQ ID NO: 18029 - protein, 11 aa, synthetic construct
  REGION 1..11: note = Description of Artificial Sequence: Synthetic peptide
TNANAAIMMQK

SEQ ID NO: 18030 - protein, 9 aa, synthetic construct
  REGION 1..9: note = Description of Artificial Sequence: Synthetic peptide
ETAYFILKL

SEQ ID NO: 18031 - protein, 9 aa, synthetic construct
  REGION 1..9: note = Description of Artificial Sequence: Synthetic peptide
ETAYFLLKL

SEQ ID NO: 18032 - protein, 9 aa, synthetic construct
  REGION 1..9: note = Description of Artificial Sequence: Synthetic peptide
TVLSIINSV

SEQ ID NO: 18033 - protein, 9 aa, synthetic construct
  REGION 1..9: note = Description of Artificial Sequence: Synthetic peptide
QVILVAVHV

SEQ ID NO: 18034 - protein, 9 aa, synthetic construct
  REGION 1..9: note = Description of Artificial Sequence: Synthetic peptide
DTSEALNKV

SEQ ID NO: 18035 - protein, 9 aa, synthetic construct
  REGION 1..9: note = Description of Artificial Sequence: Synthetic peptide
EVIGNIRQA

SEQ ID NO: 18036 - protein, 9 aa, synthetic construct
  REGION 1..9: note = Description of Artificial Sequence: Synthetic peptide
NTIAVLYCV

SEQ ID NO: 18037 - protein, 9 aa, synthetic construct
  REGION 1..9: note = Description of Artificial Sequence: Synthetic peptide
TTSTLQEQV

SEQ ID NO: 18038 - protein, 9 aa, synthetic construct
  REGION 1..9: note = Description of Artificial Sequence: Synthetic peptide
NTKNIIVQL

SEQ ID NO: 18039 - protein, 9 aa, synthetic construct
  REGION 1..9: note = Description of Artificial Sequence: Synthetic peptide
NTSVITQAC

SEQ ID NO: 18040 - protein, 9 aa, synthetic construct
  REGION 1..9: note = Description of Artificial Sequence: Synthetic peptide
EITSHTFNC

SEQ ID NO: 18041 - protein, 9 aa, synthetic construct
  REGION 1..9: note = Description of Artificial Sequence: Synthetic peptide
QLTEVVQKI

SEQ ID NO: 18042 - protein, 9 aa, synthetic construct
  REGION 1..9: note = Description of Artificial Sequence: Synthetic peptide
TSSEVHIPV

SEQ ID NO: 18043 - protein, 9 aa, synthetic construct
  REGION 1..9: note = Description of Artificial Sequence: Synthetic peptide
TVNDIQKLV

SEQ ID NO: 18044 - protein, 9 aa, synthetic construct
  REGION 1..9: note = Description of Artificial Sequence: Synthetic peptide
ATGDIIGNI

SEQ ID NO: 18045 - protein, 9 aa, synthetic construct
  REGION 1..9: note = Description of Artificial Sequence: Synthetic peptide
EVTTHSFNC

SEQ ID NO: 18046 - protein, 9 aa, synthetic construct
  REGION 1..9: note = Description of Artificial Sequence: Synthetic peptide
ETYYIDGAA

SEQ ID NO: 18047 - protein, 11 aa, synthetic construct
  REGION 1..11: note = Description of Artificial Sequence: Synthetic peptide
ESSTILGTGTK

SEQ ID NO: 18048 - protein, 9 aa, synthetic construct
  REGION 1..9: note = Description of Artificial Sequence: Synthetic peptide
EVIYRLLEL

SEQ ID NO: 18049 - protein, 9 aa, synthetic construct
  REGION 1..9: note = Description of Artificial Sequence: Synthetic peptide
YTAFTIPSI

SEQ ID NO: 18050 - protein, 9 aa, synthetic construct
  REGION 1..9: note = Description of Artificial Sequence: Synthetic peptide
GAASITLTV

SEQ ID NO: 18051 - protein, 9 aa, synthetic construct
  REGION 1..9: note = Description of Artificial Sequence: Synthetic peptide
TTSTLQEQI

SEQ ID NO: 18052 - protein, 9 aa, synthetic construct
  REGION 1..9: note = Description of Artificial Sequence: Synthetic peptide
EVIPMFSAL

SEQ ID NO: 18053 - protein, 11 aa, synthetic construct
  REGION 1..11: note = Description of Artificial Sequence: Synthetic peptide
ETYYIDGAANR

SEQ ID NO: 18054 - protein, 9 aa, synthetic construct
  REGION 1..9: note = Description of Artificial Sequence: Synthetic peptide
VVTFIIAVI

SEQ ID NO: 18055 - protein, 10 aa, synthetic construct
  REGION 1..10: note = Description of Artificial Sequence: Synthetic peptide
NTYGDTWVGV

SEQ ID NO: 18056 - protein, 9 aa, synthetic construct
  REGION 1..9: note = Description of Artificial Sequence: Synthetic peptide
LTFGYVADL

SEQ ID NO: 18057 - protein, 9 aa, synthetic construct
  REGION 1..9: note = Description of Artificial Sequence: Synthetic peptide
NITGLILTI

SEQ ID NO: 18058 - protein, 9 aa, synthetic construct
  REGION 1..9: note = Description of Artificial Sequence: Synthetic peptide
EAMSQVTNA

SEQ ID NO: 18059 - protein, 9 aa, synthetic construct
  REGION 1..9: note = Description of Artificial Sequence: Synthetic peptide
EALGKIEEI

SEQ ID NO: 18060 - protein, 9 aa, synthetic construct
  REGION 1..9: note = Description of Artificial Sequence: Synthetic peptide
AVLSIVNRV

SEQ ID NO: 18061 - protein, 9 aa, synthetic construct
  REGION 1..9: note = Description of Artificial Sequence: Synthetic peptide
EALDKIEEI

SEQ ID NO: 18062 - protein, 9 aa, synthetic construct
  REGION 1..9: note = Description of Artificial Sequence: Synthetic peptide
DVKQLTEAV

SEQ ID NO: 18063 - protein, 9 aa, synthetic construct
  REGION 1..9: note = Description of Artificial Sequence: Synthetic peptide
ESFGFGEEI

SEQ ID NO: 18064 - protein, 9 aa, synthetic construct
  REGION 1..9: note = Description of Artificial Sequence: Synthetic peptide
MTGNPPIPV

SEQ ID NO: 18065 - protein, 9 aa, synthetic construct
  REGION 1..9: note = Description of Artificial Sequence: Synthetic peptide
ETADGCQQI

SEQ ID NO: 18066 - protein, 11 aa, synthetic construct
  REGION 1..11: note = Description of Artificial Sequence: Synthetic peptide
EVVQKIATESI

SEQ ID NO: 18067 - protein, 9 aa, synthetic construct
  REGION 1..9: note = Description of Artificial Sequence: Synthetic peptide
GTDGIIVIV

SEQ ID NO: 18068 - protein, 9 aa, synthetic construct
  REGION 1..9: note = Description of Artificial Sequence: Synthetic peptide
EIKSLFNLV

SEQ ID NO: 18069 - protein, 10 aa, synthetic construct
  REGION 1..10: note = Description of Artificial Sequence: Synthetic peptide
RPNNNTRTSI

SEQ ID NO: 18070 - protein, 9 aa, synthetic construct
  REGION 1..9: note = Description of Artificial Sequence: Synthetic peptide
SPAIFQNSM

SEQ ID NO: 18071 - protein, 8 aa, synthetic construct
  REGION 1..8: note = Description of Artificial Sequence: Synthetic peptide
TPSPRQEL

SEQ ID NO: 18072 - protein, 11 aa, synthetic construct
  REGION 1..11: note = Description of Artificial Sequence: Synthetic peptide
MPNDTGKNITL

SEQ ID NO: 18073 - protein, 9 aa, synthetic construct
  REGION 1..9: note = Description of Artificial Sequence: Synthetic peptide
SPAIFQSSM

SEQ ID NO: 18074 - protein, 9 aa, synthetic construct
  REGION 1..9: note = Description of Artificial Sequence: Synthetic peptide
TPSPKQEQL

SEQ ID NO: 18075 - protein, 9 aa, synthetic construct
  REGION 1..9: note = Description of Artificial Sequence: Synthetic peptide
SPTSRELRV

SEQ ID NO: 18076 - protein, 10 aa, synthetic construct
  REGION 1..10: note = Description of Artificial Sequence: Synthetic peptide
SPIETVPVTL

SEQ ID NO: 18077 - protein, 10 aa, synthetic construct
  REGION 1..10: note = Description of Artificial Sequence: Synthetic peptide
SIRIGPGQAF

SEQ ID NO: 18078 - protein, 9 aa, synthetic construct
  REGION 1..9: note = Description of Artificial Sequence: Synthetic peptide
YPNIKVKQL

SEQ ID NO: 18079 - protein, 9 aa, synthetic construct
  REGION 1..9: note = Description of Artificial Sequence: Synthetic peptide
IPVESSTVL

SEQ ID NO: 18080 - protein, 9 aa, synthetic construct
  REGION 1..9: note = Description of Artificial Sequence: Synthetic peptide
RPMTYKAAL

SEQ ID NO: 18081 - protein, 9 aa, synthetic construct
  REGION 1..9: note = Description of Artificial Sequence: Synthetic peptide
GPSHKARVL

SEQ ID NO: 18082 - protein, 9 aa, synthetic construct
  REGION 1..9: note = Description of Artificial Sequence: Synthetic peptide
SPTSRMLRV

SEQ ID NO: 18083 - protein, 8 aa, synthetic construct
  REGION 1..8: note = Description of Artificial Sequence: Synthetic peptide
KPVVSTQL

SEQ ID NO: 18084 - protein, 8 aa, synthetic construct
  REGION 1..8: note = Description of Artificial Sequence: Synthetic peptide
RPVVSTQL

SEQ ID NO: 18085 - protein, 10 aa, synthetic construct
  REGION 1..10: note = Description of Artificial Sequence: Synthetic peptide
SPIETVPVKL

SEQ ID NO: 18086 - protein, 9 aa, synthetic construct
  REGION 1..9: note = Description of Artificial Sequence: Synthetic peptide
RPMTYKGAL

SEQ ID NO: 18087 - protein, 10 aa, synthetic construct
  REGION 1..10: note = Description of Artificial Sequence: Synthetic peptide
KEKEPPLTSL

SEQ ID NO: 18088 - protein, 10 aa, synthetic construct
  REGION 1..10: note = Description of Artificial Sequence: Synthetic peptide
KEQEPPLTSL

SEQ ID NO: 18089 - protein, 9 aa, synthetic construct
  REGION 1..9: note = Description of Artificial Sequence: Synthetic peptide
APPIQGNIM

SEQ ID NO: 18090 - protein, 9 aa, synthetic construct
  REGION 1..9: note = Description of Artificial Sequence: Synthetic peptide
TPQDLNAML

SEQ ID NO: 18091 - protein, 9 aa, synthetic construct
  REGION 1..9: note = Description of Artificial Sequence: Synthetic peptide
VPLTKEAEL

SEQ ID NO: 18092 - protein, 9 aa, synthetic construct
  REGION 1..9: note = Description of Artificial Sequence: Synthetic peptide
YPNIKVKQL

SEQ ID NO: 18093 - protein, 9 aa, synthetic construct
  REGION 1..9: note = Description of Artificial Sequence: Synthetic peptide
RGKQKVVSL

SEQ ID NO: 18094 - protein, 9 aa, synthetic construct
  REGION 1..9: note = Description of Artificial Sequence: Synthetic peptide
KGKQKVVAL

SEQ ID NO: 18095 - protein, 9 aa, synthetic construct
  REGION 1..9: note = Description of Artificial Sequence: Synthetic peptide
HLNNRTISF

SEQ ID NO: 18096 - protein, 9 aa, synthetic construct
  REGION 1..9: note = Description of Artificial Sequence: Synthetic peptide
ELKNSAISL

SEQ ID NO: 18097 - protein, 9 aa, synthetic construct
  REGION 1..9: note = Description of Artificial Sequence: Synthetic peptide
DIKQLTEAV

SEQ ID NO: 18098 - protein, 9 aa, synthetic construct
  REGION 1..9: note = Description of Artificial Sequence: Synthetic peptide
RGKQKIVSL

SEQ ID NO: 18099 - protein, 8 aa, synthetic construct
  REGION 1..8: note = Description of Artificial Sequence: Synthetic peptide
DPIPKQPL

SEQ ID NO: 18100 - protein, 9 aa, synthetic construct
  REGION 1..9: note = Description of Artificial Sequence: Synthetic peptide
DVKDTKEAL

SEQ ID NO: 18101 - protein, 9 aa, synthetic construct
  REGION 1..9: note = Description of Artificial Sequence: Synthetic peptide
VPLTKEAEL

SEQ ID NO: 18102 - protein, 9 aa, synthetic construct
  REGION 1..9: note = Description of Artificial Sequence: Synthetic peptide
DVKQLTEAV

SEQ ID NO: 18103 - protein, 9 aa, synthetic construct
  REGION 1..9: note = Description of Artificial Sequence: Synthetic peptide
DSAIRKAIL

SEQ ID NO: 18104 - protein, 9 aa, synthetic construct
  REGION 1..9: note = Description of Artificial Sequence: Synthetic peptide
DKQQKVHAL

SEQ ID NO: 18105 - protein, 8 aa, synthetic construct
  REGION 1..8: note = Description of Artificial Sequence: Synthetic peptide
TTNQKTEL

SEQ ID NO: 18106 - protein, 9 aa, synthetic construct
  REGION 1..9: note = Description of Artificial Sequence: Synthetic peptide
SIVARTVEL

SEQ ID NO: 18107 - protein, 9 aa, synthetic construct
  REGION 1..9: note = Description of Artificial Sequence: Synthetic peptide
DMEVRTHSF

SEQ ID NO: 18108 - protein, 8 aa, synthetic construct
  REGION 1..8: note = Description of Artificial Sequence: Synthetic peptide
HLKTAVQM

SEQ ID NO: 18109 - protein, 9 aa, synthetic construct
  REGION 1..9: note = Description of Artificial Sequence: Synthetic peptide
DKNQKVHAL

SEQ ID NO: 18110 - protein, 9 aa, synthetic construct
  REGION 1..9: note = Description of Artificial Sequence: Synthetic peptide
TGHNKVGSL

SEQ ID NO: 18111 - protein, 11 aa, synthetic construct
  REGION 1..11: note = Description of Artificial Sequence: Synthetic peptide
MPNDTGKNITL

SEQ ID NO: 18112 - protein, 9 aa, synthetic construct
  REGION 1..9: note = Description of Artificial Sequence: Synthetic peptide
LIVVRTVEL

SEQ ID NO: 18113 - protein, 11 aa, synthetic construct
  REGION 1..11: note = Description of Artificial Sequence: Synthetic peptide
TQIDPDLADQL

SEQ ID NO: 18114 - protein, 11 aa, synthetic construct
  REGION 1..11: note = Description of Artificial Sequence: Synthetic peptide
TQVDPGLADQL

SEQ ID NO: 18115 - protein, 11 aa, synthetic construct
  REGION 1..11: note = Description of Artificial Sequence: Synthetic peptide
TQVDPDLADQL

SEQ ID NO: 18116 - protein, 11 aa, synthetic construct
  REGION 1..11: note = Description of Artificial Sequence: Synthetic peptide
TQVEPGLADQL

SEQ ID NO: 18117 - protein, 9 aa, synthetic construct
  REGION 1..9: note = Description of Artificial Sequence: Synthetic peptide
KQISQIQKF

SEQ ID NO: 18118 - protein, 9 aa, synthetic construct
  REGION 1..9: note = Description of Artificial Sequence: Synthetic peptide
QLTEVVQKI

SEQ ID NO: 18119 - protein, 10 aa, synthetic construct
  REGION 1..10: note = Description of Artificial Sequence: Synthetic peptide
KQINNYTDEI

SEQ ID NO: 18120 - protein, 10 aa, synthetic construct
  REGION 1..10: note = Description of Artificial Sequence: Synthetic peptide
AQEEAEEVGF

SEQ ID NO: 18121 - protein, 10 aa, synthetic construct
  REGION 1..10: note = Description of Artificial Sequence: Synthetic peptide
GQVRDQAEHL

SEQ ID NO: 18122 - protein, 9 aa, synthetic construct
  REGION 1..9: note = Description of Artificial Sequence: Synthetic peptide
KQISNIQKF

SEQ ID NO: 18123 - protein, 11 aa, synthetic construct
  REGION 1..11: note = Description of Artificial Sequence: Synthetic peptide
TQQEQNEQDLL

SEQ ID NO: 18124 - protein, 10 aa, synthetic construct
  REGION 1..10: note = Description of Artificial Sequence: Synthetic peptide
YVDNGTNVTL

SEQ ID NO: 18125 - protein, 9 aa, synthetic construct
  REGION 1..9: note = Description of Artificial Sequence: Synthetic peptide
GQGASIEEM

SEQ ID NO: 18126 - protein, 10 aa, synthetic construct
  REGION 1..10: note = Description of Artificial Sequence: Synthetic peptide
AQEDGEEVGF

SEQ ID NO: 18127 - protein, 10 aa, synthetic construct
  REGION 1..10: note = Description of Artificial Sequence: Synthetic peptide
KQLTEAVQKI

SEQ ID NO: 18128 - protein, 9 aa, synthetic construct
  REGION 1..9: note = Description of Artificial Sequence: Synthetic peptide
VLANVTENF

SEQ ID NO: 18129 - protein, 9 aa, synthetic construct
  REGION 1..9: note = Description of Artificial Sequence: Synthetic peptide
QLTEVVQKI

SEQ ID NO: 18130 - protein, 9 aa, synthetic construct
  REGION 1..9: note = Description of Artificial Sequence: Synthetic peptide
HQVVTQLGI

SEQ ID NO: 18131 - protein, 9 aa, synthetic construct
  REGION 1..9: note = Description of Artificial Sequence: Synthetic peptide
QQHMLQLTV

SEQ ID NO: 18132 - protein, 9 aa, synthetic construct
  REGION 1..9: note = Description of Artificial Sequence: Synthetic peptide
GAASITLTV

SEQ ID NO: 18133 - protein, 9 aa, synthetic construct
  REGION 1..9: note = Description of Artificial Sequence: Synthetic peptide
QLTEAVQKI

SEQ ID NO: 18134 - protein, 8 aa, synthetic construct
  REGION 1..8: note = Description of Artificial Sequence: Synthetic peptide
GQMVHQAI

SEQ ID NO: 18135 - protein, 9 aa, synthetic construct
  REGION 1..9: note = Description of Artificial Sequence: Synthetic peptide
SQIYPGIKV

SEQ ID NO: 18136 - protein, 8 aa, synthetic construct
  REGION 1..8: note = Description of Artificial Sequence: Synthetic peptide
GQVILVAV

SEQ ID NO: 18137 - protein, 9 aa, synthetic construct
  REGION 1..9: note = Description of Artificial Sequence: Synthetic peptide
SQIYPNIKV

SEQ ID NO: 18138 - protein, 9 aa, synthetic construct
  REGION 1..9: note = Description of Artificial Sequence: Synthetic peptide
GQVDCSPGI

SEQ ID NO: 18139 - protein, 9 aa, synthetic construct
  REGION 1..9: note = Description of Artificial Sequence: Synthetic peptide
VQLKTPVNI

SEQ ID NO: 18140 - protein, 9 aa, synthetic construct
  REGION 1..9: note = Description of Artificial Sequence: Synthetic peptide
VQFNESVQI

SEQ ID NO: 18141 - protein, 9 aa, synthetic construct
  REGION 1..9: note = Description of Artificial Sequence: Synthetic peptide
VQKIATESI

SEQ ID NO: 18142 - protein, 8 aa, synthetic construct
  REGION 1..8: note = Description of Artificial Sequence: Synthetic peptide
VQIEPLGI

SEQ ID NO: 18143 - protein, 9 aa, synthetic construct
  REGION 1..9: note = Description of Artificial Sequence: Synthetic peptide
GQGQWTYQI

SEQ ID NO: 18144 - protein, 9 aa, synthetic construct
  REGION 1..9: note = Description of Artificial Sequence: Synthetic peptide
VQLDSPIEI

SEQ ID NO: 18145 - protein, 9 aa, synthetic construct
  REGION 1..9: note = Description of Artificial Sequence: Synthetic peptide
VQLNEPVQI

SEQ ID NO: 18146 - protein, 9 aa, synthetic construct
  REGION 1..9: note = Description of Artificial Sequence: Synthetic peptide
AVLSIVNRV

SEQ ID NO: 18147 - protein, 10 aa, synthetic construct
  REGION 1..10: note = Description of Artificial Sequence: Synthetic peptide
AQGQMVHQAI

SEQ ID NO: 18148 - protein, 9 aa, synthetic construct
  REGION 1..9: note = Description of Artificial Sequence: Synthetic peptide
RQHMLQLTV

SEQ ID NO: 18149 - protein, 9 aa, synthetic construct
  REGION 1..9: note = Description of Artificial Sequence: Synthetic peptide
VQKISTESI

SEQ ID NO: 18150 - protein, 9 aa, synthetic construct
  REGION 1..9: note = Description of Artificial Sequence: Synthetic peptide
VQNAQGQMV

SEQ ID NO: 18151 - protein, 9 aa, synthetic construct
  REGION 1..9: note = Description of Artificial Sequence: Synthetic peptide
TVLSIINSV

SEQ ID NO: 18152 - protein, 9 aa, synthetic construct
  REGION 1..9: note = Description of Artificial Sequence: Synthetic peptide
GQAMYAPPI

SEQ ID NO: 18153 - protein, 9 aa, synthetic construct
  REGION 1..9: note = Description of Artificial Sequence: Synthetic peptide
KQVGTLQYL

SEQ ID NO: 18154 - protein, 9 aa, synthetic construct
  REGION 1..9: note = Description of Artificial Sequence: Synthetic peptide
VLAEAMSQV

SEQ ID NO: 18155 - protein, 10 aa, synthetic construct
  REGION 1..10: note = Description of Artificial Sequence: Synthetic peptide
KQLTEAVQKI

SEQ ID NO: 18156 - protein, 10 aa, synthetic construct
  REGION 1..10: note = Description of Artificial Sequence: Synthetic peptide
RQYDQVAIEI

SEQ ID NO: 18157 - protein, 9 aa, synthetic construct
  REGION 1..9: note = Description of Artificial Sequence: Synthetic peptide
GQLQPALKT

SEQ ID NO: 18158 - protein, 9 aa, synthetic construct
  REGION 1..9: note = Description of Artificial Sequence: Synthetic peptide
TLYNVVNQL

SEQ ID NO: 18159 - protein, 9 aa, synthetic construct
  REGION 1..9: note = Description of Artificial Sequence: Synthetic peptide
RQIDNYTEV

SEQ ID NO: 18160 - protein, 10 aa, synthetic construct
  REGION 1..10: note = Description of Artificial Sequence: Synthetic peptide
SQVTNTNTAI

SEQ ID NO: 18161 - protein, 9 aa, synthetic construct
  REGION 1..9: note = Description of Artificial Sequence: Synthetic peptide
YQLETEPIV

SEQ ID NO: 18162 - protein, 9 aa, synthetic construct
  REGION 1..9: note = Description of Artificial Sequence: Synthetic peptide
NITGLILTI

SEQ ID NO: 18163 - protein, 9 aa, synthetic construct
  REGION 1..9: note = Description of Artificial Sequence: Synthetic peptide
VVKIEPLGV

SEQ ID NO: 18164 - protein, 9 aa, synthetic construct
  REGION 1..9: note = Description of Artificial Sequence: Synthetic peptide
NQVGSLQYL

SEQ ID NO: 18165 - protein, 9 aa, synthetic construct
  REGION 1..9: note = Description of Artificial Sequence: Synthetic peptide
SLAEGQVII

SEQ ID NO: 18166 - protein, 9 aa, synthetic construct
  REGION 1..9: note = Description of Artificial Sequence: Synthetic peptide
SLQDHQNSI

SEQ ID NO: 18167 - protein, 9 aa, synthetic construct
  REGION 1..9: note = Description of Artificial Sequence: Synthetic peptide
KQISQIQKF

SEQ ID NO: 18168 - protein, 9 aa, synthetic construct
  REGION 1..9: note = Description of Artificial Sequence: Synthetic peptide
GQEQWTYQI

SEQ ID NO: 18169 - protein, 9 aa, synthetic construct
  REGION 1..9: note = Description of Artificial Sequence: Synthetic peptide
KQISNIQKF

SEQ ID NO: 18170 - protein, 10 aa, synthetic construct
  REGION 1..10: note = Description of Artificial Sequence: Synthetic peptide
KQLTEVVQKI

SEQ ID NO: 18171 - protein, 9 aa, synthetic construct
  REGION 1..9: note = Description of Artificial Sequence: Synthetic peptide
QVILVAVHV

SEQ ID NO: 18172 - protein, 9 aa, synthetic construct
  REGION 1..9: note = Description of Artificial Sequence: Synthetic peptide
VVKIEPLGI

SEQ ID NO: 18173 - protein, 8 aa, synthetic construct
  REGION 1..8: note = Description of Artificial Sequence: Synthetic peptide
GQETAYFI

SEQ ID NO: 18174 - protein, 10 aa, synthetic construct
  REGION 1..10: note = Description of Artificial Sequence: Synthetic peptide
RQTEPAAEGV

SEQ ID NO: 18175 - protein, 10 aa, synthetic construct
  REGION 1..10: note = Description of Artificial Sequence: Synthetic peptide
GQVILVAVHV

SEQ ID NO: 18176 - protein, 9 aa, synthetic construct
  REGION 1..9: note = Description of Artificial Sequence: Synthetic peptide
NQKTELQAI

SEQ ID NO: 18177 - protein, 9 aa, synthetic construct
  REGION 1..9: note = Description of Artificial Sequence: Synthetic peptide
ALQDSGLEV

SEQ ID NO: 18178 - protein, 10 aa, synthetic construct
  REGION 1..10: note = Description of Artificial Sequence: Synthetic peptide
RQYEQVAIEI

SEQ ID NO: 18179 - protein, 9 aa, synthetic construct
  REGION 1..9: note = Description of Artificial Sequence: Synthetic peptide
ERYLRDQQL

SEQ ID NO: 18180 - protein, 8 aa, synthetic construct
  REGION 1..8: note = Description of Artificial Sequence: Synthetic peptide
ERVLATCL

SEQ ID NO: 18181 - protein, 9 aa, synthetic construct
  REGION 1..9: note = Description of Artificial Sequence: Synthetic peptide
ERYLKDQQL

SEQ ID NO: 18182 - protein, 8 aa, synthetic construct
  REGION 1..8: note = Description of Artificial Sequence: Synthetic peptide
ERILTSCL

SEQ ID NO: 18183 - protein, 9 aa, synthetic construct
  REGION 1..9: note = Description of Artificial Sequence: Synthetic peptide
DRFALNPDL

SEQ ID NO: 18184 - protein, 8 aa, synthetic construct
  REGION 1..8: note = Description of Artificial Sequence: Synthetic peptide
ERILHTCL

SEQ ID NO: 18185 - protein, 9 aa, synthetic construct
  REGION 1..9: note = Description of Artificial Sequence: Synthetic peptide
ERFALNPGL

SEQ ID NO: 18186 - protein, 9 aa, synthetic construct
  REGION 1..9: note = Description of Artificial Sequence: Synthetic peptide
ERYLRDQQL

SEQ ID NO: 18187 - protein, 8 aa, synthetic construct
  REGION 1..8: note = Description of Artificial Sequence: Synthetic peptide
ERILHTCL

SEQ ID NO: 18188 - protein, 9 aa, synthetic construct
  REGION 1..9: note = Description of Artificial Sequence: Synthetic peptide
ERYLKDQQL

SEQ ID NO: 18189 - protein, 9 aa, synthetic construct
  REGION 1..9: note = Description of Artificial Sequence: Synthetic peptide
DKQQRVHAL

SEQ ID NO: 18190 - protein, 8 aa, synthetic construct
  REGION 1..8: note = Description of Artificial Sequence: Synthetic peptide
NETLHKVI

SEQ ID NO: 18191 - protein, 8 aa, synthetic construct
  REGION 1..8: note = Description of Artificial Sequence: Synthetic peptide
GQMVHQAI

SEQ ID NO: 18192 - protein, 8 aa, synthetic construct
  REGION 1..8: note = Description of Artificial Sequence: Synthetic peptide
DQLIHTHY

SEQ ID NO: 18193 - protein, 8 aa, synthetic construct
  REGION 1..8: note = Description of Artificial Sequence: Synthetic peptide
ERVLATCL

SEQ ID NO: 18194 - protein, 9 aa, synthetic construct
  REGION 1..9: note = Description of Artificial Sequence: Synthetic peptide
DRKKKVQAL

SEQ ID NO: 18195 - protein, 8 aa, synthetic construct
  REGION 1..8: note = Description of Artificial Sequence: Synthetic peptide
IQKLVGKL

SEQ ID NO: 18196 - protein, 9 aa, synthetic construct
  REGION 1..9: note = Description of Artificial Sequence: Synthetic peptide
DEIYRLLEV

SEQ ID NO: 18197 - protein, 8 aa, synthetic construct
  REGION 1..8: note = Description of Artificial Sequence: Synthetic peptide
ERILTSCL

SEQ ID NO: 18198 - protein, 9 aa, synthetic construct
  REGION 1..9: note = Description of Artificial Sequence: Synthetic peptide
AQNLWVTVY

SEQ ID NO: 18199 - protein, 9 aa, synthetic construct
  REGION 1..9: note = Description of Artificial Sequence: Synthetic peptide
KQISNIQKF

SEQ ID NO: 18200 - protein, 9 aa, synthetic construct
  REGION 1..9: note = Description of Artificial Sequence: Synthetic peptide
KQISQIQKF

SEQ ID NO: 18201 - protein, 10 aa, synthetic construct
  REGION 1..10: note = Description of Artificial Sequence: Synthetic peptide
QQIATQLSKY

SEQ ID NO: 18202 - protein, 9 aa, synthetic construct
  REGION 1..9: note = Description of Artificial Sequence: Synthetic peptide
IINSVRQGY

SEQ ID NO: 18203 - protein, 9 aa, synthetic construct
  REGION 1..9: note = Description of Artificial Sequence: Synthetic peptide
KQNPEVIIY

SEQ ID NO: 18204 - protein, 9 aa, synthetic construct
  REGION 1..9: note = Description of Artificial Sequence: Synthetic peptide
KQNPEMVIY

SEQ ID NO: 18205 - protein, 9 aa, synthetic construct
  REGION 1..9: note = Description of Artificial Sequence: Synthetic peptide
VLANVTENF

SEQ ID NO: 18206 - protein, 8 aa, synthetic construct
  REGION 1..8: note = Description of Artificial Sequence: Synthetic peptide
GQYIYNTY

SEQ ID NO: 18207 - protein, 8 aa, synthetic construct
  REGION 1..8: note = Description of Artificial Sequence: Synthetic peptide
GQHIYNTY

SEQ ID NO: 18208 - protein, 9 aa, synthetic construct
  REGION 1..9: note = Description of Artificial Sequence: Synthetic peptide
KQGPDQWTY

SEQ ID NO: 18209 - protein, 9 aa, synthetic construct
  REGION 1..9: note = Description of Artificial Sequence: Synthetic peptide
RVMETQRNY

SEQ ID NO: 18210 - protein, 9 aa, synthetic construct
  REGION 1..9: note = Description of Artificial Sequence: Synthetic peptide
KQNPEIIIY

SEQ ID NO: 18211 - protein, 11 aa, synthetic construct
  REGION 1..11: note = Description of Artificial Sequence: Synthetic peptide
IQKQGPDQWTY

SEQ ID NO: 18212 - protein, 9 aa, synthetic construct
  REGION 1..9: note = Description of Artificial Sequence: Synthetic peptide
SVLDVGGAY

SEQ ID NO: 18213 - protein, 9 aa, synthetic construct
  REGION 1..9: note = Description of Artificial Sequence: Synthetic peptide
AIMMQKSNF

SEQ ID NO: 18214 - protein, 9 aa, synthetic construct
  REGION 1..9: note = Description of Artificial Sequence: Synthetic peptide
TQACPKVSF

SEQ ID NO: 18215 - protein, 9 aa, synthetic construct
  REGION 1..9: note = Description of Artificial Sequence: Synthetic peptide
VQKIATESI

SEQ ID NO: 18216 - protein, 9 aa, synthetic construct
  REGION 1..9: note = Description of Artificial Sequence: Synthetic peptide
KQGQGQWTY

SEQ ID NO: 18217 - protein, 9 aa, synthetic construct
  REGION 1..9: note = Description of Artificial Sequence: Synthetic peptide
VLAEAMSQM

SEQ ID NO: 18218 - protein, 9 aa, synthetic construct
  REGION 1..9: note = Description of Artificial Sequence: Synthetic peptide
TQACPKVTF

SEQ ID NO: 18219 - protein, 9 aa, synthetic construct
  REGION 1..9: note = Description of Artificial Sequence: Synthetic peptide
KQGQEQWTY

SEQ ID NO: 18220 - protein, 9 aa, synthetic construct
  REGION 1..9: note = Description of Artificial Sequence: Synthetic peptide
TQIGCTLNF

SEQ ID NO: 18221 - protein, 10 aa, synthetic construct
  REGION 1..10: note = Description of Artificial Sequence: Synthetic peptide
GTNGTNRTLY

SEQ ID NO: 18222 - protein, 9 aa, synthetic construct
  REGION 1..9: note = Description of Artificial Sequence: Synthetic peptide
SVLDVGDAY

SEQ ID NO: 18223 - protein, 10 aa, synthetic construct
  REGION 1..10: note = Description of Artificial Sequence: Synthetic peptide
SIINSVRQGY

SEQ ID NO: 18224 - protein, 9 aa, synthetic construct
  REGION 1..9: note = Description of Artificial Sequence: Synthetic peptide
IQKQGQEQW

SEQ ID NO: 18225 - protein, 9 aa, synthetic construct
  REGION 1..9: note = Description of Artificial Sequence: Synthetic peptide
VQKISTESI

SEQ ID NO: 18226 - protein, 9 aa, synthetic construct
  REGION 1..9: note = Description of Artificial Sequence: Synthetic peptide
TVLDVGDAY

SEQ ID NO: 18227 - protein, 9 aa, synthetic construct
  REGION 1..9: note = Description of Artificial Sequence: Synthetic peptide
SQIQKFRVY

SEQ ID NO: 18228 - protein, 9 aa, synthetic construct
  REGION 1..9: note = Description of Artificial Sequence: Synthetic peptide
VQQEFGIPY

SEQ ID NO: 18229 - protein, 10 aa, synthetic construct
  REGION 1..10: note = Description of Artificial Sequence: Synthetic peptide
MVMENVTESF

SEQ ID NO: 18230 - protein, 9 aa, synthetic construct
  REGION 1..9: note = Description of Artificial Sequence: Synthetic peptide
IHIGPGQAF

SEQ ID NO: 18231 - protein, 9 aa, synthetic construct
  REGION 1..9: note = Description of Artificial Sequence: Synthetic peptide
IRIGPGQAF

SEQ ID NO: 18232 - protein, 10 aa, synthetic construct
  REGION 1..10: note = Description of Artificial Sequence: Synthetic peptide
VPIDNNSTQY

SEQ ID NO: 18233 - protein, 10 aa, synthetic construct
  REGION 1..10: note = Description of Artificial Sequence: Synthetic peptide
ILKEPVHGAY

SEQ ID NO: 18234 - protein, 9 aa, synthetic construct
  REGION 1..9: note = Description of Artificial Sequence: Synthetic peptide
RIGPGQAFY

SEQ ID NO: 18235 - protein, 9 aa, synthetic construct
  REGION 1..9: note = Description of Artificial Sequence: Synthetic peptide
IQQEFGIPY

SEQ ID NO: 18236 - protein, 9 aa, synthetic construct
  REGION 1..9: note = Description of Artificial Sequence: Synthetic peptide
GQVILVAVH

SEQ ID NO: 18237 - protein, 8 aa, synthetic construct
  REGION 1..8: note = Description of Artificial Sequence: Synthetic peptide
AQVQHEKY

SEQ ID NO: 18238 - protein, 8 aa, synthetic construct
  REGION 1..8: note = Description of Artificial Sequence: Synthetic peptide
KQVGTLQY

SEQ ID NO: 18239 - protein, 8 aa, synthetic construct
  REGION 1..8: note = Description of Artificial Sequence: Synthetic peptide
AVHVASGY

SEQ ID NO: 18240 - protein, 9 aa, synthetic construct
  REGION 1..9: note = Description of Artificial Sequence: Synthetic peptide
QIATQLSKY

SEQ ID NO: 18241 - protein, 10 aa, synthetic construct
  REGION 1..10: note = Description of Artificial Sequence: Synthetic peptide
GIHIGPGQAF

SEQ ID NO: 18242 - protein, 11 aa, synthetic construct
  REGION 1..11: note = Description of Artificial Sequence: Synthetic peptide
KQNPEVIIYQY

SEQ ID NO: 18243 - protein, 9 aa, synthetic construct
  REGION 1..9: note = Description of Artificial Sequence: Synthetic peptide
FLGAAGSTM

SEQ ID NO: 18244 - protein, 8 aa, synthetic construct
  REGION 1..8: note = Description of Artificial Sequence: Synthetic peptide
GQMVHQAI

SEQ ID NO: 18245 - protein, 9 aa, synthetic construct
  REGION 1..9: note = Description of Artificial Sequence: Synthetic peptide
IQQDFGIPY

SEQ ID NO: 18246 - protein, 10 aa, synthetic construct
  REGION 1..10: note = Description of Artificial Sequence: Synthetic peptide
AGAERTGTSF

SEQ ID NO: 18247 - protein, 9 aa, synthetic construct
  REGION 1..9: note = Description of Artificial Sequence: Synthetic peptide
EQKLTNCSF

SEQ ID NO: 18248 - protein, 9 aa, synthetic construct
  REGION 1..9: note = Description of Artificial Sequence: Synthetic peptide
GAERTGTSF

SEQ ID NO: 18249 - protein, 9 aa, synthetic construct
  REGION 1..9: note = Description of Artificial Sequence: Synthetic peptide
AGNLWVTVY

SEQ ID NO: 18250 - protein, 9 aa, synthetic construct
  REGION 1..9: note = Description of Artificial Sequence: Synthetic peptide
VMENVTESF

SEQ ID NO: 18251 - protein, 9 aa, synthetic construct
  REGION 1..9: note = Description of Artificial Sequence: Synthetic peptide
KVITKLGSY

SEQ ID NO: 18252 - protein, 11 aa, synthetic construct
  REGION 1..11: note = Description of Artificial Sequence: Synthetic peptide
LQQIATQLSKY

SEQ ID NO: 18253 - protein, 8 aa, synthetic construct
  REGION 1..8: note = Description of Artificial Sequence: Synthetic peptide
NQVGSLQY

SEQ ID NO: 18254 - protein, 9 aa, synthetic construct
  REGION 1..9: note = Description of Artificial Sequence: Synthetic peptide
EQNPEMVIY

SEQ ID NO: 18255 - protein, 9 aa, synthetic construct
  REGION 1..9: note = Description of Artificial Sequence: Synthetic peptide
VLENVTETF

SEQ ID NO: 18256 - protein, 9 aa, synthetic construct
  REGION 1..9: note = Description of Artificial Sequence: Synthetic peptide
KAQVQHEKY

SEQ ID NO: 18257 - protein, 9 aa, synthetic construct
  REGION 1..9: note = Description of Artificial Sequence: Synthetic peptide
YTPGPGEGY

SEQ ID NO: 18258 - protein, 9 aa, synthetic construct
  REGION 1..9: note = Description of Artificial Sequence: Synthetic peptide
HLNNRTISF

SEQ ID NO: 18259 - protein, 8 aa, synthetic construct
  REGION 1..8: note = Description of Artificial Sequence: Synthetic peptide
WQRVGQAM

SEQ ID NO: 18260 - protein, 9 aa, synthetic construct
  REGION 1..9: note = Description of Artificial Sequence: Synthetic peptide
DARLVITTY

SEQ ID NO: 18261 - protein, 9 aa, synthetic construct
  REGION 1..9: note = Description of Artificial Sequence: Synthetic peptide
TVLDVGDAY

SEQ ID NO: 18262 - protein, 9 aa, synthetic construct
  REGION 1..9: note = Description of Artificial Sequence: Synthetic peptide
FLGAAGSTM

SEQ ID NO: 18263 - protein, 10 aa, synthetic construct
  REGION 1..10: note = Description of Artificial Sequence: Synthetic peptide
MVMENVTESF

SEQ ID NO: 18264 - protein, 9 aa, synthetic construct
  REGION 1..9: note = Description of Artificial Sequence: Synthetic peptide
SVLDVGGAY

SEQ ID NO: 18265 - protein, 10 aa, synthetic construct
  REGION 1..10: note = Description of Artificial Sequence: Synthetic peptide
VPIDNNSTQY

SEQ ID NO: 18266 - protein, 8 aa, synthetic construct
  REGION 1..8: note = Description of Artificial Sequence: Synthetic peptide
DQLIHTHY

SEQ ID NO: 18267 - protein, 9 aa, synthetic construct
  REGION 1..9: note = Description of Artificial Sequence: Synthetic peptide
VLAEAMSQM

SEQ ID NO: 18268 - protein, 9 aa, synthetic construct
  REGION 1..9: note = Description of Artificial Sequence: Synthetic peptide
SVLDVGDAY

SEQ ID NO: 18269 - protein, 9 aa, synthetic construct
  REGION 1..9: note = Description of Artificial Sequence: Synthetic peptide
EARLVITTY

SEQ ID NO: 18270 - protein, 9 aa, synthetic construct
  REGION 1..9: note = Description of Artificial Sequence: Synthetic peptide
HLNNRTISF

SEQ ID NO: 18271 - protein, 9 aa, synthetic construct
  REGION 1..9: note = Description of Artificial Sequence: Synthetic peptide
TQACPKVSF

SEQ ID NO: 18272 - protein, 9 aa, synthetic construct
  REGION 1..9: note = Description of Artificial Sequence: Synthetic peptide
EPIAGAETY

SEQ ID NO: 18273 - protein, 9 aa, synthetic construct
  REGION 1..9: note = Description of Artificial Sequence: Synthetic peptide
EPIVGAETY

SEQ ID NO: 18274 - protein, 9 aa, synthetic construct
  REGION 1..9: note = Description of Artificial Sequence: Synthetic peptide
EPIEGAETY

SEQ ID NO: 18275 - protein, 10 aa, synthetic construct
  REGION 1..10: note = Description of Artificial Sequence: Synthetic peptide
MVLENVTETF

SEQ ID NO: 18276 - protein, 9 aa, synthetic construct
  REGION 1..9: note = Description of Artificial Sequence: Synthetic peptide
TLRPGGGDM

SEQ ID NO: 18277 - protein, 9 aa, synthetic construct
  REGION 1..9: note = Description of Artificial Sequence: Synthetic peptide
TVGGHQAAM

SEQ ID NO: 18278 - protein, 10 aa, synthetic construct
  REGION 1..10: note = Description of Artificial Sequence: Synthetic peptide
SIRIGPGQAF

SEQ ID NO: 18279 - protein, 9 aa, synthetic construct
  REGION 1..9: note = Description of Artificial Sequence: Synthetic peptide
TQACPKVTF

SEQ ID NO: 18280 - protein, 9 aa, synthetic construct
  REGION 1..9: note = Description of Artificial Sequence: Synthetic peptide
EQKLTNCSF

SEQ ID NO: 18281 - protein, 9 aa, synthetic construct
  REGION 1..9: note = Description of Artificial Sequence: Synthetic peptide
NITGLILTY

SEQ ID NO: 18282 - protein, 9 aa, synthetic construct
  REGION 1..9: note = Description of Artificial Sequence: Synthetic peptide
TLYNVVNQL

SEQ ID NO: 18283 - protein, 9 aa, synthetic construct
  REGION 1..9: note = Description of Artificial Sequence: Synthetic peptide
IRIGPGQAF

SEQ ID NO: 18284 - protein, 9 aa, synthetic construct
  REGION 1..9: note = Description of Artificial Sequence: Synthetic peptide
SPAIFQNSM

SEQ ID NO: 18285 - protein, 8 aa, synthetic construct
  REGION 1..8: note = Description of Artificial Sequence: Synthetic peptide
DQLIHLHY

SEQ ID NO: 18286 - protein, 9 aa, synthetic construct
  REGION 1..9: note = Description of Artificial Sequence: Synthetic peptide
EQNPEMVIY

SEQ ID NO: 18287 - protein, 9 aa, synthetic construct
  REGION 1..9: note = Description of Artificial Sequence: Synthetic peptide
AQNLWVTVY

SEQ ID NO: 18288 - protein, 9 aa, synthetic construct
  REGION 1..9: note = Description of Artificial Sequence: Synthetic peptide
IHIGPGQAF

SEQ ID NO: 18289 - protein, 9 aa, synthetic construct
  REGION 1..9: note = Description of Artificial Sequence: Synthetic peptide
EARLVIITY

SEQ ID NO: 18290 - protein, 9 aa, synthetic construct
  REGION 1..9: note = Description of Artificial Sequence: Synthetic peptide
QIATQLSKY

SEQ ID NO: 18291 - protein, 8 aa, synthetic construct
  REGION 1..8: note = Description of Artificial Sequence: Synthetic peptide
GQYIYNTY

SEQ ID NO: 18292 - protein, 8 aa, synthetic construct
  REGION 1..8: note = Description of Artificial Sequence: Synthetic peptide
NQVGSLQY

SEQ ID NO: 18293 - protein, 10 aa, synthetic construct
  REGION 1..10: note = Description of Artificial Sequence: Synthetic peptide
YVDNGTNVTL

SEQ ID NO: 18294 - protein, 8 aa, synthetic construct
  REGION 1..8: note = Description of Artificial Sequence: Synthetic peptide
DQLIHLYY

SEQ ID NO: 18295 - protein, 10 aa, synthetic construct
  REGION 1..10: note = Description of Artificial Sequence: Synthetic peptide
FLKKGLGISY

SEQ ID NO: 18296 - protein, 9 aa, synthetic construct
  REGION 1..9: note = Description of Artificial Sequence: Synthetic peptide
DIEITSHTF

SEQ ID NO: 18297 - protein, 9 aa, synthetic construct
  REGION 1..9: note = Description of Artificial Sequence: Synthetic peptide
DAYFSVPLY

SEQ ID NO: 18298 - protein, 11 aa, synthetic construct
  REGION 1..11: note = Description of Artificial Sequence: Synthetic peptide
IPAETGKETAY

SEQ ID NO: 18299 - protein, 9 aa, synthetic construct
  REGION 1..9: note = Description of Artificial Sequence: Synthetic peptide
DIAGTTSTL

SEQ ID NO: 18300 - protein, 10 aa, synthetic construct
  REGION 1..10: note = Description of Artificial Sequence: Synthetic peptide
EVNIVTDSQY

SEQ ID NO: 18301 - protein, 9 aa, synthetic construct
  REGION 1..9: note = Description of Artificial Sequence: Synthetic peptide
HKQVGTLQY

SEQ ID NO: 18302 - protein, 9 aa, synthetic construct
  REGION 1..9: note = Description of Artificial Sequence: Synthetic peptide
AQNLWVTVY

SEQ ID NO: 18303 - protein, 8 aa, synthetic construct
  REGION 1..8: note = Description of Artificial Sequence: Synthetic peptide
GQYIYNTY

SEQ ID NO: 18304 - protein, 9 aa, synthetic construct
  REGION 1..9: note = Description of Artificial Sequence: Synthetic peptide
QKTELQAIY

SEQ ID NO: 18305 - protein, 9 aa, synthetic construct
  REGION 1..9: note = Description of Artificial Sequence: Synthetic peptide
KQISNIQKF

SEQ ID NO: 18306 - protein, 9 aa, synthetic construct
  REGION 1..9: note = Description of Artificial Sequence: Synthetic peptide
KQISQIQKF

SEQ ID NO: 18307 - protein, 9 aa, synthetic construct
  REGION 1..9: note = Description of Artificial Sequence: Synthetic peptide
KQNPEVIIY

SEQ ID NO: 18308 - protein, 9 aa, synthetic construct
  REGION 1..9: note = Description of Artificial Sequence: Synthetic peptide
SKIGPENPY

SEQ ID NO: 18309 - protein, 9 aa, synthetic construct
  REGION 1..9: note = Description of Artificial Sequence: Synthetic peptide
IRIGPGQAF

SEQ ID NO: 18310 - protein, 9 aa, synthetic construct
  REGION 1..9: note = Description of Artificial Sequence: Synthetic peptide
GKKAIGTVL

SEQ ID NO: 18311 - protein, 8 aa, synthetic construct
  REGION 1..8: note = Description of Artificial Sequence: Synthetic peptide
KKGLGISY

SEQ ID NO: 18312 - protein, 9 aa, synthetic construct
  REGION 1..9: note = Description of Artificial Sequence: Synthetic peptide
KQNPEMVIY

SEQ ID NO: 18313 - protein, 8 aa, synthetic construct
  REGION 1..8: note = Description of Artificial Sequence: Synthetic peptide
GQHIYNTY

SEQ ID NO: 18314 - protein, 9 aa, synthetic construct
  REGION 1..9: note = Description of Artificial Sequence: Synthetic peptide
LKKGLGISY

SEQ ID NO: 18315 - protein, 9 aa, synthetic construct
  REGION 1..9: note = Description of Artificial Sequence: Synthetic peptide
KQNPEIIIY

SEQ ID NO: 18316 - protein, 9 aa, synthetic construct
  REGION 1..9: note = Description of Artificial Sequence: Synthetic peptide
KQGQGQWTY

SEQ ID NO: 18317 - protein, 10 aa, synthetic construct
  REGION 1..10: note = Description of Artificial Sequence: Synthetic peptide
QQIATQLSKY

SEQ ID NO: 18318 - protein, 8 aa, synthetic construct
  REGION 1..8: note = Description of Artificial Sequence: Synthetic peptide
TKNIIVQF

SEQ ID NO: 18319 - protein, 9 aa, synthetic construct
  REGION 1..9: note = Description of Artificial Sequence: Synthetic peptide
KQGPDQWTY

SEQ ID NO: 18320 - protein, 8 aa, synthetic construct
  REGION 1..8: note = Description of Artificial Sequence: Synthetic peptide
AQVQHEKY

SEQ ID NO: 18321 - protein, 8 aa, synthetic construct
  REGION 1..8: note = Description of Artificial Sequence: Synthetic peptide
KQVGTLQY

SEQ ID NO: 18322 - protein, 9 aa, synthetic construct
  REGION 1..9: note = Description of Artificial Sequence: Synthetic peptide
VKVVEEKAF

SEQ ID NO: 18323 - protein, 10 aa, synthetic construct
  REGION 1..10: note = Description of Artificial Sequence: Synthetic peptide
RKQGQGQWTY

SEQ ID NO: 18324 - protein, 9 aa, synthetic construct
  REGION 1..9: note = Description of Artificial Sequence: Synthetic peptide
TQACPKVSF

SEQ ID NO: 18325 - protein, 9 aa, synthetic construct
  REGION 1..9: note = Description of Artificial Sequence: Synthetic peptide
THLEGQVIL

SEQ ID NO: 18326 - protein, 9 aa, synthetic construct
  REGION 1..9: note = Description of Artificial Sequence: Synthetic peptide
IHIGPGQAF

SEQ ID NO: 18327 - protein, 9 aa, synthetic construct
  REGION 1..9: note = Description of Artificial Sequence: Synthetic peptide
THLEGKVIL

SEQ ID NO: 18328 - protein, 9 aa, synthetic construct
  REGION 1..9: note = Description of Artificial Sequence: Synthetic peptide
HQAISPRTL

SEQ ID NO: 18329 - protein, 9 aa, synthetic construct
  REGION 1..9: note = Description of Artificial Sequence: Synthetic peptide
IHSIGERVL

SEQ ID NO: 18330 - protein, 9 aa, synthetic construct
  REGION 1..9: note = Description of Artificial Sequence: Synthetic peptide
EHLKTAVQM

SEQ ID NO: 18331 - protein, 9 aa, synthetic construct
  REGION 1..9: note = Description of Artificial Sequence: Synthetic peptide
THLEGKIIL

SEQ ID NO: 18332 - protein, 8 aa, synthetic construct
  REGION 1..8: note = Description of Artificial Sequence: Synthetic peptide
MHTDIISL

SEQ ID NO: 18333 - protein, 9 aa, synthetic construct
  REGION 1..9: note = Description of Artificial Sequence: Synthetic peptide
EHLRTAVQM

SEQ ID NO: 18334 - protein, 9 aa, synthetic construct
  REGION 1..9: note = Description of Artificial Sequence: Synthetic peptide
EQEPPLTSL

SEQ ID NO: 18335 - protein, 9 aa, synthetic construct
  REGION 1..9: note = Description of Artificial Sequence: Synthetic peptide
GHQAAMQML

SEQ ID NO: 18336 - protein, 9 aa, synthetic construct
  REGION 1..9: note = Description of Artificial Sequence: Synthetic peptide
IHSISERIL

SEQ ID NO: 18337 - protein, 9 aa, synthetic construct
  REGION 1..9: note = Description of Artificial Sequence: Synthetic peptide
AHTNDIKQL

SEQ ID NO: 18338 - protein, 9 aa, synthetic construct
  REGION 1..9: note = Description of Artificial Sequence: Synthetic peptide
IHFGPGQAF

SEQ ID NO: 18339 - protein, 9 aa, synthetic construct
  REGION 1..9: note = Description of Artificial Sequence: Synthetic peptide
AHTSDVKQL

SEQ ID NO: 18340 - protein, 9 aa, synthetic construct
  REGION 1..9: note = Description of Artificial Sequence: Synthetic peptide
AHTNDVKQL

SEQ ID NO: 18341 - protein, 8 aa, synthetic construct
  REGION 1..8: note = Description of Artificial Sequence: Synthetic peptide
LHQVVTQL

SEQ ID NO: 18342 - protein, 8 aa, synthetic construct
  REGION 1..8: note = Description of Artificial Sequence: Synthetic peptide
THLEGQVI

SEQ ID NO: 18343 - protein, 8 aa, synthetic construct
  REGION 1..8: note = Description of Artificial Sequence: Synthetic peptide
NHIPKQPL

SEQ ID NO: 18344 - protein, 9 aa, synthetic construct
  REGION 1..9: note = Description of Artificial Sequence: Synthetic peptide
IHTDNGTNF

SEQ ID NO: 18345 - protein, 10 aa, synthetic construct
  REGION 1..10: note = Description of Artificial Sequence: Synthetic peptide
NQDPIPKQPL

SEQ ID NO: 18346 - protein, 9 aa, synthetic construct
  REGION 1..9: note = Description of Artificial Sequence: Synthetic peptide
FQQREAREL

SEQ ID NO: 18347 - protein, 9 aa, synthetic construct
  REGION 1..9: note = Description of Artificial Sequence: Synthetic peptide
SQIYPGIKV

SEQ ID NO: 18348 - protein, 9 aa, synthetic construct
  REGION 1..9: note = Description of Artificial Sequence: Synthetic peptide
TNSPTSREL

SEQ ID NO: 18349 - protein, 8 aa, synthetic construct
  REGION 1..8: note = Description of Artificial Sequence: Synthetic peptide
THLEGKVI

SEQ ID NO: 18350 - protein, 9 aa, synthetic construct
  REGION 1..9: note = Description of Artificial Sequence: Synthetic peptide
IPVESSTVL

SEQ ID NO: 18351 - protein, 9 aa, synthetic construct
  REGION 1..9: note = Description of Artificial Sequence: Synthetic peptide
IRIGPGQAF

SEQ ID NO: 18352 - protein, 9 aa, synthetic construct
  REGION 1..9: note = Description of Artificial Sequence: Synthetic peptide
SQIYPNIKV

SEQ ID NO: 18353 - protein, 9 aa, synthetic construct
  REGION 1..9: note = Description of Artificial Sequence: Synthetic peptide
SVLDVGGAY

SEQ ID NO: 18354 - protein, 9 aa, synthetic construct
  REGION 1..9: note = Description of Artificial Sequence: Synthetic peptide
TVLDVGDAY

SEQ ID NO: 18355 - protein, 9 aa, synthetic construct
  REGION 1..9: note = Description of Artificial Sequence: Synthetic peptide
SVLDVGDAY

SEQ ID NO: 18356 - protein, 10 aa, synthetic construct
  REGION 1..10: note = Description of Artificial Sequence: Synthetic peptide
VPIDNNSTQY

SEQ ID NO: 18357 - protein, 9 aa, synthetic construct
  REGION 1..9: note = Description of Artificial Sequence: Synthetic peptide
TINEEAAEW

SEQ ID NO: 18358 - protein, 10 aa, synthetic construct
  REGION 1..10: note = Description of Artificial Sequence: Synthetic peptide
YVDNGTNVTL

SEQ ID NO: 18359 - protein, 8 aa, synthetic construct
  REGION 1..8: note = Description of Artificial Sequence: Synthetic peptide
IEIITHSF

SEQ ID NO: 18360 - protein, 8 aa, synthetic construct
  REGION 1..8: note = Description of Artificial Sequence: Synthetic peptide
IEITSHTF

SEQ ID NO: 18361 - protein, 8 aa, synthetic construct
  REGION 1..8: note = Description of Artificial Sequence: Synthetic peptide
MENVTESF

SEQ ID NO: 18362 - protein, 8 aa, synthetic construct
  REGION 1..8: note = Description of Artificial Sequence: Synthetic peptide
LENVTETF

SEQ ID NO: 18363 - protein, 8 aa, synthetic construct
  REGION 1..8: note = Description of Artificial Sequence: Synthetic peptide
LEVTTHSF

SEQ ID NO: 18364 - protein, 8 aa, synthetic construct
  REGION 1..8: note = Description of Artificial Sequence: Synthetic peptide
NETPGIRY

SEQ ID NO: 18365 - protein, 11 aa, synthetic construct
  REGION 1..11: note = Description of Artificial Sequence: Synthetic peptide
LEVNIVTDSQY

SEQ ID NO: 18366 - protein, 8 aa, synthetic construct
  REGION 1..8: note = Description of Artificial Sequence: Synthetic peptide
PEVIIYQY

SEQ ID NO: 18367 - protein, 9 aa, synthetic construct
  REGION 1..9: note = Description of Artificial Sequence: Synthetic peptide
SEFNLPPIV

SEQ ID NO: 18368 - protein, 8 aa, synthetic construct
  REGION 1..8: note = Description of Artificial Sequence: Synthetic peptide
PEIIIYQY

SEQ ID NO: 18369 - protein, 8 aa, synthetic construct
  REGION 1..8: note = Description of Artificial Sequence: Synthetic peptide
LENVTENF

SEQ ID NO: 18370 - protein, 8 aa, synthetic construct
  REGION 1..8: note = Description of Artificial Sequence: Synthetic peptide
PEMVIYQY

SEQ ID NO: 18371 - protein, 8 aa, synthetic construct
  REGION 1..8: note = Description of Artificial Sequence: Synthetic peptide
TEDLQSLY

SEQ ID NO: 18372 - protein, 10 aa, synthetic construct
  REGION 1..10: note = Description of Artificial Sequence: Synthetic peptide
TEPIVGAETY

SEQ ID NO: 18373 - protein, 8 aa, synthetic construct
  REGION 1..8: note = Description of Artificial Sequence: Synthetic peptide
MEVRTHSF

SEQ ID NO: 18374 - protein, 9 aa, synthetic construct
  REGION 1..9: note = Description of Artificial Sequence: Synthetic peptide
DIEITSHTF

SEQ ID NO: 18375 - protein, 8 aa, synthetic construct
  REGION 1..8: note = Description of Artificial Sequence: Synthetic peptide
VEAIIRTL

SEQ ID NO: 18376 - protein, 9 aa, synthetic construct
  REGION 1..9: note = Description of Artificial Sequence: Synthetic peptide
ARVLAVERY

SEQ ID NO: 18377 - protein, 10 aa, synthetic construct
  REGION 1..10: note = Description of Artificial Sequence: Synthetic peptide
IRIGPGQAFY

SEQ ID NO: 18378 - protein, 9 aa, synthetic construct
  REGION 1..9: note = Description of Artificial Sequence: Synthetic peptide
IRIGPGQAF

SEQ ID NO: 18379 - protein, 10 aa, synthetic construct
  REGION 1..10: note = Description of Artificial Sequence: Synthetic peptide
VRQGYSPLSF

SEQ ID NO: 18380 - protein, 10 aa, synthetic construct
  REGION 1..10: note = Description of Artificial Sequence: Synthetic peptide
GGLDGLIYSK

SEQ ID NO: 18381 - protein, 11 aa, synthetic construct
  REGION 1..11: note = Description of Artificial Sequence: Synthetic peptide
TEAELELEENR

SEQ ID NO: 18382 - protein, 10 aa, synthetic construct
  REGION 1..10: note = Description of Artificial Sequence: Synthetic peptide
DRNNTNNVTF

SEQ ID NO: 18383 - protein, 11 aa, synthetic construct
  REGION 1..11: note = Description of Artificial Sequence: Synthetic peptide
EDYNGTNGTNR

SEQ ID NO: 18384 - protein, 10 aa, synthetic construct
  REGION 1..10: note = Description of Artificial Sequence: Synthetic peptide
IPVDPQEVER

SEQ ID NO: 18385 - protein, 10 aa, synthetic construct
  REGION 1..10: note = Description of Artificial Sequence: Synthetic peptide
VPVDPQDVEK

SEQ ID NO: 18386 - protein, 11 aa, synthetic construct
  REGION 1..11: note = Description of Artificial Sequence: Synthetic peptide
KGGLEGLIYSK

SEQ ID NO: 18387 - protein, 9 aa, synthetic construct
  REGION 1..9: note = Description of Artificial Sequence: Synthetic peptide
HRVSPICDY

SEQ ID NO: 18388 - protein, 10 aa, synthetic construct
  REGION 1..10: note = Description of Artificial Sequence: Synthetic peptide
GGLEGLVYSK

SEQ ID NO: 18389 - protein, 9 aa, synthetic construct
  REGION 1..9: note = Description of Artificial Sequence: Synthetic peptide
SRIGPENPY

SEQ ID NO: 18390 - protein, 9 aa, synthetic construct
  REGION 1..9: note = Description of Artificial Sequence: Synthetic peptide
DGIIVIVQR

SEQ ID NO: 18391 - protein, 9 aa, synthetic construct
  REGION 1..9: note = Description of Artificial Sequence: Synthetic peptide
ERTGTSFNF

SEQ ID NO: 18392 - protein, 11 aa, synthetic construct
  REGION 1..11: note = Description of Artificial Sequence: Synthetic peptide
KEAELELAENR

SEQ ID NO: 18393 - protein, 10 aa, synthetic construct
  REGION 1..10: note = Description of Artificial Sequence: Synthetic peptide
TYYVDGAANR

SEQ ID NO: 18394 - protein, 8 aa, synthetic construct
  REGION 1..8: note = Description of Artificial Sequence: Synthetic peptide
VAIEIFGK

SEQ ID NO: 18395 - protein, 9 aa, synthetic construct
  REGION 1..9: note = Description of Artificial Sequence: Synthetic peptide
GLDGLIYSK

SEQ ID NO: 18396 - protein, 9 aa, synthetic construct
  REGION 1..9: note = Description of Artificial Sequence: Synthetic peptide
VRTVELLGR

SEQ ID NO: 18397 - protein, 11 aa, synthetic construct
  REGION 1..11: note = Description of Artificial Sequence: Synthetic peptide
KALTDVVPLTK

SEQ ID NO: 18398 - protein, 10 aa, synthetic construct
  REGION 1..10: note = Description of Artificial Sequence: Synthetic peptide
GHNQVGSLQY

SEQ ID NO: 18399 - protein, 10 aa, synthetic construct
  REGION 1..10: note = Description of Artificial Sequence: Synthetic peptide
GGLEGLIYSK

SEQ ID NO: 18400 - protein, 8 aa, synthetic construct
  REGION 1..8: note = Description of Artificial Sequence: Synthetic peptide
TDIIPLTK

SEQ ID NO: 18401 - protein, 11 aa, synthetic construct
  REGION 1..11: note = Description of Artificial Sequence: Synthetic peptide
TAIAVAEGTDR

SEQ ID NO: 18402 - protein, 10 aa, synthetic construct
  REGION 1..10: note = Description of Artificial Sequence: Synthetic peptide
TDGIIVIVQR

SEQ ID NO: 18403 - protein, 10 aa, synthetic construct
  REGION 1..10: note = Description of Artificial Sequence: Synthetic peptide
GALDLSHFLK

SEQ ID NO: 18404 - protein, 11 aa, synthetic construct
  REGION 1..11: note = Description of Artificial Sequence: Synthetic peptide
QINNYTDEIYR

SEQ ID NO: 18405 - protein, 10 aa, synthetic construct
  REGION 1..10: note = Description of Artificial Sequence: Synthetic peptide
GAFDLSHFLK

SEQ ID NO: 18406 - protein, 9 aa, synthetic construct
  REGION 1..9: note = Description of Artificial Sequence: Synthetic peptide
ALTALVTPK

SEQ ID NO: 18407 - protein, 9 aa, synthetic construct
  REGION 1..9: note = Description of Artificial Sequence: Synthetic peptide
GRAGYVTDR

SEQ ID NO: 18408 - protein, 8 aa, synthetic construct
  REGION 1..8: note = Description of Artificial Sequence: Synthetic peptide
QRVGQAMY

SEQ ID NO: 18409 - protein, 9 aa, synthetic construct
  REGION 1..9: note = Description of Artificial Sequence: Synthetic peptide
SRIGIIRQR

SEQ ID NO: 18410 - protein, 9 aa, synthetic construct
  REGION 1..9: note = Description of Artificial Sequence: Synthetic peptide
SRIGITRQR

SEQ ID NO: 18411 - protein, 9 aa, synthetic construct
  REGION 1..9: note = Description of Artificial Sequence: Synthetic peptide
GRAGYVTDR

SEQ ID NO: 18412 - protein, 9 aa, synthetic construct
  REGION 1..9: note = Description of Artificial Sequence: Synthetic peptide
ARVLAVERY

SEQ ID NO: 18413 - protein, 9 aa, synthetic construct
  REGION 1..9: note = Description of Artificial Sequence: Synthetic peptide
GRQANFLGK

SEQ ID NO: 18414 - protein, 9 aa, synthetic construct
  REGION 1..9: note = Description of Artificial Sequence: Synthetic peptide
IRIGPGQAF

SEQ ID NO: 18415 - protein, 9 aa, synthetic construct
  REGION 1..9: note = Description of Artificial Sequence: Synthetic peptide
CRIKQIVNM

SEQ ID NO: 18416 - protein, 9 aa, synthetic construct
  REGION 1..9: note = Description of Artificial Sequence: Synthetic peptide
GRAIIHIPR

SEQ ID NO: 18417 - protein, 10 aa, synthetic construct
  REGION 1..10: note = Description of Artificial Sequence: Synthetic peptide
IRIGPGQAFY

SEQ ID NO: 18418 - protein, 8 aa, synthetic construct
  REGION 1..8: note = Description of Artificial Sequence: Synthetic peptide
ARVKHPEY

SEQ ID NO: 18419 - protein, 9 aa, synthetic construct
  REGION 1..9: note = Description of Artificial Sequence: Synthetic peptide
QRIDVKDTK

SEQ ID NO: 18420 - protein, 9 aa, synthetic construct
  REGION 1..9: note = Description of Artificial Sequence: Synthetic peptide
GRPGNFPQK

SEQ ID NO: 18421 - protein, 9 aa, synthetic construct
  REGION 1..9: note = Description of Artificial Sequence: Synthetic peptide
QRIEVKDTK

SEQ ID NO: 18422 - protein, 9 aa, synthetic construct
  REGION 1..9: note = Description of Artificial Sequence: Synthetic peptide
SRIGPENPY

SEQ ID NO: 18423 - protein, 9 aa, synthetic construct
  REGION 1..9: note = Description of Artificial Sequence: Synthetic peptide
EPIEGAETY

SEQ ID NO: 18424 - protein, 9 aa, synthetic construct
  REGION 1..9: note = Description of Artificial Sequence: Synthetic peptide
EPIAGAETY

SEQ ID NO: 18425 - protein, 10 aa, synthetic construct
  REGION 1..10: note = Description of Artificial Sequence: Synthetic peptide
VPIDNNSTQY

SEQ ID NO: 18426 - protein, 9 aa, synthetic construct
  REGION 1..9: note = Description of Artificial Sequence: Synthetic peptide
EPIVGAETY

SEQ ID NO: 18427 - protein, 9 aa, synthetic construct
  REGION 1..9: note = Description of Artificial Sequence: Synthetic peptide
NASAENYTF

SEQ ID NO: 18428 - protein, 11 aa, synthetic construct
  REGION 1..11: note = Description of Artificial Sequence: Synthetic peptide
IPAETGQETAY

SEQ ID NO: 18429 - protein, 10 aa, synthetic construct
  REGION 1..10: note = Description of Artificial Sequence: Synthetic peptide
NPAIPVGDIY

SEQ ID NO: 18430 - protein, 11 aa, synthetic construct
  REGION 1..11: note = Description of Artificial Sequence: Synthetic peptide
IPAETGKETAY

SEQ ID NO: 18431 - protein, 9 aa, synthetic construct
  REGION 1..9: note = Description of Artificial Sequence: Synthetic peptide
NPEVIIYQY

SEQ ID NO: 18432 - protein, 9 aa, synthetic construct
  REGION 1..9: note = Description of Artificial Sequence: Synthetic peptide
NPEIIIYQY

SEQ ID NO: 18433 - protein, 9 aa, synthetic construct
  REGION 1..9: note = Description of Artificial Sequence: Synthetic peptide
NPEMVIYQY

SEQ ID NO: 18434 - protein, 11 aa, synthetic construct
  REGION 1..11: note = Description of Artificial Sequence: Synthetic peptide
MPNDTGKNITL

SEQ ID NO: 18435 - protein, 10 aa, synthetic construct
  REGION 1..10: note = Description of Artificial Sequence: Synthetic peptide
NPSIPVGDIY

SEQ ID NO: 18436 - protein, 11 aa, synthetic construct
  REGION 1..11: note = Description of Artificial Sequence: Synthetic peptide
EAEPIAGAETY

SEQ ID NO: 18437 - protein, 10 aa, synthetic construct
  REGION 1..10: note = Description of Artificial Sequence: Synthetic peptide
MVMENVTESF

SEQ ID NO: 18438 - protein, 9 aa, synthetic construct
  REGION 1..9: note = Description of Artificial Sequence: Synthetic peptide
NITGLILTY

SEQ ID NO: 18439 - protein, 9 aa, synthetic construct
  REGION 1..9: note = Description of Artificial Sequence: Synthetic peptide
TVLDVGDAY

SEQ ID NO: 18440 - protein, 9 aa, synthetic construct
  REGION 1..9: note = Description of Artificial Sequence: Synthetic peptide
IPVESSTVL

SEQ ID NO: 18441 - protein, 8 aa, synthetic construct
  REGION 1..8: note = Description of Artificial Sequence: Synthetic peptide
TPGPGVRY

SEQ ID NO: 18442 - protein, 9 aa, synthetic construct
  REGION 1..9: note = Description of Artificial Sequence: Synthetic peptide
SPAIFQNSM

SEQ ID NO: 18443 - protein, 10 aa, synthetic construct
  REGION 1..10: note = Description of Artificial Sequence: Synthetic peptide
EPIEGAETYY

SEQ ID NO: 18444 - protein, 9 aa, synthetic construct
  REGION 1..9: note = Description of Artificial Sequence: Synthetic peptide
DARLVITTY

SEQ ID NO: 18445 - protein, 9 aa, synthetic construct
  REGION 1..9: note = Description of Artificial Sequence: Synthetic peptide
SVLDVGDAY

SEQ ID NO: 18446 - protein, 9 aa, synthetic construct
  REGION 1..9: note = Description of Artificial Sequence: Synthetic peptide
EAMSQMTNM

SEQ ID NO: 18447 - protein, 9 aa, synthetic construct
  REGION 1..9: note = Description of Artificial Sequence: Synthetic peptide
DPNPQEMVM

SEQ ID NO: 18448 - protein, 10 aa, synthetic construct
  REGION 1..10: note = Description of Artificial Sequence: Synthetic peptide
EPIAGAETYY

SEQ ID NO: 18449 - protein, 10 aa, synthetic construct
  REGION 1..10: note = Description of Artificial Sequence: Synthetic peptide
MVLENVTETF

SEQ ID NO: 18450 - protein, 10 aa, synthetic construct
  REGION 1..10: note = Description of Artificial Sequence: Synthetic peptide
TAATNPDVAW

SEQ ID NO: 18451 - protein, 10 aa, synthetic construct
  REGION 1..10: note = Description of Artificial Sequence: Synthetic peptide
NPPIPVGDIY

SEQ ID NO: 18452 - protein, 9 aa, synthetic construct
  REGION 1..9: note = Description of Artificial Sequence: Synthetic peptide
EARLVITTY

SEQ ID NO: 18453 - protein, 9 aa, synthetic construct
  REGION 1..9: note = Description of Artificial Sequence: Synthetic peptide
SPAIFQSSM

SEQ ID NO: 18454 - protein, 9 aa, synthetic construct
  REGION 1..9: note = Description of Artificial Sequence: Synthetic peptide
DAYFSVPLY

SEQ ID NO: 18455 - protein, 9 aa, synthetic construct
  REGION 1..9: note = Description of Artificial Sequence: Synthetic peptide
IPLTTEAEL

SEQ ID NO: 18456 - protein, 9 aa, synthetic construct
  REGION 1..9: note = Description of Artificial Sequence: Synthetic peptide
PPIPVGDIY

SEQ ID NO: 18457 - protein, 10 aa, synthetic construct
  REGION 1..10: note = Description of Artificial Sequence: Synthetic peptide
APFREQNPEM

SEQ ID NO: 18458 - protein, 8 aa, synthetic construct
  REGION 1..8: note = Description of Artificial Sequence: Synthetic peptide
TPGPGEGY

SEQ ID NO: 18459 - protein, 10 aa, synthetic construct
  REGION 1..10: note = Description of Artificial Sequence: Synthetic peptide
EPIVGAETYY

SEQ ID NO: 18460 - protein, 8 aa, synthetic construct
  REGION 1..8: note = Description of Artificial Sequence: Synthetic peptide
TPGPGERY

SEQ ID NO: 18461 - protein, 9 aa, synthetic construct
  REGION 1..9: note = Description of Artificial Sequence: Synthetic peptide
NITGLILTF

SEQ ID NO: 18462 - protein, 9 aa, synthetic construct
  REGION 1..9: note = Description of Artificial Sequence: Synthetic peptide
IPLTKEAEL

SEQ ID NO: 18463 - protein, 9 aa, synthetic construct
  REGION 1..9: note = Description of Artificial Sequence: Synthetic peptide
FPISPIETV

SEQ ID NO: 18464 - protein, 11 aa, synthetic construct
  REGION 1..11: note = Description of Artificial Sequence: Synthetic peptide
MPNDTGKNITL

SEQ ID NO: 18465 - protein, 9 aa, synthetic construct
  REGION 1..9: note = Description of Artificial Sequence: Synthetic peptide
DPNPQEMVM

SEQ ID NO: 18466 - protein, 9 aa, synthetic construct
  REGION 1..9: note = Description of Artificial Sequence: Synthetic peptide
IPLTTEAEL

SEQ ID NO: 18467 - protein, 9 aa, synthetic construct
  REGION 1..9: note = Description of Artificial Sequence: Synthetic peptide
DPSPQEMVL

SEQ ID NO: 18468 - protein, 9 aa, synthetic construct
  REGION 1..9: note = Description of Artificial Sequence: Synthetic peptide
DPNPQEMVL

SEQ ID NO: 18469 - protein, 9 aa, synthetic construct
  REGION 1..9: note = Description of Artificial Sequence: Synthetic peptide
QPDKSESEL

SEQ ID NO: 18470 - protein, 9 aa, synthetic construct
  REGION 1..9: note = Description of Artificial Sequence: Synthetic peptide
TADGCQQIL

SEQ ID NO: 18471 - protein, 9 aa, synthetic construct
  REGION 1..9: note = Description of Artificial Sequence: Synthetic peptide
NASAENYTF

SEQ ID NO: 18472 - protein, 9 aa, synthetic construct
  REGION 1..9: note = Description of Artificial Sequence: Synthetic peptide
IPLTKEAEL

SEQ ID NO: 18473 - protein, 9 aa, synthetic construct
  REGION 1..9: note = Description of Artificial Sequence: Synthetic peptide
IPVESSTVL

SEQ ID NO: 18474 - protein, 9 aa, synthetic construct
  REGION 1..9: note = Description of Artificial Sequence: Synthetic peptide
VPLTKEAEL

SEQ ID NO: 18475 - protein, 9 aa, synthetic construct
  REGION 1..9: note = Description of Artificial Sequence: Synthetic peptide
YSTQVDPDL

SEQ ID NO: 18476 - protein, 9 aa, synthetic construct
  REGION 1..9: note = Description of Artificial Sequence: Synthetic peptide
YSTQIDPDL

SEQ ID NO: 18477 - protein, 10 aa, synthetic construct
  REGION 1..10: note = Description of Artificial Sequence: Synthetic peptide
YVDNGTNVTL

SEQ ID NO: 18478 - protein, 9 aa, synthetic construct
  REGION 1..9: note = Description of Artificial Sequence: Synthetic peptide
YSTQVDPGL

SEQ ID NO: 18479 - protein, 9 aa, synthetic construct
  REGION 1..9: note = Description of Artificial Sequence: Synthetic peptide
TPSPKQEQL

SEQ ID NO: 18480 - protein, 9 aa, synthetic construct
  REGION 1..9: note = Description of Artificial Sequence: Synthetic peptide
YSTQVEPGL

SEQ ID NO: 18481 - protein, 9 aa, synthetic construct
  REGION 1..9: note = Description of Artificial Sequence: Synthetic peptide
LPISPIETV

SEQ ID NO: 18482 - protein, 9 aa, synthetic construct
  REGION 1..9: note = Description of Artificial Sequence: Synthetic peptide
FPISPIETV

SEQ ID NO: 18483 - protein, 9 aa, synthetic construct
  REGION 1..9: note = Description of Artificial Sequence: Synthetic peptide
IPVESSTVL

SEQ ID NO: 18484 - protein, 11 aa, synthetic construct
  REGION 1..11: note = Description of Artificial Sequence: Synthetic peptide
MPNDTGKNITL

SEQ ID NO: 18485 - protein, 9 aa, synthetic construct
  REGION 1..9: note = Description of Artificial Sequence: Synthetic peptide
IPLTTEAEL

SEQ ID NO: 18486 - protein, 9 aa, synthetic construct
  REGION 1..9: note = Description of Artificial Sequence: Synthetic peptide
IPLTKEAEL

SEQ ID NO: 18487 - protein, 10 aa, synthetic construct
  REGION 1..10: note = Description of Artificial Sequence: Synthetic peptide
SPIETVPVTL

SEQ ID NO: 18488 - protein, 9 aa, synthetic construct
  REGION 1..9: note = Description of Artificial Sequence: Synthetic peptide
VPLTKEAEL

SEQ ID NO: 18489 - protein, 9 aa, synthetic construct
  REGION 1..9: note = Description of Artificial Sequence: Synthetic peptide
DPNPQEMVM

SEQ ID NO: 18490 - protein, 9 aa, synthetic construct
  REGION 1..9: note = Description of Artificial Sequence: Synthetic peptide
TPSPKQEQL

SEQ ID NO: 18491 - protein, 9 aa, synthetic construct
  REGION 1..9: note = Description of Artificial Sequence: Synthetic peptide
DPNPQEMVL

SEQ ID NO: 18492 - protein, 9 aa, synthetic construct
  REGION 1..9: note = Description of Artificial Sequence: Synthetic peptide
TADGCQQIL

SEQ ID NO: 18493 - protein, 9 aa, synthetic construct
  REGION 1..9: note = Description of Artificial Sequence: Synthetic peptide
FPISPIETV

SEQ ID NO: 18494 - protein, 9 aa, synthetic construct
  REGION 1..9: note = Description of Artificial Sequence: Synthetic peptide
DPSPQEMVL

SEQ ID NO: 18495 - protein, 9 aa, synthetic construct
  REGION 1..9: note = Description of Artificial Sequence: Synthetic peptide
NASAENYTF

SEQ ID NO: 18496 - protein, 11 aa, synthetic construct
  REGION 1..11: note = Description of Artificial Sequence: Synthetic peptide
IPLTTEAELEL

SEQ ID NO: 18497 - protein, 9 aa, synthetic construct
  REGION 1..9: note = Description of Artificial Sequence: Synthetic peptide
LPISPIETV

SEQ ID NO: 18498 - protein, 9 aa, synthetic construct
  REGION 1..9: note = Description of Artificial Sequence: Synthetic peptide
YSTQVDPDL

SEQ ID NO: 18499 - protein, 9 aa, synthetic construct
  REGION 1..9: note = Description of Artificial Sequence: Synthetic peptide
YSTQIDPDL

SEQ ID NO: 18500 - protein, 9 aa, synthetic construct
  REGION 1..9: note = Description of Artificial Sequence: Synthetic peptide
TPQDLNAML

SEQ ID NO: 18501 - protein, 9 aa, synthetic construct
  REGION 1..9: note = Description of Artificial Sequence: Synthetic peptide
YSTQVDPGL

SEQ ID NO: 18502 - protein, 9 aa, synthetic construct
  REGION 1..9: note = Description of Artificial Sequence: Synthetic peptide
IVTDSQYAL

SEQ ID NO: 18503 - protein, 10 aa, synthetic construct
  REGION 1..10: note = Description of Artificial Sequence: Synthetic peptide
SPIETVPVKL

SEQ ID NO: 18504 - protein, 10 aa, synthetic construct
  REGION 1..10: note = Description of Artificial Sequence: Synthetic peptide
YVDNGTNVTL

SEQ ID NO: 18505 - protein, 9 aa, synthetic construct
  REGION 1..9: note = Description of Artificial Sequence: Synthetic peptide
SPAIFQNSM

SEQ ID NO: 18506 - protein, 10 aa, synthetic construct
  REGION 1..10: note = Description of Artificial Sequence: Synthetic peptide
VPTDPSPQEM

SEQ ID NO: 18507 - protein, 10 aa, synthetic construct
  REGION 1..10: note = Description of Artificial Sequence: Synthetic peptide
NANPDCKTIL

SEQ ID NO: 18508 - protein, 9 aa, synthetic construct
  REGION 1..9: note = Description of Artificial Sequence: Synthetic peptide
TSSPSANEL

SEQ ID NO: 18509 - protein, 11 aa, synthetic construct
  REGION 1..11: note = Description of Artificial Sequence: Synthetic peptide
IPLTKEAELEL

SEQ ID NO: 18510 - protein, 10 aa, synthetic construct
  REGION 1..10: note = Description of Artificial Sequence: Synthetic peptide
APFREQNPEM

SEQ ID NO: 18511 - protein, 10 aa, synthetic construct
  REGION 1..10: note = Description of Artificial Sequence: Synthetic peptide
VPTDPNPQEM

SEQ ID NO: 18512 - protein, 9 aa, synthetic construct
  REGION 1..9: note = Description of Artificial Sequence: Synthetic peptide
YPNIKVKQL

SEQ ID NO: 18513 - protein, 9 aa, synthetic construct
  REGION 1..9: note = Description of Artificial Sequence: Synthetic peptide
QPDKSESEL

SEQ ID NO: 18514 - protein, 11 aa, synthetic construct
  REGION 1..11: note = Description of Artificial Sequence: Synthetic peptide
IPAETGKETAY

SEQ ID NO: 18515 - protein, 11 aa, synthetic construct
  REGION 1..11: note = Description of Artificial Sequence: Synthetic peptide
IPAETGQETAY

SEQ ID NO: 18516 - protein, 9 aa, synthetic construct
  REGION 1..9: note = Description of Artificial Sequence: Synthetic peptide
EPIEGAETY

SEQ ID NO: 18517 - protein, 9 aa, synthetic construct
  REGION 1..9: note = Description of Artificial Sequence: Synthetic peptide
EPIAGAETY

SEQ ID NO: 18518 - protein, 9 aa, synthetic construct
  REGION 1..9: note = Description of Artificial Sequence: Synthetic peptide
NASAENYTF

SEQ ID NO: 18519 - protein, 9 aa, synthetic construct
  REGION 1..9: note = Description of Artificial Sequence: Synthetic peptide
EPIVGAETY

SEQ ID NO: 18520 - protein, 10 aa, synthetic construct
  REGION 1..10: note = Description of Artificial Sequence: Synthetic peptide
NPAIPVGDIY

SEQ ID NO: 18521 - protein, 10 aa, synthetic construct
  REGION 1..10: note = Description of Artificial Sequence: Synthetic peptide
VPIDNNSTQY

SEQ ID NO: 18522 - protein, 10 aa, synthetic construct
  REGION 1..10: note = Description of Artificial Sequence: Synthetic peptide
NPSIPVGDIY

SEQ ID NO: 18523 - protein, 11 aa, synthetic construct
  REGION 1..11: note = Description of Artificial Sequence: Synthetic peptide
EAEPIAGAETY

SEQ ID NO: 18524 - protein, 9 aa, synthetic construct
  REGION 1..9: note = Description of Artificial Sequence: Synthetic peptide
NPEVIIYQY

SEQ ID NO: 18525 - protein, 9 aa, synthetic construct
  REGION 1..9: note = Description of Artificial Sequence: Synthetic peptide
DPNPQEMVM

SEQ ID NO: 18526 - protein, 11 aa, synthetic construct
  REGION 1..11: note = Description of Artificial Sequence: Synthetic peptide
MPNDTGKNITL

SEQ ID NO: 18527 - protein, 10 aa, synthetic construct
  REGION 1..10: note = Description of Artificial Sequence: Synthetic peptide
MVMENVTESF

SEQ ID NO: 18528 - protein, 10 aa, synthetic construct
  REGION 1..10: note = Description of Artificial Sequence: Synthetic peptide
NPPIPVGDIY

SEQ ID NO: 18529 - protein, 9 aa, synthetic construct
  REGION 1..9: note = Description of Artificial Sequence: Synthetic peptide
NPEIIIYQY

SEQ ID NO: 18530 - protein, 10 aa, synthetic construct
  REGION 1..10: note = Description of Artificial Sequence: Synthetic peptide
EPIEGAETYY

SEQ ID NO: 18531 - protein, 9 aa, synthetic construct
  REGION 1..9: note = Description of Artificial Sequence: Synthetic peptide
NPEMVIYQY

SEQ ID NO: 18532 - protein, 9 aa, synthetic construct
  REGION 1..9: note = Description of Artificial Sequence: Synthetic peptide
IPLTTEAEL

SEQ ID NO: 18533 - protein, 9 aa, synthetic construct
  REGION 1..9: note = Description of Artificial Sequence: Synthetic peptide
IPLTKEAEL

SEQ ID NO: 18534 - protein, 10 aa, synthetic construct
  REGION 1..10: note = Description of Artificial Sequence: Synthetic peptide
EPIAGAETYY

SEQ ID NO: 18535 - protein, 9 aa, synthetic construct
  REGION 1..9: note = Description of Artificial Sequence: Synthetic peptide
PPIPVGDIY

SEQ ID NO: 18536 - protein, 8 aa, synthetic construct
  REGION 1..8: note = Description of Artificial Sequence: Synthetic peptide
TPGPGVRY

SEQ ID NO: 18537 - protein, 9 aa, synthetic construct
  REGION 1..9: note = Description of Artificial Sequence: Synthetic peptide
TVLDVGDAY

SEQ ID NO: 18538 - protein, 9 aa, synthetic construct
  REGION 1..9: note = Description of Artificial Sequence: Synthetic peptide
IPVESSTVL

SEQ ID NO: 18539 - protein, 11 aa, synthetic construct
  REGION 1..11: note = Description of Artificial Sequence: Synthetic peptide
MPNDTGKNITL

SEQ ID NO: 18540 - protein, 9 aa, synthetic construct
  REGION 1..9: note = Description of Artificial Sequence: Synthetic peptide
DPNPQEMVM

SEQ ID NO: 18541 - protein, 9 aa, synthetic construct
  REGION 1..9: note = Description of Artificial Sequence: Synthetic peptide
IPLTKEAEL

SEQ ID NO: 18542 - protein, 9 aa, synthetic construct
  REGION 1..9: note = Description of Artificial Sequence: Synthetic peptide
IPLTTEAEL

SEQ ID NO: 18543 - protein, 9 aa, synthetic construct
  REGION 1..9: note = Description of Artificial Sequence: Synthetic peptide
DPSPQEMVL

SEQ ID NO: 18544 - protein, 9 aa, synthetic construct
  REGION 1..9: note = Description of Artificial Sequence: Synthetic peptide
DPNPQEMVL

SEQ ID NO: 18545 - protein, 9 aa, synthetic construct
  REGION 1..9: note = Description of Artificial Sequence: Synthetic peptide
VPLTKEAEL

SEQ ID NO: 18546 - protein, 9 aa, synthetic construct
  REGION 1..9: note = Description of Artificial Sequence: Synthetic peptide
IPVESSTVL

SEQ ID NO: 18547 - protein, 9 aa, synthetic construct
  REGION 1..9: note = Description of Artificial Sequence: Synthetic peptide
QPDKSESEL

SEQ ID NO: 18548 - protein, 9 aa, synthetic construct
  REGION 1..9: note = Description of Artificial Sequence: Synthetic peptide
NASAENYTF

SEQ ID NO: 18549 - protein, 9 aa, synthetic construct
  REGION 1..9: note = Description of Artificial Sequence: Synthetic peptide
TADGCQQIL

SEQ ID NO: 18550 - protein, 9 aa, synthetic construct
  REGION 1..9: note = Description of Artificial Sequence: Synthetic peptide
TPSPKQEQL

SEQ ID NO: 18551 - protein, 9 aa, synthetic construct
  REGION 1..9: note = Description of Artificial Sequence: Synthetic peptide
YSTQVDPDL

SEQ ID NO: 18552 - protein, 9 aa, synthetic construct
  REGION 1..9: note = Description of Artificial Sequence: Synthetic peptide
YSTQIDPDL

SEQ ID NO: 18553 - protein, 10 aa, synthetic construct
  REGION 1..10: note = Description of Artificial Sequence: Synthetic peptide
YVDNGTNVTL

SEQ ID NO: 18554 - protein, 10 aa, synthetic construct
  REGION 1..10: note = Description of Artificial Sequence: Synthetic peptide
SPIETVPVTL

SEQ ID NO: 18555 - protein, 11 aa, synthetic construct
  REGION 1..11: note = Description of Artificial Sequence: Synthetic peptide
IPLTTEAELEL

SEQ ID NO: 18556 - protein, 9 aa, synthetic construct
  REGION 1..9: note = Description of Artificial Sequence: Synthetic peptide
LPISPIETV

SEQ ID NO: 18557 - protein, 8 aa, synthetic construct
  REGION 1..8: note = Description of Artificial Sequence: Synthetic peptide
DPDLADQL

SEQ ID NO: 18558 - protein, 9 aa, synthetic construct
  REGION 1..9: note = Description of Artificial Sequence: Synthetic peptide
FPISPIETV

SEQ ID NO: 18559 - protein, 9 aa, synthetic construct
  REGION 1..9: note = Description of Artificial Sequence: Synthetic peptide
YSTQVDPGL

SEQ ID NO: 18560 - protein, 8 aa, synthetic construct
  REGION 1..8: note = Description of Artificial Sequence: Synthetic peptide
IPVGDARL

SEQ ID NO: 18561 - protein, 9 aa, synthetic construct
  REGION 1..9: note = Description of Artificial Sequence: Synthetic peptide
AEWDRVHPV

SEQ ID NO: 18562 - protein, 8 aa, synthetic construct
  REGION 1..8: note = Description of Artificial Sequence: Synthetic peptide
IEIITHSF

SEQ ID NO: 18563 - protein, 8 aa, synthetic construct
  REGION 1..8: note = Description of Artificial Sequence: Synthetic peptide
MENVTESF

SEQ ID NO: 18564 - protein, 8 aa, synthetic construct
  REGION 1..8: note = Description of Artificial Sequence: Synthetic peptide
IEITSHTF

SEQ ID NO: 18565 - protein, 10 aa, synthetic construct
  REGION 1..10: note = Description of Artificial Sequence: Synthetic peptide
GDMEVRTHSF

SEQ ID NO: 18566 - protein, 9 aa, synthetic construct
  REGION 1..9: note = Description of Artificial Sequence: Synthetic peptide
AEWDRTHPV

SEQ ID NO: 18567 - protein, 8 aa, synthetic construct
  REGION 1..8: note = Description of Artificial Sequence: Synthetic peptide
AEHLKTAV

SEQ ID NO: 18568 - protein, 8 aa, synthetic construct
  REGION 1..8: note = Description of Artificial Sequence: Synthetic peptide
LENVTETF

SEQ ID NO: 18569 - protein, 8 aa, synthetic construct
  REGION 1..8: note = Description of Artificial Sequence: Synthetic peptide
YDSPHPRI

SEQ ID NO: 18570 - protein, 8 aa, synthetic construct
  REGION 1..8: note = Description of Artificial Sequence: Synthetic peptide
LENVTENF

SEQ ID NO: 18571 - protein, 9 aa, synthetic construct
  REGION 1..9: note = Description of Artificial Sequence: Synthetic peptide
YEPEKHNVW

SEQ ID NO: 18572 - protein, 8 aa, synthetic construct
  REGION 1..8: note = Description of Artificial Sequence: Synthetic peptide
AEHLRTAV

SEQ ID NO: 18573 - protein, 9 aa, synthetic construct
  REGION 1..9: note = Description of Artificial Sequence: Synthetic peptide
IHTDNGTNF

SEQ ID NO: 18574 - protein, 9 aa, synthetic construct
  REGION 1..9: note = Description of Artificial Sequence: Synthetic peptide
THLEGQVIL

SEQ ID NO: 18575 - protein, 9 aa, synthetic construct
  REGION 1..9: note = Description of Artificial Sequence: Synthetic peptide
IHIGPGQAF

SEQ ID NO: 18576 - protein, 9 aa, synthetic construct
  REGION 1..9: note = Description of Artificial Sequence: Synthetic peptide
IHTDNGSNF

SEQ ID NO: 18577 - protein, 11 aa, synthetic construct
  REGION 1..11: note = Description of Artificial Sequence: Synthetic peptide
TQVDPGLADQL

SEQ ID NO: 18578 - protein, 10 aa, synthetic construct
  REGION 1..10: note = Description of Artificial Sequence: Synthetic peptide
YVDNGTNVTL

SEQ ID NO: 18579 - protein, 9 aa, synthetic construct
  REGION 1..9: note = Description of Artificial Sequence: Synthetic peptide
THLEGKVIL

SEQ ID NO: 18580 - protein, 11 aa, synthetic construct
  REGION 1..11: note = Description of Artificial Sequence: Synthetic peptide
TQIDPDLADQL

SEQ ID NO: 18581 - protein, 11 aa, synthetic construct
  REGION 1..11: note = Description of Artificial Sequence: Synthetic peptide
TQVEPGLADQL

SEQ ID NO: 18582 - protein, 11 aa, synthetic construct
  REGION 1..11: note = Description of Artificial Sequence: Synthetic peptide
TQVDPDLADQL

SEQ ID NO: 18583 - protein, 9 aa, synthetic construct
  REGION 1..9: note = Description of Artificial Sequence: Synthetic peptide
TQDFWEVQL

SEQ ID NO: 18584 - protein, 9 aa, synthetic construct
  REGION 1..9: note = Description of Artificial Sequence: Synthetic peptide
AHTNDIKQL

SEQ ID NO: 18585 - protein, 9 aa, synthetic construct
  REGION 1..9: note = Description of Artificial Sequence: Synthetic peptide
IHFGPGQAF

SEQ ID NO: 18586 - protein, 9 aa, synthetic construct
  REGION 1..9: note = Description of Artificial Sequence: Synthetic peptide
AHTSDVKQL

SEQ ID NO: 18587 - protein, 9 aa, synthetic construct
  REGION 1..9: note = Description of Artificial Sequence: Synthetic peptide
GHQAAMQML

SEQ ID NO: 18588 - protein, 9 aa, synthetic construct
  REGION 1..9: note = Description of Artificial Sequence: Synthetic peptide
IRIGPGQAF

SEQ ID NO: 18589 - protein, 9 aa, synthetic construct
  REGION 1..9: note = Description of Artificial Sequence: Synthetic peptide
EQEPPLTSL

SEQ ID NO: 18590 - protein, 10 aa, synthetic construct
  REGION 1..10: note = Description of Artificial Sequence: Synthetic peptide
NQDPIPKQPL

SEQ ID NO: 18591 - protein, 9 aa, synthetic construct
  REGION 1..9: note = Description of Artificial Sequence: Synthetic peptide
THLEGKIIL

SEQ ID NO: 18592 - protein, 9 aa, synthetic construct
  REGION 1..9: note = Description of Artificial Sequence: Synthetic peptide
AHTNDVKQL

SEQ ID NO: 18593 - protein, 9 aa, synthetic construct
  REGION 1..9: note = Description of Artificial Sequence: Synthetic peptide
EHLKTAVQM

SEQ ID NO: 18594 - protein, 11 aa, synthetic construct
  REGION 1..11: note = Description of Artificial Sequence: Synthetic peptide
GHNQVGSLQYL

SEQ ID NO: 18595 - protein, 9 aa, synthetic construct
  REGION 1..9: note = Description of Artificial Sequence: Synthetic peptide
QDSGLEVNI

SEQ ID NO: 18596 - protein, 9 aa, synthetic construct
  REGION 1..9: note = Description of Artificial Sequence: Synthetic peptide
SLFGSDPLL

SEQ ID NO: 18597 - protein, 10 aa, synthetic construct
  REGION 1..10: note = Description of Artificial Sequence: Synthetic peptide
TEDITGNITL

SEQ ID NO: 18598 - protein, 9 aa, synthetic construct
  REGION 1..9: note = Description of Artificial Sequence: Synthetic peptide
QESGPEVNI

SEQ ID NO: 18599 - protein, 9 aa, synthetic construct
  REGION 1..9: note = Description of Artificial Sequence: Synthetic peptide
IHSIGERVL

SEQ ID NO: 18600 - protein, 9 aa, synthetic construct
  REGION 1..9: note = Description of Artificial Sequence: Synthetic peptide
THLEGQVIL

SEQ ID NO: 18601 - protein, 11 aa, synthetic construct
  REGION 1..11: note = Description of Artificial Sequence: Synthetic peptide
TQIDPDLADQL

SEQ ID NO: 18602 - protein, 11 aa, synthetic construct
  REGION 1..11: note = Description of Artificial Sequence: Synthetic peptide
TQVDPGLADQL

SEQ ID NO: 18603 - protein, 9 aa, synthetic construct
  REGION 1..9: note = Description of Artificial Sequence: Synthetic peptide
GRPPEPVTL

SEQ ID NO: 18604 - protein, 10 aa, synthetic construct
  REGION 1..10: note = Description of Artificial Sequence: Synthetic peptide
NQDPIPKQPL

SEQ ID NO: 18605 - protein, 9 aa, synthetic construct
  REGION 1..9: note = Description of Artificial Sequence: Synthetic peptide
THLEGKVIL

SEQ ID NO: 18606 - protein, 9 aa, synthetic construct
  REGION 1..9: note = Description of Artificial Sequence: Synthetic peptide
EHLKTAVQM

SEQ ID NO: 18607 - protein, 9 aa, synthetic construct
  REGION 1..9: note = Description of Artificial Sequence: Synthetic peptide
IHTDNGTNF

SEQ ID NO: 18608 - protein, 8 aa, synthetic construct
  REGION 1..8: note = Description of Artificial Sequence: Synthetic peptide
MHTDIISL

SEQ ID NO: 18609 - protein, 10 aa, synthetic construct
  REGION 1..10: note = Description of Artificial Sequence: Synthetic peptide
YVDNGTNVTL

SEQ ID NO: 18610 - protein, 10 aa, synthetic construct
  REGION 1..10: note = Description of Artificial Sequence: Synthetic peptide
DRNNTNNVTF

SEQ ID NO: 18611 - protein, 11 aa, synthetic construct
  REGION 1..11: note = Description of Artificial Sequence: Synthetic peptide
TQVEPGLADQL

SEQ ID NO: 18612 - protein, 9 aa, synthetic construct
  REGION 1..9: note = Description of Artificial Sequence: Synthetic peptide
IHIGPGQAF

SEQ ID NO: 18613 - protein, 9 aa, synthetic construct
  REGION 1..9: note = Description of Artificial Sequence: Synthetic peptide
EQEPPLTSL

SEQ ID NO: 18614 - protein, 9 aa, synthetic construct
  REGION 1..9: note = Description of Artificial Sequence: Synthetic peptide
IRIGPGQAF

SEQ ID NO: 18615 - protein, 11 aa, synthetic construct
  REGION 1..11: note = Description of Artificial Sequence: Synthetic peptide
TQVDPDLADQL

SEQ ID NO: 18616 - protein, 9 aa, synthetic construct
  REGION 1..9: note = Description of Artificial Sequence: Synthetic peptide
IHTDNGSNF

SEQ ID NO: 18617 - protein, 9 aa, synthetic construct
  REGION 1..9: note = Description of Artificial Sequence: Synthetic peptide
EDITGNITL

SEQ ID NO: 18618 - protein, 9 aa, synthetic construct
  REGION 1..9: note = Description of Artificial Sequence: Synthetic peptide
HQAISPRTL

SEQ ID NO: 18619 - protein, 9 aa, synthetic construct
  REGION 1..9: note = Description of Artificial Sequence: Synthetic peptide
QGASIEEMM

SEQ ID NO: 18620 - protein, 9 aa, synthetic construct
  REGION 1..9: note = Description of Artificial Sequence: Synthetic peptide
SRLAFTHTA

SEQ ID NO: 18621 - protein, 8 aa, synthetic construct
  REGION 1..8: note = Description of Artificial Sequence: Synthetic peptide
GQVILVAV

SEQ ID NO: 18622 - protein, 9 aa, synthetic construct
  REGION 1..9: note = Description of Artificial Sequence: Synthetic peptide
QRTQQAPAA

SEQ ID NO: 18623 - protein, 10 aa, synthetic construct
  REGION 1..10: note = Description of Artificial Sequence: Synthetic peptide
SQYALGIIQA

SEQ ID NO: 18624 - protein, 8 aa, synthetic construct
  REGION 1..8: note = Description of Artificial Sequence: Synthetic peptide
WQRPIVTV

SEQ ID NO: 18625 - protein, 9 aa, synthetic construct
  REGION 1..9: note = Description of Artificial Sequence: Synthetic peptide
VQLGIPHPA

SEQ ID NO: 18626 - protein, 9 aa, synthetic construct
  REGION 1..9: note = Description of Artificial Sequence: Synthetic peptide
GHLNLGYVA

SEQ ID NO: 18627 - protein, 8 aa, synthetic construct
  REGION 1..8: note = Description of Artificial Sequence: Synthetic peptide
THGIKPVV

SEQ ID NO: 18628 - protein, 8 aa, synthetic construct
  REGION 1..8: note = Description of Artificial Sequence: Synthetic peptide
THGIRPVV

SEQ ID NO: 18629 - protein, 10 aa, synthetic construct
  REGION 1..10: note = Description of Artificial Sequence: Synthetic peptide
NHPGSQPQTA

SEQ ID NO: 18630 - protein, 8 aa, synthetic construct
  REGION 1..8: note = Description of Artificial Sequence: Synthetic peptide
FQTLTPNA

SEQ ID NO: 18631 - protein, 9 aa, synthetic construct
  REGION 1..9: note = Description of Artificial Sequence: Synthetic peptide
ERIRQTEPA

SEQ ID NO: 18632 - protein, 9 aa, synthetic construct
  REGION 1..9: note = Description of Artificial Sequence: Synthetic peptide
QNYPIVQNA

SEQ ID NO: 18633 - protein, 8 aa, synthetic construct
  REGION 1..8: note = Description of Artificial Sequence: Synthetic peptide
VHIPLGEA

SEQ ID NO: 18634 - protein, 8 aa, synthetic construct
  REGION 1..8: note = Description of Artificial Sequence: Synthetic peptide
IQRIIEGA

SEQ ID NO: 18635 - protein, 9 aa, synthetic construct
  REGION 1..9: note = Description of Artificial Sequence: Synthetic peptide
YQLETEPIA

SEQ ID NO: 18636 - protein, 11 aa, synthetic construct
  REGION 1..11: note = Description of Artificial Sequence: Synthetic peptide
THLEGQVILVA

SEQ ID NO: 18637 - protein, 8 aa, synthetic construct
  REGION 1..8: note = Description of Artificial Sequence: Synthetic peptide
WQRPLVTV

SEQ ID NO: 18638 - protein, 8 aa, synthetic construct
  REGION 1..8: note = Description of Artificial Sequence: Synthetic peptide
DQVAIEIC

SEQ ID NO: 18639 - protein, 9 aa, synthetic construct
  REGION 1..9: note = Description of Artificial Sequence: Synthetic peptide
SQMTNMNTA

SEQ ID NO: 18640 - protein, 8 aa, synthetic construct
  REGION 1..8: note = Description of Artificial Sequence: Synthetic peptide
THLEGQVI

SEQ ID NO: 18641 - protein, 8 aa, synthetic construct
  REGION 1..8: note = Description of Artificial Sequence: Synthetic peptide
HHYESTNP

SEQ ID NO: 18642 - protein, 9 aa, synthetic construct
  REGION 1..9: note = Description of Artificial Sequence: Synthetic peptide
GHLTFGYVA

SEQ ID NO: 18643 - protein, 9 aa, synthetic construct
  REGION 1..9: note = Description of Artificial Sequence: Synthetic peptide
SRLALTHLA

SEQ ID NO: 18644 - protein, 8 aa, synthetic construct
  REGION 1..8: note = Description of Artificial Sequence: Synthetic peptide
QHMLQLTV

SEQ ID NO: 18645 - protein, 8 aa, synthetic construct
  REGION 1..8: note = Description of Artificial Sequence: Synthetic peptide
TQYRLINC

SEQ ID NO: 18646 - protein, 9 aa, synthetic construct
  REGION 1..9: note = Description of Artificial Sequence: Synthetic peptide
YQLEAEPIA

SEQ ID NO: 18647 - protein, 8 aa, synthetic construct
  REGION 1..8: note = Description of Artificial Sequence: Synthetic peptide
GKVILVAV

SEQ ID NO: 18648 - protein, 9 aa, synthetic construct
  REGION 1..9: note = Description of Artificial Sequence: Synthetic peptide
QRVGQAMYA

SEQ ID NO: 18649 - protein, 8 aa, synthetic construct
  REGION 1..8: note = Description of Artificial Sequence: Synthetic peptide
MHTDIISL

SEQ ID NO: 18650 - protein, 9 aa, synthetic construct
  REGION 1..9: note = Description of Artificial Sequence: Synthetic peptide
SQVTNTNTA

SEQ ID NO: 18651 - protein, 8 aa, synthetic construct
  REGION 1..8: note = Description of Artificial Sequence: Synthetic peptide
LHQVVTQL

SEQ ID NO: 18652 - protein, 9 aa, synthetic construct
  REGION 1..9: note = Description of Artificial Sequence: Synthetic peptide
SQVTNANAA

SEQ ID NO: 18653 - protein, 8 aa, synthetic construct
  REGION 1..8: note = Description of Artificial Sequence: Synthetic peptide
SQVTNASA

SEQ ID NO: 18654 - protein, 10 aa, synthetic construct
  REGION 1..10: note = Description of Artificial Sequence: Synthetic peptide
TEDITGNITL

SEQ ID NO: 18655 - protein, 9 aa, synthetic construct
  REGION 1..9: note = Description of Artificial Sequence: Synthetic peptide
GEGSPQISL

SEQ ID NO: 18656 - protein, 10 aa, synthetic construct
  REGION 1..10: note = Description of Artificial Sequence: Synthetic peptide
KEQEPPLTSL

SEQ ID NO: 18657 - protein, 10 aa, synthetic construct
  REGION 1..10: note = Description of Artificial Sequence: Synthetic peptide
IEVQDTSEAL

SEQ ID NO: 18658 - protein, 9 aa, synthetic construct
  REGION 1..9: note = Description of Artificial Sequence: Synthetic peptide
IEDPEREVL

SEQ ID NO: 18659 - protein, 9 aa, synthetic construct
  REGION 1..9: note = Description of Artificial Sequence: Synthetic peptide
MEDDGREVL

SEQ ID NO: 18660 - protein, 10 aa, synthetic construct
  REGION 1..10: note = Description of Artificial Sequence: Synthetic peptide
IEVKDTKEAL

SEQ ID NO: 18661 - protein, 10 aa, synthetic construct
  REGION 1..10: note = Description of Artificial Sequence: Synthetic peptide
TETTNQKTEL

SEQ ID NO: 18662 - protein, 9 aa, synthetic construct
  REGION 1..9: note = Description of Artificial Sequence: Synthetic peptide
MEDEEKEVL

SEQ ID NO: 18663 - protein, 10 aa, synthetic construct
  REGION 1..10: note = Description of Artificial Sequence: Synthetic peptide
MEDDGREVLM

SEQ ID NO: 18664 - protein, 9 aa, synthetic construct
  REGION 1..9: note = Description of Artificial Sequence: Synthetic peptide
IEGQLKEAL

SEQ ID NO: 18665 - protein, 10 aa, synthetic construct
  REGION 1..10: note = Description of Artificial Sequence: Synthetic peptide
AEGTDRIIEL

SEQ ID NO: 18666 - protein, 8 aa, synthetic construct
  REGION 1..8: note = Description of Artificial Sequence: Synthetic peptide
IETVPVTL

SEQ ID NO: 18667 - protein, 10 aa, synthetic construct
  REGION 1..10: note = Description of Artificial Sequence: Synthetic peptide
KEKEPPLTSL

SEQ ID NO: 18668 - protein, 9 aa, synthetic construct
  REGION 1..9: note = Description of Artificial Sequence: Synthetic peptide
SEGATPQDL

SEQ ID NO: 18669 - protein, 8 aa, synthetic construct
  REGION 1..8: note = Description of Artificial Sequence: Synthetic peptide
IETVPVKL

SEQ ID NO: 18670 - protein, 10 aa, synthetic construct
  REGION 1..10: note = Description of Artificial Sequence: Synthetic peptide
QELKNSAISL

SEQ ID NO: 18671 - protein, 9 aa, synthetic construct
  REGION 1..9: note = Description of Artificial Sequence: Synthetic peptide
MEDEEGEVL

SEQ ID NO: 18672 - protein, 9 aa, synthetic construct
  REGION 1..9: note = Description of Artificial Sequence: Synthetic peptide
IEGQLREAL

SEQ ID NO: 18673 - protein, 9 aa, synthetic construct
  REGION 1..9: note = Description of Artificial Sequence: Synthetic peptide
QEQNEQDLL

SEQ ID NO: 18674 - protein, 8 aa, synthetic construct
  REGION 1..8: note = Description of Artificial Sequence: Synthetic peptide
AEGQGTSL

SEQ ID NO: 18675 - protein, 9 aa, synthetic construct
  REGION 1..9: note = Description of Artificial Sequence: Synthetic peptide
QEKNEQDLL

SEQ ID NO: 18676 - protein, 10 aa, synthetic construct
  REGION 1..10: note = Description of Artificial Sequence: Synthetic peptide
SESAIRGAIL

SEQ ID NO: 18677 - protein, 10 aa, synthetic construct
  REGION 1..10: note = Description of Artificial Sequence: Synthetic peptide
IEDPEREVLM

SEQ ID NO: 18678 - protein, 9 aa, synthetic construct
  REGION 1..9: note = Description of Artificial Sequence: Synthetic peptide
QESGPEVNI

SEQ ID NO: 18679 - protein, 9 aa, synthetic construct
  REGION 1..9: note = Description of Artificial Sequence: Synthetic peptide
VEPGLADQL

SEQ ID NO: 18680 - protein, 9 aa, synthetic construct
  REGION 1..9: note = Description of Artificial Sequence: Synthetic peptide
SEFNLPPIV

SEQ ID NO: 18681 - protein, 10 aa, synthetic construct
  REGION 1..10: note = Description of Artificial Sequence: Synthetic peptide
AEHLKTAVQM

SEQ ID NO: 18682 - protein, 10 aa, synthetic construct
  REGION 1..10: note = Description of Artificial Sequence: Synthetic peptide
YVDNGTNVTL

SEQ ID NO: 18683 - protein, 11 aa, synthetic construct
  REGION 1..11: note = Description of Artificial Sequence: Synthetic peptide
QELKNSAIDLL

SEQ ID NO: 18684 - protein, 10 aa, synthetic construct
  REGION 1..10: note = Description of Artificial Sequence: Synthetic peptide
AEAMSQMTNM

SEQ ID NO: 18685 - protein, 11 aa, synthetic construct
  REGION 1..11: note = Description of Artificial Sequence: Synthetic peptide
EEMTSSPKQEL

SEQ ID NO: 18686 - protein, 11 aa, synthetic construct
  REGION 1..11: note = Description of Artificial Sequence: Synthetic peptide
QELKNSAINLL

SEQ ID NO: 18687 - protein, 9 aa, synthetic construct
  REGION 1..9: note = Description of Artificial Sequence: Synthetic peptide
GEGSPQISL

SEQ ID NO: 18688 - protein, 10 aa, synthetic construct
  REGION 1..10: note = Description of Artificial Sequence: Synthetic peptide
KEQEPPLTSL

SEQ ID NO: 18689 - protein, 10 aa, synthetic construct
  REGION 1..10: note = Description of Artificial Sequence: Synthetic peptide
KEKEPPLTSL

SEQ ID NO: 18690 - protein, 10 aa, synthetic construct
  REGION 1..10: note = Description of Artificial Sequence: Synthetic peptide
TEDITGNITL

SEQ ID NO: 18691 - protein, 10 aa, synthetic construct
  REGION 1..10: note = Description of Artificial Sequence: Synthetic peptide
GEVIGNIRQA

SEQ ID NO: 18692 - protein, 10 aa, synthetic construct
  REGION 1..10: note = Description of Artificial Sequence: Synthetic peptide
GEKGVGSPQI

SEQ ID NO: 18693 - protein, 9 aa, synthetic construct
  REGION 1..9: note = Description of Artificial Sequence: Synthetic peptide
SEFNLPPIV

SEQ ID NO: 18694 - protein, 10 aa, synthetic construct
  REGION 1..10: note = Description of Artificial Sequence: Synthetic peptide
TETTNQKTEL

SEQ ID NO: 18695 - protein, 10 aa, synthetic construct
  REGION 1..10: note = Description of Artificial Sequence: Synthetic peptide
IEVQDTSEAL

SEQ ID NO: 18696 - protein, 8 aa, synthetic construct
  REGION 1..8: note = Description of Artificial Sequence: Synthetic peptide
TDIQTKEL

SEQ ID NO: 18697 - protein, 10 aa, synthetic construct
  REGION 1..10: note = Description of Artificial Sequence: Synthetic peptide
AEHLKTAVQM

SEQ ID NO: 18698 - protein, 10 aa, synthetic construct
  REGION 1..10: note = Description of Artificial Sequence: Synthetic peptide
AEGTDRIIEL

SEQ ID NO: 18699 - protein, 10 aa, synthetic construct
  REGION 1..10: note = Description of Artificial Sequence: Synthetic peptide
AEHLRTAVQM

SEQ ID NO: 18700 - protein, 10 aa, synthetic construct
  REGION 1..10: note = Description of Artificial Sequence: Synthetic peptide
IEVKDTKEAL

SEQ ID NO: 18701 - protein, 9 aa, synthetic construct
  REGION 1..9: note = Description of Artificial Sequence: Synthetic peptide
GERVLATCL

SEQ ID NO: 18702 - protein, 9 aa, synthetic construct
  REGION 1..9: note = Description of Artificial Sequence: Synthetic peptide
IEGQLKEAL

SEQ ID NO: 18703 - protein, 8 aa, synthetic construct
  REGION 1..8: note = Description of Artificial Sequence: Synthetic peptide
TDIPTKEL

SEQ ID NO: 18704 - protein, 11 aa, synthetic construct
  REGION 1..11: note = Description of Artificial Sequence: Synthetic peptide
EEMTSSPKQEL

SEQ ID NO: 18705 - protein, 8 aa, synthetic construct
  REGION 1..8: note = Description of Artificial Sequence: Synthetic peptide
IETVPVTL

SEQ ID NO: 18706 - protein, 8 aa, synthetic construct
  REGION 1..8: note = Description of Artificial Sequence: Synthetic peptide
IETVPVKL

SEQ ID NO: 18707 - protein, 11 aa, synthetic construct
  REGION 1..11: note = Description of Artificial Sequence: Synthetic peptide
EEITPSPRQEL

SEQ ID NO: 18708 - protein, 10 aa, synthetic construct
  REGION 1..10: note = Description of Artificial Sequence: Synthetic peptide
QELKNSAISL

SEQ ID NO: 18709 - protein, 9 aa, synthetic construct
  REGION 1..9: note = Description of Artificial Sequence: Synthetic peptide
GEIQEQRNC

SEQ ID NO: 18710 - protein, 9 aa, synthetic construct
  REGION 1..9: note = Description of Artificial Sequence: Synthetic peptide
SERILTDCL

SEQ ID NO: 18711 - protein, 9 aa, synthetic construct
  REGION 1..9: note = Description of Artificial Sequence: Synthetic peptide
IEDPEREVL

SEQ ID NO: 18712 - protein, 9 aa, synthetic construct
  REGION 1..9: note = Description of Artificial Sequence: Synthetic peptide
MEDDGREVL

SEQ ID NO: 18713 - protein, 10 aa, synthetic construct
  REGION 1..10: note = Description of Artificial Sequence: Synthetic peptide
SEFNLPPIVA

SEQ ID NO: 18714 - protein, 8 aa, synthetic construct
  REGION 1..8: note = Description of Artificial Sequence: Synthetic peptide
VEAIIRTL

SEQ ID NO: 18715 - protein, 9 aa, synthetic construct
  REGION 1..9: note = Description of Artificial Sequence: Synthetic peptide
VDNGTNVTL

SEQ ID NO: 18716 - protein, 10 aa, synthetic construct
  REGION 1..10: note = Description of Artificial Sequence: Synthetic peptide
SESAIRGAIL

SEQ ID NO: 18717 - protein, 9 aa, synthetic construct
  REGION 1..9: note = Description of Artificial Sequence: Synthetic peptide
AEWDRVHPV

SEQ ID NO: 18718 - protein, 8 aa, synthetic construct
  REGION 1..8: note = Description of Artificial Sequence: Synthetic peptide
IEQIQPAI

SEQ ID NO: 18719 - protein, 9 aa, synthetic construct
  REGION 1..9: note = Description of Artificial Sequence: Synthetic peptide
IEGQLREAL

SEQ ID NO: 18720 - protein, 10 aa, synthetic construct
  REGION 1..10: note = Description of Artificial Sequence: Synthetic peptide
GEKGEGSPQI

SEQ ID NO: 18721 - protein, 8 aa, synthetic construct
  REGION 1..8: note = Description of Artificial Sequence: Synthetic peptide
KEPPLASL

SEQ ID NO: 18722 - protein, 8 aa, synthetic construct
  REGION 1..8: note = Description of Artificial Sequence: Synthetic peptide
KEPPLTSL

SEQ ID NO: 18723 - protein, 11 aa, synthetic construct
  REGION 1..11: note = Description of Artificial Sequence: Synthetic peptide
VEALTRILQQL

SEQ ID NO: 18724 - protein, 9 aa, synthetic construct
  REGION 1..9: note = Description of Artificial Sequence: Synthetic peptide
TEVVQKIAT

SEQ ID NO: 18725 - protein, 9 aa, synthetic construct
  REGION 1..9: note = Description of Artificial Sequence: Synthetic peptide
AEWDRTHPV

SEQ ID NO: 18726 - protein, 9 aa, synthetic construct
  REGION 1..9: note = Description of Artificial Sequence: Synthetic peptide
SEGATPQDL

SEQ ID NO: 18727 - protein, 11 aa, synthetic construct
  REGION 1..11: note = Description of Artificial Sequence: Synthetic peptide
VEALIRTLQQL

SEQ ID NO: 18728 - protein, 10 aa, synthetic construct
  REGION 1..10: note = Description of Artificial Sequence: Synthetic peptide
KDKEPPLASL

SEQ ID NO: 18729 - protein, 11 aa, synthetic construct
  REGION 1..11: note = Description of Artificial Sequence: Synthetic peptide
QEPPLTSLRSL

SEQ ID NO: 18730 - protein, 11 aa, synthetic construct
  REGION 1..11: note = Description of Artificial Sequence: Synthetic peptide
QELKNSAVNLL

SEQ ID NO: 18731 - protein, 9 aa, synthetic construct
  REGION 1..9: note = Description of Artificial Sequence: Synthetic peptide
EEFVNTPHL

SEQ ID NO: 18732 - protein, 9 aa, synthetic construct
  REGION 1..9: note = Description of Artificial Sequence: Synthetic peptide
LETEPIVGA

SEQ ID NO: 18733 - protein, 11 aa, synthetic construct
  REGION 1..11: note = Description of Artificial Sequence: Synthetic peptide
AEPVAEGVGAV

SEQ ID NO: 18734 - protein, 8 aa, synthetic construct
  REGION 1..8: note = Description of Artificial Sequence: Synthetic peptide
IEITSHTF

SEQ ID NO: 18735 - protein, 11 aa, synthetic construct
  REGION 1..11: note = Description of Artificial Sequence: Synthetic peptide
VEAIIRTLQQL

SEQ ID NO: 18736 - protein, 9 aa, synthetic construct
  REGION 1..9: note = Description of Artificial Sequence: Synthetic peptide
SESELVNQI

SEQ ID NO: 18737 - protein, 10 aa, synthetic construct
  REGION 1..10: note = Description of Artificial Sequence: Synthetic peptide
GEVIGNIRQA

SEQ ID NO: 18738 - protein, 10 aa, synthetic construct
  REGION 1..10: note = Description of Artificial Sequence: Synthetic peptide
SEFNLPPIVA

SEQ ID NO: 18739 - protein, 9 aa, synthetic construct
  REGION 1..9: note = Description of Artificial Sequence: Synthetic peptide
LETEPIVGA

SEQ ID NO: 18740 - protein, 9 aa, synthetic construct
  REGION 1..9: note = Description of Artificial Sequence: Synthetic peptide
LETEPIAGA

SEQ ID NO: 18741 - protein, 9 aa, synthetic construct
  REGION 1..9: note = Description of Artificial Sequence: Synthetic peptide
LEAEPIAGA

SEQ ID NO: 18742 - protein, 10 aa, synthetic construct
  REGION 1..10: note = Description of Artificial Sequence: Synthetic peptide
REFPPEEARA

SEQ ID NO: 18743 - protein, 9 aa, synthetic construct
  REGION 1..9: note = Description of Artificial Sequence: Synthetic peptide
SEFNLPPIV

SEQ ID NO: 18744 - protein, 9 aa, synthetic construct
  REGION 1..9: note = Description of Artificial Sequence: Synthetic peptide
GEIQEQRNC

SEQ ID NO: 18745 - protein, 9 aa, synthetic construct
  REGION 1..9: note = Description of Artificial Sequence: Synthetic peptide
AETYYIDGA

SEQ ID NO: 18746 - protein, 9 aa, synthetic construct
  REGION 1..9: note = Description of Artificial Sequence: Synthetic peptide
TETLLVQNA

SEQ ID NO: 18747 - protein, 9 aa, synthetic construct
  REGION 1..9: note = Description of Artificial Sequence: Synthetic peptide
EEVGFPVRP

SEQ ID NO: 18748 - protein, 10 aa, synthetic construct
  REGION 1..10: note = Description of Artificial Sequence: Synthetic peptide
TEIVPLTKEA

SEQ ID NO: 18749 - protein, 9 aa, synthetic construct
  REGION 1..9: note = Description of Artificial Sequence: Synthetic peptide
LETEPIEGA

SEQ ID NO: 18750 - protein, 10 aa, synthetic construct
  REGION 1..10: note = Description of Artificial Sequence: Synthetic peptide
SEVHIPLGEA

SEQ ID NO: 18751 - protein, 9 aa, synthetic construct
  REGION 1..9: note = Description of Artificial Sequence: Synthetic peptide
IEVKDTKEA

SEQ ID NO: 18752 - protein, 9 aa, synthetic construct
  REGION 1..9: note = Description of Artificial Sequence: Synthetic peptide
QEFGIPYNP

SEQ ID NO: 18753 - protein, 8 aa, synthetic construct
  REGION 1..8: note = Description of Artificial Sequence: Synthetic peptide
REFPPEEA

SEQ ID NO: 18754 - protein, 9 aa, synthetic construct
  REGION 1..9: note = Description of Artificial Sequence: Synthetic peptide
AETYYVDGA

SEQ ID NO: 18755 - protein, 9 aa, synthetic construct
  REGION 1..9: note = Description of Artificial Sequence: Synthetic peptide
AEWDRVHPV

SEQ ID NO: 18756 - protein, 11 aa, synthetic construct
  REGION 1..11: note = Description of Artificial Sequence: Synthetic peptide
GESPAVLGTGA

SEQ ID NO: 18757 - protein, 9 aa, synthetic construct
  REGION 1..9: note = Description of Artificial Sequence: Synthetic peptide
GENNSLLHP

SEQ ID NO: 18758 - protein, 10 aa, synthetic construct
  REGION 1..10: note = Description of Artificial Sequence: Synthetic peptide
AETYYIDGAA

SEQ ID NO: 18759 - protein, 8 aa, synthetic construct
  REGION 1..8: note = Description of Artificial Sequence: Synthetic peptide
SESAIRKA

SEQ ID NO: 18760 - protein, 10 aa, synthetic construct
  REGION 1..10: note = Description of Artificial Sequence: Synthetic peptide
KEKEPPLTSL

SEQ ID NO: 18761 - protein, 10 aa, synthetic construct
  REGION 1..10: note = Description of Artificial Sequence: Synthetic peptide
KEQEPPLTSL

SEQ ID NO: 18762 - protein, 9 aa, synthetic construct
  REGION 1..9: note = Description of Artificial Sequence: Synthetic peptide
GEGSPQISL

SEQ ID NO: 18763 - protein, 9 aa, synthetic construct
  REGION 1..9: note = Description of Artificial Sequence: Synthetic peptide
GERVLATCL

SEQ ID NO: 18764 - protein, 9 aa, synthetic construct
  REGION 1..9: note = Description of Artificial Sequence: Synthetic peptide
IEDPEREVL

SEQ ID NO: 18765 - protein, 8 aa, synthetic construct
  REGION 1..8: note = Description of Artificial Sequence: Synthetic peptide
TDIQTKEL

SEQ ID NO: 18766 - protein, 9 aa, synthetic construct
  REGION 1..9: note = Description of Artificial Sequence: Synthetic peptide
MEDDGREVL

SEQ ID NO: 18767 - protein, 8 aa, synthetic construct
  REGION 1..8: note = Description of Artificial Sequence: Synthetic peptide
AEHLRTAV

SEQ ID NO: 18768 - protein, 8 aa, synthetic construct
  REGION 1..8: note = Description of Artificial Sequence: Synthetic peptide
AEHLKTAV

SEQ ID NO: 18769 - protein, 9 aa, synthetic construct
  REGION 1..9: note = Description of Artificial Sequence: Synthetic peptide
SERILTDCL

SEQ ID NO: 18770 - protein, 10 aa, synthetic construct
  REGION 1..10: note = Description of Artificial Sequence: Synthetic peptide
GEKGVGSPQI

SEQ ID NO: 18771 - protein, 9 aa, synthetic construct
  REGION 1..9: note = Description of Artificial Sequence: Synthetic peptide
SERILTSCL

SEQ ID NO: 18772 - protein, 9 aa, synthetic construct
  REGION 1..9: note = Description of Artificial Sequence: Synthetic peptide
GEQDRGRSV

SEQ ID NO: 18773 - protein, 9 aa, synthetic construct
  REGION 1..9: note = Description of Artificial Sequence: Synthetic peptide
SESAIRKAI

SEQ ID NO: 18774 - protein, 8 aa, synthetic construct
  REGION 1..8: note = Description of Artificial Sequence: Synthetic peptide
TDIPTKEL

SEQ ID NO: 18775 - protein, 9 aa, synthetic construct
  REGION 1..9: note = Description of Artificial Sequence: Synthetic peptide
IEGQLREAL

SEQ ID NO: 18776 - protein, 10 aa, synthetic construct
  REGION 1..10: note = Description of Artificial Sequence: Synthetic peptide
AEHLRTAVQM

SEQ ID NO: 18777 - protein, 9 aa, synthetic construct
  REGION 1..9: note = Description of Artificial Sequence: Synthetic peptide
IEGQLKEAL

SEQ ID NO: 18778 - protein, 8 aa, synthetic construct
  REGION 1..8: note = Description of Artificial Sequence: Synthetic peptide
IEQIQPAI

SEQ ID NO: 18779 - protein, 8 aa, synthetic construct
  REGION 1..8: note = Description of Artificial Sequence: Synthetic peptide
AERTGTSF

SEQ ID NO: 18780 - protein, 10 aa, synthetic construct
  REGION 1..10: note = Description of Artificial Sequence: Synthetic peptide
TEDITGNITL

SEQ ID NO: 18781 - protein, 10 aa, synthetic construct
  REGION 1..10: note = Description of Artificial Sequence: Synthetic peptide
TETTNQKTEL

SEQ ID NO: 18782 - protein, 8 aa, synthetic construct
  REGION 1..8: note = Description of Artificial Sequence: Synthetic peptide
AEGQGTSL

SEQ ID NO: 18783 - protein, 8 aa, synthetic construct
  REGION 1..8: note = Description of Artificial Sequence: Synthetic peptide
VEAIIRTL

SEQ ID NO: 18784 - protein, 10 aa, synthetic construct
  REGION 1..10: note = Description of Artificial Sequence: Synthetic peptide
AEGTDRIIEL

SEQ ID NO: 18785 - protein, 9 aa, synthetic construct
  REGION 1..9: note = Description of Artificial Sequence: Synthetic peptide
QEKNEQDLL

SEQ ID NO: 18786 - protein, 8 aa, synthetic construct
  REGION 1..8: note = Description of Artificial Sequence: Synthetic peptide
IEQLRPSI

SEQ ID NO: 18787 - protein, 9 aa, synthetic construct
  REGION 1..9: note = Description of Artificial Sequence: Synthetic peptide
KEKGGLEGL

SEQ ID NO: 18788 - protein, 11 aa, synthetic construct
  REGION 1..11: note = Description of Artificial Sequence: Synthetic peptide
EEMTSSPKQEL

SEQ ID NO: 18789 - protein, 9 aa, synthetic construct
  REGION 1..9: note = Description of Artificial Sequence: Synthetic peptide
GEQDRDRSI

SEQ ID NO: 18790 - protein, 9 aa, synthetic construct
  REGION 1..9: note = Description of Artificial Sequence: Synthetic peptide
GEQDRDRSV

SEQ ID NO: 18791 - protein, 11 aa, synthetic construct
  REGION 1..11: note = Description of Artificial Sequence: Synthetic peptide
EEITPSPRQEL

SEQ ID NO: 18792 - protein, 8 aa, synthetic construct
  REGION 1..8: note = Description of Artificial Sequence: Synthetic peptide
IEITSHTF

SEQ ID NO: 18793 - protein, 9 aa, synthetic construct
  REGION 1..9: note = Description of Artificial Sequence: Synthetic peptide
SESAIRGAI

SEQ ID NO: 18794 - protein, 10 aa, synthetic construct
  REGION 1..10: note = Description of Artificial Sequence: Synthetic peptide
AEHLKTAVQM

SEQ ID NO: 18795 - protein, 10 aa, synthetic construct
  REGION 1..10: note = Description of Artificial Sequence: Synthetic peptide
GEKGEGSPQI

SEQ ID NO: 18796 - protein, 9 aa, synthetic construct
  REGION 1..9: note = Description of Artificial Sequence: Synthetic peptide
SERILHTCL

SEQ ID NO: 18797 - protein, 8 aa, synthetic construct
  REGION 1..8: note = Description of Artificial Sequence: Synthetic peptide
TERQANFL

SEQ ID NO: 18798 - protein, 9 aa, synthetic construct
  REGION 1..9: note = Description of Artificial Sequence: Synthetic peptide
VDNGTNVTL

SEQ ID NO: 18799 - protein, 9 aa, synthetic construct
  REGION 1..9: note = Description of Artificial Sequence: Synthetic peptide
MEDEEKEVL

SEQ ID NO: 18800 - protein, 10 aa, synthetic construct
  REGION 1..10: note = Description of Artificial Sequence: Synthetic peptide
SESAIRGAIL

SEQ ID NO: 18801 - protein, 10 aa, synthetic construct
  REGION 1..10: note = Description of Artificial Sequence: Synthetic peptide
KDKEPPLASL

SEQ ID NO: 18802 - protein, 9 aa, synthetic construct
  REGION 1..9: note = Description of Artificial Sequence: Synthetic peptide
SEFNLPPIV

SEQ ID NO: 18803 - protein, 8 aa, synthetic construct
  REGION 1..8: note = Description of Artificial Sequence: Synthetic peptide
KEPPLTSL

SEQ ID NO: 18804 - protein, 8 aa, synthetic construct
  REGION 1..8: note = Description of Artificial Sequence: Synthetic peptide
VEALIRTL

SEQ ID NO: 18805 - protein, 9 aa, synthetic construct
  REGION 1..9: note = Description of Artificial Sequence: Synthetic peptide
KEKGGLDGL

SEQ ID NO: 18806 - protein, 9 aa, synthetic construct
  REGION 1..9: note = Description of Artificial Sequence: Synthetic peptide
GEIQEQRNC

SEQ ID NO: 18807 - protein, 9 aa, synthetic construct
  REGION 1..9: note = Description of Artificial Sequence: Synthetic peptide
TEMEKEGKI

SEQ ID NO: 18808 - protein, 8 aa, synthetic construct
  REGION 1..8: note = Description of Artificial Sequence: Synthetic peptide
IEIITHSF

SEQ ID NO: 18809 - protein, 10 aa, synthetic construct
  REGION 1..10: note = Description of Artificial Sequence: Synthetic peptide
QELKNSAISL

SEQ ID NO: 18810 - protein, 8 aa, synthetic construct
  REGION 1..8: note = Description of Artificial Sequence: Synthetic peptide
IETVPVTL

SEQ ID NO: 18811 - protein, 9 aa, synthetic construct
  REGION 1..9: note = Description of Artificial Sequence: Synthetic peptide
AEWDRVHPV

SEQ ID NO: 18812 - protein, 11 aa, synthetic construct
  REGION 1..11: note = Description of Artificial Sequence: Synthetic peptide
AEQATQDVKNW

SEQ ID NO: 18813 - protein, 11 aa, synthetic construct
  REGION 1..11: note = Description of Artificial Sequence: Synthetic peptide
AEQATQEVKNW

SEQ ID NO: 18814 - protein, 9 aa, synthetic construct
  REGION 1..9: note = Description of Artificial Sequence: Synthetic peptide
EEINLPGKW

SEQ ID NO: 18815 - protein, 11 aa, synthetic construct
  REGION 1..11: note = Description of Artificial Sequence: Synthetic peptide
AEIQKQGQEQW

SEQ ID NO: 18816 - protein, 10 aa, synthetic construct
  REGION 1..10: note = Description of Artificial Sequence: Synthetic peptide
AEGQGTSLSF

SEQ ID NO: 18817 - protein, 9 aa, synthetic construct
  REGION 1..9: note = Description of Artificial Sequence: Synthetic peptide
SESAIRKAI

SEQ ID NO: 18818 - protein, 9 aa, synthetic construct
  REGION 1..9: note = Description of Artificial Sequence: Synthetic peptide
AEIWDNMTW

SEQ ID NO: 18819 - protein, 9 aa, synthetic construct
  REGION 1..9: note = Description of Artificial Sequence: Synthetic peptide
EEINLLGRW

SEQ ID NO: 18820 - protein, 11 aa, synthetic construct
  REGION 1..11: note = Description of Artificial Sequence: Synthetic peptide
EEMTPPPKQEM

SEQ ID NO: 18821 - protein, 11 aa, synthetic construct
  REGION 1..11: note = Description of Artificial Sequence: Synthetic peptide
NEQDLLALDKW

SEQ ID NO: 18822 - protein, 9 aa, synthetic construct
  REGION 1..9: note = Description of Artificial Sequence: Synthetic peptide
SEIWDNMTW

SEQ ID NO: 18823 - protein, 11 aa, synthetic construct
  REGION 1..11: note = Description of Artificial Sequence: Synthetic peptide
EEMTSSPKQEL

SEQ ID NO: 18824 - protein, 10 aa, synthetic construct
  REGION 1..10: note = Description of Artificial Sequence: Synthetic peptide
GEARLVITTY

SEQ ID NO: 18825 - protein, 10 aa, synthetic construct
  REGION 1..10: note = Description of Artificial Sequence: Synthetic peptide
KEQEPPLTSL

SEQ ID NO: 18826 - protein, 10 aa, synthetic construct
  REGION 1..10: note = Description of Artificial Sequence: Synthetic peptide
AEPIAGAETY

SEQ ID NO: 18827 - protein, 11 aa, synthetic construct
  REGION 1..11: note = Description of Artificial Sequence: Synthetic peptide
EEITPSPRQEL

SEQ ID NO: 18828 - protein, 10 aa, synthetic construct
  REGION 1..10: note = Description of Artificial Sequence: Synthetic peptide
NETPGIRYQY

SEQ ID NO: 18829 - protein, 11 aa, synthetic construct
  REGION 1..11: note = Description of Artificial Sequence: Synthetic peptide
MEDDGREVLMW

SEQ ID NO: 18830 - protein, 10 aa, synthetic construct
  REGION 1..10: note = Description of Artificial Sequence: Synthetic peptide
MEMGHLNLGY

SEQ ID NO: 18831 - protein, 9 aa, synthetic construct
  REGION 1..9: note = Description of Artificial Sequence: Synthetic peptide
YETEKHNVW

SEQ ID NO: 18832 - protein, 9 aa, synthetic construct
  REGION 1..9: note = Description of Artificial Sequence: Synthetic peptide
AETGQETAY

SEQ ID NO: 18833 - protein, 10 aa, synthetic construct
  REGION 1..10: note = Description of Artificial Sequence: Synthetic peptide
VEMGHLNLGY

SEQ ID NO: 18834 - protein, 9 aa, synthetic construct
  REGION 1..9: note = Description of Artificial Sequence: Synthetic peptide
AETGKETAY

SEQ ID NO: 18835 - protein, 11 aa, synthetic construct
  REGION 1..11: note = Description of Artificial Sequence: Synthetic peptide
AEQATQDVKNW

SEQ ID NO: 18836 - protein, 9 aa, synthetic construct
  REGION 1..9: note = Description of Artificial Sequence: Synthetic peptide
EEINLPGKW

SEQ ID NO: 18837 - protein, 11 aa, synthetic construct
  REGION 1..11: note = Description of Artificial Sequence: Synthetic peptide
AEQATQEVKNW

SEQ ID NO: 18838 - protein, 11 aa, synthetic construct
  REGION 1..11: note = Description of Artificial Sequence: Synthetic peptide
AEIQKQGQEQW

SEQ ID NO: 18839 - protein, 10 aa, synthetic construct
  REGION 1..10: note = Description of Artificial Sequence: Synthetic peptide
AEGQGTSLSF

SEQ ID NO: 18840 - protein, 9 aa, synthetic construct
  REGION 1..9: note = Description of Artificial Sequence: Synthetic peptide
SESAIRKAI

SEQ ID NO: 18841 - protein, 10 aa, synthetic construct
  REGION 1..10: note = Description of Artificial Sequence: Synthetic peptide
GEARLVITTY

SEQ ID NO: 18842 - protein, 9 aa, synthetic construct
  REGION 1..9: note = Description of Artificial Sequence: Synthetic peptide
EEINLLGRW

SEQ ID NO: 18843 - protein, 11 aa, synthetic construct
  REGION 1..11: note = Description of Artificial Sequence: Synthetic peptide
AEIQKQGPDQW

SEQ ID NO: 18844 - protein, 10 aa, synthetic construct
  REGION 1..10: note = Description of Artificial Sequence: Synthetic peptide
NETPGIRYQY

SEQ ID NO: 18845 - protein, 11 aa, synthetic construct
  REGION 1..11: note = Description of Artificial Sequence: Synthetic peptide
EEMTPPPKQEM

SEQ ID NO: 18846 - protein, 11 aa, synthetic construct
  REGION 1..11: note = Description of Artificial Sequence: Synthetic peptide
LEVNIVTDSQY

SEQ ID NO: 18847 - protein, 9 aa, synthetic construct
  REGION 1..9: note = Description of Artificial Sequence: Synthetic peptide
SEIWDNMTW

SEQ ID NO: 18848 - protein, 9 aa, synthetic construct
  REGION 1..9: note = Description of Artificial Sequence: Synthetic peptide
AEIWDNMTW

SEQ ID NO: 18849 - protein, 10 aa, synthetic construct
  REGION 1..10: note = Description of Artificial Sequence: Synthetic peptide
MEWDKQINNY

SEQ ID NO: 18850 - protein, 10 aa, synthetic construct
  REGION 1..10: note = Description of Artificial Sequence: Synthetic peptide
AEPIAGAETY

SEQ ID NO: 18851 - protein, 10 aa, synthetic construct
  REGION 1..10: note = Description of Artificial Sequence: Synthetic peptide
GEARLVIITY

SEQ ID NO: 18852 - protein, 11 aa, synthetic construct
  REGION 1..11: note = Description of Artificial Sequence: Synthetic peptide
NEQDLLALDKW

SEQ ID NO: 18853 - protein, 9 aa, synthetic construct
  REGION 1..9: note = Description of Artificial Sequence: Synthetic peptide
SESELVNQI

SEQ ID NO: 18854 - protein, 11 aa, synthetic construct
  REGION 1..11: note = Description of Artificial Sequence: Synthetic peptide
EEMTSSPKQEL

SEQ ID NO: 18855 - protein, 9 aa, synthetic construct
  REGION 1..9: note = Description of Artificial Sequence: Synthetic peptide
YETEKHNVW

SEQ ID NO: 18856 - protein, 10 aa, synthetic construct
  REGION 1..10: note = Description of Artificial Sequence: Synthetic peptide
MEWDKQISNY

SEQ ID NO: 18857 - protein, 10 aa, synthetic construct
  REGION 1..10: note = Description of Artificial Sequence: Synthetic peptide
KEQEPPLTSL

SEQ ID NO: 18858 - protein, 11 aa, synthetic construct
  REGION 1..11: note = Description of Artificial Sequence: Synthetic peptide
MEDDGREVLMW

SEQ ID NO: 18859 - protein, 10 aa, synthetic construct
  REGION 1..10: note = Description of Artificial Sequence: Synthetic peptide
MEMGHLNLGY

SEQ ID NO: 18860 - protein, 10 aa, synthetic construct
  REGION 1..10: note = Description of Artificial Sequence: Synthetic peptide
AEGQGTSLCF

SEQ ID NO: 18861 - protein, 9 aa, synthetic construct
  REGION 1..9: note = Description of Artificial Sequence: Synthetic peptide
REAKIIRDY

SEQ ID NO: 18862 - protein, 10 aa, synthetic construct
  REGION 1..10: note = Description of Artificial Sequence: Synthetic peptide
TEPIVGAETY

SEQ ID NO: 18863 - protein, 10 aa, synthetic construct
  REGION 1..10: note = Description of Artificial Sequence: Synthetic peptide
RETKIGKAGY

SEQ ID NO: 18864 - protein, 8 aa, synthetic construct
  REGION 1..8: note = Description of Artificial Sequence: Synthetic peptide
TETDPFDW

SEQ ID NO: 18865 - protein, 10 aa, synthetic construct
  REGION 1..10: note = Description of Artificial Sequence: Synthetic peptide
VEMGHLNLGY

SEQ ID NO: 18866 - protein, 9 aa, synthetic construct
  REGION 1..9: note = Description of Artificial Sequence: Synthetic peptide
AETGQETAY

SEQ ID NO: 18867 - protein, 11 aa, synthetic construct
  REGION 1..11: note = Description of Artificial Sequence: Synthetic peptide
EEITPSPRQEL

SEQ ID NO: 18868 - protein, 9 aa, synthetic construct
  REGION 1..9: note = Description of Artificial Sequence: Synthetic peptide
TEMEKEGKI

SEQ ID NO: 18869 - protein, 9 aa, synthetic construct
  REGION 1..9: note = Description of Artificial Sequence: Synthetic peptide
GENLWVTVY

SEQ ID NO: 18870 - protein, 9 aa, synthetic construct
  REGION 1..9: note = Description of Artificial Sequence: Synthetic peptide
AETGKETAY

SEQ ID NO: 18871 - protein, 11 aa, synthetic construct
  REGION 1..11: note = Description of Artificial Sequence: Synthetic peptide
GEARLVITTYW

SEQ ID NO: 18872 - protein, 10 aa, synthetic construct
  REGION 1..10: note = Description of Artificial Sequence: Synthetic peptide
TEPIAGAETY

SEQ ID NO: 18873 - protein, 10 aa, synthetic construct
  REGION 1..10: note = Description of Artificial Sequence: Synthetic peptide
AETGQETAYF

SEQ ID NO: 18874 - protein, 9 aa, synthetic construct
  REGION 1..9: note = Description of Artificial Sequence: Synthetic peptide
DEIWDNMTW

SEQ ID NO: 18875 - protein, 11 aa, synthetic construct
  REGION 1..11: note = Description of Artificial Sequence: Synthetic peptide
EEIKNEAVRHF

SEQ ID NO: 18876 - protein, 11 aa, synthetic construct
  REGION 1..11: note = Description of Artificial Sequence: Synthetic peptide
EELKSEAVRHY

SEQ ID NO: 18877 - protein, 11 aa, synthetic construct
  REGION 1..11: note = Description of Artificial Sequence: Synthetic peptide
AEPIAGAETYY

SEQ ID NO: 18878 - protein, 8 aa, synthetic construct
  REGION 1..8: note = Description of Artificial Sequence: Synthetic peptide
NETPGIRY

SEQ ID NO: 18879 - protein, 9 aa, synthetic construct
  REGION 1..9: note = Description of Artificial Sequence: Synthetic peptide
EEIKSLFNL

SEQ ID NO: 18880 - protein, 11 aa, synthetic construct
  REGION 1..11: note = Description of Artificial Sequence: Synthetic peptide
GEARLVIITYW

SEQ ID NO: 18881 - protein, 10 aa, synthetic construct
  REGION 1..10: note = Description of Artificial Sequence: Synthetic peptide
RETKIGRAGY

SEQ ID NO: 18882 - protein, 9 aa, synthetic construct
  REGION 1..9: note = Description of Artificial Sequence: Synthetic peptide
QESGPEVNI

SEQ ID NO: 18883 - protein, 9 aa, synthetic construct
  REGION 1..9: note = Description of Artificial Sequence: Synthetic peptide
YEPEKHNVW

SEQ ID NO: 18884 - protein, 10 aa, synthetic construct
  REGION 1..10: note = Description of Artificial Sequence: Synthetic peptide
KEQEPPLTSL

SEQ ID NO: 18885 - protein, 11 aa, synthetic construct
  REGION 1..11: note = Description of Artificial Sequence: Synthetic peptide
AEIQKQGQEQW

SEQ ID NO: 18886 - protein, 10 aa, synthetic construct
  REGION 1..10: note = Description of Artificial Sequence: Synthetic peptide
AEGQGTSLSF

SEQ ID NO: 18887 - protein, 11 aa, synthetic construct
  REGION 1..11: note = Description of Artificial Sequence: Synthetic peptide
EEMTSSPKQEL

SEQ ID NO: 18888 - protein, 11 aa, synthetic construct
  REGION 1..11: note = Description of Artificial Sequence: Synthetic peptide
EEITPSPRQEL

SEQ ID NO: 18889 - protein, 10 aa, synthetic construct
  REGION 1..10: note = Description of Artificial Sequence: Synthetic peptide
TEDITGNITL

SEQ ID NO: 18890 - protein, 11 aa, synthetic construct
  REGION 1..11: note = Description of Artificial Sequence: Synthetic peptide
AEQATQEVKNW

SEQ ID NO: 18891 - protein, 11 aa, synthetic construct
  REGION 1..11: note = Description of Artificial Sequence: Synthetic peptide
EEMTPPPKQEM

SEQ ID NO: 18892 - protein, 11 aa, synthetic construct
  REGION 1..11: note = Description of Artificial Sequence: Synthetic peptide
AEQATQDVKNW

SEQ ID NO: 18893 - protein, 10 aa, synthetic construct
  REGION 1..10: note = Description of Artificial Sequence: Synthetic peptide
AETGQETAYF

SEQ ID NO: 18894 - protein, 9 aa, synthetic construct
  REGION 1..9: note = Description of Artificial Sequence: Synthetic peptide
EEINLPGKW

SEQ ID NO: 18895 - protein, 10 aa, synthetic construct
  REGION 1..10: note = Description of Artificial Sequence: Synthetic peptide
TETTNQKTEL

SEQ ID NO: 18896 - protein, 11 aa, synthetic construct
  REGION 1..11: note = Description of Artificial Sequence: Synthetic peptide
AEIQKQGPDQW

SEQ ID NO: 18897 - protein, 10 aa, synthetic construct
  REGION 1..10: note = Description of Artificial Sequence: Synthetic peptide
AEGQGTSLCF

SEQ ID NO: 18898 - protein, 10 aa, synthetic construct
  REGION 1..10: note = Description of Artificial Sequence: Synthetic peptide
AEAMSQMTNM

SEQ ID NO: 18899 - protein, 10 aa, synthetic construct
  REGION 1..10: note = Description of Artificial Sequence: Synthetic peptide
KEKEPPLTSL

SEQ ID NO: 18900 - protein, 9 aa, synthetic construct
  REGION 1..9: note = Description of Artificial Sequence: Synthetic peptide
GEGSPQISL

SEQ ID NO: 18901 - protein, 9 aa, synthetic construct
  REGION 1..9: note = Description of Artificial Sequence: Synthetic peptide
QEDGEEVGF

SEQ ID NO: 18902 - protein, 10 aa, synthetic construct
  REGION 1..10: note = Description of Artificial Sequence: Synthetic peptide
AEGTDRIIEL

SEQ ID NO: 18903 - protein, 10 aa, synthetic construct
  REGION 1..10: note = Description of Artificial Sequence: Synthetic peptide
GEQKLTNCSF

SEQ ID NO: 18904 - protein, 11 aa, synthetic construct
  REGION 1..11: note = Description of Artificial Sequence: Synthetic peptide
QELKNSAVNLL

SEQ ID NO: 18905 - protein, 10 aa, synthetic construct
  REGION 1..10: note = Description of Artificial Sequence: Synthetic peptide
GEKGVGSPQI

SEQ ID NO: 18906 - protein, 9 aa, synthetic construct
  REGION 1..9: note = Description of Artificial Sequence: Synthetic peptide
QESGPEVNI

SEQ ID NO: 18907 - protein, 11 aa, synthetic construct
  REGION 1..11: note = Description of Artificial Sequence: Synthetic peptide
AELELAENREI

SEQ ID NO: 18908 - protein, 10 aa, synthetic construct
  REGION 1..10: note = Description of Artificial Sequence: Synthetic peptide
SESAIRGAIL

SEQ ID NO: 18909 - protein, 11 aa, synthetic construct
  REGION 1..11: note = Description of Artificial Sequence: Synthetic peptide
QELKNSAINLL

SEQ ID NO: 18910 - protein, 10 aa, synthetic construct
  REGION 1..10: note = Description of Artificial Sequence: Synthetic peptide
GDIEITSHTF

SEQ ID NO: 18911 - protein, 10 aa, synthetic construct
  REGION 1..10: note = Description of Artificial Sequence: Synthetic peptide
AEHLKTAVQM

SEQ ID NO: 18912 - protein, 9 aa, synthetic construct
  REGION 1..9: note = Description of Artificial Sequence: Synthetic peptide
TEMEKEGKI

SEQ ID NO: 18913 - protein, 10 aa, synthetic construct
  REGION 1..10: note = Description of Artificial Sequence: Synthetic peptide
AETGKETAYF

SEQ ID NO: 18914 - protein, 9 aa, synthetic construct
  REGION 1..9: note = Description of Artificial Sequence: Synthetic peptide
SESELVNQI

SEQ ID NO: 18915 - protein, 9 aa, synthetic construct
  REGION 1..9: note = Description of Artificial Sequence: Synthetic peptide
QEEAEEVGF

SEQ ID NO: 18916 - protein, 10 aa, synthetic construct
  REGION 1..10: note = Description of Artificial Sequence: Synthetic peptide
QELKNSAISL

SEQ ID NO: 18917 - protein, 10 aa, synthetic construct
  REGION 1..10: note = Description of Artificial Sequence: Synthetic peptide
AEHLRTAVQM

SEQ ID NO: 18918 - protein, 9 aa, synthetic construct
  REGION 1..9: note = Description of Artificial Sequence: Synthetic peptide
EDITGNITL

SEQ ID NO: 18919 - protein, 10 aa, synthetic construct
  REGION 1..10: note = Description of Artificial Sequence: Synthetic peptide
QELKNSAVNL

SEQ ID NO: 18920 - protein, 10 aa, synthetic construct
  REGION 1..10: note = Description of Artificial Sequence: Synthetic peptide
AEGTDRIIEI

SEQ ID NO: 18921 - protein, 9 aa, synthetic construct
  REGION 1..9: note = Description of Artificial Sequence: Synthetic peptide
SESAIRKAI

SEQ ID NO: 18922 - protein, 9 aa, synthetic construct
  REGION 1..9: note = Description of Artificial Sequence: Synthetic peptide
EEFVNTPHL

SEQ ID NO: 18923 - protein, 10 aa, synthetic construct
  REGION 1..10: note = Description of Artificial Sequence: Synthetic peptide
QELKNSAINL

SEQ ID NO: 18924 - protein, 11 aa, synthetic construct
  REGION 1..11: note = Description of Artificial Sequence: Synthetic peptide
AELELEENREI

SEQ ID NO: 18925 - protein, 9 aa, synthetic construct
  REGION 1..9: note = Description of Artificial Sequence: Synthetic peptide
QEEEEEVGF

SEQ ID NO: 18926 - protein, 9 aa, synthetic construct
  REGION 1..9: note = Description of Artificial Sequence: Synthetic peptide
SEGATPQDL

SEQ ID NO: 18927 - protein, 10 aa, synthetic construct
  REGION 1..10: note = Description of Artificial Sequence: Synthetic peptide
GDMEVRTHSF

SEQ ID NO: 18928 - protein, 10 aa, synthetic construct
  REGION 1..10: note = Description of Artificial Sequence: Synthetic peptide
GEKGEGSPQI

SEQ ID NO: 18929 - protein, 10 aa, synthetic construct
  REGION 1..10: note = Description of Artificial Sequence: Synthetic peptide
AEGTDGIIVI

SEQ ID NO: 18930 - protein, 11 aa, synthetic construct
  REGION 1..11: note = Description of Artificial Sequence: Synthetic peptide
GEIQEQRNCSF

SEQ ID NO: 18931 - protein, 10 aa, synthetic construct
  REGION 1..10: note = Description of Artificial Sequence: Synthetic peptide
MEDDGREVLM

SEQ ID NO: 18932 - protein, 9 aa, synthetic construct
  REGION 1..9: note = Description of Artificial Sequence: Synthetic peptide
QEQNEQDLL

SEQ ID NO: 18933 - protein, 9 aa, synthetic construct
  REGION 1..9: note = Description of Artificial Sequence: Synthetic peptide
SESAIRGAI

SEQ ID NO: 18934 - protein, 9 aa, synthetic construct
  REGION 1..9: note = Description of Artificial Sequence: Synthetic peptide
MEDDGREVL

SEQ ID NO: 18935 - protein, 8 aa, synthetic construct
  REGION 1..8: note = Description of Artificial Sequence: Synthetic peptide
IEITSHTF

SEQ ID NO: 18936 - protein, 9 aa, synthetic construct
  REGION 1..9: note = Description of Artificial Sequence: Synthetic peptide
QEKNEQDLL

SEQ ID NO: 18937 - protein, 11 aa, synthetic construct
  REGION 1..11: note = Description of Artificial Sequence: Synthetic peptide
EEIKNEAVRHF

SEQ ID NO: 18938 - protein, 11 aa, synthetic construct
  REGION 1..11: note = Description of Artificial Sequence: Synthetic peptide
QEQNEQDLLAL

SEQ ID NO: 18939 - protein, 9 aa, synthetic construct
  REGION 1..9: note = Description of Artificial Sequence: Synthetic peptide
EEIKSLFNL

SEQ ID NO: 18940 - protein, 11 aa, synthetic construct
  REGION 1..11: note = Description of Artificial Sequence: Synthetic peptide
AEGVGAVSQDL

SEQ ID NO: 18941 - protein, 9 aa, synthetic construct
  REGION 1..9: note = Description of Artificial Sequence: Synthetic peptide
MEMEKEGKI

SEQ ID NO: 18942 - protein, 10 aa, synthetic construct
  REGION 1..10: note = Description of Artificial Sequence: Synthetic peptide
AEPIAGAETY

SEQ ID NO: 18943 - protein, 10 aa, synthetic construct
  REGION 1..10: note = Description of Artificial Sequence: Synthetic peptide
REQNPEMVIY

SEQ ID NO: 18944 - protein, 9 aa, synthetic construct
  REGION 1..9: note = Description of Artificial Sequence: Synthetic peptide
GEQDRDRSI

SEQ ID NO: 18945 - protein, 9 aa, synthetic construct
  REGION 1..9: note = Description of Artificial Sequence: Synthetic peptide
AEEQIIIRT

SEQ ID NO: 18946 - protein, 10 aa, synthetic construct
  REGION 1..10: note = Description of Artificial Sequence: Synthetic peptide
AERTGTSFNF

SEQ ID NO: 18947 - protein, 11 aa, synthetic construct
  REGION 1..11: note = Description of Artificial Sequence: Synthetic peptide
QELKNSAISLL

SEQ ID NO: 18948 - protein, 9 aa, synthetic construct
  REGION 1..9: note = Description of Artificial Sequence: Synthetic peptide
QLTEVVQKI

SEQ ID NO: 18949 - protein, 9 aa, synthetic construct
  REGION 1..9: note = Description of Artificial Sequence: Synthetic peptide
IEDPEREVL

SEQ ID NO: 18950 - protein, 11 aa, synthetic construct
  REGION 1..11: note = Description of Artificial Sequence: Synthetic peptide
LEVNIVTDSQY

SEQ ID NO: 18951 - protein, 11 aa, synthetic construct
  REGION 1..11: note = Description of Artificial Sequence: Synthetic peptide
QELKNSAIDLL

SEQ ID NO: 18952 - protein, 10 aa, synthetic construct
  REGION 1..10: note = Description of Artificial Sequence: Synthetic peptide
GDLEVTTHSF

SEQ ID NO: 18953 - protein, 9 aa, synthetic construct
  REGION 1..9: note = Description of Artificial Sequence: Synthetic peptide
NEGENNSLL

SEQ ID NO: 18954 - protein, 10 aa, synthetic construct
  REGION 1..10: note = Description of Artificial Sequence: Synthetic peptide
ILKEPVHGAY

SEQ ID NO: 18955 - protein, 9 aa, synthetic construct
  REGION 1..9: note = Description of Artificial Sequence: Synthetic peptide
RAVGMGASF

SEQ ID NO: 18956 - protein, 10 aa, synthetic construct
  REGION 1..10: note = Description of Artificial Sequence: Synthetic peptide
SIRIGPGQAF

SEQ ID NO: 18957 - protein, 9 aa, synthetic construct
  REGION 1..9: note = Description of Artificial Sequence: Synthetic peptide
HLNNRTISF

SEQ ID NO: 18958 - protein, 8 aa, synthetic construct
  REGION 1..8: note = Description of Artificial Sequence: Synthetic peptide
GKQKIVSL

SEQ ID NO: 18959 - protein, 9 aa, synthetic construct
  REGION 1..9: note = Description of Artificial Sequence: Synthetic peptide
KQVGTLQYL

SEQ ID NO: 18960 - protein, 11 aa, synthetic construct
  REGION 1..11: note = Description of Artificial Sequence: Synthetic peptide
RYVDNGTNVTL

SEQ ID NO: 18961 - protein, 9 aa, synthetic construct
  REGION 1..9: note = Description of Artificial Sequence: Synthetic peptide
GKKAIGTVL

SEQ ID NO: 18962 - protein, 8 aa, synthetic construct
  REGION 1..8: note = Description of Artificial Sequence: Synthetic peptide
HQAAMQML

SEQ ID NO: 18963 - protein, 9 aa, synthetic construct
  REGION 1..9: note = Description of Artificial Sequence: Synthetic peptide
HQAISPRTL

SEQ ID NO: 18964 - protein, 8 aa, synthetic construct
  REGION 1..8: note = Description of Artificial Sequence: Synthetic peptide
GKQKVVSL

SEQ ID NO: 18965 - protein, 8 aa, synthetic construct
  REGION 1..8: note = Description of Artificial Sequence: Synthetic peptide
IQAQQHML

SEQ ID NO: 18966 - protein, 8 aa, synthetic construct
  REGION 1..8: note = Description of Artificial Sequence: Synthetic peptide
GKQKVVAL

SEQ ID NO: 18967 - protein, 9 aa, synthetic construct
  REGION 1..9: note = Description of Artificial Sequence: Synthetic peptide
IKPVVSTQL

SEQ ID NO: 18968 - protein, 8 aa, synthetic construct
  REGION 1..8: note = Description of Artificial Sequence: Synthetic peptide
GQVILVAV

SEQ ID NO: 18969 - protein, 9 aa, synthetic construct
  REGION 1..9: note = Description of Artificial Sequence: Synthetic peptide
VDNGTNVTL

SEQ ID NO: 18970 - protein, 10 aa, synthetic construct
  REGION 1..10: note = Description of Artificial Sequence: Synthetic peptide
KEQEPPLTSL

SEQ ID NO: 18971 - protein, 11 aa, synthetic construct
  REGION 1..11: note = Description of Artificial Sequence: Synthetic peptide
TQIDPDLADQL

SEQ ID NO: 18972 - protein, 10 aa, synthetic construct
  REGION 1..10: note = Description of Artificial Sequence: Synthetic peptide
SLFGNDPLSQ

SEQ ID NO: 18973 - protein, 8 aa, synthetic construct
  REGION 1..8: note = Description of Artificial Sequence: Synthetic peptide
KQLQARVL

SEQ ID NO: 18974 - protein, 8 aa, synthetic construct
  REGION 1..8: note = Description of Artificial Sequence: Synthetic peptide
KKAIGTVL

SEQ ID NO: 18975 - protein, 9 aa, synthetic construct
  REGION 1..9: note = Description of Artificial Sequence: Synthetic peptide
SESELVNQI

SEQ ID NO: 18976 - protein, 10 aa, synthetic construct
  REGION 1..10: note = Description of Artificial Sequence: Synthetic peptide
CEYQAGHNQV

SEQ ID NO: 18977 - protein, 8 aa, synthetic construct
  REGION 1..8: note = Description of Artificial Sequence: Synthetic peptide
YEQVAIEI

SEQ ID NO: 18978 - protein, 9 aa, synthetic construct
  REGION 1..9: note = Description of Artificial Sequence: Synthetic peptide
SEFNLPPIV

SEQ ID NO: 18979 - protein, 8 aa, synthetic construct
  REGION 1..8: note = Description of Artificial Sequence: Synthetic peptide
IEQIQPAI

SEQ ID NO: 18980 - protein, 9 aa, synthetic construct
  REGION 1..9: note = Description of Artificial Sequence: Synthetic peptide
QESGPEVNI

SEQ ID NO: 18981 - protein, 10 aa, synthetic construct
  REGION 1..10: note = Description of Artificial Sequence: Synthetic peptide
CEYQTGHNKV

SEQ ID NO: 18982 - protein, 9 aa, synthetic construct
  REGION 1..9: note = Description of Artificial Sequence: Synthetic peptide
TEMEKEGKI

SEQ ID NO: 18983 - protein, 8 aa, synthetic construct
  REGION 1..8: note = Description of Artificial Sequence: Synthetic peptide
FESTHPKI

SEQ ID NO: 18984 - protein, 10 aa, synthetic construct
  REGION 1..10: note = Description of Artificial Sequence: Synthetic peptide
TEDITGNITL

SEQ ID NO: 18985 - protein, 10 aa, synthetic construct
  REGION 1..10: note = Description of Artificial Sequence: Synthetic peptide
GEKGVGSPQI

SEQ ID NO: 18986 - protein, 9 aa, synthetic construct
  REGION 1..9: note = Description of Artificial Sequence: Synthetic peptide
AEWDRTHPV

SEQ ID NO: 18987 - protein, 9 aa, synthetic construct
  REGION 1..9: note = Description of Artificial Sequence: Synthetic peptide
AEWDRVHPV

SEQ ID NO: 18988 - protein, 9 aa, synthetic construct
  REGION 1..9: note = Description of Artificial Sequence: Synthetic peptide
EEIYRLLEV

SEQ ID NO: 18989 - protein, 9 aa, synthetic construct
  REGION 1..9: note = Description of Artificial Sequence: Synthetic peptide
MEMEKEGKI

SEQ ID NO: 18990 - protein, 9 aa, synthetic construct
  REGION 1..9: note = Description of Artificial Sequence: Synthetic peptide
YESTNPKTS

SEQ ID NO: 18991 - protein, 9 aa, synthetic construct
  REGION 1..9: note = Description of Artificial Sequence: Synthetic peptide
VEQMHTDII

SEQ ID NO: 18992 - protein, 10 aa, synthetic construct
  REGION 1..10: note = Description of Artificial Sequence: Synthetic peptide
GEKGEGSPQI

SEQ ID NO: 18993 - protein, 9 aa, synthetic construct
  REGION 1..9: note = Description of Artificial Sequence: Synthetic peptide
TELLQVCKI

SEQ ID NO: 18994 - protein, 8 aa, synthetic construct
  REGION 1..8: note = Description of Artificial Sequence: Synthetic peptide
GENLWVTV

SEQ ID NO: 18995 - protein, 8 aa, synthetic construct
  REGION 1..8: note = Description of Artificial Sequence: Synthetic peptide
GEAIHGQV

SEQ ID NO: 18996 - protein, 9 aa, synthetic construct
  REGION 1..9: note = Description of Artificial Sequence: Synthetic peptide
IEIFGKKAI

SEQ ID NO: 18997 - protein, 9 aa, synthetic construct
  REGION 1..9: note = Description of Artificial Sequence: Synthetic peptide
VEQMQTDII

SEQ ID NO: 18998 - protein, 11 aa, synthetic construct
  REGION 1..11: note = Description of Artificial Sequence: Synthetic peptide
AELELAENREI

SEQ ID NO: 18999 - protein, 8 aa, synthetic construct
  REGION 1..8: note = Description of Artificial Sequence: Synthetic peptide
TEDITGNI

SEQ ID NO: 19000 - protein, 9 aa, synthetic construct
  REGION 1..9: note = Description of Artificial Sequence: Synthetic peptide
SESAIRGAI

SEQ ID NO: 19001 - protein, 10 aa, synthetic construct
  REGION 1..10: note = Description of Artificial Sequence: Synthetic peptide
MEDDGREVLM

SEQ ID NO: 19002 - protein, 9 aa, synthetic construct
  REGION 1..9: note = Description of Artificial Sequence: Synthetic peptide
LEMEKEGKI

SEQ ID NO: 19003 - protein, 9 aa, synthetic construct
  REGION 1..9: note = Description of Artificial Sequence: Synthetic peptide
DEIYRLLEV

SEQ ID NO: 19004 - protein, 9 aa, synthetic construct
  REGION 1..9: note = Description of Artificial Sequence: Synthetic peptide
LELEENREI

SEQ ID NO: 19005 - protein, 8 aa, synthetic construct
  REGION 1..8: note = Description of Artificial Sequence: Synthetic peptide
LEGQVILV

SEQ ID NO: 19006 - protein, 10 aa, synthetic construct
  REGION 1..10: note = Description of Artificial Sequence: Synthetic peptide
KEQEPPLTSL

SEQ ID NO: 19007 - protein, 8 aa, synthetic construct
  REGION 1..8: note = Description of Artificial Sequence: Synthetic peptide
SEFNLPPI

SEQ ID NO: 19008 - protein, 9 aa, synthetic construct
  REGION 1..9: note = Description of Artificial Sequence: Synthetic peptide
IEGAETYYV

SEQ ID NO: 19009 - protein, 8 aa, synthetic construct
  REGION 1..8: note = Description of Artificial Sequence: Synthetic peptide
FESTHPRI

SEQ ID NO: 19010 - protein, 8 aa, synthetic construct
  REGION 1..8: note = Description of Artificial Sequence: Synthetic peptide
QEMVMENV

SEQ ID NO: 19011 - protein, 10 aa, synthetic construct
  REGION 1..10: note = Description of Artificial Sequence: Synthetic peptide
AESFGFGEEI

SEQ ID NO: 19012 - protein, 8 aa, synthetic construct
  REGION 1..8: note = Description of Artificial Sequence: Synthetic peptide
AEVEEVII

SEQ ID NO: 19013 - protein, 9 aa, synthetic construct
  REGION 1..9: note = Description of Artificial Sequence: Synthetic peptide
SESAIRKAI

SEQ ID NO: 19014 - protein, 9 aa, synthetic construct
  REGION 1..9: note = Description of Artificial Sequence: Synthetic peptide
IEVKDTKEA

SEQ ID NO: 19015 - protein, 10 aa, synthetic construct
  REGION 1..10: note = Description of Artificial Sequence: Synthetic peptide
GEVIGNIRQA

SEQ ID NO: 19016 - protein, 9 aa, synthetic construct
  REGION 1..9: note = Description of Artificial Sequence: Synthetic peptide
LEAEPIAGA

SEQ ID NO: 19017 - protein, 9 aa, synthetic construct
  REGION 1..9: note = Description of Artificial Sequence: Synthetic peptide
LETEPIVGA

SEQ ID NO: 19018 - protein, 9 aa, synthetic construct
  REGION 1..9: note = Description of Artificial Sequence: Synthetic peptide
IEVQDTSEA

SEQ ID NO: 19019 - protein, 9 aa, synthetic construct
  REGION 1..9: note = Description of Artificial Sequence: Synthetic peptide
LETEPIAGA

SEQ ID NO: 19020 - protein, 10 aa, synthetic construct
  REGION 1..10: note = Description of Artificial Sequence: Synthetic peptide
SEFNLPPIVA

SEQ ID NO: 19021 - protein, 9 aa, synthetic construct
  REGION 1..9: note = Description of Artificial Sequence: Synthetic peptide
AETYYIDGA

SEQ ID NO: 19022 - protein, 10 aa, synthetic construct
  REGION 1..10: note = Description of Artificial Sequence: Synthetic peptide
TEIVPLTKEA

SEQ ID NO: 19023 - protein, 10 aa, synthetic construct
  REGION 1..10: note = Description of Artificial Sequence: Synthetic peptide
SEVHIPLGEA

SEQ ID NO: 19024 - protein, 9 aa, synthetic construct
  REGION 1..9: note = Description of Artificial Sequence: Synthetic peptide
TVLEEINLL

SEQ ID NO: 19025 - protein, 11 aa, synthetic construct
  REGION 1..11: note = Description of Artificial Sequence: Synthetic peptide
TQIDPDLADQL

SEQ ID NO: 19026 - protein, 9 aa, synthetic construct
  REGION 1..9: note = Description of Artificial Sequence: Synthetic peptide
ASFLGFLGA

SEQ ID NO: 19027 - protein, 9 aa, synthetic construct
  REGION 1..9: note = Description of Artificial Sequence: Synthetic peptide
EVIGNIRQA

SEQ ID NO: 19028 - protein, 9 aa, synthetic construct
  REGION 1..9: note = Description of Artificial Sequence: Synthetic peptide
AETYYVDGA

SEQ ID NO: 19029 - protein, 11 aa, synthetic construct
  REGION 1..11: note = Description of Artificial Sequence: Synthetic peptide
GESPAVLGTGA

SEQ ID NO: 19030 - protein, 10 aa, synthetic construct
  REGION 1..10: note = Description of Artificial Sequence: Synthetic peptide
ASIEEMMTAC

SEQ ID NO: 19031 - protein, 9 aa, synthetic construct
  REGION 1..9: note = Description of Artificial Sequence: Synthetic peptide
LETEPIEGA

SEQ ID NO: 19032 - protein, 9 aa, synthetic construct
  REGION 1..9: note = Description of Artificial Sequence: Synthetic peptide
ASITLTVQA

SEQ ID NO: 19033 - protein, 10 aa, synthetic construct
  REGION 1..10: note = Description of Artificial Sequence: Synthetic peptide
AEAMSQVTNA

SEQ ID NO: 19034 - protein, 9 aa, synthetic construct
  REGION 1..9: note = Description of Artificial Sequence: Synthetic peptide
TETLLVQNA

SEQ ID NO: 19035 - protein, 10 aa, synthetic construct
  REGION 1..10: note = Description of Artificial Sequence: Synthetic peptide
AETYYIDGAA

SEQ ID NO: 19036 - protein, 11 aa, synthetic construct
  REGION 1..11: note = Description of Artificial Sequence: Synthetic peptide
TQVDPDLADQL

SEQ ID NO: 19037 - protein, 9 aa, synthetic construct
  REGION 1..9: note = Description of Artificial Sequence: Synthetic peptide
ASIEEMMTA

SEQ ID NO: 19038 - protein, 9 aa, synthetic construct
  REGION 1..9: note = Description of Artificial Sequence: Synthetic peptide
YEDFRKYTA

SEQ ID NO: 19039 - protein, 10 aa, synthetic construct
  REGION 1..10: note = Description of Artificial Sequence: Synthetic peptide
AETYYVDGAA

SEQ ID NO: 19040 - protein, 9 aa, synthetic construct
  REGION 1..9: note = Description of Artificial Sequence: Synthetic peptide
IVARTVELL

SEQ ID NO: 19041 - protein, 10 aa, synthetic construct
  REGION 1..10: note = Description of Artificial Sequence: Synthetic peptide
REFPPEEARA

SEQ ID NO: 19042 - protein, 9 aa, synthetic construct
  REGION 1..9: note = Description of Artificial Sequence: Synthetic peptide
SEFNLPPIV

SEQ ID NO: 19043 - protein, 9 aa, synthetic construct
  REGION 1..9: note = Description of Artificial Sequence: Synthetic peptide
KQVGTLQYL

SEQ ID NO: 19044 - protein, 9 aa, synthetic construct
  REGION 1..9: note = Description of Artificial Sequence: Synthetic peptide
AEWDRTHPV

SEQ ID NO: 19045 - protein, 9 aa, synthetic construct
  REGION 1..9: note = Description of Artificial Sequence: Synthetic peptide
SDVKQLTEA

SEQ ID NO: 19046 - protein, 9 aa, synthetic construct
  REGION 1..9: note = Description of Artificial Sequence: Synthetic peptide
RIIEIVQRA

SEQ ID NO: 19047 - protein, 9 aa, synthetic construct
  REGION 1..9: note = Description of Artificial Sequence: Synthetic peptide
EEVGFPVRP

SEQ ID NO: 19048 - protein, 9 aa, synthetic construct
  REGION 1..9: note = Description of Artificial Sequence: Synthetic peptide
NQVGSLQYL

SEQ ID NO: 19049 - protein, 11 aa, synthetic construct
  REGION 1..11: note = Description of Artificial Sequence: Synthetic peptide
TQVEPGLADQL

SEQ ID NO: 19050 - protein, 9 aa, synthetic construct
  REGION 1..9: note = Description of Artificial Sequence: Synthetic peptide
VVAEGTDRI

SEQ ID NO: 19051 - protein, 10 aa, synthetic construct
  REGION 1..10: note = Description of Artificial Sequence: Synthetic peptide
YESTNPKTSS

SEQ ID NO: 19052 - protein, 8 aa, synthetic construct
  REGION 1..8: note = Description of Artificial Sequence: Synthetic peptide
TAFTIPSI

SEQ ID NO: 19053 - protein, 9 aa, synthetic construct
  REGION 1..9: note = Description of Artificial Sequence: Synthetic peptide
LPISPIETV

SEQ ID NO: 19054 - protein, 9 aa, synthetic construct
  REGION 1..9: note = Description of Artificial Sequence: Synthetic peptide
FPISPIETV

SEQ ID NO: 19055 - protein, 9 aa, synthetic construct
  REGION 1..9: note = Description of Artificial Sequence: Synthetic peptide
MPNDTGKNI

SEQ ID NO: 19056 - protein, 8 aa, synthetic construct
  REGION 1..8: note = Description of Artificial Sequence: Synthetic peptide
IPVESSTV

SEQ ID NO: 19057 - protein, 8 aa, synthetic construct
  REGION 1..8: note = Description of Artificial Sequence: Synthetic peptide
VPVNPQEV

SEQ ID NO: 19058 - protein, 8 aa, synthetic construct
  REGION 1..8: note = Description of Artificial Sequence: Synthetic peptide
YPAGHKQV

SEQ ID NO: 19059 - protein, 10 aa, synthetic construct
  REGION 1..10: note = Description of Artificial Sequence: Synthetic peptide
IPYNPQSQGV

SEQ ID NO: 19060 - protein, 9 aa, synthetic construct
  REGION 1..9: note = Description of Artificial Sequence: Synthetic peptide
SPLSFQTLI

SEQ ID NO: 19061 - protein, 9 aa, synthetic construct
  REGION 1..9: note = Description of Artificial Sequence: Synthetic peptide
LPPIVAKEI

SEQ ID NO: 19062 - protein, 8 aa, synthetic construct
  REGION 1..8: note = Description of Artificial Sequence: Synthetic peptide
DSWTVNDI

SEQ ID NO: 19063 - protein, 9 aa, synthetic construct
  REGION 1..9: note = Description of Artificial Sequence: Synthetic peptide
TALVAPKKI

SEQ ID NO: 19064 - protein, 8 aa, synthetic construct
  REGION 1..8: note = Description of Artificial Sequence: Synthetic peptide
VPVDPQEV

SEQ ID NO: 19065 - protein, 9 aa, synthetic construct
  REGION 1..9: note = Description of Artificial Sequence: Synthetic peptide
IPLGDARLV

SEQ ID NO: 19066 - protein, 8 aa, synthetic construct
  REGION 1..8: note = Description of Artificial Sequence: Synthetic peptide
IPVDPQEV

SEQ ID NO: 19067 - protein, 9 aa, synthetic construct
  REGION 1..9: note = Description of Artificial Sequence: Synthetic peptide
YAPPIKGSI

SEQ ID NO: 19068 - protein, 8 aa, synthetic construct
  REGION 1..8: note = Description of Artificial Sequence: Synthetic peptide
TAYFILKL

SEQ ID NO: 19069 - protein, 9 aa, synthetic construct
  REGION 1..9: note = Description of Artificial Sequence: Synthetic peptide
IPLGEARLV

SEQ ID NO: 19070 - protein, 8 aa, synthetic construct
  REGION 1..8: note = Description of Artificial Sequence: Synthetic peptide
TSFNFPQI

SEQ ID NO: 19071 - protein, 9 aa, synthetic construct
  REGION 1..9: note = Description of Artificial Sequence: Synthetic peptide
SPLSLQTLI

SEQ ID NO: 19072 - protein, 9 aa, synthetic construct
  REGION 1..9: note = Description of Artificial Sequence: Synthetic peptide
TVLSIINSV

SEQ ID NO: 19073 - protein, 9 aa, synthetic construct
  REGION 1..9: note = Description of Artificial Sequence: Synthetic peptide
DAYFSVPLY

SEQ ID NO: 19074 - protein, 11 aa, synthetic construct
  REGION 1..11: note = Description of Artificial Sequence: Synthetic peptide
IPYNPQSQGVV

SEQ ID NO: 19075 - protein, 9 aa, synthetic construct
  REGION 1..9: note = Description of Artificial Sequence: Synthetic peptide
SPLSFQTLV

SEQ ID NO: 19076 - protein, 8 aa, synthetic construct
  REGION 1..8: note = Description of Artificial Sequence: Synthetic peptide
SPVSILDI

SEQ ID NO: 19077 - protein, 9 aa, synthetic construct
  REGION 1..9: note = Description of Artificial Sequence: Synthetic peptide
FPISPIETV

SEQ ID NO: 19078 - protein, 9 aa, synthetic construct
  REGION 1..9: note = Description of Artificial Sequence: Synthetic peptide
LPISPIETV

SEQ ID NO: 19079 - protein, 9 aa, synthetic construct
  REGION 1..9: note = Description of Artificial Sequence: Synthetic peptide
NPYSTPIFA

SEQ ID NO: 19080 - protein, 9 aa, synthetic construct
  REGION 1..9: note = Description of Artificial Sequence: Synthetic peptide
EPIPIHYCA

SEQ ID NO: 19081 - protein, 10 aa, synthetic construct
  REGION 1..10: note = Description of Artificial Sequence: Synthetic peptide
EPLGIAPTKA

SEQ ID NO: 19082 - protein, 9 aa, synthetic construct
  REGION 1..9: note = Description of Artificial Sequence: Synthetic peptide
HVASGYIEA

SEQ ID NO: 19083 - protein, 9 aa, synthetic construct
  REGION 1..9: note = Description of Artificial Sequence: Synthetic peptide
NPYNTPIFA

SEQ ID NO: 19084 - protein, 10 aa, synthetic construct
  REGION 1..10: note = Description of Artificial Sequence: Synthetic peptide
YPEPAGTRQA

SEQ ID NO: 19085 - protein, 9 aa, synthetic construct
  REGION 1..9: note = Description of Artificial Sequence: Synthetic peptide
HPGSQPKTA

SEQ ID NO: 19086 - protein, 11 aa, synthetic construct
  REGION 1..11: note = Description of Artificial Sequence: Synthetic peptide
FALNPGLLESA

SEQ ID NO: 19087 - protein, 9 aa, synthetic construct
  REGION 1..9: note = Description of Artificial Sequence: Synthetic peptide
EAMSQVTNA

SEQ ID NO: 19088 - protein, 9 aa, synthetic construct
  REGION 1..9: note = Description of Artificial Sequence: Synthetic peptide
HPGSQPQTA

SEQ ID NO: 19089 - protein, 10 aa, synthetic construct
  REGION 1..10: note = Description of Artificial Sequence: Synthetic peptide
EPLGVAPTEA

SEQ ID NO: 19090 - protein, 8 aa, synthetic construct
  REGION 1..8: note = Description of Artificial Sequence: Synthetic peptide
TAFTIPSI

SEQ ID NO: 19091 - protein, 9 aa, synthetic construct
  REGION 1..9: note = Description of Artificial Sequence: Synthetic peptide
DPIPIHYCA

SEQ ID NO: 19092 - protein, 9 aa, synthetic construct
  REGION 1..9: note = Description of Artificial Sequence: Synthetic peptide
SPAVLGTGA

SEQ ID NO: 19093 - protein, 9 aa, synthetic construct
  REGION 1..9: note = Description of Artificial Sequence: Synthetic peptide
HPGSQPRTA

SEQ ID NO: 19094 - protein, 11 aa, synthetic construct
  REGION 1..11: note = Description of Artificial Sequence: Synthetic peptide
VPVDPQDVEKA

SEQ ID NO: 19095 - protein, 9 aa, synthetic construct
  REGION 1..9: note = Description of Artificial Sequence: Synthetic peptide
EPVAEGVGA

SEQ ID NO: 19096 - protein, 9 aa, synthetic construct
  REGION 1..9: note = Description of Artificial Sequence: Synthetic peptide
YPIVQNAQG

SEQ ID NO: 19097 - protein, 8 aa, synthetic construct
  REGION 1..8: note = Description of Artificial Sequence: Synthetic peptide
TAFTIPST

SEQ ID NO: 19098 - protein, 11 aa, synthetic construct
  REGION 1..11: note = Description of Artificial Sequence: Synthetic peptide
FPISPIETVPV

SEQ ID NO: 19099 - protein, 9 aa, synthetic construct
  REGION 1..9: note = Description of Artificial Sequence: Synthetic peptide
FPDWHNYTP

SEQ ID NO: 19100 - protein, 11 aa, synthetic construct
  REGION 1..11: note = Description of Artificial Sequence: Synthetic peptide
VPVDPQEVEKA

SEQ ID NO: 19101 - protein, 11 aa, synthetic construct
  REGION 1..11: note = Description of Artificial Sequence: Synthetic peptide
MPNDTGKNITL

SEQ ID NO: 19102 - protein, 11 aa, synthetic construct
  REGION 1..11: note = Description of Artificial Sequence: Synthetic peptide
MLNTVGGHQAA

SEQ ID NO: 19103 - protein, 10 aa, synthetic construct
  REGION 1..10: note = Description of Artificial Sequence: Synthetic peptide
IPAETGKETA

SEQ ID NO: 19104 - protein, 9 aa, synthetic construct
  REGION 1..9: note = Description of Artificial Sequence: Synthetic peptide
EVIGNIRQA

SEQ ID NO: 19105 - protein, 9 aa, synthetic construct
  REGION 1..9: note = Description of Artificial Sequence: Synthetic peptide
HPVHAGPIP

SEQ ID NO: 19106 - protein, 11 aa, synthetic construct
  REGION 1..11: note = Description of Artificial Sequence: Synthetic peptide
YPHLLSGGILI

SEQ ID NO: 19107 - protein, 10 aa, synthetic construct
  REGION 1..10: note = Description of Artificial Sequence: Synthetic peptide
HPVHAGPIPP

SEQ ID NO: 19108 - protein, 9 aa, synthetic construct
  REGION 1..9: note = Description of Artificial Sequence: Synthetic peptide
ASFLGFLGA

SEQ ID NO: 19109 - protein, 9 aa, synthetic construct
  REGION 1..9: note = Description of Artificial Sequence: Synthetic peptide
LPISPIETV

SEQ ID NO: 19110 - protein, 9 aa, synthetic construct
  REGION 1..9: note = Description of Artificial Sequence: Synthetic peptide
FPISPIETV

SEQ ID NO: 19111 - protein, 9 aa, synthetic construct
  REGION 1..9: note = Description of Artificial Sequence: Synthetic peptide
RPEPTAPPA

SEQ ID NO: 19112 - protein, 9 aa, synthetic construct
  REGION 1..9: note = Description of Artificial Sequence: Synthetic peptide
SPAVLGTGA

SEQ ID NO: 19113 - protein, 10 aa, synthetic construct
  REGION 1..10: note = Description of Artificial Sequence: Synthetic peptide
YPEPAGTRQA

SEQ ID NO: 19114 - protein, 9 aa, synthetic construct
  REGION 1..9: note = Description of Artificial Sequence: Synthetic peptide
SPAVLGTGA

SEQ ID NO: 19115 - protein, 9 aa, synthetic construct
  REGION 1..9: note = Description of Artificial Sequence: Synthetic peptide
LPISPIETV

SEQ ID NO: 19116 - protein, 9 aa, synthetic construct
  REGION 1..9: note = Description of Artificial Sequence: Synthetic peptide
FPISPIETV

SEQ ID NO: 19117 - protein, 10 aa, synthetic construct
  REGION 1..10: note = Description of Artificial Sequence: Synthetic peptide
IPAETGKETA

SEQ ID NO: 19118 - protein, 10 aa, synthetic construct
  REGION 1..10: note = Description of Artificial Sequence: Synthetic peptide
IPAETGQETA

SEQ ID NO: 19119 - protein, 9 aa, synthetic construct
  REGION 1..9: note = Description of Artificial Sequence: Synthetic peptide
SPIETVPVT

SEQ ID NO: 19120 - protein, 11 aa, synthetic construct
  REGION 1..11: note = Description of Artificial Sequence: Synthetic peptide
VPVDPQDVEKA

SEQ ID NO: 19121 - protein, 9 aa, synthetic construct
  REGION 1..9: note = Description of Artificial Sequence: Synthetic peptide
NPYNTPIFA

SEQ ID NO: 19122 - protein, 9 aa, synthetic construct
  REGION 1..9: note = Description of Artificial Sequence: Synthetic peptide
HPGSQPQTA

SEQ ID NO: 19123 - protein, 9 aa, synthetic construct
  REGION 1..9: note = Description of Artificial Sequence: Synthetic peptide
RPEPTAPPA

SEQ ID NO: 19124 - protein, 9 aa, synthetic construct
  REGION 1..9: note = Description of Artificial Sequence: Synthetic peptide
NPYSTPIFA

SEQ ID NO: 19125 - protein, 10 aa, synthetic construct
  REGION 1..10: note = Description of Artificial Sequence: Synthetic peptide
EPLGVAPTEA

SEQ ID NO: 19126 - protein, 10 aa, synthetic construct
  REGION 1..10: note = Description of Artificial Sequence: Synthetic peptide
EPLGIAPTKA

SEQ ID NO: 19127 - protein, 11 aa, synthetic construct
  REGION 1..11: note = Description of Artificial Sequence: Synthetic peptide
MPNDTGKNITL

SEQ ID NO: 19128 - protein, 10 aa, synthetic construct
  REGION 1..10: note = Description of Artificial Sequence: Synthetic peptide
KPNSGGDMEV

SEQ ID NO: 19129 - protein, 9 aa, synthetic construct
  REGION 1..9: note = Description of Artificial Sequence: Synthetic peptide
EPVAEGVGA

SEQ ID NO: 19130 - protein, 11 aa, synthetic construct
  REGION 1..11: note = Description of Artificial Sequence: Synthetic peptide
VPVDPQEVEKA

SEQ ID NO: 19131 - protein, 10 aa, synthetic construct
  REGION 1..10: note = Description of Artificial Sequence: Synthetic peptide
YPEPAGTRQA

SEQ ID NO: 19132 - protein, 9 aa, synthetic construct
  REGION 1..9: note = Description of Artificial Sequence: Synthetic peptide
HPGSQPKTA

SEQ ID NO: 19133 - protein, 8 aa, synthetic construct
  REGION 1..8: note = Description of Artificial Sequence: Synthetic peptide
VPVNPQEV

SEQ ID NO: 19134 - protein, 10 aa, synthetic construct
  REGION 1..10: note = Description of Artificial Sequence: Synthetic peptide
SPIETVPVTL

SEQ ID NO: 19135 - protein, 10 aa, synthetic construct
  REGION 1..10: note = Description of Artificial Sequence: Synthetic peptide
IPYNPQSQGV

SEQ ID NO: 19136 - protein, 9 aa, synthetic construct
  REGION 1..9: note = Description of Artificial Sequence: Synthetic peptide
LPISPIETV

SEQ ID NO: 19137 - protein, 9 aa, synthetic construct
  REGION 1..9: note = Description of Artificial Sequence: Synthetic peptide
FPISPIETV

SEQ ID NO: 19138 - protein, 9 aa, synthetic construct
  REGION 1..9: note = Description of Artificial Sequence: Synthetic peptide
SPAVLGTGA

SEQ ID NO: 19139 - protein, 10 aa, synthetic construct
  REGION 1..10: note = Description of Artificial Sequence: Synthetic peptide
IPAETGKETA

SEQ ID NO: 19140 - protein, 11 aa, synthetic construct
  REGION 1..11: note = Description of Artificial Sequence: Synthetic peptide
VPVDPQDVEKA

SEQ ID NO: 19141 - protein, 10 aa, synthetic construct
  REGION 1..10: note = Description of Artificial Sequence: Synthetic peptide
IPYNPQSQGV

SEQ ID NO: 19142 - protein, 11 aa, synthetic construct
  REGION 1..11: note = Description of Artificial Sequence: Synthetic peptide
VPVDPQEVEKA

SEQ ID NO: 19143 - protein, 10 aa, synthetic construct
  REGION 1..10: note = Description of Artificial Sequence: Synthetic peptide
APAGFAILKC

SEQ ID NO: 19144 - protein, 9 aa, synthetic construct
  REGION 1..9: note = Description of Artificial Sequence: Synthetic peptide
SPIETVPVT

SEQ ID NO: 19145 - protein, 9 aa, synthetic construct
  REGION 1..9: note = Description of Artificial Sequence: Synthetic peptide
NPYSTPIFA

SEQ ID NO: 19146 - protein, 10 aa, synthetic construct
  REGION 1..10: note = Description of Artificial Sequence: Synthetic peptide
RPLVTVKIEG

SEQ ID NO: 19147 - protein, 8 aa, synthetic construct
  REGION 1..8: note = Description of Artificial Sequence: Synthetic peptide
VPVNPQEV

SEQ ID NO: 19148 - protein, 10 aa, synthetic construct
  REGION 1..10: note = Description of Artificial Sequence: Synthetic peptide
IPAETGQETA

SEQ ID NO: 19149 - protein, 10 aa, synthetic construct
  REGION 1..10: note = Description of Artificial Sequence: Synthetic peptide
KPNSGGDMEV

SEQ ID NO: 19150 - protein, 9 aa, synthetic construct
  REGION 1..9: note = Description of Artificial Sequence: Synthetic peptide
RPEPTAPPA

SEQ ID NO: 19151 - protein, 10 aa, synthetic construct
  REGION 1..10: note = Description of Artificial Sequence: Synthetic peptide
RPNNNTRTSI

SEQ ID NO: 19152 - protein, 10 aa, synthetic construct
  REGION 1..10: note = Description of Artificial Sequence: Synthetic peptide
SPEVIPMFSA

SEQ ID NO: 19153 - protein, 9 aa, synthetic construct
  REGION 1..9: note = Description of Artificial Sequence: Synthetic peptide
HPGSQPKTA

SEQ ID NO: 19154 - protein, 9 aa, synthetic construct
  REGION 1..9: note = Description of Artificial Sequence: Synthetic peptide
HPGSQPQTA

SEQ ID NO: 19155 - protein, 10 aa, synthetic construct
  REGION 1..10: note = Description of Artificial Sequence: Synthetic peptide
EPLGIAPTKA

SEQ ID NO: 19156 - protein, 9 aa, synthetic construct
  REGION 1..9: note = Description of Artificial Sequence: Synthetic peptide
NPYNTPIFA

SEQ ID NO: 19157 - protein, 11 aa, synthetic construct
  REGION 1..11: note = Description of Artificial Sequence: Synthetic peptide
KAYEPEKHNVW

SEQ ID NO: 19158 - protein, 9 aa, synthetic construct
  REGION 1..9: note = Description of Artificial Sequence: Synthetic peptide
TTKLFNSTW

SEQ ID NO: 19159 - protein, 9 aa, synthetic construct
  REGION 1..9: note = Description of Artificial Sequence: Synthetic peptide
LSFPQITLW

SEQ ID NO: 19160 - protein, 11 aa, synthetic construct
  REGION 1..11: note = Description of Artificial Sequence: Synthetic peptide
KAYETEKHNVW

SEQ ID NO: 19161 - protein, 9 aa, synthetic construct
  REGION 1..9: note = Description of Artificial Sequence: Synthetic peptide
TSRLFNSTW

SEQ ID NO: 19162 - protein, 11 aa, synthetic construct
  REGION 1..11: note = Description of Artificial Sequence: Synthetic peptide
KAYSTEKHNVW

SEQ ID NO: 19163 - protein, 11 aa, synthetic construct
  REGION 1..11: note = Description of Artificial Sequence: Synthetic peptide
KAYDTERHNVW

SEQ ID NO: 19164 - protein, 9 aa, synthetic construct
  REGION 1..9: note = Description of Artificial Sequence: Synthetic peptide
KIKQIVNMW

SEQ ID NO: 19165 - protein, 9 aa, synthetic construct
  REGION 1..9: note = Description of Artificial Sequence: Synthetic peptide
NTKNIIVQF

SEQ ID NO: 19166 - protein, 10 aa, synthetic construct
  REGION 1..10: note = Description of Artificial Sequence: Synthetic peptide
TTNVPWNSTW

SEQ ID NO: 19167 - protein, 9 aa, synthetic construct
  REGION 1..9: note = Description of Artificial Sequence: Synthetic peptide
KTETDPFDW

SEQ ID NO: 19168 - protein, 9 aa, synthetic construct
  REGION 1..9: note = Description of Artificial Sequence: Synthetic peptide
STLQEQVAW

SEQ ID NO: 19169 - protein, 9 aa, synthetic construct
  REGION 1..9: note = Description of Artificial Sequence: Synthetic peptide
RIKQIVNMW

SEQ ID NO: 19170 - protein, 10 aa, synthetic construct
  REGION 1..10: note = Description of Artificial Sequence: Synthetic peptide
TTNVPWNSSW

SEQ ID NO: 19171 - protein, 9 aa, synthetic construct
  REGION 1..9: note = Description of Artificial Sequence: Synthetic peptide
KIKQIINMW

SEQ ID NO: 19172 - protein, 9 aa, synthetic construct
  REGION 1..9: note = Description of Artificial Sequence: Synthetic peptide
RSIRLVNGF

SEQ ID NO: 19173 - protein, 10 aa, synthetic construct
  REGION 1..10: note = Description of Artificial Sequence: Synthetic peptide
KQRQDILDLW

SEQ ID NO: 19174 - protein, 11 aa, synthetic construct
  REGION 1..11: note = Description of Artificial Sequence: Synthetic peptide
ASKTETDPFDW

SEQ ID NO: 19175 - protein, 9 aa, synthetic construct
  REGION 1..9: note = Description of Artificial Sequence: Synthetic peptide
YSTEKHNVW

SEQ ID NO: 19176 - protein, 9 aa, synthetic construct
  REGION 1..9: note = Description of Artificial Sequence: Synthetic peptide
STLQEQIAW

SEQ ID NO: 19177 - protein, 10 aa, synthetic construct
  REGION 1..10: note = Description of Artificial Sequence: Synthetic peptide
RIIELVQRAW

SEQ ID NO: 19178 - protein, 10 aa, synthetic construct
  REGION 1..10: note = Description of Artificial Sequence: Synthetic peptide
NTSRLFNSTW

SEQ ID NO: 19179 - protein, 10 aa, synthetic construct
  REGION 1..10: note = Description of Artificial Sequence: Synthetic peptide
RIIEIVQRAW

SEQ ID NO: 19180 - protein, 10 aa, synthetic construct
  REGION 1..10: note = Description of Artificial Sequence: Synthetic peptide
TVKLPEKDSW

SEQ ID NO: 19181 - protein, 11 aa, synthetic construct
  REGION 1..11: note = Description of Artificial Sequence: Synthetic peptide
TSFNFPQITLW

SEQ ID NO: 19182 - protein, 10 aa, synthetic construct
  REGION 1..10: note = Description of Artificial Sequence: Synthetic peptide
KIATESIVIW

SEQ ID NO: 19183 - protein, 9 aa, synthetic construct
  REGION 1..9: note = Description of Artificial Sequence: Synthetic peptide
ISTESIVIW

SEQ ID NO: 19184 - protein, 9 aa, synthetic construct
  REGION 1..9: note = Description of Artificial Sequence: Synthetic peptide
RAKELHPEF

SEQ ID NO: 19185 - protein, 9 aa, synthetic construct
  REGION 1..9: note = Description of Artificial Sequence: Synthetic peptide
TSGLFNSSW

SEQ ID NO: 19186 - protein, 10 aa, synthetic construct
  REGION 1..10: note = Description of Artificial Sequence: Synthetic peptide
VTVYYGVPVW

SEQ ID NO: 19187 - protein, 9 aa, synthetic construct
  REGION 1..9: note = Description of Artificial Sequence: Synthetic peptide
IIVIVQRAW

SEQ ID NO: 19188 - protein, 9 aa, synthetic construct
  REGION 1..9: note = Description of Artificial Sequence: Synthetic peptide
LGHGVSIEW

SEQ ID NO: 19189 - protein, 9 aa, synthetic construct
  REGION 1..9: note = Description of Artificial Sequence: Synthetic peptide
RSVRLVNGF

SEQ ID NO: 19190 - protein, 9 aa, synthetic construct
  REGION 1..9: note = Description of Artificial Sequence: Synthetic peptide
RTKPPLPSV

SEQ ID NO: 19191 - protein, 11 aa, synthetic construct
  REGION 1..11: note = Description of Artificial Sequence: Synthetic peptide
KSIRIGPGQAF

SEQ ID NO: 19192 - protein, 9 aa, synthetic construct
  REGION 1..9: note = Description of Artificial Sequence: Synthetic peptide
RVMETQRNY

SEQ ID NO: 19193 - protein, 9 aa, synthetic construct
  REGION 1..9: note = Description of Artificial Sequence: Synthetic peptide
KTKPPLPSV

SEQ ID NO: 19194 - protein, 11 aa, synthetic construct
  REGION 1..11: note = Description of Artificial Sequence: Synthetic peptide
SVLSGGKLDAW

SEQ ID NO: 19195 - protein, 10 aa, synthetic construct
  REGION 1..10: note = Description of Artificial Sequence: Synthetic peptide
KISTESIVIW

SEQ ID NO: 19196 - protein, 9 aa, synthetic construct
  REGION 1..9: note = Description of Artificial Sequence: Synthetic peptide
QATQDVKNW

SEQ ID NO: 19197 - protein, 9 aa, synthetic construct
  REGION 1..9: note = Description of Artificial Sequence: Synthetic peptide
KTAVQMAVF

SEQ ID NO: 19198 - protein, 8 aa, synthetic construct
  REGION 1..8: note = Description of Artificial Sequence: Synthetic peptide
ISKKANRW

SEQ ID NO: 19199 - protein, 11 aa, synthetic construct
  REGION 1..11: note = Description of Artificial Sequence: Synthetic peptide
TTSTLQEQVAW

SEQ ID NO: 19200 - protein, 9 aa, synthetic construct
  REGION 1..9: note = Description of Artificial Sequence: Synthetic peptide
WSKSSIVGW

SEQ ID NO: 19201 - protein, 9 aa, synthetic construct
  REGION 1..9: note = Description of Artificial Sequence: Synthetic peptide
RSTPLVSGF

SEQ ID NO: 19202 - protein, 9 aa, synthetic construct
  REGION 1..9: note = Description of Artificial Sequence: Synthetic peptide
FSVPLDKEF

SEQ ID NO: 19203 - protein, 9 aa, synthetic construct
  REGION 1..9: note = Description of Artificial Sequence: Synthetic peptide
STLQEQVAW

SEQ ID NO: 19204 - protein, 10 aa, synthetic construct
  REGION 1..10: note = Description of Artificial Sequence: Synthetic peptide
TAATNPDVAW

SEQ ID NO: 19205 - protein, 9 aa, synthetic construct
  REGION 1..9: note = Description of Artificial Sequence: Synthetic peptide
TSGLFNSSW

SEQ ID NO: 19206 - protein, 9 aa, synthetic construct
  REGION 1..9: note = Description of Artificial Sequence: Synthetic peptide
RSTPLVSGF

SEQ ID NO: 19207 - protein, 11 aa, synthetic construct
  REGION 1..11: note = Description of Artificial Sequence: Synthetic peptide
KTGTEDLQSLY

SEQ ID NO: 19208 - protein, 8 aa, synthetic construct
  REGION 1..8: note = Description of Artificial Sequence: Synthetic peptide
ASAENYTF

SEQ ID NO: 19209 - protein, 9 aa, synthetic construct
  REGION 1..9: note = Description of Artificial Sequence: Synthetic peptide
KQISQIQKF

SEQ ID NO: 19210 - protein, 9 aa, synthetic construct
  REGION 1..9: note = Description of Artificial Sequence: Synthetic peptide
AATNPDVAW

SEQ ID NO: 19211 - protein, 9 aa, synthetic construct
  REGION 1..9: note = Description of Artificial Sequence: Synthetic peptide
RAVGMGASF

SEQ ID NO: 19212 - protein, 9 aa, synthetic construct
  REGION 1..9: note = Description of Artificial Sequence: Synthetic peptide
KQISNIQKF

SEQ ID NO: 19213 - protein, 9 aa, synthetic construct
  REGION 1..9: note = Description of Artificial Sequence: Synthetic peptide
STLQEQIAW

SEQ ID NO: 19214 - protein, 10 aa, synthetic construct
  REGION 1..10: note = Description of Artificial Sequence: Synthetic peptide
TADRNPDSAW

SEQ ID NO: 19215 - protein, 8 aa, synthetic construct
  REGION 1..8: note = Description of Artificial Sequence: Synthetic peptide
IEIITHSF

SEQ ID NO: 19216 - protein, 9 aa, synthetic construct
  REGION 1..9: note = Description of Artificial Sequence: Synthetic peptide
YSTQVEPGL

SEQ ID NO: 19217 - protein, 9 aa, synthetic construct
  REGION 1..9: note = Description of Artificial Sequence: Synthetic peptide
KGNNDNVTF

SEQ ID NO: 19218 - protein, 9 aa, synthetic construct
  REGION 1..9: note = Description of Artificial Sequence: Synthetic peptide
KAQVQHEKY

SEQ ID NO: 19219 - protein, 9 aa, synthetic construct
  REGION 1..9: note = Description of Artificial Sequence: Synthetic peptide
NSSYTNDTY

SEQ ID NO: 19220 - protein, 9 aa, synthetic construct
  REGION 1..9: note = Description of Artificial Sequence: Synthetic peptide
RAIQAQQHM

SEQ ID NO: 19221 - protein, 9 aa, synthetic construct
  REGION 1..9: note = Description of Artificial Sequence: Synthetic peptide
YSTQVDPGL

SEQ ID NO: 19222 - protein, 11 aa, synthetic construct
  REGION 1..11: note = Description of Artificial Sequence: Synthetic peptide
KSIRIGPGQAF

SEQ ID NO: 19223 - protein, 8 aa, synthetic construct
  REGION 1..8: note = Description of Artificial Sequence: Synthetic peptide
ITGLILTY

SEQ ID NO: 19224 - protein, 9 aa, synthetic construct
  REGION 1..9: note = Description of Artificial Sequence: Synthetic peptide
NASAENYTF

SEQ ID NO: 19225 - protein, 9 aa, synthetic construct
  REGION 1..9: note = Description of Artificial Sequence: Synthetic peptide
KTKPPLPSV

SEQ ID NO: 19226 - protein, 11 aa, synthetic construct
  REGION 1..11: note = Description of Artificial Sequence: Synthetic peptide
KAYEPEKHNVW

SEQ ID NO: 19227 - protein, 9 aa, synthetic construct
  REGION 1..9: note = Description of Artificial Sequence: Synthetic peptide
KTAVQMAVF

SEQ ID NO: 19228 - protein, 9 aa, synthetic construct
  REGION 1..9: note = Description of Artificial Sequence: Synthetic peptide
RTKPPLPSV

SEQ ID NO: 19229 - protein, 8 aa, synthetic construct
  REGION 1..8: note = Description of Artificial Sequence: Synthetic peptide
GQGVSIEW

SEQ ID NO: 19230 - protein, 9 aa, synthetic construct
  REGION 1..9: note = Description of Artificial Sequence: Synthetic peptide
QATQDVKNW

SEQ ID NO: 19231 - protein, 9 aa, synthetic construct
  REGION 1..9: note = Description of Artificial Sequence: Synthetic peptide
TINEEAAEW

SEQ ID NO: 19232 - protein, 9 aa, synthetic construct
  REGION 1..9: note = Description of Artificial Sequence: Synthetic peptide
RSVRLVNGF

SEQ ID NO: 19233 - protein, 8 aa, synthetic construct
  REGION 1..8: note = Description of Artificial Sequence: Synthetic peptide
NSPTSREL

SEQ ID NO: 19234 - protein, 9 aa, synthetic construct
  REGION 1..9: note = Description of Artificial Sequence: Synthetic peptide
YSPLSFQTL

SEQ ID NO: 19235 - protein, 9 aa, synthetic construct
  REGION 1..9: note = Description of Artificial Sequence: Synthetic peptide
YSPLSLQTL

SEQ ID NO: 19236 - protein, 9 aa, synthetic construct
  REGION 1..9: note = Description of Artificial Sequence: Synthetic peptide
ITPSPRQEL

SEQ ID NO: 19237 - protein, 8 aa, synthetic construct
  REGION 1..8: note = Description of Artificial Sequence: Synthetic peptide
SSPSANEL

SEQ ID NO: 19238 - protein, 8 aa, synthetic construct
  REGION 1..8: note = Description of Artificial Sequence: Synthetic peptide
NSPTSRML

SEQ ID NO: 19239 - protein, 9 aa, synthetic construct
  REGION 1..9: note = Description of Artificial Sequence: Synthetic peptide
YSPVSILDI

SEQ ID NO: 19240 - protein, 10 aa, synthetic construct
  REGION 1..10: note = Description of Artificial Sequence: Synthetic peptide
YIIGIGIGAL

SEQ ID NO: 19241 - protein, 9 aa, synthetic construct
  REGION 1..9: note = Description of Artificial Sequence: Synthetic peptide
SIVARTVEL

SEQ ID NO: 19242 - protein, 9 aa, synthetic construct
  REGION 1..9: note = Description of Artificial Sequence: Synthetic peptide
MTPPPKQEM

SEQ ID NO: 19243 - protein, 9 aa, synthetic construct
  REGION 1..9: note = Description of Artificial Sequence: Synthetic peptide
FSVPLHEDF

SEQ ID NO: 19244 - protein, 9 aa, synthetic construct
  REGION 1..9: note = Description of Artificial Sequence: Synthetic peptide
KQISNIQKF

SEQ ID NO: 19245 - protein, 11 aa, synthetic construct
  REGION 1..11: note = Description of Artificial Sequence: Synthetic peptide
KAYEPEKHNVW

SEQ ID NO: 19246 - protein, 11 aa, synthetic construct
  REGION 1..11: note = Description of Artificial Sequence: Synthetic peptide
ETEPIAGAETY

SEQ ID NO: 19247 - protein, 9 aa, synthetic construct
  REGION 1..9: note = Description of Artificial Sequence: Synthetic peptide
DARLVITTY

SEQ ID NO: 19248 - protein, 11 aa, synthetic construct
  REGION 1..11: note = Description of Artificial Sequence: Synthetic peptide
ETEPIVGAETY

SEQ ID NO: 19249 - protein, 11 aa, synthetic construct
  REGION 1..11: note = Description of Artificial Sequence: Synthetic peptide
EAEPIAGAETY

SEQ ID NO: 19250 - protein, 9 aa, synthetic construct
  REGION 1..9: note = Description of Artificial Sequence: Synthetic peptide
EARLVITTY

SEQ ID NO: 19251 - protein, 11 aa, synthetic construct
  REGION 1..11: note = Description of Artificial Sequence: Synthetic peptide
ETEPIEGAETY

SEQ ID NO: 19252 - protein, 9 aa, synthetic construct
  REGION 1..9: note = Description of Artificial Sequence: Synthetic peptide
GTEDLQSLY

SEQ ID NO: 19253 - protein, 8 aa, synthetic construct
  REGION 1..8: note = Description of Artificial Sequence: Synthetic peptide
VLDVGDAY

SEQ ID NO: 19254 - protein, 9 aa, synthetic construct
  REGION 1..9: note = Description of Artificial Sequence: Synthetic peptide
ISVEPPAVL

SEQ ID NO: 19255 - protein, 9 aa, synthetic construct
  REGION 1..9: note = Description of Artificial Sequence: Synthetic peptide
AALDLSHFL

SEQ ID NO: 19256 - protein, 9 aa, synthetic construct
  REGION 1..9: note = Description of Artificial Sequence: Synthetic peptide
YSTQVDPDL

SEQ ID NO: 19257 - protein, 9 aa, synthetic construct
  REGION 1..9: note = Description of Artificial Sequence: Synthetic peptide
LALDKWASL

SEQ ID NO: 19258 - protein, 9 aa, synthetic construct
  REGION 1..9: note = Description of Artificial Sequence: Synthetic peptide
ATDIPTKEL

SEQ ID NO: 19259 - protein, 9 aa, synthetic construct
  REGION 1..9: note = Description of Artificial Sequence: Synthetic peptide
AALDLSHFL

SEQ ID NO: 19260 - protein, 9 aa, synthetic construct
  REGION 1..9: note = Description of Artificial Sequence: Synthetic peptide
YSTQVDPDL

SEQ ID NO: 19261 - protein, 9 aa, synthetic construct
  REGION 1..9: note = Description of Artificial Sequence: Synthetic peptide
LIVARTVEL

SEQ ID NO: 19262 - protein, 9 aa, synthetic construct
  REGION 1..9: note = Description of Artificial Sequence: Synthetic peptide
ISVEPPAVL

SEQ ID NO: 19263 - protein, 9 aa, synthetic construct
  REGION 1..9: note = Description of Artificial Sequence: Synthetic peptide
YSTQIDPDL

SEQ ID NO: 19264 - protein, 9 aa, synthetic construct
  REGION 1..9: note = Description of Artificial Sequence: Synthetic peptide
SIVARTVEL

SEQ ID NO: 19265 - protein, 9 aa, synthetic construct
  REGION 1..9: note = Description of Artificial Sequence: Synthetic peptide
SSMEAGGEL

SEQ ID NO: 19266 - protein, 9 aa, synthetic construct
  REGION 1..9: note = Description of Artificial Sequence: Synthetic peptide
LIVVRTVEL

SEQ ID NO: 19267 - protein, 9 aa, synthetic construct
  REGION 1..9: note = Description of Artificial Sequence: Synthetic peptide
ATDIQTKEL

SEQ ID NO: 19268 - protein, 9 aa, synthetic construct
  REGION 1..9: note = Description of Artificial Sequence: Synthetic peptide
YVDRFFKTL

SEQ ID NO: 19269 - protein, 9 aa, synthetic construct
  REGION 1..9: note = Description of Artificial Sequence: Synthetic peptide
YSTQVDPGL

SEQ ID NO: 19270 - protein, 9 aa, synthetic construct
  REGION 1..9: note = Description of Artificial Sequence: Synthetic peptide
AAEGQGTSL

SEQ ID NO: 19271 - protein, 8 aa, synthetic construct
  REGION 1..8: note = Description of Artificial Sequence: Synthetic peptide
AFDLSHFL

SEQ ID NO: 19272 - protein, 9 aa, synthetic construct
  REGION 1..9: note = Description of Artificial Sequence: Synthetic peptide
VLDVGGAYF

SEQ ID NO: 19273 - protein, 9 aa, synthetic construct
  REGION 1..9: note = Description of Artificial Sequence: Synthetic peptide
YYDPSKELI

SEQ ID NO: 19274 - protein, 9 aa, synthetic construct
  REGION 1..9: note = Description of Artificial Sequence: Synthetic peptide
YFDNKTIIL

SEQ ID NO: 19275 - protein, 8 aa, synthetic construct
  REGION 1..8: note = Description of Artificial Sequence: Synthetic peptide
HTDNGTNF

SEQ ID NO: 19276 - protein, 9 aa, synthetic construct
  REGION 1..9: note = Description of Artificial Sequence: Synthetic peptide
QYDQVAIEI

SEQ ID NO: 19277 - protein, 9 aa, synthetic construct
  REGION 1..9: note = Description of Artificial Sequence: Synthetic peptide
SFDPIPIHY

SEQ ID NO: 19278 - protein, 10 aa, synthetic construct
  REGION 1..10: note = Description of Artificial Sequence: Synthetic peptide
YVDNGTNVTL

SEQ ID NO: 19279 - protein, 8 aa, synthetic construct
  REGION 1..8: note = Description of Artificial Sequence: Synthetic peptide
HTDNGTNF

SEQ ID NO: 19280 - protein, 9 aa, synthetic construct
  REGION 1..9: note = Description of Artificial Sequence: Synthetic peptide
VLDVGGAYF

SEQ ID NO: 19281 - protein, 8 aa, synthetic construct
  REGION 1..8: note = Description of Artificial Sequence: Synthetic peptide
YVDNGTNV

SEQ ID NO: 19282 - protein, 8 aa, synthetic construct
  REGION 1..8: note = Description of Artificial Sequence: Synthetic peptide
HTDNGSNF

SEQ ID NO: 19283 - protein, 9 aa, synthetic construct
  REGION 1..9: note = Description of Artificial Sequence: Synthetic peptide
ATDIPTKEL

SEQ ID NO: 19284 - protein, 9 aa, synthetic construct
  REGION 1..9: note = Description of Artificial Sequence: Synthetic peptide
IQDNSEIKV

SEQ ID NO: 19285 - protein, 8 aa, synthetic construct
  REGION 1..8: note = Description of Artificial Sequence: Synthetic peptide
YTDEIYRL

SEQ ID NO: 19286 - protein, 9 aa, synthetic construct
  REGION 1..9: note = Description of Artificial Sequence: Synthetic peptide
AAEGQGTSL

SEQ ID NO: 19287 - protein, 9 aa, synthetic construct
  REGION 1..9: note = Description of Artificial Sequence: Synthetic peptide
VLDVGDAYF

SEQ ID NO: 19288 - protein, 8 aa, synthetic construct
  REGION 1..8: note = Description of Artificial Sequence: Synthetic peptide
WADIHQEF

SEQ ID NO: 19289 - protein, 9 aa, synthetic construct
  REGION 1..9: note = Description of Artificial Sequence: Synthetic peptide
QRPLVTVKI

SEQ ID NO: 19290 - protein, 9 aa, synthetic construct
  REGION 1..9: note = Description of Artificial Sequence: Synthetic peptide
IRAISERIL

SEQ ID NO: 19291 - protein, 9 aa, synthetic construct
  REGION 1..9: note = Description of Artificial Sequence: Synthetic peptide
DARLVITTY

SEQ ID NO: 19292 - protein, 10 aa, synthetic construct
  REGION 1..10: note = Description of Artificial Sequence: Synthetic peptide
YVDNGTNVTL

SEQ ID NO: 19293 - protein, 8 aa, synthetic construct
  REGION 1..8: note = Description of Artificial Sequence: Synthetic peptide
DQLIHTHY

SEQ ID NO: 19294 - protein, 9 aa, synthetic construct
  REGION 1..9: note = Description of Artificial Sequence: Synthetic peptide
TLRPGGGDM

SEQ ID NO: 19295 - protein, 9 aa, synthetic construct
  REGION 1..9: note = Description of Artificial Sequence: Synthetic peptide
EARLVITTY

SEQ ID NO: 19296 - protein, 9 aa, synthetic construct
  REGION 1..9: note = Description of Artificial Sequence: Synthetic peptide
FLGAAGSTM

SEQ ID NO: 19297 - protein, 10 aa, synthetic construct
  REGION 1..10: note = Description of Artificial Sequence: Synthetic peptide
MVMENVTESF

SEQ ID NO: 19298 - protein, 11 aa, synthetic construct
  REGION 1..11: note = Description of Artificial Sequence: Synthetic peptide
TQIDPDLADQL

SEQ ID NO: 19299 - protein, 9 aa, synthetic construct
  REGION 1..9: note = Description of Artificial Sequence: Synthetic peptide
TVLDVGDAY

SEQ ID NO: 19300 - protein, 9 aa, synthetic construct
  REGION 1..9: note = Description of Artificial Sequence: Synthetic peptide
AALDLSHFL

SEQ ID NO: 19301 - protein, 9 aa, synthetic construct
  REGION 1..9: note = Description of Artificial Sequence: Synthetic peptide
IVTDSQYAL

SEQ ID NO: 19302 - protein, 9 aa, synthetic construct
  REGION 1..9: note = Description of Artificial Sequence: Synthetic peptide
ISVEPPAVL

SEQ ID NO: 19303 - protein, 9 aa, synthetic construct
  REGION 1..9: note = Description of Artificial Sequence: Synthetic peptide
AAEGQGTSL

SEQ ID NO: 19304 - protein, 9 aa, synthetic construct
  REGION 1..9: note = Description of Artificial Sequence: Synthetic peptide
HCNISGTQW

SEQ ID NO: 19305 - protein, 10 aa, synthetic construct
  REGION 1..10: note = Description of Artificial Sequence: Synthetic peptide
YVDNGTNVTL

SEQ ID NO: 19306 - protein, 9 aa, synthetic construct
  REGION 1..9: note = Description of Artificial Sequence: Synthetic peptide
ATDIPTKEL

SEQ ID NO: 19307 - protein, 9 aa, synthetic construct
  REGION 1..9: note = Description of Artificial Sequence: Synthetic peptide
AAEGQGTSL

SEQ ID NO: 19308 - protein, 10 aa, synthetic construct
  REGION 1..10: note = Description of Artificial Sequence: Synthetic peptide
AGDEGKGTSL

SEQ ID NO: 19309 - protein, 9 aa, synthetic construct
  REGION 1..9: note = Description of Artificial Sequence: Synthetic peptide
TADGCQQIL

SEQ ID NO: 19310 - protein, 8 aa, synthetic construct
  REGION 1..8: note = Description of Artificial Sequence: Synthetic peptide
VQDTSEAL

SEQ ID NO: 19311 - protein, 9 aa, synthetic construct
  REGION 1..9: note = Description of Artificial Sequence: Synthetic peptide
ATDIQTKEL

SEQ ID NO: 19312 - protein, 9 aa, synthetic construct
  REGION 1..9: note = Description of Artificial Sequence: Synthetic peptide
GAEGQGTSL

SEQ ID NO: 19313 - protein, 9 aa, synthetic construct
  REGION 1..9: note = Description of Artificial Sequence: Synthetic peptide
VLDVGGAYF

SEQ ID NO: 19314 - protein, 8 aa, synthetic construct
  REGION 1..8: note = Description of Artificial Sequence: Synthetic peptide
ALDLSHFL

SEQ ID NO: 19315 - protein, 9 aa, synthetic construct
  REGION 1..9: note = Description of Artificial Sequence: Synthetic peptide
GTDNSTITL

SEQ ID NO: 19316 - protein, 8 aa, synthetic construct
  REGION 1..8: note = Description of Artificial Sequence: Synthetic peptide
WADIHQEF

SEQ ID NO: 19317 - protein, 9 aa, synthetic construct
  REGION 1..9: note = Description of Artificial Sequence: Synthetic peptide
TQDFWEVQL

SEQ ID NO: 19318 - protein, 8 aa, synthetic construct
  REGION 1..8: note = Description of Artificial Sequence: Synthetic peptide
HTDNGTNF

SEQ ID NO: 19319 - protein, 9 aa, synthetic construct
  REGION 1..9: note = Description of Artificial Sequence: Synthetic peptide
ISDNTKNII

SEQ ID NO: 19320 - protein, 8 aa, synthetic construct
  REGION 1..8: note = Description of Artificial Sequence: Synthetic peptide
YVDNGTNV

SEQ ID NO: 19321 - protein, 8 aa, synthetic construct
  REGION 1..8: note = Description of Artificial Sequence: Synthetic peptide
YTDEIYRL

SEQ ID NO: 19322 - protein, 8 aa, synthetic construct
  REGION 1..8: note = Description of Artificial Sequence: Synthetic peptide
GQVILVAV

SEQ ID NO: 19323 - protein, 8 aa, synthetic construct
  REGION 1..8: note = Description of Artificial Sequence: Synthetic peptide
GKQKIVSL

SEQ ID NO: 19324 - protein, 10 aa, synthetic construct
  REGION 1..10: note = Description of Artificial Sequence: Synthetic peptide
SLFGSDPLSQ

SEQ ID NO: 19325 - protein, 11 aa, synthetic construct
  REGION 1..11: note = Description of Artificial Sequence: Synthetic peptide
KAYEPEKHNVW

SEQ ID NO: 19326 - protein, 10 aa, synthetic construct
  REGION 1..10: note = Description of Artificial Sequence: Synthetic peptide
VSFDPIPIHY

SEQ ID NO: 19327 - protein, 9 aa, synthetic construct
  REGION 1..9: note = Description of Artificial Sequence: Synthetic peptide
NTKNIIVQF

SEQ ID NO: 19328 - protein, 10 aa, synthetic construct
  REGION 1..10: note = Description of Artificial Sequence: Synthetic peptide
VTFEPIPIHY

SEQ ID NO: 19329 - protein, 10 aa, synthetic construct
  REGION 1..10: note = Description of Artificial Sequence: Synthetic peptide
VSFEPIPIHY

SEQ ID NO: 19330 - protein, 9 aa, synthetic construct
  REGION 1..9: note = Description of Artificial Sequence: Synthetic peptide
KQNPEVIIY

SEQ ID NO: 19331 - protein, 9 aa, synthetic construct
  REGION 1..9: note = Description of Artificial Sequence: Synthetic peptide
GAASITLTV

SEQ ID NO: 19332 - protein, 9 aa, synthetic construct
  REGION 1..9: note = Description of Artificial Sequence: Synthetic peptide
NTKNIIVQL

SEQ ID NO: 19333 - protein, 9 aa, synthetic construct
  REGION 1..9: note = Description of Artificial Sequence: Synthetic peptide
YFVNRTLIF

SEQ ID NO: 19334 - protein, 8 aa, synthetic construct
  REGION 1..8: note = Description of Artificial Sequence: Synthetic peptide
LYNVVNQL

SEQ ID NO: 19335 - protein, 9 aa, synthetic construct
  REGION 1..9: note = Description of Artificial Sequence: Synthetic peptide
IYQEPFKNL

SEQ ID NO: 19336 - protein, 8 aa, synthetic construct
  REGION 1..8: note = Description of Artificial Sequence: Synthetic peptide
SFNVTTVL

SEQ ID NO: 19337 - protein, 8 aa, synthetic construct
  REGION 1..8: note = Description of Artificial Sequence: Synthetic peptide
HFGPGQAF

SEQ ID NO: 19338 - protein, 10 aa, synthetic construct
  REGION 1..10: note = Description of Artificial Sequence: Synthetic peptide
AFQQGKAREF

SEQ ID NO: 19339 - protein, 9 aa, synthetic construct
  REGION 1..9: note = Description of Artificial Sequence: Synthetic peptide
AYYDPSKEL

SEQ ID NO: 19340 - protein, 9 aa, synthetic construct
  REGION 1..9: note = Description of Artificial Sequence: Synthetic peptide
TYQIYQEPF

SEQ ID NO: 19341 - protein, 8 aa, synthetic construct
  REGION 1..8: note = Description of Artificial Sequence: Synthetic peptide
VYNTQGYF

SEQ ID NO: 19342 - protein, 10 aa, synthetic construct
  REGION 1..10: note = Description of Artificial Sequence: Synthetic peptide
GFLGAAGSTM

SEQ ID NO: 19343 - protein, 9 aa, synthetic construct
  REGION 1..9: note = Description of Artificial Sequence: Synthetic peptide
RYHNNWRAM

SEQ ID NO: 19344 - protein, 10 aa, synthetic construct
  REGION 1..10: note = Description of Artificial Sequence: Synthetic peptide
SYFDNKTIIL

SEQ ID NO: 19345 - protein, 8 aa, synthetic construct
  REGION 1..8: note = Description of Artificial Sequence: Synthetic peptide
SFGFGEEM

SEQ ID NO: 19346 - protein, 8 aa, synthetic construct
  REGION 1..8: note = Description of Artificial Sequence: Synthetic peptide
FYVTGEVI

SEQ ID NO: 19347 - protein, 9 aa, synthetic construct
  REGION 1..9: note = Description of Artificial Sequence: Synthetic peptide
KYHSNWRAM

SEQ ID NO: 19348 - protein, 9 aa, synthetic construct
  REGION 1..9: note = Description of Artificial Sequence: Synthetic peptide
LYNTIAVLY

SEQ ID NO: 19349 - protein, 8 aa, synthetic construct
  REGION 1..8: note = Description of Artificial Sequence: Synthetic peptide
LYNVVNQL

SEQ ID NO: 19350 - protein, 9 aa, synthetic construct
  REGION 1..9: note = Description of Artificial Sequence: Synthetic peptide
IYQEPFKNL

SEQ ID NO: 19351 - protein, 10 aa, synthetic construct
  REGION 1..10: note = Description of Artificial Sequence: Synthetic peptide
GFLGAAGSTM

SEQ ID NO: 19352 - protein, 8 aa, synthetic construct
  REGION 1..8: note = Description of Artificial Sequence: Synthetic peptide
SFNVTTVL

SEQ ID NO: 19353 - protein, 8 aa, synthetic construct
  REGION 1..8: note = Description of Artificial Sequence: Synthetic peptide
HFGPGQAF

SEQ ID NO: 19354 - protein, 9 aa, synthetic construct
  REGION 1..9: note = Description of Artificial Sequence: Synthetic peptide
AYYDPSKEL

SEQ ID NO: 19355 - protein, 8 aa, synthetic construct
  REGION 1..8: note = Description of Artificial Sequence: Synthetic peptide
LYNTIAVL

SEQ ID NO: 19356 - protein, 9 aa, synthetic construct
  REGION 1..9: note = Description of Artificial Sequence: Synthetic peptide
TYQIYQEPF

SEQ ID NO: 19357 - protein, 8 aa, synthetic construct
  REGION 1..8: note = Description of Artificial Sequence: Synthetic peptide
FYVTGEVI

SEQ ID NO: 19358 - protein, 9 aa, synthetic construct
  REGION 1..9: note = Description of Artificial Sequence: Synthetic peptide
RYVDNGTNV

SEQ ID NO: 19359 - protein, 11 aa, synthetic construct
  REGION 1..11: note = Description of Artificial Sequence: Synthetic peptide
RYVDNGTNVTL

SEQ ID NO: 19360 - protein, 8 aa, synthetic construct
  REGION 1..8: note = Description of Artificial Sequence: Synthetic peptide
VYNTQGYF

SEQ ID NO: 19361 - protein, 8 aa, synthetic construct
  REGION 1..8: note = Description of Artificial Sequence: Synthetic peptide
SFGFGEEM

SEQ ID NO: 19362 - protein, 9 aa, synthetic construct
  REGION 1..9: note = Description of Artificial Sequence: Synthetic peptide
VSNITGLIL

SEQ ID NO: 19363 - protein, 9 aa, synthetic construct
  REGION 1..9: note = Description of Artificial Sequence: Synthetic peptide
ISNITGLIL

SEQ ID NO: 19364 - protein, 9 aa, synthetic construct
  REGION 1..9: note = Description of Artificial Sequence: Synthetic peptide
RTKPPLPSV

SEQ ID NO: 19365 - protein, 9 aa, synthetic construct
  REGION 1..9: note = Description of Artificial Sequence: Synthetic peptide
ANSPTSREL

SEQ ID NO: 19366 - protein, 9 aa, synthetic construct
  REGION 1..9: note = Description of Artificial Sequence: Synthetic peptide
GAASITLTV

SEQ ID NO: 19367 - protein, 9 aa, synthetic construct
  REGION 1..9: note = Description of Artificial Sequence: Synthetic peptide
VSSGVRKVL

SEQ ID NO: 19368 - protein, 9 aa, synthetic construct
  REGION 1..9: note = Description of Artificial Sequence: Synthetic peptide
KAILGHRVY

SEQ ID NO: 19369 - protein, 9 aa, synthetic construct
  REGION 1..9: note = Description of Artificial Sequence: Synthetic peptide
RAREQHPEF

SEQ ID NO: 19370 - protein, 9 aa, synthetic construct
  REGION 1..9: note = Description of Artificial Sequence: Synthetic peptide
VSSGIRKVL

SEQ ID NO: 19371 - protein, 9 aa, synthetic construct
  REGION 1..9: note = Description of Artificial Sequence: Synthetic peptide
ANSPTSREL

SEQ ID NO: 19372 - protein, 10 aa, synthetic construct
  REGION 1..10: note = Description of Artificial Sequence: Synthetic peptide
IATDIQTKEL

SEQ ID NO: 19373 - protein, 9 aa, synthetic construct
  REGION 1..9: note = Description of Artificial Sequence: Synthetic peptide
TNSPTSREL

SEQ ID NO: 19374 - protein, 10 aa, synthetic construct
  REGION 1..10: note = Description of Artificial Sequence: Synthetic peptide
IATDIPTKEL

SEQ ID NO: 19375 - protein, 9 aa, synthetic construct
  REGION 1..9: note = Description of Artificial Sequence: Synthetic peptide
VSSGVRKVL

SEQ ID NO: 19376 - protein, 9 aa, synthetic construct
  REGION 1..9: note = Description of Artificial Sequence: Synthetic peptide
IATQLSKYF

SEQ ID NO: 19377 - protein, 9 aa, synthetic construct
  REGION 1..9: note = Description of Artificial Sequence: Synthetic peptide
GAASITLTV

SEQ ID NO: 19378 - protein, 9 aa, synthetic construct
  REGION 1..9: note = Description of Artificial Sequence: Synthetic peptide
IRIGPGQAF

SEQ ID NO: 19379 - protein, 11 aa, synthetic construct
  REGION 1..11: note = Description of Artificial Sequence: Synthetic peptide
AEIQKQGQEQW

SEQ ID NO: 19380 - protein, 9 aa, synthetic construct
  REGION 1..9: note = Description of Artificial Sequence: Synthetic peptide
EEINLPGKW

SEQ ID NO: 19381 - protein, 11 aa, synthetic construct
  REGION 1..11: note = Description of Artificial Sequence: Synthetic peptide
AEQATQDVKNW

SEQ ID NO: 19382 - protein, 10 aa, synthetic construct
  REGION 1..10: note = Description of Artificial Sequence: Synthetic peptide
AEGQGTSLSF

SEQ ID NO: 19383 - protein, 9 aa, synthetic construct
  REGION 1..9: note = Description of Artificial Sequence: Synthetic peptide
LIVARTVEL

SEQ ID NO: 19384 - protein, 9 aa, synthetic construct
  REGION 1..9: note = Description of Artificial Sequence: Synthetic peptide
LIVIRTVEL

SEQ ID NO: 19385 - protein, 9 aa, synthetic construct
  REGION 1..9: note = Description of Artificial Sequence: Synthetic peptide
AALDLSHFL

SEQ ID NO: 19386 - protein, 9 aa, synthetic construct
  REGION 1..9: note = Description of Artificial Sequence: Synthetic peptide
LIVVRTVEL

SEQ ID NO: 19387 - protein, 9 aa, synthetic construct
  REGION 1..9: note = Description of Artificial Sequence: Synthetic peptide
SIVARTVEL

SEQ ID NO: 19388 - protein, 8 aa, synthetic construct
  REGION 1..8: note = Description of Artificial Sequence: Synthetic peptide
FALNPDLL

SEQ ID NO: 19389 - protein, 9 aa, synthetic construct
  REGION 1..9: note = Description of Artificial Sequence: Synthetic peptide
GTEEIKSLY

SEQ ID NO: 19390 - protein, 11 aa, synthetic construct
  REGION 1..11: note = Description of Artificial Sequence: Synthetic peptide
ETFRPTGGDMK

SEQ ID NO: 19391 - protein, 8 aa, synthetic construct
  REGION 1..8: note = Description of Artificial Sequence: Synthetic peptide
VLDVGDAY

SEQ ID NO: 19392 - protein, 9 aa, synthetic construct
  REGION 1..9: note = Description of Artificial Sequence: Synthetic peptide
SIDNSNSSY

SEQ ID NO: 19393 - protein, 9 aa, synthetic construct
  REGION 1..9: note = Description of Artificial Sequence: Synthetic peptide
GTQEIKSLY

SEQ ID NO: 19394 - protein, 11 aa, synthetic construct
  REGION 1..11: note = Description of Artificial Sequence: Synthetic peptide
QTGTQEIKSLY

SEQ ID NO: 19395 - protein, 10 aa, synthetic construct
  REGION 1..10: note = Description of Artificial Sequence: Synthetic peptide
VTVLDVGDAY

SEQ ID NO: 19396 - protein, 11 aa, synthetic construct
  REGION 1..11: note = Description of Artificial Sequence: Synthetic peptide
QTGTEEIKSLY

SEQ ID NO: 19397 - protein, 9 aa, synthetic construct
  REGION 1..9: note = Description of Artificial Sequence: Synthetic peptide
VLAEAMSQV

SEQ ID NO: 19398 - protein, 9 aa, synthetic construct
  REGION 1..9: note = Description of Artificial Sequence: Synthetic peptide
QLTEVVQKI

SEQ ID NO: 19399 - protein, 9 aa, synthetic construct
  REGION 1..9: note = Description of Artificial Sequence: Synthetic peptide
QLAEVVQKI

SEQ ID NO: 19400 - protein, 9 aa, synthetic construct
  REGION 1..9: note = Description of Artificial Sequence: Synthetic peptide
QMQEDIISV

SEQ ID NO: 19401 - protein, 9 aa, synthetic construct
  REGION 1..9: note = Description of Artificial Sequence: Synthetic peptide
SLYNTVATL

SEQ ID NO: 19402 - protein, 9 aa, synthetic construct
  REGION 1..9: note = Description of Artificial Sequence: Synthetic peptide
TLIPNPTGV

SEQ ID NO: 19403 - protein, 9 aa, synthetic construct
  REGION 1..9: note = Description of Artificial Sequence: Synthetic peptide
TLTPHLAEA

SEQ ID NO: 19404 - protein, 9 aa, synthetic construct
  REGION 1..9: note = Description of Artificial Sequence: Synthetic peptide
ILKEPVHGV

SEQ ID NO: 19405 - protein, 9 aa, synthetic construct
  REGION 1..9: note = Description of Artificial Sequence: Synthetic peptide
ILVQLQPAL

SEQ ID NO: 19406 - protein, 10 aa, synthetic construct
  REGION 1..10: note = Description of Artificial Sequence: Synthetic peptide
KVVEIEPLGV

SEQ ID NO: 19407 - protein, 9 aa, synthetic construct
  REGION 1..9: note = Description of Artificial Sequence: Synthetic peptide
QMHEDIISV

SEQ ID NO: 19408 - protein, 10 aa, synthetic construct
  REGION 1..10: note = Description of Artificial Sequence: Synthetic peptide
RVFGEAISQV

SEQ ID NO: 19409 - protein, 9 aa, synthetic construct
  REGION 1..9: note = Description of Artificial Sequence: Synthetic peptide
TLIPNPTEA

SEQ ID NO: 19410 - protein, 9 aa, synthetic construct
  REGION 1..9: note = Description of Artificial Sequence: Synthetic peptide
QLTEAVQKI

SEQ ID NO: 19411 - protein, 10 aa, synthetic construct
  REGION 1..10: note = Description of Artificial Sequence: Synthetic peptide
ALNPGLLESA

SEQ ID NO: 19412 - protein, 9 aa, synthetic construct
  REGION 1..9: note = Description of Artificial Sequence: Synthetic peptide
SLFNTEATL

SEQ ID NO: 19413 - protein, 9 aa, synthetic construct
  REGION 1..9: note = Description of Artificial Sequence: Synthetic peptide
GLADQLIHM

SEQ ID NO: 19414 - protein, 10 aa, synthetic construct
  REGION 1..10: note = Description of Artificial Sequence: Synthetic peptide
TLWQRPLVTV

SEQ ID NO: 19415 - protein, 9 aa, synthetic construct
  REGION 1..9: note = Description of Artificial Sequence: Synthetic peptide
QMHDDIISV

SEQ ID NO: 19416 - protein, 9 aa, synthetic construct
  REGION 1..9: note = Description of Artificial Sequence: Synthetic peptide
AIVGLIVAV

SEQ ID NO: 19417 - protein, 9 aa, synthetic construct
  REGION 1..9: note = Description of Artificial Sequence: Synthetic peptide
AVLAIVNRV

SEQ ID NO: 19418 - protein, 9 aa, synthetic construct
  REGION 1..9: note = Description of Artificial Sequence: Synthetic peptide
ALTDIVPLT

SEQ ID NO: 19419 - protein, 10 aa, synthetic construct
  REGION 1..10: note = Description of Artificial Sequence: Synthetic peptide
KLVPVDPSEV

SEQ ID NO: 19420 - protein, 9 aa, synthetic construct
  REGION 1..9: note = Description of Artificial Sequence: Synthetic peptide
IVTDSQYAL

SEQ ID NO: 19421 - protein, 9 aa, synthetic construct
  REGION 1..9: note = Description of Artificial Sequence: Synthetic peptide
VLAEAMSQV

SEQ ID NO: 19422 - protein, 9 aa, synthetic construct
  REGION 1..9: note = Description of Artificial Sequence: Synthetic peptide
TLIPNPTGV

SEQ ID NO: 19423 - protein, 9 aa, synthetic construct
  REGION 1..9: note = Description of Artificial Sequence: Synthetic peptide
ILKEPVHGV

SEQ ID NO: 19424 - protein, 9 aa, synthetic construct
  REGION 1..9: note = Description of Artificial Sequence: Synthetic peptide
AVIGNIRQA

SEQ ID NO: 19425 - protein, 9 aa, synthetic construct
  REGION 1..9: note = Description of Artificial Sequence: Synthetic peptide
QLAEVVQKI

SEQ ID NO: 19426 - protein, 10 aa, synthetic construct
  REGION 1..10: note = Description of Artificial Sequence: Synthetic peptide
RVFGEAISQV

SEQ ID NO: 19427 - protein, 9 aa, synthetic construct
  REGION 1..9: note = Description of Artificial Sequence: Synthetic peptide
TLIPNPTEA

SEQ ID NO: 19428 - protein, 9 aa, synthetic construct
  REGION 1..9: note = Description of Artificial Sequence: Synthetic peptide
SLYNTVATL

SEQ ID NO: 19429 - protein, 9 aa, synthetic construct
  REGION 1..9: note = Description of Artificial Sequence: Synthetic peptide
QLTEVVQKI

SEQ ID NO: 19430 - protein, 9 aa, synthetic construct
  REGION 1..9: note = Description of Artificial Sequence: Synthetic peptide
SISERILSA

SEQ ID NO: 19431 - protein, 9 aa, synthetic construct
  REGION 1..9: note = Description of Artificial Sequence: Synthetic peptide
IVKVEPLGV

SEQ ID NO: 19432 - protein, 10 aa, synthetic construct
  REGION 1..10: note = Description of Artificial Sequence: Synthetic peptide
ALNPGLLESA

SEQ ID NO: 19433 - protein, 10 aa, synthetic construct
  REGION 1..10: note = Description of Artificial Sequence: Synthetic peptide
TLWQRPLVTV

SEQ ID NO: 19434 - protein, 9 aa, synthetic construct
  REGION 1..9: note = Description of Artificial Sequence: Synthetic peptide
QLQARILAV

SEQ ID NO: 19435 - protein, 10 aa, synthetic construct
  REGION 1..10: note = Description of Artificial Sequence: Synthetic peptide
YLKDQQLLGI

SEQ ID NO: 19436 - protein, 10 aa, synthetic construct
  REGION 1..10: note = Description of Artificial Sequence: Synthetic peptide
KVVEIEPLGV

SEQ ID NO: 19437 - protein, 9 aa, synthetic construct
  REGION 1..9: note = Description of Artificial Sequence: Synthetic peptide
ALRDSGLEV

SEQ ID NO: 19438 - protein, 9 aa, synthetic construct
  REGION 1..9: note = Description of Artificial Sequence: Synthetic peptide
SAKELIAEV

SEQ ID NO: 19439 - protein, 9 aa, synthetic construct
  REGION 1..9: note = Description of Artificial Sequence: Synthetic peptide
AVFAIVNRV

SEQ ID NO: 19440 - protein, 9 aa, synthetic construct
  REGION 1..9: note = Description of Artificial Sequence: Synthetic peptide
TLTPHLAEA

SEQ ID NO: 19441 - protein, 8 aa, synthetic construct
  REGION 1..8: note = Description of Artificial Sequence: Synthetic peptide
VLAIVNRV

SEQ ID NO: 19442 - protein, 9 aa, synthetic construct
  REGION 1..9: note = Description of Artificial Sequence: Synthetic peptide
ASITLTVQV

SEQ ID NO: 19443 - protein, 9 aa, synthetic construct
  REGION 1..9: note = Description of Artificial Sequence: Synthetic peptide
QLQARVLAV

SEQ ID NO: 19444 - protein, 9 aa, synthetic construct
  REGION 1..9: note = Description of Artificial Sequence: Synthetic peptide
RIIYNLIEV

SEQ ID NO: 19445 - protein, 9 aa, synthetic construct
  REGION 1..9: note = Description of Artificial Sequence: Synthetic peptide
GAASITLTV

SEQ ID NO: 19446 - protein, 11 aa, synthetic construct
  REGION 1..11: note = Description of Artificial Sequence: Synthetic peptide
FLKEKGGLDGL

SEQ ID NO: 19447 - protein, 9 aa, synthetic construct
  REGION 1..9: note = Description of Artificial Sequence: Synthetic peptide
QLTEAVQKI

SEQ ID NO: 19448 - protein, 9 aa, synthetic construct
  REGION 1..9: note = Description of Artificial Sequence: Synthetic peptide
AIVGLIVAV

SEQ ID NO: 19449 - protein, 10 aa, synthetic construct
  REGION 1..10: note = Description of Artificial Sequence: Synthetic peptide
SLFGSDPSSQ

SEQ ID NO: 19450 - protein, 9 aa, synthetic construct
  REGION 1..9: note = Description of Artificial Sequence: Synthetic peptide
ALSPRTLNA

SEQ ID NO: 19451 - protein, 10 aa, synthetic construct
  REGION 1..10: note = Description of Artificial Sequence: Synthetic peptide
KLVPVDPSEV

SEQ ID NO: 19452 - protein, 9 aa, synthetic construct
  REGION 1..9: note = Description of Artificial Sequence: Synthetic peptide
AVLAIVNRV

SEQ ID NO: 19453 - protein, 9 aa, synthetic construct
  REGION 1..9: note = Description of Artificial Sequence: Synthetic peptide
ELKKIIGQV

SEQ ID NO: 19454 - protein, 9 aa, synthetic construct
  REGION 1..9: note = Description of Artificial Sequence: Synthetic peptide
MIIGGLIGL

SEQ ID NO: 19455 - protein, 9 aa, synthetic construct
  REGION 1..9: note = Description of Artificial Sequence: Synthetic peptide
RIIEIVQGI

SEQ ID NO: 19456 - protein, 9 aa, synthetic construct
  REGION 1..9: note = Description of Artificial Sequence: Synthetic peptide
GAASIALTV

SEQ ID NO: 19457 - protein, 9 aa, synthetic construct
  REGION 1..9: note = Description of Artificial Sequence: Synthetic peptide
AVKKYNSQV

SEQ ID NO: 19458 - protein, 9 aa, synthetic construct
  REGION 1..9: note = Description of Artificial Sequence: Synthetic peptide
QMHEDIISV

SEQ ID NO: 19459 - protein, 10 aa, synthetic construct
  REGION 1..10: note = Description of Artificial Sequence: Synthetic peptide
KIVKVEPLGV

SEQ ID NO: 19460 - protein, 9 aa, synthetic construct
  REGION 1..9: note = Description of Artificial Sequence: Synthetic peptide
LLNATAIAV

SEQ ID NO: 19461 - protein, 10 aa, synthetic construct
  REGION 1..10: note = Description of Artificial Sequence: Synthetic peptide
VLIGPTPVNI

SEQ ID NO: 19462 - protein, 10 aa, synthetic construct
  REGION 1..10: note = Description of Artificial Sequence: Synthetic peptide
KLVPVDPGEV

SEQ ID NO: 19463 - protein, 9 aa, synthetic construct
  REGION 1..9: note = Description of Artificial Sequence: Synthetic peptide
LLNTTAIAV

SEQ ID NO: 19464 - protein, 9 aa, synthetic construct
  REGION 1..9: note = Description of Artificial Sequence: Synthetic peptide
SLYNTVATL

SEQ ID NO: 19465 - protein, 9 aa, synthetic construct
  REGION 1..9: note = Description of Artificial Sequence: Synthetic peptide
QLTEVVQKI

SEQ ID NO: 19466 - protein, 9 aa, synthetic construct
  REGION 1..9: note = Description of Artificial Sequence: Synthetic peptide
TLIPNPTGV

SEQ ID NO: 19467 - protein, 9 aa, synthetic construct
  REGION 1..9: note = Description of Artificial Sequence: Synthetic peptide
QLAEVVQKI

SEQ ID NO: 19468 - protein, 9 aa, synthetic construct
  REGION 1..9: note = Description of Artificial Sequence: Synthetic peptide
ILKEPVHGV

SEQ ID NO: 19469 - protein, 9 aa, synthetic construct
  REGION 1..9: note = Description of Artificial Sequence: Synthetic peptide
NISNWLWYI

SEQ ID NO: 19470 - protein, 9 aa, synthetic construct
  REGION 1..9: note = Description of Artificial Sequence: Synthetic peptide
AVLAIVNRV

SEQ ID NO: 19471 - protein, 9 aa, synthetic construct
  REGION 1..9: note = Description of Artificial Sequence: Synthetic peptide
GLDQWTYQI

SEQ ID NO: 19472 - protein, 10 aa, synthetic construct
  REGION 1..10: note = Description of Artificial Sequence: Synthetic peptide
TLWQRPLVTV

SEQ ID NO: 19473 - protein, 9 aa, synthetic construct
  REGION 1..9: note = Description of Artificial Sequence: Synthetic peptide
KISNWLWYI

SEQ ID NO: 19474 - protein, 9 aa, synthetic construct
  REGION 1..9: note = Description of Artificial Sequence: Synthetic peptide
RIIYNLIEV

SEQ ID NO: 19475 - protein, 9 aa, synthetic construct
  REGION 1..9: note = Description of Artificial Sequence: Synthetic peptide
ILVQLQPAL

SEQ ID NO: 19476 - protein, 9 aa, synthetic construct
  REGION 1..9: note = Description of Artificial Sequence: Synthetic peptide
GLADQLIHM

SEQ ID NO: 19477 - protein, 9 aa, synthetic construct
  REGION 1..9: note = Description of Artificial Sequence: Synthetic peptide
TLNAWVKVI

SEQ ID NO: 19478 - protein, 9 aa, synthetic construct
  REGION 1..9: note = Description of Artificial Sequence: Synthetic peptide
AIVGLIVAV

SEQ ID NO: 19479 - protein, 10 aa, synthetic construct
  REGION 1..10: note = Description of Artificial Sequence: Synthetic peptide
TLWQRPLVTI

SEQ ID NO: 19480 - protein, 9 aa, synthetic construct
  REGION 1..9: note = Description of Artificial Sequence: Synthetic peptide
SLFNTEATL

SEQ ID NO: 19481 - protein, 10 aa, synthetic construct
  REGION 1..10: note = Description of Artificial Sequence: Synthetic peptide
KVVEIEPLGV

SEQ ID NO: 19482 - protein, 9 aa, synthetic construct
  REGION 1..9: note = Description of Artificial Sequence: Synthetic peptide
DISKWLWYI

SEQ ID NO: 19483 - protein, 9 aa, synthetic construct
  REGION 1..9: note = Description of Artificial Sequence: Synthetic peptide
MIIGGLIGL

SEQ ID NO: 19484 - protein, 9 aa, synthetic construct
  REGION 1..9: note = Description of Artificial Sequence: Synthetic peptide
TLTVQVRQL

SEQ ID NO: 19485 - protein, 9 aa, synthetic construct
  REGION 1..9: note = Description of Artificial Sequence: Synthetic peptide
FQLPPIERL

SEQ ID NO: 19486 - protein, 9 aa, synthetic construct
  REGION 1..9: note = Description of Artificial Sequence: Synthetic peptide
AVFAIVNRV

SEQ ID NO: 19487 - protein, 9 aa, synthetic construct
  REGION 1..9: note = Description of Artificial Sequence: Synthetic peptide
HLEGKIILV

SEQ ID NO: 19488 - protein, 9 aa, synthetic construct
  REGION 1..9: note = Description of Artificial Sequence: Synthetic peptide
QLQARILAV

SEQ ID NO: 19489 - protein, 9 aa, synthetic construct
  REGION 1..9: note = Description of Artificial Sequence: Synthetic peptide
ALTDIVPLT

SEQ ID NO: 19490 - protein, 9 aa, synthetic construct
  REGION 1..9: note = Description of Artificial Sequence: Synthetic peptide
RIIEIVQGI

SEQ ID NO: 19491 - protein, 9 aa, synthetic construct
  REGION 1..9: note = Description of Artificial Sequence: Synthetic peptide
LLNATAIAV

SEQ ID NO: 19492 - protein, 9 aa, synthetic construct
  REGION 1..9: note = Description of Artificial Sequence: Synthetic peptide
LLNTTAIAV

SEQ ID NO: 19493 - protein, 9 aa, synthetic construct
  REGION 1..9: note = Description of Artificial Sequence: Synthetic peptide
VLAEAMSQV

SEQ ID NO: 19494 - protein, 9 aa, synthetic construct
  REGION 1..9: note = Description of Artificial Sequence: Synthetic peptide
VIWGKIPKF

SEQ ID NO: 19495 - protein, 10 aa, synthetic construct
  REGION 1..10: note = Description of Artificial Sequence: Synthetic peptide
ALAWDDLRNL

SEQ ID NO: 19496 - protein, 10 aa, synthetic construct
  REGION 1..10: note = Description of Artificial Sequence: Synthetic peptide
RVFGEAISQV

SEQ ID NO: 19497 - protein, 9 aa, synthetic construct
  REGION 1..9: note = Description of Artificial Sequence: Synthetic peptide
IVTDSQYAL

SEQ ID NO: 19498 - protein, 9 aa, synthetic construct
  REGION 1..9: note = Description of Artificial Sequence: Synthetic peptide
HLEGKVILV

SEQ ID NO: 19499 - protein, 10 aa, synthetic construct
  REGION 1..10: note = Description of Artificial Sequence: Synthetic peptide
NLAWYWGQEL

SEQ ID NO: 19500 - protein, 9 aa, synthetic construct
  REGION 1..9: note = Description of Artificial Sequence: Synthetic peptide
LVNQIIEEL

SEQ ID NO: 19501 - protein, 10 aa, synthetic construct
  REGION 1..10: note = Description of Artificial Sequence: Synthetic peptide
VLIGPTPVNI

SEQ ID NO: 19502 - protein, 9 aa, synthetic construct
  REGION 1..9: note = Description of Artificial Sequence: Synthetic peptide
AIVAFIVAI

SEQ ID NO: 19503 - protein, 10 aa, synthetic construct
  REGION 1..10: note = Description of Artificial Sequence: Synthetic peptide
ALAWEDLRNL

SEQ ID NO: 19504 - protein, 10 aa, synthetic construct
  REGION 1..10: note = Description of Artificial Sequence: Synthetic peptide
ALNPGLLESA

SEQ ID NO: 19505 - protein, 9 aa, synthetic construct
  REGION 1..9: note = Description of Artificial Sequence: Synthetic peptide
ILINCNTSV

SEQ ID NO: 19506 - protein, 9 aa, synthetic construct
  REGION 1..9: note = Description of Artificial Sequence: Synthetic peptide
IIAVIVWTI

SEQ ID NO: 19507 - protein, 9 aa, synthetic construct
  REGION 1..9: note = Description of Artificial Sequence: Synthetic peptide
TLQEQIAWM

SEQ ID NO: 19508 - protein, 9 aa, synthetic construct
  REGION 1..9: note = Description of Artificial Sequence: Synthetic peptide
AIIRILQQL

SEQ ID NO: 19509 - protein, 9 aa, synthetic construct
  REGION 1..9: note = Description of Artificial Sequence: Synthetic peptide
ILVQIQPDL

SEQ ID NO: 19510 - protein, 11 aa, synthetic construct
  REGION 1..11: note = Description of Artificial Sequence: Synthetic peptide
VQLGIPHPAGL

SEQ ID NO: 19511 - protein, 10 aa, synthetic construct
  REGION 1..10: note = Description of Artificial Sequence: Synthetic peptide
RTQDFWEVQL

SEQ ID NO: 19512 - protein, 9 aa, synthetic construct
  REGION 1..9: note = Description of Artificial Sequence: Synthetic peptide
KALTDIVAL

SEQ ID NO: 19513 - protein, 9 aa, synthetic construct
  REGION 1..9: note = Description of Artificial Sequence: Synthetic peptide
EILKYLVNL

SEQ ID NO: 19514 - protein, 9 aa, synthetic construct
  REGION 1..9: note = Description of Artificial Sequence: Synthetic peptide
RLRDFILIV

SEQ ID NO: 19515 - protein, 9 aa, synthetic construct
  REGION 1..9: note = Description of Artificial Sequence: Synthetic peptide
ILVQFNETV

SEQ ID NO: 19516 - protein, 11 aa, synthetic construct
  REGION 1..11: note = Description of Artificial Sequence: Synthetic peptide
QLAEVVQKIAL

SEQ ID NO: 19517 - protein, 9 aa, synthetic construct
  REGION 1..9: note = Description of Artificial Sequence: Synthetic peptide
ALTDIVALT

SEQ ID NO: 19518 - protein, 9 aa, synthetic construct
  REGION 1..9: note = Description of Artificial Sequence: Synthetic peptide
QMHDDIISV

SEQ ID NO: 19519 - protein, 9 aa, synthetic construct
  REGION 1..9: note = Description of Artificial Sequence: Synthetic peptide
AVIGNIRQA

SEQ ID NO: 19520 - protein, 9 aa, synthetic construct
  REGION 1..9: note = Description of Artificial Sequence: Synthetic peptide
QLAEVVQKI

SEQ ID NO: 19521 - protein, 9 aa, synthetic construct
  REGION 1..9: note = Description of Artificial Sequence: Synthetic peptide
AVFAIVNRV

SEQ ID NO: 19522 - protein, 10 aa, synthetic construct
  REGION 1..10: note = Description of Artificial Sequence: Synthetic peptide
RVFGEAISQV

SEQ ID NO: 19523 - protein, 9 aa, synthetic construct
  REGION 1..9: note = Description of Artificial Sequence: Synthetic peptide
IVARTVETL

SEQ ID NO: 19524 - protein, 9 aa, synthetic construct
  REGION 1..9: note = Description of Artificial Sequence: Synthetic peptide
QLTEVVQKI

SEQ ID NO: 19525 - protein, 9 aa, synthetic construct
  REGION 1..9: note = Description of Artificial Sequence: Synthetic peptide
VLAEAMSQV

SEQ ID NO: 19526 - protein, 9 aa, synthetic construct
  REGION 1..9: note = Description of Artificial Sequence: Synthetic peptide
IEIKDTMEA

SEQ ID NO: 19527 - protein, 9 aa, synthetic construct
  REGION 1..9: note = Description of Artificial Sequence: Synthetic peptide
STVTINETV

SEQ ID NO: 19528 - protein, 9 aa, synthetic construct
  REGION 1..9: note = Description of Artificial Sequence: Synthetic peptide
AVAEGTDRI

SEQ ID NO: 19529 - protein, 9 aa, synthetic construct
  REGION 1..9: note = Description of Artificial Sequence: Synthetic peptide
KAIEAQQHL

SEQ ID NO: 19530 - protein, 9 aa, synthetic construct
  REGION 1..9: note = Description of Artificial Sequence: Synthetic peptide
SQVTNTNIM

SEQ ID NO: 19531 - protein, 9 aa, synthetic construct
  REGION 1..9: note = Description of Artificial Sequence: Synthetic peptide
SAKELIAEV

SEQ ID NO: 19532 - protein, 11 aa, synthetic construct
  REGION 1..11: note = Description of Artificial Sequence: Synthetic peptide
TQVDPGLADQL

SEQ ID NO: 19533 - protein, 9 aa, synthetic construct
  REGION 1..9: note = Description of Artificial Sequence: Synthetic peptide
ASIALTVQA

SEQ ID NO: 19534 - protein, 11 aa, synthetic construct
  REGION 1..11: note = Description of Artificial Sequence: Synthetic peptide
VVIQDNSDIKV

SEQ ID NO: 19535 - protein, 9 aa, synthetic construct
  REGION 1..9: note = Description of Artificial Sequence: Synthetic peptide
VTINETVTL

SEQ ID NO: 19536 - protein, 9 aa, synthetic construct
  REGION 1..9: note = Description of Artificial Sequence: Synthetic peptide
GESGVLLGA

SEQ ID NO: 19537 - protein, 9 aa, synthetic construct
  REGION 1..9: note = Description of Artificial Sequence: Synthetic peptide
SISERILSA

SEQ ID NO: 19538 - protein, 9 aa, synthetic construct
  REGION 1..9: note = Description of Artificial Sequence: Synthetic peptide
VQFNETVNI

SEQ ID NO: 19539 - protein, 9 aa, synthetic construct
  REGION 1..9: note = Description of Artificial Sequence: Synthetic peptide
AIVGLIVAV

SEQ ID NO: 19540 - protein, 9 aa, synthetic construct
  REGION 1..9: note = Description of Artificial Sequence: Synthetic peptide
AVLAIVNRV

SEQ ID NO: 19541 - protein, 9 aa, synthetic construct
  REGION 1..9: note = Description of Artificial Sequence: Synthetic peptide
WTVNDIQKL

SEQ ID NO: 19542 - protein, 9 aa, synthetic construct
  REGION 1..9: note = Description of Artificial Sequence: Synthetic peptide
RIIEIVQGI

SEQ ID NO: 19543 - protein, 9 aa, synthetic construct
  REGION 1..9: note = Description of Artificial Sequence: Synthetic peptide
ATLEEMMTA

SEQ ID NO: 19544 - protein, 9 aa, synthetic construct
  REGION 1..9: note = Description of Artificial Sequence: Synthetic peptide
GAASITLTV

SEQ ID NO: 19545 - protein, 9 aa, synthetic construct
  REGION 1..9: note = Description of Artificial Sequence: Synthetic peptide
IVTDSQYAL

SEQ ID NO: 19546 - protein, 9 aa, synthetic construct
  REGION 1..9: note = Description of Artificial Sequence: Synthetic peptide
LEKEPIMGA

SEQ ID NO: 19547 - protein, 9 aa, synthetic construct
  REGION 1..9: note = Description of Artificial Sequence: Synthetic peptide
MIIGGLIGL

SEQ ID NO: 19548 - protein, 10 aa, synthetic construct
  REGION 1..10: note = Description of Artificial Sequence: Synthetic peptide
KVVEIEPLGV

SEQ ID NO: 19549 - protein, 9 aa, synthetic construct
  REGION 1..9: note = Description of Artificial Sequence: Synthetic peptide
FTSGAVKAA

SEQ ID NO: 19550 - protein, 9 aa, synthetic construct
  REGION 1..9: note = Description of Artificial Sequence: Synthetic peptide
VVIQDNSEI

SEQ ID NO: 19551 - protein, 10 aa, synthetic construct
  REGION 1..10: note = Description of Artificial Sequence: Synthetic peptide
NQIDSISERI

SEQ ID NO: 19552 - protein, 9 aa, synthetic construct
  REGION 1..9: note = Description of Artificial Sequence: Synthetic peptide
KEVESKAEP

SEQ ID NO: 19553 - protein, 9 aa, synthetic construct
  REGION 1..9: note = Description of Artificial Sequence: Synthetic peptide
GAASIALTV

SEQ ID NO: 19554 - protein, 10 aa, synthetic construct
  REGION 1..10: note = Description of Artificial Sequence: Synthetic peptide
SQYALGIIQA

SEQ ID NO: 19555 - protein, 10 aa, synthetic construct
  REGION 1..10: note = Description of Artificial Sequence: Synthetic peptide
VQIQPDLTGA

SEQ ID NO: 19556 - protein, 9 aa, synthetic construct
  REGION 1..9: note = Description of Artificial Sequence: Synthetic peptide
TLTPHLAEA

SEQ ID NO: 19557 - protein, 9 aa, synthetic construct
  REGION 1..9: note = Description of Artificial Sequence: Synthetic peptide
FQQGEAREL

SEQ ID NO: 19558 - protein, 9 aa, synthetic construct
  REGION 1..9: note = Description of Artificial Sequence: Synthetic peptide
QLTEAVQKI

SEQ ID NO: 19559 - protein, 11 aa, synthetic construct
  REGION 1..11: note = Description of Artificial Sequence: Synthetic peptide
VVIQDNSEIKV

SEQ ID NO: 19560 - protein, 9 aa, synthetic construct
  REGION 1..9: note = Description of Artificial Sequence: Synthetic peptide
IIYTLIEEA

SEQ ID NO: 19561 - protein, 9 aa, synthetic construct
  REGION 1..9: note = Description of Artificial Sequence: Synthetic peptide
ASITLTVQV

SEQ ID NO: 19562 - protein, 9 aa, synthetic construct
  REGION 1..9: note = Description of Artificial Sequence: Synthetic peptide
SQIYPGIKV

SEQ ID NO: 19563 - protein, 9 aa, synthetic construct
  REGION 1..9: note = Description of Artificial Sequence: Synthetic peptide
TTSNLQEQI

SEQ ID NO: 19564 - protein, 9 aa, synthetic construct
  REGION 1..9: note = Description of Artificial Sequence: Synthetic peptide
SLYNTVATL

SEQ ID NO: 19565 - protein, 9 aa, synthetic construct
  REGION 1..9: note = Description of Artificial Sequence: Synthetic peptide
FTSAAVKAA

SEQ ID NO: 19566 - protein, 9 aa, synthetic construct
  REGION 1..9: note = Description of Artificial Sequence: Synthetic peptide
NAKTIIVQL

SEQ ID NO: 19567 - protein, 9 aa, synthetic construct
  REGION 1..9: note = Description of Artificial Sequence: Synthetic peptide
ILKEPVHGV

SEQ ID NO: 19568 - protein, 11 aa, synthetic construct
  REGION 1..11: note = Description of Artificial Sequence: Synthetic peptide
EVIPAETGQEA

SEQ ID NO: 19569 - protein, 9 aa, synthetic construct
  REGION 1..9: note = Description of Artificial Sequence: Synthetic peptide
LVNQIIEEL

SEQ ID NO: 19570 - protein, 9 aa, synthetic construct
  REGION 1..9: note = Description of Artificial Sequence: Synthetic peptide
NAKNIIVQL

SEQ ID NO: 19571 - protein, 9 aa, synthetic construct
  REGION 1..9: note = Description of Artificial Sequence: Synthetic peptide
QLTEVVQKI

SEQ ID NO: 19572 - protein, 9 aa, synthetic construct
  REGION 1..9: note = Description of Artificial Sequence: Synthetic peptide
AVIGNIRQA

SEQ ID NO: 19573 - protein, 9 aa, synthetic construct
  REGION 1..9: note = Description of Artificial Sequence: Synthetic peptide
IVTDSQYAL

SEQ ID NO: 19574 - protein, 10 aa, synthetic construct
  REGION 1..10: note = Description of Artificial Sequence: Synthetic peptide
KVVEIEPLGV

SEQ ID NO: 19575 - protein, 9 aa, synthetic construct
  REGION 1..9: note = Description of Artificial Sequence: Synthetic peptide
IQDNSDIKV

SEQ ID NO: 19576 - protein, 11 aa, synthetic construct
  REGION 1..11: note = Description of Artificial Sequence: Synthetic peptide
VVIQDNSDIKV

SEQ ID NO: 19577 - protein, 9 aa, synthetic construct
  REGION 1..9: note = Description of Artificial Sequence: Synthetic peptide
IQDNSEIKV

SEQ ID NO: 19578 - protein, 9 aa, synthetic construct
  REGION 1..9: note = Description of Artificial Sequence: Synthetic peptide
AIVGLIVAV

SEQ ID NO: 19579 - protein, 9 aa, synthetic construct
  REGION 1..9: note = Description of Artificial Sequence: Synthetic peptide
QLAEVVQKI

SEQ ID NO: 19580 - protein, 9 aa, synthetic construct
  REGION 1..9: note = Description of Artificial Sequence: Synthetic peptide
AVLAIVNRV

SEQ ID NO: 19581 - protein, 9 aa, synthetic construct
  REGION 1..9: note = Description of Artificial Sequence: Synthetic peptide
TVSSNFPQI

SEQ ID NO: 19582 - protein, 10 aa, synthetic construct
  REGION 1..10: note = Description of Artificial Sequence: Synthetic peptide
RVFGEAISQV

SEQ ID NO: 19583 - protein, 9 aa, synthetic construct
  REGION 1..9: note = Description of Artificial Sequence: Synthetic peptide
VLAEAMSQV

SEQ ID NO: 19584 - protein, 9 aa, synthetic construct
  REGION 1..9: note = Description of Artificial Sequence: Synthetic peptide
RIIEIVQGI

SEQ ID NO: 19585 - protein, 11 aa, synthetic construct
  REGION 1..11: note = Description of Artificial Sequence: Synthetic peptide
TQVDPGLADQL

SEQ ID NO: 19586 - protein, 11 aa, synthetic construct
  REGION 1..11: note = Description of Artificial Sequence: Synthetic peptide
VVIQDNSEIKV

SEQ ID NO: 19587 - protein, 9 aa, synthetic construct
  REGION 1..9: note = Description of Artificial Sequence: Synthetic peptide
GGIGGFIKV

SEQ ID NO: 19588 - protein, 9 aa, synthetic construct
  REGION 1..9: note = Description of Artificial Sequence: Synthetic peptide
SQIYPGIKV

SEQ ID NO: 19589 - protein, 9 aa, synthetic construct
  REGION 1..9: note = Description of Artificial Sequence: Synthetic peptide
KAIEAQQHL

SEQ ID NO: 19590 - protein, 10 aa, synthetic construct
  REGION 1..10: note = Description of Artificial Sequence: Synthetic peptide
TVLDVGDAYF

SEQ ID NO: 19591 - protein, 9 aa, synthetic construct
  REGION 1..9: note = Description of Artificial Sequence: Synthetic peptide
KALTDIVAL

SEQ ID NO: 19592 - protein, 9 aa, synthetic construct
  REGION 1..9: note = Description of Artificial Sequence: Synthetic peptide
MIIGGLIGL

SEQ ID NO: 19593 - protein, 9 aa, synthetic construct
  REGION 1..9: note = Description of Artificial Sequence: Synthetic peptide
VVIQDNSEI

SEQ ID NO: 19594 - protein, 9 aa, synthetic construct
  REGION 1..9: note = Description of Artificial Sequence: Synthetic peptide
TLTPHLAEA

SEQ ID NO: 19595 - protein, 9 aa, synthetic construct
  REGION 1..9: note = Description of Artificial Sequence: Synthetic peptide
AVFAIVNRV

SEQ ID NO: 19596 - protein, 9 aa, synthetic construct
  REGION 1..9: note = Description of Artificial Sequence: Synthetic peptide
ASITLTVQV

SEQ ID NO: 19597 - protein, 9 aa, synthetic construct
  REGION 1..9: note = Description of Artificial Sequence: Synthetic peptide
GAASITLTV

SEQ ID NO: 19598 - protein, 9 aa, synthetic construct
  REGION 1..9: note = Description of Artificial Sequence: Synthetic peptide
VQFNETVNI

SEQ ID NO: 19599 - protein, 9 aa, synthetic construct
  REGION 1..9: note = Description of Artificial Sequence: Synthetic peptide
QLTEAVQKI

SEQ ID NO: 19600 - protein, 9 aa, synthetic construct
  REGION 1..9: note = Description of Artificial Sequence: Synthetic peptide
AIVAFIVAI

SEQ ID NO: 19601 - protein, 9 aa, synthetic construct
  REGION 1..9: note = Description of Artificial Sequence: Synthetic peptide
VTINETVTL

SEQ ID NO: 19602 - protein, 9 aa, synthetic construct
  REGION 1..9: note = Description of Artificial Sequence: Synthetic peptide
GAASIALTV

SEQ ID NO: 19603 - protein, 9 aa, synthetic construct
  REGION 1..9: note = Description of Artificial Sequence: Synthetic peptide
STVTINETV

SEQ ID NO: 19604 - protein, 9 aa, synthetic construct
  REGION 1..9: note = Description of Artificial Sequence: Synthetic peptide
AVAEGTDRI

SEQ ID NO: 19605 - protein, 9 aa, synthetic construct
  REGION 1..9: note = Description of Artificial Sequence: Synthetic peptide
YVDRFFKTL

SEQ ID NO: 19606 - protein, 9 aa, synthetic construct
  REGION 1..9: note = Description of Artificial Sequence: Synthetic peptide
YVDRFFKAL

SEQ ID NO: 19607 - protein, 9 aa, synthetic construct
  REGION 1..9: note = Description of Artificial Sequence: Synthetic peptide
AVLAIVNRV

SEQ ID NO: 19608 - protein, 9 aa, synthetic construct
  REGION 1..9: note = Description of Artificial Sequence: Synthetic peptide
QLAEVVQKI

SEQ ID NO: 19609 - protein, 9 aa, synthetic construct
  REGION 1..9: note = Description of Artificial Sequence: Synthetic peptide
AVFAIVNRV

SEQ ID NO: 19610 - protein, 9 aa, synthetic construct
  REGION 1..9: note = Description of Artificial Sequence: Synthetic peptide
QLTEVVQKI

SEQ ID NO: 19611 - protein, 10 aa, synthetic construct
  REGION 1..10: note = Description of Artificial Sequence: Synthetic peptide
TLWQRPLVTV

SEQ ID NO: 19612 - protein, 9 aa, synthetic construct
  REGION 1..9: note = Description of Artificial Sequence: Synthetic peptide
GLDQWTYQI

SEQ ID NO: 19613 - protein, 9 aa, synthetic construct
  REGION 1..9: note = Description of Artificial Sequence: Synthetic peptide
ILKEPVHGV

SEQ ID NO: 19614 - protein, 9 aa, synthetic construct
  REGION 1..9: note = Description of Artificial Sequence: Synthetic peptide
FSPEVIPMF

SEQ ID NO: 19615 - protein, 9 aa, synthetic construct
  REGION 1..9: note = Description of Artificial Sequence: Synthetic peptide
VLAEAMSQV

SEQ ID NO: 19616 - protein, 9 aa, synthetic construct
  REGION 1..9: note = Description of Artificial Sequence: Synthetic peptide
HLEGKIILV

SEQ ID NO: 19617 - protein, 10 aa, synthetic construct
  REGION 1..10: note = Description of Artificial Sequence: Synthetic peptide
KVVEIEPLGV

SEQ ID NO: 19618 - protein, 9 aa, synthetic construct
  REGION 1..9: note = Description of Artificial Sequence: Synthetic peptide
HLEGKVILV

SEQ ID NO: 19619 - protein, 10 aa, synthetic construct
  REGION 1..10: note = Description of Artificial Sequence: Synthetic peptide
RVFGEAISQV

SEQ ID NO: 19620 - protein, 9 aa, synthetic construct
  REGION 1..9: note = Description of Artificial Sequence: Synthetic peptide
IVARTVETL

SEQ ID NO: 19621 - protein, 9 aa, synthetic construct
  REGION 1..9: note = Description of Artificial Sequence: Synthetic peptide
AVIGNIRQA

SEQ ID NO: 19622 - protein, 10 aa, synthetic construct
  REGION 1..10: note = Description of Artificial Sequence: Synthetic peptide
KVVEIEPLGV

SEQ ID NO: 19623 - protein, 9 aa, synthetic construct
  REGION 1..9: note = Description of Artificial Sequence: Synthetic peptide
RIIEIVQGI

SEQ ID NO: 19624 - protein, 9 aa, synthetic construct
  REGION 1..9: note = Description of Artificial Sequence: Synthetic peptide
AVFAIVNRV

SEQ ID NO: 19625 - protein, 9 aa, synthetic construct
  REGION 1..9: note = Description of Artificial Sequence: Synthetic peptide
AIVGLIVAV

SEQ ID NO: 19626 - protein, 9 aa, synthetic construct
  REGION 1..9: note = Description of Artificial Sequence: Synthetic peptide
KAIEAQQHL

SEQ ID NO: 19627 - protein, 9 aa, synthetic construct
  REGION 1..9: note = Description of Artificial Sequence: Synthetic peptide
WTVNDIQKL

SEQ ID NO: 19628 - protein, 9 aa, synthetic construct
  REGION 1..9: note = Description of Artificial Sequence: Synthetic peptide
GESGVLLGA

SEQ ID NO: 19629 - protein, 9 aa, synthetic construct
  REGION 1..9: note = Description of Artificial Sequence: Synthetic peptide
IEIKDTMEA

SEQ ID NO: 19630 - protein, 9 aa, synthetic construct
  REGION 1..9: note = Description of Artificial Sequence: Synthetic peptide
QLTEVVQKI

SEQ ID NO: 19631 - protein, 9 aa, synthetic construct
  REGION 1..9: note = Description of Artificial Sequence: Synthetic peptide
AIIRILQQL

SEQ ID NO: 19632 - protein, 9 aa, synthetic construct
  REGION 1..9: note = Description of Artificial Sequence: Synthetic peptide
QLAEVVQKI

SEQ ID NO: 19633 - protein, 9 aa, synthetic construct
  REGION 1..9: note = Description of Artificial Sequence: Synthetic peptide
LEKEPIMGA

SEQ ID NO: 19634 - protein, 9 aa, synthetic construct
  REGION 1..9: note = Description of Artificial Sequence: Synthetic peptide
MIIGGLIGL

SEQ ID NO: 19635 - protein, 9 aa, synthetic construct
  REGION 1..9: note = Description of Artificial Sequence: Synthetic peptide
VLAEAMSQV

SEQ ID NO: 19636 - protein, 9 aa, synthetic construct
  REGION 1..9: note = Description of Artificial Sequence: Synthetic peptide
TLIPNPTGV

SEQ ID NO: 19637 - protein, 9 aa, synthetic construct
  REGION 1..9: note = Description of Artificial Sequence: Synthetic peptide
FTSGAVKAA

SEQ ID NO: 19638 - protein, 10 aa, synthetic construct
  REGION 1..10: note = Description of Artificial Sequence: Synthetic peptide
RVLAEAMSQV

SEQ ID NO: 19639 - protein, 11 aa, synthetic construct
  REGION 1..11: note = Description of Artificial Sequence: Synthetic peptide
VVIQDNSDIKV

SEQ ID NO: 19640 - protein, 9 aa, synthetic construct
  REGION 1..9: note = Description of Artificial Sequence: Synthetic peptide
STVTINETV

SEQ ID NO: 19641 - protein, 9 aa, synthetic construct
  REGION 1..9: note = Description of Artificial Sequence: Synthetic peptide
KVVTLTDTT

SEQ ID NO: 19642 - protein, 9 aa, synthetic construct
  REGION 1..9: note = Description of Artificial Sequence: Synthetic peptide
GTAGSTMGA

SEQ ID NO: 19643 - protein, 9 aa, synthetic construct
  REGION 1..9: note = Description of Artificial Sequence: Synthetic peptide
VEIEPLGVA

SEQ ID NO: 19644 - protein, 9 aa, synthetic construct
  REGION 1..9: note = Description of Artificial Sequence: Synthetic peptide
KEVESKAEP

SEQ ID NO: 19645 - protein, 9 aa, synthetic construct
  REGION 1..9: note = Description of Artificial Sequence: Synthetic peptide
ILKEPVHGV

SEQ ID NO: 19646 - protein, 9 aa, synthetic construct
  REGION 1..9: note = Description of Artificial Sequence: Synthetic peptide
IIYTLIEEA

SEQ ID NO: 19647 - protein, 10 aa, synthetic construct
  REGION 1..10: note = Description of Artificial Sequence: Synthetic peptide
KAIEAQQHLL

SEQ ID NO: 19648 - protein, 9 aa, synthetic construct
  REGION 1..9: note = Description of Artificial Sequence: Synthetic peptide
AVLAIVNRV

SEQ ID NO: 19649 - protein, 10 aa, synthetic construct
  REGION 1..10: note = Description of Artificial Sequence: Synthetic peptide
KSYSTESHNV

SEQ ID NO: 19650 - protein, 9 aa, synthetic construct
  REGION 1..9: note = Description of Artificial Sequence: Synthetic peptide
QIYPGIKVK

SEQ ID NO: 19651 - protein, 10 aa, synthetic construct
  REGION 1..10: note = Description of Artificial Sequence: Synthetic peptide
IVQQQSNLLK

SEQ ID NO: 19652 - protein, 9 aa, synthetic construct
  REGION 1..9: note = Description of Artificial Sequence: Synthetic peptide
RVLGTVAAK

SEQ ID NO: 19653 - protein, 9 aa, synthetic construct
  REGION 1..9: note = Description of Artificial Sequence: Synthetic peptide
RTNSPTSRK

SEQ ID NO: 19654 - protein, 9 aa, synthetic construct
  REGION 1..9: note = Description of Artificial Sequence: Synthetic peptide
SVIKQACPK

SEQ ID NO: 19655 - protein, 10 aa, synthetic construct
  REGION 1..10: note = Description of Artificial Sequence: Synthetic peptide
ILYQGNPYPK

SEQ ID NO: 19656 - protein, 9 aa, synthetic construct
  REGION 1..9: note = Description of Artificial Sequence: Synthetic peptide
ELYPSASLK

SEQ ID NO: 19657 - protein, 9 aa, synthetic construct
  REGION 1..9: note = Description of Artificial Sequence: Synthetic peptide
KILEPFRAK

SEQ ID NO: 19658 - protein, 9 aa, synthetic construct
  REGION 1..9: note = Description of Artificial Sequence: Synthetic peptide
ALTALIRPK

SEQ ID NO: 19659 - protein, 10 aa, synthetic construct
  REGION 1..10: note = Description of Artificial Sequence: Synthetic peptide
TVYYGVPVWK

SEQ ID NO: 19660 - protein, 11 aa, synthetic construct
  REGION 1..11: note = Description of Artificial Sequence: Synthetic peptide
TVNDIQKLVGK

SEQ ID NO: 19661 - protein, 9 aa, synthetic construct
  REGION 1..9: note = Description of Artificial Sequence: Synthetic peptide
LLNGSIAEK

SEQ ID NO: 19662 - protein, 10 aa, synthetic construct
  REGION 1..10: note = Description of Artificial Sequence: Synthetic peptide
RVLGTVAAKL

SEQ ID NO: 19663 - protein, 9 aa, synthetic construct
  REGION 1..9: note = Description of Artificial Sequence: Synthetic peptide
RVNISEIMK

SEQ ID NO: 19664 - protein, 10 aa, synthetic construct
  REGION 1..10: note = Description of Artificial Sequence: Synthetic peptide
KVMETQMNWK

SEQ ID NO: 19665 - protein, 9 aa, synthetic construct
  REGION 1..9: note = Description of Artificial Sequence: Synthetic peptide
TLNDTTNQK

SEQ ID NO: 19666 - protein, 10 aa, synthetic construct
  REGION 1..10: note = Description of Artificial Sequence: Synthetic peptide
IVQQQSNLLK

SEQ ID NO: 19667 - protein, 11 aa, synthetic construct
  REGION 1..11: note = Description of Artificial Sequence: Synthetic peptide
TVNDIQKLVGK

SEQ ID NO: 19668 - protein, 9 aa, synthetic construct
  REGION 1..9: note = Description of Artificial Sequence: Synthetic peptide
QIYPGIKVK

SEQ ID NO: 19669 - protein, 10 aa, synthetic construct
  REGION 1..10: note = Description of Artificial Sequence: Synthetic peptide
TVQPIQLPEK

SEQ ID NO: 19670 - protein, 10 aa, synthetic construct
  REGION 1..10: note = Description of Artificial Sequence: Synthetic peptide
TVQPVQLPEK

SEQ ID NO: 19671 - protein, 9 aa, synthetic construct
  REGION 1..9: note = Description of Artificial Sequence: Synthetic peptide
TLNDTTNQK

SEQ ID NO: 19672 - protein, 9 aa, synthetic construct
  REGION 1..9: note = Description of Artificial Sequence: Synthetic peptide
RVLGTVAAK

SEQ ID NO: 19673 - protein, 9 aa, synthetic construct
  REGION 1..9: note = Description of Artificial Sequence: Synthetic peptide
LLNGSIAEK

SEQ ID NO: 19674 - protein, 9 aa, synthetic construct
  REGION 1..9: note = Description of Artificial Sequence: Synthetic peptide
IIASDIQTK

SEQ ID NO: 19675 - protein, 9 aa, synthetic construct
  REGION 1..9: note = Description of Artificial Sequence: Synthetic peptide
GLDGLIYSK

SEQ ID NO: 19676 - protein, 9 aa, synthetic construct
  REGION 1..9: note = Description of Artificial Sequence: Synthetic peptide
SVIKQACPK

SEQ ID NO: 19677 - protein, 10 aa, synthetic construct
  REGION 1..10: note = Description of Artificial Sequence: Synthetic peptide
GSNFTSAAVK

SEQ ID NO: 19678 - protein, 10 aa, synthetic construct
  REGION 1..10: note = Description of Artificial Sequence: Synthetic peptide
GSNFTSGAVK

SEQ ID NO: 19679 - protein, 10 aa, synthetic construct
  REGION 1..10: note = Description of Artificial Sequence: Synthetic peptide
GSNFTSATVK

SEQ ID NO: 19680 - protein, 11 aa, synthetic construct
  REGION 1..11: note = Description of Artificial Sequence: Synthetic peptide
GVGAVSQDLAK

SEQ ID NO: 19681 - protein, 9 aa, synthetic construct
  REGION 1..9: note = Description of Artificial Sequence: Synthetic peptide
APAGFAILK

SEQ ID NO: 19682 - protein, 10 aa, synthetic construct
  REGION 1..10: note = Description of Artificial Sequence: Synthetic peptide
ILYQGNPYPK

SEQ ID NO: 19683 - protein, 11 aa, synthetic construct
  REGION 1..11: note = Description of Artificial Sequence: Synthetic peptide
QSQGVVESMNK

SEQ ID NO: 19684 - protein, 11 aa, synthetic construct
  REGION 1..11: note = Description of Artificial Sequence: Synthetic peptide
ALEKIEEIQNK

SEQ ID NO: 19685 - protein, 11 aa, synthetic construct
  REGION 1..11: note = Description of Artificial Sequence: Synthetic peptide
YVDGASNRETK

SEQ ID NO: 19686 - protein, 10 aa, synthetic construct
  REGION 1..10: note = Description of Artificial Sequence: Synthetic peptide
KIEEIQNKNK

SEQ ID NO: 19687 - protein, 9 aa, synthetic construct
  REGION 1..9: note = Description of Artificial Sequence: Synthetic peptide
RVNISEIMK

SEQ ID NO: 19688 - protein, 8 aa, synthetic construct
  REGION 1..8: note = Description of Artificial Sequence: Synthetic peptide
VLGTVAAK

SEQ ID NO: 19689 - protein, 9 aa, synthetic construct
  REGION 1..9: note = Description of Artificial Sequence: Synthetic peptide
AVDLSFFLK

SEQ ID NO: 19690 - protein, 9 aa, synthetic construct
  REGION 1..9: note = Description of Artificial Sequence: Synthetic peptide
RTNSPTSRK

SEQ ID NO: 19691 - protein, 11 aa, synthetic construct
  REGION 1..11: note = Description of Artificial Sequence: Synthetic peptide
ALNPGLLESAK

SEQ ID NO: 19692 - protein, 9 aa, synthetic construct
  REGION 1..9: note = Description of Artificial Sequence: Synthetic peptide
SNFTSATVK

SEQ ID NO: 19693 - protein, 9 aa, synthetic construct
  REGION 1..9: note = Description of Artificial Sequence: Synthetic peptide
SNFTSGAVK

SEQ ID NO: 19694 - protein, 9 aa, synthetic construct
  REGION 1..9: note = Description of Artificial Sequence: Synthetic peptide
KQLTEAVQK

SEQ ID NO: 19695 - protein, 9 aa, synthetic construct
  REGION 1..9: note = Description of Artificial Sequence: Synthetic peptide
VQQQSNLLK

SEQ ID NO: 19696 - protein, 9 aa, synthetic construct
  REGION 1..9: note = Description of Artificial Sequence: Synthetic peptide
ALTALIRPK

SEQ ID NO: 19697 - protein, 10 aa, synthetic construct
  REGION 1..10: note = Description of Artificial Sequence: Synthetic peptide
VVESMNKELK

SEQ ID NO: 19698 - protein, 9 aa, synthetic construct
  REGION 1..9: note = Description of Artificial Sequence: Synthetic peptide
QIYPGIKVK

SEQ ID NO: 19699 - protein, 10 aa, synthetic construct
  REGION 1..10: note = Description of Artificial Sequence: Synthetic peptide
IVQQQSNLLK

SEQ ID NO: 19700 - protein, 9 aa, synthetic construct
  REGION 1..9: note = Description of Artificial Sequence: Synthetic peptide
SVIKQACPK

SEQ ID NO: 19701 - protein, 10 aa, synthetic construct
  REGION 1..10: note = Description of Artificial Sequence: Synthetic peptide
TVQPVQLPEK

SEQ ID NO: 19702 - protein, 11 aa, synthetic construct
  REGION 1..11: note = Description of Artificial Sequence: Synthetic peptide
TVNDIQKLVGK

SEQ ID NO: 19703 - protein, 9 aa, synthetic construct
  REGION 1..9: note = Description of Artificial Sequence: Synthetic peptide
APAGFAILK

SEQ ID NO: 19704 - protein, 10 aa, synthetic construct
  REGION 1..10: note = Description of Artificial Sequence: Synthetic peptide
GSNFTSGAVK

SEQ ID NO: 19705 - protein, 10 aa, synthetic construct
  REGION 1..10: note = Description of Artificial Sequence: Synthetic peptide
TVQPIQLPEK

SEQ ID NO: 19706 - protein, 10 aa, synthetic construct
  REGION 1..10: note = Description of Artificial Sequence: Synthetic peptide
GSNFTSATVK

SEQ ID NO: 19707 - protein, 9 aa, synthetic construct
  REGION 1..9: note = Description of Artificial Sequence: Synthetic peptide
AVDLSFFLK

SEQ ID NO: 19708 - protein, 10 aa, synthetic construct
  REGION 1..10: note = Description of Artificial Sequence: Synthetic peptide
GSNFTSAAVK

SEQ ID NO: 19709 - protein, 10 aa, synthetic construct
  REGION 1..10: note = Description of Artificial Sequence: Synthetic peptide
GGLDGLIYSK

SEQ ID NO: 19710 - protein, 9 aa, synthetic construct
  REGION 1..9: note = Description of Artificial Sequence: Synthetic peptide
RVLGTVAAK

SEQ ID NO: 19711 - protein, 10 aa, synthetic construct
  REGION 1..10: note = Description of Artificial Sequence: Synthetic peptide
VTLNDTTNQK

SEQ ID NO: 19712 - protein, 10 aa, synthetic construct
  REGION 1..10: note = Description of Artificial Sequence: Synthetic peptide
VTLTDTTNQK

SEQ ID NO: 19713 - protein, 9 aa, synthetic construct
  REGION 1..9: note = Description of Artificial Sequence: Synthetic peptide
VQQQSNLLK

SEQ ID NO: 19714 - protein, 10 aa, synthetic construct
  REGION 1..10: note = Description of Artificial Sequence: Synthetic peptide
SQIYPGIKVK

SEQ ID NO: 19715 - protein, 11 aa, synthetic construct
  REGION 1..11: note = Description of Artificial Sequence: Synthetic peptide
YVDGASNRETK

SEQ ID NO: 19716 - protein, 9 aa, synthetic construct
  REGION 1..9: note = Description of Artificial Sequence: Synthetic peptide
IIASDIQTK

SEQ ID NO: 19717 - protein, 9 aa, synthetic construct
  REGION 1..9: note = Description of Artificial Sequence: Synthetic peptide
SNFTSATVK

SEQ ID NO: 19718 - protein, 10 aa, synthetic construct
  REGION 1..10: note = Description of Artificial Sequence: Synthetic peptide
VTNTNIMMQR

SEQ ID NO: 19719 - protein, 11 aa, synthetic construct
  REGION 1..11: note = Description of Artificial Sequence: Synthetic peptide
GVVESMNKELK

SEQ ID NO: 19720 - protein, 9 aa, synthetic construct
  REGION 1..9: note = Description of Artificial Sequence: Synthetic peptide
GLDGLIYSK

SEQ ID NO: 19721 - protein, 10 aa, synthetic construct
  REGION 1..10: note = Description of Artificial Sequence: Synthetic peptide
KVMETQMNWK

SEQ ID NO: 19722 - protein, 9 aa, synthetic construct
  REGION 1..9: note = Description of Artificial Sequence: Synthetic peptide
RVNISEIMK

SEQ ID NO: 19723 - protein, 11 aa, synthetic construct
  REGION 1..11: note = Description of Artificial Sequence: Synthetic peptide
GSIAEKEVIIK

SEQ ID NO: 19724 - protein, 8 aa, synthetic construct
  REGION 1..8: note = Description of Artificial Sequence: Synthetic peptide
TDIVPLTR

SEQ ID NO: 19725 - protein, 9 aa, synthetic construct
  REGION 1..9: note = Description of Artificial Sequence: Synthetic peptide
KTVEIVCYR

SEQ ID NO: 19726 - protein, 9 aa, synthetic construct
  REGION 1..9: note = Description of Artificial Sequence: Synthetic peptide
RTNSPTSRK

SEQ ID NO: 19727 - protein, 9 aa, synthetic construct
  REGION 1..9: note = Description of Artificial Sequence: Synthetic peptide
NYTGIIYTL

SEQ ID NO: 19728 - protein, 9 aa, synthetic construct
  REGION 1..9: note = Description of Artificial Sequence: Synthetic peptide
NYTGIIYSL

SEQ ID NO: 19729 - protein, 9 aa, synthetic construct
  REGION 1..9: note = Description of Artificial Sequence: Synthetic peptide
NYTRIIYNL

SEQ ID NO: 19730 - protein, 9 aa, synthetic construct
  REGION 1..9: note = Description of Artificial Sequence: Synthetic peptide
NETVNITCF

SEQ ID NO: 19731 - protein, 9 aa, synthetic construct
  REGION 1..9: note = Description of Artificial Sequence: Synthetic peptide
QYNDILIEI

SEQ ID NO: 19732 - protein, 9 aa, synthetic construct
  REGION 1..9: note = Description of Artificial Sequence: Synthetic peptide
QYNEVPIEI

SEQ ID NO: 19733 - protein, 9 aa, synthetic construct
  REGION 1..9: note = Description of Artificial Sequence: Synthetic peptide
VYIEYKKLL

SEQ ID NO: 19734 - protein, 9 aa, synthetic construct
  REGION 1..9: note = Description of Artificial Sequence: Synthetic peptide
IYQEPFKNL

SEQ ID NO: 19735 - protein, 9 aa, synthetic construct
  REGION 1..9: note = Description of Artificial Sequence: Synthetic peptide
RYLKDQQLL

SEQ ID NO: 19736 - protein, 10 aa, synthetic construct
  REGION 1..10: note = Description of Artificial Sequence: Synthetic peptide
YFNESTTINF

SEQ ID NO: 19737 - protein, 9 aa, synthetic construct
  REGION 1..9: note = Description of Artificial Sequence: Synthetic peptide
EELREQEHF

SEQ ID NO: 19738 - protein, 9 aa, synthetic construct
  REGION 1..9: note = Description of Artificial Sequence: Synthetic peptide
FYKQDVVSI

SEQ ID NO: 19739 - protein, 9 aa, synthetic construct
  REGION 1..9: note = Description of Artificial Sequence: Synthetic peptide
NYTGIIYTL

SEQ ID NO: 19740 - protein, 9 aa, synthetic construct
  REGION 1..9: note = Description of Artificial Sequence: Synthetic peptide
QYNEVPIEI

SEQ ID NO: 19741 - protein, 9 aa, synthetic construct
  REGION 1..9: note = Description of Artificial Sequence: Synthetic peptide
NYTGIIYSL

SEQ ID NO: 19742 - protein, 9 aa, synthetic construct
  REGION 1..9: note = Description of Artificial Sequence: Synthetic peptide
QYNDILIEI

SEQ ID NO: 19743 - protein, 9 aa, synthetic construct
  REGION 1..9: note = Description of Artificial Sequence: Synthetic peptide
NYTRIIYNL

SEQ ID NO: 19744 - protein, 9 aa, synthetic construct
  REGION 1..9: note = Description of Artificial Sequence: Synthetic peptide
IYQEPFKNL

SEQ ID NO: 19745 - protein, 9 aa, synthetic construct
  REGION 1..9: note = Description of Artificial Sequence: Synthetic peptide
RYLKDQQLL

SEQ ID NO: 19746 - protein, 9 aa, synthetic construct
  REGION 1..9: note = Description of Artificial Sequence: Synthetic peptide
FYKQDVVSI

SEQ ID NO: 19747 - protein, 9 aa, synthetic construct
  REGION 1..9: note = Description of Artificial Sequence: Synthetic peptide
AYCNVSSNW

SEQ ID NO: 19748 - protein, 10 aa, synthetic construct
  REGION 1..10: note = Description of Artificial Sequence: Synthetic peptide
YFNESTTINF

SEQ ID NO: 19749 - protein, 9 aa, synthetic construct
  REGION 1..9: note = Description of Artificial Sequence: Synthetic peptide
IYNTYGDTW

SEQ ID NO: 19750 - protein, 9 aa, synthetic construct
  REGION 1..9: note = Description of Artificial Sequence: Synthetic peptide
VYIEYKKLL

SEQ ID NO: 19751 - protein, 10 aa, synthetic construct
  REGION 1..10: note = Description of Artificial Sequence: Synthetic peptide
DTINEEAAEW

SEQ ID NO: 19752 - protein, 9 aa, synthetic construct
  REGION 1..9: note = Description of Artificial Sequence: Synthetic peptide
TVMETQRSW

SEQ ID NO: 19753 - protein, 9 aa, synthetic construct
  REGION 1..9: note = Description of Artificial Sequence: Synthetic peptide
EVIPMFSAL

SEQ ID NO: 19754 - protein, 9 aa, synthetic construct
  REGION 1..9: note = Description of Artificial Sequence: Synthetic peptide
EAILVITTY

SEQ ID NO: 19755 - protein, 10 aa, synthetic construct
  REGION 1..10: note = Description of Artificial Sequence: Synthetic peptide
EVQKQGLDQW

SEQ ID NO: 19756 - protein, 9 aa, synthetic construct
  REGION 1..9: note = Description of Artificial Sequence: Synthetic peptide
DIAGTTSTL

SEQ ID NO: 19757 - protein, 9 aa, synthetic construct
  REGION 1..9: note = Description of Artificial Sequence: Synthetic peptide
NVTENFNMW

SEQ ID NO: 19758 - protein, 9 aa, synthetic construct
  REGION 1..9: note = Description of Artificial Sequence: Synthetic peptide
NVTENFNIW

SEQ ID NO: 19759 - protein, 10 aa, synthetic construct
  REGION 1..10: note = Description of Artificial Sequence: Synthetic peptide
EVNIVTDSQY

SEQ ID NO: 19760 - protein, 9 aa, synthetic construct
  REGION 1..9: note = Description of Artificial Sequence: Synthetic peptide
DTMEALEKI

SEQ ID NO: 19761 - protein, 9 aa, synthetic construct
  REGION 1..9: note = Description of Artificial Sequence: Synthetic peptide
EAILVITTY

SEQ ID NO: 19762 - protein, 9 aa, synthetic construct
  REGION 1..9: note = Description of Artificial Sequence: Synthetic peptide
ETKTGKAGY

SEQ ID NO: 19763 - protein, 10 aa, synthetic construct
  REGION 1..10: note = Description of Artificial Sequence: Synthetic peptide
EVNIVTDSQY

SEQ ID NO: 19764 - protein, 9 aa, synthetic construct
  REGION 1..9: note = Description of Artificial Sequence: Synthetic peptide
ETKIGKAGY

SEQ ID NO: 19765 - protein, 9 aa, synthetic construct
  REGION 1..9: note = Description of Artificial Sequence: Synthetic peptide
EVIPMFSAL

SEQ ID NO: 19766 - protein, 9 aa, synthetic construct
  REGION 1..9: note = Description of Artificial Sequence: Synthetic peptide
ETPGIRYQY

SEQ ID NO: 19767 - protein, 10 aa, synthetic construct
  REGION 1..10: note = Description of Artificial Sequence: Synthetic peptide
ETFRPTGGNM

SEQ ID NO: 19768 - protein, 10 aa, synthetic construct
  REGION 1..10: note = Description of Artificial Sequence: Synthetic peptide
EVIPAETGQE

SEQ ID NO: 19769 - protein, 10 aa, synthetic construct
  REGION 1..10: note = Description of Artificial Sequence: Synthetic peptide
NTIGGHQAAM

SEQ ID NO: 19770 - protein, 9 aa, synthetic construct
  REGION 1..9: note = Description of Artificial Sequence: Synthetic peptide
GTEEIKSLY

SEQ ID NO: 19771 - protein, 9 aa, synthetic construct
  REGION 1..9: note = Description of Artificial Sequence: Synthetic peptide
EVIPAETGQ

SEQ ID NO: 19772 - protein, 9 aa, synthetic construct
  REGION 1..9: note = Description of Artificial Sequence: Synthetic peptide
GTQEIKSLY

SEQ ID NO: 19773 - protein, 11 aa, synthetic construct
  REGION 1..11: note = Description of Artificial Sequence: Synthetic peptide
QTGTEEIKSLY

SEQ ID NO: 19774 - protein, 9 aa, synthetic construct
  REGION 1..9: note = Description of Artificial Sequence: Synthetic peptide
EAILVITTY

SEQ ID NO: 19775 - protein, 9 aa, synthetic construct
  REGION 1..9: note = Description of Artificial Sequence: Synthetic peptide
EVIPMFSAL

SEQ ID NO: 19776 - protein, 9 aa, synthetic construct
  REGION 1..9: note = Description of Artificial Sequence: Synthetic peptide
DIAGTTSNL

SEQ ID NO: 19777 - protein, 10 aa, synthetic construct
  REGION 1..10: note = Description of Artificial Sequence: Synthetic peptide
EVNIVTDSQY

SEQ ID NO: 19778 - protein, 9 aa, synthetic construct
  REGION 1..9: note = Description of Artificial Sequence: Synthetic peptide
DIAGTTSTL

SEQ ID NO: 19779 - protein, 10 aa, synthetic construct
  REGION 1..10: note = Description of Artificial Sequence: Synthetic peptide
NTIGGHQAAM

SEQ ID NO: 19780 - protein, 10 aa, synthetic construct
  REGION 1..10: note = Description of Artificial Sequence: Synthetic peptide
ETFRPTGGNM

SEQ ID NO: 19781 - protein, 9 aa, synthetic construct
  REGION 1..9: note = Description of Artificial Sequence: Synthetic peptide
DTMEALEKI

SEQ ID NO: 19782 - protein, 10 aa, synthetic construct
  REGION 1..10: note = Description of Artificial Sequence: Synthetic peptide
EIFRPTGGDM

SEQ ID NO: 19783 - protein, 9 aa, synthetic construct
  REGION 1..9: note = Description of Artificial Sequence: Synthetic peptide
EVIPMFSAL

SEQ ID NO: 19784 - protein, 10 aa, synthetic construct
  REGION 1..10: note = Description of Artificial Sequence: Synthetic peptide
DIIATDIQTR

SEQ ID NO: 19785 - protein, 10 aa, synthetic construct
  REGION 1..10: note = Description of Artificial Sequence: Synthetic peptide
NTIGGHQAAM

SEQ ID NO: 19786 - protein, 9 aa, synthetic construct
  REGION 1..9: note = Description of Artificial Sequence: Synthetic peptide
DIAGTTSNL

SEQ ID NO: 19787 - protein, 9 aa, synthetic construct
  REGION 1..9: note = Description of Artificial Sequence: Synthetic peptide
EIIGNIRET

SEQ ID NO: 19788 - protein, 9 aa, synthetic construct
  REGION 1..9: note = Description of Artificial Sequence: Synthetic peptide
EAILVITTY

SEQ ID NO: 19789 - protein, 9 aa, synthetic construct
  REGION 1..9: note = Description of Artificial Sequence: Synthetic peptide
ETKTGKAGY

SEQ ID NO: 19790 - protein, 9 aa, synthetic construct
  REGION 1..9: note = Description of Artificial Sequence: Synthetic peptide
DIAGTTSTL

SEQ ID NO: 19791 - protein, 9 aa, synthetic construct
  REGION 1..9: note = Description of Artificial Sequence: Synthetic peptide
NQIDSISER

SEQ ID NO: 19792 - protein, 9 aa, synthetic construct
  REGION 1..9: note = Description of Artificial Sequence: Synthetic peptide
ETVNITCFR

SEQ ID NO: 19793 - protein, 11 aa, synthetic construct
  REGION 1..11: note = Description of Artificial Sequence: Synthetic peptide
ETFYVDGASNR

SEQ ID NO: 19794 - protein, 10 aa, synthetic construct
  REGION 1..10: note = Description of Artificial Sequence: Synthetic peptide
DNSDIKVVPR

SEQ ID NO: 19795 - protein, 10 aa, synthetic construct
  REGION 1..10: note = Description of Artificial Sequence: Synthetic peptide
ELVHQALSPR

SEQ ID NO: 19796 - protein, 9 aa, synthetic construct
  REGION 1..9: note = Description of Artificial Sequence: Synthetic peptide
NITGLILTR

SEQ ID NO: 19797 - protein, 9 aa, synthetic construct
  REGION 1..9: note = Description of Artificial Sequence: Synthetic peptide
SIALTVQAR

SEQ ID NO: 19798 - protein, 9 aa, synthetic construct
  REGION 1..9: note = Description of Artificial Sequence: Synthetic peptide
TVLDVGDAY

SEQ ID NO: 19799 - protein, 9 aa, synthetic construct
  REGION 1..9: note = Description of Artificial Sequence: Synthetic peptide
LYNTVATLY

SEQ ID NO: 19800 - protein, 9 aa, synthetic construct
  REGION 1..9: note = Description of Artificial Sequence: Synthetic peptide
YNSQVSHNY

SEQ ID NO: 19801 - protein, 9 aa, synthetic construct
  REGION 1..9: note = Description of Artificial Sequence: Synthetic peptide
LFNTEATLY

SEQ ID NO: 19802 - protein, 9 aa, synthetic construct
  REGION 1..9: note = Description of Artificial Sequence: Synthetic peptide
ILVQLQPSY

SEQ ID NO: 19803 - protein, 9 aa, synthetic construct
  REGION 1..9: note = Description of Artificial Sequence: Synthetic peptide
GTQEIKSLY

SEQ ID NO: 19804 - protein, 9 aa, synthetic construct
  REGION 1..9: note = Description of Artificial Sequence: Synthetic peptide
HMGPGQVLY

SEQ ID NO: 19805 - protein, 9 aa, synthetic construct
  REGION 1..9: note = Description of Artificial Sequence: Synthetic peptide
SFEPIPIHY

SEQ ID NO: 19806 - protein, 9 aa, synthetic construct
  REGION 1..9: note = Description of Artificial Sequence: Synthetic peptide
SFQPIPIHY

SEQ ID NO: 19807 - protein, 9 aa, synthetic construct
  REGION 1..9: note = Description of Artificial Sequence: Synthetic peptide
MWTIVYIEY

SEQ ID NO: 19808 - protein, 10 aa, synthetic construct
  REGION 1..10: note = Description of Artificial Sequence: Synthetic peptide
SLYNTVATLY

SEQ ID NO: 19809 - protein, 9 aa, synthetic construct
  REGION 1..9: note = Description of Artificial Sequence: Synthetic peptide
YNSQVSHNY

SEQ ID NO: 19810 - protein, 9 aa, synthetic construct
  REGION 1..9: note = Description of Artificial Sequence: Synthetic peptide
GFFPDWQNY

SEQ ID NO: 19811 - protein, 9 aa, synthetic construct
  REGION 1..9: note = Description of Artificial Sequence: Synthetic peptide
LYNTVATLY

SEQ ID NO: 19812 - protein, 9 aa, synthetic construct
  REGION 1..9: note = Description of Artificial Sequence: Synthetic peptide
LFNTEATLY

SEQ ID NO: 19813 - protein, 9 aa, synthetic construct
  REGION 1..9: note = Description of Artificial Sequence: Synthetic peptide
GYFPDWQNY

SEQ ID NO: 19814 - protein, 9 aa, synthetic construct
  REGION 1..9: note = Description of Artificial Sequence: Synthetic peptide
SFEPIPIHY

SEQ ID NO: 19815 - protein, 9 aa, synthetic construct
  REGION 1..9: note = Description of Artificial Sequence: Synthetic peptide
SFQPIPIHY

SEQ ID NO: 19816 - protein, 9 aa, synthetic construct
  REGION 1..9: note = Description of Artificial Sequence: Synthetic peptide
VWTIVFIEY

SEQ ID NO: 19817 - protein, 9 aa, synthetic construct
  REGION 1..9: note = Description of Artificial Sequence: Synthetic peptide
HMGPGQVLY

SEQ ID NO: 19818 - protein, 9 aa, synthetic construct
  REGION 1..9: note = Description of Artificial Sequence: Synthetic peptide
NFEPIPIHY

SEQ ID NO: 19819 - protein, 9 aa, synthetic construct
  REGION 1..9: note = Description of Artificial Sequence: Synthetic peptide
GTQEIKSLY

SEQ ID NO: 19820 - protein, 9 aa, synthetic construct
  REGION 1..9: note = Description of Artificial Sequence: Synthetic peptide
MWTIVYIEY

SEQ ID NO: 19821 - protein, 9 aa, synthetic construct
  REGION 1..9: note = Description of Artificial Sequence: Synthetic peptide
TVLDVGDAY

SEQ ID NO: 19822 - protein, 9 aa, synthetic construct
  REGION 1..9: note = Description of Artificial Sequence: Synthetic peptide
TEAVQKIAL

SEQ ID NO: 19823 - protein, 9 aa, synthetic construct
  REGION 1..9: note = Description of Artificial Sequence: Synthetic peptide
SERDWSNTL

SEQ ID NO: 19824 - protein, 9 aa, synthetic construct
  REGION 1..9: note = Description of Artificial Sequence: Synthetic peptide
AEVVQKIAL

SEQ ID NO: 19825 - protein, 9 aa, synthetic construct
  REGION 1..9: note = Description of Artificial Sequence: Synthetic peptide
SERIPSSCL

SEQ ID NO: 19826 - protein, 9 aa, synthetic construct
  REGION 1..9: note = Description of Artificial Sequence: Synthetic peptide
KELYPSASL

SEQ ID NO: 19827 - protein, 9 aa, synthetic construct
  REGION 1..9: note = Description of Artificial Sequence: Synthetic peptide
NETVNITCF

SEQ ID NO: 19828 - protein, 9 aa, synthetic construct
  REGION 1..9: note = Description of Artificial Sequence: Synthetic peptide
KELYPLTSL

SEQ ID NO: 19829 - protein, 9 aa, synthetic construct
  REGION 1..9: note = Description of Artificial Sequence: Synthetic peptide
GTQEIKSLY

SEQ ID NO: 19830 - protein, 10 aa, synthetic construct
  REGION 1..10: note = Description of Artificial Sequence: Synthetic peptide
KYNSQVSHNY

SEQ ID NO: 19831 - protein, 9 aa, synthetic construct
  REGION 1..9: note = Description of Artificial Sequence: Synthetic peptide
LQKGLGISY

SEQ ID NO: 19832 - protein, 9 aa, synthetic construct
  REGION 1..9: note = Description of Artificial Sequence: Synthetic peptide
YNSQVSHNY

SEQ ID NO: 19833 - protein, 11 aa, synthetic construct
  REGION 1..11: note = Description of Artificial Sequence: Synthetic peptide
QTGTEEIKSLY

SEQ ID NO: 19834 - protein, 9 aa, synthetic construct
  REGION 1..9: note = Description of Artificial Sequence: Synthetic peptide
GTEEIKSLY

SEQ ID NO: 19835 - protein, 10 aa, synthetic construct
  REGION 1..10: note = Description of Artificial Sequence: Synthetic peptide
VSIDNSNSSY

SEQ ID NO: 19836 - protein, 9 aa, synthetic construct
  REGION 1..9: note = Description of Artificial Sequence: Synthetic peptide
TVLDVGDAY

SEQ ID NO: 19837 - protein, 9 aa, synthetic construct
  REGION 1..9: note = Description of Artificial Sequence: Synthetic peptide
KAQEEHERY

SEQ ID NO: 19838 - protein, 10 aa, synthetic construct
  REGION 1..10: note = Description of Artificial Sequence: Synthetic peptide
ILKEPVHGVY

SEQ ID NO: 19839 - protein, 9 aa, synthetic construct
  REGION 1..9: note = Description of Artificial Sequence: Synthetic peptide
RAQEEHERY

SEQ ID NO: 19840 - protein, 11 aa, synthetic construct
  REGION 1..11: note = Description of Artificial Sequence: Synthetic peptide
QTGTQEIKSLY

SEQ ID NO: 19841 - protein, 10 aa, synthetic construct
  REGION 1..10: note = Description of Artificial Sequence: Synthetic peptide
FLQKGLGISY

SEQ ID NO: 19842 - protein, 11 aa, synthetic construct
  REGION 1..11: note = Description of Artificial Sequence: Synthetic peptide
VVPIDSNNKNY

SEQ ID NO: 19843 - protein, 10 aa, synthetic construct
  REGION 1..10: note = Description of Artificial Sequence: Synthetic peptide
KDNSQVSQNY

SEQ ID NO: 19844 - protein, 9 aa, synthetic construct
  REGION 1..9: note = Description of Artificial Sequence: Synthetic peptide
GTQEIKSLY

SEQ ID NO: 19845 - protein, 9 aa, synthetic construct
  REGION 1..9: note = Description of Artificial Sequence: Synthetic peptide
LQKGLGISY

SEQ ID NO: 19846 - protein, 9 aa, synthetic construct
  REGION 1..9: note = Description of Artificial Sequence: Synthetic peptide
GTEEIKSLY

SEQ ID NO: 19847 - protein, 10 aa, synthetic construct
  REGION 1..10: note = Description of Artificial Sequence: Synthetic peptide
KYNSQVSHNY

SEQ ID NO: 19848 - protein, 9 aa, synthetic construct
  REGION 1..9: note = Description of Artificial Sequence: Synthetic peptide
YNSQVSHNY

SEQ ID NO: 19849 - protein, 9 aa, synthetic construct
  REGION 1..9: note = Description of Artificial Sequence: Synthetic peptide
VVGDIRRAY

SEQ ID NO: 19850 - protein, 11 aa, synthetic construct
  REGION 1..11: note = Description of Artificial Sequence: Synthetic peptide
QTGTEEIKSLY

SEQ ID NO: 19851 - protein, 11 aa, synthetic construct
  REGION 1..11: note = Description of Artificial Sequence: Synthetic peptide
QVNNTNIIMQR

SEQ ID NO: 19852 - protein, 9 aa, synthetic construct
  REGION 1..9: note = Description of Artificial Sequence: Synthetic peptide
KTVEIVCYR

SEQ ID NO: 19853 - protein, 10 aa, synthetic construct
  REGION 1..10: note = Description of Artificial Sequence: Synthetic peptide
VTNTNIMMQR

SEQ ID NO: 19854 - protein, 9 aa, synthetic construct
  REGION 1..9: note = Description of Artificial Sequence: Synthetic peptide
KSWPQVRER

SEQ ID NO: 19855 - protein, 9 aa, synthetic construct
  REGION 1..9: note = Description of Artificial Sequence: Synthetic peptide
ATLYCVHQR

SEQ ID NO: 19856 - protein, 9 aa, synthetic construct
  REGION 1..9: note = Description of Artificial Sequence: Synthetic peptide
RQIVRMWQR

SEQ ID NO: 19857 - protein, 8 aa, synthetic construct
  REGION 1..8: note = Description of Artificial Sequence: Synthetic peptide
NTNIIMQR

SEQ ID NO: 19858 - protein, 11 aa, synthetic construct
  REGION 1..11: note = Description of Artificial Sequence: Synthetic peptide
TVNDIQKLVGK

SEQ ID NO: 19859 - protein, 9 aa, synthetic construct
  REGION 1..9: note = Description of Artificial Sequence: Synthetic peptide
KGLGISYGR

SEQ ID NO: 19860 - protein, 11 aa, synthetic construct
  REGION 1..11: note = Description of Artificial Sequence: Synthetic peptide
KGRPGNFLQSR

SEQ ID NO: 19861 - protein, 11 aa, synthetic construct
  REGION 1..11: note = Description of Artificial Sequence: Synthetic peptide
GSKSEGDIIIR

SEQ ID NO: 19862 - protein, 9 aa, synthetic construct
  REGION 1..9: note = Description of Artificial Sequence: Synthetic peptide
CTRPANNTR

SEQ ID NO: 19863 - protein, 11 aa, synthetic construct
  REGION 1..11: note = Description of Artificial Sequence: Synthetic peptide
RTNSPTSRKLR

SEQ ID NO: 19864 - protein, 11 aa, synthetic construct
  REGION 1..11: note = Description of Artificial Sequence: Synthetic peptide
QVTNTNIMMQR

SEQ ID NO: 19865 - protein, 9 aa, synthetic construct
  REGION 1..9: note = Description of Artificial Sequence: Synthetic peptide
KGLGISHGR

SEQ ID NO: 19866 - protein, 9 aa, synthetic construct
  REGION 1..9: note = Description of Artificial Sequence: Synthetic peptide
SIVGWPQVR

SEQ ID NO: 19867 - protein, 11 aa, synthetic construct
  REGION 1..11: note = Description of Artificial Sequence: Synthetic peptide
VGPTPVNIIGR

SEQ ID NO: 19868 - protein, 8 aa, synthetic construct
  REGION 1..8: note = Description of Artificial Sequence: Synthetic peptide
NTNIMMQR

SEQ ID NO: 19869 - protein, 11 aa, synthetic construct
  REGION 1..11: note = Description of Artificial Sequence: Synthetic peptide
RQNQIDSISER

SEQ ID NO: 19870 - protein, 9 aa, synthetic construct
  REGION 1..9: note = Description of Artificial Sequence: Synthetic peptide
IVNRVRQGY

SEQ ID NO: 19871 - protein, 9 aa, synthetic construct
  REGION 1..9: note = Description of Artificial Sequence: Synthetic peptide
VVGDIRRAY

SEQ ID NO: 19872 - protein, 9 aa, synthetic construct
  REGION 1..9: note = Description of Artificial Sequence: Synthetic peptide
TVMETQRSW

SEQ ID NO: 19873 - protein, 9 aa, synthetic construct
  REGION 1..9: note = Description of Artificial Sequence: Synthetic peptide
IIANVTENF

SEQ ID NO: 19874 - protein, 9 aa, synthetic construct
  REGION 1..9: note = Description of Artificial Sequence: Synthetic peptide
KVMETQMNW

SEQ ID NO: 19875 - protein, 9 aa, synthetic construct
  REGION 1..9: note = Description of Artificial Sequence: Synthetic peptide
NNTNIIMQR

SEQ ID NO: 19876 - protein, 11 aa, synthetic construct
  REGION 1..11: note = Description of Artificial Sequence: Synthetic peptide
ETFYVDGASNR

SEQ ID NO: 19877 - protein, 11 aa, synthetic construct
  REGION 1..11: note = Description of Artificial Sequence: Synthetic peptide
ETFYVDGAANR

SEQ ID NO: 19878 - protein, 10 aa, synthetic construct
  REGION 1..10: note = Description of Artificial Sequence: Synthetic peptide
DNSDIKVVPR

SEQ ID NO: 19879 - protein, 11 aa, synthetic construct
  REGION 1..11: note = Description of Artificial Sequence: Synthetic peptide
QVNNTNIIMQR

SEQ ID NO: 19880 - protein, 9 aa, synthetic construct
  REGION 1..9: note = Description of Artificial Sequence: Synthetic peptide
TNTNIMMQR

SEQ ID NO: 19881 - protein, 10 aa, synthetic construct
  REGION 1..10: note = Description of Artificial Sequence: Synthetic peptide
DNSEIKVVPR

SEQ ID NO: 19882 - protein, 11 aa, synthetic construct
  REGION 1..11: note = Description of Artificial Sequence: Synthetic peptide
EARELSPEQTR

SEQ ID NO: 19883 - protein, 10 aa, synthetic construct
  REGION 1..10: note = Description of Artificial Sequence: Synthetic peptide
VNNTNIIMQR

SEQ ID NO: 19884 - protein, 11 aa, synthetic construct
  REGION 1..11: note = Description of Artificial Sequence: Synthetic peptide
DVKQLTEAVQK

SEQ ID NO: 19885 - protein, 10 aa, synthetic construct
  REGION 1..10: note = Description of Artificial Sequence: Synthetic peptide
DIIATDIQTR

SEQ ID NO: 19886 - protein, 11 aa, synthetic construct
  REGION 1..11: note = Description of Artificial Sequence: Synthetic peptide
EARELSPEQAR

SEQ ID NO: 19887 - protein, 9 aa, synthetic construct
  REGION 1..9: note = Description of Artificial Sequence: Synthetic peptide
DAKAYSTEK

SEQ ID NO: 19888 - protein, 11 aa, synthetic construct
  REGION 1..11: note = Description of Artificial Sequence: Synthetic peptide
ESLAFQQGEAR

SEQ ID NO: 19889 - protein, 8 aa, synthetic construct
  REGION 1..8: note = Description of Artificial Sequence: Synthetic peptide
DFILIVAR

SEQ ID NO: 19890 - protein, 8 aa, synthetic construct
  REGION 1..8: note = Description of Artificial Sequence: Synthetic peptide
NTNIIMQR

SEQ ID NO: 19891 - protein, 9 aa, synthetic construct
  REGION 1..9: note = Description of Artificial Sequence: Synthetic peptide
QARVLAVER

SEQ ID NO: 19892 - protein, 11 aa, synthetic construct
  REGION 1..11: note = Description of Artificial Sequence: Synthetic peptide
DTEELADLVER

SEQ ID NO: 19893 - protein, 8 aa, synthetic construct
  REGION 1..8: note = Description of Artificial Sequence: Synthetic peptide
DFVLIVAR

SEQ ID NO: 19894 - protein, 9 aa, synthetic construct
  REGION 1..9: note = Description of Artificial Sequence: Synthetic peptide
NITGLILTR

SEQ ID NO: 19895 - protein, 9 aa, synthetic construct
  REGION 1..9: note = Description of Artificial Sequence: Synthetic peptide
ETVNITCFR

SEQ ID NO: 19896 - protein, 9 aa, synthetic construct
  REGION 1..9: note = Description of Artificial Sequence: Synthetic peptide
QARILAVER

SEQ ID NO: 19897 - protein, 9 aa, synthetic construct
  REGION 1..9: note = Description of Artificial Sequence: Synthetic peptide
DAKSYSTEK

SEQ ID NO: 19898 - protein, 9 aa, synthetic construct
  REGION 1..9: note = Description of Artificial Sequence: Synthetic peptide
DTWEKIRLR

SEQ ID NO: 19899 - protein, 11 aa, synthetic construct
  REGION 1..11: note = Description of Artificial Sequence: Synthetic peptide
ETFYVDGASNR

SEQ ID NO: 19900 - protein, 11 aa, synthetic construct
  REGION 1..11: note = Description of Artificial Sequence: Synthetic peptide
ETFYVDGAANR

SEQ ID NO: 19901 - protein, 9 aa, synthetic construct
  REGION 1..9: note = Description of Artificial Sequence: Synthetic peptide
NNTNIIMQR

SEQ ID NO: 19902 - protein, 9 aa, synthetic construct
  REGION 1..9: note = Description of Artificial Sequence: Synthetic peptide
TNTNIMMQR

SEQ ID NO: 19903 - protein, 9 aa, synthetic construct
  REGION 1..9: note = Description of Artificial Sequence: Synthetic peptide
ETVNITCFR

SEQ ID NO: 19904 - protein, 11 aa, synthetic construct
  REGION 1..11: note = Description of Artificial Sequence: Synthetic peptide
QVNNTNIIMQR

SEQ ID NO: 19905 - protein, 11 aa, synthetic construct
  REGION 1..11: note = Description of Artificial Sequence: Synthetic peptide
EARELSPEQTR

SEQ ID NO: 19906 - protein, 8 aa, synthetic construct
  REGION 1..8: note = Description of Artificial Sequence: Synthetic peptide
NTNIIMQR

SEQ ID NO: 19907 - protein, 10 aa, synthetic construct
  REGION 1..10: note = Description of Artificial Sequence: Synthetic peptide
DNSDIKVVPR

SEQ ID NO: 19908 - protein, 11 aa, synthetic construct
  REGION 1..11: note = Description of Artificial Sequence: Synthetic peptide
EARELSPEQAR

SEQ ID NO: 19909 - protein, 9 aa, synthetic construct
  REGION 1..9: note = Description of Artificial Sequence: Synthetic peptide
QARVLAVER

SEQ ID NO: 19910 - protein, 9 aa, synthetic construct
  REGION 1..9: note = Description of Artificial Sequence: Synthetic peptide
FYVDGASNR

SEQ ID NO: 19911 - protein, 8 aa, synthetic construct
  REGION 1..8: note = Description of Artificial Sequence: Synthetic peptide
NTNIMMQR

SEQ ID NO: 19912 - protein, 9 aa, synthetic construct
  REGION 1..9: note = Description of Artificial Sequence: Synthetic peptide
QARILAVER

SEQ ID NO: 19913 - protein, 9 aa, synthetic construct
  REGION 1..9: note = Description of Artificial Sequence: Synthetic peptide
FYVDGAANR

SEQ ID NO: 19914 - protein, 9 aa, synthetic construct
  REGION 1..9: note = Description of Artificial Sequence: Synthetic peptide
QTVEINCTR

SEQ ID NO: 19915 - protein, 9 aa, synthetic construct
  REGION 1..9: note = Description of Artificial Sequence: Synthetic peptide
EYRKVLRQR

SEQ ID NO: 19916 - protein, 11 aa, synthetic construct
  REGION 1..11: note = Description of Artificial Sequence: Synthetic peptide
TVNDIQKLVGK

SEQ ID NO: 19917 - protein, 11 aa, synthetic construct
  REGION 1..11: note = Description of Artificial Sequence: Synthetic peptide
ESLAFQQGEAR

SEQ ID NO: 19918 - protein, 9 aa, synthetic construct
  REGION 1..9: note = Description of Artificial Sequence: Synthetic peptide
ETHCNISER

SEQ ID NO: 19919 - protein, 9 aa, synthetic construct
  REGION 1..9: note = Description of Artificial Sequence: Synthetic peptide
ESNSSETFR

SEQ ID NO: 19920 - protein, 10 aa, synthetic construct
  REGION 1..10: note = Description of Artificial Sequence: Synthetic peptide
DNSEIKVVPR

SEQ ID NO: 19921 - protein, 9 aa, synthetic construct
  REGION 1..9: note = Description of Artificial Sequence: Synthetic peptide
NSEIKVVPR

SEQ ID NO: 19922 - protein, 9 aa, synthetic construct
  REGION 1..9: note = Description of Artificial Sequence: Synthetic peptide
NSDIKVVPR

SEQ ID NO: 19923 - protein, 9 aa, synthetic construct
  REGION 1..9: note = Description of Artificial Sequence: Synthetic peptide
EYKKLLRQR

SEQ ID NO: 19924 - protein, 10 aa, synthetic construct
  REGION 1..10: note = Description of Artificial Sequence: Synthetic peptide
VTNTNIMMQR

SEQ ID NO: 19925 - protein, 9 aa, synthetic construct
  REGION 1..9: note = Description of Artificial Sequence: Synthetic peptide
TALIKPKKR

SEQ ID NO: 19926 - protein, 10 aa, synthetic construct
  REGION 1..10: note = Description of Artificial Sequence: Synthetic peptide
ELKKIIGQVR

SEQ ID NO: 19927 - protein, 10 aa, synthetic construct
  REGION 1..10: note = Description of Artificial Sequence: Synthetic peptide
VNNTNIIMQR

SEQ ID NO: 19928 - protein, 9 aa, synthetic construct
  REGION 1..9: note = Description of Artificial Sequence: Synthetic peptide
NITGLILTR

SEQ ID NO: 19929 - protein, 8 aa, synthetic construct
  REGION 1..8: note = Description of Artificial Sequence: Synthetic peptide
DFILIVAR

SEQ ID NO: 19930 - protein, 10 aa, synthetic construct
  REGION 1..10: note = Description of Artificial Sequence: Synthetic peptide
DIIATDIQTR

SEQ ID NO: 19931 - protein, 10 aa, synthetic construct
  REGION 1..10: note = Description of Artificial Sequence: Synthetic peptide
ETFRPTGGNM

SEQ ID NO: 19932 - protein, 9 aa, synthetic construct
  REGION 1..9: note = Description of Artificial Sequence: Synthetic peptide
FNLPPIVAK

SEQ ID NO: 19933 - protein, 10 aa, synthetic construct
  REGION 1..10: note = Description of Artificial Sequence: Synthetic peptide
SNITGLILTR

SEQ ID NO: 19934 - protein, 11 aa, synthetic construct
  REGION 1..11: note = Description of Artificial Sequence: Synthetic peptide
ETFYVDGASNR

SEQ ID NO: 19935 - protein, 11 aa, synthetic construct
  REGION 1..11: note = Description of Artificial Sequence: Synthetic peptide
ETFYVDGAANR

SEQ ID NO: 19936 - protein, 9 aa, synthetic construct
  REGION 1..9: note = Description of Artificial Sequence: Synthetic peptide
NNTNIIMQR

SEQ ID NO: 19937 - protein, 11 aa, synthetic construct
  REGION 1..11: note = Description of Artificial Sequence: Synthetic peptide
QVNNTNIIMQR

SEQ ID NO: 19938 - protein, 10 aa, synthetic construct
  REGION 1..10: note = Description of Artificial Sequence: Synthetic peptide
DIIATDIQTR

SEQ ID NO: 19939 - protein, 9 aa, synthetic construct
  REGION 1..9: note = Description of Artificial Sequence: Synthetic peptide
QTVEINCTR

SEQ ID NO: 19940 - protein, 9 aa, synthetic construct
  REGION 1..9: note = Description of Artificial Sequence: Synthetic peptide
ETVNITCFR

SEQ ID NO: 19941 - protein, 10 aa, synthetic construct
  REGION 1..10: note = Description of Artificial Sequence: Synthetic peptide
DNSDIKVVPR

SEQ ID NO: 19942 - protein, 9 aa, synthetic construct
  REGION 1..9: note = Description of Artificial Sequence: Synthetic peptide
NITGLILTR

SEQ ID NO: 19943 - protein, 11 aa, synthetic construct
  REGION 1..11: note = Description of Artificial Sequence: Synthetic peptide
QVTNTNIMMQR

SEQ ID NO: 19944 - protein, 9 aa, synthetic construct
  REGION 1..9: note = Description of Artificial Sequence: Synthetic peptide
TNTNIMMQR

SEQ ID NO: 19945 - protein, 11 aa, synthetic construct
  REGION 1..11: note = Description of Artificial Sequence: Synthetic peptide
ETFRPTGGNMK

SEQ ID NO: 19946 - protein, 11 aa, synthetic construct
  REGION 1..11: note = Description of Artificial Sequence: Synthetic peptide
TVNDIQKLVGK

SEQ ID NO: 19947 - protein, 10 aa, synthetic construct
  REGION 1..10: note = Description of Artificial Sequence: Synthetic peptide
ATGAVIGNIR

SEQ ID NO: 19948 - protein, 10 aa, synthetic construct
  REGION 1..10: note = Description of Artificial Sequence: Synthetic peptide
TSNNSTEIFR

SEQ ID NO: 19949 - protein, 11 aa, synthetic construct
  REGION 1..11: note = Description of Artificial Sequence: Synthetic peptide
ETFRPTGGDMK

SEQ ID NO: 19950 - protein, 10 aa, synthetic construct
  REGION 1..10: note = Description of Artificial Sequence: Synthetic peptide
DNSEIKVVPR

SEQ ID NO: 19951 - protein, 10 aa, synthetic construct
  REGION 1..10: note = Description of Artificial Sequence: Synthetic peptide
VTNTNIMMQR

SEQ ID NO: 19952 - protein, 11 aa, synthetic construct
  REGION 1..11: note = Description of Artificial Sequence: Synthetic peptide
TAIAVAAGTDR

SEQ ID NO: 19953 - protein, 10 aa, synthetic construct
  REGION 1..10: note = Description of Artificial Sequence: Synthetic peptide
ATGEIIGNIR

SEQ ID NO: 19954 - protein, 9 aa, synthetic construct
  REGION 1..9: note = Description of Artificial Sequence: Synthetic peptide
TGAVIGNIR

SEQ ID NO: 19955 - protein, 9 aa, synthetic construct
  REGION 1..9: note = Description of Artificial Sequence: Synthetic peptide
NSEIKVVPR

SEQ ID NO: 19956 - protein, 10 aa, synthetic construct
  REGION 1..10: note = Description of Artificial Sequence: Synthetic peptide
EVNIVTDSQY

SEQ ID NO: 19957 - protein, 9 aa, synthetic construct
  REGION 1..9: note = Description of Artificial Sequence: Synthetic peptide
EPLGVAPTR

SEQ ID NO: 19958 - protein, 11 aa, synthetic construct
  REGION 1..11: note = Description of Artificial Sequence: Synthetic peptide
EIEPLGVAPTR

SEQ ID NO: 19959 - protein, 9 aa, synthetic construct
  REGION 1..9: note = Description of Artificial Sequence: Synthetic peptide
NSDIKVVPR

SEQ ID NO: 19960 - protein, 11 aa, synthetic construct
  REGION 1..11: note = Description of Artificial Sequence: Synthetic peptide
STSNNSTEIFR

SEQ ID NO: 19961 - protein, 10 aa, synthetic construct
  REGION 1..10: note = Description of Artificial Sequence: Synthetic peptide
ASITLTVQVR

SEQ ID NO: 19962 - protein, 10 aa, synthetic construct
  REGION 1..10: note = Description of Artificial Sequence: Synthetic peptide
SIAEGDIIIR

SEQ ID NO: 19963 - protein, 11 aa, synthetic construct
  REGION 1..11: note = Description of Artificial Sequence: Synthetic peptide
DVKQLTEAVQK

SEQ ID NO: 19964 - protein, 9 aa, synthetic construct
  REGION 1..9: note = Description of Artificial Sequence: Synthetic peptide
SIALTVQAR

SEQ ID NO: 19965 - protein, 8 aa, synthetic construct
  REGION 1..8: note = Description of Artificial Sequence: Synthetic peptide
NTNIIMQR

SEQ ID NO: 19966 - protein, 10 aa, synthetic construct
  REGION 1..10: note = Description of Artificial Sequence: Synthetic peptide
DCFSDSAIRK

SEQ ID NO: 19967 - protein, 9 aa, synthetic construct
  REGION 1..9: note = Description of Artificial Sequence: Synthetic peptide
FAVLAIVNR

SEQ ID NO: 19968 - protein, 9 aa, synthetic construct
  REGION 1..9: note = Description of Artificial Sequence: Synthetic peptide
IIATDIQTR

SEQ ID NO: 19969 - protein, 11 aa, synthetic construct
  REGION 1..11: note = Description of Artificial Sequence: Synthetic peptide
EIFRPTGGDMK

SEQ ID NO: 19970 - protein, 10 aa, synthetic construct
  REGION 1..10: note = Description of Artificial Sequence: Synthetic peptide
VPVDPGEVER

SEQ ID NO: 19971 - protein, 10 aa, synthetic construct
  REGION 1..10: note = Description of Artificial Sequence: Synthetic peptide
DVVPIDSNNK

SEQ ID NO: 19972 - protein, 9 aa, synthetic construct
  REGION 1..9: note = Description of Artificial Sequence: Synthetic peptide
ITTEIGDRR

SEQ ID NO: 19973 - protein, 8 aa, synthetic construct
  REGION 1..8: note = Description of Artificial Sequence: Synthetic peptide
TDIVPLTR

SEQ ID NO: 19974 - protein, 9 aa, synthetic construct
  REGION 1..9: note = Description of Artificial Sequence: Synthetic peptide
NITGLLLTR

SEQ ID NO: 19975 - protein, 10 aa, synthetic construct
  REGION 1..10: note = Description of Artificial Sequence: Synthetic peptide
ASIALTVQAR

SEQ ID NO: 19976 - protein, 9 aa, synthetic construct
  REGION 1..9: note = Description of Artificial Sequence: Synthetic peptide
SITLTVQVR

SEQ ID NO: 19977 - protein, 11 aa, synthetic construct
  REGION 1..11: note = Description of Artificial Sequence: Synthetic peptide
TAIAVAEGTDR

SEQ ID NO: 19978 - protein, 11 aa, synthetic construct
  REGION 1..11: note = Description of Artificial Sequence: Synthetic peptide
VVTLTDTTNQK

SEQ ID NO: 19979 - protein, 10 aa, synthetic construct
  REGION 1..10: note = Description of Artificial Sequence: Synthetic peptide
SNITGLILTR

SEQ ID NO: 19980 - protein, 11 aa, synthetic construct
  REGION 1..11: note = Description of Artificial Sequence: Synthetic peptide
VGPTPVNIIGR

SEQ ID NO: 19981 - protein, 10 aa, synthetic construct
  REGION 1..10: note = Description of Artificial Sequence: Synthetic peptide
ESWTVNDIQK

SEQ ID NO: 19982 - protein, 11 aa, synthetic construct
  REGION 1..11: note = Description of Artificial Sequence: Synthetic peptide
EIEPLGVAPTK

SEQ ID NO: 19983 - protein, 11 aa, synthetic construct
  REGION 1..11: note = Description of Artificial Sequence: Synthetic peptide
IGPTPVNIIGR

SEQ ID NO: 19984 - protein, 11 aa, synthetic construct
  REGION 1..11: note = Description of Artificial Sequence: Synthetic peptide
DTEELADLVER

SEQ ID NO: 19985 - protein, 10 aa, synthetic construct
  REGION 1..10: note = Description of Artificial Sequence: Synthetic peptide
DCFSEAAIRK

SEQ ID NO: 19986 - protein, 9 aa, synthetic construct
  REGION 1..9: note = Description of Artificial Sequence: Synthetic peptide
SRIGIIPQR

SEQ ID NO: 19987 - protein, 9 aa, synthetic construct
  REGION 1..9: note = Description of Artificial Sequence: Synthetic peptide
ETAFFILKL

SEQ ID NO: 19988 - protein, 9 aa, synthetic construct
  REGION 1..9: note = Description of Artificial Sequence: Synthetic peptide
EAAFFILKL

SEQ ID NO: 19989 - protein, 9 aa, synthetic construct
  REGION 1..9: note = Description of Artificial Sequence: Synthetic peptide
STVTINETV

SEQ ID NO: 19990 - protein, 9 aa, synthetic construct
  REGION 1..9: note = Description of Artificial Sequence: Synthetic peptide
ETVTLPCKI

SEQ ID NO: 19991 - protein, 9 aa, synthetic construct
  REGION 1..9: note = Description of Artificial Sequence: Synthetic peptide
QLTEVVQKI

SEQ ID NO: 19992 - protein, 9 aa, synthetic construct
  REGION 1..9: note = Description of Artificial Sequence: Synthetic peptide
QLAEVVQKI

SEQ ID NO: 19993 - protein, 9 aa, synthetic construct
  REGION 1..9: note = Description of Artificial Sequence: Synthetic peptide
TVNDIQKLV

SEQ ID NO: 19994 - protein, 9 aa, synthetic construct
  REGION 1..9: note = Description of Artificial Sequence: Synthetic peptide
AVFAIVNRV

SEQ ID NO: 19995 - protein, 9 aa, synthetic construct
  REGION 1..9: note = Description of Artificial Sequence: Synthetic peptide
TTSNLQEQI

SEQ ID NO: 19996 - protein, 9 aa, synthetic construct
  REGION 1..9: note = Description of Artificial Sequence: Synthetic peptide
ESFGFGEKI

SEQ ID NO: 19997 - protein, 9 aa, synthetic construct
  REGION 1..9: note = Description of Artificial Sequence: Synthetic peptide
IVAVIIAVI

SEQ ID NO: 19998 - protein, 9 aa, synthetic construct
  REGION 1..9: note = Description of Artificial Sequence: Synthetic peptide
DIAAIVGLI

SEQ ID NO: 19999 - protein, 9 aa, synthetic construct
  REGION 1..9: note = Description of Artificial Sequence: Synthetic peptide
NSSYILINC

SEQ ID NO: 20000 - protein, 9 aa, synthetic construct
  REGION 1..9: note = Description of Artificial Sequence: Synthetic peptide
EIKSLYNTV

SEQ ID NO: 20001 - protein, 9 aa, synthetic construct
  REGION 1..9: note = Description of Artificial Sequence: Synthetic peptide
ETVNITCFR

SEQ ID NO: 20002 - protein, 11 aa, synthetic construct
  REGION 1..11: note = Description of Artificial Sequence: Synthetic peptide
ETFYVDGASNR

SEQ ID NO: 20003 - protein, 9 aa, synthetic construct
  REGION 1..9: note = Description of Artificial Sequence: Synthetic peptide
YTAFTIPSI

SEQ ID NO: 20004 - protein, 9 aa, synthetic construct
  REGION 1..9: note = Description of Artificial Sequence: Synthetic peptide
NTVATLYCV

SEQ ID NO: 20005 - protein, 10 aa, synthetic construct
  REGION 1..10: note = Description of Artificial Sequence: Synthetic peptide
KVVEIEPLGV

SEQ ID NO: 20006 - protein, 9 aa, synthetic construct
  REGION 1..9: note = Description of Artificial Sequence: Synthetic peptide
GAASITLTV

SEQ ID NO: 20007 - protein, 9 aa, synthetic construct
  REGION 1..9: note = Description of Artificial Sequence: Synthetic peptide
TTSTLQEQI

SEQ ID NO: 20008 - protein, 9 aa, synthetic construct
  REGION 1..9: note = Description of Artificial Sequence: Synthetic peptide
DIAGTTSNL

SEQ ID NO: 20009 - protein, 9 aa, synthetic construct
  REGION 1..9: note = Description of Artificial Sequence: Synthetic peptide
DTMEALEKI

SEQ ID NO: 20010 - protein, 9 aa, synthetic construct
  REGION 1..9: note = Description of Artificial Sequence: Synthetic peptide
TVSSNFPQI

SEQ ID NO: 20011 - protein, 9 aa, synthetic construct
  REGION 1..9: note = Description of Artificial Sequence: Synthetic peptide
ATGEIIGNI

SEQ ID NO: 20012 - protein, 9 aa, synthetic construct
  REGION 1..9: note = Description of Artificial Sequence: Synthetic peptide
EVIPMFSAL

SEQ ID NO: 20013 - protein, 11 aa, synthetic construct
  REGION 1..11: note = Description of Artificial Sequence: Synthetic peptide
EVIPAETGQEA

SEQ ID NO: 20014 - protein, 10 aa, synthetic construct
  REGION 1..10: note = Description of Artificial Sequence: Synthetic peptide
NTIGGHQAAM

SEQ ID NO: 20015 - protein, 10 aa, synthetic construct
  REGION 1..10: note = Description of Artificial Sequence: Synthetic peptide
ETFRPTGGNM

SEQ ID NO: 20016 - protein, 9 aa, synthetic construct
  REGION 1..9: note = Description of Artificial Sequence: Synthetic peptide
GAASIALTV

SEQ ID NO: 20017 - protein, 11 aa, synthetic construct
  REGION 1..11: note = Description of Artificial Sequence: Synthetic peptide
ETFYVDGAANR

SEQ ID NO: 20018 - protein, 9 aa, synthetic construct
  REGION 1..9: note = Description of Artificial Sequence: Synthetic peptide
DVKQLTEAV

SEQ ID NO: 20019 - protein, 9 aa, synthetic construct
  REGION 1..9: note = Description of Artificial Sequence: Synthetic peptide
NATAIAVAA

SEQ ID NO: 20020 - protein, 9 aa, synthetic construct
  REGION 1..9: note = Description of Artificial Sequence: Synthetic peptide
NAKTIIVQL

SEQ ID NO: 20021 - protein, 11 aa, synthetic construct
  REGION 1..11: note = Description of Artificial Sequence: Synthetic peptide
ENSTVTINETV

SEQ ID NO: 20022 - protein, 9 aa, synthetic construct
  REGION 1..9: note = Description of Artificial Sequence: Synthetic peptide
SAKELIAEV

SEQ ID NO: 20023 - protein, 9 aa, synthetic construct
  REGION 1..9: note = Description of Artificial Sequence: Synthetic peptide
MTGNPPIPV

SEQ ID NO: 20024 - protein, 9 aa, synthetic construct
  REGION 1..9: note = Description of Artificial Sequence: Synthetic peptide
QNYPIVQNL

SEQ ID NO: 20025 - protein, 9 aa, synthetic construct
  REGION 1..9: note = Description of Artificial Sequence: Synthetic peptide
NAKNIIVQL

SEQ ID NO: 20026 - protein, 9 aa, synthetic construct
  REGION 1..9: note = Description of Artificial Sequence: Synthetic peptide
AVLAIVNRV

SEQ ID NO: 20027 - protein, 9 aa, synthetic construct
  REGION 1..9: note = Description of Artificial Sequence: Synthetic peptide
EIMTHTFNC

SEQ ID NO: 20028 - protein, 9 aa, synthetic construct
  REGION 1..9: note = Description of Artificial Sequence: Synthetic peptide
IPIGPGQVL

SEQ ID NO: 20029 - protein, 9 aa, synthetic construct
  REGION 1..9: note = Description of Artificial Sequence: Synthetic peptide
YPSASLKSL

SEQ ID NO: 20030 - protein, 9 aa, synthetic construct
  REGION 1..9: note = Description of Artificial Sequence: Synthetic peptide
VPLTREAEL

SEQ ID NO: 20031 - protein, 10 aa, synthetic construct
  REGION 1..10: note = Description of Artificial Sequence: Synthetic peptide
SPSPTITNPL

SEQ ID NO: 20032 - protein, 10 aa, synthetic construct
  REGION 1..10: note = Description of Artificial Sequence: Synthetic peptide
RPAEPVPLQL

SEQ ID NO: 20033 - protein, 8 aa, synthetic construct
  REGION 1..8: note = Description of Artificial Sequence: Synthetic peptide
TVRVGGQL

SEQ ID NO: 20034 - protein, 8 aa, synthetic construct
  REGION 1..8: note = Description of Artificial Sequence: Synthetic peptide
KPVVSTQL

SEQ ID NO: 20035 - protein, 10 aa, synthetic construct
  REGION 1..10: note = Description of Artificial Sequence: Synthetic peptide
SPIETVPVKL

SEQ ID NO: 20036 - protein, 9 aa, synthetic construct
  REGION 1..9: note = Description of Artificial Sequence: Synthetic peptide
SPAIFQCSM

SEQ ID NO: 20037 - protein, 9 aa, synthetic construct
  REGION 1..9: note = Description of Artificial Sequence: Synthetic peptide
TEAVQKIAL

SEQ ID NO: 20038 - protein, 9 aa, synthetic construct
  REGION 1..9: note = Description of Artificial Sequence: Synthetic peptide
TPQDLNTML

SEQ ID NO: 20039 - protein, 8 aa, synthetic construct
  REGION 1..8: note = Description of Artificial Sequence: Synthetic peptide
EAVQKIAL

SEQ ID NO: 20040 - protein, 9 aa, synthetic construct
  REGION 1..9: note = Description of Artificial Sequence: Synthetic peptide
VPLTREAEL

SEQ ID NO: 20041 - protein, 8 aa, synthetic construct
  REGION 1..8: note = Description of Artificial Sequence: Synthetic peptide
EVVQKIAL

SEQ ID NO: 20042 - protein, 9 aa, synthetic construct
  REGION 1..9: note = Description of Artificial Sequence: Synthetic peptide
EAAIRKAIL

SEQ ID NO: 20043 - protein, 9 aa, synthetic construct
  REGION 1..9: note = Description of Artificial Sequence: Synthetic peptide
ELKNSAISL

SEQ ID NO: 20044 - protein, 9 aa, synthetic construct
  REGION 1..9: note = Description of Artificial Sequence: Synthetic peptide
SISERILSA

SEQ ID NO: 20045 - protein, 9 aa, synthetic construct
  REGION 1..9: note = Description of Artificial Sequence: Synthetic peptide
YPGIKVKQL

SEQ ID NO: 20046 - protein, 9 aa, synthetic construct
  REGION 1..9: note = Description of Artificial Sequence: Synthetic peptide
DVKQLTEAV

SEQ ID NO: 20047 - protein, 9 aa, synthetic construct
  REGION 1..9: note = Description of Artificial Sequence: Synthetic peptide
DSAIRKAIL

SEQ ID NO: 20048 - protein, 9 aa, synthetic construct
  REGION 1..9: note = Description of Artificial Sequence: Synthetic peptide
DPNPREITM

SEQ ID NO: 20049 - protein, 8 aa, synthetic construct
  REGION 1..8: note = Description of Artificial Sequence: Synthetic peptide
TTNQKTEL

SEQ ID NO: 20050 - protein, 9 aa, synthetic construct
  REGION 1..9: note = Description of Artificial Sequence: Synthetic peptide
QLQARILAV

SEQ ID NO: 20051 - protein, 8 aa, synthetic construct
  REGION 1..8: note = Description of Artificial Sequence: Synthetic peptide
HLKTAVQM

SEQ ID NO: 20052 - protein, 11 aa, synthetic construct
  REGION 1..11: note = Description of Artificial Sequence: Synthetic peptide
TQVDPGLADQL

SEQ ID NO: 20053 - protein, 9 aa, synthetic construct
  REGION 1..9: note = Description of Artificial Sequence: Synthetic peptide
AQTEEEVGF

SEQ ID NO: 20054 - protein, 9 aa, synthetic construct
  REGION 1..9: note = Description of Artificial Sequence: Synthetic peptide
QLTEVVQKI

SEQ ID NO: 20055 - protein, 9 aa, synthetic construct
  REGION 1..9: note = Description of Artificial Sequence: Synthetic peptide
GQGTVSSNF

SEQ ID NO: 20056 - protein, 10 aa, synthetic construct
  REGION 1..10: note = Description of Artificial Sequence: Synthetic peptide
RQLTEVVQKI

SEQ ID NO: 20057 - protein, 10 aa, synthetic construct
  REGION 1..10: note = Description of Artificial Sequence: Synthetic peptide
GTQGVGDPQI

SEQ ID NO: 20058 - protein, 9 aa, synthetic construct
  REGION 1..9: note = Description of Artificial Sequence: Synthetic peptide
QLAEVVQKI

SEQ ID NO: 20059 - protein, 10 aa, synthetic construct
  REGION 1..10: note = Description of Artificial Sequence: Synthetic peptide
HQDPIPGQPL

SEQ ID NO: 20060 - protein, 9 aa, synthetic construct
  REGION 1..9: note = Description of Artificial Sequence: Synthetic peptide
TQGVGDPQI

SEQ ID NO: 20061 - protein, 10 aa, synthetic construct
  REGION 1..10: note = Description of Artificial Sequence: Synthetic peptide
KQLTEAVQKI

SEQ ID NO: 20062 - protein, 10 aa, synthetic construct
  REGION 1..10: note = Description of Artificial Sequence: Synthetic peptide
KQLAEVVQKI

SEQ ID NO: 20063 - protein, 9 aa, synthetic construct
  REGION 1..9: note = Description of Artificial Sequence: Synthetic peptide
QLTEVVQKI

SEQ ID NO: 20064 - protein, 9 aa, synthetic construct
  REGION 1..9: note = Description of Artificial Sequence: Synthetic peptide
QLAEVVQKI

SEQ ID NO: 20065 - protein, 9 aa, synthetic construct
  REGION 1..9: note = Description of Artificial Sequence: Synthetic peptide
GAASIALTV

SEQ ID NO: 20066 - protein, 9 aa, synthetic construct
  REGION 1..9: note = Description of Artificial Sequence: Synthetic peptide
GAASITLTV

SEQ ID NO: 20067 - protein, 9 aa, synthetic construct
  REGION 1..9: note = Description of Artificial Sequence: Synthetic peptide
QLTEAVQKI

SEQ ID NO: 20068 - protein, 9 aa, synthetic construct
  REGION 1..9: note = Description of Artificial Sequence: Synthetic peptide
SQIYPGIKV

SEQ ID NO: 20069 - protein, 9 aa, synthetic construct
  REGION 1..9: note = Description of Artificial Sequence: Synthetic peptide
VQFNETVNI

SEQ ID NO: 20070 - protein, 9 aa, synthetic construct
  REGION 1..9: note = Description of Artificial Sequence: Synthetic peptide
GQVDCSPGI

SEQ ID NO: 20071 - protein, 9 aa, synthetic construct
  REGION 1..9: note = Description of Artificial Sequence: Synthetic peptide
VQLNQTVEI

SEQ ID NO: 20072 - protein, 9 aa, synthetic construct
  REGION 1..9: note = Description of Artificial Sequence: Synthetic peptide
GQAIYAPPI

SEQ ID NO: 20073 - protein, 9 aa, synthetic construct
  REGION 1..9: note = Description of Artificial Sequence: Synthetic peptide
AVLAIVNRV

SEQ ID NO: 20074 - protein, 9 aa, synthetic construct
  REGION 1..9: note = Description of Artificial Sequence: Synthetic peptide
ASITLTVQV

SEQ ID NO: 20075 - protein, 9 aa, synthetic construct
  REGION 1..9: note = Description of Artificial Sequence: Synthetic peptide
VQKIALESI

SEQ ID NO: 20076 - protein, 8 aa, synthetic construct
  REGION 1..8: note = Description of Artificial Sequence: Synthetic peptide
SQVTNTNI

SEQ ID NO: 20077 - protein, 9 aa, synthetic construct
  REGION 1..9: note = Description of Artificial Sequence: Synthetic peptide
QQHLLKLTV

SEQ ID NO: 20078 - protein, 9 aa, synthetic construct
  REGION 1..9: note = Description of Artificial Sequence: Synthetic peptide
AVFAIVNRV

SEQ ID NO: 20079 - protein, 9 aa, synthetic construct
  REGION 1..9: note = Description of Artificial Sequence: Synthetic peptide
VLAEAMSQV

SEQ ID NO: 20080 - protein, 10 aa, synthetic construct
  REGION 1..10: note = Description of Artificial Sequence: Synthetic peptide
KQLTEAVQKI

SEQ ID NO: 20081 - protein, 9 aa, synthetic construct
  REGION 1..9: note = Description of Artificial Sequence: Synthetic peptide
RIIEIVQGI

SEQ ID NO: 20082 - protein, 8 aa, synthetic construct
  REGION 1..8: note = Description of Artificial Sequence: Synthetic peptide
YQTGTEEI

SEQ ID NO: 20083 - protein, 9 aa, synthetic construct
  REGION 1..9: note = Description of Artificial Sequence: Synthetic peptide
VQLNKTVEI

SEQ ID NO: 20084 - protein, 10 aa, synthetic construct
  REGION 1..10: note = Description of Artificial Sequence: Synthetic peptide
KVVEIEPLGV

SEQ ID NO: 20085 - protein, 10 aa, synthetic construct
  REGION 1..10: note = Description of Artificial Sequence: Synthetic peptide
RQLTEVVQKI

SEQ ID NO: 20086 - protein, 9 aa, synthetic construct
  REGION 1..9: note = Description of Artificial Sequence: Synthetic peptide
SQVSQNYPI

SEQ ID NO: 20087 - protein, 8 aa, synthetic construct
  REGION 1..8: note = Description of Artificial Sequence: Synthetic peptide
LQTGTQEI

SEQ ID NO: 20088 - protein, 9 aa, synthetic construct
  REGION 1..9: note = Description of Artificial Sequence: Synthetic peptide
VQKIALEAI

SEQ ID NO: 20089 - protein, 10 aa, synthetic construct
  REGION 1..10: note = Description of Artificial Sequence: Synthetic peptide
KQLAEVVQKI

SEQ ID NO: 20090 - protein, 9 aa, synthetic construct
  REGION 1..9: note = Description of Artificial Sequence: Synthetic peptide
NQKTELQAI

SEQ ID NO: 20091 - protein, 9 aa, synthetic construct
  REGION 1..9: note = Description of Artificial Sequence: Synthetic peptide
ALQTGTQEI

SEQ ID NO: 20092 - protein, 10 aa, synthetic construct
  REGION 1..10: note = Description of Artificial Sequence: Synthetic peptide
RQYNEVPIEI

SEQ ID NO: 20093 - protein, 9 aa, synthetic construct
  REGION 1..9: note = Description of Artificial Sequence: Synthetic peptide
GSNFTSATV

SEQ ID NO: 20094 - protein, 9 aa, synthetic construct
  REGION 1..9: note = Description of Artificial Sequence: Synthetic peptide
DRYALNPGL

SEQ ID NO: 20095 - protein, 9 aa, synthetic construct
  REGION 1..9: note = Description of Artificial Sequence: Synthetic peptide
DRFALNPGL

SEQ ID NO: 20096 - protein, 9 aa, synthetic construct
  REGION 1..9: note = Description of Artificial Sequence: Synthetic peptide
NRVLGTVAA

SEQ ID NO: 20097 - protein, 9 aa, synthetic construct
  REGION 1..9: note = Description of Artificial Sequence: Synthetic peptide
ERYLKDQQL

SEQ ID NO: 20098 - protein, 8 aa, synthetic construct
  REGION 1..8: note = Description of Artificial Sequence: Synthetic peptide
ERIPSSCL

SEQ ID NO: 20099 - protein, 9 aa, synthetic construct
  REGION 1..9: note = Description of Artificial Sequence: Synthetic peptide
ERYLKDQQL

SEQ ID NO: 20100 - protein, 8 aa, synthetic construct
  REGION 1..8: note = Description of Artificial Sequence: Synthetic peptide
GELVHQAL

SEQ ID NO: 20101 - protein, 8 aa, synthetic construct
  REGION 1..8: note = Description of Artificial Sequence: Synthetic peptide
GQPVHQAL

SEQ ID NO: 20102 - protein, 8 aa, synthetic construct
  REGION 1..8: note = Description of Artificial Sequence: Synthetic peptide
DLATHGAI

SEQ ID NO: 20103 - protein, 9 aa, synthetic construct
  REGION 1..9: note = Description of Artificial Sequence: Synthetic peptide
DRYALNPGL

SEQ ID NO: 20104 - protein, 9 aa, synthetic construct
  REGION 1..9: note = Description of Artificial Sequence: Synthetic peptide
VPLTREAEL

SEQ ID NO: 20105 - protein, 8 aa, synthetic construct
  REGION 1..8: note = Description of Artificial Sequence: Synthetic peptide
DLAKHGAI

SEQ ID NO: 20106 - protein, 9 aa, synthetic construct
  REGION 1..9: note = Description of Artificial Sequence: Synthetic peptide
DRFALNPGL

SEQ ID NO: 20107 - protein, 9 aa, synthetic construct
  REGION 1..9: note = Description of Artificial Sequence: Synthetic peptide
DPNPREITM

SEQ ID NO: 20108 - protein, 8 aa, synthetic construct
  REGION 1..8: note = Description of Artificial Sequence: Synthetic peptide
IQKLVGKL

SEQ ID NO: 20109 - protein, 9 aa, synthetic construct
  REGION 1..9: note = Description of Artificial Sequence: Synthetic peptide
TEAVQKIAL

SEQ ID NO: 20110 - protein, 9 aa, synthetic construct
  REGION 1..9: note = Description of Artificial Sequence: Synthetic peptide
LQKGLGISY

SEQ ID NO: 20111 - protein, 9 aa, synthetic construct
  REGION 1..9: note = Description of Artificial Sequence: Synthetic peptide
IIANVTENF

SEQ ID NO: 20112 - protein, 8 aa, synthetic construct
  REGION 1..8: note = Description of Artificial Sequence: Synthetic peptide
GQYIYSTY

SEQ ID NO: 20113 - protein, 8 aa, synthetic construct
  REGION 1..8: note = Description of Artificial Sequence: Synthetic peptide
GQHIYNTY

SEQ ID NO: 20114 - protein, 9 aa, synthetic construct
  REGION 1..9: note = Description of Artificial Sequence: Synthetic peptide
GTQEIKSLY

SEQ ID NO: 20115 - protein, 9 aa, synthetic construct
  REGION 1..9: note = Description of Artificial Sequence: Synthetic peptide
GQGTVSSNF

SEQ ID NO: 20116 - protein, 10 aa, synthetic construct
  REGION 1..10: note = Description of Artificial Sequence: Synthetic peptide
GCAELVVTTY

SEQ ID NO: 20117 - protein, 9 aa, synthetic construct
  REGION 1..9: note = Description of Artificial Sequence: Synthetic peptide
KQITKIQNF

SEQ ID NO: 20118 - protein, 9 aa, synthetic construct
  REGION 1..9: note = Description of Artificial Sequence: Synthetic peptide
HMGPGQVLY

SEQ ID NO: 20119 - protein, 9 aa, synthetic construct
  REGION 1..9: note = Description of Artificial Sequence: Synthetic peptide
SQVTNTNIM

SEQ ID NO: 20120 - protein, 10 aa, synthetic construct
  REGION 1..10: note = Description of Artificial Sequence: Synthetic peptide
VSIDNSNSSY

SEQ ID NO: 20121 - protein, 9 aa, synthetic construct
  REGION 1..9: note = Description of Artificial Sequence: Synthetic peptide
TVLDVGDAY

SEQ ID NO: 20122 - protein, 10 aa, synthetic construct
  REGION 1..10: note = Description of Artificial Sequence: Synthetic peptide
ILKEPVHGVY

SEQ ID NO: 20123 - protein, 8 aa, synthetic construct
  REGION 1..8: note = Description of Artificial Sequence: Synthetic peptide
AILVITTY

SEQ ID NO: 20124 - protein, 10 aa, synthetic construct
  REGION 1..10: note = Description of Artificial Sequence: Synthetic peptide
FLQKGLGISY

SEQ ID NO: 20125 - protein, 8 aa, synthetic construct
  REGION 1..8: note = Description of Artificial Sequence: Synthetic peptide
AVHIASGY

SEQ ID NO: 20126 - protein, 9 aa, synthetic construct
  REGION 1..9: note = Description of Artificial Sequence: Synthetic peptide
KQIIKIQNF

SEQ ID NO: 20127 - protein, 9 aa, synthetic construct
  REGION 1..9: note = Description of Artificial Sequence: Synthetic peptide
LQIAAIVAF

SEQ ID NO: 20128 - protein, 8 aa, synthetic construct
  REGION 1..8: note = Description of Artificial Sequence: Synthetic peptide
AVHVASGY

SEQ ID NO: 20129 - protein, 9 aa, synthetic construct
  REGION 1..9: note = Description of Artificial Sequence: Synthetic peptide
AQTEEEVGF

SEQ ID NO: 20130 - protein, 8 aa, synthetic construct
  REGION 1..8: note = Description of Artificial Sequence: Synthetic peptide
AELVVTTY

SEQ ID NO: 20131 - protein, 9 aa, synthetic construct
  REGION 1..9: note = Description of Artificial Sequence: Synthetic peptide
ILVQLQPSY

SEQ ID NO: 20132 - protein, 9 aa, synthetic construct
  REGION 1..9: note = Description of Artificial Sequence: Synthetic peptide
AIVGMGAVF

SEQ ID NO: 20133 - protein, 9 aa, synthetic construct
  REGION 1..9: note = Description of Artificial Sequence: Synthetic peptide
FLGTAGSTM

SEQ ID NO: 20134 - protein, 9 aa, synthetic construct
  REGION 1..9: note = Description of Artificial Sequence: Synthetic peptide
EAILVITTY

SEQ ID NO: 20135 - protein, 10 aa, synthetic construct
  REGION 1..10: note = Description of Artificial Sequence: Synthetic peptide
GQIVSPRCDY

SEQ ID NO: 20136 - protein, 9 aa, synthetic construct
  REGION 1..9: note = Description of Artificial Sequence: Synthetic peptide
WQKVGQAIY

SEQ ID NO: 20137 - protein, 10 aa, synthetic construct
  REGION 1..10: note = Description of Artificial Sequence: Synthetic peptide
IQWEREINNY

SEQ ID NO: 20138 - protein, 9 aa, synthetic construct
  REGION 1..9: note = Description of Artificial Sequence: Synthetic peptide
HMGPGQVLF

SEQ ID NO: 20139 - protein, 8 aa, synthetic construct
  REGION 1..8: note = Description of Artificial Sequence: Synthetic peptide
KTVEIVCY

SEQ ID NO: 20140 - protein, 10 aa, synthetic construct
  REGION 1..10: note = Description of Artificial Sequence: Synthetic peptide
GFLGTAGSTM

SEQ ID NO: 20141 - protein, 9 aa, synthetic construct
  REGION 1..9: note = Description of Artificial Sequence: Synthetic peptide
VVGDIRRAY

SEQ ID NO: 20142 - protein, 9 aa, synthetic construct
  REGION 1..9: note = Description of Artificial Sequence: Synthetic peptide
EAILVITTY

SEQ ID NO: 20143 - protein, 9 aa, synthetic construct
  REGION 1..9: note = Description of Artificial Sequence: Synthetic peptide
TVLDVGDAY

SEQ ID NO: 20144 - protein, 9 aa, synthetic construct
  REGION 1..9: note = Description of Artificial Sequence: Synthetic peptide
FLGTAGSTM

SEQ ID NO: 20145 - protein, 9 aa, synthetic construct
  REGION 1..9: note = Description of Artificial Sequence: Synthetic peptide
LQKGLGISY

SEQ ID NO: 20146 - protein, 9 aa, synthetic construct
  REGION 1..9: note = Description of Artificial Sequence: Synthetic peptide
HMGPGQVLY

SEQ ID NO: 20147 - protein, 10 aa, synthetic construct
  REGION 1..10: note = Description of Artificial Sequence: Synthetic peptide
FLQKGLGISY

SEQ ID NO: 20148 - protein, 9 aa, synthetic construct
  REGION 1..9: note = Description of Artificial Sequence: Synthetic peptide
TVGGHQAAM

SEQ ID NO: 20149 - protein, 9 aa, synthetic construct
  REGION 1..9: note = Description of Artificial Sequence: Synthetic peptide
SQVTNTNIM

SEQ ID NO: 20150 - protein, 9 aa, synthetic construct
  REGION 1..9: note = Description of Artificial Sequence: Synthetic peptide
TIGGHQAAM

SEQ ID NO: 20151 - protein, 9 aa, synthetic construct
  REGION 1..9: note = Description of Artificial Sequence: Synthetic peptide
QPIPVGEIY

SEQ ID NO: 20152 - protein, 9 aa, synthetic construct
  REGION 1..9: note = Description of Artificial Sequence: Synthetic peptide
IIANVTENF

SEQ ID NO: 20153 - protein, 9 aa, synthetic construct
  REGION 1..9: note = Description of Artificial Sequence: Synthetic peptide
ILVQLQPSY

SEQ ID NO: 20154 - protein, 8 aa, synthetic construct
  REGION 1..8: note = Description of Artificial Sequence: Synthetic peptide
GQYIYSTY

SEQ ID NO: 20155 - protein, 10 aa, synthetic construct
  REGION 1..10: note = Description of Artificial Sequence: Synthetic peptide
EINNYTGIIY

SEQ ID NO: 20156 - protein, 8 aa, synthetic construct
  REGION 1..8: note = Description of Artificial Sequence: Synthetic peptide
DNYTRIIY

SEQ ID NO: 20157 - protein, 9 aa, synthetic construct
  REGION 1..9: note = Description of Artificial Sequence: Synthetic peptide
DAYFSVPLY

SEQ ID NO: 20158 - protein, 9 aa, synthetic construct
  REGION 1..9: note = Description of Artificial Sequence: Synthetic peptide
SAEPVPLQL

SEQ ID NO: 20159 - protein, 9 aa, synthetic construct
  REGION 1..9: note = Description of Artificial Sequence: Synthetic peptide
DIAGTTSTL

SEQ ID NO: 20160 - protein, 8 aa, synthetic construct
  REGION 1..8: note = Description of Artificial Sequence: Synthetic peptide
DQLIHMCY

SEQ ID NO: 20161 - protein, 9 aa, synthetic construct
  REGION 1..9: note = Description of Artificial Sequence: Synthetic peptide
DIEIVTHSF

SEQ ID NO: 20162 - protein, 10 aa, synthetic construct
  REGION 1..10: note = Description of Artificial Sequence: Synthetic peptide
NTIGGHQAAM

SEQ ID NO: 20163 - protein, 10 aa, synthetic construct
  REGION 1..10: note = Description of Artificial Sequence: Synthetic peptide
DLWVHNTQGY

SEQ ID NO: 20164 - protein, 9 aa, synthetic construct
  REGION 1..9: note = Description of Artificial Sequence: Synthetic peptide
IPIGPGQVL

SEQ ID NO: 20165 - protein, 10 aa, synthetic construct
  REGION 1..10: note = Description of Artificial Sequence: Synthetic peptide
EVNIVTDSQY

SEQ ID NO: 20166 - protein, 9 aa, synthetic construct
  REGION 1..9: note = Description of Artificial Sequence: Synthetic peptide
AKNPEVVIY

SEQ ID NO: 20167 - protein, 9 aa, synthetic construct
  REGION 1..9: note = Description of Artificial Sequence: Synthetic peptide
LQKGLGISY

SEQ ID NO: 20168 - protein, 8 aa, synthetic construct
  REGION 1..8: note = Description of Artificial Sequence: Synthetic peptide
GQYIYSTY

SEQ ID NO: 20169 - protein, 9 aa, synthetic construct
  REGION 1..9: note = Description of Artificial Sequence: Synthetic peptide
QKTELQAIY

SEQ ID NO: 20170 - protein, 9 aa, synthetic construct
  REGION 1..9: note = Description of Artificial Sequence: Synthetic peptide
NKTVEIVCY

SEQ ID NO: 20171 - protein, 9 aa, synthetic construct
  REGION 1..9: note = Description of Artificial Sequence: Synthetic peptide
SKIGPENPY

SEQ ID NO: 20172 - protein, 9 aa, synthetic construct
  REGION 1..9: note = Description of Artificial Sequence: Synthetic peptide
KKYNSQVSH

SEQ ID NO: 20173 - protein, 8 aa, synthetic construct
  REGION 1..8: note = Description of Artificial Sequence: Synthetic peptide
QKGLGISY

SEQ ID NO: 20174 - protein, 9 aa, synthetic construct
  REGION 1..9: note = Description of Artificial Sequence: Synthetic peptide
GKKAIGTVL

SEQ ID NO: 20175 - protein, 8 aa, synthetic construct
  REGION 1..8: note = Description of Artificial Sequence: Synthetic peptide
GQHIYNTY

SEQ ID NO: 20176 - protein, 8 aa, synthetic construct
  REGION 1..8: note = Description of Artificial Sequence: Synthetic peptide
AKNILVQF

SEQ ID NO: 20177 - protein, 9 aa, synthetic construct
  REGION 1..9: note = Description of Artificial Sequence: Synthetic peptide
QKTELHAIY

SEQ ID NO: 20178 - protein, 9 aa, synthetic construct
  REGION 1..9: note = Description of Artificial Sequence: Synthetic peptide
VKVIEEKAF

SEQ ID NO: 20179 - protein, 9 aa, synthetic construct
  REGION 1..9: note = Description of Artificial Sequence: Synthetic peptide
KQITKIQNF

SEQ ID NO: 20180 - protein, 9 aa, synthetic construct
  REGION 1..9: note = Description of Artificial Sequence: Synthetic peptide
IHMGPGQVL

SEQ ID NO: 20181 - protein, 9 aa, synthetic construct
  REGION 1..9: note = Description of Artificial Sequence: Synthetic peptide
THLEGKVIL

SEQ ID NO: 20182 - protein, 9 aa, synthetic construct
  REGION 1..9: note = Description of Artificial Sequence: Synthetic peptide
AHTNDVRQL

SEQ ID NO: 20183 - protein, 9 aa, synthetic construct
  REGION 1..9: note = Description of Artificial Sequence: Synthetic peptide
VHIPLGEAI

SEQ ID NO: 20184 - protein, 9 aa, synthetic construct
  REGION 1..9: note = Description of Artificial Sequence: Synthetic peptide
EHLKTAVQM

SEQ ID NO: 20185 - protein, 11 aa, synthetic construct
  REGION 1..11: note = Description of Artificial Sequence: Synthetic peptide
THQDPIPGQPL

SEQ ID NO: 20186 - protein, 9 aa, synthetic construct
  REGION 1..9: note = Description of Artificial Sequence: Synthetic peptide
THLEGKIIL

SEQ ID NO: 20187 - protein, 9 aa, synthetic construct
  REGION 1..9: note = Description of Artificial Sequence: Synthetic peptide
FQQGEAREL

SEQ ID NO: 20188 - protein, 9 aa, synthetic construct
  REGION 1..9: note = Description of Artificial Sequence: Synthetic peptide
HQALSPRTL

SEQ ID NO: 20189 - protein, 9 aa, synthetic construct
  REGION 1..9: note = Description of Artificial Sequence: Synthetic peptide
GHQAAMQML

SEQ ID NO: 20190 - protein, 9 aa, synthetic construct
  REGION 1..9: note = Description of Artificial Sequence: Synthetic peptide
EHFNKTINF

SEQ ID NO: 20191 - protein, 9 aa, synthetic construct
  REGION 1..9: note = Description of Artificial Sequence: Synthetic peptide
AHTNDVKQL

SEQ ID NO: 20192 - protein, 8 aa, synthetic construct
  REGION 1..8: note = Description of Artificial Sequence: Synthetic peptide
LHKVAEEL

SEQ ID NO: 20193 - protein, 9 aa, synthetic construct
  REGION 1..9: note = Description of Artificial Sequence: Synthetic peptide
SQVTNTNIM

SEQ ID NO: 20194 - protein, 9 aa, synthetic construct
  REGION 1..9: note = Description of Artificial Sequence: Synthetic peptide
YHMNVSKKA

SEQ ID NO: 20195 - protein, 9 aa, synthetic construct
  REGION 1..9: note = Description of Artificial Sequence: Synthetic peptide
YQLEKEPIM

SEQ ID NO: 20196 - protein, 9 aa, synthetic construct
  REGION 1..9: note = Description of Artificial Sequence: Synthetic peptide
IPIGPGQVL

SEQ ID NO: 20197 - protein, 9 aa, synthetic construct
  REGION 1..9: note = Description of Artificial Sequence: Synthetic peptide
FQQREAREL

SEQ ID NO: 20198 - protein, 9 aa, synthetic construct
  REGION 1..9: note = Description of Artificial Sequence: Synthetic peptide
SQIYPGIKV

SEQ ID NO: 20199 - protein, 8 aa, synthetic construct
  REGION 1..8: note = Description of Artificial Sequence: Synthetic peptide
THLEGKVI

SEQ ID NO: 20200 - protein, 9 aa, synthetic construct
  REGION 1..9: note = Description of Artificial Sequence: Synthetic peptide
NHPKVSSEV

SEQ ID NO: 20201 - protein, 9 aa, synthetic construct
  REGION 1..9: note = Description of Artificial Sequence: Synthetic peptide
TVMETQRSW

SEQ ID NO: 20202 - protein, 9 aa, synthetic construct
  REGION 1..9: note = Description of Artificial Sequence: Synthetic peptide
TVLDVGDAY

SEQ ID NO: 20203 - protein, 9 aa, synthetic construct
  REGION 1..9: note = Description of Artificial Sequence: Synthetic peptide
TINEEAAEW

SEQ ID NO: 20204 - protein, 9 aa, synthetic construct
  REGION 1..9: note = Description of Artificial Sequence: Synthetic peptide
EAILVITTY

SEQ ID NO: 20205 - protein, 9 aa, synthetic construct
  REGION 1..9: note = Description of Artificial Sequence: Synthetic peptide
IIANVTENF

SEQ ID NO: 20206 - protein, 9 aa, synthetic construct
  REGION 1..9: note = Description of Artificial Sequence: Synthetic peptide
NETVNITCF

SEQ ID NO: 20207 - protein, 8 aa, synthetic construct
  REGION 1..8: note = Description of Artificial Sequence: Synthetic peptide
AELVVTTY

SEQ ID NO: 20208 - protein, 8 aa, synthetic construct
  REGION 1..8: note = Description of Artificial Sequence: Synthetic peptide
IEIVTHSF

SEQ ID NO: 20209 - protein, 9 aa, synthetic construct
  REGION 1..9: note = Description of Artificial Sequence: Synthetic peptide
DELEKLVEM

SEQ ID NO: 20210 - protein, 8 aa, synthetic construct
  REGION 1..8: note = Description of Artificial Sequence: Synthetic peptide
NESTTINF

SEQ ID NO: 20211 - protein, 8 aa, synthetic construct
  REGION 1..8: note = Description of Artificial Sequence: Synthetic peptide
NETPGIRY

SEQ ID NO: 20212 - protein, 8 aa, synthetic construct
  REGION 1..8: note = Description of Artificial Sequence: Synthetic peptide
LEIMTHTF

SEQ ID NO: 20213 - protein, 8 aa, synthetic construct
  REGION 1..8: note = Description of Artificial Sequence: Synthetic peptide
IEIMMHTF

SEQ ID NO: 20214 - protein, 8 aa, synthetic construct
  REGION 1..8: note = Description of Artificial Sequence: Synthetic peptide
TEEIKSLY

SEQ ID NO: 20215 - protein, 11 aa, synthetic construct
  REGION 1..11: note = Description of Artificial Sequence: Synthetic peptide
QEVNIVTDSQY

SEQ ID NO: 20216 - protein, 8 aa, synthetic construct
  REGION 1..8: note = Description of Artificial Sequence: Synthetic peptide
MENVTENF

SEQ ID NO: 20217 - protein, 11 aa, synthetic construct
  REGION 1..11: note = Description of Artificial Sequence: Synthetic peptide
LEVNIVTDSQY

SEQ ID NO: 20218 - protein, 8 aa, synthetic construct
  REGION 1..8: note = Description of Artificial Sequence: Synthetic peptide
DENSTVTI

SEQ ID NO: 20219 - protein, 8 aa, synthetic construct
  REGION 1..8: note = Description of Artificial Sequence: Synthetic peptide
PEVVIYQY

SEQ ID NO: 20220 - protein, 8 aa, synthetic construct
  REGION 1..8: note = Description of Artificial Sequence: Synthetic peptide
PEIVIYQY

SEQ ID NO: 20221 - protein, 8 aa, synthetic construct
  REGION 1..8: note = Description of Artificial Sequence: Synthetic peptide
DEQLLLAV

SEQ ID NO: 20222 - protein, 9 aa, synthetic construct
  REGION 1..9: note = Description of Artificial Sequence: Synthetic peptide
EELAKLVEM

SEQ ID NO: 20223 - protein, 9 aa, synthetic construct
  REGION 1..9: note = Description of Artificial Sequence: Synthetic peptide
TEAVQKIAL

SEQ ID NO: 20224 - protein, 9 aa, synthetic construct
  REGION 1..9: note = Description of Artificial Sequence: Synthetic peptide
DIEIVTHSF

SEQ ID NO: 20225 - protein, 9 aa, synthetic construct
  REGION 1..9: note = Description of Artificial Sequence: Synthetic peptide
ARVLAVERY

SEQ ID NO: 20226 - protein, 10 aa, synthetic construct
  REGION 1..10: note = Description of Artificial Sequence: Synthetic peptide
VRQGYSPLSF

SEQ ID NO: 20227 - protein, 9 aa, synthetic construct
  REGION 1..9: note = Description of Artificial Sequence: Synthetic peptide
ARILAVERY

SEQ ID NO: 20228 - protein, 10 aa, synthetic construct
  REGION 1..10: note = Description of Artificial Sequence: Synthetic peptide
NDILIEIEGK

SEQ ID NO: 20229 - protein, 10 aa, synthetic construct
  REGION 1..10: note = Description of Artificial Sequence: Synthetic peptide
GGLDGLIYSK

SEQ ID NO: 20230 - protein, 11 aa, synthetic construct
  REGION 1..11: note = Description of Artificial Sequence: Synthetic peptide
GIVQQQSNLLK

SEQ ID NO: 20231 - protein, 9 aa, synthetic construct
  REGION 1..9: note = Description of Artificial Sequence: Synthetic peptide
GRVNISEIM

SEQ ID NO: 20232 - protein, 10 aa, synthetic construct
  REGION 1..10: note = Description of Artificial Sequence: Synthetic peptide
GAVDLSFFLK

SEQ ID NO: 20233 - protein, 9 aa, synthetic construct
  REGION 1..9: note = Description of Artificial Sequence: Synthetic peptide
SRVGPENPY

SEQ ID NO: 20234 - protein, 10 aa, synthetic construct
  REGION 1..10: note = Description of Artificial Sequence: Synthetic peptide
GRVNISEIMK

SEQ ID NO: 20235 - protein, 9 aa, synthetic construct
  REGION 1..9: note = Description of Artificial Sequence: Synthetic peptide
GLDGLIYSK

SEQ ID NO: 20236 - protein, 10 aa, synthetic construct
  REGION 1..10: note = Description of Artificial Sequence: Synthetic peptide
TVLEDIDLPR

SEQ ID NO: 20237 - protein, 9 aa, synthetic construct
  REGION 1..9: note = Description of Artificial Sequence: Synthetic peptide
ARTVETLGR

SEQ ID NO: 20238 - protein, 11 aa, synthetic construct
  REGION 1..11: note = Description of Artificial Sequence: Synthetic peptide
TAIAVAEGTDR

SEQ ID NO: 20239 - protein, 10 aa, synthetic construct
  REGION 1..10: note = Description of Artificial Sequence: Synthetic peptide
VPVDPGEVER

SEQ ID NO: 20240 - protein, 11 aa, synthetic construct
  REGION 1..11: note = Description of Artificial Sequence: Synthetic peptide
QLLLNGSIAEK

SEQ ID NO: 20241 - protein, 11 aa, synthetic construct
  REGION 1..11: note = Description of Artificial Sequence: Synthetic peptide
KALTDIVPLTR

SEQ ID NO: 20242 - protein, 9 aa, synthetic construct
  REGION 1..9: note = Description of Artificial Sequence: Synthetic peptide
SRIGIIPQR

SEQ ID NO: 20243 - protein, 9 aa, synthetic construct
  REGION 1..9: note = Description of Artificial Sequence: Synthetic peptide
SRIGIMPQR

SEQ ID NO: 20244 - protein, 9 aa, synthetic construct
  REGION 1..9: note = Description of Artificial Sequence: Synthetic peptide
SRIGIIRQR

SEQ ID NO: 20245 - protein, 10 aa, synthetic construct
  REGION 1..10: note = Description of Artificial Sequence: Synthetic peptide
GRVNISEIMK

SEQ ID NO: 20246 - protein, 9 aa, synthetic construct
  REGION 1..9: note = Description of Artificial Sequence: Synthetic peptide
QRIEIKDTM

SEQ ID NO: 20247 - protein, 9 aa, synthetic construct
  REGION 1..9: note = Description of Artificial Sequence: Synthetic peptide
ARVLAVERY

SEQ ID NO: 20248 - protein, 9 aa, synthetic construct
  REGION 1..9: note = Description of Artificial Sequence: Synthetic peptide
ARTVGTLGL

SEQ ID NO: 20249 - protein, 9 aa, synthetic construct
  REGION 1..9: note = Description of Artificial Sequence: Synthetic peptide
GRVNISEIM

SEQ ID NO: 20250 - protein, 9 aa, synthetic construct
  REGION 1..9: note = Description of Artificial Sequence: Synthetic peptide
ARILAVERY

SEQ ID NO: 20251 - protein, 9 aa, synthetic construct
  REGION 1..9: note = Description of Artificial Sequence: Synthetic peptide
YRTQVDPGL

SEQ ID NO: 20252 - protein, 9 aa, synthetic construct
  REGION 1..9: note = Description of Artificial Sequence: Synthetic peptide
ARTVETLGR

SEQ ID NO: 20253 - protein, 9 aa, synthetic construct
  REGION 1..9: note = Description of Artificial Sequence: Synthetic peptide
SRVGPENPY

SEQ ID NO: 20254 - protein, 9 aa, synthetic construct
  REGION 1..9: note = Description of Artificial Sequence: Synthetic peptide
HRIDIRDTK

SEQ ID NO: 20255 - protein, 9 aa, synthetic construct
  REGION 1..9: note = Description of Artificial Sequence: Synthetic peptide
EAILVITTY

SEQ ID NO: 20256 - protein, 9 aa, synthetic construct
  REGION 1..9: note = Description of Artificial Sequence: Synthetic peptide
QPIPVGEIY

SEQ ID NO: 20257 - protein, 11 aa, synthetic construct
  REGION 1..11: note = Description of Artificial Sequence: Synthetic peptide
IPAETGQETAF

SEQ ID NO: 20258 - protein, 9 aa, synthetic construct
  REGION 1..9: note = Description of Artificial Sequence: Synthetic peptide
NPEVVIYQY

SEQ ID NO: 20259 - protein, 10 aa, synthetic construct
  REGION 1..10: note = Description of Artificial Sequence: Synthetic peptide
IPIGPGQVLY

SEQ ID NO: 20260 - protein, 9 aa, synthetic construct
  REGION 1..9: note = Description of Artificial Sequence: Synthetic peptide
NPEIVIYQY

SEQ ID NO: 20261 - protein, 9 aa, synthetic construct
  REGION 1..9: note = Description of Artificial Sequence: Synthetic peptide
EPIMGAETF

SEQ ID NO: 20262 - protein, 11 aa, synthetic construct
  REGION 1..11: note = Description of Artificial Sequence: Synthetic peptide
IPAETGQEAAF

SEQ ID NO: 20263 - protein, 11 aa, synthetic construct
  REGION 1..11: note = Description of Artificial Sequence: Synthetic peptide
VPISGRPNDSY

SEQ ID NO: 20264 - protein, 9 aa, synthetic construct
  REGION 1..9: note = Description of Artificial Sequence: Synthetic peptide
IPIGPGQVL

SEQ ID NO: 20265 - protein, 9 aa, synthetic construct
  REGION 1..9: note = Description of Artificial Sequence: Synthetic peptide
TVLDVGDAY

SEQ ID NO: 20266 - protein, 8 aa, synthetic construct
  REGION 1..8: note = Description of Artificial Sequence: Synthetic peptide
TPGPGIRY

SEQ ID NO: 20267 - protein, 9 aa, synthetic construct
  REGION 1..9: note = Description of Artificial Sequence: Synthetic peptide
DPNPREITM

SEQ ID NO: 20268 - protein, 9 aa, synthetic construct
  REGION 1..9: note = Description of Artificial Sequence: Synthetic peptide
PPIPVGEIY

SEQ ID NO: 20269 - protein, 9 aa, synthetic construct
  REGION 1..9: note = Description of Artificial Sequence: Synthetic peptide
NATAIAVAA

SEQ ID NO: 20270 - protein, 10 aa, synthetic construct
  REGION 1..10: note = Description of Artificial Sequence: Synthetic peptide
VPIDSNNKNY

SEQ ID NO: 20271 - protein, 9 aa, synthetic construct
  REGION 1..9: note = Description of Artificial Sequence: Synthetic peptide
CAELVVTTY

SEQ ID NO: 20272 - protein, 10 aa, synthetic construct
  REGION 1..10: note = Description of Artificial Sequence: Synthetic peptide
NPPIPVGEIY

SEQ ID NO: 20273 - protein, 9 aa, synthetic construct
  REGION 1..9: note = Description of Artificial Sequence: Synthetic peptide
DAYFSVPLY

SEQ ID NO: 20274 - protein, 11 aa, synthetic construct
  REGION 1..11: note = Description of Artificial Sequence: Synthetic peptide
IPLQIAAIVAF

SEQ ID NO: 20275 - protein, 8 aa, synthetic construct
  REGION 1..8: note = Description of Artificial Sequence: Synthetic peptide
LPNVTENF

SEQ ID NO: 20276 - protein, 9 aa, synthetic construct
  REGION 1..9: note = Description of Artificial Sequence: Synthetic peptide
MWTIVYIEY

SEQ ID NO: 20277 - protein, 9 aa, synthetic construct
  REGION 1..9: note = Description of Artificial Sequence: Synthetic peptide
IIANVTENF

SEQ ID NO: 20278 - protein, 9 aa, synthetic construct
  REGION 1..9: note = Description of Artificial Sequence: Synthetic peptide
SAEPVPLQL

SEQ ID NO: 20279 - protein, 9 aa, synthetic construct
  REGION 1..9: note = Description of Artificial Sequence: Synthetic peptide
FPISPIETV

SEQ ID NO: 20280 - protein, 9 aa, synthetic construct
  REGION 1..9: note = Description of Artificial Sequence: Synthetic peptide
DPNPREITM

SEQ ID NO: 20281 - protein, 9 aa, synthetic construct
  REGION 1..9: note = Description of Artificial Sequence: Synthetic peptide
QPDKSESEL

SEQ ID NO: 20282 - protein, 11 aa, synthetic construct
  REGION 1..11: note = Description of Artificial Sequence: Synthetic peptide
IPAETGQETAF

SEQ ID NO: 20283 - protein, 9 aa, synthetic construct
  REGION 1..9: note = Description of Artificial Sequence: Synthetic peptide
SAEPVPLQL

SEQ ID NO: 20284 - protein, 9 aa, synthetic construct
  REGION 1..9: note = Description of Artificial Sequence: Synthetic peptide
IPIGPGQVL

SEQ ID NO: 20285 - protein, 9 aa, synthetic construct
  REGION 1..9: note = Description of Artificial Sequence: Synthetic peptide
LAEGGEQIL

SEQ ID NO: 20286 - protein, 11 aa, synthetic construct
  REGION 1..11: note = Description of Artificial Sequence: Synthetic peptide
IPAETGQEAAF

SEQ ID NO: 20287 - protein, 9 aa, synthetic construct
  REGION 1..9: note = Description of Artificial Sequence: Synthetic peptide
SIAEGDIII

SEQ ID NO: 20288 - protein, 9 aa, synthetic construct
  REGION 1..9: note = Description of Artificial Sequence: Synthetic peptide
VPLTREAEL

SEQ ID NO: 20289 - protein, 9 aa, synthetic construct
  REGION 1..9: note = Description of Artificial Sequence: Synthetic peptide
DPSPQEMNL

SEQ ID NO: 20290 - protein, 9 aa, synthetic construct
  REGION 1..9: note = Description of Artificial Sequence: Synthetic peptide
FPISPIETV

SEQ ID NO: 20291 - protein, 9 aa, synthetic construct
  REGION 1..9: note = Description of Artificial Sequence: Synthetic peptide
DPNPQEMII

SEQ ID NO: 20292 - protein, 9 aa, synthetic construct
  REGION 1..9: note = Description of Artificial Sequence: Synthetic peptide
IPIGPGQVL

SEQ ID NO: 20293 - protein, 9 aa, synthetic construct
  REGION 1..9: note = Description of Artificial Sequence: Synthetic peptide
DPNPREITM

SEQ ID NO: 20294 - protein, 9 aa, synthetic construct
  REGION 1..9: note = Description of Artificial Sequence: Synthetic peptide
FPISPIETV

SEQ ID NO: 20295 - protein, 9 aa, synthetic construct
  REGION 1..9: note = Description of Artificial Sequence: Synthetic peptide
HPVHAGPVA

SEQ ID NO: 20296 - protein, 9 aa, synthetic construct
  REGION 1..9: note = Description of Artificial Sequence: Synthetic peptide
SAEPVPLQL

SEQ ID NO: 20297 - protein, 9 aa, synthetic construct
  REGION 1..9: note = Description of Artificial Sequence: Synthetic peptide
VPLTREAEL

SEQ ID NO: 20298 - protein, 9 aa, synthetic construct
  REGION 1..9: note = Description of Artificial Sequence: Synthetic peptide
YPSASLKSL

SEQ ID NO: 20299 - protein, 9 aa, synthetic construct
  REGION 1..9: note = Description of Artificial Sequence: Synthetic peptide
NATAIAVAA

SEQ ID NO: 20300 - protein, 9 aa, synthetic construct
  REGION 1..9: note = Description of Artificial Sequence: Synthetic peptide
FPVTPQVPL

SEQ ID NO: 20301 - protein, 11 aa, synthetic construct
  REGION 1..11: note = Description of Artificial Sequence: Synthetic peptide
IPAETGQETAF

SEQ ID NO: 20302 - protein, 9 aa, synthetic construct
  REGION 1..9: note = Description of Artificial Sequence: Synthetic peptide
TPQDLNTML

SEQ ID NO: 20303 - protein, 9 aa, synthetic construct
  REGION 1..9: note = Description of Artificial Sequence: Synthetic peptide
IVTDSQYAL

SEQ ID NO: 20304 - protein, 10 aa, synthetic construct
  REGION 1..10: note = Description of Artificial Sequence: Synthetic peptide
SPIETVPVKL

SEQ ID NO: 20305 - protein, 9 aa, synthetic construct
  REGION 1..9: note = Description of Artificial Sequence: Synthetic peptide
EPIMGAETF

SEQ ID NO: 20306 - protein, 9 aa, synthetic construct
  REGION 1..9: note = Description of Artificial Sequence: Synthetic peptide
SPSGGDIEI

SEQ ID NO: 20307 - protein, 10 aa, synthetic construct
  REGION 1..10: note = Description of Artificial Sequence: Synthetic peptide
VPTDPSPQEM

SEQ ID NO: 20308 - protein, 10 aa, synthetic construct
  REGION 1..10: note = Description of Artificial Sequence: Synthetic peptide
NANPDCKTIL

SEQ ID NO: 20309 - protein, 9 aa, synthetic construct
  REGION 1..9: note = Description of Artificial Sequence: Synthetic peptide
LAEGGEQIL

SEQ ID NO: 20310 - protein, 9 aa, synthetic construct
  REGION 1..9: note = Description of Artificial Sequence: Synthetic peptide
FPVKPQIPL

SEQ ID NO: 20311 - protein, 9 aa, synthetic construct
  REGION 1..9: note = Description of Artificial Sequence: Synthetic peptide
HPVHAGPIA

SEQ ID NO: 20312 - protein, 9 aa, synthetic construct
  REGION 1..9: note = Description of Artificial Sequence: Synthetic peptide
EALDKIEEL

SEQ ID NO: 20313 - protein, 11 aa, synthetic construct
  REGION 1..11: note = Description of Artificial Sequence: Synthetic peptide
IPAETGQEAAF

SEQ ID NO: 20314 - protein, 10 aa, synthetic construct
  REGION 1..10: note = Description of Artificial Sequence: Synthetic peptide
VPTDPNPQEM

SEQ ID NO: 20315 - protein, 9 aa, synthetic construct
  REGION 1..9: note = Description of Artificial Sequence: Synthetic peptide
QPDKSESEL

SEQ ID NO: 20316 - protein, 9 aa, synthetic construct
  REGION 1..9: note = Description of Artificial Sequence: Synthetic peptide
SPSGGDLEI

SEQ ID NO: 20317 - protein, 11 aa, synthetic construct
  REGION 1..11: note = Description of Artificial Sequence: Synthetic peptide
IPAETGQETAF

SEQ ID NO: 20318 - protein, 9 aa, synthetic construct
  REGION 1..9: note = Description of Artificial Sequence: Synthetic peptide
QPIPVGEIY

SEQ ID NO: 20319 - protein, 11 aa, synthetic construct
  REGION 1..11: note = Description of Artificial Sequence: Synthetic peptide
IPAETGQEAAF

SEQ ID NO: 20320 - protein, 9 aa, synthetic construct
  REGION 1..9: note = Description of Artificial Sequence: Synthetic peptide
DPNPREITM

SEQ ID NO: 20321 - protein, 11 aa, synthetic construct
  REGION 1..11: note = Description of Artificial Sequence: Synthetic peptide
VPISGRPNDSY

SEQ ID NO: 20322 - protein, 9 aa, synthetic construct
  REGION 1..9: note = Description of Artificial Sequence: Synthetic peptide
NPEVVIYQY

SEQ ID NO: 20323 - protein, 9 aa, synthetic construct
  REGION 1..9: note = Description of Artificial Sequence: Synthetic peptide
EAILVITTY

SEQ ID NO: 20324 - protein, 10 aa, synthetic construct
  REGION 1..10: note = Description of Artificial Sequence: Synthetic peptide
IPIGPGQVLY

SEQ ID NO: 20325 - protein, 9 aa, synthetic construct
  REGION 1..9: note = Description of Artificial Sequence: Synthetic peptide
EPIMGAETF

SEQ ID NO: 20326 - protein, 9 aa, synthetic construct
  REGION 1..9: note = Description of Artificial Sequence: Synthetic peptide
NPEIVIYQY

SEQ ID NO: 20327 - protein, 9 aa, synthetic construct
  REGION 1..9: note = Description of Artificial Sequence: Synthetic peptide
IPIGPGQVL

SEQ ID NO: 20328 - protein, 9 aa, synthetic construct
  REGION 1..9: note = Description of Artificial Sequence: Synthetic peptide
CAELVVTTY

SEQ ID NO: 20329 - protein, 9 aa, synthetic construct
  REGION 1..9: note = Description of Artificial Sequence: Synthetic peptide
TVLDVGDAY

SEQ ID NO: 20330 - protein, 10 aa, synthetic construct
  REGION 1..10: note = Description of Artificial Sequence: Synthetic peptide
NPPIPVGEIY

SEQ ID NO: 20331 - protein, 8 aa, synthetic construct
  REGION 1..8: note = Description of Artificial Sequence: Synthetic peptide
TPGPGIRY

SEQ ID NO: 20332 - protein, 9 aa, synthetic construct
  REGION 1..9: note = Description of Artificial Sequence: Synthetic peptide
DPNPREITM

SEQ ID NO: 20333 - protein, 9 aa, synthetic construct
  REGION 1..9: note = Description of Artificial Sequence: Synthetic peptide
QPDKSESEL

SEQ ID NO: 20334 - protein, 11 aa, synthetic construct
  REGION 1..11: note = Description of Artificial Sequence: Synthetic peptide
IPAETGQETAF

SEQ ID NO: 20335 - protein, 9 aa, synthetic construct
  REGION 1..9: note = Description of Artificial Sequence: Synthetic peptide
IPIGPGQVL

SEQ ID NO: 20336 - protein, 9 aa, synthetic construct
  REGION 1..9: note = Description of Artificial Sequence: Synthetic peptide
VPLTREAEL

SEQ ID NO: 20337 - protein, 9 aa, synthetic construct
  REGION 1..9: note = Description of Artificial Sequence: Synthetic peptide
SAEPVPLQL

SEQ ID NO: 20338 - protein, 11 aa, synthetic construct
  REGION 1..11: note = Description of Artificial Sequence: Synthetic peptide
IPAETGQEAAF

SEQ ID NO: 20339 - protein, 9 aa, synthetic construct
  REGION 1..9: note = Description of Artificial Sequence: Synthetic peptide
LAEGGEQIL

SEQ ID NO: 20340 - protein, 9 aa, synthetic construct
  REGION 1..9: note = Description of Artificial Sequence: Synthetic peptide
DPSPQEMNL

SEQ ID NO: 20341 - protein, 9 aa, synthetic construct
  REGION 1..9: note = Description of Artificial Sequence: Synthetic peptide
FPISPIETV

SEQ ID NO: 20342 - protein, 9 aa, synthetic construct
  REGION 1..9: note = Description of Artificial Sequence: Synthetic peptide
SPSGGDIEI

SEQ ID NO: 20343 - protein, 9 aa, synthetic construct
  REGION 1..9: note = Description of Artificial Sequence: Synthetic peptide
HPVHAGPVA

SEQ ID NO: 20344 - protein, 9 aa, synthetic construct
  REGION 1..9: note = Description of Artificial Sequence: Synthetic peptide
MGELVHQAL

SEQ ID NO: 20345 - protein, 8 aa, synthetic construct
  REGION 1..8: note = Description of Artificial Sequence: Synthetic peptide
NESTTINF

SEQ ID NO: 20346 - protein, 8 aa, synthetic construct
  REGION 1..8: note = Description of Artificial Sequence: Synthetic peptide
IEIVTHSF

SEQ ID NO: 20347 - protein, 9 aa, synthetic construct
  REGION 1..9: note = Description of Artificial Sequence: Synthetic peptide
AEWDRVHPV

SEQ ID NO: 20348 - protein, 8 aa, synthetic construct
  REGION 1..8: note = Description of Artificial Sequence: Synthetic peptide
MENVTENF

SEQ ID NO: 20349 - protein, 8 aa, synthetic construct
  REGION 1..8: note = Description of Artificial Sequence: Synthetic peptide
GELVHQAL

SEQ ID NO: 20350 - protein, 8 aa, synthetic construct
  REGION 1..8: note = Description of Artificial Sequence: Synthetic peptide
KDAKTTLF

SEQ ID NO: 20351 - protein, 8 aa, synthetic construct
  REGION 1..8: note = Description of Artificial Sequence: Synthetic peptide
AEHLKTAV

SEQ ID NO: 20352 - protein, 9 aa, synthetic construct
  REGION 1..9: note = Description of Artificial Sequence: Synthetic peptide
AEVVQKIAL

SEQ ID NO: 20353 - protein, 9 aa, synthetic construct
  REGION 1..9: note = Description of Artificial Sequence: Synthetic peptide
KELYPSASL

SEQ ID NO: 20354 - protein, 8 aa, synthetic construct
  REGION 1..8: note = Description of Artificial Sequence: Synthetic peptide
SENGTETF

SEQ ID NO: 20355 - protein, 8 aa, synthetic construct
  REGION 1..8: note = Description of Artificial Sequence: Synthetic peptide
AEEIKSLF

SEQ ID NO: 20356 - protein, 8 aa, synthetic construct
  REGION 1..8: note = Description of Artificial Sequence: Synthetic peptide
YDSNHPKV

SEQ ID NO: 20357 - protein, 9 aa, synthetic construct
  REGION 1..9: note = Description of Artificial Sequence: Synthetic peptide
TEAVQKIAL

SEQ ID NO: 20358 - protein, 8 aa, synthetic construct
  REGION 1..8: note = Description of Artificial Sequence: Synthetic peptide
TDIQTREL

SEQ ID NO: 20359 - protein, 8 aa, synthetic construct
  REGION 1..8: note = Description of Artificial Sequence: Synthetic peptide
SDIQTKEL

SEQ ID NO: 20360 - protein, 9 aa, synthetic construct
  REGION 1..9: note = Description of Artificial Sequence: Synthetic peptide
IHMGPGQVL

SEQ ID NO: 20361 - protein, 9 aa, synthetic construct
  REGION 1..9: note = Description of Artificial Sequence: Synthetic peptide
EHFNKTINF

SEQ ID NO: 20362 - protein, 9 aa, synthetic construct
  REGION 1..9: note = Description of Artificial Sequence: Synthetic peptide
IHTDNGSNF

SEQ ID NO: 20363 - protein, 9 aa, synthetic construct
  REGION 1..9: note = Description of Artificial Sequence: Synthetic peptide
TQGVGDPQI

SEQ ID NO: 20364 - protein, 9 aa, synthetic construct
  REGION 1..9: note = Description of Artificial Sequence: Synthetic peptide
VHIPLGEAI

SEQ ID NO: 20365 - protein, 11 aa, synthetic construct
  REGION 1..11: note = Description of Artificial Sequence: Synthetic peptide
TQVDPGLADQL

SEQ ID NO: 20366 - protein, 9 aa, synthetic construct
  REGION 1..9: note = Description of Artificial Sequence: Synthetic peptide
THLEGKVIL

SEQ ID NO: 20367 - protein, 11 aa, synthetic construct
  REGION 1..11: note = Description of Artificial Sequence: Synthetic peptide
THQDPIPGQPL

SEQ ID NO: 20368 - protein, 10 aa, synthetic construct
  REGION 1..10: note = Description of Artificial Sequence: Synthetic peptide
HQDPIPGQPL

SEQ ID NO: 20369 - protein, 10 aa, synthetic construct
  REGION 1..10: note = Description of Artificial Sequence: Synthetic peptide
IHMGPGQVLF

SEQ ID NO: 20370 - protein, 9 aa, synthetic construct
  REGION 1..9: note = Description of Artificial Sequence: Synthetic peptide
TQDFWEVQL

SEQ ID NO: 20371 - protein, 9 aa, synthetic construct
  REGION 1..9: note = Description of Artificial Sequence: Synthetic peptide
YRTQVDPGL

SEQ ID NO: 20372 - protein, 9 aa, synthetic construct
  REGION 1..9: note = Description of Artificial Sequence: Synthetic peptide
SHDEIWNNM

SEQ ID NO: 20373 - protein, 9 aa, synthetic construct
  REGION 1..9: note = Description of Artificial Sequence: Synthetic peptide
IIANVTENF

SEQ ID NO: 20374 - protein, 9 aa, synthetic construct
  REGION 1..9: note = Description of Artificial Sequence: Synthetic peptide
GHQAAMQML

SEQ ID NO: 20375 - protein, 10 aa, synthetic construct
  REGION 1..10: note = Description of Artificial Sequence: Synthetic peptide
LQDSGQEVNI

SEQ ID NO: 20376 - protein, 9 aa, synthetic construct
  REGION 1..9: note = Description of Artificial Sequence: Synthetic peptide
THLEGKIIL

SEQ ID NO: 20377 - protein, 9 aa, synthetic construct
  REGION 1..9: note = Description of Artificial Sequence: Synthetic peptide
AHTNDVKQL

SEQ ID NO: 20378 - protein, 9 aa, synthetic construct
  REGION 1..9: note = Description of Artificial Sequence: Synthetic peptide
EHLKTAVQM

SEQ ID NO: 20379 - protein, 9 aa, synthetic construct
  REGION 1..9: note = Description of Artificial Sequence: Synthetic peptide
AHTNDVRQL

SEQ ID NO: 20380 - protein, 10 aa, synthetic construct
  REGION 1..10: note = Description of Artificial Sequence: Synthetic peptide
NQIDSISERI

SEQ ID NO: 20381 - protein, 9 aa, synthetic construct
  REGION 1..9: note = Description of Artificial Sequence: Synthetic peptide
QDSGQEVNI

SEQ ID NO: 20382 - protein, 9 aa, synthetic construct
  REGION 1..9: note = Description of Artificial Sequence: Synthetic peptide
IHMGPGQVL

SEQ ID NO: 20383 - protein, 11 aa, synthetic construct
  REGION 1..11: note = Description of Artificial Sequence: Synthetic peptide
TQVDPGLADQL

SEQ ID NO: 20384 - protein, 9 aa, synthetic construct
  REGION 1..9: note = Description of Artificial Sequence: Synthetic peptide
YRTQVDPGL

SEQ ID NO: 20385 - protein, 11 aa, synthetic construct
  REGION 1..11: note = Description of Artificial Sequence: Synthetic peptide
THQDPIPGQPL

SEQ ID NO: 20386 - protein, 11 aa, synthetic construct
  REGION 1..11: note = Description of Artificial Sequence: Synthetic peptide
VHAGPVAPGQM

SEQ ID NO: 20387 - protein, 9 aa, synthetic construct
  REGION 1..9: note = Description of Artificial Sequence: Synthetic peptide
THLEGKVIL

SEQ ID NO: 20388 - protein, 9 aa, synthetic construct
  REGION 1..9: note = Description of Artificial Sequence: Synthetic peptide
EHLKTAVQM

SEQ ID NO: 20389 - protein, 9 aa, synthetic construct
  REGION 1..9: note = Description of Artificial Sequence: Synthetic peptide
SQVTNTNIM

SEQ ID NO: 20390 - protein, 10 aa, synthetic construct
  REGION 1..10: note = Description of Artificial Sequence: Synthetic peptide
HQDPIPGQPL

SEQ ID NO: 20391 - protein, 9 aa, synthetic construct
  REGION 1..9: note = Description of Artificial Sequence: Synthetic peptide
FQQGEAREL

SEQ ID NO: 20392 - protein, 9 aa, synthetic construct
  REGION 1..9: note = Description of Artificial Sequence: Synthetic peptide
IHTDNGSNF

SEQ ID NO: 20393 - protein, 9 aa, synthetic construct
  REGION 1..9: note = Description of Artificial Sequence: Synthetic peptide
NRVLGTVAA

SEQ ID NO: 20394 - protein, 9 aa, synthetic construct
  REGION 1..9: note = Description of Artificial Sequence: Synthetic peptide
EHFNKTINF

SEQ ID NO: 20395 - protein, 9 aa, synthetic construct
  REGION 1..9: note = Description of Artificial Sequence: Synthetic peptide
VHIPLGEAI

SEQ ID NO: 20396 - protein, 9 aa, synthetic construct
  REGION 1..9: note = Description of Artificial Sequence: Synthetic peptide
NRVLGTVAA

SEQ ID NO: 20397 - protein, 8 aa, synthetic construct
  REGION 1..8: note = Description of Artificial Sequence: Synthetic peptide
NRVLGTVA

SEQ ID NO: 20398 - protein, 9 aa, synthetic construct
  REGION 1..9: note = Description of Artificial Sequence: Synthetic peptide
NATAIAVAA

SEQ ID NO: 20399 - protein, 10 aa, synthetic construct
  REGION 1..10: note = Description of Artificial Sequence: Synthetic peptide
SQYALGIIQA

SEQ ID NO: 20400 - protein, 9 aa, synthetic construct
  REGION 1..9: note = Description of Artificial Sequence: Synthetic peptide
VQLGIPHPA

SEQ ID NO: 20401 - protein, 9 aa, synthetic construct
  REGION 1..9: note = Description of Artificial Sequence: Synthetic peptide
MRRAPAPAA

SEQ ID NO: 20402 - protein, 8 aa, synthetic construct
  REGION 1..8: note = Description of Artificial Sequence: Synthetic peptide
THGIKPVV

SEQ ID NO: 20403 - protein, 8 aa, synthetic construct
  REGION 1..8: note = Description of Artificial Sequence: Synthetic peptide
VHIPLGEA

SEQ ID NO: 20404 - protein, 8 aa, synthetic construct
  REGION 1..8: note = Description of Artificial Sequence: Synthetic peptide
WQRPLVTV

SEQ ID NO: 20405 - protein, 9 aa, synthetic construct
  REGION 1..9: note = Description of Artificial Sequence: Synthetic peptide
SHNISTNST

SEQ ID NO: 20406 - protein, 8 aa, synthetic construct
  REGION 1..8: note = Description of Artificial Sequence: Synthetic peptide
GKVILVAV

SEQ ID NO: 20407 - protein, 9 aa, synthetic construct
  REGION 1..9: note = Description of Artificial Sequence: Synthetic peptide
QRVGQAIYA

SEQ ID NO: 20408 - protein, 8 aa, synthetic construct
  REGION 1..8: note = Description of Artificial Sequence: Synthetic peptide
MHEDIISV

SEQ ID NO: 20409 - protein, 9 aa, synthetic construct
  REGION 1..9: note = Description of Artificial Sequence: Synthetic peptide
NHPKVSSEV

SEQ ID NO: 20410 - protein, 9 aa, synthetic construct
  REGION 1..9: note = Description of Artificial Sequence: Synthetic peptide
QRTGQAIYA

SEQ ID NO: 20411 - protein, 8 aa, synthetic construct
  REGION 1..8: note = Description of Artificial Sequence: Synthetic peptide
MHDDIISV

SEQ ID NO: 20412 - protein, 9 aa, synthetic construct
  REGION 1..9: note = Description of Artificial Sequence: Synthetic peptide
AEVVQKIAL

SEQ ID NO: 20413 - protein, 9 aa, synthetic construct
  REGION 1..9: note = Description of Artificial Sequence: Synthetic peptide
TEAVQKIAL

SEQ ID NO: 20414 - protein, 9 aa, synthetic construct
  REGION 1..9: note = Description of Artificial Sequence: Synthetic peptide
IEDEEREVL

SEQ ID NO: 20415 - protein, 10 aa, synthetic construct
  REGION 1..10: note = Description of Artificial Sequence: Synthetic peptide
IEIKDTMEAL

SEQ ID NO: 20416 - protein, 9 aa, synthetic construct
  REGION 1..9: note = Description of Artificial Sequence: Synthetic peptide
MEDEDREVL

SEQ ID NO: 20417 - protein, 9 aa, synthetic construct
  REGION 1..9: note = Description of Artificial Sequence: Synthetic peptide
QENNEKDLL

SEQ ID NO: 20418 - protein, 9 aa, synthetic construct
  REGION 1..9: note = Description of Artificial Sequence: Synthetic peptide
SEGATPQDL

SEQ ID NO: 20419 - protein, 8 aa, synthetic construct
  REGION 1..8: note = Description of Artificial Sequence: Synthetic peptide
IETVPVKL

SEQ ID NO: 20420 - protein, 10 aa, synthetic construct
  REGION 1..10: note = Description of Artificial Sequence: Synthetic peptide
QELKNSAISL

SEQ ID NO: 20421 - protein, 9 aa, synthetic construct
  REGION 1..9: note = Description of Artificial Sequence: Synthetic peptide
KELYPSASL

SEQ ID NO: 20422 - protein, 10 aa, synthetic construct
  REGION 1..10: note = Description of Artificial Sequence: Synthetic peptide
MEDEDREVLM

SEQ ID NO: 20423 - protein, 8 aa, synthetic construct
  REGION 1..8: note = Description of Artificial Sequence: Synthetic peptide
GELVHQAL

SEQ ID NO: 20424 - protein, 10 aa, synthetic construct
  REGION 1..10: note = Description of Artificial Sequence: Synthetic peptide
KEALDKIEEL

SEQ ID NO: 20425 - protein, 9 aa, synthetic construct
  REGION 1..9: note = Description of Artificial Sequence: Synthetic peptide
NETVNITCF

SEQ ID NO: 20426 - protein, 9 aa, synthetic construct
  REGION 1..9: note = Description of Artificial Sequence: Synthetic peptide
KELYPLTSL

SEQ ID NO: 20427 - protein, 9 aa, synthetic construct
  REGION 1..9: note = Description of Artificial Sequence: Synthetic peptide
QEKNEQDLL

SEQ ID NO: 20428 - protein, 9 aa, synthetic construct
  REGION 1..9: note = Description of Artificial Sequence: Synthetic peptide
QEKNEQELL

SEQ ID NO: 20429 - protein, 10 aa, synthetic construct
  REGION 1..10: note = Description of Artificial Sequence: Synthetic peptide
AEHLKTAVQM

SEQ ID NO: 20430 - protein, 8 aa, synthetic construct
  REGION 1..8: note = Description of Artificial Sequence: Synthetic peptide
IEAQQHLL

SEQ ID NO: 20431 - protein, 9 aa, synthetic construct
  REGION 1..9: note = Description of Artificial Sequence: Synthetic peptide
AEMEEEGKI

SEQ ID NO: 20432 - protein, 9 aa, synthetic construct
  REGION 1..9: note = Description of Artificial Sequence: Synthetic peptide
AEVVQKIAL

SEQ ID NO: 20433 - protein, 9 aa, synthetic construct
  REGION 1..9: note = Description of Artificial Sequence: Synthetic peptide
TEAVQKIAL

SEQ ID NO: 20434 - protein, 8 aa, synthetic construct
  REGION 1..8: note = Description of Artificial Sequence: Synthetic peptide
GELVHQAL

SEQ ID NO: 20435 - protein, 9 aa, synthetic construct
  REGION 1..9: note = Description of Artificial Sequence: Synthetic peptide
NETVNITCF

SEQ ID NO: 20436 - protein, 8 aa, synthetic construct
  REGION 1..8: note = Description of Artificial Sequence: Synthetic peptide
SDIQTKEL

SEQ ID NO: 20437 - protein, 9 aa, synthetic construct
  REGION 1..9: note = Description of Artificial Sequence: Synthetic peptide
TEVVQKISC

SEQ ID NO: 20438 - protein, 10 aa, synthetic construct
  REGION 1..10: note = Description of Artificial Sequence: Synthetic peptide
IEIKDTMEAL

SEQ ID NO: 20439 - protein, 8 aa, synthetic construct
  REGION 1..8: note = Description of Artificial Sequence: Synthetic peptide
TDIQTREL

SEQ ID NO: 20440 - protein, 10 aa, synthetic construct
  REGION 1..10: note = Description of Artificial Sequence: Synthetic peptide
AEHLKTAVQM

SEQ ID NO: 20441 - protein, 9 aa, synthetic construct
  REGION 1..9: note = Description of Artificial Sequence: Synthetic peptide
SERDWSNTL

SEQ ID NO: 20442 - protein, 8 aa, synthetic construct
  REGION 1..8: note = Description of Artificial Sequence: Synthetic peptide
IETVPVKL

SEQ ID NO: 20443 - protein, 10 aa, synthetic construct
  REGION 1..10: note = Description of Artificial Sequence: Synthetic peptide
QELKNSAISL

SEQ ID NO: 20444 - protein, 9 aa, synthetic construct
  REGION 1..9: note = Description of Artificial Sequence: Synthetic peptide
SEVHIPLGC

SEQ ID NO: 20445 - protein, 9 aa, synthetic construct
  REGION 1..9: note = Description of Artificial Sequence: Synthetic peptide
SEIMKNCSF

SEQ ID NO: 20446 - protein, 9 aa, synthetic construct
  REGION 1..9: note = Description of Artificial Sequence: Synthetic peptide
KELYPLTSL

SEQ ID NO: 20447 - protein, 10 aa, synthetic construct
  REGION 1..10: note = Description of Artificial Sequence: Synthetic peptide
GEIIGNIRET

SEQ ID NO: 20448 - protein, 9 aa, synthetic construct
  REGION 1..9: note = Description of Artificial Sequence: Synthetic peptide
AEWDRVHPV

SEQ ID NO: 20449 - protein, 9 aa, synthetic construct
  REGION 1..9: note = Description of Artificial Sequence: Synthetic peptide
IEDEEREVL

SEQ ID NO: 20450 - protein, 8 aa, synthetic construct
  REGION 1..8: note = Description of Artificial Sequence: Synthetic peptide
IEAQQHLL

SEQ ID NO: 20451 - protein, 9 aa, synthetic construct
  REGION 1..9: note = Description of Artificial Sequence: Synthetic peptide
SERIPSSCL

SEQ ID NO: 20452 - protein, 9 aa, synthetic construct
  REGION 1..9: note = Description of Artificial Sequence: Synthetic peptide
SDFNLPPVV

SEQ ID NO: 20453 - protein, 9 aa, synthetic construct
  REGION 1..9: note = Description of Artificial Sequence: Synthetic peptide
MEDEDREVL

SEQ ID NO: 20454 - protein, 9 aa, synthetic construct
  REGION 1..9: note = Description of Artificial Sequence: Synthetic peptide
KELYPSASL

SEQ ID NO: 20455 - protein, 9 aa, synthetic construct
  REGION 1..9: note = Description of Artificial Sequence: Synthetic peptide
SEGATPQDL

SEQ ID NO: 20456 - protein, 10 aa, synthetic construct
  REGION 1..10: note = Description of Artificial Sequence: Synthetic peptide
QEIKSLYNTV

SEQ ID NO: 20457 - protein, 9 aa, synthetic construct
  REGION 1..9: note = Description of Artificial Sequence: Synthetic peptide
SEAAIRKAI

SEQ ID NO: 20458 - protein, 8 aa, synthetic construct
  REGION 1..8: note = Description of Artificial Sequence: Synthetic peptide
GEQILVQI

SEQ ID NO: 20459 - protein, 9 aa, synthetic construct
  REGION 1..9: note = Description of Artificial Sequence: Synthetic peptide
SESELVNQI

SEQ ID NO: 20460 - protein, 8 aa, synthetic construct
  REGION 1..8: note = Description of Artificial Sequence: Synthetic peptide
AELVVTTY

SEQ ID NO: 20461 - protein, 9 aa, synthetic construct
  REGION 1..9: note = Description of Artificial Sequence: Synthetic peptide
KEVESKAEP

SEQ ID NO: 20462 - protein, 10 aa, synthetic construct
  REGION 1..10: note = Description of Artificial Sequence: Synthetic peptide
RELSPEQTRA

SEQ ID NO: 20463 - protein, 9 aa, synthetic construct
  REGION 1..9: note = Description of Artificial Sequence: Synthetic peptide
EEVGFPVTP

SEQ ID NO: 20464 - protein, 10 aa, synthetic construct
  REGION 1..10: note = Description of Artificial Sequence: Synthetic peptide
VEIEPLGVAP

SEQ ID NO: 20465 - protein, 9 aa, synthetic construct
  REGION 1..9: note = Description of Artificial Sequence: Synthetic peptide
EEVGFPVKP

SEQ ID NO: 20466 - protein, 9 aa, synthetic construct
  REGION 1..9: note = Description of Artificial Sequence: Synthetic peptide
GESGVLLGA

SEQ ID NO: 20467 - protein, 9 aa, synthetic construct
  REGION 1..9: note = Description of Artificial Sequence: Synthetic peptide
SEVHIPLGC

SEQ ID NO: 20468 - protein, 10 aa, synthetic construct
  REGION 1..10: note = Description of Artificial Sequence: Synthetic peptide
GEIIGNIRET

SEQ ID NO: 20469 - protein, 9 aa, synthetic construct
  REGION 1..9: note = Description of Artificial Sequence: Synthetic peptide
IEIKDTMEA

SEQ ID NO: 20470 - protein, 9 aa, synthetic construct
  REGION 1..9: note = Description of Artificial Sequence: Synthetic peptide
EEVGFPVRP

SEQ ID NO: 20471 - protein, 9 aa, synthetic construct
  REGION 1..9: note = Description of Artificial Sequence: Synthetic peptide
LEKEPIMGA

SEQ ID NO: 20472 - protein, 8 aa, synthetic construct
  REGION 1..8: note = Description of Artificial Sequence: Synthetic peptide
RDFVLIAA

SEQ ID NO: 20473 - protein, 9 aa, synthetic construct
  REGION 1..9: note = Description of Artificial Sequence: Synthetic peptide
VEIEPLGVA

SEQ ID NO: 20474 - protein, 10 aa, synthetic construct
  REGION 1..10: note = Description of Artificial Sequence: Synthetic peptide
SEVHIPLGEA

SEQ ID NO: 20475 - protein, 8 aa, synthetic construct
  REGION 1..8: note = Description of Artificial Sequence: Synthetic peptide
SEAAIRKA

SEQ ID NO: 20476 - protein, 9 aa, synthetic construct
  REGION 1..9: note = Description of Artificial Sequence: Synthetic peptide
QEFGIPYNP

SEQ ID NO: 20477 - protein, 9 aa, synthetic construct
  REGION 1..9: note = Description of Artificial Sequence: Synthetic peptide
AEWDRVHPV

SEQ ID NO: 20478 - protein, 10 aa, synthetic construct
  REGION 1..10: note = Description of Artificial Sequence: Synthetic peptide
SDFNLPPVVA

SEQ ID NO: 20479 - protein, 8 aa, synthetic construct
  REGION 1..8: note = Description of Artificial Sequence: Synthetic peptide
AEVVQKIA

SEQ ID NO: 20480 - protein, 9 aa, synthetic construct
  REGION 1..9: note = Description of Artificial Sequence: Synthetic peptide
AEVVQKIAL

SEQ ID NO: 20481 - protein, 9 aa, synthetic construct
  REGION 1..9: note = Description of Artificial Sequence: Synthetic peptide
TEAVQKIAL

SEQ ID NO: 20482 - protein, 8 aa, synthetic construct
  REGION 1..8: note = Description of Artificial Sequence: Synthetic peptide
GELVHQAL

SEQ ID NO: 20483 - protein, 9 aa, synthetic construct
  REGION 1..9: note = Description of Artificial Sequence: Synthetic peptide
SERIPSSCL

SEQ ID NO: 20484 - protein, 9 aa, synthetic construct
  REGION 1..9: note = Description of Artificial Sequence: Synthetic peptide
SERDWSNTL

SEQ ID NO: 20485 - protein, 8 aa, synthetic construct
  REGION 1..8: note = Description of Artificial Sequence: Synthetic peptide
SDIQTKEL

SEQ ID NO: 20486 - protein, 9 aa, synthetic construct
  REGION 1..9: note = Description of Artificial Sequence: Synthetic peptide
IEDEEREVL

SEQ ID NO: 20487 - protein, 8 aa, synthetic construct
  REGION 1..8: note = Description of Artificial Sequence: Synthetic peptide
AEVQKQGL

SEQ ID NO: 20488 - protein, 8 aa, synthetic construct
  REGION 1..8: note = Description of Artificial Sequence: Synthetic peptide
TDIQTREL

SEQ ID NO: 20489 - protein, 8 aa, synthetic construct
  REGION 1..8: note = Description of Artificial Sequence: Synthetic peptide
AEHLKTAV

SEQ ID NO: 20490 - protein, 9 aa, synthetic construct
  REGION 1..9: note = Description of Artificial Sequence: Synthetic peptide
MEDEDREVL

SEQ ID NO: 20491 - protein, 9 aa, synthetic construct
  REGION 1..9: note = Description of Artificial Sequence: Synthetic peptide
SEIMKNCSF

SEQ ID NO: 20492 - protein, 9 aa, synthetic construct
  REGION 1..9: note = Description of Artificial Sequence: Synthetic peptide
QEKNEQELL

SEQ ID NO: 20493 - protein, 9 aa, synthetic construct
  REGION 1..9: note = Description of Artificial Sequence: Synthetic peptide
SEAAIRKAI

SEQ ID NO: 20494 - protein, 8 aa, synthetic construct
  REGION 1..8: note = Description of Artificial Sequence: Synthetic peptide
IEAQQHLL

SEQ ID NO: 20495 - protein, 9 aa, synthetic construct
  REGION 1..9: note = Description of Artificial Sequence: Synthetic peptide
QEKNEQDLL

SEQ ID NO: 20496 - protein, 9 aa, synthetic construct
  REGION 1..9: note = Description of Artificial Sequence: Synthetic peptide
IEIEGKKAI

SEQ ID NO: 20497 - protein, 8 aa, synthetic construct
  REGION 1..8: note = Description of Artificial Sequence: Synthetic peptide
AEKLWVTV

SEQ ID NO: 20498 - protein, 9 aa, synthetic construct
  REGION 1..9: note = Description of Artificial Sequence: Synthetic peptide
GEQGRTRSI

SEQ ID NO: 20499 - protein, 9 aa, synthetic construct
  REGION 1..9: note = Description of Artificial Sequence: Synthetic peptide
SERILSACL

SEQ ID NO: 20500 - protein, 10 aa, synthetic construct
  REGION 1..10: note = Description of Artificial Sequence: Synthetic peptide
AEHLKTAVQM

SEQ ID NO: 20501 - protein, 9 aa, synthetic construct
  REGION 1..9: note = Description of Artificial Sequence: Synthetic peptide
TEVVQKISC

SEQ ID NO: 20502 - protein, 8 aa, synthetic construct
  REGION 1..8: note = Description of Artificial Sequence: Synthetic peptide
TERQANFL

SEQ ID NO: 20503 - protein, 9 aa, synthetic construct
  REGION 1..9: note = Description of Artificial Sequence: Synthetic peptide
KELYPLTSL

SEQ ID NO: 20504 - protein, 9 aa, synthetic construct
  REGION 1..9: note = Description of Artificial Sequence: Synthetic peptide
NETVNITCF

SEQ ID NO: 20505 - protein, 8 aa, synthetic construct
  REGION 1..8: note = Description of Artificial Sequence: Synthetic peptide
IEIVTHSF

SEQ ID NO: 20506 - protein, 9 aa, synthetic construct
  REGION 1..9: note = Description of Artificial Sequence: Synthetic peptide
QENNEKDLL

SEQ ID NO: 20507 - protein, 9 aa, synthetic construct
  REGION 1..9: note = Description of Artificial Sequence: Synthetic peptide
KEKGGLDGL

SEQ ID NO: 20508 - protein, 8 aa, synthetic construct
  REGION 1..8: note = Description of Artificial Sequence: Synthetic peptide
TERVVGDI

SEQ ID NO: 20509 - protein, 9 aa, synthetic construct
  REGION 1..9: note = Description of Artificial Sequence: Synthetic peptide
KELYPSASL

SEQ ID NO: 20510 - protein, 8 aa, synthetic construct
  REGION 1..8: note = Description of Artificial Sequence: Synthetic peptide
AELVVTTY

SEQ ID NO: 20511 - protein, 10 aa, synthetic construct
  REGION 1..10: note = Description of Artificial Sequence: Synthetic peptide
QELKNSAISL

SEQ ID NO: 20512 - protein, 9 aa, synthetic construct
  REGION 1..9: note = Description of Artificial Sequence: Synthetic peptide
AEWDRVHPV

SEQ ID NO: 20513 - protein, 11 aa, synthetic construct
  REGION 1..11: note = Description of Artificial Sequence: Synthetic peptide
AEQATQDVKNW

SEQ ID NO: 20514 - protein, 11 aa, synthetic construct
  REGION 1..11: note = Description of Artificial Sequence: Synthetic peptide
AEQATQEVKNW

SEQ ID NO: 20515 - protein, 11 aa, synthetic construct
  REGION 1..11: note = Description of Artificial Sequence: Synthetic peptide
QEVNIVTDSQY

SEQ ID NO: 20516 - protein, 9 aa, synthetic construct
  REGION 1..9: note = Description of Artificial Sequence: Synthetic peptide
EEIDLPGKW

SEQ ID NO: 20517 - protein, 9 aa, synthetic construct
  REGION 1..9: note = Description of Artificial Sequence: Synthetic peptide
AELVVTTYW

SEQ ID NO: 20518 - protein, 9 aa, synthetic construct
  REGION 1..9: note = Description of Artificial Sequence: Synthetic peptide
SEIMKNCSF

SEQ ID NO: 20519 - protein, 9 aa, synthetic construct
  REGION 1..9: note = Description of Artificial Sequence: Synthetic peptide
SEAAIRKAI

SEQ ID NO: 20520 - protein, 9 aa, synthetic construct
  REGION 1..9: note = Description of Artificial Sequence: Synthetic peptide
VEMGPHDLW

SEQ ID NO: 20521 - protein, 11 aa, synthetic construct
  REGION 1..11: note = Description of Artificial Sequence: Synthetic peptide
NEQDLLALDKW

SEQ ID NO: 20522 - protein, 11 aa, synthetic construct
  REGION 1..11: note = Description of Artificial Sequence: Synthetic peptide
AEGQGTVSSNF

SEQ ID NO: 20523 - protein, 9 aa, synthetic construct
  REGION 1..9: note = Description of Artificial Sequence: Synthetic peptide
AETGQETAF

SEQ ID NO: 20524 - protein, 10 aa, synthetic construct
  REGION 1..10: note = Description of Artificial Sequence: Synthetic peptide
NETPGIRYQY

SEQ ID NO: 20525 - protein, 11 aa, synthetic construct
  REGION 1..11: note = Description of Artificial Sequence: Synthetic peptide
AEVQKQGLDQW

SEQ ID NO: 20526 - protein, 9 aa, synthetic construct
  REGION 1..9: note = Description of Artificial Sequence: Synthetic peptide
AETGQEAAF

SEQ ID NO: 20527 - protein, 9 aa, synthetic construct
  REGION 1..9: note = Description of Artificial Sequence: Synthetic peptide
NETVNITCF

SEQ ID NO: 20528 - protein, 9 aa, synthetic construct
  REGION 1..9: note = Description of Artificial Sequence: Synthetic peptide
DEIWNNMTW

SEQ ID NO: 20529 - protein, 9 aa, synthetic construct
  REGION 1..9: note = Description of Artificial Sequence: Synthetic peptide
EELREQEHF

SEQ ID NO: 20530 - protein, 9 aa, synthetic construct
  REGION 1..9: note = Description of Artificial Sequence: Synthetic peptide
EDIDLPRKW

SEQ ID NO: 20531 - protein, 11 aa, synthetic construct
  REGION 1..11: note = Description of Artificial Sequence: Synthetic peptide
QEVNIVTDSQY

SEQ ID NO: 20532 - protein, 11 aa, synthetic construct
  REGION 1..11: note = Description of Artificial Sequence: Synthetic peptide
AEQATQDVKNW

SEQ ID NO: 20533 - protein, 11 aa, synthetic construct
  REGION 1..11: note = Description of Artificial Sequence: Synthetic peptide
AEQATQEVKNW

SEQ ID NO: 20534 - protein, 9 aa, synthetic construct
  REGION 1..9: note = Description of Artificial Sequence: Synthetic peptide
EEIDLPGKW

SEQ ID NO: 20535 - protein, 11 aa, synthetic construct
  REGION 1..11: note = Description of Artificial Sequence: Synthetic peptide
AEVQKQGLDQW

SEQ ID NO: 20536 - protein, 9 aa, synthetic construct
  REGION 1..9: note = Description of Artificial Sequence: Synthetic peptide
SEAAIRKAI

SEQ ID NO: 20537 - protein, 9 aa, synthetic construct
  REGION 1..9: note = Description of Artificial Sequence: Synthetic peptide
SEIMKNCSF

SEQ ID NO: 20538 - protein, 9 aa, synthetic construct
  REGION 1..9: note = Description of Artificial Sequence: Synthetic peptide
AELVVTTYW

SEQ ID NO: 20539 - protein, 9 aa, synthetic construct
  REGION 1..9: note = Description of Artificial Sequence: Synthetic peptide
NETVNITCF

SEQ ID NO: 20540 - protein, 9 aa, synthetic construct
  REGION 1..9: note = Description of Artificial Sequence: Synthetic peptide
AEVVQKIAL

SEQ ID NO: 20541 - protein, 10 aa, synthetic construct
  REGION 1..10: note = Description of Artificial Sequence: Synthetic peptide
NETPGIRYQY

SEQ ID NO: 20542 - protein, 11 aa, synthetic construct
  REGION 1..11: note = Description of Artificial Sequence: Synthetic peptide
LEVNIVTDSQY

SEQ ID NO: 20543 - protein, 9 aa, synthetic construct
  REGION 1..9: note = Description of Artificial Sequence: Synthetic peptide
VEMGPHDLW

SEQ ID NO: 20544 - protein, 11 aa, synthetic construct
  REGION 1..11: note = Description of Artificial Sequence: Synthetic peptide
AEGQGTVSSNF

SEQ ID NO: 20545 - protein, 11 aa, synthetic construct
  REGION 1..11: note = Description of Artificial Sequence: Synthetic peptide
NEQDLLALDKW

SEQ ID NO: 20546 - protein, 9 aa, synthetic construct
  REGION 1..9: note = Description of Artificial Sequence: Synthetic peptide
SESELVNQI

SEQ ID NO: 20547 - protein, 10 aa, synthetic construct
  REGION 1..10: note = Description of Artificial Sequence: Synthetic peptide
GEAILVITTY

SEQ ID NO: 20548 - protein, 9 aa, synthetic construct
  REGION 1..9: note = Description of Artificial Sequence: Synthetic peptide
EELREQEHF

SEQ ID NO: 20549 - protein, 9 aa, synthetic construct
  REGION 1..9: note = Description of Artificial Sequence: Synthetic peptide
AETGQETAF

SEQ ID NO: 20550 - protein, 9 aa, synthetic construct
  REGION 1..9: note = Description of Artificial Sequence: Synthetic peptide
DEIWNNMTW

SEQ ID NO: 20551 - protein, 10 aa, synthetic construct
  REGION 1..10: note = Description of Artificial Sequence: Synthetic peptide
RETKIGKAGY

SEQ ID NO: 20552 - protein, 9 aa, synthetic construct
  REGION 1..9: note = Description of Artificial Sequence: Synthetic peptide
AETGQEAAF

SEQ ID NO: 20553 - protein, 9 aa, synthetic construct
  REGION 1..9: note = Description of Artificial Sequence: Synthetic peptide
EDIDLPRKW

SEQ ID NO: 20554 - protein, 9 aa, synthetic construct
  REGION 1..9: note = Description of Artificial Sequence: Synthetic peptide
EEMEKEGKI

SEQ ID NO: 20555 - protein, 8 aa, synthetic construct
  REGION 1..8: note = Description of Artificial Sequence: Synthetic peptide
AELVVTTY

SEQ ID NO: 20556 - protein, 9 aa, synthetic construct
  REGION 1..9: note = Description of Artificial Sequence: Synthetic peptide
QELLALDQW

SEQ ID NO: 20557 - protein, 9 aa, synthetic construct
  REGION 1..9: note = Description of Artificial Sequence: Synthetic peptide
AEMEEEGKI

SEQ ID NO: 20558 - protein, 11 aa, synthetic construct
  REGION 1..11: note = Description of Artificial Sequence: Synthetic peptide
GEAILVITTYW

SEQ ID NO: 20559 - protein, 9 aa, synthetic construct
  REGION 1..9: note = Description of Artificial Sequence: Synthetic peptide
QENNEKDLL

SEQ ID NO: 20560 - protein, 11 aa, synthetic construct
  REGION 1..11: note = Description of Artificial Sequence: Synthetic peptide
NEQELLALDQW

SEQ ID NO: 20561 - protein, 10 aa, synthetic construct
  REGION 1..10: note = Description of Artificial Sequence: Synthetic peptide
LEDIDLPRKW

SEQ ID NO: 20562 - protein, 9 aa, synthetic construct
  REGION 1..9: note = Description of Artificial Sequence: Synthetic peptide
IEIEGKKAI

SEQ ID NO: 20563 - protein, 8 aa, synthetic construct
  REGION 1..8: note = Description of Artificial Sequence: Synthetic peptide
NETPGIRY

SEQ ID NO: 20564 - protein, 10 aa, synthetic construct
  REGION 1..10: note = Description of Artificial Sequence: Synthetic peptide
RETKTGKAGY

SEQ ID NO: 20565 - protein, 9 aa, synthetic construct
  REGION 1..9: note = Description of Artificial Sequence: Synthetic peptide
SEIMKNCSF

SEQ ID NO: 20566 - protein, 9 aa, synthetic construct
  REGION 1..9: note = Description of Artificial Sequence: Synthetic peptide
NETVNITCF

SEQ ID NO: 20567 - protein, 9 aa, synthetic construct
  REGION 1..9: note = Description of Artificial Sequence: Synthetic peptide
AEVVQKIAL

SEQ ID NO: 20568 - protein, 9 aa, synthetic construct
  REGION 1..9: note = Description of Artificial Sequence: Synthetic peptide
TEAVQKIAL

SEQ ID NO: 20569 - protein, 11 aa, synthetic construct
  REGION 1..11: note = Description of Artificial Sequence: Synthetic peptide
AEQATQEVKNW

SEQ ID NO: 20570 - protein, 11 aa, synthetic construct
  REGION 1..11: note = Description of Artificial Sequence: Synthetic peptide
AEGQGTVSSNF

SEQ ID NO: 20571 - protein, 11 aa, synthetic construct
  REGION 1..11: note = Description of Artificial Sequence: Synthetic peptide
AEQATQDVKNW

SEQ ID NO: 20572 - protein, 9 aa, synthetic construct
  REGION 1..9: note = Description of Artificial Sequence: Synthetic peptide
AEMEEEGKI

SEQ ID NO: 20573 - protein, 9 aa, synthetic construct
  REGION 1..9: note = Description of Artificial Sequence: Synthetic peptide
EEIDLPGKW

SEQ ID NO: 20574 - protein, 9 aa, synthetic construct
  REGION 1..9: note = Description of Artificial Sequence: Synthetic peptide
AETGQETAF

SEQ ID NO: 20575 - protein, 9 aa, synthetic construct
  REGION 1..9: note = Description of Artificial Sequence: Synthetic peptide
EELREQEHF

SEQ ID NO: 20576 - protein, 11 aa, synthetic construct
  REGION 1..11: note = Description of Artificial Sequence: Synthetic peptide
QEVNIVTDSQY

SEQ ID NO: 20577 - protein, 9 aa, synthetic construct
  REGION 1..9: note = Description of Artificial Sequence: Synthetic peptide
AETGQEAAF

SEQ ID NO: 20578 - protein, 11 aa, synthetic construct
  REGION 1..11: note = Description of Artificial Sequence: Synthetic peptide
AEVQKQGLDQW

SEQ ID NO: 20579 - protein, 11 aa, synthetic construct
  REGION 1..11: note = Description of Artificial Sequence: Synthetic peptide
AELELAENREI

SEQ ID NO: 20580 - protein, 10 aa, synthetic construct
  REGION 1..10: note = Description of Artificial Sequence: Synthetic peptide
AETGQETAFF

SEQ ID NO: 20581 - protein, 9 aa, synthetic construct
  REGION 1..9: note = Description of Artificial Sequence: Synthetic peptide
QENNEKDLL

SEQ ID NO: 20582 - protein, 11 aa, synthetic construct
  REGION 1..11: note = Description of Artificial Sequence: Synthetic peptide
AELELAENKEI

SEQ ID NO: 20583 - protein, 9 aa, synthetic construct
  REGION 1..9: note = Description of Artificial Sequence: Synthetic peptide
SERDWSNTL

SEQ ID NO: 20584 - protein, 10 aa, synthetic construct
  REGION 1..10: note = Description of Artificial Sequence: Synthetic peptide
AEHLKTAVQM

SEQ ID NO: 20585 - protein, 9 aa, synthetic construct
  REGION 1..9: note = Description of Artificial Sequence: Synthetic peptide
SESELVNQI

SEQ ID NO: 20586 - protein, 10 aa, synthetic construct
  REGION 1..10: note = Description of Artificial Sequence: Synthetic peptide
QELKNSAISL

SEQ ID NO: 20587 - protein, 10 aa, synthetic construct
  REGION 1..10: note = Description of Artificial Sequence: Synthetic peptide
AEELREQEHF

SEQ ID NO: 20588 - protein, 10 aa, synthetic construct
  REGION 1..10: note = Description of Artificial Sequence: Synthetic peptide
AETGQEAAFF

SEQ ID NO: 20589 - protein, 10 aa, synthetic construct
  REGION 1..10: note = Description of Artificial Sequence: Synthetic peptide
AEGTDRIIEI

SEQ ID NO: 20590 - protein, 10 aa, synthetic construct
  REGION 1..10: note = Description of Artificial Sequence: Synthetic peptide
EEIKSLYNTV

SEQ ID NO: 20591 - protein, 9 aa, synthetic construct
  REGION 1..9: note = Description of Artificial Sequence: Synthetic peptide
SEAAIRKAI

SEQ ID NO: 20592 - protein, 9 aa, synthetic construct
  REGION 1..9: note = Description of Artificial Sequence: Synthetic peptide
EEMEKEGKI

SEQ ID NO: 20593 - protein, 9 aa, synthetic construct
  REGION 1..9: note = Description of Artificial Sequence: Synthetic peptide
KESNSSETF

SEQ ID NO: 20594 - protein, 9 aa, synthetic construct
  REGION 1..9: note = Description of Artificial Sequence: Synthetic peptide
SEGATPQDL

SEQ ID NO: 20595 - protein, 10 aa, synthetic construct
  REGION 1..10: note = Description of Artificial Sequence: Synthetic peptide
KEPIMGAETF

SEQ ID NO: 20596 - protein, 9 aa, synthetic construct
  REGION 1..9: note = Description of Artificial Sequence: Synthetic peptide
NEGEDNRLL

SEQ ID NO: 20597 - protein, 9 aa, synthetic construct
  REGION 1..9: note = Description of Artificial Sequence: Synthetic peptide
SERIPSSCL

SEQ ID NO: 20598 - protein, 10 aa, synthetic construct
  REGION 1..10: note = Description of Artificial Sequence: Synthetic peptide
GDIEIVTHSF

SEQ ID NO: 20599 - protein, 9 aa, synthetic construct
  REGION 1..9: note = Description of Artificial Sequence: Synthetic peptide
QEKNEQDLL

SEQ ID NO: 20600 - protein, 9 aa, synthetic construct
  REGION 1..9: note = Description of Artificial Sequence: Synthetic peptide
QEKNEQELL

SEQ ID NO: 20601 - protein, 9 aa, synthetic construct
  REGION 1..9: note = Description of Artificial Sequence: Synthetic peptide
EEGTISFSF

SEQ ID NO: 20602 - protein, 11 aa, synthetic construct
  REGION 1..11: note = Description of Artificial Sequence: Synthetic peptide
LEAQTEEEVGF

SEQ ID NO: 20603 - protein, 8 aa, synthetic construct
  REGION 1..8: note = Description of Artificial Sequence: Synthetic peptide
GELVHQAL

SEQ ID NO: 20604 - protein, 9 aa, synthetic construct
  REGION 1..9: note = Description of Artificial Sequence: Synthetic peptide
EELAKLVEM

SEQ ID NO: 20605 - protein, 9 aa, synthetic construct
  REGION 1..9: note = Description of Artificial Sequence: Synthetic peptide
KELYPSASL

SEQ ID NO: 20606 - protein, 9 aa, synthetic construct
  REGION 1..9: note = Description of Artificial Sequence: Synthetic peptide
AELVVTTYW

SEQ ID NO: 20607 - protein, 11 aa, synthetic construct
  REGION 1..11: note = Description of Artificial Sequence: Synthetic peptide
QELKNSAISLL

SEQ ID NO: 20608 - protein, 11 aa, synthetic construct
  REGION 1..11: note = Description of Artificial Sequence: Synthetic peptide
AEGGEQILVQI

SEQ ID NO: 20609 - protein, 9 aa, synthetic construct
  REGION 1..9: note = Description of Artificial Sequence: Synthetic peptide
VETNSACAW

SEQ ID NO: 20610 - protein, 9 aa, synthetic construct
  REGION 1..9: note = Description of Artificial Sequence: Synthetic peptide
QLTEVVQKI

SEQ ID NO: 20611 - protein, 11 aa, synthetic construct
  REGION 1..11: note = Description of Artificial Sequence: Synthetic peptide
LEVNIVTDSQY

SEQ ID NO: 20612 - protein, 8 aa, synthetic construct
  REGION 1..8: note = Description of Artificial Sequence: Synthetic peptide
SDIQTKEL

SEQ ID NO: 20613 - protein, 9 aa, synthetic construct
  REGION 1..9: note = Description of Artificial Sequence: Synthetic peptide
AEGGEQILV

SEQ ID NO: 20614 - protein, 9 aa, synthetic construct
  REGION 1..9: note = Description of Artificial Sequence: Synthetic peptide
LQKGLGISY

SEQ ID NO: 20615 - protein, 10 aa, synthetic construct
  REGION 1..10: note = Description of Artificial Sequence: Synthetic peptide
VSIDNSNSSY

SEQ ID NO: 20616 - protein, 10 aa, synthetic construct
  REGION 1..10: note = Description of Artificial Sequence: Synthetic peptide
ILKEPVHGVY

SEQ ID NO: 20617 - protein, 9 aa, synthetic construct
  REGION 1..9: note = Description of Artificial Sequence: Synthetic peptide
IIANVTENF

SEQ ID NO: 20618 - protein, 9 aa, synthetic construct
  REGION 1..9: note = Description of Artificial Sequence: Synthetic peptide
RAVGIGAVF

SEQ ID NO: 20619 - protein, 9 aa, synthetic construct
  REGION 1..9: note = Description of Artificial Sequence: Synthetic peptide
FLGTAGSTM

SEQ ID NO: 20620 - protein, 9 aa, synthetic construct
  REGION 1..9: note = Description of Artificial Sequence: Synthetic peptide
KALTDIVAL

SEQ ID NO: 20621 - protein, 8 aa, synthetic construct
  REGION 1..8: note = Description of Artificial Sequence: Synthetic peptide
GQPVHQAL

SEQ ID NO: 20622 - protein, 10 aa, synthetic construct
  REGION 1..10: note = Description of Artificial Sequence: Synthetic peptide
SLFGSDPSSQ

SEQ ID NO: 20623 - protein, 9 aa, synthetic construct
  REGION 1..9: note = Description of Artificial Sequence: Synthetic peptide
KAIEAQQHL

SEQ ID NO: 20624 - protein, 9 aa, synthetic construct
  REGION 1..9: note = Description of Artificial Sequence: Synthetic peptide
GKKAIGTVL

SEQ ID NO: 20625 - protein, 8 aa, synthetic construct
  REGION 1..8: note = Description of Artificial Sequence: Synthetic peptide
HQAAMQML

SEQ ID NO: 20626 - protein, 8 aa, synthetic construct
  REGION 1..8: note = Description of Artificial Sequence: Synthetic peptide
AKTIIVQL

SEQ ID NO: 20627 - protein, 9 aa, synthetic construct
  REGION 1..9: note = Description of Artificial Sequence: Synthetic peptide
IKPVVSTQL

SEQ ID NO: 20628 - protein, 9 aa, synthetic construct
  REGION 1..9: note = Description of Artificial Sequence: Synthetic peptide
RALGAGATL

SEQ ID NO: 20629 - protein, 9 aa, synthetic construct
  REGION 1..9: note = Description of Artificial Sequence: Synthetic peptide
IHMGPGQVL

SEQ ID NO: 20630 - protein, 8 aa, synthetic construct
  REGION 1..8: note = Description of Artificial Sequence: Synthetic peptide
AKNIIVQL

SEQ ID NO: 20631 - protein, 9 aa, synthetic construct
  REGION 1..9: note = Description of Artificial Sequence: Synthetic peptide
KALGSGATL

SEQ ID NO: 20632 - protein, 8 aa, synthetic construct
  REGION 1..8: note = Description of Artificial Sequence: Synthetic peptide
HMGPGQVL

SEQ ID NO: 20633 - protein, 9 aa, synthetic construct
  REGION 1..9: note = Description of Artificial Sequence: Synthetic peptide
FQQGEAREL

SEQ ID NO: 20634 - protein, 10 aa, synthetic construct
  REGION 1..10: note = Description of Artificial Sequence: Synthetic peptide
HQDPIPGQPL

SEQ ID NO: 20635 - protein, 8 aa, synthetic construct
  REGION 1..8: note = Description of Artificial Sequence: Synthetic peptide
KQLQARVL

SEQ ID NO: 20636 - protein, 8 aa, synthetic construct
  REGION 1..8: note = Description of Artificial Sequence: Synthetic peptide
KKAIGTVL

SEQ ID NO: 20637 - protein, 9 aa, synthetic construct
  REGION 1..9: note = Description of Artificial Sequence: Synthetic peptide
SESELVNQI

SEQ ID NO: 20638 - protein, 9 aa, synthetic construct
  REGION 1..9: note = Description of Artificial Sequence: Synthetic peptide
IEIEGKKAI

SEQ ID NO: 20639 - protein, 8 aa, synthetic construct
  REGION 1..8: note = Description of Artificial Sequence: Synthetic peptide
VEIEPLGV

SEQ ID NO: 20640 - protein, 10 aa, synthetic construct
  REGION 1..10: note = Description of Artificial Sequence: Synthetic peptide
QEIKSLYNTV

SEQ ID NO: 20641 - protein, 9 aa, synthetic construct
  REGION 1..9: note = Description of Artificial Sequence: Synthetic peptide
AEMEEEGKI

SEQ ID NO: 20642 - protein, 9 aa, synthetic construct
  REGION 1..9: note = Description of Artificial Sequence: Synthetic peptide
AEWDRVHPV

SEQ ID NO: 20643 - protein, 10 aa, synthetic construct
  REGION 1..10: note = Description of Artificial Sequence: Synthetic peptide
CEYQAGHNKV

SEQ ID NO: 20644 - protein, 9 aa, synthetic construct
  REGION 1..9: note = Description of Artificial Sequence: Synthetic peptide
AEVVQKIAL

SEQ ID NO: 20645 - protein, 9 aa, synthetic construct
  REGION 1..9: note = Description of Artificial Sequence: Synthetic peptide
REINNYTGI

SEQ ID NO: 20646 - protein, 10 aa, synthetic construct
  REGION 1..10: note = Description of Artificial Sequence: Synthetic peptide
EEIKSLYNTV

SEQ ID NO: 20647 - protein, 8 aa, synthetic construct
  REGION 1..8: note = Description of Artificial Sequence: Synthetic peptide
GEQILVQI

SEQ ID NO: 20648 - protein, 10 aa, synthetic construct
  REGION 1..10: note = Description of Artificial Sequence: Synthetic peptide
AESFGFGEKI

SEQ ID NO: 20649 - protein, 9 aa, synthetic construct
  REGION 1..9: note = Description of Artificial Sequence: Synthetic peptide
AEGGEQILV

SEQ ID NO: 20650 - protein, 9 aa, synthetic construct
  REGION 1..9: note = Description of Artificial Sequence: Synthetic peptide
REIDNYTRI

SEQ ID NO: 20651 - protein, 11 aa, synthetic construct
  REGION 1..11: note = Description of Artificial Sequence: Synthetic peptide
AELELAENREI

SEQ ID NO: 20652 - protein, 8 aa, synthetic construct
  REGION 1..8: note = Description of Artificial Sequence: Synthetic peptide
DENSTVTI

SEQ ID NO: 20653 - protein, 9 aa, synthetic construct
  REGION 1..9: note = Description of Artificial Sequence: Synthetic peptide
SEAAIRKAI

SEQ ID NO: 20654 - protein, 9 aa, synthetic construct
  REGION 1..9: note = Description of Artificial Sequence: Synthetic peptide
TEAVQKIAL

SEQ ID NO: 20655 - protein, 9 aa, synthetic construct
  REGION 1..9: note = Description of Artificial Sequence: Synthetic peptide
IEIKDTMEA

SEQ ID NO: 20656 - protein, 8 aa, synthetic construct
  REGION 1..8: note = Description of Artificial Sequence: Synthetic peptide
QEMIIANV

SEQ ID NO: 20657 - protein, 9 aa, synthetic construct
  REGION 1..9: note = Description of Artificial Sequence: Synthetic peptide
IEIKDTMEA

SEQ ID NO: 20658 - protein, 9 aa, synthetic construct
  REGION 1..9: note = Description of Artificial Sequence: Synthetic peptide
VEIEPLGVA

SEQ ID NO: 20659 - protein, 9 aa, synthetic construct
  REGION 1..9: note = Description of Artificial Sequence: Synthetic peptide
AVIGNIRQA

SEQ ID NO: 20660 - protein, 9 aa, synthetic construct
  REGION 1..9: note = Description of Artificial Sequence: Synthetic peptide
GESGVLLGA

SEQ ID NO: 20661 - protein, 9 aa, synthetic construct
  REGION 1..9: note = Description of Artificial Sequence: Synthetic peptide
AETFYVDGA

SEQ ID NO: 20662 - protein, 9 aa, synthetic construct
  REGION 1..9: note = Description of Artificial Sequence: Synthetic peptide
VEINCTRPA

SEQ ID NO: 20663 - protein, 9 aa, synthetic construct
  REGION 1..9: note = Description of Artificial Sequence: Synthetic peptide
KEVESKAEP

SEQ ID NO: 20664 - protein, 9 aa, synthetic construct
  REGION 1..9: note = Description of Artificial Sequence: Synthetic peptide
EEVGFPVTP

SEQ ID NO: 20665 - protein, 10 aa, synthetic construct
  REGION 1..10: note = Description of Artificial Sequence: Synthetic peptide
SEVHIPLGEA

SEQ ID NO: 20666 - protein, 10 aa, synthetic construct
  REGION 1..10: note = Description of Artificial Sequence: Synthetic peptide
VEIEPLGVAP

SEQ ID NO: 20667 - protein, 9 aa, synthetic construct
  REGION 1..9: note = Description of Artificial Sequence: Synthetic peptide
LEKEPIMGA

SEQ ID NO: 20668 - protein, 9 aa, synthetic construct
  REGION 1..9: note = Description of Artificial Sequence: Synthetic peptide
EEVGFPVKP

SEQ ID NO: 20669 - protein, 9 aa, synthetic construct
  REGION 1..9: note = Description of Artificial Sequence: Synthetic peptide
IVARTVETL

SEQ ID NO: 20670 - protein, 9 aa, synthetic construct
  REGION 1..9: note = Description of Artificial Sequence: Synthetic peptide
TEVVQKISC

SEQ ID NO: 20671 - protein, 9 aa, synthetic construct
  REGION 1..9: note = Description of Artificial Sequence: Synthetic peptide
QLAEVVQKI

SEQ ID NO: 20672 - protein, 9 aa, synthetic construct
  REGION 1..9: note = Description of Artificial Sequence: Synthetic peptide
SEVHIPLGC

SEQ ID NO: 20673 - protein, 10 aa, synthetic construct
  REGION 1..10: note = Description of Artificial Sequence: Synthetic peptide
RVFGEAISQV

SEQ ID NO: 20674 - protein, 10 aa, synthetic construct
  REGION 1..10: note = Description of Artificial Sequence: Synthetic peptide
AETFYVDGAA

SEQ ID NO: 20675 - protein, 9 aa, synthetic construct
  REGION 1..9: note = Description of Artificial Sequence: Synthetic peptide
ATLEEMMTA

SEQ ID NO: 20676 - protein, 9 aa, synthetic construct
  REGION 1..9: note = Description of Artificial Sequence: Synthetic peptide
RIIEIVQGI

SEQ ID NO: 20677 - protein, 9 aa, synthetic construct
  REGION 1..9: note = Description of Artificial Sequence: Synthetic peptide
YEDFRKYTA

SEQ ID NO: 20678 - protein, 9 aa, synthetic construct
  REGION 1..9: note = Description of Artificial Sequence: Synthetic peptide
ASIALTVQA

SEQ ID NO: 20679 - protein, 10 aa, synthetic construct
  REGION 1..10: note = Description of Artificial Sequence: Synthetic peptide
RELSPEQTRA

SEQ ID NO: 20680 - protein, 10 aa, synthetic construct
  REGION 1..10: note = Description of Artificial Sequence: Synthetic peptide
REQAEHLKTA

SEQ ID NO: 20681 - protein, 10 aa, synthetic construct
  REGION 1..10: note = Description of Artificial Sequence: Synthetic peptide
AVFLGFLGTA

SEQ ID NO: 20682 - protein, 9 aa, synthetic construct
  REGION 1..9: note = Description of Artificial Sequence: Synthetic peptide
EEVGFPVRP

SEQ ID NO: 20683 - protein, 8 aa, synthetic construct
  REGION 1..8: note = Description of Artificial Sequence: Synthetic peptide
TAFTIPSI

SEQ ID NO: 20684 - protein, 9 aa, synthetic construct
  REGION 1..9: note = Description of Artificial Sequence: Synthetic peptide
FPISPIETV

SEQ ID NO: 20685 - protein, 8 aa, synthetic construct
  REGION 1..8: note = Description of Artificial Sequence: Synthetic peptide
DAPAAEGV

SEQ ID NO: 20686 - protein, 10 aa, synthetic construct
  REGION 1..10: note = Description of Artificial Sequence: Synthetic peptide
IPYNPQSQGV

SEQ ID NO: 20687 - protein, 8 aa, synthetic construct
  REGION 1..8: note = Description of Artificial Sequence: Synthetic peptide
VPVDPSEV

SEQ ID NO: 20688 - protein, 8 aa, synthetic construct
  REGION 1..8: note = Description of Artificial Sequence: Synthetic peptide
IALEAIVI

SEQ ID NO: 20689 - protein, 9 aa, synthetic construct
  REGION 1..9: note = Description of Artificial Sequence: Synthetic peptide
DPNPQEMII

SEQ ID NO: 20690 - protein, 9 aa, synthetic construct
  REGION 1..9: note = Description of Artificial Sequence: Synthetic peptide
LPPVVAKEI

SEQ ID NO: 20691 - protein, 8 aa, synthetic construct
  REGION 1..8: note = Description of Artificial Sequence: Synthetic peptide
IAAIVAFI

SEQ ID NO: 20692 - protein, 9 aa, synthetic construct
  REGION 1..9: note = Description of Artificial Sequence: Synthetic peptide
SPLSFQTLI

SEQ ID NO: 20693 - protein, 9 aa, synthetic construct
  REGION 1..9: note = Description of Artificial Sequence: Synthetic peptide
LPPIVAKEI

SEQ ID NO: 20694 - protein, 8 aa, synthetic construct
  REGION 1..8: note = Description of Artificial Sequence: Synthetic peptide
IAAIVGLI

SEQ ID NO: 20695 - protein, 8 aa, synthetic construct
  REGION 1..8: note = Description of Artificial Sequence: Synthetic peptide
IPLQIAAI

SEQ ID NO: 20696 - protein, 8 aa, synthetic construct
  REGION 1..8: note = Description of Artificial Sequence: Synthetic peptide
NPYNTPVF

SEQ ID NO: 20697 - protein, 10 aa, synthetic construct
  REGION 1..10: note = Description of Artificial Sequence: Synthetic peptide
IPLGEAILVI

SEQ ID NO: 20698 - protein, 8 aa, synthetic construct
  REGION 1..8: note = Description of Artificial Sequence: Synthetic peptide
ISFSFPQI

SEQ ID NO: 20699 - protein, 9 aa, synthetic construct
  REGION 1..9: note = Description of Artificial Sequence: Synthetic peptide
VGFPVTPQV

SEQ ID NO: 20700 - protein, 9 aa, synthetic construct
  REGION 1..9: note = Description of Artificial Sequence: Synthetic peptide
SPLSLQTLI

SEQ ID NO: 20701 - protein, 9 aa, synthetic construct
  REGION 1..9: note = Description of Artificial Sequence: Synthetic peptide
IPIGPGQVL

SEQ ID NO: 20702 - protein, 8 aa, synthetic construct
  REGION 1..8: note = Description of Artificial Sequence: Synthetic peptide
AASIALTV

SEQ ID NO: 20703 - protein, 9 aa, synthetic construct
  REGION 1..9: note = Description of Artificial Sequence: Synthetic peptide
NPPIPVGEI

SEQ ID NO: 20704 - protein, 9 aa, synthetic construct
  REGION 1..9: note = Description of Artificial Sequence: Synthetic peptide
YAPPIAGNI

SEQ ID NO: 20705 - protein, 9 aa, synthetic construct
  REGION 1..9: note = Description of Artificial Sequence: Synthetic peptide
EALEKIEEI

SEQ ID NO: 20706 - protein, 9 aa, synthetic construct
  REGION 1..9: note = Description of Artificial Sequence: Synthetic peptide
DAYFSVPLY

SEQ ID NO: 20707 - protein, 9 aa, synthetic construct
  REGION 1..9: note = Description of Artificial Sequence: Synthetic peptide
IPLQIAAIV

SEQ ID NO: 20708 - protein, 9 aa, synthetic construct
  REGION 1..9: note = Description of Artificial Sequence: Synthetic peptide
GAASIALTV

SEQ ID NO: 20709 - protein, 11 aa, synthetic construct
  REGION 1..11: note = Description of Artificial Sequence: Synthetic peptide
IPYNPQSQGVV

SEQ ID NO: 20710 - protein, 8 aa, synthetic construct
  REGION 1..8: note = Description of Artificial Sequence: Synthetic peptide
SPVSILDI

SEQ ID NO: 20711 - protein, 9 aa, synthetic construct
  REGION 1..9: note = Description of Artificial Sequence: Synthetic peptide
IPLGEAILV

SEQ ID NO: 20712 - protein, 9 aa, synthetic construct
  REGION 1..9: note = Description of Artificial Sequence: Synthetic peptide
HPVHAGPVA

SEQ ID NO: 20713 - protein, 9 aa, synthetic construct
  REGION 1..9: note = Description of Artificial Sequence: Synthetic peptide
FPISPIETV

SEQ ID NO: 20714 - protein, 9 aa, synthetic construct
  REGION 1..9: note = Description of Artificial Sequence: Synthetic peptide
HPVHAGPIA

SEQ ID NO: 20715 - protein, 9 aa, synthetic construct
  REGION 1..9: note = Description of Artificial Sequence: Synthetic peptide
NATAIAVAA

SEQ ID NO: 20716 - protein, 9 aa, synthetic construct
  REGION 1..9: note = Description of Artificial Sequence: Synthetic peptide
EPIPIHYCA

SEQ ID NO: 20717 - protein, 9 aa, synthetic construct
  REGION 1..9: note = Description of Artificial Sequence: Synthetic peptide
HVASGYIEA

SEQ ID NO: 20718 - protein, 9 aa, synthetic construct
  REGION 1..9: note = Description of Artificial Sequence: Synthetic peptide
QPIPIHYCA

SEQ ID NO: 20719 - protein, 9 aa, synthetic construct
  REGION 1..9: note = Description of Artificial Sequence: Synthetic peptide
RAAAPVPAA

SEQ ID NO: 20720 - protein, 9 aa, synthetic construct
  REGION 1..9: note = Description of Artificial Sequence: Synthetic peptide
IPAETGQEA

SEQ ID NO: 20721 - protein, 9 aa, synthetic construct
  REGION 1..9: note = Description of Artificial Sequence: Synthetic peptide
HPGSQPKTA

SEQ ID NO: 20722 - protein, 10 aa, synthetic construct
  REGION 1..10: note = Description of Artificial Sequence: Synthetic peptide
EPLGVAPTKA

SEQ ID NO: 20723 - protein, 11 aa, synthetic construct
  REGION 1..11: note = Description of Artificial Sequence: Synthetic peptide
FALNPGLLESA

SEQ ID NO: 20724 - protein, 11 aa, synthetic construct
  REGION 1..11: note = Description of Artificial Sequence: Synthetic peptide
IPIGPGQVLYA

SEQ ID NO: 20725 - protein, 11 aa, synthetic construct
  REGION 1..11: note = Description of Artificial Sequence: Synthetic peptide
VPVDPSEVEEA

SEQ ID NO: 20726 - protein, 9 aa, synthetic construct
  REGION 1..9: note = Description of Artificial Sequence: Synthetic peptide
NPYNTPVFA

SEQ ID NO: 20727 - protein, 10 aa, synthetic construct
  REGION 1..10: note = Description of Artificial Sequence: Synthetic peptide
VPIEIEGKKA

SEQ ID NO: 20728 - protein, 8 aa, synthetic construct
  REGION 1..8: note = Description of Artificial Sequence: Synthetic peptide
TAFTIPSI

SEQ ID NO: 20729 - protein, 10 aa, synthetic construct
  REGION 1..10: note = Description of Artificial Sequence: Synthetic peptide
EPLGVAPTRA

SEQ ID NO: 20730 - protein, 10 aa, synthetic construct
  REGION 1..10: note = Description of Artificial Sequence: Synthetic peptide
YPKPNGSRQA

SEQ ID NO: 20731 - protein, 9 aa, synthetic construct
  REGION 1..9: note = Description of Artificial Sequence: Synthetic peptide
HPGSQPRTA

SEQ ID NO: 20732 - protein, 10 aa, synthetic construct
  REGION 1..10: note = Description of Artificial Sequence: Synthetic peptide
IPLQIAAIVA

SEQ ID NO: 20733 - protein, 11 aa, synthetic construct
  REGION 1..11: note = Description of Artificial Sequence: Synthetic peptide
LPPVVAKEIVA

SEQ ID NO: 20734 - protein, 9 aa, synthetic construct
  REGION 1..9: note = Description of Artificial Sequence: Synthetic peptide
YPLTSLKSL

SEQ ID NO: 20735 - protein, 9 aa, synthetic construct
  REGION 1..9: note = Description of Artificial Sequence: Synthetic peptide
QAIYAPPIA

SEQ ID NO: 20736 - protein, 11 aa, synthetic construct
  REGION 1..11: note = Description of Artificial Sequence: Synthetic peptide
FPISPIETVPV

SEQ ID NO: 20737 - protein, 9 aa, synthetic construct
  REGION 1..9: note = Description of Artificial Sequence: Synthetic peptide
QPLDIAAIV

SEQ ID NO: 20738 - protein, 9 aa, synthetic construct
  REGION 1..9: note = Description of Artificial Sequence: Synthetic peptide
FPRPWLHSL

SEQ ID NO: 20739 - protein, 11 aa, synthetic construct
  REGION 1..11: note = Description of Artificial Sequence: Synthetic peptide
MLNTVGGHQAA

SEQ ID NO: 20740 - protein, 8 aa, synthetic construct
  REGION 1..8: note = Description of Artificial Sequence: Synthetic peptide
AAAPVPAA

SEQ ID NO: 20741 - protein, 10 aa, synthetic construct
  REGION 1..10: note = Description of Artificial Sequence: Synthetic peptide
HPVHAGPIAP

SEQ ID NO: 20742 - protein, 9 aa, synthetic construct
  REGION 1..9: note = Description of Artificial Sequence: Synthetic peptide
YALNPGLLA

SEQ ID NO: 20743 - protein, 9 aa, synthetic construct
  REGION 1..9: note = Description of Artificial Sequence: Synthetic peptide
HIASGYIEA

SEQ ID NO: 20744 - protein, 9 aa, synthetic construct
  REGION 1..9: note = Description of Artificial Sequence: Synthetic peptide
FPVTPQVPL

SEQ ID NO: 20745 - protein, 10 aa, synthetic construct
  REGION 1..10: note = Description of Artificial Sequence: Synthetic peptide
HPVHAGPVAP

SEQ ID NO: 20746 - protein, 9 aa, synthetic construct
  REGION 1..9: note = Description of Artificial Sequence: Synthetic peptide
FPVKPQIPL

SEQ ID NO: 20747 - protein, 9 aa, synthetic construct
  REGION 1..9: note = Description of Artificial Sequence: Synthetic peptide
YPSASLKSL

SEQ ID NO: 20748 - protein, 9 aa, synthetic construct
  REGION 1..9: note = Description of Artificial Sequence: Synthetic peptide
SISERILSA

SEQ ID NO: 20749 - protein, 9 aa, synthetic construct
  REGION 1..9: note = Description of Artificial Sequence: Synthetic peptide
HPVHAGPVA

SEQ ID NO: 20750 - protein, 10 aa, synthetic construct
  REGION 1..10: note = Description of Artificial Sequence: Synthetic peptide
YPKPNGSRQA

SEQ ID NO: 20751 - protein, 9 aa, synthetic construct
  REGION 1..9: note = Description of Artificial Sequence: Synthetic peptide
HPVHAGPIA

SEQ ID NO: 20752 - protein, 9 aa, synthetic construct
  REGION 1..9: note = Description of Artificial Sequence: Synthetic peptide
IPKQPLSQT

SEQ ID NO: 20753 - protein, 9 aa, synthetic construct
  REGION 1..9: note = Description of Artificial Sequence: Synthetic peptide
FPISPIETV

SEQ ID NO: 20754 - protein, 9 aa, synthetic construct
  REGION 1..9: note = Description of Artificial Sequence: Synthetic peptide
RPEPTAPPA

SEQ ID NO: 20755 - protein, 9 aa, synthetic construct
  REGION 1..9: note = Description of Artificial Sequence: Synthetic peptide
RAAAPVPAA

SEQ ID NO: 20756 - protein, 9 aa, synthetic construct
  REGION 1..9: note = Description of Artificial Sequence: Synthetic peptide
IPAETGQEA

SEQ ID NO: 20757 - protein, 9 aa, synthetic construct
  REGION 1..9: note = Description of Artificial Sequence: Synthetic peptide
QPIPIHYCA

SEQ ID NO: 20758 - protein, 9 aa, synthetic construct
  REGION 1..9: note = Description of Artificial Sequence: Synthetic peptide
IPIGPGQVL

SEQ ID NO: 20759 - protein, 9 aa, synthetic construct
  REGION 1..9: note = Description of Artificial Sequence: Synthetic peptide
SPTSREPRA

SEQ ID NO: 20760 - protein, 9 aa, synthetic construct
  REGION 1..9: note = Description of Artificial Sequence: Synthetic peptide
HPVHAGPVA

SEQ ID NO: 20761 - protein, 9 aa, synthetic construct
  REGION 1..9: note = Description of Artificial Sequence: Synthetic peptide
FPISPIETV

SEQ ID NO: 20762 - protein, 9 aa, synthetic construct
  REGION 1..9: note = Description of Artificial Sequence: Synthetic peptide
HPVHAGPIA

SEQ ID NO: 20763 - protein, 9 aa, synthetic construct
  REGION 1..9: note = Description of Artificial Sequence: Synthetic peptide
IPAETGQEA

SEQ ID NO: 20764 - protein, 11 aa, synthetic construct
  REGION 1..11: note = Description of Artificial Sequence: Synthetic peptide
APAPAADGVGA

SEQ ID NO: 20765 - protein, 9 aa, synthetic construct
  REGION 1..9: note = Description of Artificial Sequence: Synthetic peptide
APAAEGVGA

SEQ ID NO: 20766 - protein, 11 aa, synthetic construct
  REGION 1..11: note = Description of Artificial Sequence: Synthetic peptide
APVPAADGVGA

SEQ ID NO: 20767 - protein, 10 aa, synthetic construct
  REGION 1..10: note = Description of Artificial Sequence: Synthetic peptide
IPAETGQEAA

SEQ ID NO: 20768 - protein, 10 aa, synthetic construct
  REGION 1..10: note = Description of Artificial Sequence: Synthetic peptide
IPLQIAAIVA

SEQ ID NO: 20769 - protein, 10 aa, synthetic construct
  REGION 1..10: note = Description of Artificial Sequence: Synthetic peptide
IPAETGQETA

SEQ ID NO: 20770 - protein, 9 aa, synthetic construct
  REGION 1..9: note = Description of Artificial Sequence: Synthetic peptide
NATAIAVAA

SEQ ID NO: 20771 - protein, 10 aa, synthetic construct
  REGION 1..10: note = Description of Artificial Sequence: Synthetic peptide
APAAEGVGAA

SEQ ID NO: 20772 - protein, 9 aa, synthetic construct
  REGION 1..9: note = Description of Artificial Sequence: Synthetic peptide
NPYNTPVFA

SEQ ID NO: 20773 - protein, 9 aa, synthetic construct
  REGION 1..9: note = Description of Artificial Sequence: Synthetic peptide
TPASPTSDA

SEQ ID NO: 20774 - protein, 10 aa, synthetic construct
  REGION 1..10: note = Description of Artificial Sequence: Synthetic peptide
VPIEIEGKKA

SEQ ID NO: 20775 - protein, 10 aa, synthetic construct
  REGION 1..10: note = Description of Artificial Sequence: Synthetic peptide
YPKPNGSRQA

SEQ ID NO: 20776 - protein, 9 aa, synthetic construct
  REGION 1..9: note = Description of Artificial Sequence: Synthetic peptide
RPEPTAPPA

SEQ ID NO: 20777 - protein, 9 aa, synthetic construct
  REGION 1..9: note = Description of Artificial Sequence: Synthetic peptide
QPIPIHYCA

SEQ ID NO: 20778 - protein, 9 aa, synthetic construct
  REGION 1..9: note = Description of Artificial Sequence: Synthetic peptide
RAAAPVPAA

SEQ ID NO: 20779 - protein, 9 aa, synthetic construct
  REGION 1..9: note = Description of Artificial Sequence: Synthetic peptide
IPIGPGQVL

SEQ ID NO: 20780 - protein, 9 aa, synthetic construct
  REGION 1..9: note = Description of Artificial Sequence: Synthetic peptide
QPLDIAAIV

SEQ ID NO: 20781 - protein, 10 aa, synthetic construct
  REGION 1..10: note = Description of Artificial Sequence: Synthetic peptide
EPLGVAPTKA

SEQ ID NO: 20782 - protein, 9 aa, synthetic construct
  REGION 1..9: note = Description of Artificial Sequence: Synthetic peptide
VPAADGVGA

SEQ ID NO: 20783 - protein, 9 aa, synthetic construct
  REGION 1..9: note = Description of Artificial Sequence: Synthetic peptide
HPGSQPKTA

SEQ ID NO: 20784 - protein, 11 aa, synthetic construct
  REGION 1..11: note = Description of Artificial Sequence: Synthetic peptide
VPVDPSEVEEA

SEQ ID NO: 20785 - protein, 10 aa, synthetic construct
  REGION 1..10: note = Description of Artificial Sequence: Synthetic peptide
IPYNPQSQGV

SEQ ID NO: 20786 - protein, 9 aa, synthetic construct
  REGION 1..9: note = Description of Artificial Sequence: Synthetic peptide
HPVHAGPVA

SEQ ID NO: 20787 - protein, 9 aa, synthetic construct
  REGION 1..9: note = Description of Artificial Sequence: Synthetic peptide
FPISPIETV

SEQ ID NO: 20788 - protein, 9 aa, synthetic construct
  REGION 1..9: note = Description of Artificial Sequence: Synthetic peptide
HPVHAGPIA

SEQ ID NO: 20789 - protein, 11 aa, synthetic construct
  REGION 1..11: note = Description of Artificial Sequence: Synthetic peptide
APAPAADGVGA

SEQ ID NO: 20790 - protein, 9 aa, synthetic construct
  REGION 1..9: note = Description of Artificial Sequence: Synthetic peptide
IPAETGQEA

SEQ ID NO: 20791 - protein, 9 aa, synthetic construct
  REGION 1..9: note = Description of Artificial Sequence: Synthetic peptide
RAAAPVPAA

SEQ ID NO: 20792 - protein, 9 aa, synthetic construct
  REGION 1..9: note = Description of Artificial Sequence: Synthetic peptide
APAAEGVGA

SEQ ID NO: 20793 - protein, 10 aa, synthetic construct
  REGION 1..10: note = Description of Artificial Sequence: Synthetic peptide
IPYNPQSQGV

SEQ ID NO: 20794 - protein, 9 aa, synthetic construct
  REGION 1..9: note = Description of Artificial Sequence: Synthetic peptide
QPIPIHYCA

SEQ ID NO: 20795 - protein, 10 aa, synthetic construct
  REGION 1..10: note = Description of Artificial Sequence: Synthetic peptide
YPKPNGSRQA

SEQ ID NO: 20796 - protein, 10 aa, synthetic construct
  REGION 1..10: note = Description of Artificial Sequence: Synthetic peptide
APAAEGVGAA

SEQ ID NO: 20797 - protein, 10 aa, synthetic construct
  REGION 1..10: note = Description of Artificial Sequence: Synthetic peptide
APAGFAILKC

SEQ ID NO: 20798 - protein, 11 aa, synthetic construct
  REGION 1..11: note = Description of Artificial Sequence: Synthetic peptide
APVPAADGVGA

SEQ ID NO: 20799 - protein, 10 aa, synthetic construct
  REGION 1..10: note = Description of Artificial Sequence: Synthetic peptide
VPIEIEGKKA

SEQ ID NO: 20800 - protein, 10 aa, synthetic construct
  REGION 1..10: note = Description of Artificial Sequence: Synthetic peptide
IPAETGQEAA

SEQ ID NO: 20801 - protein, 9 aa, synthetic construct
  REGION 1..9: note = Description of Artificial Sequence: Synthetic peptide
NATAIAVAA

SEQ ID NO: 20802 - protein, 10 aa, synthetic construct
  REGION 1..10: note = Description of Artificial Sequence: Synthetic peptide
IPAETGQETA

SEQ ID NO: 20803 - protein, 10 aa, synthetic construct
  REGION 1..10: note = Description of Artificial Sequence: Synthetic peptide
IPLQIAAIVA

SEQ ID NO: 20804 - protein, 9 aa, synthetic construct
  REGION 1..9: note = Description of Artificial Sequence: Synthetic peptide
RPEPTAPPA

SEQ ID NO: 20805 - protein, 9 aa, synthetic construct
  REGION 1..9: note = Description of Artificial Sequence: Synthetic peptide
IPIGPGQVL

SEQ ID NO: 20806 - protein, 10 aa, synthetic construct
  REGION 1..10: note = Description of Artificial Sequence: Synthetic peptide
SPEVIPMFSA

SEQ ID NO: 20807 - protein, 9 aa, synthetic construct
  REGION 1..9: note = Description of Artificial Sequence: Synthetic peptide
HPGSQPKTA

SEQ ID NO: 20808 - protein, 11 aa, synthetic construct
  REGION 1..11: note = Description of Artificial Sequence: Synthetic peptide
VPVDPSEVEEA

SEQ ID NO: 20809 - protein, 9 aa, synthetic construct
  REGION 1..9: note = Description of Artificial Sequence: Synthetic peptide
TPASPTSDA

SEQ ID NO: 20810 - protein, 9 aa, synthetic construct
  REGION 1..9: note = Description of Artificial Sequence: Synthetic peptide
APAPAADGV

SEQ ID NO: 20811 - protein, 9 aa, synthetic construct
  REGION 1..9: note = Description of Artificial Sequence: Synthetic peptide
TTVPWNTTW

SEQ ID NO: 20812 - protein, 11 aa, synthetic construct
  REGION 1..11: note = Description of Artificial Sequence: Synthetic peptide
KSYSTESHNVW

SEQ ID NO: 20813 - protein, 11 aa, synthetic construct
  REGION 1..11: note = Description of Artificial Sequence: Synthetic peptide
KSYSTEKHNVW

SEQ ID NO: 20814 - protein, 9 aa, synthetic construct
  REGION 1..9: note = Description of Artificial Sequence: Synthetic peptide
TSKLFNSSW

SEQ ID NO: 20815 - protein, 9 aa, synthetic construct
  REGION 1..9: note = Description of Artificial Sequence: Synthetic peptide
RSWQNLWKW

SEQ ID NO: 20816 - protein, 11 aa, synthetic construct
  REGION 1..11: note = Description of Artificial Sequence: Synthetic peptide
KAYSTEKHNVW

SEQ ID NO: 20817 - protein, 11 aa, synthetic construct
  REGION 1..11: note = Description of Artificial Sequence: Synthetic peptide
RTVGTLGLRGW

SEQ ID NO: 20818 - protein, 9 aa, synthetic construct
  REGION 1..9: note = Description of Artificial Sequence: Synthetic peptide
KVMETQMNW

SEQ ID NO: 20819 - protein, 9 aa, synthetic construct
  REGION 1..9: note = Description of Artificial Sequence: Synthetic peptide
FSFPQITLW

SEQ ID NO: 20820 - protein, 9 aa, synthetic construct
  REGION 1..9: note = Description of Artificial Sequence: Synthetic peptide
STLQEQIGW

SEQ ID NO: 20821 - protein, 9 aa, synthetic construct
  REGION 1..9: note = Description of Artificial Sequence: Synthetic peptide
TVMETQRSW

SEQ ID NO: 20822 - protein, 11 aa, synthetic construct
  REGION 1..11: note = Description of Artificial Sequence: Synthetic peptide
ISFSFPQITLW

SEQ ID NO: 20823 - protein, 9 aa, synthetic construct
  REGION 1..9: note = Description of Artificial Sequence: Synthetic peptide
YSTESHNVW

SEQ ID NO: 20824 - protein, 10 aa, synthetic construct
  REGION 1..10: note = Description of Artificial Sequence: Synthetic peptide
TTNVPWNSSW

SEQ ID NO: 20825 - protein, 10 aa, synthetic construct
  REGION 1..10: note = Description of Artificial Sequence: Synthetic peptide
TTTVPWNTTW

SEQ ID NO: 20826 - protein, 9 aa, synthetic construct
  REGION 1..9: note = Description of Artificial Sequence: Synthetic peptide
RSIRLVNGF

SEQ ID NO: 20827 - protein, 9 aa, synthetic construct
  REGION 1..9: note = Description of Artificial Sequence: Synthetic peptide
RVMETQKNW

SEQ ID NO: 20828 - protein, 9 aa, synthetic construct
  REGION 1..9: note = Description of Artificial Sequence: Synthetic peptide
YSTEKHNVW

SEQ ID NO: 20829 - protein, 9 aa, synthetic construct
  REGION 1..9: note = Description of Artificial Sequence: Synthetic peptide
TSILFNSSW

SEQ ID NO: 20830 - protein, 9 aa, synthetic construct
  REGION 1..9: note = Description of Artificial Sequence: Synthetic peptide
STLQEQIAW

SEQ ID NO: 20831 - protein, 11 aa, synthetic construct
  REGION 1..11: note = Description of Artificial Sequence: Synthetic peptide
TTSTLQEQIGW

SEQ ID NO: 20832 - protein, 10 aa, synthetic construct
  REGION 1..10: note = Description of Artificial Sequence: Synthetic peptide
TTNVPWNASW

SEQ ID NO: 20833 - protein, 11 aa, synthetic construct
  REGION 1..11: note = Description of Artificial Sequence: Synthetic peptide
SVLSGGKLDTW

SEQ ID NO: 20834 - protein, 10 aa, synthetic construct
  REGION 1..10: note = Description of Artificial Sequence: Synthetic peptide
RVVGDIRRAY

SEQ ID NO: 20835 - protein, 9 aa, synthetic construct
  REGION 1..9: note = Description of Artificial Sequence: Synthetic peptide
KIKQIVRMW

SEQ ID NO: 20836 - protein, 11 aa, synthetic construct
  REGION 1..11: note = Description of Artificial Sequence: Synthetic peptide
KSLFNTEATLY

SEQ ID NO: 20837 - protein, 10 aa, synthetic construct
  REGION 1..10: note = Description of Artificial Sequence: Synthetic peptide
KAIEAQQHLL

SEQ ID NO: 20838 - protein, 10 aa, synthetic construct
  REGION 1..10: note = Description of Artificial Sequence: Synthetic peptide
VTVYYGVPVW

SEQ ID NO: 20839 - protein, 9 aa, synthetic construct
  REGION 1..9: note = Description of Artificial Sequence: Synthetic peptide
IALEAIVIW

SEQ ID NO: 20840 - protein, 11 aa, synthetic construct
  REGION 1..11: note = Description of Artificial Sequence: Synthetic peptide
KALTDIVPLTR

SEQ ID NO: 20841 - protein, 9 aa, synthetic construct
  REGION 1..9: note = Description of Artificial Sequence: Synthetic peptide
ITPPLVKLW

SEQ ID NO: 20842 - protein, 9 aa, synthetic construct
  REGION 1..9: note = Description of Artificial Sequence: Synthetic peptide
RSIRLVSGF

SEQ ID NO: 20843 - protein, 9 aa, synthetic construct
  REGION 1..9: note = Description of Artificial Sequence: Synthetic peptide
QATQDVKNW

SEQ ID NO: 20844 - protein, 9 aa, synthetic construct
  REGION 1..9: note = Description of Artificial Sequence: Synthetic peptide
KTAVQMAVF

SEQ ID NO: 20845 - protein, 11 aa, synthetic construct
  REGION 1..11: note = Description of Artificial Sequence: Synthetic peptide
RTVETLGRRGW

SEQ ID NO: 20846 - protein, 10 aa, synthetic construct
  REGION 1..10: note = Description of Artificial Sequence: Synthetic peptide
LALDQWGNLW

SEQ ID NO: 20847 - protein, 9 aa, synthetic construct
  REGION 1..9: note = Description of Artificial Sequence: Synthetic peptide
WSKSSIVGW

SEQ ID NO: 20848 - protein, 9 aa, synthetic construct
  REGION 1..9: note = Description of Artificial Sequence: Synthetic peptide
AILVITTYW

SEQ ID NO: 20849 - protein, 9 aa, synthetic construct
  REGION 1..9: note = Description of Artificial Sequence: Synthetic peptide
KVMETQMNW

SEQ ID NO: 20850 - protein, 9 aa, synthetic construct
  REGION 1..9: note = Description of Artificial Sequence: Synthetic peptide
TTVPWNTTW

SEQ ID NO: 20851 - protein, 9 aa, synthetic construct
  REGION 1..9: note = Description of Artificial Sequence: Synthetic peptide
KAIEAQQHL

SEQ ID NO: 20852 - protein, 9 aa, synthetic construct
  REGION 1..9: note = Description of Artificial Sequence: Synthetic peptide
YSTESHNVW

SEQ ID NO: 20853 - protein, 9 aa, synthetic construct
  REGION 1..9: note = Description of Artificial Sequence: Synthetic peptide
STLQEQIGW

SEQ ID NO: 20854 - protein, 9 aa, synthetic construct
  REGION 1..9: note = Description of Artificial Sequence: Synthetic peptide
IIANVTENF

SEQ ID NO: 20855 - protein, 9 aa, synthetic construct
  REGION 1..9: note = Description of Artificial Sequence: Synthetic peptide
GTEEIKSLY

SEQ ID NO: 20856 - protein, 9 aa, synthetic construct
  REGION 1..9: note = Description of Artificial Sequence: Synthetic peptide
RAVGIGAVF

SEQ ID NO: 20857 - protein, 9 aa, synthetic construct
  REGION 1..9: note = Description of Artificial Sequence: Synthetic peptide
TVMETQRSW

SEQ ID NO: 20858 - protein, 10 aa, synthetic construct
  REGION 1..10: note = Description of Artificial Sequence: Synthetic peptide
TAATNADCAW

SEQ ID NO: 20859 - protein, 10 aa, synthetic construct
  REGION 1..10: note = Description of Artificial Sequence: Synthetic peptide
KAIEAQQHLL

SEQ ID NO: 20860 - protein, 11 aa, synthetic construct
  REGION 1..11: note = Description of Artificial Sequence: Synthetic peptide
KSYSTESHNVW

SEQ ID NO: 20861 - protein, 9 aa, synthetic construct
  REGION 1..9: note = Description of Artificial Sequence: Synthetic peptide
STLQEQIAW

SEQ ID NO: 20862 - protein, 9 aa, synthetic construct
  REGION 1..9: note = Description of Artificial Sequence: Synthetic peptide
NETVNITCF

SEQ ID NO: 20863 - protein, 9 aa, synthetic construct
  REGION 1..9: note = Description of Artificial Sequence: Synthetic peptide
KALTDIVAL

SEQ ID NO: 20864 - protein, 9 aa, synthetic construct
  REGION 1..9: note = Description of Artificial Sequence: Synthetic peptide
TSILFNSSW

SEQ ID NO: 20865 - protein, 10 aa, synthetic construct
  REGION 1..10: note = Description of Artificial Sequence: Synthetic peptide
VSIDNSNSSY

SEQ ID NO: 20866 - protein, 9 aa, synthetic construct
  REGION 1..9: note = Description of Artificial Sequence: Synthetic peptide
GTQEIKSLY

SEQ ID NO: 20867 - protein, 8 aa, synthetic construct
  REGION 1..8: note = Description of Artificial Sequence: Synthetic peptide
KTVEIVCY

SEQ ID NO: 20868 - protein, 10 aa, synthetic construct
  REGION 1..10: note = Description of Artificial Sequence: Synthetic peptide
TATTNADCAW

SEQ ID NO: 20869 - protein, 8 aa, synthetic construct
  REGION 1..8: note = Description of Artificial Sequence: Synthetic peptide
IEIVTHSF

SEQ ID NO: 20870 - protein, 9 aa, synthetic construct
  REGION 1..9: note = Description of Artificial Sequence: Synthetic peptide
KTAVQMAVF

SEQ ID NO: 20871 - protein, 8 aa, synthetic construct
  REGION 1..8: note = Description of Artificial Sequence: Synthetic peptide
GQGVSIEW

SEQ ID NO: 20872 - protein, 11 aa, synthetic construct
  REGION 1..11: note = Description of Artificial Sequence: Synthetic peptide
KSLFNTEATLY

SEQ ID NO: 20873 - protein, 9 aa, synthetic construct
  REGION 1..9: note = Description of Artificial Sequence: Synthetic peptide
QATQDVKNW

SEQ ID NO: 20874 - protein, 9 aa, synthetic construct
  REGION 1..9: note = Description of Artificial Sequence: Synthetic peptide
TINEEAAEW

SEQ ID NO: 20875 - protein, 9 aa, synthetic construct
  REGION 1..9: note = Description of Artificial Sequence: Synthetic peptide
ASITLTVQV

SEQ ID NO: 20876 - protein, 9 aa, synthetic construct
  REGION 1..9: note = Description of Artificial Sequence: Synthetic peptide
YSPLSFQTL

SEQ ID NO: 20877 - protein, 9 aa, synthetic construct
  REGION 1..9: note = Description of Artificial Sequence: Synthetic peptide
YSPLSLQTL

SEQ ID NO: 20878 - protein, 8 aa, synthetic construct
  REGION 1..8: note = Description of Artificial Sequence: Synthetic peptide
NSPTSRKL

SEQ ID NO: 20879 - protein, 9 aa, synthetic construct
  REGION 1..9: note = Description of Artificial Sequence: Synthetic peptide
YSPVSILDI

SEQ ID NO: 20880 - protein, 9 aa, synthetic construct
  REGION 1..9: note = Description of Artificial Sequence: Synthetic peptide
HIPLGCAEL

SEQ ID NO: 20881 - protein, 9 aa, synthetic construct
  REGION 1..9: note = Description of Artificial Sequence: Synthetic peptide
LQKGLGISY

SEQ ID NO: 20882 - protein, 9 aa, synthetic construct
  REGION 1..9: note = Description of Artificial Sequence: Synthetic peptide
NAKNILVQF

SEQ ID NO: 20883 - protein, 9 aa, synthetic construct
  REGION 1..9: note = Description of Artificial Sequence: Synthetic peptide
RAVGIGAVF

SEQ ID NO: 20884 - protein, 9 aa, synthetic construct
  REGION 1..9: note = Description of Artificial Sequence: Synthetic peptide
GTEEIKSLY

SEQ ID NO: 20885 - protein, 8 aa, synthetic construct
  REGION 1..8: note = Description of Artificial Sequence: Synthetic peptide
AELVVTTY

SEQ ID NO: 20886 - protein, 9 aa, synthetic construct
  REGION 1..9: note = Description of Artificial Sequence: Synthetic peptide
EAILVITTY

SEQ ID NO: 20887 - protein, 9 aa, synthetic construct
  REGION 1..9: note = Description of Artificial Sequence: Synthetic peptide
CAELVVTTY

SEQ ID NO: 20888 - protein, 8 aa, synthetic construct
  REGION 1..8: note = Description of Artificial Sequence: Synthetic peptide
VLDVGDAY

SEQ ID NO: 20889 - protein, 9 aa, synthetic construct
  REGION 1..9: note = Description of Artificial Sequence: Synthetic peptide
KAIEAQQHL

SEQ ID NO: 20890 - protein, 9 aa, synthetic construct
  REGION 1..9: note = Description of Artificial Sequence: Synthetic peptide
LALDKWTSL

SEQ ID NO: 20891 - protein, 9 aa, synthetic construct
  REGION 1..9: note = Description of Artificial Sequence: Synthetic peptide
LAWDDLRSL

SEQ ID NO: 20892 - protein, 9 aa, synthetic construct
  REGION 1..9: note = Description of Artificial Sequence: Synthetic peptide
FQQGEAREL

SEQ ID NO: 20893 - protein, 9 aa, synthetic construct
  REGION 1..9: note = Description of Artificial Sequence: Synthetic peptide
KALGSGATL

SEQ ID NO: 20894 - protein, 9 aa, synthetic construct
  REGION 1..9: note = Description of Artificial Sequence: Synthetic peptide
KAIEAQQHL

SEQ ID NO: 20895 - protein, 9 aa, synthetic construct
  REGION 1..9: note = Description of Artificial Sequence: Synthetic peptide
LALDKWTSL

SEQ ID NO: 20896 - protein, 9 aa, synthetic construct
  REGION 1..9: note = Description of Artificial Sequence: Synthetic peptide
FQQGEAREL

SEQ ID NO: 20897 - protein, 9 aa, synthetic construct
  REGION 1..9: note = Description of Artificial Sequence: Synthetic peptide
KALGSGATL

SEQ ID NO: 20898 - protein, 9 aa, synthetic construct
  REGION 1..9: note = Description of Artificial Sequence: Synthetic peptide
FTSPSGGDL

SEQ ID NO: 20899 - protein, 9 aa, synthetic construct
  REGION 1..9: note = Description of Artificial Sequence: Synthetic peptide
YVDRFFKTL

SEQ ID NO: 20900 - protein, 9 aa, synthetic construct
  REGION 1..9: note = Description of Artificial Sequence: Synthetic peptide
LAWDDLRSL

SEQ ID NO: 20901 - protein, 9 aa, synthetic construct
  REGION 1..9: note = Description of Artificial Sequence: Synthetic peptide
SAEPVPLQL

SEQ ID NO: 20902 - protein, 9 aa, synthetic construct
  REGION 1..9: note = Description of Artificial Sequence: Synthetic peptide
YYDSAKELI

SEQ ID NO: 20903 - protein, 8 aa, synthetic construct
  REGION 1..8: note = Description of Artificial Sequence: Synthetic peptide
YYDSAKEL

SEQ ID NO: 20904 - protein, 8 aa, synthetic construct
  REGION 1..8: note = Description of Artificial Sequence: Synthetic peptide
HTDNGSNF

SEQ ID NO: 20905 - protein, 9 aa, synthetic construct
  REGION 1..9: note = Description of Artificial Sequence: Synthetic peptide
SAEPVPLQL

SEQ ID NO: 20906 - protein, 9 aa, synthetic construct
  REGION 1..9: note = Description of Artificial Sequence: Synthetic peptide
IQDNSEIKV

SEQ ID NO: 20907 - protein, 9 aa, synthetic construct
  REGION 1..9: note = Description of Artificial Sequence: Synthetic peptide
ATDIQTREL

SEQ ID NO: 20908 - protein, 9 aa, synthetic construct
  REGION 1..9: note = Description of Artificial Sequence: Synthetic peptide
AADKMWVTV

SEQ ID NO: 20909 - protein, 9 aa, synthetic construct
  REGION 1..9: note = Description of Artificial Sequence: Synthetic peptide
ISDNAKTII

SEQ ID NO: 20910 - protein, 9 aa, synthetic construct
  REGION 1..9: note = Description of Artificial Sequence: Synthetic peptide
VLDVGDAYF

SEQ ID NO: 20911 - protein, 9 aa, synthetic construct
  REGION 1..9: note = Description of Artificial Sequence: Synthetic peptide
IQDNSDIKV

SEQ ID NO: 20912 - protein, 9 aa, synthetic construct
  REGION 1..9: note = Description of Artificial Sequence: Synthetic peptide
QRPLVTIRI

SEQ ID NO: 20913 - protein, 9 aa, synthetic construct
  REGION 1..9: note = Description of Artificial Sequence: Synthetic peptide
QRPLVTVRV

SEQ ID NO: 20914 - protein, 9 aa, synthetic construct
  REGION 1..9: note = Description of Artificial Sequence: Synthetic peptide
EAILVITTY

SEQ ID NO: 20915 - protein, 9 aa, synthetic construct
  REGION 1..9: note = Description of Artificial Sequence: Synthetic peptide
VALTAEAEL

SEQ ID NO: 20916 - protein, 9 aa, synthetic construct
  REGION 1..9: note = Description of Artificial Sequence: Synthetic peptide
KALTDIVAL

SEQ ID NO: 20917 - protein, 9 aa, synthetic construct
  REGION 1..9: note = Description of Artificial Sequence: Synthetic peptide
SAEPVPLQL

SEQ ID NO: 20918 - protein, 9 aa, synthetic construct
  REGION 1..9: note = Description of Artificial Sequence: Synthetic peptide
KAIEAQQHL

SEQ ID NO: 20919 - protein, 9 aa, synthetic construct
  REGION 1..9: note = Description of Artificial Sequence: Synthetic peptide
LQKGLGISY

SEQ ID NO: 20920 - protein, 9 aa, synthetic construct
  REGION 1..9: note = Description of Artificial Sequence: Synthetic peptide
TVLDVGDAY

SEQ ID NO: 20921 - protein, 9 aa, synthetic construct
  REGION 1..9: note = Description of Artificial Sequence: Synthetic peptide
HMGPGQVLY

SEQ ID NO: 20922 - protein, 9 aa, synthetic construct
  REGION 1..9: note = Description of Artificial Sequence: Synthetic peptide
TVMETQRSW

SEQ ID NO: 20923 - protein, 9 aa, synthetic construct
  REGION 1..9: note = Description of Artificial Sequence: Synthetic peptide
IVTDSQYAL

SEQ ID NO: 20924 - protein, 9 aa, synthetic construct
  REGION 1..9: note = Description of Artificial Sequence: Synthetic peptide
ASDIQTKEL

SEQ ID NO: 20925 - protein, 9 aa, synthetic construct
  REGION 1..9: note = Description of Artificial Sequence: Synthetic peptide
ATDIQTREL

SEQ ID NO: 20926 - protein, 9 aa, synthetic construct
  REGION 1..9: note = Description of Artificial Sequence: Synthetic peptide
TQDFWEVQL

SEQ ID NO: 20927 - protein, 9 aa, synthetic construct
  REGION 1..9: note = Description of Artificial Sequence: Synthetic peptide
ISDNAKTII

SEQ ID NO: 20928 - protein, 8 aa, synthetic construct
  REGION 1..8: note = Description of Artificial Sequence: Synthetic peptide
AVDLSFFL

SEQ ID NO: 20929 - protein, 9 aa, synthetic construct
  REGION 1..9: note = Description of Artificial Sequence: Synthetic peptide
SAEPVPLQL

SEQ ID NO: 20930 - protein, 10 aa, synthetic construct
  REGION 1..10: note = Description of Artificial Sequence: Synthetic peptide
SLFGSDPSSQ

SEQ ID NO: 20931 - protein, 9 aa, synthetic construct
  REGION 1..9: note = Description of Artificial Sequence: Synthetic peptide
ILVQLQPAL

SEQ ID NO: 20932 - protein, 9 aa, synthetic construct
  REGION 1..9: note = Description of Artificial Sequence: Synthetic peptide
FQQGEAREL

SEQ ID NO: 20933 - protein, 9 aa, synthetic construct
  REGION 1..9: note = Description of Artificial Sequence: Synthetic peptide
RALGAGATL

SEQ ID NO: 20934 - protein, 8 aa, synthetic construct
  REGION 1..8: note = Description of Artificial Sequence: Synthetic peptide
GQPVHQAL

SEQ ID NO: 20935 - protein, 10 aa, synthetic construct
  REGION 1..10: note = Description of Artificial Sequence: Synthetic peptide
SLFGSDPLSQ

SEQ ID NO: 20936 - protein, 9 aa, synthetic construct
  REGION 1..9: note = Description of Artificial Sequence: Synthetic peptide
KALGSGATL

SEQ ID NO: 20937 - protein, 9 aa, synthetic construct
  REGION 1..9: note = Description of Artificial Sequence: Synthetic peptide
KALTDIVAL

SEQ ID NO: 20938 - protein, 10 aa, synthetic construct
  REGION 1..10: note = Description of Artificial Sequence: Synthetic peptide
QDSGQEVNIV

SEQ ID NO: 20939 - protein, 9 aa, synthetic construct
  REGION 1..9: note = Description of Artificial Sequence: Synthetic peptide
NAKNIIVQL

SEQ ID NO: 20940 - protein, 9 aa, synthetic construct
  REGION 1..9: note = Description of Artificial Sequence: Synthetic peptide
NAKTIIVQL

SEQ ID NO: 20941 - protein, 10 aa, synthetic construct
  REGION 1..10: note = Description of Artificial Sequence: Synthetic peptide
VSFEPIPIHY

SEQ ID NO: 20942 - protein, 9 aa, synthetic construct
  REGION 1..9: note = Description of Artificial Sequence: Synthetic peptide
SAKELIAEV

SEQ ID NO: 20943 - protein, 9 aa, synthetic construct
  REGION 1..9: note = Description of Artificial Sequence: Synthetic peptide
GAASIALTV

SEQ ID NO: 20944 - protein, 9 aa, synthetic construct
  REGION 1..9: note = Description of Artificial Sequence: Synthetic peptide
GAASITLTV

SEQ ID NO: 20945 - protein, 9 aa, synthetic construct
  REGION 1..9: note = Description of Artificial Sequence: Synthetic peptide
NAKNILVQF

SEQ ID NO: 20946 - protein, 9 aa, synthetic construct
  REGION 1..9: note = Description of Artificial Sequence: Synthetic peptide
VSSNWNRVL

SEQ ID NO: 20947 - protein, 9 aa, synthetic construct
  REGION 1..9: note = Description of Artificial Sequence: Synthetic peptide
ASITLTVQV

SEQ ID NO: 20948 - protein, 9 aa, synthetic construct
  REGION 1..9: note = Description of Artificial Sequence: Synthetic peptide
VYYDSAKEL

SEQ ID NO: 20949 - protein, 9 aa, synthetic construct
  REGION 1..9: note = Description of Artificial Sequence: Synthetic peptide
IYQEPFKNL

SEQ ID NO: 20950 - protein, 9 aa, synthetic construct
  REGION 1..9: note = Description of Artificial Sequence: Synthetic peptide
VFIEYRKVL

SEQ ID NO: 20951 - protein, 10 aa, synthetic construct
  REGION 1..10: note = Description of Artificial Sequence: Synthetic peptide
YFNESTTINF

SEQ ID NO: 20952 - protein, 10 aa, synthetic construct
  REGION 1..10: note = Description of Artificial Sequence: Synthetic peptide
GFLGTAGSTM

SEQ ID NO: 20953 - protein, 9 aa, synthetic construct
  REGION 1..9: note = Description of Artificial Sequence: Synthetic peptide
LYNTVATLY

SEQ ID NO: 20954 - protein, 8 aa, synthetic construct
  REGION 1..8: note = Description of Artificial Sequence: Synthetic peptide
LYNTVATL

SEQ ID NO: 20955 - protein, 10 aa, synthetic construct
  REGION 1..10: note = Description of Artificial Sequence: Synthetic peptide
AFQQGEAREL

SEQ ID NO: 20956 - protein, 9 aa, synthetic construct
  REGION 1..9: note = Description of Artificial Sequence: Synthetic peptide
TYQIYQEPF

SEQ ID NO: 20957 - protein, 8 aa, synthetic construct
  REGION 1..8: note = Description of Artificial Sequence: Synthetic peptide
VYNTQGYF

SEQ ID NO: 20958 - protein, 9 aa, synthetic construct
  REGION 1..9: note = Description of Artificial Sequence: Synthetic peptide
IFRPTGGDM

SEQ ID NO: 20959 - protein, 9 aa, synthetic construct
  REGION 1..9: note = Description of Artificial Sequence: Synthetic peptide
FFYCNTSSL

SEQ ID NO: 20960 - protein, 9 aa, synthetic construct
  REGION 1..9: note = Description of Artificial Sequence: Synthetic peptide
SYQTGTEEI

SEQ ID NO: 20961 - protein, 9 aa, synthetic construct
  REGION 1..9: note = Description of Artificial Sequence: Synthetic peptide
KYHSNWRAM

SEQ ID NO: 20962 - protein, 8 aa, synthetic construct
  REGION 1..8: note = Description of Artificial Sequence: Synthetic peptide
NYPIVQNL

SEQ ID NO: 20963 - protein, 9 aa, synthetic construct
  REGION 1..9: note = Description of Artificial Sequence: Synthetic peptide
VYYDSAKEL

SEQ ID NO: 20964 - protein, 8 aa, synthetic construct
  REGION 1..8: note = Description of Artificial Sequence: Synthetic peptide
LYNTVATL

SEQ ID NO: 20965 - protein, 9 aa, synthetic construct
  REGION 1..9: note = Description of Artificial Sequence: Synthetic peptide
IYQEPFKNL

SEQ ID NO: 20966 - protein, 10 aa, synthetic construct
  REGION 1..10: note = Description of Artificial Sequence: Synthetic peptide
GFLGTAGSTM

SEQ ID NO: 20967 - protein, 9 aa, synthetic construct
  REGION 1..9: note = Description of Artificial Sequence: Synthetic peptide
SYQTGTEEI

SEQ ID NO: 20968 - protein, 9 aa, synthetic construct
  REGION 1..9: note = Description of Artificial Sequence: Synthetic peptide
TYQIYQEPF

SEQ ID NO: 20969 - protein, 9 aa, synthetic construct
  REGION 1..9: note = Description of Artificial Sequence: Synthetic peptide
LYNTVATLY

SEQ ID NO: 20970 - protein, 8 aa, synthetic construct
  REGION 1..8: note = Description of Artificial Sequence: Synthetic peptide
VYNTQGYF

SEQ ID NO: 20971 - protein, 9 aa, synthetic construct
  REGION 1..9: note = Description of Artificial Sequence: Synthetic peptide
ASITLTVQV

SEQ ID NO: 20972 - protein, 9 aa, synthetic construct
  REGION 1..9: note = Description of Artificial Sequence: Synthetic peptide
TSNITGLLL

SEQ ID NO: 20973 - protein, 9 aa, synthetic construct
  REGION 1..9: note = Description of Artificial Sequence: Synthetic peptide
RIIYNLIEV

SEQ ID NO: 20974 - protein, 9 aa, synthetic construct
  REGION 1..9: note = Description of Artificial Sequence: Synthetic peptide
GAASIALTV

SEQ ID NO: 20975 - protein, 9 aa, synthetic construct
  REGION 1..9: note = Description of Artificial Sequence: Synthetic peptide
SSNITGLIL

SEQ ID NO: 20976 - protein, 9 aa, synthetic construct
  REGION 1..9: note = Description of Artificial Sequence: Synthetic peptide
KTELHAIYL

SEQ ID NO: 20977 - protein, 10 aa, synthetic construct
  REGION 1..10: note = Description of Artificial Sequence: Synthetic peptide
KVVEIEPLGV

SEQ ID NO: 20978 - protein, 9 aa, synthetic construct
  REGION 1..9: note = Description of Artificial Sequence: Synthetic peptide
GAASITLTV

SEQ ID NO: 20979 - protein, 9 aa, synthetic construct
  REGION 1..9: note = Description of Artificial Sequence: Synthetic peptide
VSSNWNRVL

SEQ ID NO: 20980 - protein, 9 aa, synthetic construct
  REGION 1..9: note = Description of Artificial Sequence: Synthetic peptide
NASWSNKSY

SEQ ID NO: 20981 - protein, 9 aa, synthetic construct
  REGION 1..9: note = Description of Artificial Sequence: Synthetic peptide
VSSHRARVF

SEQ ID NO: 20982 - protein, 9 aa, synthetic construct
  REGION 1..9: note = Description of Artificial Sequence: Synthetic peptide
VSSGIRKVL

SEQ ID NO: 20983 - protein, 9 aa, synthetic construct
  REGION 1..9: note = Description of Artificial Sequence: Synthetic peptide
ITNNAKNIL

SEQ ID NO: 20984 - protein, 10 aa, synthetic construct
  REGION 1..10: note = Description of Artificial Sequence: Synthetic peptide
IATDIQTREL

SEQ ID NO: 20985 - protein, 9 aa, synthetic construct
  REGION 1..9: note = Description of Artificial Sequence: Synthetic peptide
NASWSNKSY

SEQ ID NO: 20986 - protein, 9 aa, synthetic construct
  REGION 1..9: note = Description of Artificial Sequence: Synthetic peptide
KAIEAQQHL

SEQ ID NO: 20987 - protein, 9 aa, synthetic construct
  REGION 1..9: note = Description of Artificial Sequence: Synthetic peptide
NAKNIIVQL

SEQ ID NO: 20988 - protein, 9 aa, synthetic construct
  REGION 1..9: note = Description of Artificial Sequence: Synthetic peptide
VSSNWNRVL

SEQ ID NO: 20989 - protein, 9 aa, synthetic construct
  REGION 1..9: note = Description of Artificial Sequence: Synthetic peptide
NAKTIIVQL

SEQ ID NO: 20990 - protein, 10 aa, synthetic construct
  REGION 1..10: note = Description of Artificial Sequence: Synthetic peptide
IASDIQTKEL

SEQ ID NO: 20991 - protein, 9 aa, synthetic construct
  REGION 1..9: note = Description of Artificial Sequence: Synthetic peptide
SAKELIAEV

SEQ ID NO: 20992 - protein, 9 aa, synthetic construct
  REGION 1..9: note = Description of Artificial Sequence: Synthetic peptide
GAASIALTV

SEQ ID NO: 20993 - protein, 9 aa, synthetic construct
  REGION 1..9: note = Description of Artificial Sequence: Synthetic peptide
GAASIALTV

SEQ ID NO: 20994 - protein, 9 aa, synthetic construct
  REGION 1..9: note = Description of Artificial Sequence: Synthetic peptide
GAASITLTV

SEQ ID NO: 20995 - protein, 9 aa, synthetic construct
  REGION 1..9: note = Description of Artificial Sequence: Synthetic peptide
VETNSACAW

SEQ ID NO: 20996 - protein, 9 aa, synthetic construct
  REGION 1..9: note = Description of Artificial Sequence: Synthetic peptide
NATAIAVAA

SEQ ID NO: 20997 - protein, 11 aa, synthetic construct
  REGION 1..11: note = Description of Artificial Sequence: Synthetic peptide
QEVNIVTDSQY

SEQ ID NO: 20998 - protein, 11 aa, synthetic construct
  REGION 1..11: note = Description of Artificial Sequence: Synthetic peptide
AEQATQDVKNW

SEQ ID NO: 20999 - protein, 9 aa, synthetic construct
  REGION 1..9: note = Description of Artificial Sequence: Synthetic peptide
SAEPVPLQL

SEQ ID NO: 21000 - protein, 9 aa, synthetic construct
  REGION 1..9: note = Description of Artificial Sequence: Synthetic peptide
KALTDIVAL

SEQ ID NO: 21001 - protein, 10 aa, synthetic construct
  REGION 1..10: note = Description of Artificial Sequence: Synthetic peptide
RAVGIGAVFL

SEQ ID NO: 21002 - protein, 9 aa, synthetic construct
  REGION 1..9: note = Description of Artificial Sequence: Synthetic peptide
VAFIVAIFL

SEQ ID NO: 21003 - protein, 9 aa, synthetic construct
  REGION 1..9: note = Description of Artificial Sequence: Synthetic peptide
MIIGGLIGL

SEQ ID NO: 21004 - protein, 9 aa, synthetic construct
  REGION 1..9: note = Description of Artificial Sequence: Synthetic peptide
HTQVGSLQY

SEQ ID NO: 21005 - protein, 10 aa, synthetic construct
  REGION 1..10: note = Description of Artificial Sequence: Synthetic peptide
AADKGVSQNY

SEQ ID NO: 21006 - protein, 9 aa, synthetic construct
  REGION 1..9: note = Description of Artificial Sequence: Synthetic peptide
GSEEIKSLY

SEQ ID NO: 21007 - protein, 8 aa, synthetic construct
  REGION 1..8: note = Description of Artificial Sequence: Synthetic peptide
VLDVGDAY

SEQ ID NO: 21008 - protein, 10 aa, synthetic construct
  REGION 1..10: note = Description of Artificial Sequence: Synthetic peptide
VTVLDVGDAY

SEQ ID NO: 21009 - protein, 9 aa, synthetic construct
  REGION 1..9: note = Description of Artificial Sequence: Synthetic peptide
PTDPNPQEV

SEQ ID NO: 21010 - protein, 9 aa, synthetic construct
  REGION 1..9: note = Description of Artificial Sequence: Synthetic peptide
QLTEVVQKV

SEQ ID NO: 21011 - protein, 9 aa, synthetic construct
  REGION 1..9: note = Description of Artificial Sequence: Synthetic peptide
VLAEAMSQV

(The sequence listing continues in the following parts.)
